United States Patent Application Publication US 2026/0103690 A1 - sequence listing, part 79

SEQ ID NO: 388808 - protein, 325 aa, unidentified
MTASLSSDNSFIGIDVGSRSFEAAWHRGGCAQYANRPDAIAAFLARLRAEPPTQRIAIEPTGGYEKLLVIELRRAGLPVEIVHTSRFQAYRQLIGVRAKSDGSDARLLAAYAAAPDEIRRQSHRVVLPEDGDREELAALGVRRDQLNRMLHAESCRLANVRSTFVRHSISRHLEALRKEVREIGIAMKAIVRQRQDLSRQKRLLQTIVGIGEVTAVMCLARAPELGRISNKAAAALIGVAPFVHESGGLSAPARIFGGRADVRRVFYMAAVAASQHNPVLAAFYNQLIAAGKPAKVALIAVMRRLVVFANGVLRSDEPWKRGMAA

SEQ ID NO: 388809 - protein, 459 aa, unidentified
MAKKKVMEMEIINTSAAGIDVGSRSHYVAVGQAMEDVKEFGVYAEDLTALCEWLLSYGITSVAMESTGDYWQNLYAELLKHGIDVCLCNGKFTKHAKGKKTDVKDCRHIQKLHALGLLTSSFLPDEATEKLRTYCRQRSNMLDLAAAASRKMQKYLKFLNFRLDVVVKDVCGLTGLAIIEDICKGNLDPSRLAEHRHYNCKKPKEEIAKALHGNNREDFLFGLRQELESYRFYQKQIQSCDKAIEQCIKLVLKKQPEKLKLRTTEKPHKRQNKNAPEIKDLNQVAFQYFNGVDLMAIEGLSHATVLSIMSEIGPEGFAAFPTSKQFVSWLRLAPNNKISGGKVLSSKIPKGSNRMKKALRQAANAIGNQKDTHLSDFFKRVAFRKGRQAAVSATARKLGVIIWTMMTQKVAYSPPKEYLFLDQKRKLKMVSRIKKNIAKFDLKSEDLGFDNYLTNCAII

SEQ ID NO: 388810 - protein, 392 aa, unidentified
MGWLSDSVPPPADTHAVWLDRGMNVCDRYFKSGCPPHTSPLRVQTGMRVITIGIDPHKSSHTAVAVDGAGHKTGQRRFVVNAGTFTQLMRWCEPWPERRFAIEGAGGLGRALAQQLAAAGEDVVDVPSTLSARARLLATGGDRKTDPADALHVAQVALFRQDLRKVTPEDQSTILRLLTERHDDLVNERTRTTNRLHAVLRDLLPGGAPTGLSADKAATLMKGIRPITATDNCRRDIARDLLAHLRRLDRQAKANEAQIRDALAASQTTLTSLPGLGTVLAARILGHIGDIDRFPTEHHFASYAGAAPLDASSGKNIRHRLNTGGNRALNSALHIIAVCQIRNPGRGQDYYLRKIAEGKTPAEARRALKRRLSNVVYRIMKRDRRSHLATAA

SEQ ID NO: 388811 - protein, 331 aa, unidentified
MKNYFIGIDVSKMTLDVALHSLDGHLNCNHVVIENNAKGFKAMVTWLKEKKINNQDVLICMEHTGIYSNKVVDFLEKKNIAYTLQNALHIKKSLGLVRGKSDIDDSFRLADFCYEKRATIKESMKPSQSIIQLKNLYTERRKLVSSKAQYKQIRSEIAIHQGKGFVKRKDLLIKELQRAIDEIEEEMMEIIKADPDINRNFFLLISILGIGMVNAVGTIVYTNNFHNFSDPRAYACYVGIAPFPHSSGTSIHKRKSVSRMGRLQLKADLSLAARSAILYDPQMKAYFKRKFNGKKGAESNYGIVLNAVKFKLVCRIFSVIRRQSAYVKFAF

SEQ ID NO: 388812 - protein, 373 aa, unidentified
MPKYSTAFGMDVHLRSTTVCALDADTGEAVTRRFPGNPWGEIAGWMDGFPGPSLAAYESGYLGFAPQRELAGLGVECVVAAVSKIPRSAADSASKNDRNDAARMAKAILAHDISPVWVPSPEVEGIRDLAGAYDGATARLATAKQRLLAFLAKRGFVYGGTTPAGNPRKYWTYDFLRWLDKVRPEDDGGVRTLAALRNEVEAAAEARADLLSEYRAAVDASPIAAEVAALQSIKGCAFALAAAFSAEVGDFTRFRSGKQVTAYFGLAPSQRSSGGSVRLGGISGAGNALVRKLAVEGSWCYAAARHQPKLMPRDTGVPLEIRMHGRKGSERLLRRREEMLARGMPAAKANAATAAELVRWLWALGMMCREGAE

SEQ ID NO: 388813 - protein, 331 aa, unidentified
MKFKDFIGIDISKKTLDVYIYSSKTSEVFENSNSGFKKLVNRVEASTNILAKEAIFIFEHTGIYSNNLSLFLEERGIPFVLVPGLEIKRSMGLTRGKEDKIDAKRIAIYGFRLRDELEPVKLPSKKLADLKLLLGLRDRLIKDRTGFLANLKESKAFMVRKENEVFFKVQETMIKKLSKEILKIEAEVKNLIDEDKILKQNFNLLLSIKGVGSQTAAHMIAYTDNFSKFKTWRKFASYSGIAPFPHSSGTSIRGKNKVSHLANKKMKTLFDLCAKTAIQYNQEMMQFYNRRIEQGKNKMSTINIIRNKLLARMFAVIDRKTPYVDIYKYAA

SEQ ID NO: 388814 - protein, 349 aa, unidentified
MASLPAVVRQVTVGVDSHKDVHVAAAVDQVGRVLGTTWIPTTTQGSAQLLRWATRLGQVQRFGIEGTGSFAAGLSRWLQQQGYQVVEVNRPNRQTRRRRGKSDPVDAEAAARAVLAGEATTTPKAANGTVEMLRVLRVARRSAIKARGQAANQLHSLLVTAPDPLRHQLGALPLARLVQVAAAVRPGPLTDPLAATKFTLRELARRYQFLTAELDRLDAELAALAPKAAPRLLTRRGVGAQVAGALLVVAGDNPGRLRSEAAFSMLCGSSPLEASSGKTVRHRLNRGGDREANNALWTIAMTRLSCDERTQRYLARRTAEGKSKREIIRCLKRYIAREIYQDITAAVGS

SEQ ID NO: 388815 - protein, 457 aa, unidentified
MAKRRRKAMSRKFKITKLPAELQHINLNAAGIDVGSERHLVAVPEGRDVVSVRAFGTFTSDLEALATWLKKCGVTTVAMESTGVYWIPLFEVLERRGFEVKLVDARHVKNVSGRKSDVLDCQWIQQLHTYGLLAGAFRPPDEICVLRSYLRQKEMLTQASSMHIQHMQKALQQMNLLLHNVVSDITGAIGMKIIKAILAGERDPQVLSRNRDERCKHSATTIAKSLVGNYREEHLFALRQAVDLYETYQTKIADCEQAIIKELEKQPNVSDDEPPPADKETQARDRIRAGVDVRDMLYQKSGVDLFAIPGLAADTLLILASEVGFDMRPWKTEKHFSSWLSLCPGTRRSGGKVLDSKTKRNPNRAAQAFRMAASSLSRSTTALGAFYRRIKMRTSGQQAVTATAHKIARIYYAMLTKGASYIELGQQAYEQRYKQRRLDQLKNQAKSLGYQLIPCAS

SEQ ID NO: 388816 - protein, 346 aa, unidentified
MYDRKDIILTVDYHAENTEVRWFNCVSGEERCLNIPTERCGILRLVEKTLAEASKAGGKVIWIMESTTGWARIKELIGSRVHFIMANVLQMPLPPKAYRRKTDKIDTGRMLREFLNGSLPQSYQPEARWREVRRLVDSRQDLVERQTAVKNWISHFLHHETWADREGLWTQKGRTRLRGLRLSASDRMVLNLKLQELEQLDELRQKVEAGMQAVYDQWPEAQWVDEVRGIGMVTAVSILAHIGPIERFLTAENLISYAGLAPGHRQSDGTSHNGRIGGGGTDSHLRYLLIESMQWVCQIPRYREAFDRAVGKHGKNIARIIVARMLVRSLYKVLKDGVRFNQVRAA

SEQ ID NO: 388817 - protein, 349 aa, unidentified
MRFFTPPPDARFYAGVDLHARSLFLCVLDRDGQERLARNLAAAPAPFLKAVAPFRDGLVVGCECMHCWYWLADACRDEGIAFALGHAWGMKAVHGSKTKCDRHDAQAIARLLRGGNFPLAYAYPRERRGLRDLLRARLRLVRQRAELYGHVHTARRQANLPPVSNDVKYKSKRGAITADIADPFVRRRVETHLGLLEPLDTTIRRLEAEIEEAAQEHYPTELAVLQTAPGVGAVLSLTILLEIDTVGRFETRQQFCSYARLCGAVQQSDGKRVGVGNRKAGNAWLKWAFSEAAVLSAQKDERVGGLLARLSSRLGKAKALSALAHKLGRAFYHMLHTKEAFDVNRFVRH

SEQ ID NO: 388818 - protein, 348 aa, unidentified
MVADSLDVVIGVDTHRDAHALALAAAPSGALLLEAVVEASADGYRDAFAFAQAHARGRRAWAIEGTGCYGAGLTRFLLARGERVLEVDRPRRERRPGRGKSDALDALRAACSLLAREPLASPRRAGRREALRALLTTRESAVGARRCALNQLRALIVSCPEPLRAELRPLTRARLLRLLRAKRPRRQTDPQLRGTLLAMQLLAVRIEALTLEERTLKQEILPLARELAPQLLAEPGVGPITAASILLAWSHKGRLRNEAAFARLAGAPPIPASSGKVVRHRLDRGGDRKLNRALHTIILTRRRTDPDTIAYIQRRISEGKSDRDAVRCLKRYLARSLFRQLEAIPQAA

SEQ ID NO: 388819 - protein, 355 aa, unidentified
MDSKKYIGMDVHKESISIAVMNGVGKIGMECVIETKASMILQFIDGLRGDLQVTFEEGTSAAWLYDLLKPHVTRLVVCDPRKNASMREGNQSDKIDARRLAELLRLNHLNPVYHGEHGLRSLKELVRSYLTITKDLGRVMSRAKAIYRSWAIPCSGKQVYAPRHRVEWLAKIGEPGVRRRAEFYYQQLDALRTVRQQVRRELLAEGKKHQAWKRLCQIPSIGPIRSAVLLGILQTPHRFRTKRQLWTYSGFGIETQSSADHRRVNGQLQRAKKQSSIRGLNRNHNHDLKNLFKGAAIVASSKPGPFQEFYTALLTKGIRPEMARLTLARKIATIVLIVWKRGACFDAQHLKPQTA

SEQ ID NO: 388820 - protein, 410 aa, unidentified
MKIAGIDVHKKVLMVVVVDASVPEEKPARRRFVTLPSELQRFRIWLQEQGVEEAVMESTAQYWRSVWLELEPHMRLHLAQAFSNRAPRGRKHDFKDAERLVRRLIADELILSFVPDGEQRIWRSLTRMKVQLTRDRVRLQNQMECLLEEMRIKLSIVVSNLLGASGLRILHALAEGETDPKKLAELGDERLQCTEEQLVDALTGRVQPMHREMLALQLQRLQLIDQQMAQLNGMIARAMKSHQDAVIRLAEVPGLGVDSAQQIIAEVGAQASTFPSAGELTSWVGTCPGKDESAEQNHSSRSAKGNKYLRRVLNQAAHAAVAKKGSHFQAVFRRLLPRLGYQSAIWAVAHRLCRVVWKILHEGVRFIEQGCGVGPREKKKRAQMLARALRKLGYEVTITPINQLAAKPAI

SEQ ID NO: 388821 - protein, 316 aa, unidentified
MFQLGIDVSKKTLDLCLLREGVKGSVKTRKLQNDINAVNAVIAWLSKQHCKPEDVHIIMEATGVYHESLAYGLHKAGGRISLANPHRAREFARGMGMLTKNDRVDAYMLACYGALKAPEPWLPPPEEVRHLSALLRRRDALVADSTREKNRLEKYLATDTPSVIAESVEAMIGQLNAEIKRLDRLIRSHLNQHPELKKDFDLLTSIKSVGYQLGLNMLVILRSHDFATAEQAAAFLDVVPVEKYSGTSVRGCPKLSKIGPPEIRAKLYLASLCGLRFNPLMKAMYERLCLRGKGKMCAIGALMRKLVHWCYGVLKT

SEQ ID NO: 388822 - protein, 420 aa, unidentified
MPDDRCRLGSDDVVIGLDLASVEHQVVVLTADGQRLTRFKIPHSRVGLEELLRRTMPAALSRTGGSRVFAFEATGHVWEAVAYILRARGERYVVINPLTTFRVREARQLSREKTDLTDAEQIAELCRSGLVTRTQLEARPYLALRRAWGEYRRLREERARLKVLVAHQLYGLFPEFLRVWADLLQPGALAVLRTGLTPATMAALSLGEFVARVREHRAGRRVWRFKLAQVHRYAEQTIACPDGVDVLAREVQRAVARIDVLTAQMTTVATEVDALLADLEETPYLRTIPGLGWASVAGLLAHVGAITKYRHGRQLIKLAGTNPSRRDTGQTVGRGQTMSRRGRAGLREVMYLATISCLQHNPRIRAHYDRLIQRADRPLSKMQALGACMNKLLLYAFAVMSRREAFQLDHNWQRTMSRVA

SEQ ID NO: 388823 - protein, 316 aa, unidentified
MTSDRVFVGIDVSKDRLDVALRPSAERWAVANDEPGLATVVARLQAVHPTGVVLEATGGLELPLTGALAAAGLPVVVVNPRQVRDFAKATGQLAKTDALDAAVLAQFAEAVRPALRPLPDAATRALSALLTRRRQLLEMRTAEKNRLGSAARPVRQEIQAHIAWLDRRLARLDDDLARTIRESPVWHEKDDLLQSTPGVGPGLARTLLASLPELGTLNRKQIAALVGVAPLNRDSGTLRGRRSVWGGRAHVRAALYMSALAATRYNPVIRAFYQRLCAAGKAKKVALTACMHKLLMILNAMVKTRTPWQRNFAQTP

SEQ ID NO: 388824 - protein, 393 aa, unidentified
MICVGIDVAKDKHDCVILNSEGKILAGVFTIPNNADGFDTLLQKIRSCTSSDDKIKVGLEATGHYSYNILGFLINQGLPTYVINPLHTNLYRKSMSLRKTKTDRVDAKTIATMLMSNVDLKSYTDTAYHNEELKSLTRYRFDKVRERAQLKQSVSRLVTILFPELEKLVPTLHMSSIYALLIEFPGAKQITEAHLTHLKSLLKDASKGRYGRDMATEIRDAAKHSIGSVMPAKSLELRHTIRLIRELDSEIEDIEAAIEAIMEELQSPITTIPGMGFRMGAMILAEIGDFARFDSPDKILAYAGMSPSTYQSGQLSLAGTYSHMEKRGSRYLRYALYNATKYVCHWDPGFAAYLAKKRAEGKHYNVALSHAAKKLVRLIYALEKSRQPYRRAA

SEQ ID NO: 388825 - protein, 379 aa, unidentified
MQDGIDYYVGLDVSQKQTSVCVIDRDGKQVCEGKCLSRPQDIHGWLGRRVELGKKTKIGLEAGTISSWLHRGLCEQGHEVVCMETFQAHRFLSTYRNKTDKNDARGLAQLLRMGGEDFLRVVTIRSQASQETRVLLAMRDHLVTHKVSLENHISGVLKPFGLIVARGGVSAETFYDRVLTALADAETAGLKLKEYVLPSLHLYKQACSRIEPLTKQIEEIAGSIDMVRRFMDIPGVGPITALSFYAAIDNPQRFEKSSDVPAYFGLTPRQFQSGESNYMSGISKRGDPATRRALVNAATVLLCHSQEWNSLKAWGVRLAKRIGFSKARIAVARKLAMIMHKIWLTNDRFRPKMISATERQTLKKEMDMRYGRGISAAVA

SEQ ID NO: 388826 - protein, 371 aa, unidentified
MHHGDGVDGPLPYGIECQNVAACKSTTKKGTVQMHNITIGMDIAKSVFQVHGVDKRTGTVIKKRLARSKLLGFFAKLEPSLIGMEACSTSHHWARELEALGHEVKLLPANYVKAYVKRGKNDAIDAEAVWEGLERPTMRFVPIKSREQQGVLALHKVRSQLVGERTRLVNLLRAYMAEFGLVAPQGIWRIAELKAIVGDKADERLPASCRAALTAVVRQLDSLANAIEDLDRAVVAHCKSNETSRRLSAIPGIGPITASALVATVGDATVFKSGRHFASWLGLTPRQHASGFKDRKGRISKMGNPYLRTLLVLGATATMRQAQRGQSSASAFVRRLLAKKKSVRLITVALANKMARIVWVLMARGECYRAA

SEQ ID NO: 388827 - protein, 343 aa, unidentified
MDTTTIAVDLAKSIFQIAISRRPGHVCESHRLSRTRFKRFFAEHQPATVLLEACSSAHHWARELQNFGHSVILLPPHAVRPYVPRNKTDRTDAKALLEAFRNKDIHPVPVKSVDQHVMMTLHRYRSAYMAQRTARINTTRGVLREIGVVIPAGAARLVPAVYDLMTDPERSFPGALGPVLDQACAEIRDLEVQTRAIERQLENLACDDPVIARLRSIPGIGLLSATALVAFVGDITRFPTGRHFASYLGLTPRERSSGLHRRLGRISKRGDSYIRMLLVHGARSVLWASKKLKDPDRLRSWALEIERSRGHNKAAVALANKLARLSWAVWKYDRCFESIREVG

SEQ ID NO: 388828 - protein, 372 aa, unidentified
MNYNTVYVGMDVHKESFSLCAYTIEAEKAFHYQRTEADYKKVLNYLEFLRTIYGGDANFICGYEAGCLGYTLYHQLMANNVKCIILAPTTMLEQRSKKRIKTDKRDAEIIAKCLAQHNYSPVHIPTAKDEETKEFLRMRDDHKLALKKVKQQILAFCLRHNYRYDGNSHWTAAHLKWLKALTPEALYKEILDEYLLTYQTLSDKLERLDKRIEELSAQDEYKEAVKKLRCFIGVKTHTALSVLVEVGDFKRFASAQHFASYLGLVPGEDSSGDDQNRLGITKAGNRHVRLLLTEASQCYARGQVGFKSKELKARQSGNTPAVIAYADKANERLRRRYYKMVLNKCKKHNVAKTAIARELACFMWGIMTDNLA

SEQ ID NO: 388829 - protein, 375 aa, unidentified
MSKHSEAFVAFDSSKLRNAVAIADGGREGEVRFLGEIDSNMAAITQLVHKLEANYERITFCYEAGPTGYELQRHIKALGHECLVVAPSLIPKKPGDRVKTNRRDAVSLVKLLRAGELTAVWVPDRRHEAMRDLTRARETAVIDLRAKRQQVSAFLLRQGRWYPAGKKSWTKVHMEWLAQQKFEQPERRMVFEEMIFAIRQAQERVARLEQAIRAAVPDWSLAKMVTAFMALRGIDLVSAADLLAELGDLSRFPTAPEVMGYVGMGCSESSTGDTIKRGPITKSGNRRARRTLVECAWSYQHPPRIGVAKQQKVAAAPPKVREIAWKAQSRLNRRYRALIKRGKRKNVAITAVARELAGFVWAVAREVASAERAAK

SEQ ID NO: 388830 - protein, 389 aa, unidentified
MKIFVGIDIAKLNHFAAAISSDGEILIEPFKFTNDADGFQLLVSKLESFDKNSLIIGLESTAHYGDNLVRFLVTELYQVCVLNPIKTCQMRKNNVRKTKTDKVDTYVIAKTLMMQDNLRFVSFFDLDMMDLKALGRFRQKTIKQRTRLKIQLTTYVDQVFPEIQYFFKSGLHQHAVYALLKEAPSPKEIASMHMTHLANLLKVNSHGHFTKELAKELRVLAQKSVGANDSAISIQITQTIQQIELLDSQLEKIEAEMTDIMKFNDSVIMTIPGIGYINGGMILGEIGDIHRFSNPNKLLAFAGLDPSVYQSGNFQAKTTRMSKRGSRVLRYALVNAAWNVVRNNATFKAYYDAKRAEGRSHYNALGHCSGKLVRVIWKMLTDNVEFNLK

SEQ ID NO: 388831 - protein, 332 aa, unidentified
MEKSITYVGLDVHKNSIEIALADWGRDNEVRHYGSVGGDLHSLDKVVRKLVSQGRELHFVYEAGPCGYEIYRHLTRQGFDCIVVAPSLIPKKSGNRIKNDRRDAEMLARLHRAGELTPVYVPHVEDEAMRDLSRAREDAKSAERKARQQLNAFLLRSGVRYSGKTLWSLAHWRWISDIKMPHPAQQITLQEYVDAVRACSERIDRFTEQIRQLVTQWRVGPVVEALQALRGVSLVVAVTTVAELGDLSRFDHPRQLMAYLGLVPSEHSSGETTKRGGITKTGNSHARRMLVEAAWSYRLPARVSRRLRDRQQSLPQPVWGSSGDGEFRGHHT

SEQ ID NO: 388832 - protein, 414 aa, unidentified
MELLHERCAALDIGKKDLKACVRAPSPKGRRSRRQETRTYATTTNALLELRDWLVAERVTLVVLEATGDYWRGAFYLLEDDLNVILVNAAHAKGLPGRKTDVCDASWLCQLGECGLLRASFVPPEPIRQLRDLTRYRTTLTAERTREAQRLEKELEDAGIKLSSVATDILGVSGRAMLAALIAGEDDAVALAELAKGRMRPKIPQLVQALTGNFGAHHAFLCRLHLERIDQLSATIGELSARIEEQMRPFSHKLDQLQTIPGVARAVAEVIVAETGADMSRFPSPGHLASWAGVCPGHHESAGKRKSGKTRHGDRWLCGALGTAAMAAARTRDTTYLGARYRRLVPRLGKKKAIVAVEHSILTAAWHMLTDDVDYHDLGGDYFARLDPERAMRRIVRQANALGYTVRFDPIHAA

SEQ ID NO: 388833 - protein, 386 aa, unidentified
MQTLNNLSRSLIALEPASTLIAVIEMSLSSWLVAGIVPGIERQPLKKLAVDESALLRLLHRWREEAEKAGCRIERIVVAFEAGRDGFWLARWLKARSIEAHVIHAASVAVSREHRRAKTDRLDAELLKRAFLGWLRGERNHCKVVAIPTLKDEDAKRPSRERESLVGEQSRIVNRMKAALIRLGIRGFNPKLKRAAGRLDSLRTPEGEPIPPNTLAELRRDMERRRLISNQIRQIEEARLKHFEQAPNDGPHAMVRLLARVIGVGIETADMLVHEVLSRNMHDRRAIARYAGLTGSPDESGRKRREKGLARSGNGRVRRGMVQLAWRFLTYQKESALAQWYRARTENARGARKPMIVALARKLLIALWRFAWQGVVPDGVVLRPAQ

SEQ ID NO: 388834 - protein, 331 aa, unidentified
MDEVKRFVGIDVAKAQLEVFIWPGGETFSVANDEVGIGALRRQLEPADFVILEATGGSEMPVASALAAAGLAVAIVNPRQVRDFARATGRLAKTDRLDAEVLARFGEAVRPEARPLADEQAQALEALVTRRRQLVEMLTAEKNRRANAPKVLHRSIDEHIRWLEKRLSGLDDELAELIRDTPLWRERDELLRSVPGVGKVLSSTLLAQLPELGMLNRKQIAALAGLAPFNRDSGKLRGSRCIWGGRAQVRRVLYMATVAGVRSNPAIRTFYLRLRANGKHAKPALIACMRKFLVILNAMLHNKTRWQPPALTSPTSNLSPLLGAVPEHGCC

SEQ ID NO: 388835 - protein, 413 aa, unidentified
MRTVYERVAGLDVHKKVIVACIRFPLADGSWHVEKRNFGTMTADLLALSDWLLAHEISHVAMESTGEYWKPVFNILENNFEVLIVNAQHISKVPGRKTDQSDAEWIAELMQYGLLKASFIPPLGQRELRELTRYRSTFVRERATLANRVQKLLESANIKLASVASNVLGVSGRAMLNALIEGKASPREMADLAQKRMRQKHEELSKALEGCTKPHHRFVLAELLRQIDSLEETIARFDEQIEEYCRPFEQAVTQLDTIPGVARQTAEVIVSEIGIDMGRFPTADHLAAWAGVAPGNNESAGKRRSGRTRPGNKALRAALNQAAHGAAHTKNTYLSAQYRRLAARRGKKKAIVAVMHSILVISYHLIQRNEPYRELGGDYFDKQKPEATAKRLVKRLENLGFQVSLQSNLPVAA

SEQ ID NO: 388836 - protein, 366 aa, unidentified
MKKISTMQAFSNEIVKEQKLTIGLDLGDRWSFYCVLDEAGKIILEQKVATTPEAMKQTCGKIPRSLVALETGTHSPWVSRLLTELGHQVIVAHAQKVQLITKSNRKDDRHDARTLARLVRIDPELLGPVRHRSAKAQIHLTVIRARAELVSARTALVNAARGLVKSFGQRLPKCGTYQVSEKLAEGVSAELRDVLAPLLREVESLNERIQEYDQRMEKIANEVHPEVSLLKQVKGVGTQIALTYVLTIEDPYRFPKSRAVGCFLGLRPGRRNSGESEPQKKISKEGDRYLRTMMVQGAHYILGPFGEDSDLRRWGLKLAERGGKNAKKRAVVAVARKLAVLLHRLWVSGEVYEPLRNSQKAMRAVA

SEQ ID NO: 388837 - protein, 317 aa, unidentified
MEQRKIITAVAGVDVGKHWLDAAVHGGGSGVRFANDRKGIDELIAWLKAREVGRVGLEATGGYEREVRQACAAAGLEVVVHQPAEVRLFARLKRLRAKTDAIDARLIATATAQVDTVRAAADPRLAELAERLTAYEQIVDQAAELKTFLEQVRLKDLTRVLQRQIATLERLKARLCAGILAHVRAQPDLKARFDLLTSLPGVGPVVAMSLLIRMPELGAMKRGQPAALVGVAPFDRQSGQFKGRTPIGGGRRRPRRMLYLAALAAKRFDPGFKAFATRLATTGKPTKLIIVAVMRKLIEAANLILARKRPWSKIQPA

SEQ ID NO: 388838 - protein, 355 aa, unidentified
MTETVYCGVDFHARTQTIAYCDSANGEIQLAQLDHRKDDVRGFYSQFTGQVIVGLEAGGYSSWFEAMLEELGHTVWTGNATDIRRRANWRQKNDRRDAELILEIMLKGDFPRVHRHSPESVETLRMLRYRARLVKMRTMISNNLQAIAINCGLSERSRMLSRAGQQRLKSARMTPAIKHQSEDLLTLLVPINERIGRVEKWLKQQASTDDRVKLLMTHPGVGVLTALGVVHTLEPFDRFNRQKAVVAYIGLEPMERSSAERKHYLGISKAGSRLLRYLLGEAGHIAVRFDQELGQFYVRLAKRRGKPKAKVAVARKLLIRCWIMLRDNIDYAEFRRRGVEARLARQSSRPQMPEA

SEQ ID NO: 388839 - protein, 344 aa, unidentified
MNITTIGLDLAKNVFQVHGINDEGDVIIRRRLRRAQVFEFFAGLAPCLVGMEACGTAHFWARELVALGHEVKIIPPSYVKAYVRRGKNDAVDAAAICEAVTRPNMRFVPIKSEEQQAALMLHKARALLMRQQTMLVNALRAHMAELGMTAPLGRGRVGDIIAVIEDDEDESIPPLAKAALRPLVAQLRANEDATAALDSEIKAWHKGNTASRRLATIPGIGFLTASAIAATVPDPSFFRSGREFSAWLGLVPRQNSTGGKDRLGRISKQGNSYIRRLLVLGATSMLRHARTRTAPGADWVNSLLERRPARLVTVAMANKTARIAWALLAHEENYRAPAAPAMTR

SEQ ID NO: 388840 - protein, 339 aa, unidentified
MKVYAGIDLHSSNNYVGIIDEEDKRLYQKRLPNQLEYILPALEPFKKDLEGVVVESTYNWYWLVDGLQDQGYKVHLANPSAMKQYEGLKHTDDKWDSFLLAHMKRLNILKEGYIYPKEERPVRDALRRRLLFVRHRTSHILSLQSSVTRNLGYKMSVREIKNLQESDAERLFNDPFLVLTARNNISVIGFISNKIKEIEKAVTSHVKLKSEFKLLLTMPGIGKILGLTIMLEVGDINRFSKVGNYSSYCRAVKSERLSNEKKKGEGNRKNGNKYLSWAYVEAANFANRHYPEVQSFYKRKKAKRNGIVAIKALSNKLARASYYVMRDRVPYDANRLFRS

SEQ ID NO: 388841 - protein, 358 aa, unidentified
MSKHSENQQVKVMGIDLAKRQFHVHGVDVGGRKVLSKKFSRQKLKEYLVTLLPCTVAMEACAGAHYWGRLLRSYGHEVRLIAPQFVKPFVKSNKNDAADAEAICEAAQRPTMRFVAVKEVEQQDIQSIHRMRSLAVERRTAQINQIRGLVLEYGIEIPTGRFNLLKRLPEILEDAENGLTEFFRKELFGLYEELRHLDARIEHYDEKLKQIAQADERLQRLQTIPGIGPVIATALLAAIGDIQAFKNGRELAAWLGLVPRQHSTGGKATLLGISKRGDVYLRQLIIHGARAVLRWAERKTDRTSRWAAALKVRRHKNIAIVAMANKMVRVAFALLKKGENYRVQPLVAHNTPLGPIEA

SEQ ID NO: 388842 - protein, 323 aa, unidentified
MSITPQPVTPIGIDIAKAKFDAAALVDGKYKTKVFANTPQGFELFLAWLSPFPSPHVCLEATGRYGEALATALVEHGVTVSVVNPAQIHAFGKAELTRTKTDKSDAKLIARFCHLHQPPAWQPLPPAVRQLQALVRRLDNLVEMQQMERNRQEGADATVQPSIDRVLTLLDAEIEQTRATIHDHLDQDPDLRQRRDLLDTIPGLGETTIAVVLACLGDINRFDNAKSVAAFAGLSPAECQSGSHKGQTRLSKTGDALLRKALYFPAVVAGQHNPVIRAFCERLKAKGKPGKVIVCAAMRKLLTLAYGVLKSGCTFDPKWALAN

SEQ ID NO: 388843 - protein, 346 aa, unidentified
MRIVKQVVGIDVAQKELVVSLGKMHEDWTPQLYARKAFENSKKGFVALVSWTKKLTTQDCPVRYVMEATGVYHEALAYFLEAADHEVTVVLPNKISNYFKTLKVKTITDKTAADTIATFGLEKKLDLWKKPKPIFKRIRQLTREREQLIQIRTIAKNQLHAEQSEAEPGKKTLERLQKQIEFLKKQEKEINEELQALQQTEEHVHKSIKLISTVTGVGKLTAATVLAETNGFELVRNKRQLSSYAGYDVREKQSGTSVKGKPRISKKGNKYLRKAMHMPALTAIRHDDRFKAVYARLVAKHGIKMKAAVAVQRKLLELIYTIYKTQVPYDKNYLTKNGIQANIEID

SEQ ID NO: 388844 - protein, 320 aa, unidentified
MREGTKVKSVGIDVSKDRLDVAVRTGEELNKEVFSVANDDRGRQELVKRLKKVAPERIVLEASGGYETLVVQALASAKLPVVVVNARQVRQFAQATGRLAKTDRIDADVIAHFGEAVQPAIRPLPDDAHRQLEALVSRRRQLVEMRADELKRKQTAPPVVHPNLDAVIEFLTKQIDDIDGDLQVLVRSSPAWREADDLLQSVPGVGPVLAITLTALLPELGTLSRKQIAALVGVAPFNNESGKRDGKRTIWGGRAPVRAVLYMAALAARRCNTMLKAVYERLVDRGKTQKVALVACMRKLLVALNAMVRDRRAWDPQLAG

SEQ ID NO: 388845 - protein, 419 aa, unidentified
MTRKDDSKVIRIVHPICCGLDVHKESVSACVIFPDDTGEEQYEIKVFGTFTDDLTRLREWLLEHDCPVVAMESTGVYWRPVHNVLEETVQVVLVNARDMRNVAGRKTDIGDSKWIAGLLRHGLLKSSFIPPQTVRQWRDLTRLRKKYVQSAGDYRKRTHKLFESANIKIDSVVSDLFGVTGRNLMQLLVEDRKALTLSDIQTCVRGKLKGKEVELFRSIQGFFTDHHRFILKTILATISMLEAQIDQLDRQIVVSMKGHEDLLDRMKEAPGISDVSSCDILAEIGPTLDSFPTDTALVSWSGLCPGNNESAGKRKSGKSPVRKHHLKTIMLEVAWAAVKKKGSYFKDKYYRLKARRGAKKAIVAIAHRILLGIYHVIKDGATFRDLGEEYLSRRNKSRKLSQLHRQALALGFKLVPQTA

SEQ ID NO: 388846 - protein, 324 aa, unidentified
MKKQAVKEIFVGIDVSKHHLDVSVRPTGEEFQVGNNDEGFAEIVERIKTISPDLIVLEATGGYETAVASALGIAGHPIAIVNPRQARDFAKSLGRLAKTDRIDAAMLAHFGEATRPEPRKLPDEQSILLQSLLCRRRQVIEMLVAEKNRYGVIHESQKSRVQKHIVWLEREKAKLDEELREQIQQSPIWREKEQLLRSVPGVGEVLVTTLFAELPELGQINRKKIAALVGVAPFNCDSGKMRGKRAIWGGRAAVRNALYMAALSATRYNPVIRAHYQHLLEEGKPKKVALVACMRKLLTILNAMIRTMKPWEPILAAPRSAIVA

SEQ ID NO: 388847 - protein, 347 aa, unidentified
MRFYTNQHPFYCGIDLHARSMYVCIVSHDGDMLLHRNMKAAPAPFLQAVAPYRDGLVVAVECIFTWYWLADLCAAEGIPFVLGHALYMKAIHGGKAKNDKIDSQKIAALLRGGMLPQAYVYPAEMRATRDLLRRRTHLMRKRAELLAHVQNTNSQYNLPEIGKKIAYKANRAGVAERFDDIAVQKTIEVDLDLITYYDQMLNDLELFILKTAKQHDAQTLYLLQTVPGIGKILSLVLLYEIHQIDRFPRVQDFASYCRLIKCAKESGGKRLGTSGNKIGNAHLKWAFSEAATLFLRGNEPGQKYLARLEKKHDKGKALSILAHKLARAVYFMLKRQTAFDLEQFLCT

SEQ ID NO: 388848 - protein, 356 aa, unidentified
MSSIVSEQYQFVIGVDTHAATHTFALVAGATSAVLDHAVFPTSAAGLSRAEGWLARRVGDAPTLVVIEGTGSFGAILTERLQSAGREVVEAARMPAGDRRGTGKSDELDAVRIARAVLGLAAADLRTPRALATDRARVAMRVLVVARDQMTRERTRAINALIALVRTIDLGIDARKPLTAGQIATIAAWRQRDEDATTATCRHEAVRLARRIRTLDGDLAGNRADITELTRQDTPQLLELTGVGAVVAASVLIAWSHPGRVRSDAAMASLAGTCPIPASSGNTVRHRLNRGGDRRLNRALTTITIVRMRVDPATRAYVTRRRAEGRTTKEIMRALKRYITRQLFRTLAAAHPIPTG

SEQ ID NO: 388849 - protein, 424 aa, unidentified
MKPPPEVAFAAFVGIDWSDTKHDICLQAGNSEEREFAVVPHRPAAIDAWASALHQPFAGRPVAVCLELAKGPLVYALEKYDFLVLFPVHPATLAKYRQAFAPSHAKADPTDAQLALEVLLRYRAKLKVLAPQSASMRMLQRLVEQRRRLVGDQNRISNRLTDALKQYFPDVLAWFADRDTLLFCDFLSRWPTLKQLKRARRTTLLSFFHDHHVRSQARIDERLHAIKSATALTDDPAVILPNQLLVLALVEQLRATLQAIERFDAEIASVSQTLPDYALFSALPGAGATLAPRLLVAFGEQRERYGSAVEVQRYTGIAPVTESSGNKHWVHWRLQCPTFIRQTFVEWAGATIPRSFWAAAYYRQQRDKGCSHQAAVRALAFKWIRILYRCWQTKTPYDESTYLNALKRRGSPLLASMTETAKNI

SEQ ID NO: 388850 - protein, 377 aa, unidentified
MDYRVYCGVDFHARQQTICSLTTESGVMSTHELKHQNKAELKAFYAQFSGPVLVGLEASGYSPWFEQLLESLGHEVWLGDATEIRRRARRRQKNDRRDAELILDLLIHNEFPRIHRPPTTSREILRMLRYRHKLIKIRTIIKNSLQSLSIQSGLSLRARLFTHAGLAQVRAAAMSPVMQYQRDQWLQSLEPLNQRILEAANWLQQQAAGDERIERLRTHPGIGLLTGLGLVHTLAPVGRFSNQRKVAAYVGFDPKERSSGEKKRYSGISKAGSRVLRFLLVEAAQTACKGDPELKRFYLRLLHRHGKPKAKVPWPESYWFVVTSFCATGLTMRSSIVALSQLGLPGKPHRPEVPEFVIGQPASAISNGRRERIEPHG

SEQ ID NO: 388851 - protein, 396 aa, unidentified
MKSETTDTIHDTPFSQCLYMALELSHGKWLLGFTIGFGQAPRLRSIMARDRKALAEEIDLAKKRFNLAADIQVRSCYEAGRDGFWLHRYLAAQGVDNRVVDSASIEVNRRKRRAKTDRLDVSKLLTMLMRYHNGEQKLWSIVHVPSPEEEDQRQLHRELMALIAERTRHINCIKGLLVSQGVVFPIQTDFLCRLEAVQLWDGSKLPVGLHARLAREYERLQGGKQQIRELEHSRVEAVRTSSTPAVEQVRQLLRLKAIGMNSAWVYVMEFFSWRNFHNRREVGSLAGLTPTPYRSGESAHEQGISKAGNRRIRAMAIEIACRLAPACRRGSRHARWVWLRYQPDSQLSLWYQERFAKGNSRVRRIGIVALARRLLIALWQYLETGVVPAGACLSKP

SEQ ID NO: 388852 - protein, 357 aa, unidentified
MDIILKQCLGIDVSKLTLSFSLGLLTNGLGKEFKFHPDVSNDLSGFKGLQAWLKSSLEPTVDFIIVMEATGVYHQRVAHYLHGLGYAVCVMQSGRVKRYAQSLDQRSKTDALDSRMLSMLGLERDLRLWHPPSMELQQLKALSRERSSLLKDRTMEVNRQGAITSGFYSYAKALKRHKARLKLLNTQIEVIEEEMRVLISKNGVLKKKLDLLMSIPGISFISAATVVGETLGFESIANAKQLASFAGYDVVLRESGNFKGKTRISKKGNSHIRAALHMPSMTCVRCNPTLKQFYTRLKPKKAKPLVALIAVQRKLLILMFTIWRNEEIYDPEFENKKQQRHKALAAQDNNLINQLVS

SEQ ID NO: 388853 - protein, 451 aa, unidentified
MKKKKISLEVVNPNAAGIDIGSRSHWVAVGQNAQDVKEFGVYSQDHKELCEWLQKHKVTSIAMESTGTYWQNLFSSLVVFGFDVILVNGRQTKNIKGKKTDILDCQWIQKLHTLGLLSSSFLPDSTTAIIRTYSRHRQNILKQSSSIILKMQKYLRLMNMRLDVVVSDIVGLTGTKIITAFLNGEKSGEKLAAFRHYNCKKPQSEIAKALQYNGRNDYFFALKQEWETYHHLQNQITEVDKQIKEHLSKVIDKDDNKRQHIATKKPHKRKNKNTIRGVDMNQMAYQYFEGVDLMAIEGVNDATVMAIISEIGLEGIKKFENAKQFTSWLRLAPNNKISGGRVLSSHLPKGSNRLKIAFRRAANVIGNLKEGYLNDFFRRINYKKGRVTAISATARKLAVIIYNMLSKGEAYKPPTEYLFLDQKRKLKLVKRIKKNIAKFGIQPEDVGFTTT

SEQ ID NO: 388854 - protein, 346 aa, unidentified
MNQIIRIGMDTSKHIFQLHGVDAAERPVLRGKLRRNEVLAFFAKLPPTVIGMEACGAAHHWARELRKLGHEVKLMAPQHVKAYVKRNKNDGRDAEGLCEAMSRPTMQFVPVKTKEQQAALMLAGVRQQLITRRTQLSNAIRGYAAEFGLTTAKGLDKIEPLLARIALDESLPALARELLAMQGQDYARLQAELKAIEARLMAWHRANADSRRLAEIPGIGLIGATTLVMKTPDPCAFPSGRHFAAWLGLTPKDHSTAGKTRLGKITRAGDEMLRSLLVAGATAVIQQVRRGRGHASPWLIALLKRKPPKLAAVALANKIARIAWKLMVTGESYDGARMPGVSAFAA

SEQ ID NO: 388855 - protein, 342 aa, unidentified
MNYYAGIDVSLECSSVAIVDATGKIVREGKVASDPVALIAWFRVFGLNVIRIGLEAGPLSQWLYAAMKEAGLAVELLETRHVRNAFKTMAVKTDRKDARGIAELVRVGWFRPVHCKSMNAQETRAMLTARTLVQSKLHDIEASLRGILRGFGLKVGKITSNRLAGRINELVVGHPTLQIIAEALLAAHEVLLRQFKGFEKRVRIMAREDAKARLLMTATGVGAIVSLTCSSAIDDPGRFKKSKTVGAHYGMAPKKYQSGETDYTGRISKAGDKSVRTALYQAAHIILTKPVKGSVLKSWAMRLAKRIGMKKAKVALARKLAVIMHRMLVDGKPFNPAAGAAA

SEQ ID NO: 388856 - protein, 363 aa, unidentified
MTMISAERTDTTVEVILGVDTHLDFHVAVAIDHLGRRLGESSVPTTVKGYEELLCWAQDFGPVRCAGVEGTSSYGAGLARHLRAREIEVLEVERPKRRRPSSRRHLKKSDPSDAERAARAVLVGETSGVPKSADGRVEMIRALRAARRSAMKARTQAANQLQGLRVTAPEQLRHRLRGLSTKELVSVAARFHLGDDPHDVPTATKFALRSVARRYEALSGEIAELDSHLDRLVAQLAPELVSLAGIGADHAATLLIAAGDNPQRLRSEASFASLCGVAPIAASSGKVLRHRLNRGGNREANRALYMICLARMRRDRRTQEYVARRTTEGKSKREIIRCLKRYVAREVYRVLVSRVACSSPIGP

SEQ ID NO: 388857 - protein, 441 aa, unidentified
MPDSLPIAEPEPEWAAFAAIDWADQKHAWRLVPAGSAVHEQGQLENTPEAVDLWATSLYVRFGGRPIAICLEQSRGPLVYMLSKYAHLVMFPVHSTTAARYRQVFSPSGAKDDPRDAASLLDLLLHHRSQLRRWQPDTVETRQLQRLVEQRRLMVNEKTRQSNRLTACLKMYFPQILRWFDDLSTPLVGALLERWPSLQELQRAHPGTLKKFFLEHHSRSHQLIQERIQSIYQAVPATGDQAVLQGEAAATHGFLTLLKTLRENIAVLDQQIEQLVASHPDHALFASLPGAGPVMVPRLIVAFGTRRERYDTAFQMQCYSGIAPVKEASGKSEWVHFRRSCPKFLRQTFHEFAFLSTRSSGWAKAYYDRQRDQEQSHPAAVRALAYKWIRIIFRCWKERKLYDEQLYLQSLQKRRSPLGDSFTALGWKPVAGFQKLSENPS

SEQ ID NO: 388858 - protein, 407 aa, unidentified
MLFVGDDWAEDHHDIELQDEQGRVLARARLPEGIAGITRLHALIGQFAGPDTEPGEVAVGIETDRGLWVTALRAAGYAVYAINPRQVARYRERHGTSGAKSDKGDSHTLADMVRTDSHQLRPVAGDSPEAEAIKVAARAHQTLIWERSRHLLRLRAALREYFPAALEAFDDLAAPDTLELLAMAPDPASAARLTAGQITAALTRARRRGVPAKTAAIAVALRGEQMRQPQPLAEAYAAAVSSLTVIIAALGGEITKMERQVTACFRRHPDAAVYLSQPGTGDILGARELGEFGDDPDRYASAKARKNYAATSPVTRQSGKKKIVMARFIRNDRLADALHRQAQSALRSSPGARAYYDEQRDRGLDHDAALRALSNRLVGILHGCLKTGTLYDEATAWSHRATISAAA

SEQ ID NO: 388859 - protein, 407 aa, unidentified
MAIPAQVEIWIGLDVGKEFHHAVVLNDAGDSLLDRRVLNTEADLVTLLDTASGHGVAGLVIDQPGSIAQLALALARQREVPVAYIPGLVMRRAADLYPGDAKTDRRDAYVIADTARTRRNRVHWLGIDDDLLVQLRVLNGLDVDLAADSTRHANRLRDALTSISPALEQAVGTKLQHAGVRDMLAKYPTPTALRAAGNARIRAVVAKRSPRLGVSITTRVSAALDAQTVSVPAEETLGRVIAELAVELGRIRDRRATLETEIEQVFLAHPLGPVLISLPGIGTRTGARILAEIGDGTGFASGSKLAAYAGLAPVTRQSGTSIKGEHRSRRGNHRLKNAMFIAAFASLSDPDSRAFYDRKRREGKRHNAATICLARRRCDVIHAMLRTREHYLTSNQLTERADTKKAA

SEQ ID NO: 388860 - protein, 344 aa, unidentified
MNATTTYAVDTAKTVFQLHWVNPATGEISRRKLTRAKFIEFFAQRQPARVVMEACSAAHHWARTLTAMGHQVELLPPHQVRPFVRGNKDDAADAQGLWMAAGQPGIRRVPVKSMQQQAVLSLHRLRSHWVTIRTATVNNLRGLLGEFGVQLPRGRAVGLRELALQRAKIDAQLPAMMVQALDHQLLALQEIERHVLTMEQQLRVVQRTDEAAKRLRKTPGIGLLGATGLAAALGDGRGWRNGREFACCLGLVPRHTGTGGKVCMGSISKRGDPYLRNLLISGARALASRKRPGAWIQQMLERRPFNVVVVAVAHKLARIAWALVAHGRSFDAGWQSQPPARAAA

SEQ ID NO: 388861 - protein, 370 aa, unidentified
MLDTTTFVGLDVHARSIKAVSLDVMTGEVRAATFGYDAGAVAEWVRSVDPGARCVYESGVTGFDLQKRLSGLGVDCVVGAVSKMIKPSADRRRKNDRNDAEFLARMLSVGNVVEVWVPDDECEAARDLTRALEDARDDLSRSKQRLSKFLLRHGLVFDERTPTGRRKGNWTRAHWSWIESIRFAEGADNDALAYYVDAVRRAAEEKARLEGLVEAEARKPRWRKRVDSPRCLKGVDTASAADLVFEAGEFSRFRNARSFAAWVGLTPSEHSSGESDRRGAITKAGNKHLRKTLVEAAWHYLTRSGRPKDLAKGQAPDRGARRHAAKGVRRLVERREALLARGVHGNKANVATARELACWVWAVGLMAEEA

SEQ ID NO: 388862 - protein, 424 aa, unidentified
MAYRVAGIDVHKKMLAVVVADVEGEGEYVFERRRYGSNGGQLRQLAEWLNQQQVAEVVMESTAQYWQPVWGALERYWKRDAGSNSAGLHLAQAQSNRGRRGRKKDFPDAERLVRRLVAHELILSFVPDAEQRLWRTVSRRKYQLIRNRVQLRNRLESLLEEAHLKLSSLVTDLLGVSARRMLSGLAEGETDPVALAALADYRLRATPAQLSDALGACTELHSVYRHLVKMTLEDLNLIEQQIQQLEQEMARLLGQHQEAVQRLAEVPGLGVDSAQQIIAEVGAAAATFEAAKNLASWVGACPGHEESAEINKNRRSPKGSRHMRRILNQAANAAVRMKGCIFQIVYRRLVPRMGHNQAIGAIAHRLCRLIWLILRQGVRYEERGPSVGEKSRKIRTNKMIRQLRQLGYHVEPPILPSTTAATTQ

SEQ ID NO: 388863 - protein, 328 aa, unidentified
MWYDKANKFYRHRRSKDVFDVCVLNGQEGRTQSKQFSNNEAGFAALSQWLPSEAHCVMEATGPYYLRLAFYLHEKGVWVSVVNPLVIKHFSKMKMCRAKTDRKDAALLALFAKEQAPLRWTPPKSYVATLQQLGSVLVQLTKQHTALTNQLKAFECSGMLEKDTKTLLQRLLRQVEKQSCEVEKKMERLISCYHQELLKRLTTIPGLGQKTALVLIVVSGGFTRFSTYKQLCSYLGLSPRIHDSGKLKGKTPICKMGMSRLRALLYMCSWSALKYNQACKALYERLIEKGKAGKVALIAVCCKLIKQAFAIVKHNSSYQADYQKNICF

SEQ ID NO: 388864 - protein, 409 aa, unidentified
MEVFLERCAGLDVHQASVVCCVLIGAPGRKTQKLLRSFGTTTRELETLRAWLAEHGVTHVAMESTGVYWKPVYAVLEGHFELIVGNAHHIKNVPGRKTDVKDAEWIAQLVRHGLVAKSFVPPPAIRDLRELVRHRRTLIETRTAVRNRVLKLLEGANIKLSGVASDVFGVSGMAMLEALASGTNNASEMAGLARGRMRRKHAALEAALEGRMREPQCFLLGMQLRNLEAIDRDLEALDARIEAQLEPYQAQHRLLMQIPGVDWVTAASIIAEIGTDMDVFATARRLAAWAGVAPGNYESAGKPKGAGTRRGNVFLKSALFAAASAAVRTKGSYYRDKYNRLRARRGPVRAIMAIAHKLLIAAFHMLSTGEDFRDLGESYLDQAARKRSTTGSVKNLGQVACRRWSDRPG

SEQ ID NO: 388865 - protein, 366 aa, unidentified
MEKCIWVGLDVHKESVTAAILEGDDHYAEVVKLSADLQKTRRLFRRLSKQGTVRACYEASGAGFVLHRVLERDGFHCDVVAPSLIPRKPGDRRKTDRLDALQLAELYRGGHLTAVHVPSEEQEAVRSLVRLRCAYMRQVKSTKHRITGMLYTQGLTFRGTKTLWTKRHRAWLSKLRGEVTGAIGTCLVTELEHLEYLETQLRALDAEIDRYAQCPPYRETVEALQCLRGVKVLTAMTLVTEIGDVHRFRSPRALMSWVGLVPSERSSGDRERRGPITKAGSGHARRLLIEAAWNHRHRTGADLIVSRRRQGQPPEVVGIAVKAQHRLSKKFRRLWLKKHPTVAVVAVARELCGFVWAIMKAAPQTS

SEQ ID NO: 388866 - protein, 315 aa, unidentified
MEAMIERCAGLDVHQETVVACVLFGSLDKKPSKEIQTFPTTTRGLLALSDWLSSYKVTDVVMESTGVYWKPIWNVLENDFQLILANAQHVKNVPGRKTDVKDAEWLAKLLRSGLIESNFVPPEDIRDLRDLTRYRKKLIYSRTAERNRIHKILQDANIKLTTVVSDIFGATGCRILEALINGEKMEVQKLQQMVDPRIKANLEAIVEALNGRIRKHHRDMLRFHWEHIAYIDETIDKVVEQIDQLLIPYQKEWELLETIPGVNKTAAATFIAEMGVDMSVFKTSKNVASWAGVSPGNYESAGKKKRVKQPMETKL

SEQ ID NO: 388867 - protein, 338 aa, unidentified
MERQYVAIDLHLNRSVVVRENEAGEKVAVTRIENDPLALAEAMRDAGEQPEVAIEATYGWYWAVDTLEELGANVHLVNPSGLAWENRRVKNDYRDCCDLLDRMRLGKLPEAWIAPHPVRELRELVRYRARLVMLRTGLKAQLKAVLAKHGLRPPVKDLWGLAGPIWLDQLDLPRAYTTRIESIRDLVEVYDREIHMLEREIHRQLSGHPGYEAIQAIPGVGQTIGAIMVGEIGDVSRFRDPQALCSWAGLTPKHHESDTKVRRGRITKQGSRLVRWAAIEAVSNGRGGPKLKADYHRIAERRPKNVARVAVARKLLIMVFYGLRDGHIRCLAPAEQAG

SEQ ID NO: 388868 - protein, 434 aa, unidentified
MGTYAGVDWASEKHDVLVADAAGEKLLAATFAHDEQGLRSLCRTLMRLEVELVAIERPDGLLVERLLDAGLRVLALHPNQVAAARDRFRVSGGKSDRFDAFVICELARTDSHRFRVLEPDSDQTKALRALTRGREDLVGARTALSNQLRAELGRFWPGPLGLFSVLHSRISLAFLERYPSPADTRGLGEARLQAFLTRERYSGRQQPAQLLAKLRRAPEGRVGELELNTRRQLVLSLVATIKSLNSQIKELERQIATAIREHPDGQIFRSLFKGADSVITAAELLGEIGDCRARYPTRDTLAADAGQAAVAIESGKRKSACFRWGCNKRLRAAFCTLADSTRHWHPWAQDVYAAAIARGHDHPRALRTLGRAWCRIVWRCWQDGVPYDPARHRALQQHITVTIPTLSGPVVDHAATQRMAAGLPTTDDEVTAAA

SEQ ID NO: 388869 - protein, 396 aa, unidentified
MPTTTRHARTPALPQSMPVPPRVLYLALDLGQRHWTLAFTVGRGQRPRVRTIPGGDLARLTTELAAARRRFGLPPESPVVSCYEAGRDGFWVHRALLAHGVTNVVVDAASIEVPRRARRAKTDRLDARKLVTMLVRHAEGEREVWHVVHVPSEADEDRRHLERERQTLVAEHTGLVNRIQGLLATQGVVLTLRGDVPAQLAAVRRWDGTPLPPELRARLEREWARVTAVRAALRTLTARRHQRVTAATPAAADVPAVHLTRRLAALGAIGETTAWLLATEMFSWRAFRNRRQVGGFVGLTATPDQSGERVRELGLTRNGSVELRARVIELAWSWLRFQPGSALSQWYRQRYGGGNARLRRIGIVAVARRLLIALWRYAMGGPPPAGAHLKDDAMVA

SEQ ID NO: 388870 - protein, 362 aa, unidentified
MSYRNRNDAQWREKPERTVGLDLGDRFSHYCILNAHGEVIEEGRIATTEKGLRQQFANVPRQRIALECGTHSPWVSRRLQQWGHQVIVANPRAVPSITHSVSKNDRHDAEQLARLAHSDPELLKPIQHRRQTRQQDLNWLRARHTLVRARTLVINSLRGLAKSAGGRLPNCSSESFPKRVAEHIPASLTPLATPLLEQVAALNTHIAALDQQIETLAQRYPEISLLRTAPGVGPVVAAAYVLTLDRPDSVAHSRQMGARLGLRPKQHQSGDRDPQQGITKISNRYLRSLLVQSAHYVLGRFGPDSALRRWGLQLAGTGNQGAKKRAVVAVARKLAVLLHAMWRTGQSYRPFPPLRAVPNSNP

SEQ ID NO: 388871 - protein, 335 aa, unidentified
MEKLQYLGIDISKKNFDVALLKENKYKHKSFKNNEKGYEELKKWLEFNQATEVHCCMEATGIYGEKLAEYLYKEEYKISVENAAKISSFAKAQLSRNKTDKADAKIIAQYCEACKPELFTPQPKEVKELKELVRYLTELKEAKIQQSNRLEAVENKAVVESIKAVVKTIEKEIEEIEKLIKQHIDNNPSLKADKELLKTIPGIGETTASMLLAEIPEIKNFESAKKLAAFAGLSPSQYSSGTSVRKRTRICKIGNSRIRKALYFPAITAMRHNPILAKFSKRLAAKGKHNFAIICAVMRKLLHLAFGILRSGKAFDPNFSLNLEKDEILEISSFS

SEQ ID NO: 388872 - protein, 344 aa, unidentified
MENYAGIDVSLELSSVCVVDAQGKILKEAKVASEPDALVEFFERLGFAAKRIGLEAGPLSQWLHAGLKGAGLEAVLLETRHVKAAVSAMTVKTDRKDARGIAQLIRMGWFQPVHAKSVGAQEIRALLIARKQLLGRLIDVELSIRGILRGFGLKVGPVTRRSFEARIRELVAGQATLERIASAMLSARSALKAEYGRLHKAVLAIVRDDAVCRRLMTVPGVGPLVAVTYKSAIDDPHRIVKSKAAGALFGLTPKKYQSGEKDVTGGITLAGDETVRTVLYEAANVLLSRITRFSKLKRWGMDVAKRRGSKRAKVALARKLAVVLHRIWIDGTTYRWTDAGPIAA

SEQ ID NO: 388873 - protein, 417 aa, unidentified
MNESAKLLPQKYMEGDKVHVLGIDVSRGKSNCALLHDHTVIKEFQIIHNKSGLAKLKSIITSDLPVMAVFETTGIYSRVLTRFFSEEGMNYLEINPLESSIRMAGLRRQKTDRSDAVKLVLLGIDQKSLIHGRRPYSRPYEQLHLMAHRYLEITKERSRIINHLHAALDQTFPELNDIFNPIRSVLGLTFVSLFPHPDFLTGYIPGTMAKQIIGLVSPKIHLDLIVRRCNEVWQAGQLSYPAQPANSFLTNQIHSYCEEIQRYNQAHDLLKRQLITYAKTFPAFKLIASIPGAGEISTALLLGFTGKIARFPSYKQLNAYVGVDLRRTQSGGLKEADRINRRGQSSARYIMFEMIRSMLRNKARIDNHIVDYYYKLKKGPHPKPDMVAMIACVNRLDRTIMNLVRTNQIYNYARTFH

SEQ ID NO: 388874 - protein, 356 aa, unidentified
MKYVGIDVHKKMCQAAVLDEDGELLDQIRFLNEKKEIKDFAMKLLTFRDDVKAVVESTGNLWIQIYDILEKFGFEVFLSNPGKTRLIAEAKNKTDKVDAKILARLLRADMLFTCYVPGEEIRNRREFLRHRLNLVKMRTQVKNRIHSLLDKYTLRSPHNSWTKKWVAWLREQDLGFMENAIIKSQLALLETFNEQIRVMEDKIAAIAVDDPQVKLLMTMPGIGYFTASLLVAEIGDINRFSNDKKISSWAGLAPRISQSGEKTRIGRVGKGNKRVAALMVQSAHNARLHDPRFSKAYKRVSRRGGKGKAIVAVAHEMIRIVYFMLRDNAPYRGQNVELTLRKLKRMEGRASIGLRI

SEQ ID NO: 388875 - protein, 386 aa, unidentified
MMTMTRTEESTAAAAANAPTLLLAFELGERSWKLGFTTGLGQRPRMRQIPARATDRVLEEIVRAKARFRLSADAAVASCYEAGREGFWLHRWLVAQGVRNHVIDSSSIEVNRRARRAKTDRLDLGGLLNLLARHHQGDGRVWRVVRVPSVAEEDARQLHRTRETVQQDRNRLINRLKGLLTTQGLKLSVDATFPTQLETAQLWDGTPIPAGLKARLQRGWAQLEFLTRALTELDAERDALTADPQTAMGRYVEALPTLRGIGPIGTWTLATEIFGWRDIKNRRELAGLVGLVPAPYQSGESHHDQGITRAGNKHVRRLMVQLAWSWVRYQPESALTKWYAGKFGHGSRRLRRIGIVALARKLLIALWHYVEHGEVPEGAIVKGQAA

SEQ ID NO: 388876 - protein, 487 aa, unidentified
MAKRKLSTFERLTKGPLNRKQRKELCRRLYSDNPGLEIIHPNTAGIDVGNESHFVAVAPGCDPQPVREFGSWTAALHQIADWLQSLAIQHVVMQSTGVYWVALYEVLEKRGFKVCLANARDTRNLPGRKTDVQESQWLLKLHTYGLLRNSFRPPEQIRVLRTVWRLRDRHVADAGREIQHMQKALTKMNVQLANVISDISGITGQAIVRAILKGQRDPYKLAEMKDYRIRASKEEIARSLEGNWQEDVLFELQQAVDRYDFCHQQIAGCDRKLQQYLAALPSRSIASAQPAERADEPETGKKKKRRNRQKANGKPRKNQPAFDLQAELARICGVNLASLPGVSVMTIQTWVSELGVDMTPWPTEDHLVSWLKLSPRPRITGGKVIRQEKIKVKNRVAEALRMAATTLINSDSYLGACYRYLRARKEPAKAIKAMAAYLAKLFYRMLTKGKAWVDRGNQEHQRRRAERELHALERRAAARGLRLVPAA

SEQ ID NO: 388877 - protein, 347 aa, unidentified
MGTPSYEGKQVYMGLDVHREFFVASCICDGVVVKRCRMPGTAEAVISLISKVFGGASVRAAYEAGYSGFWLYRKLVAAGIDCIVVHPASIEVSSRDTVKTDKRDSLKIAQQLAAGRLRGVRVPTEEEEQRRLLTRTREQLMSKKRRVMVQIRMRLHYFGLFPESIQRRIKLQDVEDILVGLEGELQRTIGMLRDEWVELAKRIKEIDRLLVEQAKDDPLDAVYRSVPGVGPLISRILSAELGDMSQFRNERALFSFTGLTPSEYSSGGHICRGHISRQGNTRLRHMLVEASWKAVRKDPVIKEYYIKLSERIGKRKAIVAVARKLAGRIRAALRKNEHYTVDYRTAA

SEQ ID NO: 388878 - protein, 404 aa, unidentified
MRDVCAGVDWAKDSHDVVVEDAGGERLWAATVPHDEAGLSRLCRALVTLEVARVAVERPDGLLVERLLDAGLEVIAMHPNQVAAARPRFRPAGGKSDRFDAFVLCELARTDHHRFRALVPDSDETKALRALTRSRDVLVEQRVALCNQLRAELERFWPGPIDLFKNLDSPISLAFLDRYPSPTDARGLGEKRLATFLARHHYSGRKSPHELLGRLRTAPSGRAGEAESEARRGIVLALVTALKPLVEQIRLLTSEIAHHLRAHPDGHVFLSLFKDPNSVITAATLLAEIGDCRARYPTPEHLAADAGMSPVAVESGKRKVACFRRGCDHRLRSAFVTLADSTRHHHPWAHRHYTDALARGHDHPRACRTLGRAWTRVLWRCWQDGVAYDPTQHRALQRQLDIKG

SEQ ID NO: 388879 - protein, 366 aa, unidentified
MEVTTVAIDLAKNVFAVCGANAAGKVIWRKELRRGQLLGFMRKMAPCLIGMEACGGAHYWARQLIALGHDVRLVSPTLVTPYRKGNKTDRNDADAILEAVTRPSMRFVAIKTVAQQDVLALHRIRSLLLKNRTALCNQLRGILRERGVAVRTGVTALKRALPTILAEENGELSGEVRDLLIEMADWLRTLELRIASCDQKLTHKFKVDERCKRLAQVPGVGPLAATALVAAIGNAREFRNGRELSAFLGLVPRQHSSGGKRVLLGITKRGDRYLRTLLIHGARASLRWSGTKTDPYSRWATRIKAERGPNVAAVAMANKNARILWALLNRSDRFRSDNSHHAVSRPGSLPPVRRARAAKLRLSRTE

SEQ ID NO: 388880 - protein, 321 aa, unidentified
MNKCKEFVGIDISKDTFDVCYYNGKHEQFSNNESGFKEFIETISPESHCVMEQTGGYHKPLASYVQDHGFVVSVENPLVIKRFIQMNLRVTKTDKADANMIMEYGKQFNPKEWKRSKQYITECKQLRSLVVLHQKQSTALKSQRHSFMSSGDSTKGLIKLIDQELSHLKKKIKELEKQMEELVKANEQTMLTNLSSIKGIAKRTAILLIIHTNGFSDFQTSKQLSAYFGLCPQIRQSGTSVNGRGNISKSGNKDLRKMMFMCSLSASVYNKGCRDQFQRLVAKGKCRKVALIAVSNKLLKQALAVAKSGIPYDPEFVSVKR

SEQ ID NO: 388881 - protein, 358 aa, unidentified
MTHPSVTKASPLFFGLDVGDRVTHLCCVDGERAVVERHRFATTADGVREVFASRPRAKIVLEVGSQSPWMSELLRSFGHDVIVADARRVAQLTRAGRKTDRRDAETLARLLQGMPELLGAVHHRGRQGQADLAVIRARDLLVRTRTSLVQHVRGTLKAAGLRALTCTAEAFNKKARQFVPENLEPALGPILDQLSELETRIRHFDREIERIAKERYPAAARLREVCGVGSLTSLAFVLSVDDPARFKRSRTVGSWIGLCPRVQASGDCDPQLSISKTGCSYLRRLLVQSAHYILGPFGKDGDLRRFGLRLCERGGKAARRRAAVAVARKLAVLLHRLWTTDDPYEPLRNSLRMSAALG

SEQ ID NO: 388882 - protein, 389 aa, unidentified
MSQPFDASKSLATLEQDNTVIAVIEMSQSKWLVAAVVPGVKRQPLKKLQADEEALLKLLYRWRTEAGQTGREIKRVVVAYEAGRDGFWLARWLRTRGVEAYVIHPASIAVSREHRRAKTDRLDTELLMRAFLGWLRGEKRHCSMAAVPAAEEEDARRPNRERENLVTERTRIANQMKAILARFGIRSFKPTLRKAAQNLDGLRTAEGTPLLENTRAELSRHLARLRVVREQIRAIEQKRLHKLAAAPAEENGPHVMVRLIARVFGVGVETADMLVNEVFARHLRDRKAVARYAGLTGSPDESGKRRRERGLARAGNARVRRGMIQLAWCFIKFQKDSALAKWFDARTADGRGSTRKTMIVALARKLLIALWRLVTTGEVPEGVILRPAA

SEQ ID NO: 388883 - protein, 412 aa, unidentified
MKDLLEISCGLDVHKEKIVACILTGPLGKPTRSEIREFSTLIPDMIALRNWIVSKNCHHVAMESTGIYWMPIYEILEDAFSGDITLLVVNARHMKNVPGKKTDMRDSEWISTLLRAGLLNGSFIPEKRIREFRDLNRYRKSVIRDITSQKNRIEKFLQSSGFRLSSFISDIFGASGRNIILHLVEHGQIDKTALDSCLKTKTRNRIDEILMSVNGTLSEHQKAFLRILMTHYDSLKKHLAEIETSLEEDMAPFALQVEQLNSIYGISTTASCAIIAEIGIDMKPFKTAEHICSWAGLCPGNNESAGKRKSTSVTKGNPYIKSMLCEIAWVIAGKRNTYLSAWYWRIKQKKGAKKAIVALARKLLVIIYTMLKQGTLFDESCFETRRKNCEQKQLSRYIRELEKHGYHVEAQS

SEQ ID NO: 388884 - protein, 410 aa, unidentified
MEVLYPRCGGLDIHKRTVVACRVTPGPDGQPVKAIRTFGAMTADLLALGDWLAEGGCTHVAMEATGVYWKPIWNLLEAAFVLLLVNARHVRQVPGRKTDVRDCEWLADLLRHGLLRGSFVPDRPQRELRELTRYRTSLVRARAAEANRLQKTLEGANVKLAAVATDVLGKSGRDILAALVAGETDAAALAQLARGLLRKKLPQLEQALTADVGHHQRFLLTQHLAHIDFLEAAIAQVSAEVARRLRPLDEAIARLDTLPGIGREAAEALLAELGGDVARFPTAKHLASWAGMCPGNRESAGKRLSGATRKGSPWLRGLLVQAAHAAARTKGTYLAAQYRRLAARRGKSRAAVAVGHTILVIAYHLLRHGTDYHDLGPQYFDERDRRAVERRLVRRLESLGYRVALEPRAA

SEQ ID NO: 388885 - protein, 441 aa, unidentified
MRVMYERCCGLDIHKSSITACALISEKGKTQEETRRFGTMTGDLRELAGWLQQKGIRHVAMESTGVYWKPVWNILEPAGLELLLANAQEVKIVPGRKTDQKDSQWIADLHKHGLLRKSFVPPRAIRDLRDLTRSRAILTQEHTSVCNRIQKVLEDANIKLGSVASDVFGVSGRAILRALMKEEKDPEVLAELSKGRLRNKIPQLRRALEGQVTAHHRSLLTGHWNRMEFLERQIADCETQIAQGMKPTPEEMALTIQTAAKEAPLPLSPREEAIQLWMEIPGVGWTAACSMVAELGVHMDQFPSAAHVASWAGLCPGNNESAGKRLSGKTRKGNVWLRRTMCEVAWAASHTKDSYSAAQFRRIASRRGNKRALVALAHSILVTAYHMLKHKRHYLELGGDFFDVINRDQVRNRLVQRLTKLGFEVKLKPKGAVEKVTSATN

SEQ ID NO: 388886 - protein, 430 aa, unidentified
MNYKQNEKISQVTEKTLVIGVDIAKETHYARAFNYRGQEIRDGYRKVLKFKNSSDGFAYFKDWITTLMGSYDMEKVIVAMEPTGHYWFNLRQYCKKNDLKVVLVNPHHVKKTKELDDNSPTKNDRKDPKTIAMLVISGRYSEPYFPEGIYADLREIMKAYERISCGLITVRNRITGWLDEYFPEFTDVFSDIEGKTAMKTLREFPFPAKIVELGAENILSEWKKEVRRGIGIKRAKQLVDAARDSIGCVEGISSAMMSLGMLLDEYNMYKSQYERTVAVIEELLKQIPYADKIIRIKGIGNITAAGIIAEIGDISRFEDAKQVIKYAGLNLVENSSGKHKGSTRISKRGRRRLRSVLFRAMMPLVAKNAEFRELHRYYTGRRDNPMKKKQSLIVLCCKLIRVLFAMITKNIEYNGEKLMKDINRSMAEAA

SEQ ID NO: 388887 - protein, 399 aa, unidentified
MIKDHEKVDIFIGVDVGKSNHHAVAIDRAGKKLLDRALPQDEAKLQAIIRSVASKGTVLLVVDQPSTIGALPVAVAQAEGILVGYLPGLAMRRIADLHPGEAKTDARDAAIIAEAARSLPHTLRSIVVADEQAAELSMLCGFDDDLAKQATATSNRIRGLLTQVHPALERVVGTHLDHPAMAELLIKYPAPEKLRKAGQNRVATLLSRHAPRAGKRWAAEVFTALGEQTVVVAGTGAAGIVLPQLAAMLKQLRTARDEVLAQVEVLVEAHPLHEVLTSMPAVGVRTEARIITEVAGKEFKTAGHLASYAGLAPVTWRSGTSIRGDHPSKKGNKALKRAFFLSAFAALKDPLSRAYYDRKRAEGKRHNQALIALARRRCDVLFAMLRDGTFYEAPAAKTA

SEQ ID NO: 388888 - protein, 348 aa, unidentified
MQTSWTTWSGSTRTATNTSWRWWPAATGAVLARQVVQANERGYQAALGFAGEAADGARAWAVEGTGSYGAGLARCLAERGETVLEVSRSPRSERRLRGKDDALDAVRTARAVLASEELALPRNGEQREALRLLLVARRSAVDVRREALGQLRGVIVTAPDRLREELRVLPTRRLLERCSRLRRSSTPAADELATRLVLRSLARRIDAATREAAELEREILTYVRALAPALLDEPGVGPIVAAQLLVAWSHRGRLRSEAAFARLAGVAPVPASSGQTRRHRLSRGGDRQLNRALHTIVLHRRQHDATTRDYIAKRIAEGKSRRDATRLLKRYLARHLYRLLQQQEPLMA

SEQ ID NO: 388889 - protein, 342 aa, unidentified
MQVTTIGLDIAKNVFQVHGIDANEKVVVRKQLRRSQMIAFFAALAPCLIGMEACATAHYWARELTKLGHKVRLMPAKDVKAYVKRNKNDAADAEAICEAVRRPTMRFVQIKSAEQQGQLMQHRTRDLLMRQRTQLINALRAHLAELGIVAAKGDSGVKELLAIVADDGEARLPIDARASVIVLAAQLEAVQTVIGVIEKRIKMQHRSNEASQRVETIPGIGVLGATAIVATVADPTVFRSGRDFAAWIGLVPRQDSTGGKQKLGPISKQGDQYLRRILIVGAISVLRRALQNPGKYPWLTQLLARRPFKVVAVALANKMARTAWALLAHGGTYRAPELAEAA

SEQ ID NO: 388890 - protein, 361 aa, unidentified
MDGSRGEPKTTAGLDLGDKYSYLCLIDQQSGEVMEEGRLRTTPEAFRRRFASEQLMRIAIEAGTHSPWVSRVLEECGHEVLVANARKVRLIYANKRKTDEIDAENLARLARLDPKLLYPLKHRGEDSQAHMALIRSRQALVGCRTQLVNHVRGAVKSFGARLPKCPARSFHKRAPEHIPEALRPALEPILEQIGSLTERIRDYDRQLETISKERYSETELLRQVEGIGPLTALTFVLTLEDPYRFERSRSVGAYLGLVPAIDQSGDRDPQRRISKEGDEMLRRLLVGSAHYILGPFGSDSDLRRHGEKIASRGGKNAKKRAVVAVARKLSVLLHRLWVSAEVYDPHYNTRRRQQLEEEGAA

SEQ ID NO: 388891 - protein, 347 aa, unidentified
MNLYNNMHPYYCGIDLHARLLYVCIIDQEGQVVVHKEISANPNKLKQLLEPYIGNIVVGVECMHCWYWVADFCDDIGVDFILGHALYMKAIHGGKAKNDRIDSFKIASLIRGGNFPLAYVYPKEMRATRDLLRRRMKIVRHGADLKAHVVNTTSQYNLPPNKVNLKNVAAREQLKNTFPEVSVQKNIDLDMVILDCYAEQLSKIEWYIETQARQHKPIHLHLLKSISGIGRILSLTIIYEIGNIDRFNSVQNFASYARLVKCKAESAGKSYGTQGNKIGNAHLKWAFSEAAVLYLRGNDKAKNYLLKLQKRMSKAKALSALAHKLGRCVYFMLKNETVFNEKQFLKS

SEQ ID NO: 388892 - protein, 359 aa, unidentified
MMIVGCDFHPKWQQVAVFDGKTGEISEHQLMNGDGEAERFYRGLGAPALVGVEACGNSQWFVELLERLGHRVWIGDAAQIRASYVRRQKTDRRDAGHILRLLMEQRFPRLWVPTAEQRDLRQLLIHRHKLVEIRTRVKNGLQHLAMNQGVQKHSRLWSAAGRACLEQLPLGGWTATRREDLLRLLGELDAQIGHLNAAVEGVADDHPQVRLLRTQPGVGAITALAFVLTIGDVSRFKHSGQVASYVGLIPREHSSGGKQRLGAISKQGNGFMRQLLVEAVQTTCRLDEGFRKQYQARCHHKAKGVAKVAAARRLAVRLYWMLKQNVGYPEIACIESSPRVPLAGTNEADGLNGRSRTPR

SEQ ID NO: 388893 - protein, 347 aa, unidentified
MVTIGLDLHKRESQLCISHDDGRIEERRITTSRDRFTAVLTPLAPARILLESGTESEWVARHLERMGHEVIVADPNFAPMYATRSRRTKTDRRDARTLMDACQLGAYRKAHRTSDERRHVRAHLAVREALVRTRTRYTAIAKALLRRDGLRVPRCEPHLLAERVAEHDPPPQLLEELQPLFEMLVPLNQQIAAADARIALLELTDPAVALLMTAPGIGPVTASAVVATADDITRFDSAHRFEAYLGLVPSELSSGEKRRIGHITKAGNARVRYLLVEAAWRILRSKDESTLALRSWAQGIAARRGKRIAVVALARRLAGILYAMWRDNEPYNARRIRVPRARATATA

SEQ ID NO: 388894 - protein, 344 aa, unidentified
MACPSSHYRLFVGIDVAATTCAVAWMHATSQPSRAISIEQTTAGFAALQHKLQTIEPDPQAILIVMEATGTYWMRLASSLVAASFAVAVINPAQAHDFAKALLKRSKTDAIDAQTLAMLGARLQPECWTPPPPVYTELQQRLVHRDGLVAARTQFRNQLHALLQQPVVIASVRTRLETLISTLNEEIATVEQEIAATLQQDEAWAVAATHLATITGLGTLTVAWILTTTINFTLTTTPEAAANYAGLAPQLRQSGSSVRGRPRVGHGGNARLRRALYMASLSAIQHNPVIKAFYTRLRAAGKPRKVAVCAAARKLLRIAWAVANKKEDFDPAYATCSRQEVGGR

SEQ ID NO: 388895 - protein, 351 aa, unidentified
MKVTTIGIDLAKSVFQIHGIDERGNVVLRRQLRRAQMVLFFSKLETCLIGLEACGSSHYWARKLAALGHTVRLMAPQFVKPYRKNDKNDGNDAAAVCEAVGRPSMRFVPVKSPEQQAELSVHRVRHRLMRQRTALINQLRGLLAEYGLVLAQGATHVRSQLPALLENSSDSLPPLALELFQDLYEELCQLEQRLADYDRRVERLYRGNPLCQKLGELDGIGALTATAFVATVAHAAQFHNGRQCAAWLGLTPKQDSSGGKTRLLGISKRGDVYLRTLLVHGARSIMRHTPKRDDPKSRWVEQLRKRRGENIAAVALAAKHARILWALMVRSEPSAQLIAAHSIEPPAQPNL

SEQ ID NO: 388896 - protein, 342 aa, unidentified
MSTIQTIGVDLAKNVFSIHGVDAYGKCVLRKTVKRNKLLDTFAKLPPCLIGMEACSGAHHWARELLKLGHNPKIMASKFVIPYRQNEKNDANDAEAICEAVSRPKTRFVSIKSEEQQAVLCLYRIRQGLIKTRTATINQLRGLLSEFGIVMPQGRYSAQNTIGSVLEDAENGLPILARELLQDLSNKIQHLNLEVLHYDRRVSALVREMASAKALMDIPGVGEHSASAIVATVNDAKQFGSSRQFAAWIGLVPRQYSTGGHVHLGRISKRGEKHIRTLLIHGARAVIARCKEKTDRNSIWLNQLVERRGYKRAAVALAAKNARIIWALLTTGKEYKINYVNG

SEQ ID NO: 388897 - protein, 343 aa, unidentified
MQSISTIGLDIAKSVFQVHGVDVAGQVVVRRQLRRRYVLSFFQKLPPCLVGIEACASSHYWSRELQALGHTVRLMPPAYVKPYVKRQKNDATDAEAICEAVTRPNMRFVPTKTVEQQSCLMLHRARHLFIRQQTAVINSIRAYLAEFGIVAPVGRRGVEQLLEVIADLADDRLPEVARACLVALGSQLRALKVQILEFDRRIIAWHRSNATSKRLDAIPGVGPALATALVASIADPKAFRSGRDFSAWVGLVPKQKSSGGKDKLGSISKQGDRYLRSLFTAGALAVIRYAKIHGTGHRPWLTGLLARRPTKVAAIALANKLARMAWAMMARNERYQEPAALAA

SEQ ID NO: 388898 - protein, 413 aa, unidentified
MVQAIIERCCGLDVHQETVVACLLVGAPWAHPMKEVRTFRTVTRDLEALRDWLLEAGVTHVGMESTGVYWRPVYAVLEGFFELIVGNARHIRNVPGRKTDVKDSEWIADLVRHGLIAKSYVPPRPLRELRELLRYRRKLVESQAAERNRLLKLLETANIKLASVASDVFGVSGRAMLRELIAGEASPEAMADLARGRLRHKRGDLILALDGRLEEHHRFLLAMQLRRLEAIEADIAALDLRIGKRLEPYCAQHALLMQIPGVDWVVAAVLIAEIGVDMSVFVSVYHLAAWAGVCPGNHESAGKQKSGRARKGNIHLRAILVGAAISASKTKGSYLKDKYHRLKARRGALRAALAIAHKILVSTYYMLAKNSPYRDLGEAYLDQIGQSRTVTNLKRRLERLGYRVTLEPNAQAT

SEQ ID NO: 388899 - protein, 344 aa, unidentified
MSIAVLGIDLGKNVCSLVGLDATGAVVLRRRARRETLIGMADKLPRCVVAMEACCGAHHLGRIFAAHGHDVRLMSPEYVRPYVKAQKNDDRDAEGIAEAATRPTMRFVELKTQDQLDMQTLHRSRERLVGERTALINQLRAILLERGIVVGQGKRKLQEFLVQLIDDRKGEGLSPRLALLVTDARAQWAELDRRIAAFDAEFAAAAKASDDVRRLTTIPGFGALTATALVAAIGGGESFEHARDFAAWLGLVPKQFTTGGKAKLLGISKRGNKYLRKMLIHGARAALPHVAARDSALGRWAKALLGRAHKNIAIVALANKLARIAWAVLRRGAPFSTTTEMVVA

SEQ ID NO: 388900 - protein, 382 aa, unidentified
MPAYADPTPKPISADTIFIAFELSGTSWLVALHAPDADKVERHRLPAGVAAEVLGLIARTKARVTRRLGTTPRVACCYEAGRDGFWLHRVLEAEGIASHVMDPTSLQVDRRARRAKTDRLDAQALLRALMAWSRGERQVCSMVRPPSPEHEDERRLSRERGTLLKERLRLSNRIKGLCAAQGIYDYEPLGADRRERLARLVTGDGRALPGRLAAEIGRQLDCLELVLRHLAEVEAVRDARAAQARKEGGSKLAALLRLKGIGPEVATVLELEVFHRHFANRRDVAAYAGLAPSPYASGGTSREQGISKAGNRRARKALIELAWLWLRHQPESALARWYRDRVGTATGRVKRIAIVALARKLLVAIWRYVETGLVPAEAAVRT

SEQ ID NO: 388901 - protein, 355 aa, unidentified
MESVKYLGFDVHQSTISVAVVNADGKLVMQSVIATHAATILDFIHELRGTLYLTFEEGTHSAWLYDLLARRVARVVVCNPRQNALLKAGNKSDTSDARKLAELLRAGLLAPVYHGEGSTRTLQELVRSYAALTEDTTRVMGRVKALYRSQAIACAGKKPYGRRHRREWLSKLSEAGLHRRAERLYEELDALQGLRRAAKRELVLESRKHAAAKLLRTVPLLGAIRAALLIGRVQTPHRFRSKRQFWAYCGLALETRSSADYRFEDGQLVRAKKPVFIRGLNRNHNHDLKNLFKSAATTASALHGPFREFYEGLLAKGMQPAMARLTLARKIAAITLSVWKKGESFDAEQLKPQAA

SEQ ID NO: 388902 - protein, 392 aa, unidentified
MYIVGIDIGKNHHEASIVSPEGKQIGRSLRFATTHKGADSLMSFIFKNIGNSPCVFGMEATGHYWYPIYSFLKAKGYTIYVINPIQSDSLRKMYIRQTKNDSIDSFLIAEVIRFGQFGTTSMADGNILAMRQLCRYRDSVISSRTEIKLRIGTIMEQIFPEYEKQFSSLWVSTSMGILEKYLTPENIENAPIDELFEIIKDKSHNRLTRAKAISIKEAAADTFGIKIAQDAFSFQLKQLIDRMNFLDKQIEALDCQILEYYEKFDCYLHTIPGIGIIGAATILAEIGDISRFKNSSSLIAFAGIDPTVRQSGEFNSTHNHMSKRGSPYLRHAIFLAATTCSFHNSPLNAYYKKKRDQGKHHLTATGAVARKLTSVIYAVLRDSKPYEPKSFC

SEQ ID NO: 388903 - protein, 353 aa, unidentified
MLTIGVDFSKRTSVYSVWDATGHRLQRCKLDNEPQVMRQFFQALPAEPIQLAMEATRNWGLYYETVRGSVDHFYLAHPVKMKAITQSETKNDQHDADLIARLTQSGFLPTAHISSLGTRQLRSLRRFRTFCVHERTAVRNQVQTLIDRNVWPAQRPTSFKNPCSRRGLAWLTTVSLPERERFILTQCLATYAHVTHQITAMEREVERQAVDLPGIAYLRTVPGFHKSRVHLYTVLLEIDDIQRFHKARNLAHYAGLIPREHSSGDTHRTGRLVKQANKHLRTALLESVFGAMLADRSLRAYYQSVKDRRGSGPAIIATTRQLSYAVYHVLKDQTAYRAQSFPPATASGPLAEE

SEQ ID NO: 388904 - protein, 326 aa, unidentified
MQFIGIDVSKKRLHGAWLRDPQQGLTRPKAVDNSPEGHALLLAWAQRATGAPAGELSFVLEATGVYHEAVALFLHQAGCQVAVTNPLHVKRFAESHGIKTKNDAHDGRVLARYGHERRPTAWQPPPAHVRDLRALLRRLEALEEDRQREANRLEKTQIEGAPDSVLESLQAMLTALKEQIERLHRQIDDHIDRHPDLKTQRAHLETIPGVGPKLSAEFLALFGFKNFRDAKQAAAFLGLVPVEHQSGTSLLKRPRLAKNGDSRWRARLFLPALTATRYNADVRGLYQRLIAAGKSKMSAAGAAMRKLVQIAFGVFKHQQPYQPQSI

SEQ ID NO: 388905 - protein, 405 aa, unidentified
MQVVHERCAGLDVHQKTVKACVITPEGRETRTYGTMTADVLEAIDWLLAKGVTHVAMESTGVYWKPIYNLLEDCGFEVLVVNAQHIKAVPGRKTDVKDAEWIAELLRHGLLRGSYIPSRPERELRELVRYRRSLIQERAREVNRVQKVLEGANIKLSSVASDVLGKSGRAMLEAMAAGVDDPQALAGLARGQLKNKQLELERALEGRLSAHQRLLLREQLSHINELDARIDRLNQEVEERMRPFEQALQRLDTIPGVGRTVAEEVIAEIGVDMSRFPTAGHLASWAKVCPGNNESAGKRKSGRTGHGNRWLRSPLLEASRAAARTRNTYLSAQYHRIAARRGGNRAALAVAHTILVIMYHILKDGTTYKELGGNYFDERDKEAVARRLASRLEKLGYEVKVSKAA

SEQ ID NO: 388906 - protein, 403 aa, unidentified
MKYTAGLDWGSVGHAACVIDEQGTVTARLDIEHTAEGLKKLLADLARIAPPQELPIAIERPSGLVVDTLVEAGHPVVPIHPNVLKACRPRYHAARCKSDPGDAYILADVLRTDGHRFRALRPASDEIKALRTMTRTRDDLVAERVVVANQLRSLLDAFWPGAVAIFADIDSPIALDFLDRYPTPASTRHLGPKRLAAFMARNAYCGRRSPEELLARLQSAPNGLAGEAEEEAKGYMVKALVAVLRTLVEQIRRVTAAVEHAVAQLPAGQVVMSLPRAGKVNAAQILAELGEDPERFQTEDQLAAEAGVAPVTHESGKHRAVVFRFACNKRLRQALVTWADNSRHASPWANHVYALARAKGFRHPHAIRVLARAWVRVLWRCWRNNKPYEAALHGAAKPFLETA

SEQ ID NO: 388907 - protein, 427 aa, unidentified
MSETKSLEIRVSVDVGSRSHQVAIGLSSGEVLEEFEIAHRVEGFEDLFSRIERHRKGNSYRVAVAMEGFNGWARPLDSMVRGRGYRLYNINNLKLARFKEIFPGAAKSDRIDARKGLELFQLRDHLPLAKEVLQEVVGTPHENEVLKRLSQRRRRLVDERVRVVNNLQADLQAVCPGLLEITKEAGNQWFLNFLISADTLPQLARLRRTTLLKIPSVGVKYARLIQDWQERAHFSEEVEWVSAMIQEDARRILELDETIKALEVKTAEVAETSTIAKLLRSIPGYGAICTSELAGEIGTIERFNKEGSLALYLGMATLDNSSGKYQGTKRPKHINTRAKAAMMTALDRHRKYVPQSQKYYEKKRAQGKSHNQAIRALGRHLCRIIYKMLKEKREYEVRPLKRDTQAKVTSRSSRIGQIGKKKISAKG

SEQ ID NO: 388908 - protein, 315 aa, unidentified
MAMPVSVTKPIVGVDVAKNELVIYHAELDVLTAIPNDKAAIKRWLKALPGPVAVAIESTNIYHLEFADLAYEAGCEIYMVGGYELHHYREGVKIRAKTDALDAKLLARYLKNEGHELHPWAPPSPLYRQLLSLFRRRAALVQARVALVQSWANEPLLKSAFAEQIAAMQRLETLIEKTIKDHLRDAGLLGQLNRCLKVEGIGFLTGARLLTAFQRGDFRNSDAFIAFLGMDLRVSKSGQKDGRRSLSKRGDPEARRLLHNAAMSASRTSAWKGFYEKQRARGFTTTQALVMLARKLARIVFALLKGQSEYQPKAA

SEQ ID NO: 388909 - protein, 407 aa, unidentified
MEVVNPRCAGLDVHSRRISACARIVTDRGVSREVCSFGTSTRELRAMADWLESKGCTHVAMESTGVYWKPVWHVLEGRFELVLANASQVRNMPGRKSDVSDATWIGELLAHGLIRPSFVPPAPVQEMRDLTRTRKQLVREISRHTLRIQKTLEDANIKLAEVVSSVLGMSGRAILAGLVRGETDPERLAELAATGRLKASRDQIVEALRGTVTDHHRFMLKLHLDQIDQLERAVREVEERARAGPFRAAIELLSTIPGVSETTATVIVAEIGDDMRRFPTAGHLLSWAGLCPRMDESAGKRLSNRTRRGAPWLKTVLVQAAWSASKKRDSYFRARFLRLKSRRGPKKAVVAIAASILTAAYQMLKTGAEYQDLGPKHYDHIDRVRAADRLRRRLQALGYRVTMEPAA

SEQ ID NO: 388910 - protein, 433 aa, unidentified
MNPSHPYDLVIGLDRSDKKADLCLIDTRTGQRRAQIIDTAPEALWEWLADLRQEFPQARVGLCLEQPAGHLVSFLEAYDWVRLHPLNPLTLQKFREAFVTSRAKDDTQDAEYLAELLLTHHAKLPVWAPQDSATRAVQQLVVHRRAVVDERTALSNRLIALLKQYFPQALTLCGDDLWRPLATRLLLKWSSLQAVQKAKPASLKQFYYLNGSRSATRLAQRLALIQKAVPVTDETALIESFVLRVQLICRQLQLVTRTIADYDRQIAQAYAAHPDRELFASLPGAGAVLGPRLLATLGRQRDRFGAAADLQRYTGIAPVTKKSGGSCYIHRRYRCPTFHKQSFHEYAKESILWCRWAAAYYLQQRTKGASHHTAVRALAYKWQRIIFRCWLNHAPYQDHIYEASLRKHGSPIVALFDRVELGKSPFKNPVNKS

SEQ ID NO: 388911 - protein, 391 aa, unidentified
MEARTVNNLPPAGTHDDAICCVLAIELSKKSWIVAVNTPLSDKISRHTLKPSDGKELLDLCERIRTRVAKETTKRVEMVSCYEAGYDGFWLHRLLQAHDIRNHVIDPASLQVDRRARRAKTDRVDAERLLRSLMAYLRGEPKVWSVVRVPSVAEEDDRRLHRERGRLINERIQHVNRIKGLLAIHGIYDYQPLRRDRIQRLEQLHTADGRTLPPRLEAEILRELQRLEIVIGMIKTIEAERDAIASANTETERGSVKKIQHLAKIKSIGPEFATTLVGEVFYRSFDNRKQLASYVGLTPAHFQSGAMSRDQGISKAGNAKARTVMIELAWLWLRHQPDSDLSVWFRDRVGKLKGRIRRITIVAVARKLLITLWRYLETGLVPKGAALKVCD

SEQ ID NO: 388912 - protein, 373 aa, unidentified
MHYTTVYVGMDVHKETFSLCCYTNEKEQAEYPQKVDGHYSKVLNYIEAMRFHYGEDALFICGYEAGCLGFTLYHQLMDHNVKCVILAPTTMLQQRGKKKIKTDKRDAALIARCLAHHDYSPVHIPTDQDEQTKEYLRMRDDHKLALKKVKQQILSFCLRHIYRYDATNKYWTQAHLKWLRALKPEGLYEEVLKEYLLTYDTLTDKLERLDKRIEELAGGEEYHENVKKLSCFLGVKTVTALSVLTEVGDFNRFASAQHFASYIGLTPGEDSSGEDQTRLGITKAGNRHVRCLLVEAAQSYTRGQIGFKSKALKARQEGNPPEVIAYADKANERLRRRYYRMVLKNNKKTNVAKTAIARELACFMWGMITGNVA

SEQ ID NO: 388913 - protein, 357 aa, unidentified
MESQEVKYVGVDCGKKSIEVVRINSENSLERRQFSTTESGINNLLQWLTLNDIVGLEAGSQSFRIAKSILNKGVQVIVLNPGNLATIYQSLKKTDKEDSLKIARLIQRFPIEELPTVPIPNDEEEDNRRLCTEQENWTKQLTQGKNRLHSLFTQAGLTQITKKHLRTKANREISVALLPSRYQKEAERILKVLDLVEQNLKLIEKEIQEALKKNKAYVQTIMSMPGIGMITSLAIMSYMGDCKRFSSAKQAAYYAGLVPRVDISGDTVRYGRIINLGCHSIRRVIVQAAWSLVRCQHGGKVKEFYQRLYLKKGAKKSIIATSRKMIEVLYVMIRTGKLFDSMPENILNRKLTQYGLM

SEQ ID NO: 388914 - protein, 432 aa, unidentified
MKEALFGVSREGLFLCLCSVLGGCLLPGLLRELSAGRVIVAIDPGKVRHRVWVTTADGLVGAPLSLPSSRVGVERVAGLLDGRSAPLFAVEATGSLHRAWAAELERRWPGSLRLFAPSETHAARAQLGARRFKTDDRDCAALVWLARQGAGRPAAPGTVDALRAAVAHRRQLVLALKPLRQRLHDQLNALAPGLSAPAGHGRRLLLDTPTGHAVLACAAAFAGRAPTPRSLQARAAGRLTKATAAFWAARWRDCLEPPPDANLRAARLARDLDRLDALRADIAFVDDQLEQLLAASDGHVLTTLPAVAIVRATAFAAHSLPIERFPTPEHLYSATGLAPASYESASVRKRGAISRTGLPEHRDALMGIAWGLGQFAPAFQRRLAELNARGMSGIQARVALARHACRLCWRILSSQQPYDDQRYDRARRDRGR

SEQ ID NO: 388915 - protein, 344 aa, unidentified
MGDDIAGRQVIGIDLHLYRSVIARVDERGNELGWIRVDNDPKTLIVECRKAGRGAPVAIEATYGWYWAVDALLAAGFEVHLAHPLGMKALRKRKRVKTDPRDAYELANLLRLGSLPEAYIAPPDLRELRELVRHRRQLVKLSTAVKAGVRALLAKHNIRLAASDLDGDTATGLMDALALPGTYATRLASQRRLLLVLADEIASVEVELHGRLRHHPGYCNLLKVKGIGPILAAVFVAEIGDVTRFPTAGALCCWAGITPRHYESDKTVHRGHISKEGDPLVRWAAVEAVQRQCEPAVKAVRDDIVARRGKSARNIAKVAAARRMLEVDYVLRDGQARCLSKAAA

SEQ ID NO: 388916 - protein, 439 aa, unidentified
MNLANSFISAGIDVGADFSFMSLALPNQTLIGKPFKIVHNNFISLEKAVLTIKDAEELYSMKARIVMESTGIYHYPLFCYLCDKGFDVVVINPIITKNSTNLNIRKVANDKNSSKNLALIGLKPDLKVSVIPSDAVLDLRNLVREYYNLMDGRCAYVNKLLGILRVSFPQFLTVFSKITVKTSLALLEKYPSPHDFLVARKSSITNIIMKTARFGKAYAEKQYQAIVNAAESAGAFGYYVPSNSVQIRMCVSFIKKYDEEIKGIFTMMHKLVDECVDETFVKQIRLIETIPGAGFLSAVTIICEIGDFSVFKSPKQLFAYFGLDPAVKQSGNFTGAQVKMSKRGSAVARRAIFTIALVGVGVNRKGVANNPVLRDYYLHKCKSKRKMVALGAVMHKVCKIVFAILRDNEPFFLITPEQHICNYTLTQSAVTVLIQPSAA

SEQ ID NO: 388917 - protein, 430 aa, unidentified
MTASARGTVQPEPEFVAFVGIDWADQKHVWCLQKANSTQREAGELQHRPEAVEAWVSELCQRFGHGPIAVAVEQVKGALVYMLRKYECLHLYPVPSTMSASMREALYPSGAKDDPRDAELLLELLVLHRDKLRRLTPDNEATRRVQNLVEERRKLVEEKTAQLNRLTGYLKVYFPQMLQWFAKLDSKLVCDFLERWPSLEELQKVPSAELKKFFRQRRGRHGELTEWRMQGICQATPAIRDRAVIEAKQMVVQVIAQLIRALLEGIATLDRKIAEAAGAHPDYFIFESLPGAGAALAPRLLAALGSQRDRYGSATEVQKYSGIAPVTERSGKKKWVHFRWACSKFLRQSFHEWAGHSIGQSVWARAYYQRQRERGKEHHAAVRALAFKWIRIVFRCWQDRVVYNETRYLTVLAKRGSNLTSALVDVAVSL

SEQ ID NO: 388918 - protein, 347 aa, unidentified
MRFYTKQHRYSCGIDLHARTMYVCILDQEGAIVVHKNLPTTPEVFLKAIAPYRDDLVVAVECMFTWYWLADLCAHEQIPFVLGHALYMKAIHGGKAKNDKIDAHKIAVLLRGGMLPMAYVYPADMRATRDLLRRRCHLMRKRSELLTHIQNTNSQYCLPPFGKKIAYKTNRHGLPDRFPDPSVQKSMELDVALINHYDTLLTEVELYITHTAKVHDVNAFYRLRSVPGIGKILALVILYEIHDIARFPTVQDFASYARLVKCSKESAGKRHGSSGAKIGNGHLKWAFSEASVLFLRQNPPAQRYLDQLASKHGKAKALSILAHKLGRAVYYMLQRREAFDMNKFLSS

SEQ ID NO: 388919 - protein, 341 aa, unidentified
MKVVYTGLDVGSRLFQIATMEESGELLFCKKIAMSEENLIAAFSALEGEVHVHLEAGEMAPWIRDVISRLVHRVVISHPMNNAWIAKDPNKCDRIDAIKLADLLRMNRFREVYYSDDRSRREFKLLVQHYNDLTKQQAGIKRKIKARFRAQGIIVHSLELFTVKGKEKALGLLSSDWLRKAVEQLYEVLEQSQTAQQQARQLMCKQGQAFPEIKLLQSVPGVGPIGAARYSAYIQDPTRFSSRRKLWRYSRLGVSFRSSDGEPLSHPRLDRNGCGVLKNVARVAFIAALRAKVENSFQRAYKEALKSTHNAVHARLSVMRKIVSVMRAVWITNTPYRDDLG

SEQ ID NO: 388920 - protein, 356 aa, unidentified
MNKRSKLDFSGQPIYIGLDVHKKSWSVSIFTQHGEYKTFSQPPEAEILSQYLQHHFPGAQYRSVYEAGCCGFWIHDQLKDTGIQNIVANPADIPTRDKERKNKRDRVDCRKLARALRGDEIEGIYTPARWKLEDRSLIRTRLSMGRKQTRCKNQIKSMLLFYGVGIPERREMGHWSRRFIRWIEGIRMERTSGDMALQSHLEELCHLRQLIAKLNRAIVALARTEQYRSWISLLKTIPGISTLTAMIVLTELHEITRFGSIDPLCSYVGLIPDTQGSGEKEHVGGVTQRRHSQLRWLLIEASWIAVRKDPVMMEAFQEYCKRMRKTKAIIKIARKLLNRIRYVLKNQVEYVTGVIE

SEQ ID NO: 388921 - protein, 353 aa, unidentified
MSSLTDLRDVVDVVIGVDTHVHTHSAAALDARTGGVLDQITVEATADGYAQLVEFADQHAALRAWAIEGTGGHGAGLTRHLERGEEVVIELDRPKRAKRRHGAKSDPLDAIRAAREALARPRLGAPRSGGDRQALSVLLAARRSAVDAGTVAQRQVFSLVIAAPEQIRARFRGQKLPGMIKTAAALRVHPSWDVETTTTVTTLRTLARRARALAEEAAEHETAIRVIVRSWRPDLLEQLGIGPIVAATVLCAWSHPGRIHSEAAFAMLAGVAPIPANSGQVTSRYRLNRYGDRQLNRALHTIVLSRIRYDRATRDYVARRTTEGKTTREIKRCLKRYIARDLYRQLESAPVSP

SEQ ID NO: 388922 - protein, 351 aa, unidentified
MNTLARSVTGGVDTHLEFHVAAALDERAGLLGIERFDTTTRGYKKLLAWLEAFGPVVLVGVEGTSSYGAGLTRHLHAEGIAVVEVDRPNRQRRRRQGKSDPKDAVLAARAALSGDADGAAKTQDGNVEAIRVLRVARTSARSARSQALNQMRSLVSTAPEPIRGELRGLSVHRLLARASTYRPGTKRDVISLTKLTLRGLARRAIELEEEIRAYDAILEPLVTETAPELVSALGVGPDSAGALLVAAGDNPERLRSEAAFAHLCGAAPLDASSGKQQRHRFDPGGDPQANSALWHIVITRMVYDPRTTAYIERRMKSASSPRRRPCAASSATSPERSSTCSRWTDWSLDSP

SEQ ID NO: 388923 - protein, 363 aa, unidentified
MNTAILAIDLGKYNSVLCWYDPATRAASFRTVLTAPGELRRELLRQPVALVAFEACALAGWVHDLAEQLGLDCLVASTAGAAWQWKHVKRKTDRDDALKLARLAAVGELDRVAVPPRAVRQWKSLIGLRKRLVSERVRGQNRLRGVLVGQGLPAPRGAKAWAAAGLAGIGQFARPLAECGPDELWRGELHLLLQRHQFLEGQIRAVEAKLDALAAADRRVALLETVPGVGTRTAEVIAVHLGDAGRFRSADEVSAYAGLVPRQYQSGETDRRGRITRRGPRMLRAALVECAWCSLRYNPWARAVWLRLQGHGVGKKKAIVALARKLLVRCWAMLRKGQRWQATAPPAPPSVDARPRERVLGVE

SEQ ID NO: 388924 - protein, 469 aa, unidentified
MSNKYYLGIDVSKGYADFIILDNNKKIVEDGFQLDDTFEGHNQLYKILSGFIAKHPEANIFAAVESTGGYENNWLKLLSKYQSKLNLSIARVNPFGVNYNSKATLKRIITDKESSKNVAEYMISHPEKVSYNNEDYYSSARKQWTFIKMLTKQKVQLLNQLGSLLYIANPEVLRYCRSKINQWTLKMLRQYPTARHLSKAELSKLSKIPYIKEELAIALIENAKKSVASSVDDTTAEIIKAIVEQILRLEKLIAWQTKQLENNCKLPEVELLKTFQGIGTYSAVGLMIEILSVERFPTVKHLASYFGVHPVFKQSGDGLYGYRMSKRGRKQPREILFNVARFAIAHNPYIKEIYAMHLKKGMPKMAALGAVMYKILRIIYGMLKHNKAFDPEIDRANREKHSATNIQNNPDRSRRFQPIDFYAPVSRRQIKKRKEQEMSHFSKPLNAESPKEIFTGSNSRSFPEVSNET

SEQ ID NO: 388925 - protein, 342 aa, unidentified
MPHYYAALDVSLETTCICIVDTEGAILVERKTASDPDSIARVLAAAAADLVRCGLEAGPLSPWLHGELVRRGIPMVCLETRHAKAALGAMRNKTDKNDARGLAQLVRTGWFRAVHVKSSESQELRALLAGRKLLHGKCLDVENQIRGLLKAFGLRLGLVARARYDRRVMELLVGQPRLRAVVQPLLRARAALWAEFNTLHLLLLRTARKDPVCRRLMTVPGVGPVSSMTFKTGVDDPARFSRSRTVGAHFGLTPRRYNSGEIDRSGAISKVGDAMVRESLYEAAHIMLTRVQADLPLKRWAQGIVRRGGPQRAKVALARRLAVVLQRIWRDGTVFDPGFEVT

SEQ ID NO: 388926 - protein, 386 aa, unidentified
MPKSTDLSKSLVTLDQASTLIAVIEMSESSWLVGAMVPGLRREPRKKLPADEAALLELLQRWREEAQKAGAKIARMVVAYEAGRDGFWLARWLRARDVEAHVIHPSSVAVSREHRRAKTDRLDLALLKRALLGWLRGEAKHCTMAAVPTLAEEDAKRPSREREKLVGERTRLVNRMKAALARHGIRGFNPKLKTAPARLEALRTAEGVPLPPNTLAELRRDMQRFALVGEQIKEIEATRLKRLQDAPAEPGHAMVRLLARVVGVGIETADTLVHEVLARDLRDRRAVARYAGLTGAPDESGKRRRERGLARAGNARVRRIVIQLAWRFLRFQKDSALVQWYQARTDDTRKSRKTFIVALARKLLIALWRMVTTGEMPEGVVLRPAA

SEQ ID NO: 388927 - protein, 425 aa, unidentified
MNEVEKKLLVHGDVIIVGIDVAKHNHWARIYNQMELDVVKPFKFHNSKEGYYRLVAKMEEAKEKARAKRVVIGMEPTGHYWKPLAWFLKEQGYTVVIVNPYHVKRRKEEVGNSPTKNDRKDAGIIAKVVKDGNFLHCLLPKGKYAELRNLTVTRRQQRRKLNSALNQLKAILDEYFPELGQVFKNLLGKAAQWVLRNCPFPRLILAYKLEELATALKEASNHRVGMKRAQALYQTAQETIGVTEGLFGARHRLNACLDEIAFYQKQIEQTEAAMADILAGIDIAGNLLSIPGIGLVTVAGFLGEIGDPQNYEHWKQIQKLAGLNLSEQSSGKKNGQSKISKRGRAELRNLLYQASITLVAKNREFKALYHYFLTRRKNPLKKKQALIAISVKLLRVMYGLARKKENYDPDKVLGDYRRAQLQQAA

SEQ ID NO: 388928 - protein, 403 aa, unidentified
MWFIGLDWADEHHDICVITDVGKQIGSLRIAHSPQGFENLKEFLLSITGPNKEEVACIIETNHGLLISWLLEAGYPVYPVNPKTIDRHRRPSGAKTDKIDAYLLAKYGRSEIADLRRLEPDSAIVAELKALTRDQDSLVRSQTRLVNQLTACLKAYYPVALNLFSKLQQHSTLAFLQAYPTPQDAMAASVGQIAQVLKEAGHPTATKVAPKILETLHQPQLTADAITLRTKARLMQVLVKQLLPLVEEIAHYDKVIEELFLTHADSKMFRSLPRAGKRLAPRLLAEIGDDPDRYAEAASLQALAGTSPVLFESGNYSKPHRRYACSKPLRNALQQFAWQSTQRAGWARDYYQRKRKEGKSHTVAVRALANVWVRILFAMRSSHSCYCAATFEEAQRKHAPRAA

SEQ ID NO: 388929 - protein, 300 aa, unidentified
MKDMMIGVDLAKNVFQIHGALRTGEVQFRKKLTRQQFTAFMARQAPCLIIFEACGGAHYWAREMEAPGHEVKLIAPQYVRPFVKRQKNDAADAEAIVIAARQAEMRFVGPKTVEQQSRAAVFRGRERLVHQRTADVNALRALLYEHGYVFPVGMRYLDRMTALVDDDTSDLPALIREECQDLLAQIAEKTARITERTAKLKALASQSDRARRLQTMPGVGPLTAIAVQAFGPDMAHFKTGRNFAAWLGLVPRQHSSGGKERLGRMTKAGQADIRRLLIIGAMSRLGWLGRHTIAQGNCPA

SEQ ID NO: 388930 - protein, 413 aa, unidentified
MDLLHDRCAGLDVSKKDVKACVRSPGARANQRHTEVRTFATTTNALLQLRDWLIEQRVTLVAMEATSDYWRPPFYVLEDDLDVILVNPAHAKGLPGRKSDVTDSMWLAQLGECGLLKASFVPPTPIRQLRDLTRYRTTLSREHTREAARLEKELEDAGIKISSVATDILGVSGRAMLEALIAGERDPQVLAQMAKGRMRTKITPLTQALVGRFGQHHAFLCRMHLDRLDALEADIAKLSTRIEEALEPFRETLARLDTIPGVGRDVAEVIIAETGADMSRFPTPGHLASWAGVAPGLNQSGERHKPAHTRHGDHWLTGALGVAAMAANRTQDTTFLGARYRRLARRIGKLKALVAIQRSILTATWHVLSENTNYHDLGGDHYTKRDPQRALRRITRDANRLGYTVRFDPIQAA

SEQ ID NO: 388931 - protein, 382 aa, unidentified
MEILHRCCAGLDVHKKSVVACVRTIGPDGQVRSQVRTFATMTAELLSLADWLEAEGVRQVAMESTGVYWKPVFHLLEDRFEVMVVNAGRLKQVEGRKTDVKDAEWIAQLLQHGLLSPSFLPPPPIRELRDLTRQRTQLVRDRATVVNRVQKVLEDANIKLGSVASDVLGASGRAMLRALIAGQTDADALAELARQRLRAKIPQLRLALHGRVTEHHRFQLRLLLEQVEQLEAWIAQFDARIAAQMIPFAPQAQRMTAVPGIGTRASEVVVAEIGTDMTKFPSSGHLVSWAGLCPGNHRSAGKQRSGRTTKGSQWLRTTLVQAAWAASHTQETVFSAAYRRWAKRLGKKKALVAVARKILVVIYHLLKEGTDYRERGTPAQAA

SEQ ID NO: 388932 - protein, 350 aa, unidentified
MKTILAIDLGKHKSVFCRLDTGSLKPEYFSAKTRPQKFHDIFTELDAESSIVLFEVGSQAGWLSDMLRALGIKFKVANVNHSAWKWTNNQNKSDKTDAHRLAMMYHHGFFPEVYIPERAVRQKRSLIYYRQKIVNRMTQIKNGIRALMTTVAIDLPTGKNCWTKKHRKQLEQLALPFDGIEDHCDLWRGQLHMELEQLNALQVCLDTTTAKLDELNKQKQSIKLLETIPGIGPRTAEAIVAVIDDPHRFKSCRQISNYAGFSPRRYQSGQMERSGRISKRGNPLLRALLVQASWTALRFDWAKHIYKRVCRGSVKRRKIAIIAVARHLLMRCWAMLRDNKPWYYKIEKAV

SEQ ID NO: 388933 - protein, 343 aa, unidentified
MNVFAALDVSQDLTAICVVDGAGAVLAEAKVQTCPEAITEWLSRHAGDVERVGMETGPLAVWLWNALTERGLPVVCLDARHANGVLKMMPNKTDRLDARGLAQIVRTGWFRAVQIKSHNAYVNRALLTARDTLVGMRVRLENEVRGLLKTFGVMFGKRVGGFKRRAEEIIARDLAVSPELVPVFEALMRARRDVLARIADLDRRIRVIARSHQTVRLLMTTPGVGPITAMAVVAAFDDAGRFRRSSSAGAYLGLTPRRYESGEISRNGRVSKRGDAFTRKCLFEAANAIYCRKLGGSRLRDWAKAIAERTGPRKAKVALARKLAVTLHAMWRTGTPFQEEVAA

SEQ ID NO: 388934 - protein, 387 aa, unidentified
MSQVSDLSRSLAAFDQNTALTVVVELSEASWLVAGLVPGLDRQPLKKQEPNPVALLRLLERWRAEAVTAGRTIERIALAFEAGRDGFWLARWLQARGIEVHVIHSTSVAVSREHRRAKTDRLDTALLMRVFLGWLRGERGHCRMVAIPTLAEEDARRPSRERESLVGERTRIVNRMKAALARLGIRGFKPELRKAPQRLEALRTPEDMPIPPNMLDEIRRDMARLAVVREQIDAIERARLVRLEQAPAAGPHAMVRLLACVIGVGVETADMLVQEVLCRNLRDRRAVARYAGLTGSPDESGKRRREKGLAKAGNARVRRGLIQLAWRFLRFQKDSALAQWYRGRTECPKGARKTTMIVALARKLLIALWRMVTTGEIPAGVALRPAA

SEQ ID NO: 388935 - protein, 312 aa, unidentified
MIPSTIGVDISKDFLDVHRLPDDKARRFDNSKAGHKALIRWLSEMPVARIVYEPTGPYHRSFEQALAKAGMPLAKVNARQARRFAEATGKLAKTDRADAAMLARMGVALALAVRPISSEMLGELKELNLARQALIKDRTAAKNRAKILSVPLLKQQNTRRRKQIDVQIAAIETEIQARIAQDKQLAERLAILESIPGISKITAFILLIEMPELGSMDGKQAASLAGLAPVARQSGRWTGRAFIRGGRAGLRQALYMPALVAARFNPALKAHYRKLIDAGKPAKVAITAIMRKLIVLSNALLRERRIWVEIRA

SEQ ID NO: 388936 - protein, 423 aa, unidentified
MSYRIAGIDVHKKMLAVVVADVEVHSEYEFERRRYGSNPEHLRLLAEWLTEQQVEEVVMESTAQYWAPVWGALERYWKPTCQKREGAGPMSGTLHLAQAQSNRGRRGRKKDFPDAERLVKRLVANELILSFVPDAEQRLWRTITRRKYQLTRDKVRLQNQLEALLEEVHIKLSSLVSDLLGVSARRMLKALAEGETDPTALAAMAHKLLRATQAQLCDALGACAELKPIYRRLLNMSLEQLQVIEQQISQLDQEMANLLSPHQDAVKRLAEVPGLGVDSAQQIIAEVGAQAATFPSAKQLASWVGACPGDEESAGVSKGHRSPKGNRQMRRILNQAANAAAKAKGTIFEIVYRRLVSRLGHNQTIGAIAHRLCQLIWIILHRNVRYEERAPSVNARSRQRRTNKMIRELRNLGYRIEPVAIPA

SEQ ID NO: 388937 - protein, 358 aa, unidentified
MSEITRVGVDLAKNVIQVHAVDAVGKVITNKALQRDKFMLWCAQLPVDCLIAMEASSSAHHWARKLVALGLDARIIAAHLVQPYRLQGKSGKNDANDASAICEAASRPTMRFVAIKTVAQQGMLSVHRLREGLKEERTACTNRIRGILAEFGLVFAQSSKVLRENLSTVIEDASNELAGIARLVIERAKSQWDELEAHIAWCDQRIAAHIKQDEHAKQATQLLGVGPVTASAVVATVGDFKQFKNGAQFGAWLGLVPKQNSSGGKNNLGSITKRGDMYVRMLLIQGAKAAVQTAHRRDDPISKWAHHLREKSGWQKAVVALANKNARILWAMFARGKSFDAHHVSVKPVVPQAAMFAA

SEQ ID NO: 388938 - protein, 338 aa, unidentified
MKLYGGIDLHSNNCVINLMDENGSVIFKKRVANSLDAILLIFQAYQDAIVGLVVESTYNWYWLVDGLMEAGFKVHLANTAAIQQYSGLKHGDDDSDAHWLATMLRLGILPEGYIYPKEERMVRDLLRKRLQLVQQNTLNLLAIQGLYIRHLNVPLNSNKLKQLTPEKLALDFSDDNVRMAVASNLLIHDCVTGQINIIEKSLKQQLKLREEFVKLTSIDGIGLILGLTIMLETGDITRFNNVGNYASYCRCVNGARYSNGKKKGNSNTKNGNKYLAWAFVEAANFAIRYNETVKRYYQRKLTKSHPAVAKKTVAHKLARACFYVLRDQVAFDVNKAFG

SEQ ID NO: 388939 - protein, 389 aa, unidentified
MLVEETKVTGITAYNQEVHMNSILYIGIDVHKESYTIGSYRTCDDEVKYVQKIKADYKMVLKYLEQLRRHYGEDTEFMCGYEAGPLGYRLYHELNNCGVTCVIMAPHTLGVTNNNRVKTDKNDARNIARSLAFRLYSKIHVPTAEDEEIKEYIRMRDDMNNNLKKTKQQILAFVLRQGYRYAGKSYWTIAHVKWLKSLEFDGFLQETMSEYLITFDYLVSKLERLTERLEEIATSDRYAENVKKLKCLVGVKTYTALSVIVETGDFRRFAKPDQYASFLGLVPSEDSSGESQKQGAITKAGNRVIRRLLIESSQSYARGAIGHKSKELTRRQMGNSPEVISYADKANERLRRKFYRLVLQNNKARNKAVTAVARELACFMWGLMTDNIA

SEQ ID NO: 388940 - protein, 411 aa, unidentified
MRLFVGDDWAEDHHDVEVMDEAGKVLAKRRLPEGVAGIAQLHELIGRHLGEDADGAEVVAGIETDRGPWVTALVTAGYRVFPVNPLQASRYRERLGVSGAKSDAGDAHMLADMVRTDSHQLRPAAGDSAEAEGLKVLARTHKTLIWERTRAVQRLRHQLREYYPAALEAYDDLDAPDTLELLGKAPDPARAAKLTRAQVSAALKRARRRNITDKATAILAALRSPQLGQPAAVTAAYAATVRSLIAVITVLNEQVKILQRQVEENFGRHPDAEIYQSQPGMGAILGARVLAEFGDDPHRYADGKARRNYAATSPITRASGKKKVVAARFIHNDRLVDALNAQAFTALRASPGARALYDELRARGIEHNDALRRLANRLVGILHGCLKTRTLYDEATAWSHRQNLPQSSVAA

SEQ ID NO: 388941 - protein, 356 aa, unidentified
MNKTMLITGKVNYNRKIQDYDHYIALDWSQVNVALARCTIKQTMPKVYEFDSDVKAIKNYLTNLKGHILLTIEETTTSHWLYVELIDHVDRIIICDPFRNRLLSDGPKTDKIDAGKLCQLLRGGFLKEVYHSCESDFKLRQLVSAYEDLIKAGVRIQNQRHALYRAMGYRYTSKNAPVLKDRISDDRSTRFISDWQDSCIEHYLEEKASFESHIEQVICGNKIIKSLKSLPGIGSISALKIHATVIQAQRFTSKGHYYSYCGLVMHEKMSGNRNYGKRRPRFNGRLKSVYKMAAHRAILLKNNPVYEYYEELIDKGLTEKQATLMVARYLAKVSLGIMKNGKKYEPYRWRENKTVA

SEQ ID NO: 388942 - protein, 369 aa, unidentified
MSKGITTGGGVTVGLDLGDKYSDGCVLDASGEVVETFRVRTTEPALAKRLSAFEPCRVVMEVGTHSPWVSRLVTRLGHEGIVANPRRVRLIAENDSKSDGFDAELLARLGRVDPALLSPIVHRGEQAQRDLVLIRARDGLVRARSQLINQVRGFAKSLGTRLAASSAEAFPGRVRGVVPDALFPGLPTMLAMIEQLTAEVRVMDREVERLCRERYPETQVLRQVKGVGPITALCFVLTLEDPHRFRKSRSVGAYLGLRSRQRDSGEQRPQLRITKAGDALLRRLLVTAAHYILGPFGPDTELRRFGLQLAERGGKAGKKRAVVAVARRLAVLLHRLWVTGEAYQPLGYDASVPKAAWGRVRWIEHTASG

SEQ ID NO: 388943 - protein, 348 aa, unidentified
MNQRYEKSREFVGIDLHRRRSVIVRINGEGEVVDLVRIENSIPALLAEVSKAGPGAPVAIEATYGWYWAVDALTGAGFEVVLAHPRGVKSMQNRRAKTDALDARELADLLRLGRLARAWIAPPEVRELRELVRYRHKLVGDRAAVKASVHAVLGKCGVIPVVADIFGPVGARILDGLVLPEPYASRVASQRRILATLSTEIVRLEVETGRRLKDNPQYRALLSLNGVGPVMAAIFVAEIGDVHRFASADQLACWTGLTTRVDSSDKHTRYGHVSKQGSRLLRWAAVEGCQRAREPYLVNKRRAIIERRGKGAQHIATVAAARHMIKIVYYTMRDGHARCLDAPIPAAS

SEQ ID NO: 388944 - protein, 354 aa, unidentified
MLIIGCDFHTRYQQIAMAREGTAELLLERRLDHESGEAHAFYRSLQSSHEPVRVGIEATGPIHWFERLLAELGHELWIGDSARIRASEVRKQKTDERDARLILDLLLAKRFPKIWVPTPAERDLRQLLWHRHKLVCLRTMLGNQLHFLAMSQGLCRKKKLFTKKGRGELAGLALAPWARRRREELLKLLDQLDPPIAELDRAVLEEAKRRDDAVLLMTHPGIGPVTSLAFVLAIGPVTRFCCSRKLVSYLGLNPSEESSGGRRRLGAISKQGNTMVRWLLIEAVYPAVRKDLALRQDYQRLKFRRGHAVAKVAIARKLAVRMYWMLRSGADYAQLVRRQGSPGGTLVNVSSSLA

SEQ ID NO: 388945 - protein, 342 aa, unidentified
MDHYAGIDVSLECSSVCVVDASGKIARESKVASEPEALIAYFGSLRLSVVRIGLEAGPLSQWLYAAMKEAGLAVELLETRHVRTALETMPVKSDRNDARGIAQLIRLGWFRPVHCKSIGAQETRAVLTARKLVQSKLLDVENSVRGILRGFGLKVGHTTNRSFAGRVEDLVVNHASLHMIAAALLSVHAVLLRELKAFDKRVRSMARVDVKAKLLMSAPAVGPIVALTYASAIDDPGRFTSSRRVGAHFGLTPKKYQSGETDYTGRISKIGDATVRTALYEAAHIMLIKPIKGCAPLKSWAMRIARRSGMKKAKVALARKLAVILHRMLANATPFNAAMAAA

SEQ ID NO: 388946 - protein, 338 aa, unidentified
MKLYGAIDLHSTNSVTVVINEQDQVVYQKRLPNDLSLITQQLSSYRRSLQGIVVESTYNWYWLVDGLMEKGYRVHLANTAAIQQYNGLKYTDDDSDARWLAHLLRLGILPEGYIYPKQERAVRDLLRKRGQLVHHRTANLLSIQSLISRTTGNSIGAQYIKALNIEHVDGVLPNPDHVLALKANLAVMNSADAQIEILEKAVQDRVKLRPQFRFLKTVPGIGPILALTIMLETGEIERFAGVGNYASYCRCVGSKKISNGKKKGQGNTKNGNKYLAWAFVEAANFAIRFNSRIKSFYQKKKSKSHGIVAIKAVAHKLCRACYYIMKDEVPFDINKAFA

SEQ ID NO: 388947 - protein, 536 aa, unidentified
MLMEQEAPLLFHTVFAGAVILTVAYLLHWRGHSPQKKPLELILYFVILSNRDTSPQNTFKTGINALKSDDIISSYGQRISCFYLCSQVYCAQTGTSALRDVTYEPDVEAMDRFLLISQQVVTFSSTRNVRNLNTRGAYTMYIVGIDIAKRKHEAAVIDGEGAVIIKPFSFTNNCSGYNRLLAMLTKAKLPLDEVSFAMEATGHYWLALFTRLQKEGFRVQVINPVQTNSIRSFYIRQAKTDPRDALLIAEVIRFGHFSESTLHPENIYELRELCRGRHAIVSMQADVKRKVVALLDQVFPEYETAFTNMFGDTSMAILQTCPTPKELSEMPLEELCHLIEVSSHKRFRMAKARELQELARNSFGFAMAGDVFSTMIRLYAKHLDFLKQQVREMDRKIAEIMETLDTPITTITGIGPTLGAYILSEIGDINRFSSAAKLAAYAGIDPTMRQSGEYNGVRNRMSKRGSPYLRHAIWLAASSAVLHDPALKLYFQKKRDEGKPYMASVGHACRKMVSIIYAVMRDNKAYVPCIPSEISA

SEQ ID NO: 388948 - protein, 317 aa, unidentified
MTQTTTLTAGIDTSKDKLDIAIDDGTACWHDKNTAAGWRRVAARLAEAGVRRVGIEPTGGYERGVVKHLRERGFTVLVLQPTQVKAYAKMHLRRSKNDEIDAGLIAGCAAGLKPPAIPPDARLEALAGQLTFVEQIEEDMARLKTRLEHVDDARLRGIIKADIAALKMRRAAEMLRIIKALRAHTDLARRYHLVLSVPGIGERTAIAIIIRLPELGRISREEAAALAGLAPYDADSGKHKGQRHIAGGRARLRRSLFAAALPAAFRWNKALIELYARLIARGKCHKAALVACARKLLIYANTVVQRGTPWVESPAAA

SEQ ID NO: 388949 - protein, 373 aa, unidentified
MPKYSTAFGMDVHLRSTTVCALDADTGEAVTRRFPGNPWGEIAGWMDGFPGPSLAAYESGYLGFAPQRELAGLGVECVVAAVSKIPRSAADSASKNDRNDAARMAKAILAHDISPVWIPSPEVEGIRDLAGAYGGATARLATAKQRLLAFLAKRGFVYGGTTPAGNPRKYWTYDFLRWLDKVRPEDDGGVRTLAALRNEVEAAAEARADLLSEYRAAVDASPIAAEVAALQSIKGCAFALAAAFSAEVGDFTRFRSGRQVTAYFGLAPSQRSSGDSVRLGGISGAGNALVRKLAVEGSWCYAAARHQPKLMPRDTGVPLEIRMHGRKGSERLLRRREEMLARGVPAAKANAATAAELVRWLWALGMMCREGAE

SEQ ID NO: 388950 - protein, 400 aa, unidentified
MRAVFGIDVSKASSEVAILVNGEKVHGYTMSNDALGFARLLGDLRTVHKPEIIFEATGVYSRRLQAFPEDNGYAYTRLNPLEAKKQLDSLRARKTDQIDAEKLAQSQFALNRKPTYVQEEVYQNLRDLSRFYQNLTEDIVRTKNRLHKVLQVTFPEMENILSTPTGEQYWNLVVAFPCKDFVLDLSKDELSKSIRLSTLKRISDKRVAYLAEKLTALANQSYCAVKKTSPIMEEVRYYAKELLRLSEQRQAVLDEMVELAQPLPEYDILLSIPGIAETTATSIIGELGNIRRFQSANQINAFIGIDLRHYESGNFIAKEHITKRGNPYARKILFKCIHNIASASHTNPCHIADFYEKRKRQSQTTSTKPHTIASIHRLIRTMYYLITHNKLYDYTLTQNQ

SEQ ID NO: 388951 - protein, 431 aa, unidentified
MLKINPLSTLYVGIDVSSKSNYVCALDFFKNKYINSSFANNQPGAEELAEKILECLKQHPELNTIVAALESTSVYSIHIANFLSSCEELLHFKPYVFVLNPKCTANYKKSYIGLGKSDPIDAFVIADYARAGNIETEPWRGSQFLALKRLTRHRLHLVECMTREKTYLVSNLYLKFSELQILEGDDQPFCDIYGVTSSSVLTEYLSPEEIIDSSEEDLISFLAEKSRNRIKDISKTAELLKKAARDSYRLDKALYEPLNVSIASSFNCIETFKKEIKLIDTAIEREIKGLNPNAFIILQSIDGIGPVFAGGIVAEIGDISAFHSSDALAKYAGLMWKSNQSGDFDGEDTPMSKAGNRYLRYYLGEAANSMRKHNVEYGTYYRKKYNEVPKHQHKRALALTSRKFVRLVYGLLARNQLYSGVSLDTSIKETK

SEQ ID NO: 388952 - protein, 320 aa, unidentified
MKEIGFTQMVSVGCGIDVHQSLIVASIRKSSASVETREFDAYTSSLTSLREWCKSSGVTHVAMESTGVYWKPVFNILETDFEIILVNARHVKNVPGHKTDKKDSQWLSKLLLSGLLKGSFIPPRDIRELRDLTRYRKKVVGQIASEKNRIIKILEDANIKLSSVLSNVDGAVGTKIINDLINGETLIDRLMRHYHGKQKVSREEFRKALEGHVTEHHKLMLKIHRESISDKEEQLKRLDTAIDKATESYRVEIELLDTIPGVGKDGAISIISEIGVDMSRFPDETHLSSWAGMSPGNCETGGKKKMQKQFMATSICRAYW

SEQ ID NO: 388953 - protein, 416 aa, unidentified
MRDDARWFVGIDWASETHQVCLVDADGKIVGERGFPHGGSGLAEMCIWLCVTTQAEPTVIAVAIEVPHGPIVETLLERGFLVYAINPKQLDRFRDRFTVAGAKDDRRDAHVLGDSLRTDRHCFRHLAAEDAVIVALREWSRMAEDLQQERNRLANRVREQLWRYYPQALKISDDLGADWFLELWAAVPTPAKAARVRESSIDRVLKTHRIRRIAAAEAAQILRQQPLTVAAGTVEAASAHIRAVAARLKLVNRQIKQAHRCLDTLCGKLAVDEEKTASGQEPEQRDVTILRSLPGVGRIVLATLLAEAAEPLRRRDYHALRTLCGVAPVTKRSGKRCIVIMRQACHMRLRSAVYHWARVAIQHDPLSRCRYAELRKRGHSHGRVLRSVADRLLAVACAMLDRQTMFDPSRAEKQAT

SEQ ID NO: 388954 - protein, 415 aa, unidentified
MALKIVYKICCGIDVHKTFVVACIASTNDKGITSYESHRFSTYTSGLKTLLQWLLDRNCKDVCMESTGKYWIPVYNILEKDCSIVLAHPKYVKAIRGKKTDKKDAKWIADLFKHDLVTGSFMPPADIRQLRDLMRYRFKLTCFKSSEKNRLQNCLTVSNIQLGNVVSDTFGKSAQAILDKILENPADTSFDLEPLVFKSLKKKLPELRDAIDGYITPEQAGKLKVIKAHYENLESRKAELEELILALAVPYQQELAILQTAPGISSDFTAIGIISEIGTNMEAFPSAKHLCSWAGLTPTNNESAGKKKSVRVSKAGCYIKPLLVQCTNAVIKSTKHPEMRNRYLRIKKRRGHKKAIIAIARMLLTALYHMLKNGENYNAELYQKSDLPPVDREITVEQALMIARNQGYKIKSATA

SEQ ID NO: 388955 - protein, 344 aa, unidentified
MILKQVAGIDVAQKELVVSLGRMDQDLTVEVFDYKVFANNQKGFKALTQWAEKQVKNDIKIRYVMEATGVYHESLAYYLTDNNSEASIVLPNKISNFFRTLDVNTITDKTASQAIARFGLERKLEVWKKPKEIFRKLKQLTRERDQIISDRTLLKNQLHAEKAEAFPNHSSIIRLNKRIKLIDKQELEIKAEIAAIVKKDPELVKKVNMITTIPGVGKLTAVIVLAETNGFELIRNKKQLVSYSGLDVKLKDSGTSIKGKPKISKKGNRHIRKAMHMPALSAMRFNEQHKALFERLVSRHGIRMKAVVAVQRKILELIYVIFKTSVPFDKDYIQQTEKKEVEAL

SEQ ID NO: 388956 - protein, 355 aa, unidentified
MSSEKYIGLDVHQATISVAVLDSTGKLVMESILETKAATILEFFAGLRGTLSVTFEEGTWAAWLYDVLKPHVAKLVVCNPRKNALLKDGNKSDRIDAHKLAELLYLNKLSSVYPGETGVRMLRELARSYLTIAKDLTRVMCRLKAVYRSWAIPCAGRDVYYTRHRTEWLGKIKEAGVRRRAERLYQQLDMLQYLRQQARRELLAESRKHAITIKLRQIPSLGPIRSALAVALIQTPHRFRTKRQLWAYSGLALETRTSAEYCYVQGGLRRSKKQISIRGLNQDHNHDLKGWFKGAATRASVLPGPFQDFYQRSLAKGIKPTMARLTLARKIAAITLTLWKKGENFDADKLKSQAA

SEQ ID NO: 388957 - protein, 418 aa, unidentified
MAEVMIGIDPHKASHTAVAIGLSEQQLAQLQVCACPSQTDQLLAWAAAWPERAWAVEGAAGLGHLLAQQLAAAGERVLDVPPKLAARVRLLQAGDTNKNDPNDAFSVAVAALRSTAKRPVIAEDHAVVLKVWAKRHRDLARARNQACCRLHAVLCDLVPGGIRKEISAGQAARILEQVRPADAVTTARCELAAEFLTDIRRLDAQLRTTNKKLAAAVKASGTSLTGLFGVGPVIAGTVIGDVRQVFRFPSRDHFAAYDGTAPVEVSSGGRKVYRLSLRGNRRLNHAIHMAAITQLRYKHSQGRAYYEKKLAEGKTHKEALRSLKRRISDAIYAALVADARQAAAACSKGPGGQPGNLSVSRAAGSHPAHTSSSDKPLPGLPPPYGPALRQDPPPVSPTERVGTGLGTPRPAEEIRHNH

SEQ ID NO: 388958 - protein, 339 aa, unidentified
MIACGFDVHRAQITFDLVDHESGELRRGRLAPATREELRRWLGKVDTTRLVVAVEGTTGWRFVAEEVEAAGGQVVLAEPGETRALRGPKRRAKTDRADARWLRELLERGELPVSWIPPVHLLELRCRVQLRQTIADERRAWLQRIHAQLFHHGIAVGGELAKPAARDWLATVELSCAGREVVEAALATVDFLDTQLAALDRELRRYARVHPATQALGRLYGVGDLTAVAIYAAVGDARRFSSARKVVRLAGLDVTVHESAGKRQAGRISRQGPPMLRWAAYEAGLAACRASSPDHADYLALRERLGHKTACLTVSRRVLRRAYHALVAVGEAALEPIPS

SEQ ID NO: 388959 - protein, 414 aa, unidentified
MDVVHPRCAGVDISKRDAKVCVRIAGSGRAKAKSVVTTWGAVTNQVLALRDHLIAEQVTLVVMEATSDYWKPFYYLLEDGPFEVMLVNARHVKNLPGRKTDVSDAAWLAQLGAHGLVRDSFVPPEPIRQLRDLTRTRTTLVRARAKEIQRLEKLLEDAGIKLSSVATDISGVSGRAMLEALIDGQRDPVILANLAKRRLRSKIPELTEALTGRFSEHHGFLAQIHLDLIDNHTLAIDELTARIEVVVEPFRHVRDLLVTIPGISTLVADVIIAETGGDMSRFPTAGHLASWAGTCPGSNESAGRIKSTRTRPGNPYLKGALGIAAMSASRSKDTYLAAKFRRIASRRGPIKAIVALEHAMLVAIWHMITNGTAYGDPGGDYFTRLNPDKAKHRALDQLHKMGYSVTLEPLAVAG

SEQ ID NO: 388960 - protein, 350 aa, unidentified
MLIIGCDYHPGFEQIAYVDTETGELQEQRLTHREEAERFYRDLAARETRVRVGMEASGHGRWFERLLEELNFELWVGDAAAIRAKRVRKQRTDRQDAQHILNLLVENRFPRIWVASWENRDLRQLLWHRHRMVQARTRVMNQLQAVALNEGLRCKKRLWRERGRQQLELLTLAPWTSRRRRELLELLDRLNPTIVELNQAIEQQVEKYPEAQRLMTHPGVGALTALAFVLIIGDANRFSRGKQIASYLGLVPTEESSGDRRRLGHISKQGNCLLRFLLVEAAQVTVRTDREWRSKYFHLAMRRGRKIAKVAMARRLAVALFWMWRRKWNYEHLQKFGSYVGQPGNRYGVQ

SEQ ID NO: 388961 - protein, 453 aa, unidentified
MEQPQEIEDQEYERTWERVAAIDVAKGSGVVCTRVPDEDRPGRRKTHVWTVKATKRAVIELADHLRGLQIQVVTLESTSDYWRIWWVVLEAAGLKVQLVNARHVKNVPGRAKTGKKDAVWLAKLTERGLLQPSFVPPPEIRRLREFTRLRTDLVRERTRYWARLEKLLERAQIKISAVLSKLTTDTARAMIEALIGGQRNPKVLAELAIGKARSKRGELAEALDGDWQPHHGELARILLDQIDALTAQVDALTDRVSELIDQIPAAWGVDAGGVTGPQAGTGPDAVILPALARLDEITGCGIIAAQAVIAEIGLDMTVFGTSGRLVSWARRSPQTRQSGKKTTTGRAGKGNPYLNGMLGEIAASASRTDTFLGERYRRLARRRGKRKALAAIARSILVIIFHLLADPTARFTDLGPGWYDNQIDAQRKTRGLIRQLEALGHTVTLTPAGAAAA

SEQ ID NO: 388962 - protein, 345 aa, unidentified
MTESKIVAFDLAKRIVQACVIDGTGAVIAEERMGPERVLSFTARHPHATVALEACGGAHHWGRALERQGHRVLLLPPQRVKSYGDPACKDDRRDARAIAEAASRSYLRPVPVKSEGQQALQSLDRVAALLARQRTQTVNALHGHLSEFGITLPKGPHLLKRRFTELEASPRWRELPEELGAAMGELFAAFLALEDRLSAIKARLARSAKQSKLGHLLLEIPGIGPMTAVSLEAAIGDDPGRFASGRQFAAWLGLTPRVSASGERRQLARITKRGSARLRSLLVVCAQAMLRQYRQGRHGDPLACWARHLLARKRWNVAVVALANKLARIVWKVASSGAAYQARTA

SEQ ID NO: 388963 - protein, 330 aa, unidentified
MDKMEACGVEVSARELVVALGEAQGRTRLRRFANSTVGHRALLRVLKRLGKVRVVLEATGMYGLDVALALSAEEGMEVMVANPRAVRHFAQAMMQRSKNDQLDAVVLREFAVRMPFRAWTRPTENKLELWAIARRLEALTAQRAAEKNRQHAAGLSRAVPAVVRKEIANGLRFLEGSIARLQKEAQRRIAADAQLQSRYELLCSIPGVGKVSALHTLGELVLLPEDRDVRQWVAYAGLDPRECSSGTSVRKRVRISKVGNRHLRRALYMPALVASRRQPQVREFYERLQRRGKNKSQALMAVARKLLHAIYGMFRTFKPFDGALLFAAAS

SEQ ID NO: 388964 - protein, 433 aa, unidentified
MSESSATSSTDSFLHFAGFDWAKDQHDVVIVTREGRIIDQFQFEDSAAGWSQFRDRIAPRLPLAVAIETNCGPAVERLLQSGVGVYPVQPKAAARYRERKVPTGVKNNFIDAWSLADALRLDGHTWRPLQPDDPLIQELRLLCRDEVALIEQRTALINQLQQAIYEYYPAAREAFDDWTLPAAWEFIIEFPTPEKLIRAGKKRWEKFLKSRGLARPQTYSKRLEIFATAQRFRGTAPVTAAKSRLAVALAKQLLALEEQLRLYRSRIRELFDQHPDHELFGSLPGLGDKLAPRMLAECAGDPQRFPSTQELQCVAGSAPVSFESGQMHKVRIRRACNKFLRATVHLWVNLSRSYCVWAETYYQKKREQKMSHACALRCLAQRWLKILWKMLQTKTPYDEALHTKNQTEHGSWVLALLPHRSSQNSVDNLHPVC

SEQ ID NO: 388965 - protein, 447 aa, unidentified
MKKKNVSMEVVNPDAAGIDIGSRSHFVAIGQGDEDVKEFGVYKEDLQALAQWLLDNEIKTVAMESTGTYWQSLYAVLQSSGLDVILCNDKFTKNIKGRKSDVQDCQWIQKLHTLGLLSGSFLPDEATEQLRTYCRHRANLIEQAADTTRKMQKYLRLLNLRLDVVVKDVTGLTGLSIIDAICKGEINPEILASLRNGNCKKSEVEIAKALQCNGRKDYLFALKHEYQMYLNLQSKIKECDQEIEKMLNEQINSDDNKREHYIEKKVHKRVNKNAPKNIDLNLLSYQYFEGVDLLAIEGVSHSTVLTLISEVGMGIHKFQSAKQFTSWLRLSPNNKISGGKVLSNRIPKGSNRLKIALRNAANAIGNLKDTALSNFFKRMAFRKGRVSAISATARKLAVIIWNMIVKRVPYKPATEYQFLDQKRKKITQMKKLITKFDITISDLSFQL

SEQ ID NO: 388966 - protein, 412 aa, unidentified
MELLHQRCAGLDVHKQSVVAAVRLAVEGKVITEVRTFATTTQGLLSLSDWLAENGCTHVAMEATGVYWKPVWHVLSDGDFELVLANAAHVKNVPGRKTDASDAAWLAELLAHGLIRGSFVPDGPTQDMRALLRTRKQLTREKTRHTQRIHKTLEDANIKLDAVLADVLGRSGRAMLEALVAGESDPVRLAALAHAGVKCPQEKLREALRGRVREHHRFLLRLHLGQIDALDAAIATLDREVDANLGPFRAAVEQVSTIPGVKALGAQAIVCEIGTDMSRFPTVGHLLSWAGMCPRNDESAGKRRSRRLRKGAPWLKTVLVQCAWAAIRKKGSYLQAQYLRLKSRRGPQKAICAVAASILTAVYHMLKDGTLYHDLGSDHFQRRSKTTQTQRLVTRLQHLGYAVEIKPLPTAA

SEQ ID NO: 388967 - protein, 345 aa, unidentified
MELMYYIGLDVHKQKISYCVKDSGGKVYAEGSLPATRIDLDLWMKTLPQPWSAAMEATMFTGWIYDHLKPHAAALKVAHPLMLRAIAAAKKKNDRIDANKICDCLRCDFLPECYMASTAIRERRRTLRYRNLLVRQMVQMKNKTSMLLMEAGVSYNKQRLHKAGYFRELLATNPDIDEGLVPLLRLCRETVVRLQRTESALVRSLEGDSLLMDRVERLMTIPAVGPITALTWALEVGDVQRFSSIKKAISYCGLCGAEKSSANTVQRTPLSKQRNKHLQTTLIEAAKMAPRNSSELAMLYDTEKQKGNANRATLAVARKLVAYLMAVDRRQRDFQVVETSSGIAA

SEQ ID NO: 388968 - protein, 481 aa, unidentified
MRLPYPVRILGLDLGIISAHRGVVVDGEGRVRARRSAVPTAESLTALEAAALRGAEPGARLMVVIEPTGPAWLPIAVFFGRRGHLVVRVSSAKAADLRRFLSRHAKTNGIDAETLARLPLVAPESVEPVELPGAARASLDRRVRAVGRLTAEIGERKTRIRALAAALMPTVDHALGKPVTRADLAVLARWGDPRALQAVSLRRLTAVVAKASGGHSGEGKARAFHAAAEQALALWAGDSAVALADLAAELATEIRLLHAAEIERAEHETVRDAALATVDPDGLAASLPGVGPVGASVLTAVMARPGRFPNAAAFKQFTGLAPRANQTGDTDRKGQPMSKAGPRGLRSVLIRCADTARKQDPQLAAVYHQQMTTRNAPHLKALCVVAARLAERAWVTLADAQPYQLRDVDGTPVTAEEAKQIIAERYTVPPEVRRRRRSGNQKGKIPQQPSAGGKSRPAAGHEATFPTPTVPHRRPRVKQPT

SEQ ID NO: 388969 - protein, 425 aa, unidentified
MFSRVKIACGLDVHHSKIVGSIVTSYGTHETRTFTTNIDDTLKLKDWILTHKCERVAMEATGIYWYPIYNLLEEYVTVQVANPLFIKGIPGRKTDQIDAEWIGMLCLNGLIKPSIVPKREVRKMRDLVRTMTGLTHERTRHKNRIHKIMVRAGIRIGAHLSNLYGPSGLKILIGLLEGKSIDTILLDLKSTKITKKRDELVQSICGTLDENDVYLIRLELDSIEFINHQIEDLKPRLTYLMTPMNDDINILMTIPGIGQDSAMKILAEIGDIHLFPSGKHLVSWAGIAPGMNESAGKKTPGHITKRGSKYLRTFLIEPAHAIARMKSDNQLKRYFSRMVGRLGYKPAIIALARKLLMIIYHLLANHEPYFEENFSKKKPIKLPVASPPSMTADQILNIMSDAIANMSEVDRAEFVRKLNRIRTPG

SEQ ID NO: 388970 - protein, 360 aa, unidentified
MKELTTIAVDLAKSVFEVAVSEVPGRVSQRRRVNRAGLVAFLANRPPAVVLMEACGSAHHFGREIQKLGHQVRLLPPSKSAKYRIGNKTDRTDTDALLEANRNERILPVPVKSIPQQTLASVHRLRVGWMGTRTARLNALRGVMRELGVVIPLGAKVVLPAVAEAMACGHVPEDLHPLLAASMAEIRQLEENVKECERTLARMARSIPAAHALQKIPGIGLLGSTALIPAVGDPLRFKNGRKMSAFFGIVPSEHSSGNRRRLGSITKRGNTYVRTLAIHGGRSVLLAAHRRKNPDRLHRWALEVERRQGPNRAAVAVANKIIRIAWAVWARGTTYDGSLPGSTPKPPTTNTTSPQGTGAF

SEQ ID NO: 388971 - protein, 355 aa, unidentified
MEDYDGRQVVGMDLHRHRSVLVRMTEDGRRLGTARITNSPAGLRKEIARAGKNPRVVLGATYGWDWAADVLAAAGAEVHLAHPLGVKAFSYRRVKNDERDSADLADLLRMGRLPEAWIAPHEVRELRELTRYRTKLVRMRTSCKDQVHGVLAKLGVTVTCTDIFGKAGSAWLDVLPLPQPYSGKVTSLRHLAGELTTEIAMLTDVIGDLLAGDRGYQAIQQLPGIGPVLAAVIVAEIGDVTRFHSAAQLCSWAGLTPRHRESDTKVARGHVTKQGSRLLRWALIEAIQRLPRESVIGAAKDAIIARRGKEAKNIAKVAAARRLLTLVYYGMRDGQIRCLSQPRQDPPATQAAHAA

SEQ ID NO: 388972 - protein, 355 aa, unidentified
MKITTIGIDLAKNVFQIHGVDAKGNVVLRKVLKREQMAAFFANLPVCLIGMEACGSAHYWARKLEALGHTVKLMAPQYVKPYVKTNKNDAADAEAICEAVTRPPMRFVPIKSVDQQAVLALHSARQGFVKARTAQANQIRGLLAEFGIVIPQGIAHIAARLPDILEDGENGLPGDFRRLIERLGDHLKELDRQAQELEVQIQLWHRSHAESQKLAQIPGIGPITASALLAAIGDARHFANGRQLAAWLGLVPRQHSSGGKQTLLGISKHGDNYLRTLLIHGARAVIRFADRKPGDADRWLAGLLQRRHKNVATVALANKNARVVWALLAHDREYVTGYTPAPSSRSSTAPVAAGQ

SEQ ID NO: 388973 - protein, 411 aa, unidentified
MVKENFIYVGIDLHKETHTAVMIDCYNQKLGEITFPNRPAAFPKLVTKVKKCNTDGKEVVYGLENAYGYGRALAVWLIDKGYLVKDVNTAISHRQAKHRGAMYRKSDSDDAKAIALATLNMLDKLPDACPNDAYWSLGQLVHRRDNIMKQRTRLVNQLHEQLCIAYPSYKQFFNDISRPTALYFWEHYPSRKYLKGKSVEDLRAELVPVSHNKCSTKTCEKILDAVASDKVKNIDYQDARDMVTLSIVSDLQHYDSQLAEVDKMLEQMYKMLGCTLTTIPGVNVITAVKILAEIGDIKRFSNANKLAQFAGIAPLHLSSSGKGKDVATKQGNRRLQATIYFLAIQMVQLSSKGTPRNPVVRAYYEKRKAEGKTSQQALICISRRLISIIYGMLKNGTEYRMPVVENAGENR

SEQ ID NO: 388974 - protein, 335 aa, unidentified
MRYVGLDVHYRSSTFCVLEENGKELQCETVRGHWAKLLERLGTVTGPWTICFEATCGYGYLYRELSRLAQRVVVAHPGQLRLIFRAKRKNDRIDARKLAKLLYLDEVPTAYGPNEEVQSWRELIEHRRHMMDRQTIGKNAIRSLLRSHGMIAPKGLWTKKGLASLRQEEMPTSAARLRRDLLLDELSDAQRRVRTVTQVLDESGGRHPGVLLLRTIPGVGIRTAETVAAYMDKAERFTRSKQVGAYFGFVPCQDASAGVNRLGHITRQGPATARQYLVEAAWQGVYRSPTIRAYFERVQHGRPERRKIALVATAHYLLRCMHAMLVHHQPWHEAA

SEQ ID NO: 388975 - protein, 331 aa, unidentified
MDVCFVGIDVSSKTFNVCIQRDQKLIEWELPNTPKGYTKLLKDLNKYKVAVRIGMEATGVYHLNLAFYLSQAKHTEVMIINPFVMHSFAKSIAPRGKSDRKDACMILKYLERMPFESFIPPEQELLHLRSLTRRIEQITVDVRREKNRLHAMHSASIVSPFVLAQCKQSISDLKSSIVELQTEMERLIRASSSSKTASQVEILQSIPGIGLRTAIVLISEIGLLPEGLTVKQWVAHIGVDPCQRQSGTSVHTRSRISKRGNKHIRRALFLSAMSASQFSLPISEFKNELVARGKSKKQALVAVMRKLIHCIFGILKHQTPFDPSLFRGRTS

SEQ ID NO: 388976 - protein, 469 aa, unidentified
MIYSVGIDLHQGSHRARCLDDRAQIYDGFTFQTTPEGLARLEERIFRDGANPIIVLEPAGLPWLMVAVYLRSQHPNCRLVKAKMQKVAALRRYLRGPVKSDRLDALTLAKMPFIDPEQLIEIYLPPAEIHALQRLTRQRKRMESDVSSHKVRISAILDGYLPGVRRAFSESWSSSFRAFLRGRINPIAVVRDGEEALHAYLSKASSRSKVQAYQVFQACQSVAQVCKMSMKAGTLNEDFFTDLQDEVARELRLLEASEAESESLARRIAEIYKKLHPSDNLSTIPGVGPHTAPIFLSSVGDPVRFRNQSTFANWEGVVPGARQSSNVEAKGLRMTKAGPSIMRMALYQAGEIGRRNDPGLAAVYYREMVYHGKNHRQAMGAVMSHLGARVLRVLKEDRPYEIRDLEGKTVDKNEAKRLILSRYHVSEEIRRERRRRNTKVNRREEVEGVSIQEADDAPQAEQVKSVSRK

SEQ ID NO: 388977 - protein, 514 aa, unidentified
MSEGTAVSPFSRLSPRLLRKHSAWHIRHIPLTQNFHPQPLAPARKADWVHAHCARFRSPYAAQDKPFASGFTNPDQNGGDIMLKINYMSTLFVGIDVSSKSNAVYAMDFEENKYISSSFDNNQPGADKFVTMIAECMQKHKNLDTLLIVLESTSVYSVHISNFLSTSEVLMPYKPYVFCVNPKATSNYRKSYIGMEKTDPTDAYLIADFGRVGRTKKLEPWRGGQFIALKRLTRHRMHLSECITREKTYMVSNLYLKFSELQLLEGDDKPFGSLYGATSSAVLTEFLSPQEIIDMPEEDLLTFLAQKSRNRISDISKTSDLLRKAARDSYRLDKCMYEPLNISLASSFNCIHAYQKEIKLIEQAIEKCINGMNPNALIILRSIPGIGPVWASGILSEIGDITAFHSSDALAKYAGLYWPKGDSGDFTSEDKQMSKAGNPYLRYYLGEAANSVRKHIPEYADFYARKYAEVTKHQHKRALALTSRKFVRLVFGLLAKNQLYTGEKLDTEYNIESN

SEQ ID NO: 388978 - protein, 351 aa, unidentified
MGEYIAFDSHKRYSWVDRQDHSTGESRSHRLLHAPGAVRSYLSGTEPGTGVAVEATGNWYWIIAEIEQAGLRPLLVHPRKAKLMMGLTNKTDKLDAEGLNRLQRNGTLPTVWIPPGPLRDLRELTRTRLVLVQQRTRLKNRLSATLAKYGVGPSESSDPYGKRGRLALEKNLERLPEQTRWVSGQLLAQLDFVGAQIRELEQRLDALVEVTPEMQRLMSMPGVGVILAATMALEIGEVQRFPSAMHLASYSGTTPRVHASGGKVRYGALRSDVNRYLKWAFAEAANSVAVNHVRCPQRHVSELYRRLRQRKGHPKAIGAVARHLAEAAFHVLQGEAEYRDPVLGRGRTSGV

SEQ ID NO: 388979 - protein, 483 aa, unidentified
MKSKPEEQNKRATNHPTQHHWHEMNRKQRREMMRKMQNEDLSLEVIHPDAGGIDIGNESHYVAVPPSRDSQSVREFGCTTAELKAMAVWLKQCRIRTVAMQSTGVYWVAVYDILEQAGLEVYLVNARDTKNLPGRKSDVQESQWLMKLHTYGLLRNSFRPSPEIRVMRTHWRQRNDLVQSAGRHIQRMQKALTQMNLQLANVLTDISGATGQAIIKAILAGERDSHKLAQFRDPRVKASEEQIAQSLEGNWQEDLLFVLKQEHEGYEFCHKQMAECDRQLKQYLQQREDRSQGAPLPEEKRKGRLKKKRANKPQFDLREGLFRMTGTDLTRIDGIDVMTAMTIISEAGWDMSKWPDEDHFVSWLRLCPDNRISGNKVIGKGRLPTNNPISIALKMAASTLRQSKTYLGAQFRRFRTRLGAPIAIKAMAAKLARLVYRMLRYGMKYVDQGAAFYELRHRELQIKRLKAKAENLGYRVTPIPAAA

SEQ ID NO: 388980 - protein, 424 aa, unidentified
MKPKPDVEFAAFAGIDWADAKHDICLQAAGSEEREWAVVPHRAAAIDAWASTLRQRFHGRPVAVCLELAKGPLVYALQKHDFLVLFPVHPATLAKYREAFTPSHAKADPTDAELALELLLRYRAKLKPLTPQSGPMRMLLRLVEQRRRLVGDQNRISSRLADALKQYFPDVLAWFPEKDTLLFCDFLTRWPTLKQLQRARRATLLSFFHEHHVRSQSRIDERLLAIKSAIPLTDDLAVIRPNKLLVLTLVEQLRVTLRAIESFDAEIATVSQTLPDHDLFRALPGAGATLAPRLLVAFGEQRERYQSAAEVQRYTGIAPVTESSGNKHWVHWRLQCPTFLRQTFVEWAGATIPRSFWAAAYYRQQRDKGSTHQAAVRALAFKWIRILYRCWQTRTPYDESTYLNALKRRGSPLLTSIVGAAKNT

SEQ ID NO: 388981 - protein, 347 aa, unidentified
MTTATPIRMTDETTDRPALFLAFALGANHWKLGFTTGAAQRPRERNVSARHLEAVREEIRKAKERFGLPADAPVINCYEAGRDGFWRHRWLVSQGVANCVVDASSIEVKRRHRPAKTDRLDVQKLLTMLLRHAAGERKVWRLVRVPSVEEEDRRQLHRALTTAKRDRTRVINRIKGLLASHGLVMPPGGDFSQQLEHLRLWDGTPLPAGLHHRLGQEWEQVVALTQRIAQVEAERRVVLQTAADAVTHKVQQLLRLTGSGVNSAWRFVMECFGWRAFRNRKDVGALSGLTPTPYASGNTAYEQGIAKAGNAHIRAMAIEMAWGWLRLQPQSALPQGYQQRFGHGRSR

SEQ ID NO: 388982 - protein, 410 aa, unidentified
MMKLKYPICCGLDVHKNVIVATIVITNRDGVSEYRQKSFSTINSDIQKFHNWLIENNCYHVCMESTGKYWIPIFNYLEKDIEVCLTHPKYVKAIKGKKTDKKDSKWIADLYKFDLVRCSFIPPKDFRQLRELARYRFKLVCMKSSEKNRIQNCMTVSNVGIASVLSDPFGKTATEIMSYLLEHTADSIDEKAVRKLIKKGAKAKSDEIIEAIRGCNIETDQAKKLELALGHLEYLDGMITQTEVELYVRIKPYYEFVEFVSTMPGMTELSSTIVLAETGVDMNIFDDAKHLCSWCGLSPSNNESAGKKKSVRIAKAGAYLKPMMVQCALAAIKNKKQPYFAIKYGRIKKRRGHKKAIIAIARMMMVCIYHMVSEKKPFTPADYEELMKPQNHVERVVLNVLKVLVTIVLS

SEQ ID NO: 388983 - protein, 344 aa, unidentified
MKLFIGLDVSLAKTAVCIVSEHGKIVKEAEVGSDPAALTQFALEQQGEIAMIGMEAGPLSRWLHRGLTEAGLEVVLMETRQVKGALKAMPIKTDRRDAEGIARLLHLGWFRPVHCKSVSAQEIRALLGARKSIQQGVIALEMSLRGLLRNFGLKVGAISKGRFDARIQELVASNTTLVAATEPMLRARATLRHELARLERHVRSLAQDDPTCRLLMTMPAVGAVVALTFKSAVDDPARFSSSKKVGPWVGLTPSRQQSGERDVTGGITKAGDAHLRHALCQAATVMMNRGRGSWLRTWASRVAKRRGTKRAMVALARRIGVILHRMWLDGGNFRWEGAPEPIHA

SEQ ID NO: 388984 - protein, 384 aa, unidentified
MPTMTTRSVLAPVAVPTLHLAFDLGNLRWALAFTTTTGAPPRLRMCPARDLTTLDQEIARAKAHFNLEPNALVVSCYEAGRDGFWLHRALTARGITNTIIDSASIEVDRRHRRAKSDRLDATALLSLQLRAVAGDRRSWHPVNVPSETAEDWRHLHRELALLTRERTRHRSRIKALLVAQGIRLTTMRHLPTQLVRLRRWDGTPLPPYLRARLDREWDRLATVLQQQRSLVAERRTLLATSPDPAVRQVRQLLALRGIGEVSAWLYTMEFFAWRGFRNRREVGALAGLTATRQLSGRLTRDLGISKAGNVHVRGLAIELAWSWLHHQPDSALSRWFTERFAAGGSRQRRLGIVALARKLLIALWRYLETGLVPTGAQLKPGAAT

SEQ ID NO: 388985 - protein, 342 aa, unidentified
MKFYCGIDLSARDCQVCVIDEQLKVLVQQKLGNELPKICRLLEPYKANLKIVVESTFNWYWLIDGLQAEGFEVVLAHTLGLYLITGAKVKTDRRDAYSLAKLLLVGAVPTAYIYPVETRPVRDLLRRRMHLVQVRAGEYGSLRRLLLRQGILSSKQQEIKTATEAELEQWFEHPLVRLHASQELRRIALYSQQIAELEKTILALAQTAPSYDRLLKLPGVGQTIALTILYEVGELTRFANPKVFSSYCRVVPGIAQSGSVSGRGRASKQGNHYLKAAFSQAAVHAVRCYPKVRRYYERQLKRHQGRGRRMICYNIIAHKLAQAAFHVLKEQIEYRAELLFGP

SEQ ID NO: 388986 - protein, 371 aa, unidentified
MTETVKYVGLDVHKETIAVAVADGERGGEVRFVGTVANEDDAIRKLVKRLTGPGVTLNVCYEAGPCGYGLHRLLTKLGQNCIVIAPSMMPRRPGDHVKTDRRDAMTLARLLRAGELTAIWIPDEAHEAVRDLIRARRSAQDDAIGAKQTVRSFLLRHDRRFGGKAAWTKMYWRWLSEQRFDFPHQQLAFEEMQKRVLEAQARVGRLEAALTEAVDAWCFAPLVRNLQVLRGIRLVSAATLVAEVGDLTRFDNPKQLMAYVGLVPSEHSSGARTKRGRITRAGNAQARTMLIEAGWSYRLPAREERRYRERVIDLSEDIQAIGWKAQVRLCQRYRRLAATGKPQPKVTTAIARELVGYAWDIARRVSPAIAG

SEQ ID NO: 388987 - protein, 371 aa, unidentified
MIRSWTDSRRDWKPVAASVVGPRMSLVLRSFLPHPNSCLGTSPYQQGRDTKMAQRSFCGIDVAKDRLDVMVLPEELCWSVANDAAGWAELVAKLRGLRIAASGIEASGGYERGVVRALLAAGMSVRQINPFKLRQFAKACGVLAKNDRLDARMIALFVATLPTRSAQRYAPVERLAELVTARRQLSDDKVAAENASRLFEDAALRRLYGGRIARLAADIALLDKRLAEILAGDAMLARRYALLVSMPSVGPVLAVTLLALLPELGQMNRKQVAALVGVAPYDFDSGRLKGMRCIWGGRAPVRRVLYMAALIGCRCNPQLRAFHDRLAAAGKKVKVVLVAVMRKIITILNAMLRDNVPWVDHSIGRHILPAA

SEQ ID NO: 388988 - protein, 370 aa, unidentified
MLNTTTFVGLDVHARSIKAVALDAMTGEVRSATFAYDAAEVAGWVSSVDPSAKCVYESGVTGFDLQKRLAALGVDCVVGAVSKMIKPSADRKRKNDRNDAEFLARMLSVGNVVEVWVPDDGCEAARDLVRALDDAREDLKRRKQRLSKFLLRHGYVFSETTPTGRRKGNWTAAHWAWIKSISFPEKADDDVLAYYVDAVRQAMEDKARLERLVEAEASKPRWKRRVDSVRCLKGIDVTSAADLVFEAGEFSRFKSARSFAAWLGLTPSEHSSGESVRQGGITKAGNKHLRRVLVESAWHYLGCSPHSKDLAKGQVPDPAARRHAAKGVRRLVERRRAMLERGVHKNKANVATARELACWCWAVGCMVEGA

SEQ ID NO: 388989 - protein, 347 aa, unidentified
MQVITIGIDLAKNVFQVHGVDANDKVVFNKPLRRSQVLPFFAKLAPCLIGMEACASAHYWARELKKLGHDVRLMPAKDVKAYVKRNKNDSVDAAACCEAVRRPTVRTVPVKTPEQQAQLMQHRVRDLLVRQRTQAINAVRSHLAELGIVAAQGYDGLKVLLAVIADCSDVRLPENARASLSALVAQIASCQAEIGAIEKRLLAQHRKNADSKRLETIPGIGVVGASAIVATVPDASIFKTGRDFAAWIGIVSREDSTGGKQRLGPISKQGDRYLRRILIVGAFAVIKQARAHPEKYPWLTQLLARKPAKVAAVALANKTARIAWAVLTKKEIYRSRPITAAPASLGG

SEQ ID NO: 388990 - protein, 329 aa, unidentified
MSDELIQPATWVGVDVSKKKFDVFLERANGRGKSKVFPNHAAGFAQLLTWGQAQGLDWTRTGVCLEATGPYGTLLARTLHEAGVVIAIENPARIQAFARTLGVRVKTDKADAQLIARYAKQHPPRRWQPPSAEEERLQALVGRLDDLIVMRTMEMARAQQLTGEALASVTNILKALEEEIERLRAAICHHIDQDPTLRQPAQLLGSIPGIGQETISRVLAHLGTLTRFENVRQLVAFVGLNPRVRQSGQWTGTSPISKQGSSAIRRALYLPALVAKRYNPILRNFGKRLAANGKRPKQIVVAIMRKLLHMMWGILKSGRPFDPAMGLQG

SEQ ID NO: 388991 - protein, 346 aa, unidentified
MNQIIRIGMDTSKHIFQLHGVDAAEQAVLRKRLRRKEVLAFFAKLPPTVIGMEACGAAHYWGRELRKLGHEVKLMAPQHVKAYVKRNKNDGRDAEGLCEAMSRPTMQFVPVKTEEQQAALMLAGVRQQLIARRTQLSNAIRGYAAEFGVTAAKGLDKIEPLLARIAQDESLPALARELFAIEGREYAQVQAELKAIEAKLMAWHRANAASRRLAQIPGVGPIGATALVMKTPDPRAFSSGRHFAAWLGLTPKDHSTAGKTRLGKITRAGDEVLRSLLVAGATAVIQQVRRGRGRPSPWLVALLKRKPPKLAAVALANKIARIAWKLMTTGESYDGARMPGASALAA

SEQ ID NO: 388992 - protein, 441 aa, unidentified
MMMEEPRYFVGVDWATREHEVCVIDAQGEEIGKRSFAHSGDGLERLCSWISKVTNGAAPERVTVAIEVNRGPVIAALLERGYVVLACNPKQLDRIRDRFSVAGAKDDQLDALVLASAARTDRRLLREVPHDSAKVLELRELVRLHHDLVEQRVRLQARMREQLWRYFPQMLELGDIGDRWTMALWHKAPSPEAAARLRKSSVDAILRQHRIRRLTAAQVLTELKAQKLKVIPGAAEAAILHIQTLVPQLRLLHDQIRAIDKRLDGAMDALAAGADRADGGTPEPEGDSSAGHKSEQRDVAILRSLPGAGRIAIATLLAEGSEILRARDYQQLRALSGVAPVTRQTGRQGKRGGPKPMVIMRRACNSRLRDALWHWAGSAIQHDEHWRADAAALRARGVSASETRRRIGDKLLRVCCGCLRAGTPYDPHRWNREEGHAAKAA

SEQ ID NO: 388993 - protein, 413 aa, unidentified
MCAHLTLVRRDTIILTESVLIVAGADTHADTIHVAAITITGAPIGDREFATTRAGYAAAIRFLRSLGQIERIGVEGTASYGAGFTRALTAAGIEVVEVTRAVKSTRRLKGKSDPLDAYSAARTALAGDGLATPKDDATAGLRALHIARRSAVKHRTAVINQIKAMLISAPDAVREKYCGLTTLKLVEAIARCRPDAQADPWAQSVLTAAKMLAQRVQFLETQAETLQAQIDAFVTQANPGLRAAYGVGADTAAQLLITAGANPHRLHSEAAFAALCGVAPVPASSGKTNRHRLSRGGDRAANNALFRIALVRMSHHQPTKHYVQRQLANGHTRMEILRKLKRAIAREVFKLLTRQIAVPEYADLRPSRQAKNITVTAAANHFGLWPTVISRIERGLQRDDTLADEYRTWLKAA

SEQ ID NO: 388994 - protein, 391 aa, unidentified
MSLYFVGIDISKYKHDCCIISATDQKVISKFSIKNDKVGFEELITTFNSLSSPEDIRIGFESTAHYALNLELFLENAHHSFMEVNPVLIKDFKKSQTLRRTKTDSIDCELIARWLMTVEYKPHSKGFYHAYSLKSLTRLRDRLIRQRSFYLVKITNVLDHTFPEFKPFFNERLSKTALYLLENYGFAVMMARMNSVSYEKLRSISRGKFSPQQFIALKELASNTVGVNNSIFDVELNSLLTLYKTLVTEINTLEKEINLLIEEVHPHYLSVPGIGPISAAIIYSEYGDISNFDNPGQMLAFAGIEPGINESGTESHGGRMVKRGSSQLRYALINCCLPLIRFDMTFATYYAKKRAEGKPHRVAITHVAKKLIRVIYALERQDTDFCVQKLR

SEQ ID NO: 388995 - protein, 413 aa, unidentified
MEVVVACCAGLDVHQASVVACINRTGQGGRSRKEVRSFGAMRDDLIALRDWLMEGGVTLVAMESTGVYWKPVYEMLEDQFDVMVANARHIKNVPGRKTDVKDCEWISDLARHGLISPGFVPPRAIRDLRELNRYRRKVAQVQTGERNRLIKVLETAGIKLAGVVSDVLGVSGRAIIRALIEGEDTPAAMAGLALGKLRKKRPDLARALDAPLKLHQRFMLRTQLARIQQAEADLEQIDIELNKMAVPYQRYIELLMSIPGVNWINAVTIIAEVGIDMSVFLSAAHLASWAGLCPGNNESAGKKRSGKLRKGNVVLKTTLVNAAIAGSGSRGRKGTFLAEKFRRLAARRGKMKAAVAVAHKILVSVWHMLSDGTYYQDLGAGFLDKIDRTRNARHLVRRLAHMGFDVQLTEKAA

SEQ ID NO: 388996 - protein, 346 aa, unidentified
MTNGGIDLGRRMSQICILKQDGEVIERRIKSERERFAAVFKAHPGARILIEAGTESEWVARSLEELGHEVIVADPNYAPMYGQRHRRVKTDRRDARALAEACRLGAYRPAHRTSEAQRHVRWQIAVRETLVRTRARSIVLIGSLLRQAGLHLPGGGAETFLNRLNALALPEPLHQAIGPMLPALEMLNRQVTTADRALEELARSDPRVRRLDTAPGIGPVTAATFVATLDRADRFAGPHQLEAYLGLVPREYSSGERQVRGRITKGGNTRLRCLLIEAAWSIVNYPKPETAALRQWTLRIAGRRGMPRAVVALARRLAGILFAMMRDETVYDSSRLTSRSRPARVA

SEQ ID NO: 388997 - protein, 344 aa, unidentified
MKYYCSLDVSLNSTATCIVNHDGTIIRESEVPSEPAAIDQWLKATGLPIERVGLEAGGLSSWLCQELLAGGWPVICIETRHAKAAMKAQQVKTDRNDARGLAQILRSGWYRTVHVKSLESHQVRALLASRKAILVKCVDLENELRGLLKIFGVRLASRVGHGSFDEAVRKAITAEPLLARALVPLLDARTVLYKTYLKLDNAVKAVVRTDPVCQRLMTVPGVGPVTSLTFKAGVDDVNRFRSSRTVAAHFGLTPRRYQSGETDNPGRISKAGDRDVRMALYTAAHALMTRSDAWSTLKAWGLRLAKIRGHRRAVVAVARKLAVILHRMWVDGTDFRAARLQGAA

SEQ ID NO: 388998 - protein, 312 aa, unidentified
MATSSYVGIDVSKDRLDVARLGDKQEKQFSNTKDGIAQLVQQMVNLQPELIVVEATGGYQRNVVEALFHAGLSVAVVNPVRVRQFARACGLLAKTDKLDAFVLAEFGQRVRPRLYAGKNEAEKQLSALLVRRKQVEEMLKAEQNRLRTVSPSLRGSVERIIAILKEEKKRLEEQIRELMNEHKAWQEQTKILDSAPGVGPVTTATLLADLPELGKMDRKKIAALVGVAPMNYDSGRKRGYRKTKGGRNDVRSILYMSTLVATRHNPLIRTQYQHLLKRGKLKKVALTACMRKFLTILNAMVRDKQPFRCVTA

SEQ ID NO: 388999 - protein, 332 aa, unidentified
MDNFYFIGVDVSKKKLDFCVLFEGKVLREEQVSNHQQAVARLIGELKNDLEMDNEQFLICAEHTGQYTFPLVCACKSVECKLWLENPSQIKYSSGMQRGKNDKVDAKRIAIYASRFGDKVKYYDRPSEEIERLKQLERERALYVTDLAKYKGQMYDQKDFMPAALYRKKTKRMKGLIQELQAAIDAITAEMEKIIGSTEVLARQMELLMSIDGVGKVVALNVIIETEAFSRFDNPRKFCCHAGVAPFSYTSGSSQHSKNKVSHRANKNIKKLLHMAAVSVTHRKEGELKAYYMRKVEEGKNKMSVINVLRAKIVARMFAVIKRNEFYTPIYS

SEQ ID NO: 389000 - protein, 344 aa, unidentified
MEITIIGVDLAKNVFQVHGANDRGKAVLRKQLRRDQFAAFFANLPPCLVGMEACGGAHHWARKLQALGHTVKLMAPQFIKPYVKSNKNDAADAEAICEAVGRPTMRFVPIKNIEQQSVLALHRVRQGFVKARTAQANQIRGLLGEYGLIVPQGIGHIAIRVPDLIEDASNELPGTFRLLIHRLLEHLKQLQRQVAEIEGQIKAWHRSSEASRRLEKVPGIGLLTATALVATVGDAKNFDNGRQLAAWLGLVPRQHSSGGKSTLLGMSKRGDAYLRTLLIHGARSVIYRAGQRAHADSWLVKLIRRRNANIAAVALANKTARITWALLARDREFRPDYPTVTATA

SEQ ID NO: 389001 - protein, 400 aa, unidentified
MRKPKQRQTKPRQSKQRKPNDLSRSLAALDLDRTLIAVIEMGASSWLVAGLVPGVERQPLKKLETDEHALLALLERWRGEAVRSGYAITRIVVAYEAGRDGFWLARWLRAQGIEAHVIHAASVAVSREHRRAKTDRLDTELLKRAFLGWLRGERDHCKMVAIPTVAEEDARRPGRERESLVGDATRIINRIKSALARLGIRTFNPTLKKAPVLLNDLRTPEGDPIPPNTLDEIKRDMERRHLICEQIRRIEQERVKRLEQAPDTGPNAMVHLLARVTGIGIETADTLVREVLTRNLRDRRAVARYGGLTGAPNQSGSFNREKGLARSGNPRVRRCMIGLAWRFVRLQKDSPLVKWFELRTANARGSRKTMIVALARKLLIALWGLVHEGVVPEGVIMRPA

SEQ ID NO: 389002 - protein, 332 aa, unidentified
MYYIGIDLHKQDLVMAVEDEHGPVGRPRRIACRDMDAILASVERWRPFRAVVEASASYRWLYDLLSPQGEVVLAHPLRLRAITAARAKTDRLDAALLARLLRANLIPAAYVPPERYQTLRDLTRSRARLAYGATLAKNQVHALLARANVHPPFKTPFGKRGRRWLAGLDLGLAGNLARDELLRRLEHYGREVAALDGHLERLASEFPEAAALEVLHGIGRYSALLIVAEIGEPERFRNTRQVGAYAGLTARVHQSGASEHRGGISKQGSRWLRWILVQAAMKLVRRDERLENFYQRVRKRAGRNVARVAVARKLAGICWVRLRQWERSQAAA

SEQ ID NO: 389003 - protein, 368 aa, unidentified
MRHGSTLYVGLDVPKDSIAVAYATTDGPSDPVHVGAIGTRQCDIDALVRTMQSKSAQLVFIYEAGPGGYWLYRDLTRKGLTCVVVAPSLIPRKPGDRVKTDKRDAVTLARLARSGDLTPVYVPDVPDEAIRDLARAREDALRDLNAGRFRLKALLLRHDIRYVGRANWGPEHVRWLARLVLPTPAQQIVFQEYVRTVTERPELLHRLEAELLEQAKPWRLYPVVDALQALRGVQFTVAITTIAELGDLTRFDNPRQLMSYLGLTPSEYSSGDRRRLGGITGNGHARRVLIEAAKAYRHRAKVSEPIQARQQHLPAPIRDIAWRAQVRLCGRYRKLLARGKHPNTIAAAVARELAAFMWAIARTQAVSA

SEQ ID NO: 389004 - protein, 437 aa, unidentified
MHEVEDEPLFAERVAGIDIAKAEVMVTIRVPVDTGSGRRQQETRSFRATRKDLLHLADWLRSWGVTRAGMEATGDYWKPVYFLLEQEGFDCQLYHAAQVKALPGRPKTDKLDSVWLAKITERGALPSSFVPPEPIRRLRTCTRYRRHLTQARTAEKQRCEKLLEDAHLKLSTVITDIHGVSGRDMLTAIIAGERNPTVLAQMARTRMRGKIRQLEEALDCSFFTAEHAFALAMMLANIDHLTAQISELSARIDALCEPYLHQISQLDAVPGFGIITAQDIIAEIGTDMTVFPTAGHLASWARRCPQVTSSAGKRKGSNATGRGNPYIGAALGEAAVNAGRTSTFLGAKYRRLVKRMPKKKAQGAVSRTQLIITHALLSDPDAVYTDLGTGYYEQRDNIRRQVHNHVRAIERNGYKVTLEPIDPDPTDPGTLPVGKAS

SEQ ID NO: 389005 - protein, 367 aa, unidentified
MSKNTSKKNSLPAADLSACTTVAVDLAKSVFQVAGEDQLGQVIYEKRIRSREAFITFLQQLPAGIAVLMETGPGAQAWGRMLLKQGHQPRILPARHVANHRSGPKNDRNDVLAILRAGRDQHIHAVPVKTEASQEMQALHRVRQRYVKEHTAMGNQMRGLLLEYGVSIPQGKAAIDREIGRLLENPGPLVPELLRELISELLEEWKTLDGRIEVITGRVKKAAQENETTQRLMTVRGIGPILSSAIVAKQTEPERFANARDFAAYFGTVPEQHSSGNTVRLGKMAKRGDAYIRSLSIQGAHAVLRQLDPNSEQPDDRRLQRWLSRHGQRGAAVRLANRNLRIIWVLLQSKDVYRRQPKDPREAAMAQ

SEQ ID NO: 389006 - protein, 404 aa, unidentified
MNAVGIDVSKGRSMVAVMRPMGEVAHKPFEVTHNHDSLLKLVQQILALGNNTRVIMEATGHYHEPVAAVLHHYGLFVSVLNPIVIKQYGAGSVRKVKNDKKDALKIAKYGLDNWLVLREHTPMDAIRQQLKLFSRQYNLHMKMATSMQNNLISLLDKTFPGVNDLFDSPVRDDGHQKWVDFVMDFWHCDVIAALSEDAFIERYRKWCKRKGYNFSQPKAEKIYNASWNLCPTLPKSPTTKTLVTSAVKGLSALMQQRAAVKTEVIALAKQLPEYECVLAMYGVGEITGAQLIAELGDVRNFANRGSIVAFAGIDPTVSESGSYNRESNSSSKRGSPHLRKTLFQVVSTYLKKSPLDEPVYQFLDKKRREGKPFYVYMTAAANKFLRIYHARVKNVLNQHDIAPI

SEQ ID NO: 389007 - protein, 359 aa, unidentified
MENKVNKKLDFTGQNIYIGLDTHLKSWKATIRIEDTFFKTFSQDPDSEKLSNYLKKKFPGANYFSAYEASFSGFSAHRELNKLGIKNIVVNPADIPTTDKERKQKEDARDSRKIAEQLAASKLTGIFVPDIKVEGDRAMLRFRRTLTKEIARNKNRVKSFLYYHGKTIPEQFADKKHWSKRFTKWLLELKLPSESARTTLTGMVEVVEFLRKKQYRILKEIKELSQTESYKTNTELLISVPGIGLITAMSFLTEIEDIARFNNLDKFCSFVGLVPMTNSSGDHEAVGNITKRQNKILRSLIVESSWIAIKNDPALMLAYQKLAKRMKPTKAIIRIAKKMLNRIRYVLREQKKYEYAVVK

SEQ ID NO: 389008 - protein, 457 aa, unidentified
MGHARARRIPAQLVEDEDYQLRHERVAGIDIAKAKADVCTRLPPQRDGGRRASRLEEVPARARDILALAGRLSADGVELVVMESTSDYWRIWFYLLEAVGLRVQLVNSSHARQLAGRPKTDRLDAQWIARLAEMGLLRPSFVPPPEIRALRDLTRTRLQLVRDRTREWQRLEKLLEGALVKLSSVVWSLARTKTARDILEAVAGGELDPKVLAALASGQVKGGRGAIEQALEGMQVRDHHRMLIRVHLDHITLLDRQVSAVEDEIEAALDAIPAAWGADADGVLSPAPGEAAAALPAVERLAEIPGVSPALARAIIAETGLDMTRFPTPGHLASWAGLAPVSRQSGPRARKPKKGQGDVYLKGYCTQAATGAASTDTFLGERLRRLSRRLGGTRARCAVGRSILVIIWHLLADPGTRFTDLGPGWHADKADRDRKIRAHVRQLQALGLHVDLSEAAA

SEQ ID NO: 389009 - protein, 399 aa, unidentified
MKKAEVIKENLTASTWRELETNGKFDKNKKLSFISDDMLILGCDVGSETHYMRAIDTRGRELSKSAYSFNNNQEGFQSAKEWAVRIAAEHDKSQIVLGLEPTGHYWFCLATWMITNGISVVQVNPYAVKQTKEVEDNSQLKDDRKDPKLIANLVKDGNFGMPYLPEKIYAELRRLSMFRDQLNEDRIRTINRMHREMKIYFPEYKDALGKVDGAFSLELLKEAPFPEELTALGEEGIRQIWHAAKLRGRGYSRAREILQYAKASVGIKDGSIASKAAVKWFVQKIMELDVELAVIENQINQKCQEIPHTGNVLEISGIGENTLSGILAEMGDISRFDDVKEIQKLSGLGLVACSSGKHKGETKISHRGRKRLRYWLFQAAKSAVAHAEEFKELHMYYTT

SEQ ID NO: 389010 - protein, 318 aa, unidentified
MNTITKQKINVGVDTGKSQLDIYIRPLDIFFSVENNEIGIKEAIVQLKKYQPERIVVEATGRLEMPFAMACAEAKLPFVIAHPVHIKRFAGAIGRRAKTDKLDAKLIAHFSEVIKPDLTQLKPKAMRAMSDLVTRRNQLLSMQTMEKNRIQIMPKDLAMTIKPILTALSNQIKKVEEKIMKMIESTPEFKAKDQLLQSMNGVGKVAAASIISNLPELGYMTNKQAAALVGVAPINKESGRYKGHRKIQGGRHQVRTVLFMAVMSAIQSNPVFKSYYGKLVSGGKPKKVALIACVRKMVIVLNSMLRDGVMWEAPKALN

SEQ ID NO: 389011 - protein, 391 aa, unidentified
MFLLGIDIAKLNHVASCIDSSTNEVVFSNFKFKNDFKGFSALLNKIKSFDAKNLIIGLESTSHYGENLINFLFIHDFKVALINPLQTSDLRKANIRDAKNDNLDSLNIAKSLIFSKLNFVSEKNIDCFSLKKLTRFRTNLIKQRSKAKIQLTSLLDLLFPELQYLFKSKIHSKAIYSLLKKYPSAEEIAALKDDEISNLLYASSKGHFKKEKSIELKSLAKTTVGIKDTSISLHLIQLIELIELYTKQIKDIEIKITDIVNNLDTTLLSVPGISVIACAIILGETNNFENFSSSKKLLAFAGLDPKIRQSGNFSAASCRMSKKGSPYLRYALIFTAWNIVRHSEKFDKYYSLKRSQGKSHYNALGHVAHKLVRILFTLIKKNISYQEEKLE

SEQ ID NO: 389012 - protein, 403 aa, unidentified
MVAVMIGVDPHKGSHTAVAISPAEEPLGELRVRACAGQAERLLAWAAAWPQRTWAIEGASGLGHLLAQQLLAAGEQVVDIQPKLGARVRLLATGAVNKNDPNDARSVAVAALRSPARRQVQPEDHAAVLKVWAKRHRDLGRARTQVVCRLHAVLCELVPGGVSKRISAPQAGRLLEGIRPAGAVGAARCELAAEFLADLRRIDAQMRDAKKKLTIAVRASGTTLTSVFGVGPIVAATVIGDVRHVSRFADRDHFAAYNGTAPIEVSSGRRKIYRLSRRGNRRLNHVIHMAAVTQVSHRHSDGRAYYERKLAEGKTPKEALRSLKRRVSDAVFAQLQADARRAAAGPALREPGRATGERLHRPRGRLTPPGTGSSAKPLPGPATTLRPQPSCRSGRNEKLRRTT

SEQ ID NO: 389013 - protein, 405 aa, unidentified
MLFVGDDWAEDHHDVYLMNDTGDRLASRRLPEGLAGMRVFHELVAAHAEDPAQVVIGIETDRGLWVDALTAAEYRVFAINPLAVARYRDRHHVSGAKSDPSDAKLLADLVRTDRHNHRLIAGDSGTAEAVKVLARAHQNLIWARTRHTNGLRSALREYYPAALEAFEDLADRDALAILGRAPTPADAQRLSVSKIRSALKAAGRQRNLDTRALQIQAMLRTEQLAAPAAVTAAFGASTRATVGIIAELNRQISDLAAELATHFEAHPDADIYRSLPGLGVILGARVLGEFGDDPNRYTTAKCRKNYAGTSPLTVASGRKRAVLARHIRNRRLYDAVDQWAFCTLQASPGARAFYDQHRAAGDLHHQALRALGNRLVGILHGCLRHHTHYSEHTAWAHRAQTPAAA

SEQ ID NO: 389014 - protein, 316 aa, unidentified
MQTPLDIGVDVAKNEVVVACAANTFAAQAIVNRRAELRAWLRSLPQGSRIGLESTSTYHELLADLAHQQGFSVFVLNPRNTRHYAQGVGQRAKTDRVDAQVIARYLAREYAQLHPYQPPTADQRRIDQLLRRRAKLSTIRAMLRQSLSDLDSCGTEIKAVFAKFDALIKKIDLTLARLNAASPERLQTQQHLQSIIGVGPIVGISLSNVLQRIPFRNADAFVAFVGYDTRPEDSGQRRGRRRLSKRGPAELRRLLFNAAMSASKTGPWNPIYRHYRDKGLSGTAALCIIARKIARTAWSISKYKTTFDPKRLTCQP

SEQ ID NO: 389015 - protein, 350 aa, unidentified
MEVVYECCCGLDVHAKRVVACLITKGHKEIRTFATITDELLQLGDWLSGVGCTHVAIESTGIYWKPVFNILEGLLTVILVNARHIKAVPGRKTDVRDCEWLADLLRHGLLKASFIPPPEIRELRELVRYRHTVVTEHTAVANRITKLIESANIKLGQVASEVLGRSGRLRLRALAAGETNAETLAEFAQGKLKNKKAALRRALTGSLTPVQRWVLTELLTRAEELEAARGRVETRINEEVATCTDPFVPEAVELLESIPGIGQRTAQTIVAEIGVDMSRFPSANHLASWAGVCPGNHESAGKRKSGHPTKGNKSVRTILTEAAWTATRAKETFLHAKYHRLAKRMSKQKA

SEQ ID NO: 389016 - protein, 407 aa, unidentified
MDLLKTVFGIDVSSRKSNVCIMVNGQKVNDYAISNDMVGFNRLLGDLKQVTKPQIIFEATGVYSRRLQAFLDMHELRYVMMNPLEAKRKTKDDLHQNKTDKLDALYLAKLQSEHPQRLAYVQNKEYQELMANNRIYEQASHDLITNKNRLHKAVQLTFPEIEHLLANPRGKNYWSIALRFPHPDIVLETKEADIIDFLKGLSGIGKKRANDITQNLIRLAKVACPAVKKNSAHIRGLKMAINNILSAEEECQTALQEMAKLAPKRDLEILTSIPGIGENTALRIISELGDIRRFNNPSQLNAFVGVDPQVYESGNLTAHLSISKRGTAIGRKVLYLAINQIQSAKKVGNPCHIADYYEKRKRSSETASHKKAAIASIHKLLRTIFALIKNDQLYSYDVAKHNQRLLS

SEQ ID NO: 389017 - protein, 367 aa, unidentified
MGVDGRGKGWEVGAVLPGVVRRPRRSLPARDMAALLQQIERWKAEVLRAGRTVCRTVLAYEAGRDGFWIARYLLACGIEVQIMHPASIPVERRGRRVKTDRIDLDMLLRTLLAWLRGEPRVCSIVRIPSEAEEDMRRPERERERLVSERVALENRIENLLCLHGITGFRPRLKKAAVRLDELRSAAGTPLRPQLMAEVKRLMVRHRLLSEQLSEIEAAREQTAMAAEPDHAVQQIQMLTRLVGLGLATATGLTREVFCRSFADRRAIAGFVGLTGTPFNSGGSEREQGISKNGNPRVRRILLQLAWRWLRFQPESALSCWFAERTGGAKGRIRKIMVVALARKLLVALWRYVETGELPAGARLAAAA

SEQ ID NO: 389018 - protein, 356 aa, unidentified
MNGLKHQKEKRSMDHFGGLDVSVKETSICIVDDTGKIVKEVKVASEPAALLKVLGNPSYRFKRIGLEAGPLSQWLFSALAEAELPVICVETRHMQAVLKAQINKTDRNDARGIAQMIRVGLYRPVHVKTLRSQKLRMLLTHRKLLQSKAIAIENDLRGTLRNFGLKVGMVGKVRFEARIQELVENFPDLSVLVEPLLIVRRALREQVVILHRRLLAIVREDEVCRRLMTTPGVGPVVALTYRATVDVPARFRKSKSVGAVFGLTCSRYQSGEIDWSGKISRCGDEMMRTMLYEAAQSMMHSKKWSWLKAWAMQIARRRGMKKAIVALARRLAVIMHRIWVDGTEFRWTREQAAAAA

SEQ ID NO: 389019 - protein, 362 aa, unidentified
MLYLGCDVHKNYTTMSFVTEDGKVADTSSFYNDIEELKNLLKKFPKEEFSAVLEAGLNWGVIYDMLDSLEEVKNVTLAHPPKVKAIASAKIKTDKIDSKILGQLLRTDLIPEVWVPCKETRILKDIVRFRAFTVRIKTMIKNRIHDILRKSHVNPPEVKDIFGKYGRMWLEEIELSDRRADKLLRYHLKLKDTFEDMEKELKKWINKEMKTNEDLKLIKTIPGIREVFGPIIVLEIDDINRFPDPAHLHSYSGLVPSTHVSGNTSYHGRLIRGNRWLRWAFIEGAHTSVRVSPYFRKHYDSVKRKAGSQAASVASGRKLATIVYKVLKEKRPYIEEYRIKQNIGRSPSVRPSGGITSRSFQE

SEQ ID NO: 389020 - protein, 356 aa, unidentified
MSMVAHTHPFVIGVDAHARNHALAILACPTGEVLDEGQFPATGAGLQRAVDWVARRTGGDLDTLWVVEGVGTYGARLARAAADAGYSVAEAARMNARANRGVGKSDPLDACRIAQAVLPLDVAQLRRPRTDDGVRAAVRVLIASRDHISVERTAAINALTALLRVAELGVDARRALTGGQIALVAAWRTREEALATRVARAEAVRLAKRVLAADQEIASNAKQMTALLNSSPARKLLDQPGIGPVTAAVTLAAWSHPGRVRSEAAFASLAGVNPIPASSGNTVRHRINRGGDRRLNRALHMAVVTRMRIDPATRAYVEKRTAEGRTLREIRRCLKRYLARQIYRHLNAASDTLLAA

SEQ ID NO: 389021 - protein, 322 aa, unidentified
MAMPVTVSLPIIGVDVAKDELVIYHAEADLLESIPNNKTAIKKWLKALPGKVAVAIEATNVYHLMFADLAYEFDCTLYMVGGYELSHYRKSVNIRAKTDALDAKLLARYLKNENQELRPWSPPNALYRRLISLFRRRAAVVHARVSLKQSWANEPLLKTAINEQLKAMERLELLIEKTICDQLEEAGLKGQLTRCMQVEGIGPLTGARLITAFQRGDFRNSDAFIAFLGLDLRVSKSGQKDNRRSLSKRGDPEARRLLHNAAMSARRTAAWKDVYEGYIGKGLRTTQVLVILARKLTRIVFALLKGQDEYQPKVSQWASLKP

SEQ ID NO: 389022 - protein, 405 aa, unidentified
MFVGIDWASTEHAVCVLDQTGTTVRAFRIPHSAAGFDDLVARLRRLGAPAGLPVALERPDGRLVDRLLEAGHPVVPVRSNAIKAWREGEVVSGAKSDAGDAKVIAEYLRLRHHQLRTLTPFSDATRALRAVVRARGELVRQRVAAINQLTATLDAFWPGTKAVFPDIEREIALAFLQRYPTPESAAGLGEQCMAAFLTRHRYCGRTPAAELVARLRAAPAGLAGGAEATARRDAVLAFVGVLRALNQAIRDLDRSVIARLGEHPDSKVFASLPRSGQINAAQMLAEWGDCRDAYQSPEAVAALAGIVPVTKQSGKHAAVSFRWACNKRFRNAMTTFAHNSRLASPWAAKVYADAIARGHDHPHATRVLARAWVRVIWRCWVDQVPYDPVKHAAAQRLAEEEATAA

SEQ ID NO: 389023 - protein, 438 aa, unidentified
MTVTVAIPFYKVVILMMKLKYPICCGLDVHKNVIVATIVITNRDGVSEYRQKSFSTINSDIQKFHIWLIENNCYHVCMESTGKYWIPIFNYLEKDIEVCLTHPKYVKAIKGKKTDKKDSKWIADLYKFDLVRCSFIPPKDFRQLRELARYRFKLVCMKSSEKNRIQNCMTVSNVGIASVLSDPFGKTATEIMSYLLEHTADSIDEKAVRKLIKKGAKAKSDEIIEAIRGCNIETDQAKKLELALGHLEYLDGMITQTEVELYVRIKPYYEFVEFVSTMPGMTELSSTIVLAETGVDMNIFDDAKHLCSWCGLSPSNNESAGKKKSVRIAKAGAYLKPMMVQCALAAIKNKKQPYFAIKYGRIKKRRGHKKAIIAIARMMMVCIYHMVSEKKPFTPADYEELMKPQNHVERVVLNENNVFAYLESLGYDSSKLVKRNDN

SEQ ID NO: 389024 - protein, 321 aa, unidentified
MKKIEPNLSENPFIGIDVAKDNLEVFNDVSFQRVVCPNRTRDLDRLARDLKKISPKLIVMEATGGYETQAAVAFSKAGLPYAIVFPTRVRQLARGLGIIAKNDEVDARVIAYYGRIGGIQPKPLESNELRELEAFTTRRRQLVEMRQMEENRLDTAHPSMRKEIKEHITWLSRRIDKLNKEIDRRIELSKVWNEKRKLLMSVPGVGPVLASTLITELPELGLLSNRRIAALVGVAPFDRDTGKTHGIRFCKGGRNSVRRVLYMATICAARFNPVIKTFYDRLCEKGKRKKVVHIACARKMIVMLNAMTRDGLEFKSSALDS

SEQ ID NO: 389025 - protein, 355 aa, unidentified
MDSAKYIGLDVHKESISIAVLNAVGKIVMECVIETNATLILQFLRGLRGELYVTFEEGTSAAWLCDLIQPHVTEVVVCNPRQNALLNVGSKSDRIDARKLAELLRGNQLKSVYHGEHGVRTLKELVRSYLTISKDAARVMTRVKALYRSWAIPCTGKQVYAPQHRAEWLAKVTVPGVHRRAEFYFQQLDALRSLRQQVRRELLSESQKHPAWELLCQIPSMGPIRAAVLIGIVQTPHRFRTKRQLWTFSGFGIETHSSADYRYVEGQLRRTNRPVSVRGLNANHNHDLKNLFKAAAIVAAHKPGPFQEFYAALLVKGIRPEMARLTLARKIAAITLHLWKKGVRFDAQYLTSQAA

SEQ ID NO: 389026 - protein, 346 aa, unidentified
MLADELDYVVGVDPHRDTHALAVVEVRSGGVVFEATTLADADGYACVLRLADQHAPGRRAFAVEGTGSFGAGLTRFLSGEGERVLEVGRLRRERQSGKSDALDAIRAARSVLGQTRPARPRAGGEREALRALNAAREGAVTARRAGLCQLRGLLVSAPEPLRAELRSLTRAQLLRRLAAVRPERRQDPELRGTLLALRALARRVKTLTVEEGELAGEIETLTRKLAPQLLDQPGVGPLAAAQILISWSHRGRVRSEAAFARLAGCAPIPASSGQTIRYRLDRSGDRRLNRALHMILVTRRRAHPPTIAYINRRIQEGKSRREASRCLKRYLARNLYRLLEHAPMPT

SEQ ID NO: 389027 - protein, 412 aa, unidentified
MKQIRDRVAGLDVHRDNVVACCRVQDPDGQVELSKRSFATTRKGLGELAAFLSDHAVGTVALEATGVYWKPVYYALEGLFDELWLCNAQHVKNVPGRKSDLSDCEWLADVAAHGMVKPSFVPPPEIRELRELTRYRKTQVDARGREIQRLEKVLQDAGIKLTSVASATWSASSREMIEALVAGQRDPAVLAQMAKGTMRKKIDRLEEALAGSFGPHHAIVCRRIVDHIDFLDASIAELNSEIAARLVPFDAAIRIITSITGIAQTTAEVIIAETGADMTRFPTAGHLCAWAGVAPASHESAGKRRPAGTRHGSPWLRRALIEASRAGARSKGSYYSAQYTRIARRRGPNKAAVAVAHSMLDTTWHLLTTGALYEDPGHDYFQRWHDPDAEAKRLKRRIEQLGYTVTLTQQAA

SEQ ID NO: 389028 - protein, 387 aa, unidentified
MKTNQIKPIHDRNTSTPSPGQSNPAVAAAPAPPAPVRHVFMLGLDVDLLNVVTAIQCDRGAIALAQKFSRAQLLAWVQKQTAAGHEVHTVYEACGFGYTLHHALVAAGAHSLVTTPMRLSPERRRKNDRLDARALCVRLSRHREGHAHELKPIRIPSAAEQQRRELGRQREFFKRERGRLENHGRALRIEFEHETLPAGWAGPRKWKQIAPQCSEFVRGQLEPVVLQIRACQARMQELTARIQATVAQEKIPTGLGALTVALLEGEVCDWKRFRHRKAIGSYTGCCPSEHSTGGVQRFGHIDRHGNKHVRVLLVEAVWRLLRWQPDWHARVKYLQKLKHGASLKKKIAVALARQLAIDLWRWRTGRCTAAQLGWTVESAKDEAGTAQ

SEQ ID NO: 389029 - protein, 323 aa, unidentified
MSSFVGVDVAKNTFDIATHLPNGKHKTKAKLANDTKGFKEFETWLQKQVEPSALIVLEATSVYHLELAEFVYNKGYRVCVVNPATTHAYAGSELRRIKTDKSDAKLIADFAREKNEKLKLWAPEPLKYRQLKAMVRRLDDLQEMEQMELNRLEVSDEKVKASINSVLRHIEKEITETHKAIKKHIDDDPDMRQMRDLIVTIDGIGQKTIERLLAELGDLRKYDDPRKLVAAAGLNPKLHDSGLLKGRSTISKIGSVRVRAGLYMPGLVALQHNEAIKAMKDRLKANGKAPKQIICAAMRKLLHFVYGVLKSGQPYDPKLALAQ

SEQ ID NO: 389030 - protein, 494 aa, unidentified
MATGESTTTKQAQQRKAYRRRKARGQARAARAQEVEAARVEGLPVTQAHAAGIDIGSRSHWVCVGCCGDDRDDLIQEFPAHTEGLHQILAYLRQHSVTTVALESSGVYWIPLYELLEANGFEVLLVDPSYTKQVKGRPKTDRLDCQWIYRLPSVGLLAAAFRPDEKTCQLRSYLRQRANLIRYGGQHIQHMEKALEQMNLKLTEIVSDITGVTGRAIIQAILKGTRDPHKLAKLRNRRCKASEAEIAQALNGSYRDEHLFALRQAYEAWQFYQKQVGAVEEQIEQQLGRMKQDRALPPLKPRPRNGGRKPNQPRFDVRSALYYVVGIDLTEIEGIGEQTALTIISEIGPEVSRFATVKHFCSWLGLCPQLQKTGGRVRSSRTRPGVNRAAVAFRLAANSLYASKGALGAFLRRQKARLGAPQAVTATAHKLARIVYLALKHGLAYVRQSQEEYEVRLREQQVKAVKRKARQLGLEVIDKQASAETADAETAARC

SEQ ID NO: 389031 - protein, 351 aa, unidentified
MMKKVVKQVLGVDVAQKELVVTLGRMHDDFSIELYAYNVFKNNDTGIIALVKWVQKLTISEVSVRFVMEATGVYHQKFAYYLEEHGFEVSIALPNKISSYIRTLEIKTITDKTCSEAIVRFGLERNLNLWKRPKEVYKQLQQLTRERDQLVAERVVAKNQLHAEESEAFPNKNSVKRVKARIRFLTQQEKDIKQDIDAIVICNQEVKNEIDNICTIPGVGRLTAVIVLAETNGFELIRNKRQLVSYAGLDVREKTSGTSVKGKPRISKKGNRNLRRAMHLPALGAIKHNETHKAIYARLVSKCGIKMKGVVAIQRKVLELIYVLHKNKTVYQVDYEETKREQLQLAAPFTN

SEQ ID NO: 389032 - protein, 327 aa, unidentified
MFFIGIDVSKAKLDCTLLTAEADKRKTKVVVNTAAGVQALLAWCAKHGAQPAQLHAILEPTGLYHEQAATALHDAQVRVSLVNPAQARDFAKALAMRSKNDALDSYVLARYGQTLSPALWHPAPLHARQLRALLTRREALGKDLLRELNRKEKSQFSPSAPLVDGSIDKAIAFLREQIKQIERAIDQHIDNHPDLKQDRELLNSIPSIGPQAGNAILAVMHNRRIDSAQTLAAYLGVVPVQRQSGSSLNSCARLSKAGPSQVRATLYMAALVGTRHNPHIRALYQRLLKAGKSKKAALGAAMRKLVHLCFGVLKNRIPYQPNYAMNA

SEQ ID NO: 389033 - protein, 317 aa, unidentified
MTKIICGVDVSSTSLDAFISPSGPAGSFRNTAEGIAELAAFCRQQSVELVAMEASGGYEKQAFALLWAEDIPVALLNARATRDFAKGMGMLEKTDRLDARVIAWFAAVKGSVPSAPASAAQQRLKALVTRLRQLTELQAAQRNQRRLVSEVTVLESMAELLKLLRSQMRRLEAEIAELLGSDPLWQKLDQALRSIKGVADRTVAWVMAEMPEIGTLSNKAVSKLAGLAPLADDSGKREGKRMVRGGRRHVRAILFVVASVVRRHDSDFTAFHQRLSAAGKPLKVIRIALAHKLLVRLNAKARDARQAFAAASSCQNA

SEQ ID NO: 389034 - protein, 403 aa, unidentified
MHYARAFDYRGIEYSKKPFKFSNTEAGFATFKEWILDLKERHEKDKVVPGMEPTGHYWFNLGKFLQDNEMKPVLVNPHHVKKSKELDDNNPTKNDRKDPKVIAGLVREGRYMIPYLPEGVYADLRTASNIRFQLQAELTRIQNRISRWFNIYFPEYKTVYGKPDAKSGMLILKAAPLPEDILTLGIDGVNQIWRDAKLRAVGKARAKTLIEAAEHSVGSKEGAVSARMEIRMLLEDYESRNIRLQEVMALIEGLVKQIPMAEKLLEIKGVGIRTVSGFLAEVGDISRFNNPKELQKLAGLALVENSSGKHKGETTISRRGRKRLRYLLFEVAMSLVSKNQEFRELHNYYTTRRLNPLKKMQSLMAIAAKLIRVFYAMLTKGVDYDPKKMVSDIKRPAVYLQAA

SEQ ID NO: 389035 - protein, 414 aa, unidentified
MALKIVYPICCGIDVHKTFVVACIASTIKGVTTYKRHRFSTYTKGLNELSQWLCENNCKDVCMESTGKYWIPVFNVLEAFCNITLAHPKYVKAIRGKKTDKKDAKWIADLFKHDLVAGSFMPPLEIRQLRDLMRYRFKLTNFMSSEKNRLQNSLTVSNIQLGNVVSDTFGKSSMNIIEKLLKNPLDTSFDIEPLIHGSMKSKLPELELAIDGFITPEQAEKLKVMKQHYEDLQSRKADLEKIILSLAASYTEEMNLILTVPSFKNIFSAIAVVSEIGVNMDVFPTAKHLCSWAGLTPTNNESAGKKKSVRISRAGCYIKPLLVQCATAVVKSEKHPEIRNRYLKLKKRRGHKRAIIAIARMLLTAIYNILKKKEPYNPNLYKKADVLPVNREITVEQALLLAKSQGFRIITVAT

SEQ ID NO: 389036 - protein, 379 aa, unidentified
MMRFYNQPHRFYCGVDLHARTMYLCILDQAGAVVLHQEVSAEPTAFLEAIAPFRDGLVVACECLFCWYWLADLCQAENIAFVLGHALYMKAIHGGKSADDRIDSQKIAQLLRGGNLPIAYVYPKGLRETRDLLRRRMYLVHKRAEVVAHVVNTNSQYNLPSFGKKLIYARNRQALKITDRFADASVRKSIELNLRLLDALDDLLGDVELYLERTVKLDDADTFYRLRSIPGVGKILALVFLYEIHDIHRFASEGMFLSYARLIRPRKTSAGKVKGGGGAKIGNAHLKWAFSEAACLLARESDQAKRFLARQQKKHGKPKALGILAARLGRAVYQMLRQKKAFDPKRFWNGEPGVTPAQLHKAAVQRPRRAKGSSCVLEA

SEQ ID NO: 389037 - protein, 401 aa, unidentified
MSVHELRVALDIGSKRHRVGIATDDGKIVEEFDITHDKAGFELFFRRVEARRNELPVVVAMEGLNGWARPLDRMIQKRDYELLNVNNVKLARFKEIFPGPAKTDKIDTRKTLELMHMRKVLPLAKTVLHRVGDTPVENEQLKRYTRRRRQLVDDKVRVLNRLQSDLQAVSPGLLEITGEAGNLWFLHLLTCRENLSKIAGMRRPSLLKIRGVGQTYATKIEAWQGTATFSDEVDWVGPMIIADAQRVLDLIRQVQAIEKQIVTIGASSTIATRIETIPGFGPLSAATLAGEIGNLERFEAETSLALYTGMTRLDNSSGQFTGSKNTRQVNTHAKAAMMVAVARHIDNVPESKVYYDKKKAEGKTHNQAVRALGRHLIRVIWSMLKNDRDYLPKSERLSKSA

SEQ ID NO: 389038 - protein, 387 aa, unidentified
MKKHTTAKMRRRALPKRVRIQFAKMAAEQRLTIGLDLGDRYSRYCILDQAGEVISKGELPTTRTGLNTLFEKMPSSRVAHEVGTHSPWVSRHLAQLGHEVIVANPRQVALIGRSTRKDDGIDAEKLARLARLDPKLLYPIRHRGEQAQADLAVIRARATLVEARTKLINAARGLAKSLGERLKACEGEAVDELTAEGLSAGLRQILQPLLKSIGQMSEQIGEYDRQIEGLASRYPEVELLQQVYGVGTLVSTAFVLTIEDPDRFRHSREVGGYLGMVPKRRDSSQSEPELGISKEGDRLLRALLVQSAHCILKRGAPDSDLRRWGRAKIEQAEKQVRGRKRGGKSVKKRVVVAVARRLAVLLHRLWVNGEVYEPLYNHRPGTTEIAA

SEQ ID NO: 389039 - protein, 352 aa, unidentified
MKIIGCDFHPSFQQISLLDLESKERVRRKLMHATGEAERFYRSLQGEGVRVGIEASGNTRWFQRLLEELGHELLIGDAGRIRAAELRRQKTDRRDADHLLELLESGKFPAIWVPSAEQRDLRQLLLHRHKLVQMQTRIKNQLQHVAMNEGLQKKRQLWTERGQRWLKELSLPPWTERRRQDLLLLLQGLEPAIQELSQAVEQQAEQDERVRLLMTHPGVGPITGLAFVLVIGDVQRFSRSREWASYLGLIPCEDSSGTRRRLGAISKQGNTLLRTLLVEAGQSAARLDPELRRAYQRLCHKKQHTGIGKVMVARKLAVRLYWMLKTQQPYAPARTQSSPSHPVSTREGSSSL

SEQ ID NO: 389040 - protein, 309 aa, unidentified
MEHFIGIDVAKDRLDVHTRPGGEVFAVARDSNGLAMLVERLQRLAPALVALEATGGYETVVASALGAAQLPLAVVNPRQIRDFARATGKLAKTDRIDAAAIAHFAEAVRPPARPLADAEARALGELVARRRQVIEMIIAERHRRRMASQRRVIRAIERHLALLQAELSELEGDIDDAIRKSPAWQADADLLVSVPGVGKVTLRTLIAELPELGHLNRRKIAALVGVAPINCDSGTLRGRRTIAGGRPAVRTALYMAALVASRANPVIAAYYAKLRAAGKTGKQALVAGMRRLVVILNAILRDRKPWQPA

SEQ ID NO: 389041 - protein, 394 aa, unidentified
MACLLIGSPGVQPVKEVRTFRTVTRDLEALRDWLRAVGVTHVGMESTGVYWRPVYAVLEGHFELIVGNARHIRNVPGRKTDVKDAEWIADLVRHGLIAKSFVPPRPLREMRELLRYRRKLTESQAAERNRLLKLLETANIKLASVMSDVFGVSGRAMLRALIEGRASVEAMADLARGQLRRKRSDLILALEGRMEEHHRFLLATQLRRLEAIEQDIATLDLRITERLEPYRMPHALLMQIPGVDWLVAAVLIAEIGVDMSVFLSVYHLSAWAGVCPGSQESAGRQKSGRARKGNVHLRTILVGAAISAARTKGSYLKDKFHRLKARRGAMRAALAIAHKILVSAYHMLAKGLPYRDLGEAYLDQISQTRTVANLKRRLERLGYHVTLQRTTQAA

SEQ ID NO: 389042 - protein, 342 aa, unidentified
MGEAPVLYGGLDLHGDNVFCTLMDAARNVRFEQRFPNDLFTITEGLKPFRKLISKLAVESTYNWYWLVDGLRKLKYDVRLANPARMQENIGLKAANDKTDARFIARQLVNGILPEGYIYPEETRGVRDMLRRRMRLVHERTSEWLSLISLIARHTGQDMNIAEVEGCDLEEVLKGQPHAWVMAQASERHIVFLNGEINALEKEVLRELPDKETYKRLMTVPGIGPVLARTILLETGSVSRFKEAGNYASYCRAVSTIHTSNGKKKGEGNGKCGNRYLAWAYVEAANCASRFSPEMHAWFQRKQSRSGKRVIAVKALANKLAKACYFMMRDGKDFDVKKLTGA

SEQ ID NO: 389043 - protein, 347 aa, unidentified
MRFYTQQHRHYCGIDLHARTMYVRIIDQDGTILVEKNIPARPRPFLALIAPYRDDLVVAVECMFTWYWLADLCHEEGISFVLGHALYMKAIHGGKAKNDRIDAGKIAALLRGGMIPRAYVYPREMRATRDLLRRRLHLVRHRGRLLAHIQNTNHQCNHDAFGAKLTYKANREGVAERFEDPSMRKSVEVDLALIGHYDGIIRDLELFIIRMAKQHDADMFHRLRSITGVGKILALTILYEVHNISRFETVQQFASYSRLVKCSRESAGKRMGTGGAKIGNVHLKWAFSEAAVLYLRANPKGQKYLARLTGKHGKGKALSILAHKLGRATYYVMTRSRNFDGKKFLAA

SEQ ID NO: 389044 - protein, 355 aa, unidentified
MNHLSKLDFTNQPIYVGLDVHKKSWTVSIYSQHFEHKTFTQPPKVDKLVTYLKRTFPGAAYHSVYEAGFSGFWIHDQLKQQGIRCMVVNPADVPTKDKEKTAKTDPVDSRKLARSLRNGELESIYVPSRIKVEDRSLVRTRQSMVRKQTRCKNQIKSILSFYGIPIPEDMENRRWSRRFIHFIEQIRMEKTSGDFALKAHLDELLHLRGIIARLNKAIAQLAKTSEYHLQVKLLKTVPGISTLTAMILLTELAEISRFKTLDKLASYVGLIPKTHASGEKQLQGALTKRRNSQLRALLIESSWVAVRKDPALMLSFTRLSIRMKKTKAIIHIARKLLNRIRYVLKNQKPYVPAVI

SEQ ID NO: 389045 - protein, 342 aa, unidentified
MNNRTVISADIAKNVFQCVQFKNDRQIGKNKAYKRAPFAKLITSGQPGKLVMEACSGAQHWARMAKAHGHEVVLIPPRVVTPYRQGQKTDANDAFAIYEASQRQQLKVSPHKTVEQQALGVLESVRAHYQSRKNKLGNAIRGHLAEFGLIIPKGYKSLRHQLPLILEDAENGLPMSVRMAIDIYWQDWQSAHQKVIALEKEKLVALSQIKPAKEILKIEGIGPVCTSGLICALGDGSVFNRGKEAAAFIGTSPKQHSSGGKEVMVGISKTSGHKKLRSALIQGARSVILKLKAKKEPSSEKERWLVQLIERQGENRAAVALANKNVRTAWALLAHNREYIAA

SEQ ID NO: 389046 - protein, 390 aa, unidentified
MVYLGIDVGKSHHAAALLNSEGNTIATLPSFANTGAGFRKLLRFVSSHVSKEEELSVGIEATGPYWIPLCRWGRKQGWEVTVLNPLKVASLRNYGVRGSKTDRIDAVLVAHALRWEKRPPSDEPSYETLELRHLTRLRSQIIKDRTRISLRLISLLDTLFPELLTLFSKPISPSTLAILEVAPTPQKVVALGKENLTAILRKASAGKLGQERAQQIIDAAQRSVGVPSETLEEVTALIVAQIRLLGEQLTTLNRRINELYARTGLTLDTLPGVGTVLAATFLGEFGDVNRFKGRTQMVAYAGIDPKLRESGSHQGQVRMSKRGSPYLRHAIYLAAQTAARTDEYFQDILQRQLKRGKSKRKALGAVMNRFIHVLYAVWKDNRAYSPLTPS

SEQ ID NO: 389047 - protein, 369 aa, unidentified
MKNTIVHHEGAASLEAARTKVKRCGSIIKIGLDVHARIYVAVAQYDQLLPKPARRLAPSEFVPWVRQLVRAGHVVYVVYEACGFGFGLYRNLQAAGAHCYVIAPRKLDEQCTRVKTDPRDATTLCQRLSRYVEGNTRELAVIRVPSEAEEQARHVSRQREQLVRHRQKLEAQGRSLLVGHSLPSPAHWWKNQTWSRLTKLLPSWICLRLEVHRPALLTLEQQISALSAELEAAAPADVPAGVGKLTTVVMTREICSWERFRNRRAISCYTGLCPGEHSSGTKRVPGSVTKRGNPRLRVALVECAWRMVRFQPNYPPVKKRLSVLAKGARATGAQRKKAIVAVARHLAVDLWRVHTGRNTAAQLGLTIND

SEQ ID NO: 389048 - protein, 336 aa, unidentified
MTMTTIGLDLAKYVFQVHGVDAEGNVIEKRRLRRNQVIAYFASIPPCLVGMEACATAHFWGRELARLGHEVRLMPPQYVKAYLKRGKNDAADAAAICEAVGRPSMRFVPIKTEAQQAVLVMHRARDLLVRQRTQVINAFRGHAAEFGIIGAQGRWNVDRLLAAIREGQAVPEPARTIVEMLASQLVAISERIDEIDARILAWHKANPVSQRLAAIPGIGPLIATAIAATVADPAAFRNAREFAAWVGLTPRQKSTGGKQRLGRISRQGDQYIRRLLIIGAQTTLLRSKAARANPWIQSLLARCPRLKVAVALANKTARIAWALMAKGESYRPMASA

SEQ ID NO: 389049 - protein, 343 aa, unidentified
MQVSTIGLDIAKNVFQVHGIDKEGKVVITRQLRRGQVIVFFKKLAPCLIGMEACATAHHWGRELTELGHTVRLMPASYVKAYVKRSKNDAVDAAASCEAVTRPSMRFVPIKTIAQQAALMLHRSRSLLIRQRTQLINALRAHLAELGLIAAKGKDGVKGLVTIVIDGANSSQLPEPMRQALQPLVMQLAALQEQIGQIERSIHAQHRASDDSRRLETVPGIGVIGATALAATITDPSVFKSGRECAAWIGLVPRQNSTGGKERLGGISKQGDRYLRRLLVNGAMAVIRQARLHPDKYPWVTKLLAKKPAKVVAVALANKMARIAWAILAKGETYRAPALAAAV

SEQ ID NO: 389050 - protein, 408 aa, unidentified
MKVFVGDDWAEAHHDVHLMNESGDKVVAKRLPEGLDGIGGFHAMVAEHADDPSDVVIGIETDRGMWVQALIAAGYTVYAINPLSVSRYRDRHNVAGAKSDPGDAKVLADLVRTDRHNHRPVAGDSDDVGGLKVLARAHQNLIWDRTRHTHRLRNDLREYFPAALEAFDELGHRDAISVLAKAPHPDQAKALSIAQIRAVLKRGGRQRNLDTRAAEIQAALRTPQLAAPPAITIAFAATTRSLISVIGGLNDAIVELETELAASFEQHPDADIYLSLPGLGVTLGARVLAEFGDDPKRYDTAKSRRNYAGTSPLTIASGTKRAVLARHVRNRRLYDACDQWAFCSITTSPGCRQFYDQRRAAGDLHHQALRALANRLVGYLHGCLRTHQHYNEHTAWAHRQTSDLTIAA

SEQ ID NO: 389051 - protein, 377 aa, unidentified
MKNYITKYVGLDVHKNSIAVSVAESGREEPTYYGEISNSVESLRKLVKRLGKSGDLLSFCYEAGPCGYGIYRTLTQWGQACEVVAPSLIPRKAGQRLKTDRRDANLLARMHRAGELTAVWVPNAEQESIRDLTRAREDMKSLERRARQRLNAFLLRHDKIYQSGKSRWTQAHFRWLETVKFDSPVQQIVLQEYIDSVKTSQKRVTDLKNQMREALKTWTFRPVAEGLMALRGVSLITAMTILAELGDITRFESPRDLMPFLGLIPSEHTSGPTRRQGPITKTGNSHVRRVLIEAAWGYRFPARKTATIERRAEKTSIAVQAIAWQAQKRLCSRYRNLLRAGKEKKLVVTAVARELTGFIWAIACEIQGKAHGSKALA

SEQ ID NO: 389052 - protein, 363 aa, unidentified
MKQRLHAVQQAAANQAYAGNTIGIDLGDRWSRYCVVDASGSIVEEDRVRTCTDAMRNKFSKLPYTRIVIEAGTHSPWVSRLLEEMNHQVIVANPRKVRLIYENDRKNDRLDARMLARLGRVDVSLLSPVWHRSAEAQADLAVVRSRDALVAARTQLINAVRGMVKSTGGRLPKSTTAAFAAKIAGLVPMELKLAVAPLVKSIRVLSDQIRSYDAQIERLAEQKYPETRLLRQVKGVGPLIALTYVLTVEDPSRFRRSRQLGSFLGLRPEQRESGESAPQLGISKCGNNHLRWLLVQAAHYILSRLAPDSRLRRWGLQLASRGGKNGKRRAVVAVARKLAVLLHRLWVTGEVYEPLYGLVSEVA

SEQ ID NO: 389053 - protein, 311 aa, unidentified
MDQIYIGVDVAKSWLDIYHPTRGARRIENTPGDTRSFARAAAREGAWVIFEASGGYDRVLRDGLEAARASFSRVNPRQARDFARAMGVIGKTDRVDARMLATFGQRLQPPQTPPVSPTRQVLLAQITRRRQLVEMRKQEITRLQQTTDRDSRSDIKSLILLLERRIEKVETRIAEIIRSSPELAETDRRLQSVPGVGTVVAATIMAELPEIGTTDRRKIAALAGLAPIARDSGQRNGRRVIGGGRATVRTVLYLAALHASRHSTMFKAFRQKLQASGKPVKAALTATARKLLCVLNSMVADGTYFREIQPT

SEQ ID NO: 389054 - protein, 381 aa, unidentified
METLHSHCAGLDVHQKEIVVCIYIGNSETELTKEIRTFPTFTKHLFEMLQWLEELHITHLAMESTGIYWKPVFNILEDYFDITLANAQRIKNVPGRKTDVADAEWIAKLLRYGLIEKSFVPPADIRELRDLTRLRKKMIGNMTAEKNRIQKTLECSNIKLGSIISDVFGVSGRKLLTRLVEQGYVNSHEVEENIHGSMMPKASQITESLFGTLNPHQIFLIRQSWNHILFLEESIQQIEEKIDELLSPYPEQVELLLTIPGVKKHAVASIIAEIGVEMRQFPSAQHLASWAGLSPGNHESAGKKKNSRTTKGNPHIQSMLCEVAWAISRTRHTWLSGKYWSLAARRGKKKALIAIAHKVIKIIYHILDQRSGFIEYSKVLS

SEQ ID NO: 389055 - protein, 444 aa, unidentified
MSQKLLQQYRRCCGIDVHKEQVTVCVLPADGQQGEVVVKQYGTFTESLRQLRFWLQALKVTDVAMESTGVYWRPVWNVLEGYFRLLLVNPAQVKALLGRKSDRRDARRIAEFLQDRRLDASFVPPPEIRYLRELVRDRVSLVQETTRISNQIRDVLETANIKLGSVASDVLGQTGRRILTALAEGQWDAERLSWKAVGKLRKKEGELKKALTGYLTKGHEFRLGQLLKQLKFLEEHLVELDTEIRRCMEPYAEQVELLSTIPGVDRVVAWTLVAELGVDMAVFPDAGHCASWAGMCPGEKESAGKKQSVRLRKGNRYLRRALVQAGWAASRKKGSYLQAQFRRLLGRRGAQKAVVAVGHQILTVAYAILRDRVGYRELGANYYDQRNSERTKLRLMQRLMALGYRVELTPLAEGGEASEGAVPVVAGAVVEGARKRGRPRKEIS

SEQ ID NO: 389056 - protein, 340 aa, unidentified
MQLYFVGLDVHKQVIAYCVKTADGQIVSEGKIAATRAALDEWVKSLPGMWHGAMEATMFSHWIYWHLKPYAARLDMGHPARIKAICAGKKKSDKIDARTIADLLRSNLFPACFVISPELEALRQQLRFRRLIVEQQVLFKNKTAGLLMSAGIEYERRRLHGKRYFGELLETSEWIHQQLRPLLEFNRSQIETLAQMDQRLMRMLERHPQLQTRLEFLQRTEAVGPVTALTWALEVATPERFHAIKQAISYCGLASALRESAGQQKRGPLSKQRNRHLQCVLIECAKLAPLYNQKLREVYEKALQRGNRNRATLAVARKLVAYLLAADRAFFAGQSQAAAA

SEQ ID NO: 389057 - protein, 311 aa, unidentified
MELHTIGIDLGKTVFHLVGLNLRGEVVVRKKFSRKRLLHFTANLKVELIGMEACGGAHFLGRALREQGHEVRLMPAQYVKPYVKTNKSDYIDSEAIAEAVARPRMRFVPIKTDDQLDLQSLHRVRERWVMRRTAVINQIRGLLLERGITLRKGRCHVDAALPGILEDASAKLSGALRVLLAQLKLELPITATAVIAAIGNGAAFRKGREFSAWLGLVPGEHTTGGKQKLLGISKRGNSYLRRLFVQGARAVLQFREKQSSGLSAWLAQLTSRTHRNVAGVALANKLARMAWAVLAKNEQYRPPMLSGAATA

SEQ ID NO: 389058 - protein, 351 aa, unidentified
MMIIGCDLHTRFQQIAMLDTETGEIVERRLEHESGEALAFYAALPAPARVGIEATGYARWLERLLREQGHDLWIGDASAIRAARVRQQKTDARDAQLLLSLLVENRFPKIWVCSPAERDLWQLLRHRDKLVRFRTSVRNQLHALAMGEGVCRKKKLWTQRGRQELQALALGVWAGRRRRELLEMLDRLDGSIEELDQAVAQQAESSPAAVRLMQQPGVGPITGLALALAVGPIERFPNSRKLVSYLGLNPKENSSGGKQRLGAISKQGNSLVRWLLVEAAQTAARKDEGLRRVYHRLVHRRGRAVAKVAIARKLAVRLYWQLRLAGAQPSPPTRTQGSPCGPLVGATRPTP

SEQ ID NO: 389059 - protein, 396 aa, unidentified
MALEVPAALWVGFLTRCLLAGVLDCGVARKRREHIDPNQACPLRSPVFERKGNVMSVMIGIDPHKGSHTAVVVDLDEVVIDEIRVRATANQLGELQEWAAGYQDRCWAVESARGMGYLVSQQLVGAGERVIDVPAMMASRVRLLGSGKSQKNDPNDARSVAIAALRHPSLTVVSGEDHTRVLGLLAKRHRDVARLKNKAACRLHALLTELTPGGLATEMTVTKANLLLAGVEVTDEVTRQRVVIATELVDDIGRLDAQMRASKKRIQAAVVASGTSLMNIRGIGPIGAALILGAVGDIGRFPTPGHFASYNATAPIEASSGDRKRHRLNPKGNRKLNHALHIAAVTQLRYPNKGRDYYDKKLAEGKTSKEAIRALKRRISDVVYRHLVADTKQSIS

SEQ ID NO: 389060 - protein, 365 aa, unidentified
MIQETVVGLDVHADSIVAAILPPKSDTPEVVKLSGDLMQVRRLFRRLTQDGPVRSCYEASGAGFVLQRLLTYDGFSCEVIAPSLIPKKPGDHRKTDRIDAIMLARLYRSGHLTPVHVPDEDHEALRRLLRLRETYHAYCTATMHRISGILRNHGHVFKEGKSTWTKKHRGWLGELRQNLQGPLQTALAAELQHLEYLETEQSSFDAELERYAALPQYRKAVEALCCLRGVKILTALTLLVEIGDVRRFRSPRSLMAYFGLVPSEHSSGNREYRGSITKAGNVHVRRLLVEAAWNNRHNAGAALVLKRRRQGQPPEIVAIAMKAQLRLVNKFLRLDKRKHRHVAITAVARELCGFVWAILMTLPEH

SEQ ID NO: 389061 - protein, 309 aa, unidentified
MRIIGCDLHARQQSLAMLETATGEMVNLTLKHEGNEVREFYSQLPRPVLVGIEATGSMHWFLNLMDELGIECRVGHPATIRAAAPRRQKNDRLDADLILKLVAENRFPAIWLPTKELLDLRALVRHRHQWVRMRTRIQNALQAIALANGLRRGPSLWSYDGQAKIAFLPLLPHTAYRRSALQAMYQKMDEEIEKLTQQVAEQAGQRSGARRLMTHPGVGPVTALATDVFLGDPKRFADSKALASYVGLIPREYSSGGRQRLGGVTKQGSPLLRFLWGEAGAHAVRRNPELKRFYRRKLVQKGLGRRAWQ

SEQ ID NO: 389062 - protein, 365 aa, unidentified
METEYKWFVGIDWGDQSHQVCVLDRNRRKIGERSIKHDGEGIGELMSWVRAIVAGEPATMAAALEVPHGPIVEALLACGIAVFAINPKQVDRFRDRYTVNGAKDDRRDAYVIAMSLATDPHAFKKLSLESAFTLRVRELSRTLDDLNSERRRLSNQLRDLLVRYFPEVLALCPAADEPWLWALLALTPLPGKAKRLSATRIEAVLQMHGIRRISPADVRNVLQRDSLQIAPQSAAATAEHVRILIPLLQAFDIQYRHVFATLKSLMNEVSANQECEEHRTITLMRSLPGIGVVVSTTLVAEAGPVLAQADGRAFRCYAGVAPITKQSGKSCRVLMRYGCNLRMREACYHWARTSVQRDANSRSHL

SEQ ID NO: 389063 - protein, 339 aa, unidentified
MDITTIGFDLAKTVFQVHGADGQGRVVLRRKLRRGKVLAFFAGLPSCLVGMEACASAHYWARELHALGHEVRLIPPQYVRPFVKTNKNDAADAEAICEAVTRPTMRFAPAKSAEQQSVLMLHRARELLVRQRTMVINALRGHCAELGLIVAQGASKVEELVAIIEDPGDGRLPPLAREALGSLVEQLRSAQARIKTLEATLLAWHRSNEASLRLATIPGVGVITATALVATIGDGAQFRSGRQLSAWLGLVPRQHSSGGKPKLGRISKRGDGYIRRLLVHGARTVLRWRRAKPGTHPGWTDQLLARRPTNVVLVAMANKTARVVWALLRYERIYQPTSA

SEQ ID NO: 389064 - protein, 403 aa, unidentified
MNMNAVGIDVSKGKSMVAILRPYGEIISKPFEVKHTVSGIRSLIEQIQSIDGESRIVMEHTGRYYEPLVRELSKADLFVSAINPKLIKDFGDNSLRKVKSDKADAVKIARYTLDSWTELRQYSLMDEIRNQLKTMNRQFDFYMKHKTAMKNNLISILDQTYPGANTYFDSPAREDGSQTWVDFSATYWHVDCVRILSLNAFIDHYQKWCKRRKYNFSRSKAVEIYEASKELVSILPKDDLTKLIIKQAVEQLNTASQTVEQLRTMMNEAASKLPEYPVVMAMKGVGKSLGPQLMAEIGDVSRFTHKGALTAFAGVDPGVNESGSYEQKSVPASKRGSSTLRKTLFQVMDVLIKTKPQDDPVYLFMDKKRAQGKPYYVYMTAGANKFLRIYYGRVKEYLSSLPE

SEQ ID NO: 389065 - protein, 552 aa, unidentified
MVETVEQSKNQNAKKNQWNQAPNKARWKAVISELSASKDHFIEYLKWWDPDRTADLLSHEFYCGIDVHKKSWRAAIFGLDSDHFTDPIFGPVCEFEVNSQGRTALLEMLTHFRVKRVLMEVSGVYTYPIYDLLCSQTLLPDLQVYVMNPRQIPRDLNMIRKTDKTDAMRLARLASRSELLTTCYLENKEHRSVRTTMRFIKKKIEEKNRYENRLKGFLSGLGFVVDFSLSSQATVQFLKAWLDSRFDLLADFVDDLRNRGEEGLINAMGGYEILHDEFGFVSLNRNDRYVLGNYLSEVVLIHSQLETLKATSFNIMYNHPVYGDLYTRLLDVPGIGELNASIICSESGSFRRFPSVRKYQAYCGLAPTIMQSGETVRHGRSYKMSNRRLFFAYKQSAMAIVNMVKRVSPEKLDVQVPLYAYAKRLVDSNMVYLKAVHKVAAKLNRIVFSMAIRGHRYSDWYTPHVPVRQDERDEQLMRRLNRMKKEMSYLKGRTRRTLEKRYAIIPKAMQEALDQLETYSNNVVSILKRLEVQAQFETSILSLQEKLAIRNG

SEQ ID NO: 389066 - protein, 442 aa, unidentified
MAGSGMILIREVADAPVIMGISKPAGLKSPCGEVKIMNPLFVGIDVSSRNNVAYLMKPDGSKHSSFSVQNNLGGAKLLSERIVSALGSMQLSDVVIGLEATSIYGDSLVYALREDGRLGKFQRKIHVLNPKQVRKFKEAYPDLPKNDWVDAFVIADHLRFGRIAREVYMDDYRYKALQTLTRARFEVIQNLTREKQRFANYLFLKCSGMAQDKDIANSSSTTIALMERFETVDDLANSDLEELTAFVTETGRGRFADPAATAKAVRAAAKGSYRLPKTVNDTVNQAMSVSIASMRALKEQVKVLDKAIEQQFEIIPNTLTSIPGIGKVYSAGIIAEIGDIHRFDSQASVAKFAGLVWHKNQSGEFEAEHSRMIKSGNRYLRYYLLEAANSVRRCDSEFRRYYDLKFKEVNKYQHKRALALTARKLVRLVFRLLKDNRLYNRW

SEQ ID NO: 389067 - protein, 336 aa, unidentified
MLYVGVDLHRKASQLAVVDEKGELICNRRVLSDREEMLRVFGEVGRDQALEVAFEATYGWGWFADLLEDVGIPTHMAHPRANKAIASARVKNDAVDAKTLAHLLRTGLLPESWIAPPEVREARRLVRMRTSLVRIRSRLKNQVHAVLADGGFHPEGSDIFAGDLARLSKRLPTLTRQRVEANLRLIEELDEEVDLADAQIHKQFARDPRVRRLQPLPGIGILTGAIVVAEVGEIQRFPTARHFCSWSGLTPTEHSSAEHTRRGHISKQGSRWLRWVLVEAACVANRNPALAGFYAPIASRRGDKIARVALARRLATLCYHALRNPQGCRAFPARTR

SEQ ID NO: 389068 - protein, 346 aa, unidentified
MKSSPQLYIGIDVHKKSWSVNLRTDLFDHKTFSMNPSASELMRYVGEHFPGYHVKCCYEACCCGYTAFREFSKVGWEVLVVNSPDVPVINKQQIHKSDSVDCRHLCKQLQADQLRGIYVPDEKQEQLRSLFRQRNNLTKALRKIKCHIKGELLYYGINTPKCYDNNNWSKAMLAWLQSLPWKHKTGQSSLQSKLRHLHFVYYEWLQVSNELRAYTRREYKKDYYLLRSVPGIGPLTAIGILAELGDVRQFNKFDRLCSYVGLVPSVYSSGEKIQTRGLTPRSKQLLRSYLIEASWTAVRRDMALHEYYRSHAGKPSNKIIVKVARKLLSRMWHVIKKEMPYQCEVN

SEQ ID NO: 389069 - protein, 353 aa, unidentified
MNDTPSIAWLGLDAHSKNCVLGQLDDHGTEVKSWSFVTQPQQLIQRIKDIPATDKRLMLEESNLARWISQLLKPHVQQIVVCDARRNRLISQDHHKHDQRDAFALARLLRLNEFKPVWQPTEDQRVLFKRIAKAYENAVQRQTRLKLQLKSLFQHWGLFPAGASVYSKPGRVAWLKQLPYDPLRAQALLLYELLDQALAGQAQFRRLMCQTGRQFPEIQRLSTTPGVGLVGSHLFVAYIQDPKRFGKFSRLSRYCRLGIRDRTSDNKPLGYEQLDRQGIGTLKAISYRAYLQAAKRRSGPVWDFYQLSLRHTGSTTHARLNTQRKILLTLWTLWLTGREFDPKQFFRAQPIDV

SEQ ID NO: 389070 - protein, 364 aa, unidentified
MEHFAGLDVGTKASSLCVVDQDGTIVFEADIPTDPDLLARALKPWRRTLRRVGHEAGSMSPWLHAELESRGVPVICLEAYHARAAMRAQRNKTDQTDARGIAHLVRAGWFRRVHIKSDQSYRLRFLLAQRALLVRKRVDIENSIRQSLKVFGLRMGIAGKAKFEGRARELVGDDAVLGGLVEAMLRVRQAILEEVARLHKLVIDVVARDELCRRYMRIPGVGPITALSFKTAIDDPRRFDSAKTVGAYFGLTPKRWQSGETIDRQGRISKQGDKDVRRCLFEAAHILLVKYRGRTPIKTWGERLMAQKGHHKATVAVARRLAMAMYAMWRDGTEFQLDAGGPMSAGDAHIKIRRLLGAGNLKPA

SEQ ID NO: 389071 - protein, 407 aa, unidentified
MIFVGVDWAEAHHDVCVLDAEGKVLGRKRILDSLAGVGELHALVADHLDDENDVNEVVVGIEKDRGLIVTALVAAGYQVFAINPLAAARYRERHHVSGAKSDPGDAKMLADLVRTDRHNHRAVSGDTSLAEAVKLLSRAHQNAIWSRQRQVNALRSSLKDYYPGALLAFGTDLADRDAVAVLSIAPTPAIGRTLSRAKLISAMKHGGRQRNLEERSEKIQGALRQEQLAQPPVLENAYGITTKTTVAVIAQLNAAMAELEAALSEHFEQHPSAKIIHSLPGMGTVLGARVLGEFGDDPNRYADATSRKNYAGTSPVTKASGKSKVVLARHSGNKRLADALDQWAFCSTNFSPGARAYYDELRSRDKHHRKAIRQLANKWVGIFHACLENGCLYDEKIAWPTTEKLAA

SEQ ID NO: 389072 - protein, 401 aa, unidentified
MTSTFGVFLGLDVGKGEHHAVGLDPAGKRLHDAPLPNSEPKLRALFDKLAVHGPLLVVVDQPATIGALPVAVARAAGHRVAYLPGLAMRRIADLYPGRAKTDARDAFVIADAARSLPHTLRPVDVGDDALAELDVLVGFDDDLAGEATRIANRIRGLLTGVHPALERAIGPRITHPAVLEILSRCGGPTGIAKAGRRKLTAIATAHAPRIGEELVATILAALDEQTVTVPGTTAADTVLPRLADSLKTVLLQRKQVAAEVEGILDAHPLAGVLTSMPGIGVRTAARILLEIGDASAFKSSGHLAAYAGIAPVTRSSGSSIKGEHPARTGNRKLKRAFFLAAFAALSDPTSRAYYQRKRDQGKKHNAALICLARRRCDVLFAMLRTKTHYRHPETTSAPAAA

SEQ ID NO: 389073 - protein, 369 aa, unidentified
MNTTTFVGLDVHARSIKAVALDAMTGEVRSATFAYDAAAVAEWVGSLDPAAKCVYESGVTGFDLQKKLTALGVDCVVGAVSKMIKPSADRKRKNDRNDAEFLARMLSVGNVVEVCVPDDECEAARDLVRALDDAREDLKRCKQRLSKFLLRHGYVFSETTPTGRRKGNWTAAHWAWIRSIEFPEKADDEVLAYYIDAVRQATENKKRLEKLVEAEASKPRWKKRVDSLRCLKGVDAMTAADIVFEAGEFSRFKNARSFAAWLGLTPSEHSSGESARQGGITKAGNKHLRRVLVEAAWHYISASPHPKDLAKGQAPDPAARRHAAKGIRRLVKRREEMLGRGVHKNKANVATARELACWCWAVGRMIENG

SEQ ID NO: 389074 - protein, 315 aa, unidentified
MAMPVSVSKPIVGVDVAKNELVIYHAEVDLLETIPNTKAAIKKWLKALSCKVAIAIEATNIYHLEFADLAHEAGCVVYMVGGYELKHYRESVKIRAKTDALDAKLLVRYLRKEADELRPWTPPSPLYRHLLSLFRRRAALVQARVSLTQSWANEPLLKASFAEQVKSMQRLEGLIEKMISECLKEAGLLGQLKRCLKVEGIGFLTGARLIATFQRGEFRNSDAFIAFLGMDLRVNKSGQKDGRRSLSKRGDSEARRLLHNAAMAASRTETWKAFYQAQRARGYSTTQALVILARKLARVVFALLKGQSEYQPKVG

SEQ ID NO: 389075 - protein, 450 aa, unidentified
MQFMKKKAGFPVLYPNAAGIDIASREHYVAVNPDAAEQSIRSFGSFTDDLHEIAAWLLQCKVDTVAMEATGIYWVSLYLILEEAGFDVVLVNAKHVKNVSGKKSDVKDAEWIRQLHSCGLLSKGFQPDHFTRTLRAYMRHRKNLTEMAATHIRMMQKALEQMNIKLQNVIADITGKSGQAIIKAIIDGEHDPQNLVKLLDGRIKATKESICKSLHGIWKTENLFELKQSFDLYHTYQEMIKECDLHIKGHIEEKASYCESDQTQPPYPVKKKYKTNKNNLNFDATDMLQKIVGTDLTEIFGITDTNATEIISEIGLDMSKWPTAKHFTAWLNLAPNNKVSGGKLLSSRVPRKRNKAGQIFKMAAFAVQRSKNWLAIFYNRIKMRSGTSRAVTATARKIAVIFYKLMKEKVRFCPLDRDQYLESFKVRQLKKLKQQATRLGLVLVPDNLVT

SEQ ID NO: 389076 - protein, 321 aa, unidentified
MAMLSFCGIDVSKDRLDVMVLPGRQSFAVRNDAAGWAELIARLRGLTIAAIGLEASGGYERGAIRTLLAAGLPACQVNPFKLRQFARASGVLAKNDPLDTRMIASFVAIMPTRPAQPRPPAIERLIEMLAVRRQLNAEKVAAENASRLLEDAMLQRLSRRRIARLAADIDRLDRRLVEITASDAALAHRYRLLASMPGVGLVLACTLIALLPELGTMSRKQVAALVGVAPYAFESGKFKGRRCIWGGRAPVREVLYMAAMSASNWNPVFKALHKRLKAAGKLPKVAIVAVMRKIITTLNAMVRDDVVWADHLHGRHIVPTA

SEQ ID NO: 389077 - protein, 342 aa, unidentified
MNRSATYIGLDIAKTVFYAVGKNDVGHEVVKRKLKRDQVLDFFANLPPAQVGIEACGGAHYWAREINRLGHEVRLIAGQHAKKYVMGNKNDYRDAQAICEARSRADMRYVPTNTETQQELQMLHRIRQQVMTQRIALICQVRSFLGEFGLVLPEGVRAFQRGVQQVLGENPTNLSAGVLEMLLELKQQLDSLDSLLARYDTRIVRAAQADERSRRLMDVPSIGPMIATALIAAVNEPRHFKSGRGLSANLGLTPREHSSGGRQVLLGITKKGDRYLRTLLIHGARSALRVAEGKTDRMLIWAVKLKQAKGFNVAAVALANKVARIAWALLAHDRQYQAQSDA

SEQ ID NO: 389078 - protein, 421 aa, unidentified
MTPLSHDTCAAFIGIDWADAKHDGCLQAAGTAKRECFQLAHTPEAIDAWVTTLRTRFHGQPLAICLELDKGPLVSALRKYDFLVLFPINPLMLARYREAFTPSRAKDDPTDAELQLDLLLTHRDKLHPLTPQSPTMRALAQLVEHRRRVVGDKVRMTNRLTSTLKNYFPQVLHWFQDKDTLIFCDFLSRWPTLKAVQLARRATLETFFRDHHVRSPEVITQRIQAIKAATPLTTDEGVIAPNALLVQALVAQLRVTLQAIAEFDTAIAQRAHSHPDFPLFQALPGAGPVFASRLLVAFGEQRERYRSATALQKYAGVAPVTERSGKKAWVHWRLQCPKFLRQTFVEWAAESIRHSFWAQVYYQQQRDKGKAHQAAVRALAFKWIRILYRCWQERKPYDESVYLQALHRRGSSLLQNLAKAS

SEQ ID NO: 389079 - protein, 391 aa, unidentified
MRKPKQHKLNDLSRSLTTLDVHHTLIAVIEMSLSSWVVAGIVPGVERQPLKKLDTDENALLKLLDRWRKEAERAGHKIRRIAVAFEAGRDGFWLARWLRAHDIEVHVIHASSIAVSREHRRAKTDRLDTGLLKRAFLGWLRGERDHCKMVAIPTITDEDAKRPNRERENLVGEQSRIVNRMKAALARLGIRNFNPKLKKAADRLQGLSTPEGEPIPPNTLSELRRDMQRRRLLMDQIRQIEDARLERLEQAPSNGPHAMVRLLARVVGVGIETADMLVQEVLSRNLRDRRAVARYAGLTGSPDESGKKRREKGLARSGNARVRRGMIQLAWRFLMFQKCSALAQWYRARTENARGTRKTMIVALARKLLISLWRFVRDGVVPEGVVLRPAQ

SEQ ID NO: 389080 - protein, 342 aa, unidentified
MTYYAGIDVSLEYSSVCVVDGAGKIIREQRIASEPEALIAWFRGLGFGLERIGLEAGPMSQWLHAAMRAAGLAVELLETRHVRDAFKAMPVKSDRNDARGIAQLMRLGWFRPVHCKSMAAQEMRALLTARKLVQSKLLDVQMSLRGLLRGFGLKVGATTPSQFAGRIRVLVEGNATLEVIAAALLAVHETLRREFAGFEKRVRSIARSDGRVRLLMSTPGVGAIVALTYVAAIDDPARFKSSKGVGAHFGLTPKKYQSGETDITGRISKIGDEGVRTALYEAGHIILTQPLKGCTALKSWAMRLAKRAGMKKAKVALARKLAVIMHRMLVDGTLFASAAVAA

SEQ ID NO: 389081 - protein, 317 aa, unidentified
MDNRTAPDRYVGIDVAKSHVTVHVRPDAIAFVCTTDAQGLAELLARLKPLAPKLIVLEASGGYEAIVAATLAEAGLPVAVVNPRQTRRFAGALGRLAKTDTIDAADIAHFAEAIKPEPRPLPDEQTRQLRALLARRYQLVVMAGAEQQRHDRADTTLARRSCVAMLRSLKAEIARIERAIDKLITASPIFCARQDLLKTIPGVGDVVARIFIAELPELGTVDRHKIAALVGLAPMNRDSGRQRGERHIKGGRPQIRSPLFAACLAVIQCNPTLRSFYQRLLMAGKPKRLALVAVMRKLVCIANAMLRTQQPWAQAQS

SEQ ID NO: 389082 - protein, 348 aa, unidentified
MLYTGIDYHKRYSVVCTVDAEGRRVQSARIDQNEPAAFAAYFQRLPAPSRTVLEACWNWGWLYDLLHELAGVEAVVLSHPGKTRLIAEAQIKTDRLDAEKLATLLRGNLVAEAHASSPAVRARKYVLRQRVYWVRMRTRLRNRVHALLARQRQIEPPVCTDLFGKKGLQWLRVLRLPAPDGLLLQQSLAGFDQLTLQIKELERAILAENQDDPAFARLQTLPGVGAILAAVIATELDGAARFCRPEKLCAYAGLVPTTHASGGKIHHGRLLPFCNEWLRWAFIEASWSAVSCSPYLGSLYRRHRARGKPGGKAITIVARRLCRIAWHLLHEQRNYTPNPTHQLSPVAP

SEQ ID NO: 389083 - protein, 351 aa, unidentified
MLIIGCDFHPGFQQVAIFDNRTGEIEERRLPHREEAEQFYRSLSGPVRVGMEACGHYPWFERLLEELGFELWLGDAAEVRASVVRKQKTDRRDAEHLLHLLLENRFPKIWVPSLEVRDVRQLLVHRHKQVQARTRTKNQLQAMALSQGVQKKWKLWTKLGRAELEQLPLLPYAAERRQRLLETLDGLEADLVELNRQVEEEVRKRPEAMRLRTHPGVGPVTALAMVLTLGPAERFASGKEVGSYFGLIPREDSSGGKQRLGKISKQGSSFLRFLLVEAGPTAARYDPQLKRFYRRLAMRKHRGVAKVAVARKLATRLYLMLREQWTYPQLCQAVMQVSPSHSVVEPEKPTA

SEQ ID NO: 389084 - protein, 456 aa, unidentified
MFKDQARSKPTGLPIIHPFAAGIDIGSRFHVVAVSPDLCNEPVQTFEAFTADLQRMAAWLIALGIKTVAMESTGVYWVAAYEVLESNGLEVVLANAREARAVPGRKSDVNDAQWLQRLHACGLLRASFRPGRDIAALRAYLRMRERHTDYAAAHIQHMQKALTFMNIQLHHVIASITGVTGMKIIRAIVAGERDPAKLAAMRDVRCKETEETIRAALVGNYQPEHVFALKQALALYDFYQDCIAECDAAIELKVAALNASRPIPETPLPQAKHRTKQPGEPHFEVRPAMYQLAGTDLTQIHGIGPFLALRLIAECGTDLSRWPTAKHFTSWLALAPGCKISGGKVLSAHTRKTSNRLTVALRLAAVTVGRSNTALGAFYRRLAARIGCAKAVTATARKIAVLFYNAMRFGMDYHDPGANHYEQQYRARVIKQLQRRAAQFGFALQSLEASDTVGVS

SEQ ID NO: 389085 - protein, 337 aa, unidentified
MAIAIVGIDLGKNSCSVAALDGNGAVVLRRRVSRGKLAGYVGRLPACVVAMEACCGAHHLGRVFEAQGHAVRLMSPEYVQPYVKAQKNDDRDAEAIAEAATRPTMRFVAMKAEAQLDMQTLHRARSRLVNSRTRLINQLRAILLERGITVAKGRRALAIALEPLLEPEDAGLSSRIRMLLADMRSEWAELDARIATLDREFVETARRSAPERRLATIPGIGALNATALVAAVGEAEGFAHGRDLAAWLGLAPRQMTTGGKPRLGGITKRGNVYLRTMLIHGARAALPSLSRSDTPLGAWLRALMARAHVNVAVVALAAKLARIAWAVLRSGGLRPRR

SEQ ID NO: 389086 - protein, 390 aa, unidentified
MIYVGIDIAKLNHFASAISSDGTELMKPFKFTNDGDGFQMLVSRLIDLSLEDDSIIIGLESTAHYGDNLVRYLVACNYNVCVLNPIKTSVMRKDNIRKTKTDKVDTFIIAKTLMMQDSYRFVSFYDLDLLDLKQLGRFRQKTIKQRTRLKIQLTSYVDQVFPELQYFFKSGLHQKAVYALLKEAPTPQDIASMHMTHLSSLLVKSSHGHFTKEQAKELRVLARKSVGANDSALSIQITHSIAQIELLDSQLNSVEAEMTEIMKFNDSVIMTIPGIGYINGGMILGEIGDIHHFSSPSKLLAFAGLDPSVYQSGNYSARRTRMSKRGSRVLRYALVNAAHNVVKNNSTFKAYYDAKMAEGRTHYNALGHCAGKLVRVIWKMLTDEVEFNLD

SEQ ID NO: 389087 - protein, 375 aa, unidentified
MKEKVRFLGLDVHGETIAAAIAEPDGEVRSLGVIPNRAESVRKLIKKLGPAEQLRACYEAGPTGYVLYWQLTELGVDCAVVAPTLVPTKAGDRVKTDRRDAAKLARCHRAGDLTAVWVPDASTEALRDLVRTREAAKQDQLRARHRLSKFLLRTGRRAPFAGKAWTLPYMAWVRQLRYEQAAQEWTRLDLLHEVEHMAERVKRLEEAIREAVKLAPAPMQEAIRGLQALRGVAEISAVTVVAELGRISRFEGARQLMGYSGAVPSEESSGKRQQRGAITKTGNAHLRRVVIEAAWSYRLKPRIGPVLGKRQEGVPEEIKEMAWKAQLRLHKRYARLAAAGKDQRKIVTAVGRELLGFIWAIGRRVEAAGCEQRAA

SEQ ID NO: 389088 - protein, 395 aa, unidentified
MFIVGIDIAKRSHEAIIIAEDGQVVRKAFSFRNNCTGYNLLLEQVRRLTLVKSQIVFAMESTAHYWLALYARLLKGGYAVMVLNPIQSHSLRELYIRKAKTDARDSLIIADLVRFGRCKASNVPQDKILALRELCRSRAYLVDMAADLKRKLIALLDRIFPEYESLFDSVFSKASIAVLSKYSTPQKVKNANLRKLTDLLMESSNGHFGEWKAHQLKEAACSSFGIDDSGGVYSTLLGMFLEQILSLTAQADSLEKQISVFFQEFNNPLTSIPGVGTVLAATILSEIGDITRFSSADKLLAYAGLDPSVKQSGEFKSNQNRMSKRGSPYLRRAIWLASTVAVHRDPMFQTYYEKKISEGLHYMNVIGHVSRKMTAVIFAVLRDGQPYQPILQSAG

SEQ ID NO: 389089 - protein, 391 aa, unidentified
MICVGIDVAKNTHWACALDAGGRILLSRAVRNTQADLDALSAELRALPGPVQVGLDVDGSIATFMQALLLADSIALVHVPGLAVNRAAHGYAGGERKSDPQDARVIADLVRTRDGLRPIRPDDDATASLRLLVSRRRDLVQDQGRRVCRMRQLLSQVHPSLEAKLDVTCKGPLALLTRYVTPTEIGRASTKAIVRHLCRTPNLREPERLAELARECATLQRIVVPGEPMAARIVREMAVEALLVRDRLAAIDKELEVIVAAHPKGALARSLPGMGAVLAAEFIAVAGDITRFRSPAALAAAAGLAPVLRQSGHSRTLRRARRGDKDLKRILYQSAFSAFSAHPASRAYYDRKRREGKHHVQAVIALARQRSNVLWAMLTHDKPYDPNHRVT

SEQ ID NO: 389090 - protein, 370 aa, unidentified
MLDTTTFVGLDVHARSIKAVSLDVMTGEVRAATFGYDAGAVAEWVRSVDPGARCVYESGVTGFDLQKRLSGLGVDCAVGAVSKMIKPSADRRRKNDRNDAEFLARMLLVGNVVEVWVPDDECEAARDLTRALEDARDDLSRSKQRLSKFLLRHGLVFDERTPTGRRKGNWTRAHWSWIESIRFAEGADNDVLAYYVDAVRRAAEEKARLEGLVEAEARKPRWRKRVDSLRCLKGVDTASAADLVFEAGEFSRFGNARSFASWVGLTPSEHSSGESDRRGAITKAGNKHLRKALVEAAWHYLTCSARPKDLARGQDPDRGARRHAAKGVRRLVERREALLARGVHGNKANVATARELACWVWAVGLMAEGA

SEQ ID NO: 389091 - protein, 423 aa, unidentified
MIYTGIDVSKSSARCVFLDNEGEKLKAFSVGTDKEGFDKLLASIKELKLNKDNSLFGIEATGILWENLFSFLTELDFKVILLNPYQTKKYREALRFKAKTDDIDAYVIAGLLRSKDFSSSFIPEDRIQALRDFTKLRYELVKDRTNYQRQALSLLTLVFPEYSDTALKNPFGIASLAVLKQFPTAKHIAATKVKQIEAIVRSIKGNNFSVDNIQHLIDTAKSSVFSGRASDARALNLNILLSQIESFNNSITSLDAQIETLLTDDQQNNTPSSNLLDIPGVGPKTVAAMLSAVGYNGKSFHAGSNFIGYIGFFPIIRDSGETKLKRHIAKTGPKYLRWALYLDAVSCIKHNEQFKRIYQIKRSQGKSAKQALICVAVKLAHTMLSMLKSGKPYDPKRVFACSWFFKDRLFFDIFLYLLLIGLL

SEQ ID NO: 389092 - protein, 343 aa, unidentified
MQTVTTIGLDIAKSVFQVHGHDDAGQVVIRRQLKRRSVLAFFQKLPPCLVGIEACASAHHWSRELQALGHKVRLIPPAYVKPYVKRQKNDAADAEAICEAVTRANMRFVPTKTPEQQSGLVLHRTRHLFIRQQTAVINAIRAHLAEFGIVAPVGRHGVEELLNVLADPNDKRVPEIARACLSAFGAQLRRIKEQVLEFDRLIRAWHRSDEMSMRLDEAPGVGPVLATAVVATVADPKSFRSGRNFSAWIGIVPKQHSSGGKNRLGNISKQGDRYLRGLFVAGALAVIRYAKIHGTKHRPWLTALLARRPTKVAAIALANKLARMVWAMMVKGERYKEPVALAA

SEQ ID NO: 389093 - protein, 349 aa, unidentified
MAMTIVEAPPGITGGVDTHLDKHVAAALDPLGRLVGTESFDADSAGYKALLAWLEDFGQVSKIGVEGTGSYGAGLSRFLRRKGIEVVEVNRPNRQSRRNQGKSDTLDAVEAARAAISGRASGAGKTKDGSVEAIRVLVVAKRSARQARVKAIVQMRHLVITAPDQLHSRLKGVTVHALVTDGAKLRPTKSGDSVTAATKASLSSLAHRIQALDRELAELDEKIESLLLAIAPDLMARFGVGPDTAASLLVAAGDNPERLHSEAAWAHLCGVSPVPADSGKNAGHLRRHNGGNRQANSALWRIAMVRVAHDPETRAYFDRRVKEGRTKRDIIRILQRYIAREVYRFLPRG

SEQ ID NO: 389094 - protein, 363 aa, unidentified
MILGLPDWGNMVDVSSEAKSSGSGVTNPYHRTEHCDKIHAYRCDKEVGVIGIDVSKDHLITSRGRVRRYENKKEDYEEILKMKPCVIVLEPTGVYAIRPSQYFKERGVRVLQVSPNVLSREKEFRGKKTDFYDAEKLENMVDKAKEYDYNPLKELVTLYLFLKDIETKYKNRLKRALFLVSDNDKVSKDRLEKLAKGDFTQEELYQLEYTPLVLEEIKILAKNLLETQERLKEVRRMIEGQVPQDHVLLTIPGVGRLAAGIVGDVKRFPKPESFVAYCGLDPVVERSGKAVVSRGISKRGNKYLRSLFYFLAMRNYSRNPTSLKFYETHKDRLKGRKLYVALARKLARVVWSVWYNNKPYEPK

SEQ ID NO: 389095 - protein, 409 aa, unidentified
MFCGIDWAEAHHDVAVVDEAGTAVVSARIGNDAAGFTRLLSVLADAGDTPEDPIPVAIETDRGLLVAALRATDRPIYPINPLSASRYRSRQQVSGSKSDAADAVLLANILRTDAAAHRPLPADTELAQAIRVLARAQQDAVWSRQQIGNQVRALLKDFYPAALDAFAGLSEGGLARRDARVVLAAAPTPAAAAKLTRVQLSKLLGTAGRKRNIDTDVERLCSVFRAANHLRQPQVVENAMGIGLTALLGQLDAACRAAEALAEAAIAHFDLHPDATIIISFPGLGQLTGARVLAETGDDPTRFADARGLKAYAGSAPITRASGKKSVVLHRHIKNRRLAAVGPIWALSSLRASPGARRHFDARRTAGDWNHQAQRHLFNKFLGQLHHCLRTRGLYDENQAFPPSLAFAA

SEQ ID NO: 389096 - protein, 342 aa, unidentified
MKDTMIGVDLAKSIFQVHGALMSGKEQFRKRLTRPQFWKFMAVHSPAVVVMEACGSAHFGAREMIKIGHDVKLIAPQYVKPFVKRQKNDAADAEAIVIAAQPPEMRFVEPKTEEQQARAVLFRGRERLVRQRTELVNALRAVLYEFGYTAPQGLRQLKRIEAIVEEPNSDLPALVREECQGLIEQIFEKTVRIDTKTKRAKNIAAQTDTARRLQTMPGVGPLTALAIEAFAPAMESVPCGRDFAAWLGLVPRQHSSGGKERLGRVSKAGQADIRRLLIIGAMSRLNGMGRQSIPEGSWLARLSARKPKMLVAIALANKMARAIWAMLTKQKDYRDPMLAVAA

SEQ ID NO: 389097 - protein, 345 aa, unidentified
MPNIEIGVDSMVKENFIYVGIDLHKETHTAVMIDCYNQKLGEITFPNRPADFPKLVAKVKKCNTDGKTIVFGLENAYGYGRALAVWLIDKGYLVKDVNTAISHRQAKHRGAMYRKSDSDDAEAIALATLNMLDKLPDAYPNDAYWSLGQLVHRRDNIMKQRTRLVNQLHEQLCIAYPSYKQFFNDISRPTALYFWEHYPSRKYLKGKSVEDLRAELVPVSHNKCSTKTCEKILDAVASDKVKNNAYQDARDMVTLSIVSDLQYYDKQLAEVDKMLEQMYKMLGCTLTTIPGVNVITAVKILAEIGDIKRFSNANKLAQFAGIAPLHLSSSGKGKDVATKQGNRRL

SEQ ID NO: 389098 - protein, 472 aa, unidentified
MSQGKRSPSKSKASKSAPQAASRAPREQPVTLAVQHPHAAGIDVHSDMHMVCVPADRASEPVRRFGANTCDLQAIADWLKQCGVTTVALESTGVYWIPLFELLEARGFMVWLVEPGQLSHCGARPKTDVLDCQWIQRLHSYGLLRPSFRPAESILALRGYWRQRQMQIRYAASHVQHMQKALEQMNVKLTEVLADITGLTGRRIIEAILAGERNPHKLAALRDHNCKHNEASIAKALEGTWRPEHLFALQQAYELYRFHHRQIDECDAMIQQELAKLPDRSEGKPFTRKAAKCGRKGNDLRFDACGPLFKALGIDLTEIEGIDVGTALVILAEIGVDVSRFPTEQHFASWLGVCPRVYESNKSQKKKGPRKGKNRVAIALRMAAQALGRTQSPLALFYRRIKSRIGGKGAITATAHKLACLVYRMLKYGREYVKQSMEAYENRIREQQERSLRRKARLLGFDLVAHATAAPS

SEQ ID NO: 389099 - protein, 377 aa, unidentified
MDKDSRFVGLDVHAETIAVGVAEPGGEVRSLGTIPNTPEAVRRLVKKLGPPETLRVCYEAGPTGYVLYRQLSALGVPCAVIAPTLVPVKAGDRVKTDRRDAEKLARSYRSGDLTPVWVPDPGHEALRDLVRAREAAKKDQLRARHRLGKFLLRQGRRAPTGSKAWGVKHRAWLQTIRFAHAAQDATLLDYRTEIDHAADRIARLERAIATAADLTPAPVRAVIAGLQALRGIAKLSAVSVVTEVGALSRFAKPRQLMGYSGAVASEHSSGPHRRRGGITKTGNAHLRRIVIEAAWAYRHRPAIGGTLRTRQEGLSEEVKALAWKAQHRLHGRYARLLAKGKAPTQVVTAIARELLGFIWAIGVHIEQHTAGGAPAAA

SEQ ID NO: 389100 - protein, 383 aa, unidentified
MTQALGTVIDYERTLILAIELSNTSWVLAAQIPGLPGVKAKRSIDPTPEALMAAIENYRARAEKAGRNVDRVIAVYEAGWSGFWLVRWLAKHGVEEAHVIQPSSVPVDRRARRAKSDGIDAELLLRTLLAWLRGEPRVCSMVPIPAEADEDARRRVRERAELISERVGLVNRIGAVLATLGAGEYNPLRRDRRQRLDELQTALGDSLPTNAHAKIARMLDRLELLLIQITELEQSHDAVLEDENPDRASSMIQQLAKLRGIGVQSATVLVREGFVREFVNGKALGSYAGLTATPYSSGGIEREQGIGKAGNARLRTVMVELAWLWQRYQPGSAQVRWFRERGGTGRRVRKVMVVALARKLLIALWRFATQGVVPEGAVMKPAS

SEQ ID NO: 389101 - protein, 389 aa, unidentified
MPRPRNARPNRSRRKTFVLQKANGQLVPRVQQVGPEHFGIVAIDCAKARSRYFLADFYGRTLLEPATLPHSRGDFQAAVDRLRQAALQHDLKDVVIAIERTGEYHRPVQRAFRHAGFETRLVHPFTAKQYRQPADPGNKTDDTDLAAIFRAATHGFGLAEPAWPDDYLTIQLLRRHRRDLVDKNAILQCQIRELLHAAMPGYAECFCHFWDDSPAPMIFARHTTSPAAVRQAGLAGLQQIAAQVQLRCRRATLHKILAWAEQAPPGHAHALDLRRILGTLDDDRLAKTQQILELERSLASLVVRTPYVLLLAIPGINIVTVADLAGELGPIALYLNANAITGRAGLMPSRYQSDQVDCANGPLRRRGNRRLRGGGGGRPVAHAAGSAAS

SEQ ID NO: 389102 - protein, 407 aa, unidentified
MLKIVYRVCCGMDVHKSFVVACIASTNEQGVTSYKSKRFSTFTGDLRRCAVWLSENNCEDVCMESTGKYWIPIYNILEPTCNIVLAHPKYVKAIRGKKTDKRDAKWIADIFKHDLVAGSFIPPANIRQLRDLVRYRWKLTSFTTGEKNRAQNCLTVSNFKLDDVFSDVFGKAASAIISRILENPAMKITDVSGFRTKHMKATNEEIFAAVDGEMCVEQAEKLRIIRSHMDSLELCKLNLESLILSTAEKYLPQLELIMTVPGIQSFAAIGVISEIGVDMSVFPTSKHLCSWAGLTPQNNESAGKKKTTRISRAGAYIKPLLVQCALGAIRAKPFPEVRNRYLALKKRRGHKKAIIAIARMLLTAIYNMLKKNEPYNRLSTTWQTVPRPTVKFRWKKLFTLSNDKGIW

SEQ ID NO: 389103 - protein, 344 aa, unidentified
MSQVTTIGLDIAKSVFHAHGADERGAMVFSRKLSRGKLLDFFAGQPACTVALEACGGAHHWARELRAMGHEVRLIPPAYVKPFVKRHKNDAIDAEAICEAAQRPGMRFVAVKSEEQQAAGLVFRTRDLIVRQRTQLINAIRGHLAEYGWVAPRGTAHMTMLADLLDEEEMISTLPEAARPMFKLMIDLLADLNKQVAALDREIARRAKEDEAARRLMTIPGIGPIAATAIIALAPPIETFRKGRDFAAWLGLAPRQHSTGGKQRLGSISKMGERTIRRLLIIGGSSMVRQATRFGAPAGSWLERMLMRKPRMLVSVALANKMARMVWALLTKQEDYRAPAAVAA

SEQ ID NO: 389104 - protein, 321 aa, unidentified
MTEAQDKIEFAQVIERGCGIDIHKSVLVSTVQGKGIKTETRSYDAFTESIKQLRDWLKSLGITHVAMESTGVYWKPVYNILEEDFAIVLVNARHIKNIPGDKTDKKDSRRIAKLLLAGLLKGSFIPTRSVREMRDLTRYKRRIIEQISSEKNRIHKFLEDANIKLSTVVSNMSGAVATKIIDAMIEGEGNPEELAKMRHGKMKASEQELVVALTGNLTGHHKFMLKMVKQSIKDKQLLIDELDKQIDNKLKENEMVLDAELLSTIPGVDKEAAAYILSEIGNDMDRFPDEQHLASWAGLSPGNNESAGKKKAQEPRTVTNG

SEQ ID NO: 389105 - protein, 343 aa, unidentified
MKLIRVGIDLAKNVFQVHGVDRNEKAVWRRKLTREHWLKTLLETVVPGCEIGMEACGGAHHWARKLQAHGCKVRLIAPQFVKPYVKSNKNDANDAEAICEAMSRPHMRFVAVKTVAQQDIQAVHRIRGELTKQRTAKANQIRGLVAEYGLVAPKELMHLRRALPCWLEDAENGLSQRFRRLLNGLWSDLRALDARMTELDREIAVIAQSDSVAKRLQQLRGVGPITATALVAAVGNGEQFANGRQMSAAFGLTPRQHSSGGKEQLLGISKRGDPYLRVLLIHGARSVIRTSKNKDDRLSQWVTRLAARSHPNIAAAALANKTTRMAWAMLKNGTDYQPAMATS

SEQ ID NO: 389106 - protein, 360 aa, unidentified
MTGTMTWAAMDVHARSTYAASLDVVTGELSRQRFDTGAVEPVVGWLVGLPGPVRACYEAGPTGFGLYRAAVAAGIDCQVIAPSKTPRPSGDRNKSDRRDTDLLLRQLMAGALTAVAVPSATFEAARDLARAREQVRLDLMRCRHRLSKLLLRHGRVWDRTAWTQTHRQWLSTQTFDHQNTELALIDNLAACDGLSARRQALDERLSWIATDPEFWPLVRRLRAFRGLDTLSALIVVLEVAGFERFGRAVQLGSWLGLVPSRQQSGESDVHGSITKTGSKYARRILVEAAWHYARPPRIGRTLAERQEGLPDHVLQIASRAQHRLYRIHRRMRERKKPGNVITIACARELACFLWAAATAP

SEQ ID NO: 389107 - protein, 364 aa, unidentified
MNKCHLNTELSSLEGTRSEFNRSKAVIKLGIDVHQDFYVVVEQMEGTNPKPAQRFQKQVFLHWAAKLSKSGSKVHAVYEACGFGFGLQRQLTAQGIHCYVVCPQKLDERNKRVKTDGLDAKALCLKLDRFVQGNREALALVRVPTEAEEQKRAIHRQREQLVKARKGLEAQGRSLLVNHGMEPASNWWKGRTFAQLQVPEWMKELLSNSQPILLALEEKIRALTAQLQAAAISKQPRGLGLLSSVVIDREIGSWTRFKNRRQVGSYTGLCPGEYSSGNTRVQSCVTKHGNPRLRAALVETAWRLVRFQPNYKPVLKWRKILAKGARATGAARKKAIVAVARQLAVDLWRIRTGRVATETLGLIN

SEQ ID NO: 389108 - protein, 343 aa, unidentified
MNYYAALDVSLRSVHLCVMDEKGKIQAEGQVDSEPKDIDAFLRKLDLEITAVGLEAGTLTQYLTYGLQTAGYPVVCMEARQVKAALSAMRNKTDKNDARGIAQLLRSGWYSRVHVKSIESHHIRMLLSSRKAVLNKCIDLENEIRGLFKVFGIKLPPKLGHGSFDRAVRETIETDPALRHALLPLLEARLVLYHTHRELDNRTRKLALQDPVCQRLMTAPGVGYVTALTFQAAVDDPTRFKRSRTVAAHFGLTPRRFQSGEIDHCGHISRAGDPDVRRTLYNAANAMMTRSSRWSSLKAWGMQLAKSRGHRRAVVAVARKLAVILHRMWVDETQFHWGAEGNS

SEQ ID NO: 389109 - protein, 337 aa, unidentified
MKTLKQCMGIDVSKDTLVCCISSLNDDDKISFSKPKTFFNNPEGFNQLLSWAATLRCSEMTFVLEATGVYYENLAYWLDSRDEKLSVLLPNKVKHFAKSLNIKTKTDSIDSRILSQLGLERKLAYWKMPSKVMREIKFLSREYREAKAKLVVDKNQLHAKIHSHDCPASVEKRLKKQISLLETQLLEIEAELRTIAMSDSNLYDRIAKISTIPGVGFMTIISIMAETNAFALVNNAKQLVSYAGLDIMHDQSGLKEGKTRISKKGNSFIRNALYMPALSASKHNPDMKIFYDRLKETKPAKKIGITAVARKLLVLIYLLWKNNEEFEPAITTAVVGC

SEQ ID NO: 389110 - protein, 389 aa, unidentified
MEARTLNHLPPAASHDGAVRCLLAIELSKKSWIVAVNTPLSDKISRHTLQACDWKGLLELIERIRTRVSQTFSRPVEVISCYEAGYDGFWLHRLLEAHGVRNFVIDPASVQVDRRARRVKTDNIDVGRLLRSLMAYLRGEPKVWSVVRVPSVTEEDDRRLHRERDRLINERVQHVNRIKGLCAVHGIYDYEPLRPNRLARLEQLRAAGKRELPPRVKAEIARELQRLELVLNMIKTIEAERDAIASAGKSSTHANAKKIQDLTRLKSIGPEIGTTLVGEVFYRQFNNRQQLGSYVGLTPSHFQSGPLSRDQGISKAGNPKARTVMIELAWLWLRHQPNSPLSIWFRERVGTAKGRIRRIAIVAVARKLLIGLWRYLETGVVPTATVLKV

SEQ ID NO: 389111 - protein, 354 aa, unidentified
MLYVGLDLSRKRLDWQALDREGERVAIGAVPPDRDGLAKLVHRLGDAPVLAVIESMSGARFVHDRLELAGWEVRIADAVKARGLAPLACKTDKIDCWVLAELARLDLVPEIWLPDPAVRAERERARFRLHLVKHRSSLKNRVHSILFQHGVPSPGSDLFGAGGRRLLERLQLPEPWASTLQASLALIDTLDEQIHGCERELRQLGADHHYIPLLVTCPGIAWILGFTIASEIGDIARFATPRKLVGYTGPCPKVDQSGERDRRGPLRKNGPNYLRWALIEAAHTAGRDPRYRPIVERMRARHGKKRGSKIAAIEIARRQAEAIWHMLSHNRPFAPAGATAPTQLITGNDRAIER

SEQ ID NO: 389112 - protein, 360 aa, unidentified
MKAEDLTVERQVTGGVDTHKDLHVAAIVDMHDRVLGCQSFATTRQGYKQMLAWMRSFGSLQRVGIECTGTYGAGLLRYLQQAGVEILEVTAPDRQDRRKRGKDDDLDAQNAAHAAFAGRRTVTPKSRDGMIESLRVLKACRKTAVAARRVALQMIHNTIVAAPDELRDMLRKMTRMQLVRTLAAWRPDLTDYRAVTSAYRIALKSLGRRYLELHDEIADLDAIIIPIVDELAPALVAQNSIGHGTAAQLLLTAGDNVERLHSEASFAALCGASPVPASSGKTTRHRLNRGGDRAANSALHIIALGRLRTDPRSKAYMAKRIAEGHSKLEVIRCLKRYIAREVFALISQRRREVNQLPLAA

SEQ ID NO: 389113 - protein, 329 aa, unidentified
MYNVGIDVGSKELVMVIRHKGKNQKARSFKNTHEGHAQIIKTLTSKKGEVGVCLEATGIYHFDLAVALCRSNTVEVMVVNPKASRHFADALMTRSKTDQVDANILAQFAETMPFVSWQVPDDKILELRAFSRKLAALTKLKAQTKSQLHALESSVSVPEIILEETQATIEFLELQIHRLKEHALTLIGSEEKLQRSLEITTSIKGIAETSAIQLLGELLVLPKDMNNRQWVAFAGLDPRHYQSGTSVSKKPRISKAGNSYLRQALYMPALCAAHRDPHVNAYYQHLIEDQGLKKMQAVCAVMRKLLHAIHAMLKNESHFDSTRFFNMAV

SEQ ID NO: 389114 - protein, 408 aa, unidentified
MEPIYRSCCGLDVHKRSTQACVRRLREDGSLHQETRSFGTMTRDILEMADWLAAEGVTHVAMESTGVYWKPIYNLLEGRFTLLLVNAKHVKHVPGRKTDVKDCQWLAQLLQAGLLRGSFIPDRPQRELRDLTRHRTQLVAEKSRVANRIQKILEDANIKLASVASDILGASGRDMLRALIAGGKMPQEMAELARRQLRAKLPQLSLALEGQVTDHHRFMLKGLMDHLEYLEQQIEHFSRRIEEVSRPFGPALEAVASLPGFDQRSAQNVVAEIGAEMAQFPSEHHLSSWAGVCPGSNESGGKRKSGKTTKGNRWLRTALVQGAWAASRKKGSYFQAQYRRLAPRRGKKRAALAVAHSLLVVIFHMLKTGSSYKELGGDYFDKLNQKRLVPYFLKRLTDLGYQVSLKAA

SEQ ID NO: 389115 - protein, 339 aa, unidentified
MNRIVVGVDIAKRVFQLHWVEPQTGEIVALQLKREKFLEHFANRANCLIGMEACGGSQHWARSLQKLGHEVKLMSARMVKPFVGGNKNDVADARGIWTAVQQPGIKAVAVKSEAQQAVLALHRMREQLVKFRTAQINGLRGLLTEYGEVMPQGRAGIHRDIPGALGRLADRLPAIVIETLREQHARLGELDEQISQIERRLRQWQRQDPMSQRIAAIPGVGLLSATAAVATMGDARAFKSGREFAAWLGLVPRQSGTGGRVRLLGISKRGDKYLRTLLIHGARSVLTHSKSPPEWLSELVKRRPKNVAVVAMANKMARTIWAVTAHERAYHSGYVSRPA

SEQ ID NO: 389116 - protein, 355 aa, unidentified
MNQEKYIGMDVHAATISAAVKNAEGKLLMECVLETKAATILEFIQGLRGTLALTFEEGTSAAWLHDLLKPHVSRLVVCDPRKNALMRDGNQNDRVDARNLAELLRTNQVKAVYHGEHGTRALKELGRSYLTLTQDTTRVMNRIKSVYRSWAIPCAGTSVYSRRHRAEWLAQLVEPGVRIRAEHLYQQLDSLEPVRQAARRELLRESRKHAAVKLLRQIPAIGPIRSALLVAILQTPHRFRTKRQLWAYSGFAVQTYDSGEYRFVRGKLHRNRERITVHGLNRNHNHDLKNLLKGAAISAIQRPGPLQDFYAALVEKGMRPSMARLTLARKIAAITLTIWKKGVSFDPKQLQRQTA

SEQ ID NO: 389117 - protein, 351 aa, unidentified
MKTNTPPKIETQDRIQQLKLGVDWHADHFRVVRMCDGQSPQPAQRFTPAIFLLFVQKQLTLADQVFVVYEAGPGGFHLHRQLTALGVTVFVVHPQKLDPNHKGVVTDKTDARELALNLDRYLRGNQRALSVVRVPTAAEEQRRALSRQREQLRRERQRLAAQGRSLCLTQGIRLRGEWWSQNLSLPEWLEPRLQVWRKLITAVEEQLEVLTKQVEALAPKARPKGLGPLTLGTLLAELCDWSRFKNRKQIGSYTGLCGGVSSSGQSHCDLSITKAGNARIRWALIELAWRMVLYQPQSKAVQRWKHVLLNSKAAARQKKRALVALARQLAVDLWRWQTGKVTPEQLGWVMV

SEQ ID NO: 389118 - protein, 355 aa, unidentified
MNDAKYIGMDVHQATISVAVRDSSGNLVMEAILETKAETILQFIRGLRGSLYVTFEEGTWAAWLHDLLQPHVARVLASDPRKNALLKAGNKSDRIDARKLSELLYLNKLSPVYHGEQGIRTLKELARSYITITRDLTRVMSRLKAIYRSWGIPCAGQQVYAPRYRAEWLAKISEAGVRRRAELYYQQFDALAALRQGTRRELLAEARKHPAMRLLRQIPAIGPIRAALLIALIQTPNRFRTKRQLWAYCGLALRTYTSGEYRFVSGQLKRSKKVLAVRGLNINHNHDLKNIFKGAATRAAAAAGPLQGFYQASVARGMKPHLARLTLARKIATITLLVWKKGVRFDAEHLKQQAA

SEQ ID NO: 389119 - protein, 297 aa, unidentified
MGEHSEVYVAFDTAKLKHAVAVADGGRGGEIRFVGEIENRPATIERLIRKLARRYKKLQVCFEAGPTGYGLYRQMQALGHDCLVVAPALIPRRSGERVKTNRRDALSLARLFRAGELSGVWVPDEVHEAVRDLVRGRMTAAEDVRRKRQQLLSFLLRHGRIFTGGDHWTRAHRRWLAEQSFDHPAQQIVFQDGVAAIEDAVERRRRLEEQLASLVPKWSMAPAVAAYQAMRGVSFLVAVTFAAEIGDVRRFDTPRQLMSFLGLVPAERSTGEKVRRTGLTLAGNRRARRVLVEAAWS

SEQ ID NO: 389120 - protein, 334 aa, unidentified
MENIALIGIDLGKNSFHIHCQDRRGKAVYRKKFTRPKLIEFLATCPATTIAMEACGGSHFMARKLEELGHSPKLISPQFVRPFVKSNKNDFVDAEAICEAASRPSMRFVQPRTESQQAMRALHRVRESLVQDKVKTTNQMHAFLLEFGISVPRGAAVISRLSTILEDNSLPLYLSQLLLKLQQHYHYLVEQIKHLESQLKRKLDEDEVGQRLLSIPCVGTLTASTISTEIGDGKQYASSRDFAAATGLVPRQYSTGGRTTLLGISKRGNKKIRTLLVQCARVFIQKLEHQSGKLADWVRDLLCRKSNFVVTCALANKLARIAWALTARQQTYVA

SEQ ID NO: 389121 - protein, 341 aa, unidentified
MNQVSTVGLDLAKHIFQLHGADSAGAVVFRKKLRRGQLLAFLATLPPCTVAMEACGSAHSWGREIAKLGHTVRLIAPAYVKPFVKRQKNDAADAEAIGEAAQRPTMRFVALKSANQQAAAVVFRTRDLLVRQRTQTINALRGHLTEFGVIAAKGPVHTSKLIAALEDPTSDLPQAARGILAVLVEELRSLDERVAVLDREIARHATENPVARRLMTIPGIGVVTAAALTALAPPAPMFRRGRDFAAWLGLTPLQRSSGGKERLGKTSKMGERSLRRLLIIGASAVARWAARKGVPAGSWLGRMLARKPPMLVRVALANKMARIVWALLAKGGVYRAPVAAA

SEQ ID NO: 389122 - protein, 432 aa, unidentified
MRANAGGVDIGATEIFVAVPADRDTESVRSFPSFTQDLHALADWLQQCRIDTVAMESTGVYWIPLFQILEARGIEVHLVNAQHVHHVPGRKSDVLDCQWLQYLHSVGLLKASFRPEQAVCEIRSLMRHRENLVQMACVHVQHMHKSLDQMNLQIHHVISDITGVTGLAIVDAIVAGNTDPKELAKLRDYRIKASMETVTKSLVGDYRPEHIFTLKQSLTAYRHYQQLIADCDHEVQRRIHTFQTKDDGPTAPADCSSTSTPTAPTFDLHRHLERIWGVDLTAIPGFDVVRIQTIFSELGADLSKFPTVDSFSSWLNLSPKDGTSAGRRIRGPKVKTKNRVTQAFRMAAQSLHHNKSYLGDYYRSHRARHGALKAIKNAAHKLARIFYHLVTTRQPYHETVFATLEACNQRRRLHKLQTLAKQMGYSLVEAHA

SEQ ID NO: 389123 - protein, 402 aa, unidentified
MNAVGIDVSKGKSMVAIMRPFGEIVSTPFEIKHTTSDIHSLVELINSVEGESRIVMEHTGRYYEVLAHQLSEANLFVSTINPKLIKDFDNDSLRKVKSDKADAVKIARYALDKWQNLKQYSVMDELRNQLKTMNRQFGFYMKHKTAMKNNLISILDQTYPGVNTYFDSPARSDGSQKWVDFASTYWHVDCVRKMSLNSFIDHYQNWCKRKKYNFSQSKAEEIYGKAKELVPVLSKDAITKLIIKQAVDQLNSASTTVESLRTLMNETASKLPEYPVVMAMKGVGTSLGPQLIAEIGDVSRFTHKSAITAFAGVDPGVNESGTYEQKSVPTSKRGSADLRKTLFQVMDVLIKTHPQDDPVYQFLDKKRAQGKPYYVYMTAGANKFLRIYYGRVKEYLSSLPES

SEQ ID NO: 389124 - protein, 364 aa, unidentified
MKKHSKVPTKRSVKPEFTVGLDLGDKSSHYCILNTDGELMEEGKVRSTEAGLRKQFGDEPRMRIGLEAGTHSAWVNRLLAELGHEVIVANPRKLRAITSNESKNDRNDAEMLARLASCDPKLLSPIRHRGVDKQQDLNLVRTRAALVRARTMLINAVRGLVKSAGGRLRSCSSDSFADKARASVPPELRSACEPLLEQIAHMKLTIRAMDKQVEALEEKYPEIAILRTVPGVGPLVAACYVLTMDSPHILHTNRQAGAFLGLRPRQSQSGESDPQNRISRTGNTYLRSLLVQSAQHVLGPFGPPSALRQWGLQLAGRGGKSAKRRAIIAVARKLAVMLYSMWRSGSKFEPFPQGSIQTAAPVAA

SEQ ID NO: 389125 - protein, 358 aa, unidentified
MCHNPQTAPKAKTEEESEMNSTQVAVDLAKSVFEVAVSRRPGKVHESHRLSRSRFQKFFAGLEPVEILMEACGTAHHWGRTFEAMGHRVTLLPPSDVSRYRDGNKTDRADAKALLEAARNEKIDPVPVKSIDQQAIAALHRIRSGYQQTRTARINAVRGHLREFGIMIPMGATRVVPMARAAIEGDGVPTYLCDVLEEVLDEIEMLSEKAKAVQCKLERLSKHMPEAQALMTVPGIGVLTATALVSFVGDARRFRSGRQLAAYLGLTPREFSSGTKRRLGRITKRGNSYVRMLLIHGARSALQAGKRADEPDDLRTWALDVERRRGHNVAAVALANKLARVAWRVWRDQRPFEQRRPV

SEQ ID NO: 389126 - protein, 343 aa, unidentified
MQTIATIGLDIAKSVFQVHGVDAGGQVIVRRQLKRRSVLAFFQKLPPCLVGIEACASSHHWSRELQALGHTVRLMPPAYVKPYVKRQKNDATDAEAICEAVTRANMRFVPTKTPEQQSGLVLHRTRHLFIRQQTAVINAIRAHLAEFGIVAPVGRHGVEELLNVVADPSDRRVPEMARACLLAFGAQLRRIKEQILEFDRLIRAWHRSNEMSMRLDEAPGVGPVLATAVVAAVADPKSFRSGRNFSAWIGLVPKQHSSGGKNRLGNISKQGDRYLRGLFVAGALAVIRYAKIHGTKHRPWLTALLARRPTKVAAIALANKIARMVWAMMARGERYKEPVALAR

SEQ ID NO: 389127 - protein, 343 aa, unidentified
MKLFVGLDVSLEKTAICVISEHGKILKEAQVASEPEALLRWIGDQDGAVAAFGLEAGPLSQWLHRGLSEAGQPVVLMETRQVKGALKAMPIKTDRRDAEGIARLLHLGWFRPVHCKSVSSQEVRAVLSARKAVQQGFITLEMSVRGLLRNFGLKVGTISRGRFEQRIRELAAGNPMLEAATEPMLRARSALRRELAGLERHVRQLAQEDPVCRRLMSMPGIGAVVSLTYRSAVDDPARFTSSKKVGPWVGLTPSRNQSGERDISGGITKAGDVNLRRALCQAATVMMHRGRATWLRTWAAKLARRRGAKRAMVALARRIAVILHRMWKDDTDFRFETPVLHAG

SEQ ID NO: 389128 - protein, 343 aa, unidentified
MEPMYYIGLDVHKRKISYCVKDSSGKVFAEGSLPATRLDLDLWMKTLPQPWSAAMEATMFTGWIYDHLKPHAAALKVAHPLMLRAIATAKKKNDRIDAGKICDCLRCDFLPESYMASTAIRERRRTLRYRNLLVRQMVQMKIKISALLMEAGVSYNKQRLHKAGYFRELLATNPDIDEGLCSLLRLCRETVVRLGKTESALVRSLERDSLLVERVERLMTIPAVGPITALTWALEVGDVQRFSSIKKAVSYCGLCGAEKSSGNTVQRTPLSKQRNKHLQTTLIEAAKMAPRNSPELAMLYDKEKQKGNANRATLAVARKLVAYLMAVDRGQRNFQVVTSTIAA

SEQ ID NO: 389129 - protein, 354 aa, unidentified
MSIFAGVDCHKGSHVIAFVDAVGSELRAWTISNDIDGFEMAFGIAEEFGGAVWGLEGAGSYGRRFADFLVERGAEVYEIPGNVTKRNRRQSTRTGKTDAIDAKAIAEALIRERERLPRYHASELRLTLRLRYEQRDRLVRQRTIEVNRLKAAAAMVDLKIELDCTATSSLESIRSAALSLQGSRHSIDAYADDILIALETIERINGHVARIEKLLGPFVQTLAPELLEVRGVGVITAAGLIGHAGDLRNFRNGDAFAVKCGTAPTPCSSGKTAAVRVNTGGNRTLNRLLYTIATTQIRTPEHPGRAYYDRKRAQGQNARAAIRSLKRQLTKVVYRQLLKTHARLQPTPALKIAA

SEQ ID NO: 389130 - protein, 338 aa, unidentified
MSIVHVGVDLAKNVFAVHGVDESGKAALMRPSVSRAKLGELMAGLPPCTVAMEACTGAHHWARLFASYGHTVHLIAPKFVTPYRMSGARGKTDAADAAAICEAVQRPAMRFVPLKSEQQQSQLMVHRARQGYVQARTACINRIRGFLAEFGHVLPLKADTVRRQAAGLLEELPGWGNTVIGDLLSEVHRLDERIAQYDRHVAQLAREDARARQLMQLPGIGATTATAVVAMIGNGHEFKCGRQFAAWLGLTPGQYSSGGKTRLGRITKTGDGYLRSLLILGARSVLALAKGRSDAISSWAVALQQRRGYWKAVVAIAAKNARMAWAVLRRGENFKMPA

SEQ ID NO: 389131 - protein, 363 aa, unidentified
MASIALDRGDVIVGVDTHKDQHVAVAIDGVGGLVGDPKFVDATNDGYAELLSWALSLGRVHVFAVEGCGSYGIGLARFLRRHGHPPVEVSRPPRAGARRMSGKSDAIDAEHAARTALAGVGVVTPKLADGQVEAIRLVKIARDTAVKAHTTAIITLKAVLVTANQDLRDRLEPLSDFKLLTACSELDTSGDLADPAVAMRHTLVSLAQRWFDLHAEIKTHSKHLKALTRSAAPDLVDAFGVGLDIAAQMLITAGDNADRVRNEAAFAKMCGVAPIPTGSGKTGGRHRLNRGGNRQANAALYRAVIVRMRWHAPTIAYVERRTADGLSKKDIIRCLKRFLARELFQLLPDVSAAQAPVPVARAA

SEQ ID NO: 389132 - protein, 355 aa, unidentified
MESTEYIGMDVHKDAIAVAVMNSAGKVVMESVLETKAATILQFIRGLRGNLLLTFEEGTWAAWLYDLLKPYVTKVTVCNPRKNALLRSGNKGDRIDAQKLAELLRHGSLSAVYHGERGLRTLRELSRSYLTISKDLTRVMNRLKALYRSWGIACSGTQVYAPRHRAEWLNRIKEAGVRSRAEFTYHQLDGLQALRQAVRRELLAESRKHRATKLLRQIPGIGPIRAALVIALLQTPDRFRTKRQLWAYCGLAIETRGSGEYCYVEGELRRSQKPVALRGLNKNHNHDLKWIFKSAAVRASSSAGPLHDFYESLLAKGMKPAMARLTLARKIAAIILIVWKKGARFNGEYLKPQAA

SEQ ID NO: 389133 - protein, 339 aa, unidentified
MREFIRIGVDVSKGFFQVHAIEGEGSSAVRRKLSRAKFLSFFAGIAPTRIGIEACGSAHHWARELRALGHEVVLMAPAYVKPYLKRGKTDANDAAAICEAMSRPDMRFVPVKSADQQAVLMLHKTRALMIKQRTMAVNALRGHLSEFGLIAARGIHRIKDLLALAETDERLPEAAREATAMLAAEIQGLDGRIDALEAKIAAASSPMIRHLDEIPAFGPLIASAMVAFNPDPRAFRSGSDFSASLGLTPSQHSSGGKEKLGHITKAGNRYLRTMLVVGCTSVLRVAHKYKGALAEWIVAMRARKPERVVAVALANKLARIAWAMMATGEAFRKELYFKA

SEQ ID NO: 389134 - protein, 358 aa, unidentified
MTSMQDAPRRRRVVVGVDTHKHIHVAVALDELGGRIEARSFAADRSGYEQLIDWASSLGREVMFGVEGTGSYGAGLASAIRRRSIGVLEVLRTDRRDRRLRGKSDTIDAENAARAVLNGQASAVPKSADGTVEMIRLVKVAKDVAVKARTSAMISLKAVLVNAPAELREQLQPLTKMALIRRCAALRPGPVTDPMTAAKHTLRAIARRWLALDAEIKAHEQMLNRLTTELVPDLVAAFGIGADIAAEMLIVAGDNPERVRSEPAFARLCGVAPIPASSGMTTRHRLNCGGHRQANAALYRTVIVRLHHQPTQAYYQRKDGRGPHQSRIIRCLKRLLAREIWSYLRPLRQARQPLVLAA

SEQ ID NO: 389135 - protein, 451 aa, unidentified
MIEKALFETNVTTCCSGELSPWCAESSEILPFGPAQPHLEDAGLKSLRSLGPLWITSEKDASCTLRTKPLKKKGKSHIFGYNLVAEQNPTERRLAMLNVSRIDLTGQPIYIGLDVHKKSWSVSIYSKHGEYKTFSQPPEVETLLHYLRHHLPGAQYHAVYEAGYCGFWIHDQLKEKGIQCIVVNPADIPTKNKERRTKRDRIDCRKLARSLRNGEIEGIYVPCRPKLEDRSLIRTRQSMVRKQTRCKNQIKGMLLFYGIDLLEEETRGHWSRRFIQWIEQIRMERGSGDIALKAHLEELSHLRQLIASLNRAILRLTRTEEYRPLVRLLKTVPGISTLTAMILLTELCEIARFRSIDELCSYVGLVPDIQESGEKEHVEGMTQRRHPQLRWLLIEASWVAVRKDPALMMAFDQYCKRMRKTKAIVKIARKLLNRIRYVLKNQAEYVPSVIQ

SEQ ID NO: 389136 - protein, 334 aa, unidentified
MEQITTVGIDLAKSVFSLHGVDGAGRVVLRRTVRRDQLLEVVAGLSPCLIGMEACSGAHEWGRRFQALGHTVRLMAPKFVTPYRKSGKNDGNDAEAICEAVTRPSMRFVPVKSAEQQALLALHRVRQGFIVERTATINRLRGLLSEFGVVLPLRSVTVRRQAAAAAESLPELARRAIGDLLEQLRVLDERIGAYDREIGAQARLSEPAQRLMKIRGIGATTALAIVATVGNAREFKNGRQFAAWIGLVPGQYSTGGKARLGHISKRGDAYLRNLLVQGARSVLNSAASHQDRMSRWILELQPRRGYYRTLVAIANKNARIAWALLARNETLRTA

SEQ ID NO: 389137 - protein, 438 aa, unidentified
MSNKVIFNLDELFISVGIDVGADFSWMSIALPNQQFVGKPYKILHNSIDSLTTAVSKIKEAEELYSLESRIFLESTGIYHYPLFCYLRDKGFNCSVINPIITKNSTNINIRKVHNDRFDSKKAALIGLKPDLKVSLMPSDLALNCRNLCREYYDLMDNRSAYVNKLQGELRMAFPQYLGIFSKVTINTSLTLLETYTSPSAFLEADKQEIIDIIRSTARFGLTYAQNKYNAIIQAATDANQFGYIINSNIKRIRLYISFIRKYDEEINSILESLHELVDANEDADFVKQIHLIETFKGAGFLSAVSIMGEIGDFSVFSKPKQLFAYFGLDPAVKQSGKFEGTKVQMSKRGSAIARRVIHMLTIQSISISRNGEAKNPVLREYYLKKCDSKPKLVAMGAVSHKVCNMIFAILRDNKPFKIIAPQEHIKQYNVAKCDMAA

SEQ ID NO: 389138 - protein, 427 aa, unidentified
MAVVMIGVDPHKASHTAVAINAAEQPLGQLRVRASAVQAERLLEWAQAWPERAWAVEGAGGLGHLLAQQLLSAGERVLDVPPQLAARVRLLATGDVNKNDPNDARSVAVAALRSAQVREVRRDDHATVLKVWAKRYQDLGRARTQVACRLHQVLCELVPGGVSGEITAGRAGQVLASSTPAGAVDAARWELAAELTEDLRGVDTRIRETRKKAAAAVRAAGTSLTGLFGVGPVIAATVIGDVRHVSRFPNRDHFAAYNGTAPIEVSSGGRKVYRLSRRGNRRLNHAIHMAAVTQIRYRHTKGRAYYDKKLAEGKTPKEALRALKRQISDAIFACLQEDARRAAAAAAKSPGGQPGNHSASRAAGSHPDHRLFGQATPGPATHPMTLTAPFPAPLPSRASEQPGPGPGAARPRSGARRASSTRPPASR

SEQ ID NO: 389139 - protein, 370 aa, unidentified
MLDTTTFIGLDVHARSIKAVSLDVMTGEVRAATFGYDAGAVAEWVRSVDPRARCVYESGVTGFDLQKRLSGLGVDCAVGAVSKMIKPSADRRRKNDRNDAEFLARMLSVGNVVEVWVPDDECEAARDLTRALEDARDDLSRSKQRLSKFLLRHGLVFDERTPTGRRKGNWTRAHWSWIESIRFAEGADNDVLAYYVDAVRRAAEEKARLEGLVEAEARKPRWRKRVDSLRCLKGVDTASAADLVFEAGEFSRFRNARSFAAWVGLTPSEHSSGESDRRGSITKAGNKHLRKTLVEAAWHYLTCSGRPKDLAKGQAPDRGARRHAAKGVRRLVERREALLARGVHGNKANVATARELACWVWAVGLMAEEA

SEQ ID NO: 389140 - protein, 395 aa, unidentified
MRFAGIDIGAERHMVAVLDEQGEVLCRSSPFGEDATGYARVFELLGSPDDCLVALEATGHYWRNLFVALIAKDYVVAVLNPLRTARFAEEELRRTKTDAIDALGIARFAQQKRPRAAHLPDAVTEELRELEWLRERVAEDFAGRLRQLHRAVDLGFPEFTRHVRTLESQLATTILSRYPTAASFRGVSAKKLARIVYDGSHKIGEELARALIVAAEKSVGAYHSEPYRLRIKYLCEDLQLLRRRLKELACDVGRKVDEHEIAKLIMTIEGVGPLTAACLIAELGDPARFNSPGAIASYVGVIPRIRQSGKKRFTKGPAIPFGNARLRKSLFMVVLQLIRRNAWLRQYYERLRAAGKPGKVAVIAAMRKLLVAVWSVATHRRPFVPIMPAPITKNT

SEQ ID NO: 389141 - protein, 371 aa, unidentified
MEEFKFIGLDVHKATIAVSVAEARGGEVRYVGEIPNTPEAVVKLVRQLKKDRVPLSFCYEAGPCGYVLHRQLVELGQACQVIAPSLIPRKPGDRVKTDRRDSLSLARLHRAGELTAVWVPDCAQEALRDLTRGREDLKHIQHQARQRLQGFLLRHGQHYEGKCHWTQAHFRWLETVKFDQPVQQILFQEYVDLVLALSKRVSTLDEQVGKAAEASVHAPVIKGLCALRGVDTLTATTIVAELGDLKRFDKAPELMSYLGLVPSEHSSGATKSRGSITKTGNGHVRRVLVEAAWTYRFPARKTAALQRRAEKTPEAVQEIAWSAQKRLCGRYHLMATIKGKKKVQVCTAIARELAGFIWAIGQALPRPGATA

SEQ ID NO: 389142 - protein, 411 aa, unidentified
MEVVFSRCCGLDIHKKTVVACVLVREGGGVEKKICTFRTVTAELLLLHDWLKAYGVTHVAMESTGIYWKPVFNLLEESFAVLLVNAAHIKTVPGRKTDVKDCEWIADLLSHGLLKGSFVPPKPIRDLRDLTRYRKSLIDERVREVNRLQKLLETANIKLASVATDVMGVSGKAMLKTLMEGNTDPEALADLAQGKLRKKLPLLREALEGYFRPHHRFLLGQILSHLDFLDEAIADVSKEVTHRIDPFVKKIEKLKTIPGVGQMVAETVIAEIGVDMDQFATHRHLASWAGICPGNNESAGKRKNGKTRKGDRWLRRVLIEASWAASRSKKSYLSAQYHRIARRRGKKKAVIAVGHSILVVMYHILKCDSSYQELGPDYFDRVNITYVKNHFVKRLEGIGYKVVLEPSVEAA

SEQ ID NO: 389143 - protein, 367 aa, unidentified
MLYLGIDQHRKQLTVSIRNEAGDVILRRQVSTEWDRVRAFFDELRRLATPEGGFVAIVEVCGFNDWLLKMLPEYGCRETVLIQVEKRSKKKTDRRDAHQLSGVLWVNRDRLLAGRLVEGVRRVQPPTAIDAEDRQITELRKRMGQLRTRTINKIKHLLRKHNIEQDQPAKGLDTKRTRGWLATLPLGAIDRMELDLLLAQWKLWDEQIARLELDIEKRQAKNATAAVVATIPGCAAYSSLALASRIGSIERFPRPKSLANYWGLTPGCRNSGEATDRLGSITKQGSSTARFMLAQITLHVLRRDAWMRAWYARIKKRRGSKIARVAVMRRLATIIWHMVKHNEAYVAGGPPRRKLSQPAQRQKSGAA

SEQ ID NO: 389144 - protein, 345 aa, unidentified
MTRFVGLDVSQKLTALCVVDETGRRLWRGQCATDLGQIERMVKGHAGEDARVGIETGPMTPWLVHELRGRGLNIVCLDARHASAAVKMQMNKTDQNDAEGLAQIMRTGWYRPVHVKSLDAHRARALLGARAQLVGMTTRLSNHIRGVLKTFGMLPGAMCGLPFDRRVEELLADRDDLAPIVRPMLVTWRQLREQIAAFDKAVRALAKASPTCRLLMSVPGIGVLSVLAYVSTVEDPARFARSRSVGAHMGLTPRQYQSGEVDRSGRISKCGDMLARTLLYEAAVVLLSRVKRASRLKDWAQALAKRSGAGKARVALARKLSVILHSIWKTGKPFRWSEQEMPQAA

SEQ ID NO: 389145 - protein, 355 aa, unidentified
MTSTKYIGMDVHKESISIAVRNSVGKVVMESVIETKASVILQFLNGLSGDLHVTFEEGTAAAWLYDLLKPHVARLVVCNPRRNALLKVGNKSDRIDAQKLAELLRGNQLQPVYHGEHGLRTLKELVRSYLTVGKDLARVMTRVKALYRSWGIPCSGTQVYSRLYRVTWLSKITEPGVRLRAAFYFQQLDALRTLRQEVRQELLAESKKHKVWKRLCEIPSIGPIRAAVALGILQTPHRFRTKRQLWSISGFAIETRSSADHRQVNGRLQKVKKRVSIRGLNQNHNHDLKNLFKGAAVVASTKPGPFQEFYEALLAKGMRPEMARLTLARKIATIVLIVWKRGVNFDAQYLKPQTV

SEQ ID NO: 389146 - protein, 336 aa, unidentified
MLYAGLDIHKNFSQAVVCRENGNVLKEGRVPTTKESISEFFSEFKEELKIAIEAGINSEYIFDFLEEQGHKVTLAHPLKTRMIAESRVKTDKIDANILAYLLRTNLLPTSYMPPKDIREIRQLVRQRIFLGRFSAKLKNRIHAELIRKGIRYERKGLIFTSDGKNWLHSLNMPFMESYLIMLGSIEDQIKKHNKKINQRGRKYEEVKLLTSIPGIGVYSALVIFSEIGNIERFNTEEKLFSYSGLIPSVNQSGNHRYYGRITKQGSKNLRWILTENVRVHLNWARANDVETKLLKYYLRLCKKGKPKNKAVIATARKLLQVIYWMLKNKTEYCVKG

SEQ ID NO: 389147 - protein, 341 aa, unidentified
MSSLVCGLDVHKDSVFATVMSYGGEVIERRKLADKDEVVSFLGQYPIDKVAMESSTSIVPVYRALRGRGYDVLVSHPKKTRLIAESRIKTDRVDSWAVTELARLDALPLSYVPPDDIAALREKVRRRAFLVRMRSKLKVKIKTHLTINGLTPPSEYGLFTRKGLEWLRSLHSDAVDSYLPVLSTLTVQIEKLSKELRSMAPEDEDVRLLMTIPGIGYYSALLVKSEIGDISRFPDGEKLCSYAGLVPSVSSSGGRTRRGSITKEGSRWLRWIMVESVRIHLKYDTSIARAYHAIAERKGSGIAKVAAARRLLMCCYSVLRNHEPYHDPAGHYQPSRSGRGE

SEQ ID NO: 389148 - protein, 430 aa, unidentified
MKSNTQNAKIEAITEKTLVLGIDVGSETHYARAFDYRGIEYSKKPFKFSNTEAGFVTFKEWILDLKERHEKDKVVPGMEPTGHYWFNLGKFLQDNEMKPVLVNPHHVKKSKELDDNNPTKNDRKDPKVIAGLVREGRYMIPYLPDGVYADLRTASNIRFQLQAELTRIQNRISRWFNIYFPEYKTVYGKPDAKSGILILKAAPLPEDILTLGIDGVNQIWRDAKLRAVGKARAKTLIEAAEHSVGSKEGAVSGKMEIRMLLEDYESRNTRLQEVMVLIEELVRKIPMAEKLLEIKGVGIRTVSGFLAEVGDISRFNNPKELQKLAGLALVENSSGKHKGETTISRRGRKRLRYLLFEVAMSLVSKNQEFRELHNYYTTRRLNPLKKMQSLMAIAAKLIRVFYAMLTKGVDYDPKKMVSDIKRPAVYLQAA

SEQ ID NO: 389149 - protein, 338 aa, unidentified
MGRYIGIDLHRNCFTACLLAENGRSYLRTWRLSELDKFCSKLKKSDEVAVEVTGNTRLFYDKVSAKVSRVVLVNPHQFKVISDSVNKTDDNDARRLSLFLSKGLLPEVRMSDKEHAQVKSLAQSRDKLVKLRTSLKNKINNLCSAHGVNLKKEALSGEKGLVEVLELKFDPMVNLEIRVLVDQVRSLNQSIKELEEAIKDAGGKLPGHKNLKSIKGIGDLGASILLSVIVDVEDFADEGKLASYFGIVPRVERSNQTFRSGRITKRGSKLGRTTLVQCALIAKRYSPYLSNYYERIKARRGAGKAIIALARKFLNLIYNTLKNNWLWEDFPNGILAEG

SEQ ID NO: 389150 - protein, 428 aa, unidentified
MDQVNRNRLEEFRQLRQEVRHSEEYLIVGIDIAKDRHHAFFGTATGKTLLRRLVISNDYEGFRKLLDQAEALRVRHGLKKVVYGMEPTANYHKPLGEYLITQGRTVVLVSGVTVKRNRESLDGRWDKHDVKDSANVADLISQGKCLYYEYPAAGLRGLRGLLSLKRRLKKQEHGYRVRIRNHLIAQYFPEMDRDFERLGAEGLSIVRWCFPPSQITELDVDPFIQRVTSRRILMEKRRRLEGIWEKAGESIGCDGVPGVEHEARVMVEGLRQIREVIKETENKIQELCEQFPEYEYVLTIPGFGPDVSAKVLGAIGDPDRFENGKQVLKLAGLDLSADRSGKNSDKAIPEISKRGKADLRYALYQAALIASTKNQDFMRYYTRKLRGREKEKGIHTKMWVKLSAKMLLIAWTLMKKKEAFDPAYLKVE

SEQ ID NO: 389151 - protein, 351 aa, unidentified
MNYVGVDIHKRYSVLVAVDERGRELGRSRSNGNTAFGFAQFFGGLEGKSKVVLEACWNWGRIYDLLSEIEQVEEVVLAHPLKTRLIADAQIKTDGLDAHALATLLRGDLIARAHVPAKPTRQRKEVLRQRLYWARLRTRIRNRIHALIDRQRELKMPQCSDLFGRKGLTALNKLVLSEPDATLLREELGLLELIQGQIKAQEARIVEFNSNDEMTLRLQSIPGMGKILAAVAAAEIDSIERFSSAAKLCAYAGLVPRTHASGGKVYQGHLLKSRNKWLQWAFIEAAWVAVGCSAYFGGLYRQHRARGKNANIAITIIARRMCQICWTLLKERRDFIETFPGRSAVRLTAAA

SEQ ID NO: 389152 - protein, 336 aa, unidentified
MKPEPLLGPRARITRLGTGGLYMATECFIGIDVSKETLDVHTLPDRNELQFANNPEGIKAICRKFSKLRPNLIVIEATGGLQIPVATALGLKKFPVVVINPRQARDFARAKGRLAKTDKIDAAILALFGKHMEPEVRPLKDEQTQELSALMSRRNQLIRMLVMEKNRFSRAYGSVRKDIEKNIGWLEERLSEIDTNLGKMVRASPIWRERDNLLKSVPGVGDVLSRSLLSNLPELGTLNRREIAALVGVAPLHCDSGKHRGKRRVWGGRSDVRSILYMAVLSAKKYNPVIRDFYNRLKEAGKPHKVAAVASMRKLITILNAMVRSGQAWAQCANAA

SEQ ID NO: 389153 - protein, 349 aa, unidentified
MTTQRLSYVGQSVYVGVDVHKDTYAVTCVCNKQIVKTATAKADPAGLTASLSQWFPGARLYTAYEAGFSAFVLHRALTKAGIMNIVVNPASIAVAANDKVKTDRRDSKKLALDLSDGRLQGIYVPTEAEELARLLPRTRAQIVEHRATIARQIKAKLHQFGLIAPASRRLISNRYWREIDAWPLPPDLRVSLTFLAEQWRFATRQLIEMRRLLREQAKAHPAIEQVYRSVPGIGEVVARTLATELGDMTRFANERALFSYTGLTPSEYSSGPSVRRGHISRQGSSRVRHLLIDTAWRALPRDAVLKEIFDRIAATRGKKRAIVAIARRLTGRIRACFRQGTTYAVGTYA

SEQ ID NO: 389154 - protein, 298 aa, unidentified
MALRPSDEHDTLVHDAVGIDTLVARLRHVAPTLIVLEATGGWERPLVRALVAAALPVIVANPRHVRDFAKATGQLAKTDRLDAVVLARFAEAVRPPLRPHPDAATEALAALLARRRQLLDMLTAEKNRLSTAPTRVQRRIRAHVTWLTAELARLNEDLDAAIRQSPVWREQEDLLQSTPGVGPVMSRTLLADLPELGTLNRKQIAALVGVAPLNRDSGTLRGKRQVWGGRAPVRAALYMATLVATKCNPVIRSFYLRLRGVGKAPKVALVACMRKLLTMLNAMMKHRTPWRSSAVQKA

SEQ ID NO: 389155 - protein, 411 aa, unidentified
METVVERPAALDVHKAQVTACVRVPAEDGGREQHVAEFSTTVLGLLTLRDWLQAHGVTQVTMEATGVYWKPVWAVLEDDFECLLVNARHVKQVPGRKTDVSDAAWLCQLAEAGLLKASFVPPKPIRALRNLTRYRKTQIAERAREANRLHKALEDTGIKLDNVASDILGASGRAMLAALISGTTDPALLAELAKGTLRRKIPALREALEGRFDELHSVWIGAILSHIDFLDEQIDSLTDAIGRQIAPFEPAVELLCTIPGVQRRTAEAVISEIGVDMSVFPTAKHLASWAGQCPGNDESAGKRRSGRTRKGSKWLDLALGESAMAAIRCKDTYLAAQYQRLRPRCGHRKALGAVKHSMICAVWHMLSTGELYDDLGSNYFRQRNPERATKRLIAQLEALGHTVTLQEAVAA

SEQ ID NO: 389156 - protein, 391 aa, unidentified
MIYIGIDVAKDKHDCFITNSDSEVLFKAFTIFNNLDGFNDLYQKIESVMDDVTKVKVGLEATGHYSYNLLGYLIDKGLPTYVINPLHTNLYRKSLSLRQTKTDKVDARTIASMLMSDVNLKSYSDISYHNEELKSLTRYRFDKVKERAKLKSSVSRLVCILFPELEKLVPTLHMASVYSMLSEFPGAKHVASAHLTRLTNLLSEASKGRYSKDTAITFREAARASIGSNMPAKSLELKHTIKLIQELDSEIDEIENEIKVIMDEINSPILSIPGINYRMGAMIIAEIGDFSRFDSPDKILAYAGFSPSTYQSGQLDGAYAHMEKRGSRYLRYALYNATKYVCHWDPTFAVYLAKKRAEGKHYNVAISHAVKKLVRVIYHLEKTKQQYIKAS

SEQ ID NO: 389157 - protein, 331 aa, unidentified
MEKKDFLGIDVSKLTIDCHLHTMQITKQFKNTKNGFKSMERWIKQKANLNLSELVICFEATGGYSFELSRYLANANLEFTVDSGYRISRTLGLVRGKNDSVDALRIAEYAYRYADKLRIHKMPSDELILLQKLYNFRRKLKKDLASYKTRLKEEKRIEFFDIPMLNDPQTVVIESLKQSLADVEESIKAIIKGNSEMQKNYDLLVSIKGIGFVTATLVIALTANFTLFDDPKKFASYSGTAPFSYQSGTSINKGKRVSKLANAEMRSLLTQAAKSARQHDPELKAYADTRAKAGKSPMSTINILRNKLISRMFAVIRKQKPYEIRVPNTAA

SEQ ID NO: 389158 - protein, 424 aa, unidentified
MKVTYQTCCGVDVHKSFLVATIVKTTGGIEPSYQKKRFSTFNNSILEFKQWLLDNHCHDVCMESTGKYWVPVFNLLEDKINVVIANPKWVKAVKGNKDDTKDSKWIGDLFRLGLVKGSYIPCKKVRILREYTRYRYKLVSCRSSEKNRYQNALTVCNVALDSIVSDIFGKSSTSIIDYLLEQSGTSINHEEIASKLLRSLKSKEDAVIESVEGYQMTDAQKYRMRLVRAHMDYITAEINDVDKMIENMISSNPDFENAVQFLCTIPGVKRDSAITIISETGTDMSQFSSSKRLCCWAGLTPGSNESAGKKKSVRITRAGVYLKPALVQCAHAAVKSDKSPYYKKKYESLVKRRGKKRAIIAIARMILTAIYQMLSTGEQWNPSDLYKIDIPVALVEKQKAKAIKQAKKLLQREGLLPPDEPLAS

SEQ ID NO: 389159 - protein, 351 aa, unidentified
MGLQARMERSAVNHVAIDLGSLNSQICMRSAEGTILLEKKVKTEELPRLVTTWPPSRVVCETSSEAFLIADHAKAAGHQVRVVRSTLSKELGVGDRGIKTDRRDARKLSEVSTRIDLPAVHVPSMRGRLWRSILRSRELLIETRTKAVSHVRGWLRTQLMKLRRGATETFPARVRELWTEENPLPAHIASVLIAIDTLNEQVSASMKQIRELAKNDDVCLRLMTIPGVGPISSMAFVAAIDDVTRFPNVHRVQSYLGLTPGEDSSSKRERRTGITKAGPSSVRRVLIQAAWVAKRFRSNDPMVKWATRIEERRGKHIAVVALARKISGVMFALWRDQTRYSPLEAAMTTRS

SEQ ID NO: 389160 - protein, 450 aa, unidentified
MAKTKKRKHRKLERSLPIMRANAGGVDIGATEIFVAVPADRDTESVRSFPSFTQDLHALADWLQQCRIDTVAMESTGVYWIPLFQILEARGIEVHLVNAQHVHHVPGRKSDVLDCQWLQYLHSVGLLKASFRPEQAVCEIRSLMRHRENLVQMACVHVQHMHKSLDQMNLQIHHVISDITGVTGLAIVDAIVAGNTDPKELAKLRDYRIKASMETVTKSLVGDYRPEHIFTLKQSLTAYRHYQQLIADCDHEVQRRIHTFQTKDDGPTAPADCSSTSTPTAPTFDLHRHLERIWGVDLTAIPGFDVVRIQTIFSELGADLSKFPTVDSFSSWLNLSPKDGTSAGRRIRGPKVKTKNRVTQAFRMAAQSLHHNKSYLGDYYRSHRARHGALKAIKNAAHKLARIFYHLVTTRQPYDETVFATLEACNQRRRLHKLQTLAKQMGYSLVEAHA

SEQ ID NO: 389161 - protein, 342 aa, unidentified
MNHYAGIDVSLECSSVCVVDANGKILREARVPSEPAALIAWFRASGFTAERIGLEAGPLSQWLFAAMREAGLAVELLETRHVRKAFEAMPVKSDRNDARGIAQLMRLGWFRPVHCKSMEAQEVRAILTARKLVQSKLRDVENSLRGILRGFGLKVGKVTEREFAARINELVAGQAHLERIAGALLAVRETLRKEFKAFEKQTGKMARSEPRARLLTSVPAVGPIVALTYASAIDDPARFKSSKLVGAHFGLTPKKHQSGETDYTGRISKIGDASVRWVLYEAAHIMLTKPVKGCSHLKSWAMRIKKRAGMSKAKVALARRLAVIMHRMLVTGTPFNPAAAAA

SEQ ID NO: 389162 - protein, 441 aa, unidentified
MSQFVKPFISVGIDVGADFSEMAIALPTLQFLDKRSFRIYHFKPESLSAALEKIKKAEEEHSMNIRIFMESTGIYHYPLFCFFRDAGFQVDVINPLITNSSRNSNIRKVKNDNFDAKSIAKTGFDPELKLSNMPCELIMNFRNLTREYHHLVDVKSSYVLKLSSQIRIAFPQFRGIFSTLTGKAPMMILKKYTSPGEILNADPDELVSEIATTSRRSKATSVTKRDQLIQAAQDAQIFGCGVESNFLLIKKFIQFIELYEQEINDILQQMKLLVHKHQDELFIQQVELLESIKGIGFLSALTLMCEIGDFSAFTKPKQLFAYFGLDPSVNQSGNFNGNRMTMSKRGSSIARRVLHMVAVQAVGTTIHGVAKNPVLRDFYLKKCREGKAKLVALGAVSHKICNIIFAVLRDHKPYVMKSPEQHRLEYNLEHASCITTLKFVA

SEQ ID NO: 389163 - protein, 396 aa, unidentified
MSIAHNDNKRMAVFHALHQSAIGIDVHSNLIVGVYQKGEFGNNVVEGDTWSGTASKPELVKFAEWCKSKDPEVLIMESTGVYWQSLYEALEDIGFTKSQLIVVNARDVKNRRGSKTDLSDAIHLAEIARQGSYRASFVPEKFVKQLRCLWRSFSTLKNTRKRLLNILHKQLCQVGCRASSVFSDIRGKTATKILECLISGESGEKLRSSIVSIMKSSKGKLKASPAMIYDALQADMDSLVWFSIRKHLNHIKFIDIQLKESEDNLKQHLAPYKKLIDLLTTIPAIKEMTAMGIVCELGDDLSQFTSIRRFAKWIGLAPGNNESANKRRSGKTPPGNKYLKVLLIEAASGIGLMKTGYLHEVHQKLKERRGQKKANVAIAISCAELYLMLYPTELHM

SEQ ID NO: 389164 - protein, 425 aa, unidentified
MTQPYGNTEEKVLVAIDIAKKRNAVLIQLPDESQKKFMVANKLSDYQKFSAYLKNLRFPCVIGLEATGNYHRPLAYYLQQAGFDLKLISSVASARTREAMYNSWDKNDPKDAQVILHLLKTGLTQTYHDPLLHRINDIQELSKTYYQVSLQKTRLQHSIMTHYLPLYFPEVQKYYYTSRAQWFSSLLLRFPSPSSVLKYSREEFIEAARDVAGRKVNKAAWLTDFYETAASSIGLPVEEYSKSMVMFRLVLREHQHLCRLRRSIEERANLYLKDNADYNRLRTIPGIGPVIALTILAEAGNLRRFSHYKKFLKYCGLNLSTQRSGNFRGISKLSKFGNARLRYVFWLAGTSAIRMRENTFRKKYENYIKADPDNPDLKRKAYTAIAAKMARVAYALVKKEKDYRCFFESSIPSGKIPSVGTLRPL

SEQ ID NO: 389165 - protein, 307 aa, unidentified
MNGIGIDVCKAMLDVAVHCGPFARFHNTPAGHRKLLSWLARQEAGQVVLEASGGYEQRVLDALFDAGHRVVRANAQRCHAFATAIGLPAKTDRLDAINLACMAATLELRAYQPMESWRRKLREFVRARQQLVDLATSAQNQLEQVTDTSLCRVLQANIAQMKKTCVILEKHIAEQVGQQPQLEALRAFKGVGAILQAVIASYLPELGRLDGKAIAKLVGLAPIAHDSGKMRGLRQIRGGRIEVRNVLYMACLSAIQHEPRIREFYRSLRVRGKPGKVAVVAAMRKMLVILNARARDALAGESQAIPA

SEQ ID NO: 389166 - protein, 403 aa, unidentified
MTIFVGLDWGGSSHAVCVVDAAGKVLDHFVVAHDRDGLADLVARLRRHGPPGETPIAIERPSGLLVDALVDAGFVVTPVHPNVVKACRPRYRAVAAKSDPGDAYILADILRTDGHRLTPLKPQSDAIKALRALVRGRDDLVATRLVLANQLRALLESFWPGAAGLFADIASPIALAFLQRYPTPESASRLGEKRMAAFLAQNQYCGRRSVADVLGRLRAAPATMAAEAEADAKGELVRAIAVTLESLVAQIGKLSSRIEHAVAELPEGKIVMSFPRAGKICAAQITAELGDVRDRFQSQEHLAAEAGVAPVTYQSGKSRAVTWRWACNKRLRAALTCFADNSRHASPWAAKVYHDARERGCRHPHAVRILARAWLRILWRAWQDGTSYDPNKHPAASFLLTTG

SEQ ID NO: 389167 - protein, 316 aa, unidentified
MTTGSVAVGVDVSKDMLDVFVLETRAFRRFANDAGGVGRLIAWLKRLAHAPTIVLEATGTMGWAAIAALTQAGLAPRVVNPARIKAFRAAEGKHAKTDRLDAELIARFASAMSEKARPAPSAKQLEIKSLAARRRQLADMAGDEKKRLKQAFDAAAVDSIRHTVALLTGEKKRIEARLVAAIGADAETARLFDILVSIHGIGPAIAAGLIADLPELGQLNRHEIAALAGVAPQARQSGRSEARARVKGGRPHVRTALYLAAFNARRVEGPFKDFYRRQRAAGKPYNVALIAVARKIVVLANSLAKEGKPWRPNIEP

SEQ ID NO: 389168 - protein, 355 aa, unidentified
MNDTKYIGLDVHQTTISVAVLDSAGKLVMEAILETKAETILQFIHGLRGSLHVTFEEGTCAAWLHDLLKPHVAQVLVCDPRKNALIKAGNKSDRIDARKLADMLYLNKLNPVYHGETGIRALKEVARSYLALTRDTTRVMNRLKALYRSWAIPCAGQRVYAPRYRSEWLAKITEAGVHRRAEIYYQQLDALRSLREQVRRDLFAEGRKHSAMSLLRQIPSIGPIRAALLIALMQTPHRFRTKRQLWAYCGLALKTSTSGEYRIVEGQLKRSKKFLAIRGLNANHNHDLKNIFKGAATRAAAVPGPFQEFHVALVARGMKPTMARLTLARKIAAITLIVWKKGVRFDAEYLKQQAA

SEQ ID NO: 389169 - protein, 355 aa, unidentified
MTSAKYIGMDVHKESISIAVRNSAGKVVMESVIETKASMILQFIDGLRVDLQVTFEEGTSAAWLYDLLKPHVTKLVVCDPRKNKSMREGNQNDKIDARRLAELLRLNHLTPVYHGEHGLRTLKELVRSYLTITKDLGRVMTRVKAIYRSWAIPCTGKEVYAARHRAEWLAKINEPGVRRRAEFYYQQLDALRVLRQEVRCDLLAESKKHPAWKRLCQIPAIGPIRAGVLLGILQTPYRFRSKRPLWNYGGLAIEMHSSADHRSVDGQLQRSRKNVLVRGLNRNCNHDLKNLFKGAAAVASSKPGPLQEFYTALVAKGMRPEMARLTLARKIASIVLIVWKRGVNFDAQYLKPQTA

SEQ ID NO: 389170 - protein, 356 aa, unidentified
MPLGSEYRNRSLIPGCQYSCSCPNSHLSRVCELASTRKGQPMSQSSFVGIDVSKDSLEVHILPSEEHFKVRYDSEGIEQLIQLLQPFQPQVIVMEATGGYEKHLALELHLSGLDKLQILNPRNVRDFARSTGKLAKTDSIDARMIALFGQTFKLTGQTLPSQAQDELQAMVRRRNQLVSSRAAELNRLHQAGTVRVLDSLKRIIAALDAEIKDLDQDIHQLITQNPVWYDMAQCLRQVKGIGNVTACSILALLPELGCLNRRQIAALAGLAPINRDSGVFRGKRMIHGGRAEVRKALYMATLVAIKFNPAIRDFYLKLTSAGKPKKLAITACMRKLLITLNAISKNYFQQHVSVCS

SEQ ID NO: 389171 - protein, 356 aa, unidentified
MSRDIKYIGMEVHKEAIVIAVLDGGGKLVMESIVETKASSILQFIHGLRGELHVTWEEGTWAAWLYDLLQPQVGQVLVCDPRRNALLKEGNKSDKIDARKLADLLRTGMLRPVYPGEHGLRTLRELGRSYQTMSKDLNRVMNRIKALYRGWSIPCAGTQVYAPRYREEWLNKIPHAGVRRRAELLYQQLDGLQGLPRTLRPELLAESRKHKAAKLLRQIPCIGPIRAARLLALMQTPHRFRSKRQLWTYSGLGIETRDSAQYRYVQGQLQRTKKPQQIRGLNRNHNHEMKEIFKGAATRASCGVGPLRDFYVTLLAKGMKPEMARLTLARKIAAIALTLWKKEERFDAEQLKPQAA

SEQ ID NO: 389172 - protein, 389 aa, unidentified
MFYVGLDVASEKHDCCILNEKKKIFRSFSISNSADGFDSLLAALAELSSDEIKIGLEATGIYSENLSVFLRRKGFDVSTINPLLIKKHQCATTLRKTKTDKADAKGIAQFIAEEGFQPDLPVSYHIQELKSLSRARFSVVQDRSALKNKVKRLVVLLFPELLGEFSDIFGNSAAALLKQYPSAAKLAACHCDTLAALLRKTSRGRFGRAKAEHLRQLAQNSVGNHSSAKAMELRMLLKRIDLLSEQIAEYDREIKIIMDKIDSPILSIPGISYTLGATIAAEIGDIRRFSSPAKLLAFAGLEPSIYQSGKFVPTSGKMVKRGSPFLRWALLQAAGYAPNYSSTFALYRSKKAAEGKPAAVVRSHVAKKLVRIIHSLLTHSTAFSDQLPA

SEQ ID NO: 389173 - protein, 361 aa, unidentified
MSVYVGIDVHRKRSQVAVIDQDGEVLANRNVPNGVKPILSVIGGLPPGTPAAFGAAFGWGWLVEVLEDYGFDPHLVHPLQCKAIASARLKNDKAGAAILAQLLRADLLPEAWIAPSAVRQLRALLRHRIQLVRLRTLLRNRIHAVLADHGQDRPGGCWSGPGRAWLATLELPPASREVIEDGLALIDALQPVIDRLDWEVRQHARTDPRVKVLTQLPGVGPFTAVVILAEVGDISRFGPARKLAAWAGLTPTVRGSDRTVRHGHISKQGSVWARWILCEAAQTAKRHPDFAATYQAIAHRRGKKIATTAIARRLLIRACHLLTEAEITTPTPAPPARLLTGRVAKPRASSQNRMSRPRRAR

SEQ ID NO: 389174 - protein, 315 aa, unidentified
MTATIAQTVGVDISKLTLDVYLHPQATARQFPNTTAGITALLAWLGQTTVHRIIFEPTGAYHRCLERQLGNTGVPMVKVNPLQARRFAEAIGQRAKTDAVDAAMLARFGALDALQNRPMVSQTLSDMKELLVARRGLVKDRVAASNRNHVHRASLLKRLTDQRLRQVERQIAAIDAALRGLCRSDAELKARLDILVSIPGIGEATALTMLIEMPELGTIDNKCVASLAGLAPIARDSGQHSGTRYIRAGRAHFRQALYMPALVAIRFNPDMKTKYQALIAAGKPPKVAITAVMRKLAILANALLHGQRNWTPKAT

SEQ ID NO: 389175 - protein, 412 aa, unidentified
MAVVMNQDSGFDIWCGLDVGKTGHHACPLDAAGRKVFDKPLPQDQKRLEELFDKLQTHGRVLVIVDQPNTIGALPIAVARSMGIQVAYLPGLAMRRAADLYPGNAKTDARDAFVIADTARTMPHTLRRVDAGEETLSELKVLVGFDEDLAAEATRLSNRIRGLLTQIHPALERVVGPRLTTKQGLAVIEQLGGPQAMAAASKSKLLRVISKAYPRGAQEFADAITTALAEQTVIVAGTAAAEQVLPQLAASLRQTLDQRHALAAQIEQVVDAHPLAAVLTSMPGVGVRTAARILLDVGDASQFPTAGHLAAYAGLAPVTRRSGTSIRGEFPARAGNKHLKRALFLSAFAALRSDPTSKAYYDRKRAQGKKHNAALICLSRRRCDVLFAMLKNREPYRAPTPTREPSPLPLAA

SEQ ID NO: 389176 - protein, 356 aa, unidentified
MPSKVKNFTYNGQNVYVGIDTHLKNWRVSIILDHLEMNTFSQNPNARDLARYLKRNFPGCNYYSAYEAGFCGFSVHNSLIENGINNIIANPSDIPTTDKERKQKNDSRDSLKIARSLRNGGLKAIHVPQRSTLEFRSLVRYRKTLVKEITRNKNRIKSALYFYGIPIPAELDTASKYWSGRFSQWIRNIELETKYGKPVFDSILDSVELLRKKLLDINRIIRNARKEGEYAPMLQNLCTIHGIGLITAVTFVSEIEIINRFNNLDKLCSYVGLIPTTHSSGEKDINGKITPRSNKPLRSVLIEAAWMAIRSDPHLGLMFNDLRKRMKGNEAIIRIAKKLLNRIRFVMKNETAYVNL

SEQ ID NO: 389177 - protein, 340 aa, unidentified
MYYIGLDVHKKTISYCTKRVDGTVHAEGKLDATRLALDAWLPGLPQPWTGALEATIFTGWIYDYLKPHAHVLKVANPAMLQAIAVAKKKNDQVDARMIADLLRCNLLPQCYMAPSEFRERRRTLRYRNLLVRQNVQMKNRTAGLLMETGVPYNKQKLHGKAYFAQLRKSPEVPDCIQPLLKIGRESIERIAKLDRALLKALRDDPALTARVERLLTIPCVGPVTALTWVLEVGEVSRFSSVKDAVSYCGLCSAERSSAGVQKRMPISKQRNKHLQTVLVEAAKLSQHFNDGLTRLHEKALLKGNRNRATIAVARKLVAYLLAVDRREKPFLEGEESAEAA

SEQ ID NO: 389178 - protein, 363 aa, unidentified
MKIMVGIDLHSNNALCGLMDENGRRLLHKKLPCDLAAILELLQPHRERIATIGIESTFNWYWLVDGLQDHGYHVVLANPAAMQPYSGKKHTDDVSDAYFIAELLRLNLLPTGHIPDRATRPVRDLLRRRLLLVRQRTTLILSFKSLNERTLGQRVPLSRVKSMKAEEAQARFTAAADQLLGGEQITLMSHITESITRLETHILSVTGKTRAYLHLQELPGIGKILGLTIALETGDAKRFADAGNFASYCRCVRSLRQSNTKKKGENNRKCGNKYLAWAFVEAAHLACRHDEQCRRFYDRKKQQTNPVIATKALACKLAKAAWHVMAEDAPYDAERVFGPGKKQDLGETGREPAKGSGPQSQQD

SEQ ID NO: 389179 - protein, 414 aa, unidentified
MELVYERCCALDVHKRQVTACVHVPDRKGKRTELRAEFQTMTPDLLAMRDWLKGLGVSCIAMEATGVYWKPVYYLLEDDFELLLVNAQHVKNVPGRKTDVADAQWLCQLLEHGLLRSSFVPPRPIRELRDLTRYRKSLVWERAREANRLQKLLEDANIKLSDVASDVLGASGRAMLAALCEGNNDPAALAELARGKLRAKLPALKAALQGRFSTHHALLLSHLLSHVDYLDGSIDSLSAEIEERLDPFERKRELLCTIPGVAERTAEVILAELGPDMSRFPSHRHAASWAAICPGNDESAGKRKTGKTRKGDRWLRTALVEAANSAAGRTKDTYLRAQYLRVKRRHGHKKAIVAVAHSILVAAYYILSEQKPYQDLGGDYFIRRQDQERLTQRLVRQLERLGQRVTLEPAPEAR

SEQ ID NO: 389180 - protein, 362 aa, unidentified
MRFYNQPHTFYCGVDLHARTMYLCILDQGGTIVLHKEVPAEAGAFLEAIAPFRDGLVVACECLFCWYWLADLCQAENITFVLGHAPYLPSPAGRGAGGEGGGKSKDDEIDSQKIAQLLRGGTPGAHAARLAYAYPKGLRETRDLLRRRMYLVHKRAEVVAHLVNTNSQYNLPPFGKKLIYARNRQALKIADRFADASVRKSIELDLGLLDSLDELIGDVELYLDRTVKVDDADTFYRLRSIAGVGKILALVLLYEIHRIDRFADEGDFLSYARLVRCQHRSANKIVGTGGKKIGNAHLKWAFSEAVCLLIRSCPVVKAWQARQEKKRGKKKTLAVLAAKLGRAVCLMLHRKVAFDVRRFLGQ

SEQ ID NO: 389181 - protein, 323 aa, unidentified
MNKYNEIFGVDISKDVFDVYGSKSGHNQFKNAASGFMFFLKNLPKKSLVVMEATGYYHYRLAQFLFKQGVLVSVVNPLSVKRFIQMKLAKVKTDKSDAKAICEYGQINQVPLYSALSDVQSECLQLFRLLDSYLKKRTMTKNKLHGEDVLGIPSKHVYRSLKRNRKHLDTEIASIETKLLSLVKQDQQAQLTLLKSIPGLGVKTALFLIVITDGFTKFETAAQLCSYVGITPTIRQSGSSVRGRSRISKVGNKKLRNLLFLCSFSACKHNKSCREIYERIVNKGKSKKLALIAVSNKLLKQAFAIAKSGNPYDETFVSVLMAK

SEQ ID NO: 389182 - protein, 358 aa, unidentified
MRIIGVDLHTGQQTIAMLDTETGELVEQTLKHDGDEVRKFYSALPGQVLVGIEATGSMHWFLELLDELGIDHQVGHPSEIRKAETRKQKHDRRDAALLLKLQVENRFPSIWMPSTALRDLRTLLLHRHQWVRMRTRLQNSLQAIALSRGLRRGRALWNQIGQHTIASLPLPPNAARRRTELQGLYRTLNEQIDELDKRVNGQALQRPGARLLMTHPGVGSVTALARDVFLGDPARFEDGKAVVSYVGMIPSEYSSGGQQRLGGLSKQGNPLLRFFWCEAAVHAVGQDPDLKRFYRRKLSQKGLGKARVAAARKLGIRLWIMLRDQIDYEEFCRRGQMRQKSGGARAGMPEVGHSPAMQ

SEQ ID NO: 389183 - protein, 361 aa, unidentified
MKKIQDFVLKGKEVYAGLEDSKKSWKVCVRSGRLVAHETTMPAEYENLRNYFHNKFPECKIRVMYEAGFRGFELHDQVVADGWECVVTPPHTVTEEKCSKKKNDRNDCRRLAKNNENDDYRICHVPDRQLREDRQVSRLYGQLQRDINRVCNRIRKTIDFHGINRFFASGSWNRHQYKVAEEQVKSLLISESLKFTFNVLFSELRQLRSLQKDVVLQMRKLARSERYRRTVDLLTSAPGIGVQTAIRLALEWGDMSRFETKEAFSAFLGLIPSDYSTGEQDHKGHITRQGNRNVRSWLVECAWLAIRHDPVLLEKYRRVVSHCGSGKKAIVAVARNLALRLRAMLLSGKPYQIGLIECAKA

SEQ ID NO: 389184 - protein, 356 aa, unidentified
MITSKVAQKMDFTNRKIYIGLDVHKKNWNVSIFVEKQYFKAFQQAPKPDVLIKYLHDNFPGGIYECAYEAGFCGFWIQRELSDKGISCIVVNPADIPITNKERNNKRDPVDSKRIASALEDGKLNPIYIPSIQLEADRRIVRLRKTITNDLTRSKNRIKSELFLIGIEIPGKYKGWSKPFIEWLKALDLEHKNWRSTLDVTIQRMEQLRSQLLLLNRDIRKLIKEDRYKKIGEQLLKISGVGVLTAITVLTEIGEIERFETFDRLNSYIGYCPTEHSSGESEQKGGLTPRGNSQLRELLVESSWIATRTAPTMAACYADLTKRMTGKRAIIRIARKVLNRIYGAWKNGLNYQTGIN

SEQ ID NO: 389185 - protein, 355 aa, unidentified
MKQQQAIQYLAFDVHQATIVANCRDAEGKVIMRATVATEARAILQLVKSCGPRVHIAFEEGTQAQWLHDLLVPHAEKVIVCNLRGQNEGGNKNDRIDVERLSLDLRNGTLKPVFHGTPSVLTLSELVRSYNNLVEDATRVMQRIKAMFRARAIATKGTAIYRPSEREQWLGQLQGGARVRAAALFKHLDVLVELRPPAKAAMLAEARKQSGWKVLRSIPYLGPVRVAQIMAIMRTPFRFRTKRNLWPYVGLAVVTRSSADQEIVEGRLRKRRRPPLTRGLNRNHNPTLKGVFKAAANAATARPGPLYDFYQASLRRGVREELAKVTLARKIVSVTLRLWRKGELWDPEKLTMQAT

SEQ ID NO: 389186 - protein, 366 aa, unidentified
MDKVKFYVGLDVHKDSIAIASAAAYSRDDPHFVGTTRYSVISLTKALSRLGAPSELSICHEAGPCGYGLVRALREQGYHCEVVAPSRVARRPADRIKTDRRDALLLARLHRAGELVPVAVPEPRDEAIRDLVRAREDAVNDQRRVRQRLKSFLLRHGHAYTGTRWGPKHELFLSKIKFEDSAQHIVFTEYRMAVRFATELVERLTQSLRAHTETWRWLPMVKGLMTLRSIDFISALTIVAELGDLRRFPHPREFMGYLGLVPSEHSSGNSKQRGRLTKTGNTHVRRILIEAAWNYRLPARIGESLQPRLEGQPRHIIDIAWKAQLRLCQRFRRLRARGLHQNKTCAAIARELCGFIWDIGTRLQPA

SEQ ID NO: 389187 - protein, 343 aa, unidentified
MDHFAGLDVSVKETSLCIVDDTGKIVREVKVASEPEALLHVLMNPAYHFKRIGLEAGPLSQWLFGALAEAGLPVICVETRHMRAVLKAQINKTDRNDARGMAQMMRVGLYRPVHVKTLRSQKLRMLLTHRKLLQSKAIAIDNDLRATLRNFGLKVGVVGTVKFEARIKELVEDLPDLVVLVEPLLIVRRVLREQVGILHRRLLAIVRDDDVCRRLMTVPGVGPVVALTYRATVDVPARFRNSKAVGAVFGLTPCKHQSGEVDRTGAISRCGDEMMRMMLYEAAQIVLVRSTKWSWVKAWAMKIARHRGMKKAIVALARRLAVIMHRIWVDGTEFRWTRDVAAA

SEQ ID NO: 389188 - protein, 308 aa, unidentified
MCTLGIDVSKNKIDLCLLTAGPGGKKKHKVLTNEPAVAHKVIDWLNAQRCVPESVTVVLEATGIYHENLAYGLHEAGVSVCMANPCRVREFAHGMDILNKNDAVDAFVLACYGELKPPAVWVPPSPEVRKLRALLRQRDALREDVQRTVNRLEKANSTSTPQEVIRSLERTKSWLNEELARIEKLITDHTDNDPGLKADLDLLKSIKGVKDQVGREMLALLKDGTFKSASQVAAYLGLTPVEKTSGSSVRGRPHMSKTGPSGVRAKLYVAALTASRWNKQAKAIYERLVAKGKAKKAALGADEWRTGE

SEQ ID NO: 389189 - protein, 341 aa, unidentified
MQDVTLIGIDLGKHTFHLHAQDRAGHAVWRKKCNRSQLMALLANTPACTVVMEACAGAHQMARDLGRFGHTIKLISPQLVRPFVKTNKNDFIDAEAICEAASRPSMRFVTPKTEAQQCLGAWHRVRESLVRDRVQVTNQIHAFLLEFGISLPKGPAVIKRLPSVLAEQRLPARLIVLLERLRDQYRALDAQIAEIEQDLAAQLQEDESGRRLLSVPGIGPITASLLASELGDGKQYGGARDFAASLGLVPRQHSTGGRAQLMGISKRGDKNLRRLLVQCARVYMQHVDRQTGRLADWVRDLLQRRHSNVVACALANKFARIVWAMTAKRVDFERLGEALPA

SEQ ID NO: 389190 - protein, 412 aa, unidentified
MLKIVYPICCGMDVHKSFVVACIATTNDHGVTNYKSKRFSTFTGDLRRCADWLSENNCKDVCMESTGKYWIKIYNILEHTCNIVLAHPKYVKAIRGKKTDKRDAKWIADIFKHDLVSGSFIPPADIRQLRDLVRYHWKLTNFNVGEKNRAQNCLTVSNIKLDDVFSDVFGKAASAITTRLLESNEPFDVKPYLTKNIKKPIEQIQAAVDGEMCAEQAEKLRIIRSHMDSLELCKLNLESLILSTAEKYIPQLNLVMTAPGIQSFAAIGIISEIGVDMSVFPTSKHLCSWAGLTPQNNESAGKKKTTRISRAGAYIKPLLVQCALCAIRTKQFPEVRNRYLALKKRRGHKKAIIAIARMLLTAIYNILKWNEVYNSELYRKADRPPAHREVSVEEAVFILQRQGYLVTAPAVT

SEQ ID NO: 389191 - protein, 338 aa, unidentified
MKITTIGLDIAKSVFHAVGVDKAGKLIKKKMLRRKDLLPFLAQIEPCLIVMEACSGANYWAREFELLGHNVKLIAPQFVVPFRQGNKNDYNDALAIAEAAQRPNMRFVKPKSVEQQDVQLLHRMRERLTKQSTALINQVRGMLAEYGIVITKSKSAFKVQFPDILADETNALTTKGRAIFYQLYEEFSDIEKRLKGCDVQVLTETKNNVICQRLETIPGIGPVTATAFYAAAGDGKDFSNGRHFSAWCGLVPKQHSSGGKDNLLGISKRGNAYLRTLFIHGARAVLQHSCHKQDKFSCWAIQLAERRGFNRACVAVANKLARMAWVIAAHDEEYRLPV

SEQ ID NO: 389192 - protein, 410 aa, unidentified
MEVLHPRCCGLDVHKDTVVACVRLVIDGKTVKEVRTFSTTTADLMALSQWLAENKCTHIAMESTGVYWKPVWHILADGKFELVLANAAHIKGVPGRKSDVKDADWVSDLLAHGLIRASFVPDSPTQEMRTLIRTRKQLSREQARHILRVQKTLEDANIKLDSVISDLMGVSGRKMIEALIAGQRDPVKLARLADPRVKASQETLRQALRGRVTKQHRFLLRLHLDQIDGIDAAIAKIDREVEAAIAPFRTAVEQISSVPGVKNLAALQIISEIGTDMKRFPSDANLVSWACICPRSDESAGKRRSTRIRKGSPWLKTALVQSAHSAVRMKGTYFHALFHRIRSRRGVKKAIVAVAASILTAIYHMLKDGTMFHDLGPDHFNRRTKEQQKDRLVKRLAELGYAVELAPLPN

SEQ ID NO: 389193 - protein, 352 aa, unidentified
MVIIGCDFHPGFQQIAMVDTEGGEVRQLRLSHTQEAEQFYGSLRGREVLVGMEACGYTHWFEQMLGELGHRYQIGDAAQIRASYVRKQKTDKRDAGHILKLLVEGRFPALPWVPTAAERDARQLIVHRHKRVQALTRVKNQLHALAINQGLRMRWQLWSKEGRQQLQALPLLPYAAARRADLLKQYEEMDREVDRLDKLVRQEAEAHPAAVRLMSHPGVGPVTALAFVLTLGDVRRFAHARQVASYLGLIPMEHSSGGKQQLGHISKQGNSFLRFVLVEAGHSAVRKDAELARCYARLKHRHSTGVAKVAVARKLALRLYWMLRNQIDYAQLPGPCAGKPVSFRDRKTRPAC

SEQ ID NO: 389194 - protein, 479 aa, unidentified
MNAKAKNNKNQVNNNFSVINTLSADERQSRISELLNTMQAKTWHDLETSGKFDKNAKLSFISDDMLIVGCDIGSETHYLRAIDRKGRELSKKPFSFLNNEEGFEAAKAWMVDLAAVNGKRQIVLGLEPTGHYWFCVATWLISNGISVVQVNPYAVKQTKEIEDNSQLKDDRKDPKVIANLVMNGNYGMPYLPEGIYADLRSLSLLRSQLAENRIRSINRLHRLMKIYFPEYKDAFGKTDGSFAMEILKVAPFPEDIIRLGEDGIRDIWHKAKLRGRGYSRAAEIFRYACVSIGKKEGSEPDRYSVKCHVEDIISLDERLATVEAAINEKCMEIPHVENILEISGLGQNIVAGIISSMGDIERFDDAKEIQKLSGLNLVANSSGKHNGETKISHRGRKELRTWLFQGAKSVVAHAPEFQYIHEYYTTRAKNPLKKMQSLIVIACKLLRIIFTILKKGITYDPQKMLDDIKRFEEAEIVAA

SEQ ID NO: 389195 - protein, 366 aa, unidentified
MKKISTVAVEGIQIFEDNQLTIGLDLGDRSSRYCILNEAGEIILEQELPTTAKGIEQVFSKIPRSRIALETGTHSPWISQQLSQYGHEVIVAHARNVRLISESSRKDDRLDARTLGRLARIDPALLSPVRHRSAKAQMHLTVIRARAVLVSARTALVNAARGLTKSNGQRLRKCGTEQMNRELAQGLSQELRDALDPLLAEIESLNERIAEYDGRIEQIAREGYPEVTRLKQVKGVGPLIALTYVLTLDDPYRFRRSRDVGCFLGLRPGRRNSGRNEPQLHISKEGDRYLRTLLVQGAHYVMGPFAQDSDLRRWGLKLAERGGKNAKKRAVVAVARKLAVLLHKLWVSKEVYEPLRNNRKGMAQVA

SEQ ID NO: 389196 - protein, 332 aa, unidentified
MDNCIGIDISKASINVHISKNSADVEVENNIKGFKTLHSKLKKIYKKDIGNNIFIFEPTGSYSEALRKYCYAQDIKCFIINPKQFSNYAKALGIEVKNDIEDARVLSKALSLAKEGEVRVPVYDEDVEHIKELMSYYQFTTKQTTQQKNHLEALESKEGDKFTIKELKRSIKDFQEKQKRIIEQIQTIIDTNAVYKNDYGNIKSIMGVGQIGAIALLHLFLKYPEANQRQITSLAGLNPVYKQSGSSIQSSYRISKTGSRLYRGALFMGVLSAVRYDKNFGAFYERLKKNKKHSTQAQIAVMRKIIITAHSLYKNNRKYDVDYHQKKLDSMD

SEQ ID NO: 389197 - protein, 470 aa, unidentified
MNHRRLVGIDLGIATAHTVRVLDGEGNVVAKRKAWPTAESLTAVETVALADCPAGTRLEVVIEPTGPAWLPIAVFFSARGHRVFRVSSQKAADLRRFLSRHAKSNGIDADTLARLPLFDPAGLRPLVLPSTERAALDRRVRATDRLTQAGADHKRRIKDLARQLLPMSPLTSELGAADLAVLERYADPNALTRLGMTRLTALITKASHHHQGAERASQWLEAAQASLALYDGHPAVDFAGLAAEVATEVRLLRATQAELAVHAAEREARYQAVDPDGLARSLPGLAEVGGPALTACMGDPARFGNGKRFRSFTGLTPKASETGETDRKGQPMSKAGSSLLRTTLVRAADTARKQDPQLARIYYLQMTERGKDHLGALCVVAACLAERAWTVMRRGTPYVICDTNDQPVTPDQAKAIIAGRWIVPPEIRARRRSKKTGKAPQKVLEGQSERGSLPRGTTPPRHRRPVKLTP

SEQ ID NO: 389198 - protein, 416 aa, unidentified
MKLFVGIDVSSEKLDVCFLTDDNQLSILSEISVANDIEGASFIRETILEFNNSYHFDQIVIGMESTSMYSFHPSMFFHEDEKLKKLNTLVTIENPFRVKQFSRMFDENKTDRNDALRIADFLRIQRFTTSPIKEEKYMALQRLTRTRYQLIKQLIRTKQHFLENLTYKCNTLAREMRDESTSLFSATLISLMTEDFTLDELAELPLEAFCDLLQEKGKGRFKQPEKIAKAIQRAITMSYRLGARAQESINVVLSVLVREIRALEKNIKELDKAIEQVIVVIPEYQCLTSIPGVGKVYAAGLIAEIGQIERFEDQTKLAKYAGLSWKVNQSGNYQSQNTPLTKQGNRYFRYYLVEAANSVKNYLPEYKAFYQSKYKEVPKHQHKRALVLTARKFTRLVDTLLRKHQLYTPPRSVIEK

SEQ ID NO: 389199 - protein, 351 aa, unidentified
MKDYTGKKIYLGIDVHKKTYAVTALCEKIVVKKATLPANPEGLVVFCNKFFPGAKIESAYEAGFSGFHLHRILEKNGIKNLVVHAAGIEVAIGDRVKTDKRDSLKIATQLEANRLKGIHVPSEEREEKRALTRLRDTVVEHRTTTANQIKSLLHQHGLISPTAQKKVCPKWIESLKTLPMRDGLRNALNHLVDMWQQLNVRIKAIDTEIVKQAAEDATLEMVYRSTPGIGPVGARILANEVEDMSYFDNERQLFSYTGLTPSEHSSGGHIRKGHISRQGKTVIRRILVLAAWKAIQHDTQLRAVYNRISVRAGGKKAIVAVARRLIGHIRACFRKKCLYRAEIKTTMATAA

SEQ ID NO: 389200 - protein, 421 aa, unidentified
MDVIYERVAGLDVHKRTVVACVRRMSGHQVSRECRSFATTTAELLALRGWLSESGCTHVAMEATGVYWKPVWNILSDGGFVLIVANAAHIKNVPGRKTDLNDAMWIADLLACGLIKASFVPPEDLQELRALLRARKQLVREQTSHVQRIQKTLEEANIKLDTVISDILGASGRRMIAAIIAGVRDPRQLAGLADRRLKATPKQLYDALHGRVRDHHRFLLQLHLAQWDALDAAIRAVDREADARIAELDDEEDAGQAPFCEVIVRLSTMPGVSVLAARTIVAEIGRDMSRFPTAGHLVAWAGLCPAQNESAGKKKSTRLRKGAPWLKTMLVQCAWAAKRKKGSYYQAQFFRLQSRRGPQKAICAVAASLLTAIYHMVKNGTLHHDLGAAHFDRRSSEAQAHRLLAQLAKLGFQVQLQPAAA

SEQ ID NO: 389201 - protein, 410 aa, unidentified
MEAIVERCAGLDVHQASVVACLTIGAAGAKPTKQIRTFGTTLPELEELRDWLAANKCTLVAMESTGIYWVPVYAVLEGHFEIVVGNARHIKNVPGRKTDVKDCDWISDLARHGLIAKSFVPPRPIRDLRDLTRYRSKLVQTASAERNRLIRLLESANVKLASVASDVFGVSGWAMLQALVEGQQSPAEMAQLARRRLRRKLAELERALHGRLEEHHRFLLGIQMRRIEAIEADIAELDRRLRAKLAPYARQMRLLMQIPGVDWVIAGVIIAEIGVDMSAFVSAEHLASWATMCPGNHESAGKRRSGKTRKGNVHLKTALVMAAKAAGRSKGTYLGEKFRRLTARRGALRAAVAVGHKILVAAYRMLASGSDYKDLGAGYLDQLNHHRAAGNMLRRLRQMGYDVQITPRAA

SEQ ID NO: 389202 - protein, 457 aa, unidentified
MSNKLRRKKKTKKFKAADLPIELKHVNLDAAGIDIGSDRHLVAVPVGRDEVSVREFGAFTTDLYALADWLKKCAVTTVAMESTGVYWIPLFEILERRGFEVKLVDARKTKHVSGRKSDVLDCQWLQTLHTYGLLTAAFRPADEICVLRGYLRQKEMLVQSSSMHIQHMQKALQQMNLLLHNVVTDITGVTGMSILKAIIAGERDSKALARYRDERCRNSARTIAKSLVGNYRQEHVFALTQAVELYEFYQAKISDCEKAIANFLAIQVTQTEDEPPPSQKNIPPRQRIRAGVDLRSRLFKLTGVDLFSIPGLGADTILTVLAEVGFDMSPWKSEKNFASWLGLCSGTKISGGKVLDRKSKRSANRAAQAFRLAASSLTRSATALGAFYRRIKARIGAPQAITATAHKIAIIFYQLLKCRTAYVEIGQQAYEQKFKERRFKAMQKQALAMGYQLIPAA

SEQ ID NO: 389203 - protein, 351 aa, unidentified
MRHFYTRQHRFYCGIDLHARLLAICIVDHETASVVCRTQIPADQQQLLDTLAPYRADVVVAVECLFAWYWVADLCAKEGIPFVLGHALYMKAIHGGKAKNDDIDAEKIARLLRGGNIPVAYVYPKGLRETRDLLRRRMHLVHQRAGLITHVQILNAQNNLPDFKKKLIYAKNRAELKVAERFLNPHVRKSVEVDLTLIDALDVQIAELELYLERTAKIEDPTTFQLLKTIGGVGKILGLTLLYEIHDIRRFAEVGEFLSYARLIRCTHESSGKKLGVGGAKIGNAHLKWAFSEAVCLLVRNYPAVKVWQAKRQKRHGKKKTLGILAARLGRAVYHMLRKREAFDARRFLGQ

SEQ ID NO: 389204 - protein, 322 aa, unidentified
MSQNNSCILYVGLDVAKLSLELNLAGKSHSLANDPQGHAQLLKLLAPHPHAHVVCEATGGYEQSVVRVLHGSAVAVSVVEAGRIRHFARAQGRRAKTDPIDAAVLTAFAQAVQPAPTAAPTQQQERLAQLSTRRRQLIQTRIAEENRSEHYTDPLCLRQAKQCLKMLQRQIQACDQAILKLIEADAELSHKAERLDAIPGVGTVVAATVLAEMPELGQLTHGAAAALAGLAPYNRDSGEHSGARHISGGRRVVRGALYMAAMSAIKHDRILKEFYLRLRAAGKKPMVALTACMRKLIVLMNRLLKDKNFELENKNLKISLAI

SEQ ID NO: 389205 - protein, 396 aa, unidentified
MSVVVGIDVGASKHVAAVCRADRQRAERSLLRYRNNRSGFEELDHWLQSQGTVERVVMESSGHYWLPLASHLRHSGHQVAVVNPLEAKYFAKSRLRRTKSDPADARTLAELGVRDQPPAREPLVGVEVREAARFCIRLVEDQARVCQRIRRLVEISFPELGEIFEDPTCETALAVLRQAPTARSAARRRLDTLANSVRPGGRRRLGQVKAKRLQELARETIAPPELDAQAALEVQLLIEQYDLLGRQIEVAERRVAEMLDGELARRLQTIPGVGPATAATLMAEIGDIRRFDDVDQVAALSGVHPAEKSSGRKGAREGTSWHMAKTGNPYIRAALYRIAVSGIKHNPVLRQHYAKKRAAGRSPMNAIGHCMGKALDLVWGVWRSDRDFDPNYRVRT

SEQ ID NO: 389206 - protein, 334 aa, unidentified
MTSIAHTRQVTVTGIICGVDISSSSLEARIGQQGAAASFPNHAEGIAALAGFCREQGVELVAMEATGGYEQQSFAQLSQTGLPVAILNPRAVRQFAQSMGRLEKTDRIDAGMIAWYAEVKPSPPVCLAPQSQQHLRALVTRLRQLTDIRTAQLNQQRLVTDRSVQASFKKLLALVARQIRDLEQAIAKLIEQDPLWRELNQVFRTIKGVADRTVARMMAEMPEIGTLSNKTISKLAGVAPLARDSGKHQGKRVVRGGRASVRDILFIVASVVGRYEPDFIAFQQRLRAAGKPPKVVRIALAHKLLVRLNAKARQVRQRIAALQPASSALLLGKI

SEQ ID NO: 389207 - protein, 439 aa, unidentified
MKLYVGIDISKTSCVAAFLSHENTTKRPALLHFAQSRSGFEALSARMRSLAPLAECTVLVEHTGHYAHPLLQFLHEQGVACSMLHVQERDRRKQKSDRRDAQALCRLLYNQQALGVEAEAGSRLYPLLAPAPHALRLSALTHHYEDVTVGIVARLNRLTAICDEVFPEFTRIFKDPNLLIALAYREHFPTPALLACATIDDLRALRRRSFPSEKQLVELQRLARESIGVKNADRLDGLLLEQQHLIAELRLLQSERADLEVKITAIVEGCREGQILTSIPGIGMIQAGILIAAIGTIANFRRAADLKSYCGWAPREVQTGTTSDSRYLPRGGNGSLRRLFYLATMTAIGHDTEFRALYQRLLPLKCSYDARTKRYRGAKKLIGRIAGQLITLVYALLQHDHEVLAALKEGEEAPTPVLYDREIHRRHRSGHYIPLKHAR

SEQ ID NO: 389208 - protein, 346 aa, unidentified
MDNYAGIDVSLEASHVCVVDGQGKILKEAKVASEPEALITWFAGAGAPMARIGLEAGPLSQWLYAGMKAEGLAVELLETRHVRDAFKSMPVKTDRKDARGIAQLMRLGWFRPVHCKSLPAQEVRALLTARKLLQSKRIDVEMSLRGILRGFGLKVGATTPRTFAKRVEELVEHHETLRMLSASMLEVRATLEAEFKILEKRIYTIARQDERTKLLMTTPGVGALVALTFVSAIDDAGRFTSSRAVGAHFGLTQRKYQSGETDVTGRISKCGDHQVRTALYEAANVILSRVVKPSALKSWALGVAKRSGPKKAKVALARKLAVILHRMLADGTTFNPAKSACPMIAA

SEQ ID NO: 389209 - protein, 407 aa, unidentified
MEHDQRQYNLKGVFIMIFIGIDVAKNKHDCCILGIGGEVLKDSFTFANNRSGFDELFTAIQSSMQGKQDNEVRVGLEATGHYSTNLVAFIRDSGIEPIILNPLSVNLFRKSQTLRKTKTDKVDARFIAAMLMTLNPSPRTPISYHIEELKVLTRNRSRLVGYCAKLKLSLTRLLDVVFPELPGIVWSRNQKSVHGLLLELPNARTIANCRIDRLTNIIKDASHGRYSRDKALIIRQTAAESIGSDSPAMAFEIQQTIRLIQNAQAEIKLLDKQIAIFIKSTKTPLLSVPGIGNTLAAIILSEIGDIHRFETPAQLLAFAGMEPSTYQSGNFNANNTPMVKRGSTYLRWAVLQAARLVAMRDKTFKDFLKKKRNEGKHYNVALSHVGKKLIRVIFHMLITDRVFVPQT

SEQ ID NO: 389210 - protein, 450 aa, unidentified
MKKQSKRSQSLPVINPNSAGIDIGASFHVVAIAPDKSDEPVRTFKAFTSGLHEMASWLVTKGITTVAMESTGIYWVPVYEILEEYGLEVVLSNARDTRSVPGRKTDVNDAQWIQRLHACGLLKASFRPTALVVELRSYLRVRERLTDYAAAHIQHMQKALTFMNIQLNLVVADITGVTGMRIIRAIAKGERNPAVLSTYRDTRCKSTQKTIEEALIGNYQLEQVFALRQALVMYDAYQVQIKECDLEIEAVLAKLSNGVEKPLEPIPKPKHRTKQPNQLNFDVRSALYNLIGADLTQIHGLGPYLALRMISECGTDMSRWTTAKHFTSWLTLCPGSKISGGKKLSSHSRKSNNRIVAHLRLAATTVGRSSTALGAFYRRLSARIGKAKAVTATARKIAILFYNAMRYGMQYKDPGADHYEQQYRDRVMKNLKRRAEEFGMELRPKTECVS

SEQ ID NO: 389211 - protein, 351 aa, unidentified
MLAEQLDYVVGVDQHRDVHALAVVHVVSGAVVFEASVAANSHGYAQALRLVDQHATGRRAFAAEGTGSFGAGLTRFLSAHGERVLEVSRLRRERRSGGKTDALDAIRTARSVLAQDRPSTPRASGAREALRALAAAREGAVNAKRAGLCQLQDLLVTTPEPLRSELRPLTRARLLQRLAATRPERRHDPELRGALLALRFVARRVLQLTAEERELAREIESITRKLAPQLLEQPGVGPLAAAQLLLSWSHPGRITSEAAFARLAGCAPIPASSGQTIRYRLDRGGDRRLNRALHMILVTRRRTHAPTIAYIERRIHEGKSRREATRCLKRYLARNLYRLLENGAPLATWQT

SEQ ID NO: 389212 - protein, 359 aa, unidentified
MNYIFVGCDSHDKTLVTKIAVNREAPEKKTFSATKTGRRKFVQYLKERAKGGAKVVVAYEASGNGFILCDELREAGLACHVLAPTKIERSTKQKRNKNDDRDADRLLEILRGHYLAGNRLPSVWVPDVQTRDDRETVRTRQDMSQKATAVKTQIQMLLKRNGEEKPEGIGKGWSKSYRLWLKGLAESGAERVGMKTALGSLLRQLEFLENEIDRLDQAMQQLSDSPRWKPITEALMKEKGVGLNTALKFATDIADFSRFRRGRQIGAYYGLVPSSQESGENNDRKGHITREGSPSTRQILCQSTWARVRHDEKEREVYRRLTARNPKKKKVALVACMRRLSVRLWHVGLQAQLKMKMEG

SEQ ID NO: 389213 - protein, 312 aa, unidentified
MTETNSVVHAGLDIAKAQLQLHLQNQQHVLPNTVTGHQRLIRLLRVVAGVHVVCEATGGYERKVVSALHSANLPVSVVNPAQVRHFALAQGQRAKNDPIDAALLTAYGHALRPNATPVPQAVLAELRELVQWRDHLKEQLVRARQPAEHATLAFVRRQQSKEARHLEKQMAAVEKELAAALTRHPCWREQVQRLAELDGVGTLTAVSVLSQMPELGHLNRGQAAALAGLAPWTRQSGPWEGQRHIGGGRAVVRRALYMSAVALARQTGSTLGKFYARLRAAGKPAKVALTAVMRKLLLQMNQVLKYHVPDPA

SEQ ID NO: 389214 - protein, 342 aa, unidentified
MDEYDGRQFVGIDLHRQRSVIVRQSESGEQLSAVRIVNDPVALRLELERAGTDPEVVLEATYGWYWAVDVLRDCGAQVHLAHPLGVKGFRYRRVKNDVRDAGDLADLLRMGRLPEAWIAPPQTRELRELVRYRAKLVAIRSGLKAQVHAVLAKAGVLIAVSDLFGVGGRQRLAKVPLGAAYAERVRSLLELIDVLDGHEARFAGLIAKRLCNHRGYQALQQVPGIGPVLAAVFVAEIGDVDRFTSPAHLCSWAGLTPKHRESDTVVHRGHITKQGSKLVRWAAVEAIQRYPTTSKIALDRTRIESRRGKNIAKIAAARKLLTLVYYGLRDGHIRALDRPRAA

SEQ ID NO: 389215 - protein, 340 aa, unidentified
MNATTYGLDVAKRVFQMYWVDAQTGEIVNRRFGRDELIRFLAQRPAGRVALEACGSGHWWARKIKAVGHEVVLLHAKFIRPFVQTNKTDAADARAIWTAVQQPEMRTVAAKTEDQQAMLALHRMRSLLVKFRTMQVNQLRGLLYEFGATFRAGRVAGLAEVRARMAELAEALPGTMVCGLQDQLQRIDALEQDIDRLERQIGTWQNQQAACRAIAEVPGIGKLTATALVATMGDAKAFKSGREFASFLGLVPRQSGTGGKIRLGSISKRGDPYLRTLLIHGARSVLCHAKVPTTWQRAIQARRPANVAAVAMAHKMARTAWAILAHGQAYQKDYVSVKPA

SEQ ID NO: 389216 - protein, 319 aa, unidentified
MTKEAIYVGVDVAKDTLDVADSGSRETRQFTNDHEGIAKAVQYIASLQPAGIILEATGNLEMPLAVALQAECLPVVIINPRQVRDFARATGALAKTDAIDARILALFGLRIKPEMRPLPDKQAREMGSLLTRRRQLMEMLVAERNRLSRSDEDVQLNIKDHIKWLKEALSDINNDLERRIQSSPSWHEKGNLLRSVPGIGKVVSTTLLIELPELGQLNRRKIAALVGVAPLNRDSGTMRGKRTVWGGRAKLRAVLYMAALVATRRNPIIAAFYRRLLDAGKVKKVALVACMRKLLTMVNAMMRARTAWNPEPIRKITEA

SEQ ID NO: 389217 - protein, 336 aa, unidentified
MFQLGIDVSKKTLDLCLLREGVKGRVKTRKLQNDINAVSAVIAWLSKQHCKPEDVHIIMEATGVYHESLAYGLHKAGGRISLANPHRAREFARGMGMLTKNDRVDAYMLACYGVLKAPEPWLPPPEEVRHLSALLRRRDALVADSTREKNRLEKYLATDTPSVIAESVEAMIGQLNAEIKRLDSLIRSHLNQHPELKKDFDLLTSIKSVGYQLGLNMLVILRSHDFATAEQAAAFLGVVPVEKYSGTSVRGCPKLSKIGPPEIRAKLYLASLCGLRFNPLMKAIYERLCLRGKAKMCAIGALMRKLVHWCYGVLKTQKPFDVGYLSSYARSACKAA

SEQ ID NO: 389218 - protein, 336 aa, unidentified
MSVYVGIDVHRKRSQVAVVSEDGTVELNKNVVNGSEPMLRLIGDLPSGTPVASGAAFGWGWLVRLLEDYGFDPHLVHPLRCKAIASARLKNDKVDAAILAQLLRADLLPEAWIAPAQVRQLRALLRHRASLVRLGTQQRNRIHAVVADFGYDRSGSYLSGPGRGWLAGLDLPAASREIVADCLAVIDGLAPVIDRIDGELRLHAKADPRVKTLTTLPGVGQFTALVMVAEIGDITRFPSARKLASWAGLTPTVRGSDRTVRHGHISKQGSAWLRWVLNQAAQTARRSPEFAASYAAIARRRGKKIATIAIARKLLTRAWHLLSDMQATGPATPPRP

SEQ ID NO: 389219 - protein, 339 aa, unidentified
MHYCGLDLGKKSSNFCIVDEKRSVIREGKVRNRVHELCRLFGKLPPIKIAIEASTKSFWIVDRLREFGHDAVVVDPGRTKAIGAAFIKHDKLDARILATLCAADVLAEIDRPTEEQRLARMPVVARDGIVRSRVKLVQLVRSLLDSEGIELKKCALNVFVDRVTDLWDEIPAGMAHAIEPVLTAIHMLTEQIADCDSRIEEAITKDPDAQLLMTAPGVGPIVAACFLMAVRDPSRFKSGRDVGSYLGLVPSLYQSGETYRRGRITKHGNRQARWALSMAASVLLSVVKKQSALRQWGLEVADRRGRKTAVVATARKLSAVLWSMWKNQTPFEPRLTEAA

SEQ ID NO: 389220 - protein, 414 aa, unidentified
MEVLYPRCCGLDVHKSSITACALLREQGRIRTERRRFTTMTQELKSLAAWLRQLQVTHVAIESTGVYWKPVWNVLEGHFTIVLANAQHVKNVPGRKTDAKDSEWIAELLQHGLLRSSYVPPEIIRDLRDLTRGRATLSQEASRLASRIQKVLEDANIKLSSVASNTLGKSGRAMLDALVAGQIDPEQLADLALGHLRAKIPQLRLALEGKIREHHRFLLKRLLHQLRFIESEIDLLDQRLEGLGQQDPTLAAAVARWTTVPGVDRVAAWSLAAEIGIAMEQFPTAAHLASWAGLCPGNCESAGKRLSGKTRKGSPWLGRMACQCAWAAARTKNTYLSAQFRRLAAKRGRKRAIIAVAHSILAIAYYLQKKRCDYRDLGSGYFDRLHADGLKRYLVRRLEALGHKVTIEAVGNAA

SEQ ID NO: 389221 - protein, 346 aa, unidentified
MNQIIRIGMDTSKHIFQLHGVDSAELPVLRRKLRRSEMLAFFGKLPPTIIGMEACAASHYWARKLREVGHEVKLIAPQHVKAYVKRNKNDGRDAEGLCEAMSRPTMQFVPVKTEEQQAALMLAGVRQQLITRRTQLSNAIRGYAAEFGLITAKGLVKVEPLLAQIAQDESLPALAREMFTLQGRDYARLQVELKTVEARLMAWHRANADSWRLAKIPGIGPIGATTLVMKAPDPRLFPSGRHFAAWIGLTPKDHSTAGKTRIGKITRAGDEMLRSVLVAGATSVIQQAKKGRGHPSPWLVALLARKSPKLAAVALANKTARIAWKLLTTGDSYDGARMPVASARAA

SEQ ID NO: 389222 - protein, 355 aa, unidentified
MNSVRYVGLDVHRDTISAAVLNESGRMIQQSILATRAAAILDFIGGMRGTLHVTFEEGTHSAWLYDLLQRRVARLVVCNPRMNSLLKSGNKSDAIDARKLAELLRADMLSPVYHGEKSAMEVQHLARSYALLTEDTTRVMARIKAIFRGQAISCAGQKLYGHKHRDEYLAQLGACALRRRAELLYEELEAVRQLRRQAKREMIVECRKYPETKLLCSVPFLGPVRAAVLIGRVQTPHRFRTKRQFWAYCGLALEMRDSGEYRVVDGQVERRKKPAQIRGLNWNHNHELKNLFKAAATTASFSNGVFREFYLGLLKKNMQPEMARLTLARKIAAITLKIWKKGEAFDAELMKLQAA

SEQ ID NO: 389223 - protein, 341 aa, unidentified
MQAITVGLDIAKSVFQVHGVDAHGQVVIRRQLKRRYVLAFFEKLAPCVIGIEACASSHHWSRRLQALGHTVRLMPPAYVKPYVKRQKNDATDAEAICEAVGRANMRFVPTKTPEQQSGLVLHRTRHLFIRQQTSVINAIRAHCAEFGIVAPVGRRGVEELLRGIANEKRVPELARACLLALGAQLRRIKEQILEFDRMITAWHRGCETSRRLDEIPGVGPALATAVVASIADPRAFRSGRDFSAWIGLVPKQSSSGGKPKLGSISKQGDRYLRGLFTAGALAVIRYAKIRGTGHRPWLTALLARRPIKVAAIALANKIARMVWAMMARGERYREPVALVAY

SEQ ID NO: 389224 - protein, 371 aa, unidentified
MEHTRFVGLDIHKERISIAVAESGRSCAVEYLGEISNDPVAIGRLCDRLERPSKTLAFCYEAGPCGYGVHRQLISLGHRCDVVAPSLIPTRPGDRVKTNRRDATMLARLHRAGELTPVWVPDADHEAMRDLIRLRSVVRQIVSRARQHLQGFLLRHGRKHGRGTAWRMAYRRWLSTLAFEHPAQQIAFQDYVDAVMDAERPLQRVEEQISGLLPEWNLRPVVDALQAMRGIALITAVVLVAEVGDFTRFANPRQLMAYFRLIPGEQSSGETIRRGGITKTGNAHARRALVEGAWAYRMKARIGRHKVDRIEALPKVVRDIAWRAQLRLCTRYRRLSARGKTANVVNVAIAREMVGFIWSIACTVQSAPKTA

SEQ ID NO: 389225 - protein, 342 aa, unidentified
MRYLGMDVHVKSTVWCLLDGGGEVVEKGKAPTTATELTGLVQRLAKDEPLVVAQECGKLSHFVHDVLSPLGAKLLTFNPYHLRVIAASRKKTDKRDAYWLARTVQSGLTPHPVYIPTGIVRQLRALLNERDSVTGQRAAWLVRAGTLLQSAGLDERKHSGKDWIEKLLQQPDGIDEQLKLALERCERMALALSGELAVIDARLHQYARSIEQVRRLQTIPAIGEKVALTIYAWIGDISRFHTARQLCAYAGLTPSVRQSADSSVTGRITKEGSKQLRRALTQAGDVLLFRCQSESSAPLKAKPARIAVHRARRKIAVVAAARHSCARPSTSCATRPTTTQLY

SEQ ID NO: 389226 - protein, 423 aa, unidentified
MQTDGANQQQYAASIGFDWGDQQHAIALQAAGSGRVETQTIKQTPESLHDWVLSLRNRFGGRNVIIAIEQSRGAVINALLGRDFVHVMRVPPKSLARYREAFYPSGAKDDIPDASLLLEWARDHRDKVKVWTPDKPETRALQKLTEFRRDTVGRRIVITNMLTQSLKEYFPQALSWAGELDTHMACDFLEKWPTLEKLQKAKQAQIRKFYQEHGCRRTEVIQQRLEEIRSARPLTQDSAVISTSITVLETLIPQLRCLIDAIDRIESQIHVLFNKHEDRDIFDSFPGAGPVMAPRLLAAMGSDRSRYDAALEVQQHSGIAPVMERSGNSTWVHRRFACPKFFRQTFHEFAGLSIRYSSWACAYYKMQIDKGKGHHAAVRALAYKWIRIIFRCWQKRVPYNEEIYLEALRRKNASLLKYLAAAA

SEQ ID NO: 389227 - protein, 343 aa, unidentified
MYYIGLDVHKKTISYCVKDAAGCVHQEGRIGSTRRELDAWIRTLPRPRTIAMEATIFTGWIYDHLLPHAEKVKVAHPLMLRAIAAAKKKNDKIDAGKIADCLRCDFLPECHMASTEIRDRRRTLRYRSLVIKQMVQMKNRVSGLLMESGVSYNKQRLHKVGYFAELMSTSEEVNESIRPLLKLSREMICRSQKLDYALVSSLQRDPLLKERLRRLQTVPGVGPITALTWALEMGEVTRFTSIKQAISYCGLCGDEKSSADKVMRMPISKQRNKHIQRVLIEAAKLAVRECHELAVIRARELERGNPNRATLAVARKMVGYMLAVERRNQDFVPAEKFSRAAAA

SEQ ID NO: 389228 - protein, 355 aa, unidentified
MTSSSKYIGMDVHKESISIAVRNSAGKIVIESVIQTKASMILQFIDGLRGEVHVTFEEGTWSAWLYDLLKPHVSQLIVCDPRRNALLKEGNQNDRVDARKLAELLQNNQLRPVYHGDHGLRAVKEVRSYLTITKDVSRVMTRVKAIYRSWGIPCSGTQVYSARHRAVWLEKIREPGVRRRAEHYYQELDGLRSLRRVVRKELLVESKKHQVWKRLCGIPAIGPIRAAVLLGIVQTAHRFRTKRQLWTYSGFGVEGHSSADHQVVNGQLQRKKKPIEIRGLNKNCNHHLKNMFKSAAINASTKPGPFQDFYAALVAKGMRPEMARLTLARKIATIVLIVWKRGVCFDANHLKPQTA

SEQ ID NO: 389229 - protein, 387 aa, unidentified
MIAHYSDEKFQKEFTIQNNKNGYNYLFNYLNRVNHPQLIFESTGIYSRAMVRFCRNNQINYIELNPLEAKFKTSSLRSWKTDQSDAHKLAQIAPFLNDSDSLNNTTDDIFFELRERARFHLEFENEQNRLKVEIIEILHQTFPGLEKLFKNRYSMIALNIAEIFTHLDFVLQDDSESIISTILKSTDKGLSQRKAESYGETLFKLANDSYPNVNSSSFLVKKAQLLIQKLKKSIGQLSQLDKEMILLAQELDCFEIIYSIPGIGELTAAMIIGELGDISRFKSNKQLNAFVGIDIKRYQSGGTHYRDTFNKRGNKKARRLLYLVIMNIIRGQHRYNNHIVDYYYKLRKQPNEKSHKTAVVACINRLLKTFHYLIMNHKLYDYEMSPH

SEQ ID NO: 389230 - protein, 444 aa, unidentified
MKTKKRAKVGMINPDAAGIDIGGTFHFVAVPADRSETPVRRFGSFTKDLHDLAKWLKECQIKTVAMESTGIYWLQLFLVLEEYGFEVFLVNAQHVKNVSGRKTDVLDCQWIQQLHSYGLLSASFQPDDMIRTLRGYMRHRKNLTQAYSTQILHMQKAFEQLNIKLHNVITDITGKSGQLIIKEILAGERDPERLALLAAGRVKASKEEIVLSLEGNWKEEPLFELRQSYELYLIYKQKITECDIQIQKHMEELAGENDVRKCQEIPRRVYSKNRLNFNASPYLKDLVGVDLTKIFGISELSAMEIISEVGVDMTKWPSERHFTSWLNLCPNNRISGGRLLKNKRIKSKNKAGQAFRMAAYALQRSDHYLGVFYRRMKSKGGAMFATKATARKLAIIFYRMVKSGSEFNPISVDEYERVYKDRKLVYLKKQASKLGLELIPAEAC

SEQ ID NO: 389231 - protein, 466 aa, unidentified
MMTKQVEEILDEPHEQIVQRVCAIDVGKDSGTVCVRVPAASGTGRRVSKVWDVPARTRAVLGLAAQLSDQGIEKVTLESTSDYWRIWFYLLEAHGLDVQLVNARDVKNVPGRPKTDKLDSVWLAKLTEKGLLRPSFVPSAQVRQLRDYTRMRADLTGDRTRYWQRLEKLLEDALIKVTSVASRIDTLSVRDMIEALIAGQRDPRVLAGMARGRMRLKYADLVESLTGQFDDHHAELARMLLHQIDTLTDQIDVLTARIEALLASLPAGNTPDPDRPAPDGQTRPGTRANAPADEAAQRRTPPTAADMIKILDQIPGIGPSNAQVIIAEIGLDMSRFPTAGHLVSWTRLCPRTIQSGKRSTTGKTGKGNRYLRAVLGEAAATGGKTQTFLGERYRRLIKRRGKLKTIVAIARSILVIIWHLLANPGTTFHDLGVDFNDHRIDIGRRTRNHVRQLEALGFNVTLTAAA

SEQ ID NO: 389232 - protein, 457 aa, unidentified
MAWLVDLESVREGIPDLPTLNELVGPRARVMQEARGKIASAFPPRLKTTRKGITAMHTPDMPLLVGIDLAKDSFTAAVGHQDAEEIRAFALNQKGLARFLQFLAGYGSFPEGFLFGLEASGPYTALLLNWLLSHGARPFLLNPLLIYRFRRAQSLRRTKTDAIDARTIVQYMAQAPQELQPLQEDDDVQVLANEYEHVAQQVARLKTQLRQQLHALFPELASSSALFSRRILHVLLSFPSAYALAHADPEQLAAVWSSTRPASGRGLALTCQRLQEMAHSSIGLHAPQREIALQSKIRQLLPLLEEQKTLRQALVQAVRDAHPQTWRILLSVPGLGPLTVALFLAHLRSLERFPSHRQLAAFAGIDPTTYESGQYKAQGHISKRGSPHLRRVLYLMAQAIIRRTETFGRYFERLTLRGKAYRVALIACANKLLRVIFALVRTATEFIDCPTPEVSHS

SEQ ID NO: 389233 - protein, 387 aa, unidentified
MTKNKGRVVGLDVHPDSFAGAIVEGSDPAQARVLSTSTRVELKQLEQWALRHTSTQDRLVLEASGNAFAVAARLRAIGRKVEILDSHRAGKVGKVYCANDRVDAVKIARIYLSALSPIVWQPDAKTLERREIFSAYQAVVKESTRAKQQLRSMLNEHCVRLEKGFRLCHPNAIRRLVALREWTPARTMLLQQLHGTLMAARGRRTLLRRHMAQEIVAEEALLRLTRLCGINLITLYGVVAAVGDVRRFPHSKKLVAYLGLNPSVSQSGNFEGSGALKRHGRGALRALLIQSGKKLLEVNNPLQKWGLAIAARRGRNKAAVAVARKLCVALWHVLMGHVIGALERLDTLETKLSKFATEMGPAALRAFGYNNKAEFVEKKLYVLRSYP

SEQ ID NO: 389234 - protein, 355 aa, unidentified
MTPTQYLPNDYDLFVGLDVDKNSFSFTIRDHDTMNQSKRIPSEPQQLDHYMQKRFAGKKVLYAYEAGPTGFHLHDYLAEKNLDCLVVSPLSIPKAPNQKVKNNRIDSQKLVDELRAGKLKSIRVPQDMYRELRHLINLRENYVDYRKSSKQRIKALLLYAHLDYVFKDAEQNWSNNYIQALEQLPCSPAMRQRLDMLLMDLEYARKQTSVILRQLRAFVESSPEIHQYMQYLLSVSGIGFITAVTVLGRIGDPQYMKNVRELSAFVGLVPVEHSTGDHVNYGSITHLGDRCLRSLLIESSWTAIRKDTELNQFYHRIKNRHHPKIGAKKAIVAVARKLTHRIYCVLKEQRLYIVR

SEQ ID NO: 389235 - protein, 400 aa, unidentified
MISVGIDVSKEKSTVCILKPYGEIVSKPFEVYHVEQELSELATMLLRLNDEVRIIMEATGIYHLPVLSYFKEKGFFVAVINPFEMKEYRCQGLRRVKTDKQDAITISHYGIDHWYRLKEYEAQENIYTELKLLGRQYCHYMRMRVESVLELTHLLDYTMPGIKTLLQGWNEKNGKDKLGDFAEEYWHYDNITKKSEKQFIDSYLKWAKKKGYHQNQDKAIKIYALAKEGIPTVSSNTPSTKMLVQEAVRVLREVDHTLMTILTQMRSLAKSLPEYPIVRAMGGVGDVLAPKLIAEIGDVRRFHSGKALIAYAGIDAPPYQSGRLVGTERKISKRGSSNLRKIGYEVMRSLKAHKVPEDAAVYEFILKKEREGKSKRAAKIAGLNKFLRIYYARVMEVYRK

SEQ ID NO: 389236 - protein, 421 aa, unidentified
MNQLSERPFTAYVGIDWASTKHDICLQVAGSEDRVFERIKHTPEAIEEWAQALYQRLGGPIAVALELSEGPIVSALGEYDFLVLFPIDPKRLARYREAFVPSGAKDDPTDAEFAMDYLMRHPEKLTPLKPESAPMRKLRYLVEARDRIRGDQSRCVNRLIQALKQYYPQAVDWFNDHNTLVFCDFLKQWPTLATVQRARKARLERFFKEHNVRFARLIEDRIQAIKAATPLTRDEAVIEAHRLQVEILVEQLRLTIQAMKCFDEEITAIATRFPDYGHLFTPLPGAGKVIAPRLLAAFGEDRDRYRCAAQLQQRSGIAPITKRSGNSTWVHWRFQCPKFLRQTFIDYAAQTINKSAWAGAYYRQQRDKGASHHVAVRALAYKWIRVLYRCWQERTPYDESKYLEALRRRGSPLLKQLAEAA

SEQ ID NO: 389237 - protein, 349 aa, unidentified
MVILGIDAHKRTHTVVAIDEAGRQLGMKTTTATTTEANLELLRWAERFGSDRRWAVEDCRHLSRRLEADLLSAGEVVTRVPPKLMAHARDAARTYGKSDPIDALAVARAAHREPDLPLARLDGPSRELRLLVDHREDLVRERTSQINRLRWHLHELDPAWDPTPRSLIRYRRLDAVADRLESFSGVVTRIARDLVARIRELTTAERALAREILIRVRELAPRLLELAGVGALTAAKIVAETADVRRFRSKDAFARHNGTAPLPVWSGNRERHRLSRTGNRQLNAAIHRIAVTQMRCHEAARTYLERRMAMGNTKTEALRALKRKLSDVVYRSLLADADTTPSASLGEAA

SEQ ID NO: 389238 - protein, 342 aa, unidentified
MQITTIGLDIAKHAFQVHGIDAAEKVVVRKQLRRSQVLAFFKALPPCLVGMEACASAHYWARELTRLGHQVRLMPAKDVKAYVKRNKNDAADAEAICEAVRRPTMRFVQIKSVEQQGRLMLHRTRDLLMRQRTQAINALRAHMAELGIVAAQGREGIKELLTIIASEEDARLPADAHTSLVVLAAQLQALQTMIRSIEKRIVVQHCANEASKRLQTIPGIGVIGAAAITATVPDPKVFRSGRDLAAWIGLVPREDSTGGKHKLGPISKQGDQYLRRILVVGAHAVLKRARLHPEQYPWLTQLLARKPFRVVAVALANKMARVAWALLAKGGTYRAPSLAAAT

SEQ ID NO: 389239 - protein, 347 aa, unidentified
MSITMIGLDTAKSVFQIHGVNETGKVELRRKLRRSDLIAFFEKQERCTVVMEACGAAHHWARILSGLGHTVKLIAAEAVKPFVKKGKKNDAADAAAICEAASRPDATFVPVKSVAQQGILALHTTRSLLVKQQTMLANAIRGLATEFGLVVPRGLHNLEPLVALVEADEAVPAQARRAIAELYKRFGELATGIQAFETAIVAHARSDATARRLATIPGIGPITASLIAATVVDISRFKTARQFAAWLGLVPRQNSTGGKTHLGRITKAGNREIRKLLVLGATSMVGRAEGWHSAVGSWLRDILQRRPVRLVTVALANKMARIAWSVMTRNEVYRPQGGVAAKAQAAE

SEQ ID NO: 389240 - protein, 355 aa, unidentified
METQTNLEKSFFENKELFVGMDVHKAKWVVTVRSYDLELKTFSMQPNGETLEKFLISTYPGAKYKIVYECCFSGFWIYDYFSEKGYSIIVTPTNRIYKDGSTIKTDKIDSRKLAFQLSRGLLREVMVPAKKIREFKYIFRIYDKQKMRKGQILRQVKAILEQKNHPLKWEKWNKGLVEKLKELKFEDKLFDLKFVNLLKEYEYVVSQIKDSEEIIGKIKEDEVLGQRITRIEKINGIGIISSVRMSVYLFDRKDRFESSEKLNHHLGLTPSERSSGDKVSRGRSGMCGNRQLRSIIIQLAWKSVRKDGALLDKFERVYKKSGSKQKAIVAVARKLMTKLYAIITKEEAYRVNLAA

SEQ ID NO: 389241 - protein, 344 aa, unidentified
MISVGMDIHSDKTVCDFFDPTAEPKRQHRTATVPTTREGLESALRPLKGQCRVAFEVGTQAQWVAQIIRPLAAEVQVANPSRITWLYRDGRKNDKRDAHKLSTLLSLNQLPTVHLPPADVSAWRALINHRRTLVHRRTMIKNQIRSILRTFAHRCPHRSCWTRIGMVWLRSLTFDAVRHEMVGALLEELTFVSKQVRGAEARLNTIAKTQPNVALLRSIPGVGPRTAEAVVAFTDVVKRFGNRKQFASYFGMTPTEDSSGRIHRYGHISKRGPSVVRWVLIEAVHQTVRRSPAFRAYFDRLHRGQRNRYKKAIVATGRKVLTIMFAMMRDQTRFSEDRVSSQAA

SEQ ID NO: 389242 - protein, 390 aa, unidentified
MICVGIDVAKDKHDCFIISSEGEVLADVFAFPNSMDGFTSLLQRIRACSSPQDKIKVGLEATGHYSYNILGFLLDNGLDSFVINPLHTNLYRKSLSLRKTKTDRVDARTIAAMLMSDVGLKPYTDTAYHNEELKSLTRYRFDKVKERAQLKQSISRLVCILFPELEKLVPTLHMASIYALLEEFPGAKQVADANLTHLKSVLCGASKGRYGRDKAIEIREAAKASIGSVMPAKSLELRHTIRLIHELDAEIDEIEAEIQQIMDELHSPITTIPGIGTRMGAMILAEVGDFSRFDSPDKVLAYAGLSPSTYQSGQLTNCYSHMEKRGSRYLRYAIFNATKYVCLWNPDFAAYLAKKRAEGKHYNVAISHAAKKLVRLIYALEKSGRAFQTA

SEQ ID NO: 389243 - protein, 351 aa, unidentified
MIIGCDFHPRFQQISFLLEETGECGQRRLMHTAEAEQYYRSLRGTRVRVGIEATGSYGWFRRLLSELGHELVVGDATQIRASNPRRQKTDKRDAEHILGLLVADRFPAIWQPPAENEQLRQLLLHRSRLVRLRTRVTNQLDGMAKNEGLLVPGGWSGKRRKAIEALPLPGWYGERRKDLLALLDRVEERIAPLDKAVGQAAASNAEARLLMTHPGVGPVVSLAYVLTIGNWQRFPRGKQVGSYLGLIPSEESSGDKRRLGHISKQGNTLLRWLLVEAASTAQRYDASWHRQYVRLSMTKHHGVAKVAIAHKLAVRLYWMLRSGEDYSQVRERGSHARQSECPVGRTTRPIE

SEQ ID NO: 389244 - protein, 390 aa, unidentified
MDVLYQSCAGIDVHQANIVVCILHGPLTSTRPKREMATFDTTTKGLCACHDFLSQFHVEAIGMESTGVYWRPVWHALCDDFELILAQPAHMKAIPGQKTDKKDAHWIAKLTRIGLLPRSFVPDEIIQELRELTRQRKHYVESRNRETNRIHKILQSGGIKLTTYIEDIMGLSGRNLLQLLVDGTPITPRIVRQSVYTSLKKKVPQLLEALDGYFSDHHRFMLKQSLEIYDFYQKQIELLEERINVYLSQYENHVEILDSIPGIDVITASVIISEVGVDMSQFPTSGHLASWAGLCPGNNESAGKKRSTKIRHGNSYLKKCLCQAAFAVKKQKGSPLADRFYQIQSRRGSQKATIALAHQLLKIAYILLKEQITYPEFLAQKKTTRDELVA

SEQ ID NO: 389245 - protein, 471 aa, unidentified
MGSPKSKQPKTKQSKKRAARNNKKQQDRPVIEANAAGIDVGAREMYVAIPPDRDPEPVRIFPTFTADLEALADWLVERGITTVAMESTGVYWIPLYQILEDHGIRPCLVNARHMKNVPGRRTDWYECQWLQYLHSCGLLRAAFRPEQEVCAIRALLRHRHELVQMASQHVQHMQKALTQMNLQIQHVISDINGVTGTAIVDAILAGERNPVVLAKLRHERVAADKETIRKSLEGDWRQEHLFTLRQSRKLYDSYVKMIEDCDKEIAPRLSQMEAKLDVSQKPLPQLSGPSRKRRKKRTGDFRFDVRKEAYSLYGVDVTRIPGLDGLVIPLFSEVGRDLKARFGTSDRFSSWLGLCTDNDKSGGKVLWQGIRKVKNRAGDIFRMAAAALHHSRSPVGDFLRRMKAKLGPAAGITATAHKIAIIFFTLVTKQIEYDGSVWAARDKERHQRFEQKVKRQARQLGYELVPIQVPA

SEQ ID NO: 389246 - protein, 442 aa, unidentified
MKQVIIGVDPHKLSATIEVVDDREQLLGGGRFPTDHAGYTAMRTYVKGWPDRVWAIEGATGTGLPLAQRLLEAGEQVVDVPPKLSARARLFDTGHNRKTDALDAHSIAVVAVRTSNLRVLKVDPELEALRMLTDRRETLTRRRVQTVNRLQRHLAELLPGTGKRDITALQAKAMLATVRPRDLAGKTCRRIAAEELTDLIMIETKVKKATAELKAIVAARDSRLMTIYGVGPVVAARILADVGDVGRFADRNRFASWTGTAPIDVSSGQNNRHRLSRAGNRRMNHMIHIAAVTQIRNDTDGQAYYRRKRAAGKKPMEAMRCLKRRISDAVYRQLVADAERAKLPTATAAAAMGAGPGGHRGATQESSAVDLTPHIDTSDKPLPGPAHPTLPGTGPAANPHPASAPRPPRRRAGAVKVQRPTGRTTLTATSVGAHSKAPKPRP

SEQ ID NO: 389247 - protein, 387 aa, unidentified
MHQPNDLSRSLVPFEQDATLVAVIELSQSSWLIAATVPGIERQPLKKIVPDETDLLKLLHRWRDEASRSGRTITRIAVAFEAGRDGLWLARWLSKHGIESHVIHSSSVAVSREHKRAKTDRLDTAMLMRVFIGWLRGERDHCKMVAVPTIEEEDAKRPCRERENLVGERTRIINRMKAALTRLGIRGFKPQLRKAPQLLESLRTPEGLAIPPNTLDEIRRDLARLTIVRDQIKAIEQARLERLEQTPQTGPNAMVRLLASVLGVGLETADMLVQEVLSRNLRDRRAVARYAGLTGAPDESGSKRREKGLAKSGNARVRRGLIQLAWRFLLFQKDSALTKWFRSRTEGPSGARKTKMIVALARKLLIALWRMVTTGEVPHGVVLRQPA

SEQ ID NO: 389248 - protein, 318 aa, unidentified
MNSPSMTVGIDVSKQRLDFARFPQGDTFSVAYTDTGLAKLLKRLRGWSPQIILLEASGGYEYGVVAALVAASLTPVLINPRQVRDFARALGILAKTDKIDAKVLAEFAFRVQPEPRPLPAAQQQELNHLLSRRRQLLEMIQMECNRREVSPFLRVRQSIDHNVDSLRRQLTDLEREINDFFNQSPLWVQQDALLRTVPGIGPQTVLSLQAWLPELGALNRHQIAALVGLAPFNRDSGVLRGRRMIRGGRHKVRQALYMATLSAVRYNPAIKALFDRLAGQSGKPGKVALVACMRKLLIILNAMVKNQTTWRPMTPLTS

SEQ ID NO: 389249 - protein, 314 aa, unidentified
MTDTAEIFVGIDVSKAQLDVAVHNQPSSWQADNTDAGIAELVKQLQAINPTLVVLEATGGFELRLVAELAAGKLPVVVTNPRRVRNFARSTGKLAKTDKLDAKMLAHFAAALRPEPRALPSEQEEQLTALLTRRRQMVDMLTAEKNRLHTVRATMRSDIEEHITWLTEKLAELDADIDQFVQGSTLWQEKATLLKSVPGVGRITASTLIAMLPELGTLNRQEIAALVGVAPVNKDSGRKQGKRRIYGGRAAVRSVLYMATLSAKKHNPKIKKFYEHLLKQGKEKKVALTACMRKLLVILNAMLRTKQSWQAEAA

SEQ ID NO: 389250 - protein, 407 aa, unidentified
MRLLIGDDWSEEHHDVEVMDTSGRRLAKARLPEGVKGMARLHAMIGEQLGDDADDAEVLVGIETDRGPWVQALIAAGYRVFAVNPLQAARYRDRLSVSGAKSDGADAHLLADMVRTDSHQLRMVAGDTAQVEAIKVVTRTHKTLIWERTRHTQRLRHALRDYFPAALAAFEDLDAPDTLELLGKAATPASAAKLSIGQISAALKRARRRNVADKAAIIQASLRAEHLGQPEVVALAYAASVRALTAVLSTLNEQVTALQEQVETYFGTHPDAEIVLSQPGLGPILGARVLAEFGDDPHRYANAKSRKNYAGTSPITRASGKKKVVLARFVHNDRLIDALGSQAFTALTASPGARAYYDQLKAREVSHRAALRQLANRLVGILHGCLKTGTLYDEATAWSHRADTLAA

SEQ ID NO: 389251 - protein, 332 aa, unidentified
MYFDHYLGIDISKATLDAALIIKEGEVVGQTKVANNSHGFNDLASWIRKLKVKLSDVLVCAEHTGIYGYDLQIWLDDMQISFAFVPALEIKRSLGIRRGKNDAVDALRIAEYAYIRRESISLSHKPSDVIFQLRALLGERKQYVRMRAALLARKDALHQYESKESIDRREKIIDKYAEYIASVDKQMRGLMEHDDEIKRNYELISSVKGIGLVNAINTLVYTNNFTSFQTPRQYACYCGIAPFEHTSGTSIKGRTAVSKMGNQQLKCELTMAARSAIIHDPWMKQYYKRKMMSKGNASGAHGIVLNAIKFKLIVRMFSVVKSGIPYKVMAYC

SEQ ID NO: 389252 - protein, 312 aa, unidentified
MMTDDSIGIDISKDFLDAHRLSDGGAARFPNTPTGFRALSAWLGGDIPARVVFEATGPYHRRFERALSRQLPLVKVNPLQARRFAQACGTRVKTDVVDARMLASFGNAFALEPDQPTDEKQYELRELFSARGALIKDRTRLINRLQTQTLALVRRQTKARIEQLTRQLKALQQDINVRLQDCPSRARANAILRSIPGIGEVAAATILIEMPEVGTLGKKKAASLTGLAPMTQQSGKWRGKASIQGGRKQLRDAPYMPALVAVKHNADMCKKYQSMIKQGKPQKVALTAIMRKLIELANTLIKADREWVQNRA

SEQ ID NO: 389253 - protein, 351 aa, unidentified
MPRTSTVHAVTAIGIDMGKNILHMVGLDSSGTIVLREKVSRGRIASRLANLQPCLIGIEAGMATHYVARELAALGHDVKQVPATYAKPFRQGHKNDFRDAHAVAEAVQRPTTRFVPAKTNEQLDLQALHRVRSRLVSERTAVINQIRGFLLERGIIVRQGLRFLRQQLPDILAKRTDVLSPRMIRIVGDLAGDWRQLDERIEIVTDEIERLAKSDDSCRRVMTVPGIGPIISSAMVAAIGNGVAFARGRDFSAWLGVVPKQMSTGDRTILGRITKRGNGYLRMLFMQAARIILLRPANWPKHGFGAWLVRAAQRLHPNVLAAALANKLARIAWTVLAQERSYEARVMKAAA

SEQ ID NO: 389254 - protein, 355 aa, unidentified
MNSAKYIGMDVHKESISIAVMNSAGKIVLECVVETKASIILQFIDGLRGDLHVTFEEGTWAAWLYDLLKPHVTRIVVCDPRKNASMKEGNKSDKIDARRLAELLRLNHLNPVYHGEHGLRTLKELVRSYLTITKDVGRVMTRVKALYRSWAIACTGKQVYAPQHRAEWLMKLTEPGVHRRAEFYFQQLDAWRSLRQQVRRELLEESKKHQAWKRLCQIPSIGPIRAAVLLGILQTPHRFRTKRQLWTLGGLGIETYSSADHRYVEGQLQRSKKPVLIRGLNENCNHDLKNLFKGAAIIASTKPGPFQEFYAALLAKGMRAEMARLTLARKIATIVLVIWKRGVCFDAQFLKPQTA

SEQ ID NO: 389255 - protein, 394 aa, unidentified
MHWVGFDVGKVFHWVCVLDGEGEVVLSRKVEATEERMEEVLSEIAELGETTERVVGIDILGGPATMLEALLLERRERVRYVSGTAVNKLREAYAGGENKSDPKDAFVIADQLRMRWRSLPEVAVRREHLAELRVLVGHRRDLVQEQVRRTTRLRAMLGEVFPGLESALDWRKEGPLLAVTKVATPAAARRLGEARLARWLKARGALKASTLAERIVSAAKSQRREMPAAEVKAALVAELASEILRTRDRLRELDGRLEELVEADPSGEVVRSLPGMGLVLTAEFLAEAGDVSHFVSADRLAAAAGIVPVLRASGGVSYQRRGRRGNRVLKRIFYRSAFSAISCHGPSRDYYRRKRTEGKTAQQAVIALARRRVNVLWAMLRDGAVYEGRTTTAA

SEQ ID NO: 389256 - protein, 454 aa, unidentified
MGRAQSKAIAWEAMPVINPSAAGLDIGSEEIWACVPANRAAQPVRKFGTYTPDLHALADWLQSCGIETVAMESTGVYWIPIYEILEARGVEVYLVNARHLKHVPGRKSDWQDCQWIQRLHSLGLLNGSFRPEGEMCALRAYRRHRATLIEHRAAHIQHMQKALHEMNVQLTQALSDITGVTGLAIIRAIVTGERDPLILAQMRDPRCAKPETELVKALTGNYRAEHVFALKQALALYDAYTEQIRECDQEIERQYSVLKPVHDDDLPPLDTSDKKNTHSKNAPSYDARTLLYQLLGVDLIAINGLNASTVEDIISEIGTDMDCWPTDKHFCSWLGLAPHNDISGGKVLRSRTLKTHNRAGQAFRIAAQAVSRTQTALGAYFRRMRARCGPQKAIVATAHKLARIFFFMLKHRTPFHDIGADEYNKRQREREIARLQKKAAKLGFTLTQLSTQPA

SEQ ID NO: 389257 - protein, 351 aa, unidentified
MPRATSNANVIATIGIDIGKNTFHVIGLDDKGAIILRHKLSRGQVYARLANIPPCLIGMEACVGSHHLGRQLSALGHHTRLMPARYVRPYSKGQKNDFRDAEAIAEAVQRPTMKFVALKTVEQLDLQGLHRIRERLVCQRTSVINQIRAFLLERGIAVRQGLRALRTEMPIVLAKTDKLSQRMIHMLEDLCTDWRHLNGRIEAVSKEIETLSEQDDGAKRLMTVPGIGPIISTATVAAIGTGEVFSKGRDFGAWLGLVPKQMSTGGRTILGPISKRGNRYLRMLFVQAARAVLLRPQSWEKHGLKLWIEAAARRLNRFKLAIALANKIARIAWGVLHGGRNFEVRPMNQAA

SEQ ID NO: 389258 - protein, 400 aa, unidentified
MNPVVGLDVSKGESHAQAFLDRGVPHGKIFRFKHDLEGLASFLRYIRGIEAAAGIRPSIVMEATGHYHSPVVQFLDEQQYLYIVINPLISHNAKKTNLRRLKTDAADAHLLGALFYKEEFEPFKKRGQHLMNLRYLTRQHESLTGMYVQAKLQFQAILDQVFPEYHGVFGDLYSKVSLRFLALHPTSKEVLEMAEKEITATIQRLTGRGKSALWCLERAQVLVAAARRNPFKETAFPSHLISLQLLIKLLLQYQDHLADLNKSIEALAEELLEYDLIQSIPGIGTKIAATILAEIGEIDRFDNAKKLVAFAGVDPSVFSSGKFTATINKITKHGSRRLRTALYQAVRCGIRSNRNKKLRDYYDKKRAEGKLFKVAIIACVNKLIHWIFAILTTKEAFRLE

SEQ ID NO: 389259 - protein, 344 aa, unidentified
MDHFAGLDVSVKETSICIVDDTGRLVRETKVASEPEALLAVLTNPAYHFKRIGLEAGPLSQWLYSALAEAGLPVICVETRHMRAVLKAQINKTDRNDARGMAQMMRAGLYRPVHVKTLRSQKLRTLLTHRKLLQSKAIAIENDLRGTLRNFGLKVGVVGAVKFEARIKELVENLPDLAVLVEPLLVVRRVLRKQLGILHRRLLVLVRDDEVCRRLMTVPGVGPVVALTYRATVDVPARFKNSKAVGAVFGLTPAKYQSGESDRTGAISKCGDEMMRVMLYEAAQIMLVRSTRWSWLKAWAMQIARRCGMKKAIVALARRLAVIMHRIWVDGTEFCWTRKEAAAT

SEQ ID NO: 389260 - protein, 361 aa, unidentified
MIRFNPLYWEATMRFYTQQHRFYCGVDLHARTLALCVLDATGQVVARLTVSAAPQAVLDALAPFRDDLAVACECMFAWYWLADLCHEQGIPFVLGHALYMKAIHGGKAKNDTIDAEKIARLLRGGNLPIAYVYPRAMRATRDLLRRRTFLVRHRAHLLAHVVNTNSQYNLPPLTKKLSYAANRAELDVAARFADPSVRQAVEADLALVDACDEQIRALELYLTRTAKVDDPQAYQRLRSIPGVGPVLALVLLYEIHDIRRFPEVGQFLSYCRLVRCAHESAGKKKGSGGNKIGNAHLKWAFSEATCLFLRGSAPAKQWLARREKKKGKARALGTFAARLGRAVYHLLRKKEAFDIGRFFAS

SEQ ID NO: 389261 - protein, 310 aa, unidentified
MDAIVVGIDVSKDRLDVAVRPTGETFAVERDAESLSRLIARLAPLEPQAIAVEATGGYETVVAASLSAAGLPVVVVNPAQVRAFAKALGKRAKTDPIDAAVIAHFVEAAKPDIRPMPDEQTRLLADLVARRGQIVQMIVAERQRQKRLIEKRLQKSIARLLAALQKELSSLETDIDEAVRGSPAWREKEDRLASVPGVGPTIARTLIAELPELGRLDRRKIAALVGLAPWTRQSGQWKGKSFIGGGRTQVRAALFMGALVAARHNSALRGFHQRLLDAGKPKLVAIVAVARKLLTILNAIIREQKPWLPA

SEQ ID NO: 389262 - protein, 354 aa, unidentified
MNDTGEKLAAKRFPEGLEGIAGLHALIAEHTTDPGEVIVGIETERGMWVQALIAGGYRVYAINPLSVSRYRDRHNVAGAKSDPGDAKLLADLVRTDRHNHRPVAGDSDEAAGLKVLARSHQNLIWDRTRHTNRLRNDLREFFPAALVAFESLADRDAVAVLGKAPHPELARRLSVAQIRSALRKGGRQRNLDDRATQIQAALRTPQLTAPPDVAAAFAATTKALVEVIAGLNDAIGELETELATHFDEHPDADIYLSLPGLGVVLGARVLAEFGDDPDRYDTAKSRRNYAGTSPLTIASGKKHAVLARHVRNRRLYDAIDQWAFCAITTSPGCRQFYDHRRTCLLYTSPSPRDS

SEQ ID NO: 389263 - protein, 333 aa, unidentified
MNHVGIDVSSKELAVVVSVKGKARSAKTFENTASGHQAIIGMLSKLKGGSRACIEATGIYHFDLAVALSRAEGIEVMVINPKVAHNFAKVLMKRSKTDAVDAGTLAVYCERMSFEAWQRPADGHLALRAVSRRITALTKLKTQTKNQLHALKATGGTPDLVIGHTDALIEVLEKQIQAHRDSALELIAGHDGLATAFALITGIKGIAQASAVQLLGELMILPQDMTAKQWVAYAGLDPRHFESGSSVSKKPRISKAGNKFIRQALYMPALVATRYEPNIKGYYAHLVEDNGLKKIQAVCAVMRKLLHAIHGMLKAKKEFDGTRFYTRPAQATS

SEQ ID NO: 389264 - protein, 348 aa, unidentified
MIVGIDVHKHAHAAALLDERGATIGTLAFANSPAGMHKLCSWLADHDAAEAVVGVESPAGYGRLLVASLEAAGHEVLNVPAWQTHRERRRHGPGKTDPGDAIAVAQVVLRNRARLGPALEPELVRALALLELQRRRLVRDRTQAIQRLRADWNQIDPVGEARVTNLSRQRELRRLKRISFGDGLVEQVATRCIRDLARDIEDLNQRIAMLDREIAELLAEHGNPLADLHGAGVQIAAAVIAHAGDVRRFRNAAAFARFCGAAPIPTGSGKTASRHRLHRGGNRQLNAALYRIAIVQARHHPPARTYLARKTAEGKTPREARRALKRHLANVIYRRLYAWAETTAALNT

SEQ ID NO: 389265 - protein, 467 aa, unidentified
MQAFYMGLDVSKGYADFMIIDRQKRPAVKGFQLDDTFEGHRCLYNTLGRFFAEQPDSILFAAMESTGGYENNWYNCLLQFQGSMNIQTARLNPLGVMHNSKAHLKKNTTDRISAQNIAEYLVAHPEKVQYQKEDQLAGLRKQWGFIRMLTKQCTQFLNQLNNLLYTACPELLQYCQDGMPHWLLKLLVKYPSASKLSKAHARTIAKIPYVSVQRAQRLIAEAKRSVASSAADPVTQQLIVATAQQILHLKETISVQTKQMLNQCNLSEIELLKSFPGISDASAVGLLIEIQTIKRFANVKKLASFFGVHPVYKKSGDGVGGIRMSKQGRKEPRHILYMIALSAIQHNPVIRQVYEKHQLQGKHNMAAIGICMHKILRVLYGMLKHNKPFDPRIDFANQTRNVRAINDGKVKNTGRRFQDYDTQAPVSRRHRKKRLERERSNSVSDTKLGITAPVPLGNIITDIMPQL

SEQ ID NO: 389266 - protein, 410 aa, unidentified
MRYYLGVDWADQTHAVWVVDERGTKITARTVPHTAEGLSEWGRELDEWRAHGIELWVAIERPEGRVVDFLLDHGIVVYPVNPKALDRARDRFRQSGAKDDPFDARVLADFLRTDHAHLRPLRPSSEAAQELKLLTEDYQRQVRQQTRLVNQLTITLKAYYPRALEVAELTTGLAQAFLQAYPTPAAVAALTERQWQRWARAHRLSATRTRELWEVLQRPQLPVPAHVVRAKARLLRSLVAQLTPVVAAVGEYREAIEDFFARMSTAQWIRTLPIGDHGITAPTLWARLGDAPGRWEAFRHLQAQAGAVPVTKRSGKQQRVVHFRVACDKALRYVVDQVAFLSLRSCEWARAYYDQQRGRGHSHRRALRALGAKWLKIIFVMWQRHASYDEPYHLATMARQQLRQPQTKIA

SEQ ID NO: 389267 - protein, 356 aa, unidentified
MNQITTVGVDLAKDLIVACAADVAGRTQFYKRCGFHGFAAWAANLPPCTIAMEACSSAHYWARTLSALGHNVKLLAPDLVKPFRKSQAAKNDRNDAQAILITALQPDMRFVAVKSLEQQSILAVHRMREGWKSERTALINRVRGLLSEFGIWLGRSPQNLARSLPRLIQDEELPARIRALLSYAQQHLGQLEALMERCELDICQHARHSEPAQRLCTLNGIGPITASAIVATVGDARDFRNGRQMAAWAGLVPKQSSSGGHDRLGKITKRGGYLLARTADAGGTLDIKCSARASTRQALTPPALDRRAATARRLPQNPGGDRQQTRPHLLGNAGTRESLRPQQLAAARPCNRLICQ

SEQ ID NO: 389268 - protein, 421 aa, unidentified
MKNSTAKKVRQVPAGYLVVGVDPHKKRHAAVAITQDFAVHGKFKFNNSREGLEYLLQRVKAEMVKSDCRGIMFAIETGGHYWRNLAYFLDEIGIPFRFINQFTLKRRREGKDLNRRKNDYRDSEVAAQLLCTGEFTETRLQQGVYAELRAAYNAYRRLVKERTRIANLIKGLLDGLFPEFTQVFKDPCGLTALSVLSTCPIPGVIAGMTEEEFASTIKASHQGRLMRKKLCALRYAAETSIGINAGAQPVSTELSFLVEKLQLIKRHIRSIDGTLVRLVDITEEGNYLLSIIGVNYISVAGLLAELGSFRSYRSAKQLIKMAGSNPTESESGGKRGSHTPMSRPGRPALRNCAWTAVIPMLRFNPDFRAWAKELRERPVHKNPLAKREVVGAALNRLLRLAFTLVKKQTFYQTPHPVQVTS

SEQ ID NO: 389269 - protein, 324 aa, unidentified
MSTVVGIDIAKHTFDIATLQANGKHRTKAKLANDPKGFEVLLQWLNEHAEAQAWIVMEATGIYHEALAEWLYERGYQICVLNPAQIAFYARSQLQRVKTDKVDAKLIADYGHRHQEELRAWKPEQPSIKRLKALTHRLKDLQELKQMEQNRLEVTSDAKVAASIQSVLRHIHQQIADTLEAIKQHFDDNDDLRGQRDLLKSIDGIADRTAALLLAELGDVQRFEGSRAVTAFAGLSPRLQESGKHKGHVRISRMGSALLRGGLYLPAVVSMSHNSAIRAMADRLRAKGKSGKQIVCAAMRKLLCIAYGVLKSGKPFNPELALAK

SEQ ID NO: 389270 - protein, 430 aa, unidentified
MKKNNSNSQTNSDRAGKPGKARGPVQRDAKEVVAELVARLSQKLEPRSAGARAGEARQQDLPGPNRDRLTVGVDLGDKWSNFCIVGLDGEKLTEGELRTTQEDFAEFFQSLAAARVVIEVGTHSAWARDVVAGCGHEVLVANPRQMEGPKRRKRKNDRIDAHKLARIGRMDPQSLFPVEHRSVKVRQDLVAVRARDALVAARTQLINTTRGLVKSMGGRLPKCSSPSFPHKVEEALPAEVREVLLPLVRLVETLSDGIAAYDEKMEKLGSEKYPQTKLLRQVKGVGPITALAYVLTLENPQRFAQSRDVGPYLGLVPKQEDSGDSQPQLRITKMGDMMLRRLLVGSAHYILGPFGPDTDLRRYGIRLSERGGKNAKKRAVVAVARKLAVLLHSLWVSGEVYEPLRHALPKATEEEAVRHAPAEATEKEAA

SEQ ID NO: 389271 - protein, 346 aa, unidentified
MEHYVGLDVSLKLTAVCIVDRTGKIEREGVVHSDPEAIAAFIKSNAPHVARIGLETGATSTWLWTELNRLGLPVICIDARHAKAVLKMQINKSDRNDAVGIARIMQCGWYKEVRVKDLDSHAVKALLVSRALLVKIKRDLENQVRGLLKNLGLVIGRAKMNAFAWRAAELIEDQPELAAAVTPLLNARVAIERQIADLDRKVLKLARNNARVQQFMTAPGIGPITALCFLATIDDPKRFRRSRSVGAYVGLTTRRYASGEIDWTGRISKCGDKMLRSYLFEAANVLLTRVAKWSALKAWGIRLAKRSGLRKAKVAVARKLAVILHRMWVDGTGFKWSSKETADQTA

SEQ ID NO: 389272 - protein, 445 aa, unidentified
MDVVFLRCAGLDVHKKSITACRIVPDPTGQETEGIAELRTFGTMTLELLALADWLTEASITHVAMESTGEYWTPVYNLLEGTLTVFLVHAAHVKNVPGRKTDKADARWLAKLMRFGLLQASFIPPQGQRDVRDLTRYRTKLVQERVREVNRLQGVLERANIKLASVASDIMGVSGRAMLAALIAGKADPATMADLAKRRMRAKLPLLEQALTGVVRDHHRQLLAMQLAHIDFLDEHIAALNTTIATALRALSADASLSPQPLPRATASSALPLTGSTPLTFTRAVELLDTISGVDQRGAEVIVTEIGIDMSRFETAPRLAAWAGVAPGNDESAGKQRSGKTRKGNRSLRAILTQLAHAAVRTKGTYLSALYQRLAARRGKQRAIIAVAHSMMRSVFHMLSRNESYRELGANYFDERRRHYTVDRLTRRIEPLGYRVHLEPVASVA

SEQ ID NO: 389273 - protein, 326 aa, unidentified
MEHELHYIGIDTAKEKLDVDVLRPDGRHRTKKFANTTKGHDELVSWLKGHKIDHAHICIEATGTYMEPVAECLYDAGYIVSVINPALGKAFAQSEGLRNKTDTVDARMLAEFCRQKRPAAWEAPHPLERALRALVVRHQALTDMHTQELNRTETAREVQRPSIDAHLLWLEAELKRLEKQIKDLTDDDPDMKHRRKLLESIPGIGEKTSAVLLAYIGLKDRFAHARQFAAFAGLTPRRYESGSSVRGASRMSKAGHVSLRRALYMPAMVATSKTEWGRAFRDRLADNGKKGKVILGAMMRKLAQVAYGVLKSGVPFDASRHNPVAA

SEQ ID NO: 389274 - protein, 322 aa, unidentified
MAMHSFAGIDVSKDRLDVMVLPEEQCSSVSNDPTGWAKLVEQLRGSSIAAIGLEASGGYERGVMRSLLAAGMSVRQVNPFKLRQFAKASGVLAKNDPLDARMIASFVAIMPTRPAQPRAPALERLVEMLTVRRQLSAEKVAAENASRLLENAMLQRLSRRRIARLAADIDMLDERLVEIVVADAALAHRYRLLTSMPGVGPVLACTLIALLPELGRMSRKQVAALVGVAPYAFESGKLKGKRCVWGGRAPIRHVLFMAAMSASNWNPLLKRFHDRLAATGKLPKVVIVAVMRKMITTLNAMVRDDVVWAGRHSGRHNVPTAR

SEQ ID NO: 389275 - protein, 399 aa, unidentified
MCQYFVGIDVSKGCHTAAVVDEDGQLRLKGFDFGDDTVGYAKLLEALARLPEVSSLHVCLEATGNYAHRLAAFLRPQPGFTVSVVNARSSHHFAKVLMSRTKTDRVDAIVLARYCRALRPRATVAAEQAALARLTRSRHTLQLSLIAQLNLLRNLLERVNPGVERGFYRLDCYGALAVLDRYPIGGMLAQARPDRVAQLKANTRRVGKVRADRLVASARSIPGEQGAATDAMVVRQLVAAIRQLQRSLSALEETIAEQVQGHVLFTIDGLGPNTVPVILAELPVDQLDTDTQAIAFAGLNPRLRQSGRLAGKVKLSKCGSAALRQALYLAALSVRNHNPVLRQYYLHKLAQRKRPKAAIIACMSKLLRIIFAVLKTGRPFDPDYENKRLAGRRLALQVA

SEQ ID NO: 389276 - protein, 457 aa, unidentified
MSQAKRSRKSRDLVPVHPAAAAIDIGATIHVAAVGPDRDNEPVRTFRTFTDDLHRLADWFASCGIKTVVMESTGVYWIPTFEILEQRGFKVMVVNARDAKHVPGRKTDVSDAQWLQRLHEYGLLRASFRPQAEIAGLRAYLRQRERLLDYAAAHIQHMQKALTQMNLQLHHVVSDIMGVTGMSIIRAIVTGERDPNVLASHRERGCHASVETMCQALVGNYREEHIFALTQALELFDVYQTKVVACDKQIAAILTRLKQAAPPPASKLLPARRRTRQPNAVAFDARTALHAILGVDLTQIDGLGPYLALKLVGECGTNLAAWPSAKHFTSWLALAPHNKISGGKVLSSKTRRTSNRAASLLRLAAGTVGRTETALGAFYRRLSARVGKAKAITATARKIAVLFYNTLRHGMSYADPGATYYEDRYKQRVLANLQRRAKSLGFVLREAEQQVAQMGVS

SEQ ID NO: 389277 - protein, 453 aa, unidentified
MEQPQEIEDEEYERTWERVAAIDVAKGSGVVCTRVPDEDRPGRRKTHVWTVTATRQAVIELADHLRGLQVQIVTLESTSDYWRIWWVVLEAAGLKVQLVNARHVKNVPGRAKTDKKDAVWLAKLTERGLLQPSFVPPPEIRQLREFTRLRTDLVRERTRYWARLEKLLERALIKISAVLSKLTTDTARAMIEALIDGQRNPKILAELAIGKARSKRVQLAEALDGDWQPHHSELARILLDQIDALTAQIDALTDRVSELIDQIPAAWGVDADGVTGPQAGTGPDAVILPAVARLDEITGCGIIAAQAIIAEIGLDMTVFGTSGRLVSWARRSPQTRQSGKKTTTGRAGKGNPYLNGMLGEIAASASRTDTFLGERYRRLARRRGKRKALAAIARSILVIIFHLLADRTARFTDLGPGWYDNQIDAQRKTRNLIRQLEALGHTVALTPAGAAAA

SEQ ID NO: 389278 - protein, 352 aa, unidentified
MSNQELFPNLTIGLDLGDKVSRTYEVDARGNCVKTAAVATTPGAIERYFGGRPRCRVALEVSTHSPWVSRQLEALGHEAVVANTSEIFSRQRRKRRNDKLDAEFLARQARADVKLLYPIQHRGAEAQEDLALLRARDQLVQARTQLINHVRGAVKSLGARISKCDTDVFAKRAAAQVPEPLRPALAPLLEVIGDLTKRIRELDRQVERMEEKYPEAVHLQQPAGVGPLTALAFVLVVEDPQRFKHSRDVGPFFGLVPKLDDSSDSSPQLHITKAGDTLVRRYLVNAAHYILGPFGPDCDLRRYGQAISARGGKNAQKRAAVAVARKLAVLLHHLWVSHAAYDADWTLHPRAA

SEQ ID NO: 389279 - protein, 430 aa, unidentified
MLGVGIDWAEQFHLVALGSPDDGVSEVVRIEHTAPAMAALITRLGRLEPDPAEVRVVIETSHGMLVEALVDAGYAVLPVNPDLIARRRGPARKKDDTEDARIACLLALDRFTTLRPLIPHGPVAAELRAIARDDERASRDERRLLNRLRADLIATFPAALTIAGEDLGAPTFLRLLQSWPTAAELRAATREEITALARAGRHGWPDHFADRIEHALNSTDVFTARDYLVRAKADTIRLTAVQLLAIGAQRRTWEKRMGALLLGAPRRGRARQPSPTQNGGPHPNGFPGGEIYLSFAGLGDRLAARVAGEIGDHIDYFTSPNALQCYAGKAPVTRRSGKSEYTVAHRLACNRHLRDAVQTWAFCSLNTSGWAREFYDTHRARGHTHHATLRALGNRWLEVLWHCLTKDVLYDEAIHTANRNRALAPKPAAA

SEQ ID NO: 389280 - protein, 342 aa, unidentified
MILKQNVGIDLSMKKFDVNLSVLDTSFDKRCLGTKQFENTANGFNQFMEWIDKRKDKTVEELFTLEFTGVYYEQLAYFLREKGKTVHMVIPSKSKKYCESLSIASKTDKLDAQALAWMGLERKLREWEPLSSIFLSLRVLTREREELLKERTIVSNRLHAVKHKASPSEATINRYNERLSLINDQIEEIENEIKEMIKSDEKLNEKVKNIITIPGVALVTVSTVLSETNGFSSVLNQKQLTSYAGYDVQLKESGKFKGKSKISKQGNAHIRRVLHFPAQTAITYNKPLGTFYERVNAKKEKSMIAGVGVQRKLLCLIYAIWKTDRVFDPNYETNKYHYKKVG

SEQ ID NO: 389281 - protein, 421 aa, unidentified
MVKVRPVCRWTGRAIGLDLHRDFCEIAICEEGQTHGAGRVAMTPEGIDALADSLLPTDRVVMEVSSAAWEVARRLEGRCQQVVVVSPDDTGIAQARAKTDKLDCRTLASLLWRGQLEAVWTPDEQVRVLRRRLHRREQLVRARTRAKNEVHAVLMRTLRGKPPCSDMFGVKGRRWLEQLRQQLAVEEAETLESALRQIDFLDAEIEQVERTVAQQMLDSPEAKRLLTVPGVNVIAAAAFLAAVGDITRFRDSRKLIAYLGLDPRVRQSGDQPARPGRISKRGSAQARWALVEAAWSVVAQPGPLRAFYERIKGRRGHGKAIVATARKLAILFWCLLSRGEDYAHQQPSLTAQKLRRLQLAAGAPTRKGKPSGTWATRERIRHAEKQLAEQAQASYERTVRDWQAAGPNKKKVGASVTPERA

SEQ ID NO: 389282 - protein, 424 aa, unidentified
MKVTFQTCCGVDVHKSFLVATIIKTSSGIEPSYQKRRFSTFNNSILEFKKWLLENECLYVCMESTGKYWIPVFNLLEDEINVTIANPKWVKAVKGNKDDTKDSKWIGDLFRLGLVRGSYIPCKKIRILREFTRYRYKLVSCRSSEKNRYQNALTVCNVALDSVVSDIFGKSSTSIIDYLLGQSGTSIDHEVIASKLLKRLKAKEDAVIESIEGYQMTDSQKYRMHLVRAHMDYITAAINDVDSEIESLISSDPDYENAVELLCTIPGVKYDSAITIISEIGIDMSQFCSSKRLCCWAGLTPGSNESAGKKKSVRITRAGVYLKPALVQCAHAAVKSDKSPYYKKKYESLVKRRGKKRAIIAIARMILTAIFQMLTTGETWNPCDLYKIDMPVALVEKQKAKAIRQAKKLLQREGTLPPDKPLAS

SEQ ID NO: 389283 - protein, 386 aa, unidentified
MTIAVYDHAPKPPASLDHATTITAVVELSKRTWLVGGHVPGLERRPLKRTEDRAAGLLRILTTWRKRAEQAGRTIARIVVAFEAGRDGFWLARWLRDRGINAYVMHATSVAISREHRRAKTDRIDTAMLRRGFLGWLRGERGHCSMALIPTIAEEDAKRPHRERESLIKQRTRAINQMKAILTQFGVRNFKPVLRKAAEKIGDVRTPEGGPLPANAAAALRRHIEHFRLINEQIKAIEKTRLQRLRQHPTDKFNTMVFLLVRIIGLGVETAEQLVHEILFRKLRDRKAVARYSGLTGAPDESGARRREKGLSRSGNGRVRKILIQLSWRMLRFQPNSGLVRWFKDRTANSRRSRKPMIVALARKLIIALWRYVNTGVVPEGFQLAK

SEQ ID NO: 389284 - protein, 431 aa, unidentified
MLKINPLSTLYVGIDVSSKSNYVCALDFYKNKYINSSFANNQPGAEELALKILECLKEHPDITTIVAALESTSVYSIHIANYLSSCEELMRFKPYVFVLNPKCTANYKKSYIGLGKSDPIDAFVIADYARAGNIESEPWRGSQFLALKRLTRHRLHLVECMTREKTYLVSNLYLKFSELQMLEGDDQPFCDIYGATSSSVLMEYFSPEEILDSSEEDLIAFLAEKSRNRIKDISKTADLLKKAARDSYRLDKALYEPLNVSIASSFNCIETFKREIKVIDNAIEKEIKGLNPNAFIILQSIDGIGPVFAGGIIAEIGDITAFHSSDALAKYAGLTWKSNQSGDFDGEDTPMIKAGNRYLRYYLGEAANSMRKHNVEYGTYYRKKYNEVPKHQHKRALALTSRKFVRLVYGLLARNQLYSGVSLDTSIKDSN

SEQ ID NO: 389285 - protein, 359 aa, unidentified
MIVIGIDPHMKTHTAVALDVATGRSLGTRTVTSDGTGLDGLLAWARGLGPERYFAIEDCRHVSGRLERHLLGHSERVVRVPPKMMAGARSSARTYGKSDPIDAACVARAALREPGLPEASLCGPEQDARLLVDHRDDLVDERKRMQKRLRWHCHDLEVDLDMPPRVLDRYVWLDRLEAILDSLPESTRRRIAVSELGRIRELTVEVKGLEREIAGLMRELAPDLMEIPGCSAILAAHLIGQTAGFSRFSGEAAFAMHVGVAPLPVSSGKSCRHRLNRCGNRKLNSVIHMIAVTQARMHPPAMAYMERKQAEGMSYREALRCLKRLIARTVFKTMLRAEKAATGTVVRADFGAVPTAVAV

SEQ ID NO: 389286 - protein, 386 aa, unidentified
MQKLNDLSRSLTALEPDGTLIAVIEMSLSSWLVAGIVPGIERQPLKKLAVDESALLKLLHRWREEAEKAGRRIERIAVAFEAGRDGFWLARWLKARGIEAYVIHASSVAVSREHRRAKTDRLDTELLKRSFLGWLRGERDHCKMVEIPTMKDEDAKRPNREHDSLIGERSRIVNRMKAALVRLGIRGFNPKLKRASTRLDGLRTPEGEPIPPNALAELRRDMERRRLVNNQIRQIEEERLKRIEQAPCDGPHVMVRLLARVMGVGIETADMLVHEVLSRNMRDRRAVARYAGLTGSPDESGRKRREKGLARSGNVRVRRGMIQLAWRFLLHQKNSALTKWFRSRTENARGTRKPMIVALARKLLIALWRLVREGIVPDGVVLRAAQ

SEQ ID NO: 389287 - protein, 341 aa, unidentified
MQKAGVVASIDLLAIDLGKRSFHIHGIDRDGVVVSRKVSRAKLWETVEAFAPATVAMEACASAHYWGRRFLDAGRGVRLINPRFVKPFVKGSKNDAADAEGIYEAAQRPTMRFVPVKSVSQQDLQSLHRVREHIIGARTALINHLRGLLAEYGVVLPQGPWRLIAQAPAAIAEADLTDLARDLFDDLLDQLAMLESRLRKLDQKLAEICRTHDACRRLAKLPGVGPVVATALVSAVDDGRHFHSGRELAAWIGLTPRQYTTDGKPRLGGIARRANHYLRRQMIHGARAVISRLGKHDDPRSKWLKDVVARRGLNRAIVALANKTARIAWVLLARKEEYLAA

SEQ ID NO: 389288 - protein, 321 aa, unidentified
MVYIGIDISKSSFVAAYPSVNGYRTQTYPNTVAGARKFIATLSVAEHHCVMEATGNYGFLLLYLLHQSGIAVSLVNPKQIKHFARMMMAVTKTDEKDACMIAMYGEKMNPPIYKMPSQSIILLKQKKTVIRQLRKQLVASKNLRGSLIVLPYRDKACVRTLDKTIDFLTKQIEQLEAELAEIASSEFDKQLKALTSIKGIGITLATALILTTGGFTYFDNAKQLSRFIGICPTYQQSGTSVNIKGHINRNGDEHLRSLLYVASWTALRYNAACRECYLRLKANGKPSKVALIAVVNKLVRQAFAIATTDSTYIDGFVSAKK

SEQ ID NO: 389289 - protein, 340 aa, unidentified
MQITTIGLDIAKNVFQVHGIGVGERVVVRKQLRRNQVMAFFEALSPCLIGMEACASAHYWARELTKLGHEVRLMPAKDVKAYVKRNKNDAADAEAICEAVGRPTMRFVRIKSAEQQGQLMQHRMRDLLLRQRTQTINALRAHLAELGITAAQGREGLKDLLAVVADERDERLPINARVSLVVLAAQLQALQRLIGTLEKRIMAQHRASQESRRLATIPGIGVVGATAIAATITDPKAFRSGRDLAAWIGLVPREDSTGGKRKLGPISMQADRYLRRILVVGAHSVLRRAKQNPERYPWLTRLLARRPFKVVAIALANKMARVAWALLAKGGTYRPRLAAT

SEQ ID NO: 389290 - protein, 303 aa, unidentified
MQTIGIDMAKDTFHAAFDDRKVLKFENTPAGIEEFMTTLEDDDFPITDTRIGVEATGVYHLLFAVTLREHSWDVVVINPLESHRMITQGLRTVKTDRLDALKIRTMTSMGKGYLFTDTKDVLALKALVVERQALVEMPKMTKQRMGVHRLKETATGFAFYDSFTTVLEALSKEIKHIERSMRGYETETQKLLRSIPGLGSTTAAALVAFIGDINRFAKPEKLVAYIGLDCRVYQSGTSVQGKGYISKHGNGYLRQMLFNAAFVARQHNPDLKSYHEQKLREGKHYFSALCAVERKLVHLIYAV

SEQ ID NO: 389291 - protein, 335 aa, unidentified
MQVYGIDLSMEKFDVNFIDQNGNEKNKTVNNGVKAISKFLEDIPPGSILCAENTGVYGDLLLCLSNQMGVSISFIPGYNIKHSLGLRKGKTDKVDAMRIREYGERFYDKLVPTMYEDETVKELQELYTLRAQLIKTRKALLTSETGRKHQPMRSIYAHTHVHSVLGNLDTEIETIDAEIKKIIISNEEMKENYELATSIKGIGPVITTDLIIKTGNFKVIDTARKAASYAGVCPFPNSSGKMVGKAKTSPFADKKLKSLLFMGAKSAVKHNKEYRMYYQKKKLEGKPHYLIMNNVSNKMLRTIYSVIKNKLPYNEGFICLDPREKKNNSSTKKVA

SEQ ID NO: 389292 - protein, 343 aa, unidentified
MEIEKKKKKNFKYFVGIDVSKNELDYAVILGKELLFHQEGENQPKAITEFMRKLRALPGFTFAKSMFCMENTGFYCNHLLRILRTKKAFVVLENPLQIKNSIGIIRGKNDKDDAIRIAMYAQKNSEELRQWVPKRTVVSNLNNLLTIRERLTRVAIALRMPLNEQEYFIDRNQSKLYGKLCGNGINAVKLDIKEVDLNIKELINADEDLKKLNAIITSVPCVGAITAMQMIITTNEFKDIRCAKKFACYAGVAPFKKESGLITRKARVSHLANKNMKSLLHLCALSAVRFDKELRNYYERKTLTEGKSKMLVINAVRNKLIARIFACVNQDRHFQKDYLRSKA

SEQ ID NO: 389293 - protein, 403 aa, unidentified
MKHVIAFDISMGKSYMVIYNAQKQCVFESEIKHSKPEFKKLQEKIHELTDKTGELPKIVFEATGIYSRQLERFMQDNQYTYCLLNPLEAKLQCDSLRIHKTDRSDAHRLALTHFTATRRVFTGTDNLFYQLKSLSRLYSELDSELSIIRGRMHKVIQLTFPELERMFTSKSDLFLNFVQLFPHPDCILGLSKTIIKNRIRANTNKKISNITAEKKAIQILEIAKTSYPAVSQNDVLCDQLKLYARRYQELLHQKECCINKMIYIAEQRAEYNIILSLPGIGPNTAVRLMAEIGDITRFNNNKQLNAFAGIDIRRFQSGKPFFKDKINKRGNKHLRKLLFLIIQNMIKQRRYGQNHIVEYYDKLKTQPYNKCHKVASIACVNKFLKLLFHLITHDIHYDYRLTA

SEQ ID NO: 389294 - protein, 327 aa, unidentified
MLGIDTSKNMLQCALRDPVNHKVLWNKPFHNDADGVSLLLEQTPGDIPWVIEPTGRFSLSVVRQAQAAGRCVLLAPPRKAKLYLQSLQSRAKTDKLDAKGLAQFGLSRKLSPYPVKAEPQELVDQLLSARKGISNSITRLQLQADELPHAREALRNAISGLKAELQELDKQIAARVAQEPSLAIAKELRKVPGIGPVTAAAVSSRLTAKSFAHPDQFVAYIGLDIDIRQSGTRKGQHGLTHQGDAELRRLLFCCAKSSIVAKDSPFKTQYEREKAKGLSPTAALCAVARKIAKLCWSLYRHNTAYDPDRVYKAPESSGKQPSLADEN

SEQ ID NO: 389295 - protein, 406 aa, unidentified
MNDNDGWPAFAGIDWGGSHHQLCVVDASGKRRSQLRVTHDVAGLADLDAELARFGNRLPVAVERSEGLLVEHLQAVGHVVFPVSPRIAARARERYRVAPVKDDRFDAYVLADTLRHEHDRWRPLAVASPLLAEIRALTRDRDRLLETQQATEAQLRAILEAYHPAPVRLFSSVDRQITLSFITDYPTPAAASRLRTARIAGFCKRNSYTGRVPAQVLAERLRANLLSGAEGTVAGKSFSAQSFTRLLTLLNEQLAEFDDAIAAAVAEHPDAAIFASFPGVGPVLTGVLLAEIGEDRTRFPRPEVLLAEAGLAPVTRASGRSRSVRFRYAANGRLREAAMWWAFNSLKVSPWAAHAFRVARDERGQRYHRALRGLAARWTRILWRCWHDGTTYDPGKHLSAATADAA

SEQ ID NO: 389296 - protein, 445 aa, unidentified
MTPCAPLLSTAEPDWAAFTAIDWASRKHFWSLAPCDGGPPESGTLDNTPEAIELWAMALRQRFAARPIAVAIEQKRGAVIYLLAKYAHFVVYPVPPSMAASYRQAFFPSGAKNDPGDAGLLLEILLHHRQRLRPRQPDTPATRLLQFLVEQRRQLVQQKVQQVQRLTDCLQQYFPQLRLWFDSLDSPLVTALLDRWPVLPQLQRAHPGTLHRFFVEHNCRREELIQQRIQAIYTAVAAIDDPVVIEACTRKTETLLHLIRCLRQEVAGLEKRIRTLTEEHPDAPIFASFPGAGPATVPRLIAAFGTCRDAYANASDVQRISGVAPVNITSGNAKSTRMRRACPKFLRQTFHEFAAQSIPYSTWAKAYYQHYLRQNKSQHHAAVRSLANKWIRILYRCWKDHRLYDESIFLESQRRRGSLLGAELASLGTVQWRSQAGFQKLDDQP

SEQ ID NO: 389297 - protein, 449 aa, unidentified
MKRHDLKQRGLPVIHDHAAGIDIGSRFHVVAVPADLAKESVQTFQAFTADLERMANWLVSLGITTVAMESTGVYWIPVYEILEAHGLQVVLANARDARAVPGRKTDVNDAQWIQRLHACGLLRASFHPDREISALRSYLRLRERHLDYAAAHIQHMQKALTHMNLQLHHVVADITGLSGMRIIRAIVAGERSPSSLAALSDKRCKAGIDVIEASLVGNYQPEHVFALTQALSMYDAYQAQLLVCDQQIAQTLIKLSQEKTLPAEPLPKPRHNTRQPNALNFDVRTLLYQLVGVDLTQIHGIGPYLALRLVAECGTDLSRWRTCHHFTSWLTLAPGCRISGGKVLSAHTRKTKNRVTAHLRLAAVTVGRTNTALGAFYRRLAARIGKSKAVTATARKIAILFYNAMRFGMNYQDPGADHYEQKYRERVVKGLHRRAAEFGFTLQPAEGVS

SEQ ID NO: 389298 - protein, 366 aa, unidentified
MRKNSTVVKNGNKIFKQPALTIGLDLGDRSSCYCILDELGNVILERSVPTTSSGIRQAFGKMPRCRIALETGTHSPWVSRQLARMDHEVIVAHARNVRLIGESSRKDDQLDARTLARLARIDPGLLGPVRHRSAEAQIQLTVIRARAALVSTRTALVNAARGLAKSYGERLKKCGTEQMNRDSSEGLSPELREALDPLLREIESLNERIAEYDRRIEQIAKEVHPEVARLKQVKGVGTLIALTYVLTLDDPHRFRRSRDVGCFLGLRPGRRNSGQSEPQLHISKEGDRYLRTLMVQGAHYILGPFGQDSDLRRWGLKLAERGGKNAKKRAVVAVARKLAVLLHKLWVSGEVYEPLRNNRKAERAVA

SEQ ID NO: 389299 - protein, 365 aa, unidentified
MCQKVIVADESHEGAVHMQISTLGIDIAKNVFQVHGVDAAEKVVLKKQLRRGQVLEFVGKLPPCLIGMEACATSHHWAREFRRLGHDVQLMPPGYVKAYVKRSKNDAADAAAICEAVRRPSMRFVPIKNAEQQAALMLHRTRDLLIRQRTQLINAMRAHLAELGLVAPKGREGLQQLLRTVAQAEEEQLPSDARLACETLAAQLQAVQHRIDTLEKRIHQAHRANPASKRLDAIPGFGVIVSSAVAATMTDPKAFKTGREFAAWIGLVPRQNSTGGKERLGSISKQGDRYLRRLLIVGALAVIKSARTRPDKYPWVVALLGRRPAKVVAVALANKMARIAWAVLVKGETYRAATHASSRALAAGV

SEQ ID NO: 389300 - protein, 375 aa, unidentified
MRKLRFVGMDVHAETIAVAVAETGGEVRSLGNIPNRLESIRKMIGKLGPTETLRCCYEAGPTGYVLYWQLTQMGVACEVIAPSLIPTKAGDRVKTDRRDAEKLARCYRAGELTAVWVPDAAHEALRDLVRAREAAKKDQLRHRHRLGKFLLRQGKRPVDAGKAWTKKYVNWIRVHVRFEHAALQATLDHYIEEVDHIAERIVKLEQAIDEAVAQAAPEIRAVIEALQALRGVAQTTAATVVCEVGRLSRFANPSQLMGYSGLVPREYSTGSRVQRGAITKAGNAHLRRVLVEAAWTYQHRPNIQGRVLKRQKSLALSDEAKKIAWKAQQRLHKRFTALAARGKNNNLIVTAVARELLGFMWAIAVHIEAKPRKAA

SEQ ID NO: 389301 - protein, 426 aa, unidentified
MKVMHDRAAAIDVHKDMVKVAVRVPGERRGTRKTDVLEFRTFYGVLEEMGRELRRRGVTHVVMEASGVYTEPVYYALAGLDFTEVMVINPAHAKALKGHKTDARDAIRLLDLYECGLLSGSYIPAPDLKEVRDLARYRMKTVQARASEIQRLQKTLETAGVKLSSVVSDVTGVSATAMIEALIDGERRGAVLADLAQGRLRTAGKMADLSMALAGRFTDHHALMCRLHLDRIGALGEAVAGLDATIAPLAARHAREAALLKTLPGFGDVIVAGWLGAIGPAPHQHFATAQRLASWATVCPGNYMSAKKSKGGRTGDGGNYIKPLLVQAAWAAVRVPGRLQAKFNRLVRKFGGARNKGAVKRAIMAIAHTLLKIAYQVLKTGTPYTDLGAGFYASRETPQARQDYLIRQLQKLNPGCVITITPAEAA

SEQ ID NO: 389302 - protein, 343 aa, unidentified
MQIRSVGIDLGKTTFHLVALGASGKVLVKKRFTQKQLLAFTANMQTSLIGLEACSGAHFLGRALKQQGHDVRLIAAQFVKPFVKSNKNDFVDAEAIAEAVERKNMRFVPIKTDDQLDLQAIHRVRDRLVSRRTAVINQIRAFLLERGMVFAQKPAKLKAAMPDVLENAEKDLTPMMRTLMDKLWAEWKLVEEQLKELGDELERISAADAGCTRIRQIPGIGPVVATAIVAAIGNGAAFRKGREFSAWLGIVPRQYSTGGKAKLLGISKRGNVYLRKILIHGARAAVLRIKRDRVPIGAWLDRLDSRAPKNVVVVAMANKLARIAWAVLSSGEEYKPANVAIAA

SEQ ID NO: 389303 - protein, 318 aa, unidentified
MSRDVKYIGMDVHKEAIVIAVLNDGGKLAMESIVETKASSLLQFIHGLRGELHVTWEEGSWAAWLYDLLKPHVQQVLVCDPRRNALLKEGNKSDKVDARKLADLLRTGMLRPVYHGEHGLRTLRELGRSYQTISKDLNRVMNRVKALYRGWSIPCAGTQVYAPRYRQEWLSKIEQAGVRRRAELLYEQLDGLQAMRRTLRPELLAESRKHKASKLLRQIPCIGPIRAARLIALMQTPHRFRSKRQLWTYSGLGIETHDSAQYCYVHGQLQRSKKPQQIRGLNRNHNHEMKEIFKGAAIRASCGWDRCATSMWLYWTKA

SEQ ID NO: 389304 - protein, 319 aa, unidentified
MHCIGVDVSKQELVTFDGKTERIFPNDRGLLEFRRFVKRTEDAFIVFEPTSTYSRKLETLCRTNHILCCQLNPRVVPHLRQVGRGRSKTDSSDAELLYRYGIERGHNEASELRQDSLSESIQARLACYRVAQKARVAYQGLHEALENDPATPRTLLAEIKAEISELKNREERYLVAAQRNAEEDEQTGRRLVALLSIPGIGPITALTLLALFRKYPGATRSQIVALAGLDPIQFQSGTSVHGKTRISKRGNRELRKRLYQATLSAARYNPSVKALHRRLKEQGKPDKVARIAAARKLLLIAHAIYKSGEEFRSPTEEVT

SEQ ID NO: 389305 - protein, 337 aa, unidentified
MRYIGVDLHKTQFSVCWMEEDGSNKFERYPMNGEGLSRFREKLDGECEVGVEATGNSKYFYDEIVGTVKKVRVINPLQFKIISESVKKNDREDSRVIAKFLSKGLLPEVRVMDKGRREIKSLIQTRDKLVKLRSSLKNKIHGILLEHGIQSKREMFSSQKGLRKVLDMPVSETSRFELEVIVKQINSLNEGIKELEGKIKDKGKKLKGQKNLQSITGIGELSSTIILSTIGDIGDFENKKKLAAYAGLVPRVHESNGRYKNGRITKRGDKIFRTTLVQVALIAIRYNRYLRSFYERLKVKKGSGKAIIATTRKMLDIIYDTLKNDWEFKDFNNFVLV

SEQ ID NO: 389306 - protein, 332 aa, unidentified
MPVSVAVHVAVGVDVSKAKLDVALLNPQGKYRSKVVSNDQPGFKALLQWLGTHLSDEHAAAHVCMEATGAYHEALALFLHDQGVAVSVLNPLLVKRFAEANMVRNKTDDGDAKCLARLCQMQRPSRWEAPAPSVRVLQALVGRLDTLQQMRQAECNRLEVAHESIRGSIDHLIAELDGEIAQVRRQIEKTIDDDPDLKRRSELLETIPGLGGKTIPQLLAYIGQPGRFKSVKALIAYAKLAPMVRQSGSSLNRHRGTHPMGHTALKQALYFPAMVAGRFNPLVAAFWARLKAQNKPGKVIVEACMHKLLAIAYGVLRSGQPFNADHLKPQSA

SEQ ID NO: 389307 - protein, 353 aa, unidentified
MASEKYVGLDVHKATIVAAVQDASGKCLITSVIETKAETIRAFIKGLAGTVRVTLEEGTHASWLFDLIKPLVAEVVVCNPRQNALLQSGNKSDKIDANKLADLLRAGLLKPVYHEAHGTQTLKQLAQCYETFVSDNIRVMNRIKALYRGRGVDCSGTGVYCESQQKDWLAKLEGPGARSRAQLLYTQLESVKKLRRQARNELIKESRRHAASKLLTPVPGLGPVRVALILATVVTPFRFRTKRQLWTYVGLAVVTKDSAEYEIVGGRVRKRNKPRSTRGLNRNYNRRLKKVFKSAALDATRTEPFASYYRDLIKKGTSPEIARVNIARKLAAIVLSLWKRGEEYDRQRMKESA

SEQ ID NO: 389308 - protein, 442 aa, unidentified
MPRRIGLDVHREFAQIAVWEDGLVRQAGQIATTPEALRAFADSLLASDEVAIEATCNTHAIVKLIAPRVARVVVSNPMKTRAIAEAKVKTDKVDAKILAQLLAADYLPAVWIADERTQALRRQVARRAHIVRQRTRLKNQVQAILHRNLVPKPPVADLFGIKGRCWLEGVPLPPDEELAVQALVRQLDFHGQELRIVDASLARVGLGREEVKRLMTVPGVDATVALSIVAAVGDFHRFPRPQQLVSYLGLNPRVRQSGGQPASHGRITKHGRAHARGMLVEAAWVAVKTPGPLRAFYERIRSRRGMQIAVVATARKLAVLSWHLIIKGEDYAFARASLTEKKLRKLELRAGLPSQRGRKGTSAAYNLKEVRRRERELAEQAESSYRQLVADWHANTPSRERPGVAAANGTRLERPSAGQAARQASVPEPALRSGVDHTHDQA

SEQ ID NO: 389309 - protein, 376 aa, unidentified
MTMMHQRQIRYIGLDVHKATISAAIAEESGAPTSYGRIPNDPAAIRTLMTRLGGPQVELRVAYEAGPTGYALHRQLTRMAISCMVVAPSLIPKQPGNKVKTDRRDALKLARLLRSGDLTPVWVPDEAHEALRNLVRARADAKADQLRAKHRLSKFLLRQGCWPPVGVRNWSKRYVTWLHQLEFEHLPDRVVCADYLTEVTAAGERIKRLEVALYECAQSSRQVALIRALQAFRGIAFLSAVTLVAEAGDLRRFRTAPQFMAYAGMVPSESSSGGKQQRGSITKTGNSLLRHVLGEAAHHARHAPRVTSKVKQRQTDLPADIVDLAWRAQVRLHTRYRHLSGRIGALKALTAIARELAGFVWAAGQALQEEEVPTAA

SEQ ID NO: 389310 - protein, 346 aa, unidentified
MNNHNSKGNIIVLGIDLAKSSFQLHGIDEKGNVVLKKKLTRSKLIAFIANLPPCLIGLEACGGAHHWVRVFSEFGHTVKMIAPQFVKPYVKSNKNDAVDAEAICEAVQRPNMRFVPSKSIEQQDIQSVHRIRSLLVGRRTAQANQIRGLLMEYGIIIPQGINQLRKAIPEILEDAENKLSPYFRELLRELYEEIVHFDERIATIELKLKRISEQNEDCKRLLTIPGIGLLTATALIAAIGDISVFKNGRELAAWLGLVPRQHSTGGKQTLLGISKRGDTYLRTLLIHGGRAVVRVAHKHQDKRNQWIGEIKQRRGENISNVAVANKNARIVWALLTYKQDYCTVGA

SEQ ID NO: 389311 - protein, 456 aa, unidentified
MPGSTSTRGRSSGQLNTINPNAAGLDVGSTFHVVAVPADRDEQPVRTFRTFSGDLHRLADWLKEAGITTVAMESTSVYWIPVFEILEARGFEVLLVNARDVKHVPGRKTDVQDAQWLQQLHQYGLLRGSFRPRDGVVRLRAYLRHRERLVEYAASHIQHMQKALMQMNVQLHHVVSDITGATGMRIIRAIVSGNHAPERLAEFRDVRCAASEATIGAALTGNYRAEHVFALRHALELWDFHQAKIAECDAEIERVLRTLNEVRATPAEPLPAVRHAKAKNEPEFDTRPALYTLLGADLTQIHGFGAYTVLRLVAECGDDMRKWPTAKHFTSWLSLAPRNKISGGRLLSSKTRRSSNRAATLLRIAAVNVGRTQTALGAFYRRLAARIGKAKAVTATARKLAILFYQALRFGMTYVDPGASYYEERYRQRVIQHLQHRARHFGFALVADPSASGGVS

SEQ ID NO: 389312 - protein, 356 aa, unidentified
MATYYIGADVHSNSIEIAIRTRREVVNRYSIPPSIQAAVEVLSSLEGARHMAIEEGPMAGWLYRNLRQKVDSFVVADPRRNKLISSDGDHDDKIDSAKLALLLEGGYLREVYHSDDDRRVELKHWVSLYHDRVHDAVRHMNKIRARCRMHGIKIPRKVLRQPEHRADWLVKLKQPALAKQLLMLWIGYDATAKQARMAKQHMISLSRKYPVIRLWQQLPGIGTVRAVTVFAYLDTPWRFKRKNKLWKYCGVGLQRTASGTDKKGKPKPARLQMPWAANRTLKDAILGAALTAINQKHNVFKDDYERMVRNGVIPSNARHTVARKLLTVMWGIWKTSCQFDQSKGPLSKSTEQCHCV

SEQ ID NO: 389313 - protein, 373 aa, unidentified
MFHFITLFIGMDVHKESFSLCYYDMMANQFKHSTKVGPNVSYIVNYVNELRRLYGQDAEVLCGYEAGYLGFTLYHQLQAHGLPCIVMAPTTVMKEGSKRVKTDKKDAAQLAKALAFRSYRPVHIPTVEDEQVKEYIRMRTDHKVALKKIKQQILAFCLRHDFRYTEGSSNWTQKHVRWLHSLNLDGLYAEILTEYLLTYEKLVDQIERYDARIEQLGQSDSYQEKVSWLSCFIGIKTLTALSIVTEIGDFNRFATAQHFASYLGLTPSENSSGDKERRGAITKAGNSHVRRLLIEAAQPLAKGMIGYKSKELKRRQSGNRVEVIAYADKANERLRRRYRTLVLGKNKKQNVAKTAIARELSGFIWGMMTGRIA

SEQ ID NO: 389314 - protein, 355 aa, unidentified
MDTTKYVGMDVHTESISIAVVNSAGKIVMESTLETKANTILEFIQGLRGNVQVTFEEGTWAAWLYDLLKPHVTTVVVCNPRKNALLKDGNKGDKIDARKLAKLLHLNNLKPVYHGENGIRTLKEVSRSYLTITKDLGRVMNRLKALYRSWAIPCAGQQVYAPRHRSEWLGKITEAGVRRRAEYYYQQLDALQALRHGVRRDLLAESRKQTGSKVLCQIPCIGPIRAALLIALIQTPHRFRTKRQLWNYSGLGVKTRDSAQYRFVGGELQRSKRPQQLRGLNENHNHDLKNIFKGAATMATISPGPFHDFYESLLVKGRKPTMARLTLARKIAAITLIVWKKGDSFDAKHLKQQAA

SEQ ID NO: 389315 - protein, 441 aa, unidentified
MAIRKREDVVFPNAAAIDIGASSHWVAVPAHSADTPVREFGPMTDDLNALADWLLACGVDVVALESTGVYWIPVYEVLEQRGLKPWLVDARQVKYVPGRKSDVQDCQWLQKLMSWGLLRAAFRPEADVCVMRAVARQREVLLTEQGSWVQRMQKALVEMNIQLTEVLSDVMGQTGQAIIRDIVAGEYEAKALARHRHWRVKASAGEIERALTGNWREEHLFVLKQALAMYDDIAARLRECDAKLGELLAQRSVIGVDIGKAPRVGSKARAEYDVRQQLANWAGVDLTRINGLGLDSVMKILSEIGTDLSRFANVKHFCSWLGLCPATKISGGKVISARTKRSVNRVRQALKMAAMSLCHSGSALGAFYRRLCTRMDKPSANTATAHKLARMVYFMLTRGEAYVDEGQQRYEEQYRQRSIAALKRRAAAMGFQISPVAATAA

SEQ ID NO: 389316 - protein, 346 aa, unidentified
MTIVGCDFHPSWQQVAVFNSSTGELVECRLVNGNGEAERFYRSLPVPSLIGLESCGNSQWFVELVERLGHTVWIGDAAQIRASYVRKQKTDKRDAAHILKLLIEGRFPQLWVPNARVRDLRQLLIHRHKLVEIRTRVKNGLQHLAMNRGMQRKSRLWTEAGQKAFRALPLEGWAACRREDLQRLRAVLDSQIGELDQAVEKSAYADESARLLMAQPGVGPITSLAFVLTLGDVARFKRGKQVASYLGLIPTEHSSGGKQRLGAISKQGNGFARLLLVEAAQTITRLDEGFRKQYQHRCHSKPKGVAKVAAARRLAVRLYWMLRSKTPYPEIVRIESSSRCPMDGES

SEQ ID NO: 389317 - protein, 340 aa, unidentified
MDIKVLGIDFGKTVCSLAGLDEAGAVVFRKRLQRHRLLDFLATLPPCVVAMEACGGAHHIGRFCLEKGHEPRLMSPLYVKVHKNDDRDAEAIAEAATRPTMSFVAIKSEEQLDLQALHRARERLVSDRTRLINQGRGFLMERGIRVGTGRHVFQKELARLATEGIADLSPRMLLLVTDMVSELDVINDRVAAIDAEIKALARADADMQRLMEIPGIGPTIATALVAAVGTGTSSSFGKGRDLAAWLGLVPRQITTGGKAKLIGISKHGNRYLRKLFIHGARSVLHLVRDRTSPIAAWADALKERAHANVAAVAMANKMARIAWAVLTKGERYRPNAMSGL

SEQ ID NO: 389318 - protein, 459 aa, unidentified
MAQRVDPTKRRADGTPIEPLSIKHPNAAGIDIGGKSHYVAVPPDRVGKGESAVREFGPHTEDLVAIADWLCACRIDTVALESTGVYWIALYELLQARGFDVWLVDAKSVRHVKARKSDVLDCQWLQQLHSFGLLCKAHRPDEQVCALREMSRLRDITIDERARHTQRMQKALTQMNVQLTNVITDITGETGMKIIRAIVLGERDRMVLAQMRNYRIHASTEQIAKALEGRWSREHLFSLDHELKAYDFASEQIARLDAEIKVLLDAMRVFDKTPAANANKGRRKNTLAFDGRQALMNWCGVDLTEVPGIDVGTAMKILSELGRSLTRFDTVKHFCSWLGLCPGTRISGNKRLSGASKRIPNRVARALKLAAMGLSRSRCAMGAYYRRLALRMGSPKAITAVAHKLARIVYAMLSGQADYVKEDQVRHDARYRERAIKALQKRAQELDLTLSPQAVPAHA

SEQ ID NO: 389319 - protein, 375 aa, unidentified
MKDFSTFIGMDVHKETIAVAIAEKHGTPRYYGEIANTTEAITKLLKKVVPHGGRAAFCYEAGPCGYGVYRQITDMGYRCDVVAPSLIPKKAGDRVKTDRRDAVTLTRLYRADELTAVWVPDQEQEAMRDLTRIREDMKSMERHARQRLSGFLLRNKKIYTGKNKWTQAHFRWLEKIRFESPIQQIVFQEYVDTVKQLQGRVASLEEEMRKALSGWPLGILVEALMSLRGVNLVTAMTIVAEIGDMSRFKSPRQLMAYLGLVPSENSSGKRQRRGEITKTGNSHVRRVLVEASWSYRLPARKTAHLQRKAEKTTEAVQAIAWKAQKRLCRRYWHLTLKGKLKVQACTAVARELAGFIWAIAREIMGKNNSSVVIAA

SEQ ID NO: 389320 - protein, 326 aa, unidentified
MSNPLMPLGIDISKTDFHVALLKNAKRSKYEHFSNDEDGFQQLSQWLEQQGVEQIHGCLEATSIYGHALALHLHQQGHRVSIVNPLRVKGYAKSQLARTKSDRADAKLSAQFCRDLQPAPWQPSVTEVSQLQGYTRRLDALEHMLTEEKNRLQVTPADLKADIEAHIQFLQEQVATVKKRWREHIQAHEGLPQQHELLTTIVGVGESTAARVLAEIGAIEHFTSARQLAAFAGLTPQEHTSGTSVQGKPRLCKIGNRRLRKALYFPALTCWRRCPQARAFGERLLAAGKTKMQVIGALRHKLIRVIYGIFKSRQPFDPDKLLPSRT

SEQ ID NO: 389321 - protein, 408 aa, unidentified
MTVVGIDVSKGKSMVAAMKPGGELVAAPYEVRHSDIELSHLALDVLCMEPDTRVVMEATGRYHEPVAALLHSEGIFVSILNPLLIKQSGAGSLRKVKSDPKDALKIAKYGLDNWSTLREYTPMEAIRQQLKLCARQCDLYNKNIVMLTNNLISLSDKTFPRVNELFSSPEKADGHLKWVDFYRSFWHCDCINRMSPDAFEERYKKWCKRKGYHFSTDAADALYAASCGSYTTLPRDNNAKLLVTVAADQLIALRENQSKLEAEMLNVCKQLPEYETVMAMYGVGKSTGPHLMAELGDVRRFPHRSSIVAFAGVDPGVVGSGKMQLSSVTTSKRGSPQLRKALFQVVSTYVKCKPENEAVYQFYAKKRDEGKPFFVCTTAAANKFLRIYYAHVKECLNAAESATQVEEG

SEQ ID NO: 389322 - protein, 326 aa, unidentified
MEHELHYIGIDTAKEKLDVDVLRPDGRHRTKKFANTTKGHDELVSWLKGHKIDHAHICIEATGTYMEPVAECLYDAGYIVSVINPALGKAFAQSEGLRNKTDTVDARMLAEFCRQKRPAAWEAPHPLERALRALVVRHQALTDMHTQELNRTETAREVQRPSIDAHLLWLEAELKRLEKQIKDLTDDDPDMKHRRKLLESIPGIGEKTSAVLLAYIGLKDRFAHARQFAAFAGLTPRRYESGSSVRGTSRLSKAGHVSLRRALYMPAMVATSKTEWGRVFRDRLAANGKKGKVILGAMMRKLAQVAYGVLKSGVPFDASRHNPVAA

SEQ ID NO: 389323 - protein, 370 aa, unidentified
MSVRRILAKTIDTDLEYEAIGIDLAKNCVSAALLTTDGEVVCIDRLDYSELEQSAQALSPMTFAMEPCTEMNYLVQKLEAWGHRCLVIGGKNVQNYVENHYSGQKTDLNDAQALAFLAQDTQLRTIKAKDVEQQKYASLTTLREQYIKQYRQTIVSLKGICQAWGLNISKGISGKAQLKDLIENHAAFPEELRESLVDMVTHAQTTQKVLNKITKTLEVLAKNDKVCQLIQTIPGLGTICSCRLRATIGDIKRFKNPKDFPAYYGLVPRSIATGHNEKKGKITHRGDRTMRSLMVQGAGCVIRLATCGKLKSKQLTKWILKKQKEKMPWGKLVCAVAAKLLRIVRAVLISNKPYNSKIAGVAKCSLPKGS

SEQ ID NO: 389324 - protein, 347 aa, unidentified
MKFYTQMHQHYCGIDLHARSLYVCILDQQGNKLVHKNIKANPQSLMRVVQPYRDGLVIGVECMFSWYWVADLCRDEQVKFILGHALYMKAIHGGKAKNDRIDSKKIAVLMRGGMFPQAYVYPREMRGTRDLMRRRMHLMRKRSELLAHIHNTNSQYNLPEINKDLRYAVHRDGIAERFNDPSVQKSIELDLNLIETYDQQLGKVERYIYQHAKTCDQHSLVLLRTVPGIGKILSLIILYEIHTIARFPSVQDFASYCRLIKCKKESAGKSYGYSGKKIGNAYLKWAFSEAAVLFLRGNPEAQAWLQRMSNKHNKARALTILAHKLGRAVYFILQRQKMFDQERFLNS

SEQ ID NO: 389325 - protein, 331 aa, unidentified
MTNAAHEPATAPAALDYVGVDMAKDSFAWGLHGERSTHTASNTEEGFQALLDTLQGRHIGLIVIEATGGLERALAMFLLAHGLPVAVVNPRAAREFARSMGHLAKTDSIDALALAHYAQTLAAKPNQAGVLFAPASAQVQALQAMVQRRVQLLAMRTAEKNRQGGAVRVLQKSIAAILRALDKEIAKLDKNIDAQLKDHFKDQTKRFDDIKGVGPNTCAVVAAFMPELGLVPSARAAKLAGLAPLNQDSGKARGKRHIWGGRSIVRSALYMATLSAIKFNPVIKPFYDRLLAAGKPKKVAMTACAHKLLRILNAMARTGKTWDPELHGIHT

SEQ ID NO: 389326 - protein, 387 aa, unidentified
MNKSNRVIGLDVHPDSFAGAVLLKGKDAASARVVSTSRRVELPELEKWAARHTGEQDVLVLEASGNAFAVAERLRVLQRQVVILDSHRAGKVGKAYCANDRVDAIKIARIYLTALSPVVWQPDAKTRERREVFSAYQAVVKEATRLKQQLRSMLNEHCVRLESGFRLSHPSAINRLLKLREWTPVRAMLLEQLHRGLVSAQARRTRLRRYMAQEVLDEPELLRLTRLCGISLITLYGLSASIGDIKRFSNSRKLSAYFGLNPSVEQTGNWEGEGALKRHGRGALRALLVQSAKKLLRVNNPLQKWGLAVATRRGRNKAAVAVARKLCVAVWHVMQGHVIGAIERMTTLHTKLHKLATELGLNTIKSQGYETKEAFVQKKLFVLRSYA

SEQ ID NO: 389327 - protein, 379 aa, unidentified
MGHHSEAFVGIDTSKLRNAVAIAEAGRRGELRYLGEVDTRETATRKLVAGLAAKYRKLTFCYEAGPTGYGLQRLIESLGHTCIVAAPSLIPKKAGERVKTNRRDAEGLARLLRAGELTAVWVPDERHEAMRELTRARDASRQDLTRKRQQVSSMLLRLGRHYPGIRTWGARHRAWLANQKFVHPEQRLAIEELLLAERQAGERIARLEQAIRSAVADWSLAPVVPALQAMRGIDLVSAVTILAEIGDLSRFASPRQLMAYLGLVPSERSTGESVKRGSITKAGNGRARRVLVEAAWAYRHPPRVGYEKQTQVAAAPVRAREIAWKAQVRLCKRFRTLSRKGKKSTVVATAIARELAAFIWAINREVSGQIKTAETSRRA

SEQ ID NO: 389328 - protein, 421 aa, unidentified
MQVLYERCAAVDVGKDTIAVAIRLPGGGPDHRQTVKRTFKTFYGVLKHAALWLTEQHVTHVAMEATGIYSMPVYHALVEHGDFEKVLVCNAGHVKNVPGRKTDLSDAEWLVHLLECGLLRGSFIPPAQIKAARDVIRYRTKLTQSRTSELQRLGNVLQDAGIKIDSVASTLTTLSARAMVEALIDGERRPAVLADLAKGRMRSKIGDLARALEGRFDDHHALMCRLHLDHIAHLEEMITKLETQVEEMMEPFRAQRDLLITIPGIGPLASAAVISEIGIEAATWFPTAEQLASWTGLCPGNHESAGKRYRGTRRKGNQHLQPTIVECAWAAVRTNGYLQSLYHRHVRKFGGYRSAEAKKKAIIVVAHKLIVIIWHVLDTARPYQELGADYFTTRIDPEKETRRLVTKLQALGHTVTLEPAA

SEQ ID NO: 389329 - protein, 412 aa, unidentified
MKLFVGIDVSSKDLKVCMMNGEGDTLQSFTVDNNLEGASHLRDQIVAVADKLPSKEIHIGLEATSVYSWHPAMFLHEDEALQKRKAKVFTINPKLITKFKEAYVDLDKNDHIDAWLIADRLRFGRLPMTMVMQEQYIALQRLTRMRFHLVHNLTREKQYFLTNLFYKCSAFTSEVDSSVFGHAITELLLEKYSLDEIVAMDVADLADYLKDHGKNRFPDPERVAKCIQKAARASYRLSKVVEDSIDLILGTSIQSIRSIQAQIKELDQAIERILSGIPNTLQTIPGIGPVYAAGILSEIGDITRFDDQAAVAKYAGLVWRKHQSGAFDAEDTKRIKSGNRFLRYYLVEAANSVKNRDPEFGDYYRKKYKEVPKHQHKRALVLTARKLVRLVDVLLRNDQIYTPRRKVNAAKD

SEQ ID NO: 389330 - protein, 344 aa, unidentified
MTYYAGLDVSLRTVNICVVDDQGEQIAETKLASDVQDIIAYLDDLELDLASVGLEAGTLMQYLTYGLQAAGFEVVCMEARQVKGALSAMRNKTDKHDARGIAQTLRSGWYSPVHVKSMASHHIRMLLSSRKAVLSKCVDLENEVRGLFKIFGIKLPPKLGHGAFDAAVRDIIETDETLSHALLPLLDARLVLYHTFRVLDNRTRHLAHDDPVCVRLMTVPGVGFITALTFKAGVDDPLRFKRSRTVGAHFGLTPRRFQSGEMDIDGHISKCGDASVRGTLYTAANALLTRSSRWSPLKAWGMKLAKTRGHRRAVIAVARKLAVILHRVWIDDTQFRWGTEGARS

SEQ ID NO: 389331 - protein, 300 aa, unidentified
MNKLVVQNLNVGVDVGKDFLDIHIRPLGEYLKVSNDKKGIGEAIKRLRKLTVERIVIEATGRYEIAFVSACAKAALPFSVVNPIHVKRFAGAIGRKAKTDKLDAALIAHFSEVIQPALSTLKPENIQKMADTVARRNQLLEMQTREKNRLQIMPKTVQSSIKAILTVLKKQIQKMDDELADLIESCPEYQAKSELVQSMPGIGKVSAAALISYLPELGMMNSKQVAALVGVAPMNKESGRYKGKQVTQGGRHQVRTVLFMAMMSAMQCNAKFKATYERLVAAGKPKKSPSLPVLGRWLSY

SEQ ID NO: 389332 - protein, 418 aa, unidentified
MKSIKTKKVKKINDKTVIATLDIGKNIQYGYFRAPNGNDVKPFAFYNSKKSYNEFWQKLCQFKNKEGLEEIVIGFESTGPYAEPLFNFLRKKPVTLVQVNPVHTKRVKELTGNSPNKTDNKDPRVIADVISLGHALTLVVPQGPAAELRRLTQARERAIKARTSMINQLQHLIFVIFPEFLKVLKISTKTARHLIKHYTTPEKISVLSLESVGQILKKVSRGKLGQDRAKQLHEAAGNSIGISEGKQSIVLEIKHLIGRIESEDQFIDRLEKQMHVYLQQIPYSQNILSIKGLAEVTVAGLIGEVADFNKFDTISEVMKLAGLDLYEISSGNHRGQRRISKRGRPLMRKLLFFAAINAVKSKGIMHAKYQKMLARGMLKMKALVAISRKLLGLIFAIVRDNTKYVENYSDNYHYKLAA

SEQ ID NO: 389333 - protein, 408 aa, unidentified
MNAVGIDVSKGKSMVAALRPMGEVALLPQEFLHTGVGLEQMAYAILALGEDTRVVMEATGRYHEPVAAALHEYGIYVCVLNPLYIKQSGGGSIRKVKTDKADAMKIAKYGLDNWVDLREYTPMDTVRQQLKLCSRQYNLYMKTVVSLQNNLISLTDKTFPGVNELFSSPERADGHQKWVDFVMTFWHCDCICRVSEKAFTERYQKWCKRKGYHFSEEKALDIYAGSCGHFTTLPKNDNTKLLITTAAQQLLAGKTTLAALRAEMTRLASQLPEYETVRAMYGVGETTAAQLMAEIGDVRRFPRRSSIVGFAGVDPAVDQSGKHETQSTSTTKRGSPHLRKTLYQIVCTYLRKAPADEPVYQFLDKKRAEGKPYFVYMTAAQNKFLRIYYARVKECLEAFDAQQGTSQG

SEQ ID NO: 389334 - protein, 413 aa, unidentified
MRVMIERVAGLDVHQETVVVCVLIGKPGERPTKEVRTFRTMTRDLEALREWLLSLGVTPVGMESTGVYWKPVYAVLEGSFELIVGNARHIRNVPGRKTDVKDAEWIADLVRHGLIAKSFVPPPPLRELRDLLRYRRKLVESQAAERNRLLKLLETANIKLASVVSDVFGVSGRAMLRALIEGTASAQIMADLAKGQLRRKRADLVLALEGRVEEHHRFLLGMQLRRLEAAEEEIAALDARIDEKLEPYRAPHALLMQIPGVDRLVAAVLIAEIGIDMSVFLSVYHLASWAGVCPGNHESAGKQKSGRARNGNVHLRTMLVGAAISASRAKGSYLKDKFYRLKARRGSMRAALAIAHKILVAAYHMLAKGVGYREIGEAYLDQISQTRTVANLKRRLERLGFHVTLQSKAQPTA

SEQ ID NO: 389335 - protein, 447 aa, unidentified
MKPNKPAKKRASKFPKHLQHLNHQAAGIDVGSRSHFVAVPEGADEQPVREFSTFTDDLERLAEWLIACGVTTVAMESTGIYWIPVFELLERHGLEVKLVNARHVKNVPGRKSDVLDCQWLQQLHTYGLLRGAFRPADQVCTLRAYVRQRATLVRSASAHIQRMQKALAQMNLQLHNVVTDITGVTGMGIIQAILAGERNPKKLAALRDKRCKNSEATIARSLHGNYRPEHLFSLQQAVDFYAFHQQKIADCDRRILEQLSHFDASDPQDSDGTPPGTMEEALQRMSGVDLSSINGISTNTALKIVAEIGIDMSRWPTVKQFTSWLGLCPGSKISGGKVLSSATKPVANRAAAALRMASMTLFNSKSALGAYLRRQRSRLGAPKAITATAHKLARLIYSMLKHGAEFVDAGQEQYEERYRSRVIQNLKRKAQELGYKLIPTQEELLGA

SEQ ID NO: 389336 - protein, 555 aa, unidentified
MVKASSALKSGRAAALTSQMRRPECSGISAIIGAMKQKSIYQNQCPQLRELFSSAPSPAQILVVSLDFARDKHLALFCNGLGDGLLKPFSVHNNQVGVDLLNQRIHKTIQRCRIDPTHVLLGGEDDPCYAKNFLWALHQDWLVLRVNAFKAKKHRENIQASSDELDLLGIAKMLLNREATVVFNNGMADRAEHYHALKALGRTRDGLVRDQTRLSNRIHFQVKILFPGFLSDRKDNPIRPFSEACLDLMEKSDFAVTQYAGKKNAPLARTLNKLRLRKPEQQASQLITNARTALPPAPHTVQAHQDALGCLVSVYRTIKQNTAQLEYRQAFHLAQVPAALLTSLPGMGIINSSALAGELGPPDQLGCRGQMASYAGIIPRIKQTGGPDSASRTFSVGHHCNHRLKNHVVRAATAIGQQHGPPEIKEHWQHLLDKDQHAGFIHARRLLATSKALMINGTIWLPESLRCGAGAGDDAMLLYRRQMFEYLQEMWPRLRAKWIGRKALELAFAPENPLGKWRQVIQELYRIQLPLEELDPSMDVTRTNLPPANMETPDE

SEQ ID NO: 389337 - protein, 323 aa, unidentified
MTVYIGIDIASKKFDAAELRDGAYRCKTFENTPTGFTALYNWLKTNSIPDIHVCLDATGSYGTALATFLYEKNLKVSVVNPARIKGFAASELTRTKTDKADSRLIARFCKAAQPDPWRPVPAPVRKLQVLVRRIGALNGMLRMECNRRENADIDAQESVERMITHLKMELKSVRRAIKEHISNVPELKKQNDLQLSIPGIGAVSASLILSFMASKDFTKAKEVTVFLGLNPRHHQSGTSVRGKTRMSKMGDAKLRCALYMPALVALQHNPDIRAFGLRLLAAGKPRMLVVGAIMRKLIHIIFGVLKAGTGFSSRVTVNAGFNQ

SEQ ID NO: 389338 - protein, 367 aa, unidentified
MVKNSTAFVGLDLGDKRSNVFILDQEGELIEETRIPTTEPAFRRKFASLPPCRVAMEAGTHSRWASRLLEQLGHEVLVANPRRLRLIYESSRKTDEADAEHLARLARLDPQLLSPIRHRGPEAQAHLTVIRSRDSLVRARTLLINHVRGSVKSTGARLLACSADSFHHRVEPSIPAELQPALLPIVQAIASLTVQIHAYNRQIEQLCQEQYPETQGLRAVGGVGPIVSLAYVLTLDDPDRFRKSREVAPALGLVPKRDQSGSRDPQLRITKTGDSYLRRLLVGSAQYILGPFGPDCDLRRWGLKLAERGGKNAKKRAVVAVARKLAILLHRLWVTGEVYDPFYHSHPDQTSLTETNLLVRQPEAVCA

SEQ ID NO: 389339 - protein, 387 aa, unidentified
MPQPNDLSRSLVALDQNSTIIAVVELSHSSWLVGGVVPGIERQPRKKLEPHPERLLALLHRWRDEAVKAGRTITRIALAFEAGRDGFWLARWLETRGVEAHVIHASSLAVSREHRRAKTDRLDTELLKRGFLGWLRGERGHCSMARVPTIAEEDAKRPNRERDCLVGERTRIVNRIKSTLARLGIRNFKPTLRKAAERLATVYTPEGMPLPPNTLAELQRDMARLGVVISQIRQIEEARQKRLEQQHETGPHAMVRLLARIVGVGVETADMLVHEVLSRPMRDRRAVARYAGLTGSPDESGAQRREQGLARAGNARVRRGMIQLAWRFLMFQKESALALWYRARTTDSRRGTRKTMIVALARKLIIALWRFVTTGEPLEGVILRPAS

SEQ ID NO: 389340 - protein, 369 aa, unidentified
MKKHSKKANETGRRSASQGQPEITIGIDVGDQYSHFCILDAGGEIVKRGRVSSTQAGLEKEFGKIPAGRIALETGTHCHWMSEVLSQLGHEVIVADARELKSISGSRRKNDPRDAEQLARLARVDVRLLHPVRMRKRKTQQDRSVLRARDLLVASRTQLICAIRGMVKADGSRLADCAAESFPEQVGAAIPEGLRRALAPLLETLDVLNEKIRYYDQLVTHMAEEEYPETCLLKQVPGVGPVTALYFRLVIEEARRFQHSRDVGSYLGLVPKQQDSGESTPELRISKAGDEGARRLLVNCAHYILGPFGPDSDLRRWGLRLAARGGKNAKKRAIVAVARKLAVLLHRLLVTGEVYEPLRNRQAAEKEAA

SEQ ID NO: 389341 - protein, 409 aa, unidentified
MNAVGIDVSKGKSMVAIMRPFGEVVASPYEVTHTDSELSKLANSLKSLNGETKVIMEYTGSYYYPIAYALHEAGLFVSAVHAKLIHDYGNNTIRKVKTDKADAVKIANYGLSNWLKLPEYLPEEDIRRMLKAFSRQYTKYGKLKAMLKNNFISLTDQTFPGVNELFTSPPRKSDGHEKWMDFAFKFWHCECICELTPKAFTDRYRRWCKREGYNFSQDKADDIYASACGHWLALPKNETTKLLITQAIGQINAVSENIAVIAREMKRLAESLPEYPVVSAFYGVGDILGPQLMAEIGDVYRYRNKGSLVCFAGLEAPPYQSGKFDSQNRSISKKGSPHLRKTLFQVMDIYLKHAPAGELVYQFLDRKRAEGKHYYSYMTAGSAKFLRVYYARVKEYLNKLDSEQEPSKV

SEQ ID NO: 389342 - protein, 351 aa, unidentified
MNILAMEIAKSKTVVCYYDSESGRHKYGKVKTSPQQIHDLVAEYSPDRVVFEICSSAGWLHDIVTALGTEVQVANTNTQAWRWKNVKNKNDKKDALKLAQLSAMNQLPTVHMPKPNVRQKRALIQYRQTLVARVVQIKNNIRSILDKQGYSMAAGKSGWTNKSIEQLNQMALPIERCGVHDLWRGQLYVELTMLSSTQDALAHVTSKLDKLAESDSQVNLLQTVDGVGPRLAEAIVAFLDEPERFKSSKHIGSYAGLTPRQYQSGSTNRQGRISGQGNKLLRALLVEVSWIGLRYNRWIRETYQRLLRGSASRKKIAITAVARKLLVRCWAMLRDGQPWRDMGVKTERQAA

SEQ ID NO: 389343 - protein, 352 aa, unidentified
MNYYIGCDAHKKYSVFAGISEAGEIIPAQRVEHDRESYCSFLKSLPPTCRIAVESVGNWYWLVDEMEKAGHMPALVNPAKAKLMMGQLNKTDKLDARGLAILSRNGTLPAVWIPPGELRDQRELPRMRMAMSQVRTKFKNRIHSTFAKYGITFDEVVDLFGKKGRKLMEKALDQLPPETRLSVQEQLRLLDQVEQSIRQAEKRIGQVIKMDDTMQLLQTLPGVGPILAIVIALEIGSIDRFATAEKLASYAGKVPRVSSSGGKTYYGRVRPDVNHYLKWAFTEAANAIVLQQKRWPDRHVVRLYQRVRKHKGHAKAVTAVGRHLAEATYWMMRNKELYREPGMKRPVSYTQG

SEQ ID NO: 389344 - protein, 413 aa, unidentified
MIVVKFLRVLSLSKFILKLGDFMFYIGIDIAKSNHEASIIDSNGKLVSESFSFSNSIRGLEKFQKFISSFSIDSNNCIIGMEATGHYWISLYSFLIDFGFSCIVINPIQSDAFRKMYIRQTKNDSVDSFVIAQILRFGEFSISHFSDEDTFALRNLSRFRFALVDEASDWKRKLVAILDQVFPEYSSLFSNIYGVASRELLSKYPLPEDMISIPADELSMLLSKCSKGHFGIDKAKEIQEKASNSFGVKFALKSFSFQIKQIIAQISFLEDQILEIEDEISSMINSLCPVITSITGIGDVLGAAIFSEIGDITRFERANQLVAYSGLDVAVKQSGNFNATDTKISKRGSPYLRRAIWLAASVAAFKDPALSVYYQKLRQRGKAHGTAIGAVARKLTNIIFAVLRDNKAYIPNI

SEQ ID NO: 389345 - protein, 371 aa, unidentified
MIVVGVDPHKQTHTAVAVAKATGELVEELTVAARTPGHQELLVWARRLGEERLFALEDCRHVSGSLERFLIARGERVVRVPPKLMGKARRGARSFGKSDAIDALAVARAALSEPDLAPARLAGPELDVKLLLDHREDLIAEATRTNNRLRWHLHDLDPELEVQRGRLGRSAWMERLARRLARPEQTMRVRICREQLRRLRALAREIAAAEAELARLVRTRAPGLLALPGCGALSAAKLIAEVAGVERFADDAKLAMVAGVAPLDASSGRQRRHRLNRKGNRQLNLALHRIAVTQARVHAPARAFLTRKQAEGKSRREALRCLKRHLARVVFKLLRAMVPPRPRVENLPPSNEREMPYFREVASPIPATGLT

SEQ ID NO: 389346 - protein, 402 aa, unidentified
MTYDYVIGMDACKYFHHACVLDIDGTQVLSKRINQNEQSLRALFSAFSAYDHKVLVVVDQPNNIGRLTVAVAQDIGIDVRYLPGLAMRQLSRIHAGNAKTDIRDAYIIAHVAKNLPESLRSVDRVEEAFLQLKVLNGIDEDLARSYTRLINQIRSALVGCYPQFEQALRGQIIPRKWVLHLLARYGGPTKIKRLGKAKAAAFARRYKARNPEPVLDAIFAAISEQTVTIAGAHYAEMGVAMSAKDALLKLEHRQQIEKEVIELINDIPHTQFLLSMPGIGPKTAAQILMTAGDMSDFPSAGHLASYAGLSPRTNQSGTSIMSNSLNRAGNKKLKNALWQSSFASIRFHERSRQFYERKRREGKRHNAAVVALARRRLNVLYAMMRNHEHYHDPAPSQEDLAA

SEQ ID NO: 389347 - protein, 343 aa, unidentified
MEQYAGIDVSLESVSVCVVDADGRIMREAKLACEPEALITWFGKLEVDMARIGLEAGPLSQWLYARMREAGLSVELLETRHVRDAFRAMPVKTDRTDARGIAQLMRLGWFRSVHCKSLPAQELRAILTARKLVQTKRHDLEMSLRGILRGFGLKVGQTTPRSFEARVRELVDGHPTLTVVADAMLLARAVLVEQLGKLQKRLVSLARQDMRARLLMSTPGVGVLVALTYAAAIDDPARFRSSKAVGAHFGLTPRKYQSGETDVTGRISKIGDAGVRTALYEAANVILTRPVKGSSLKSWAMRVAKRAGMRKAKVALARKLAVVLHRMLANGSAFVAGKAAAKA

SEQ ID NO: 389348 - protein, 341 aa, unidentified
MRKTLFCGVDLHCNNAMYVITDGRDKQLFRKRLPNRLPTVLECLEPFRQRLKVVAVESTYNWYWLVDGLQGHDYPVVLANPAQMDQYNGIKEADDLTDAAFLARLARLNILPTGYIYPKEDRPVRDLLRRRTLVVQHRTAIKQSLQNMAMRQTGQSFGWRAIRKLSDAERTELLGDNDCLGFVALQQVDLIELLSEKIQRFEKKILEHAQLKPAYVCLLTLPGVGMILALTIMLETGDIGRFETVGDYTSYCRCVRATRTSNGKSKGKNNSKNGNRYLAWAFVEAAHHAIRVCPQAKRFYDRKLTKRNGALATKALVAKWSKAAYYIMKRQEAFDLTRVFG

SEQ ID NO: 389349 - protein, 481 aa, unidentified
MAKVKQSAFDRLRMGARLNRKERRVVEQRLSAADPALEIVNRDAAGIDVGNESHYVAVPRGRDAQPVREFGSWTAALVEMAQWLVRCGIRTVVMQSTGVYWIAVHDVLQKHGLEVYLVDARGTKNVPGRKSDVQECQWLMRLHTYGLLRACFLPAPEIQRVRTVWRLRDQHVRDSSRSIQHMQKCLIAMNMQLHNALSNIVGATGQAIIRALLAGERDPKTLAALRDRRCMASEEEIVHSLQGVWKPDVLFELQQAVDAYDFYRQQMAKCDQQLKQYLALLPARTVEAVDPPSTDISKKSRKPHKPHKPQGNEPLFDLEAELERILGINATTIDGINVMTVQTVLAEVGPDLSAWKTEAHWSSWLNLAPKRDVSGGRVIRHVREHRTNRVGNAFRMAAQALIHAHSYLGARCRYLRAKLGAQKAIKAMARILACVYYRLVMKGQRWVDQGMEEFNRRSEQRELDLLRRKANKHGMQLVPAA

SEQ ID NO: 389350 - protein, 356 aa, unidentified
MAVYVGIDGHKKYCQAALMNDNGHIVKELRFDNTSQGASSLITLARAVDPQVEAVIEPSANFWIRIYDKLEQEGVDVKLTNPMRTKAIAEARIKTDRIDAKTLAYLLKGDLVAESYVPTRKNRERRALIRHRASLTRMRVEIKNRIHALLDKHELSYTYTDLFGKQGLEWLRSLQLPTTDQQILRTSLQVADTLTEQIREMDIQIAKDATSEEKAKLLMTMPGVDYYAAMVLLSEIGDVHRFSSDEKLVSWVGLAPQVHQSGETNWTGHITRKGSRRARWILGQCAQSARQHDPRMREFYERIERKHGSQKAVVAVARKMLAIMYVMMIRNEPYHGENHSLTERKHKHLDTLVNGA

SEQ ID NO: 389351 - protein, 380 aa, unidentified
MRSIGLDLGAKKISFCEVRQGEVVARRTVTKLEELEDVLGENSPPAKVAFEACREAWHVHDVLAAWGHEPLLLDTTRVKQLGIGQHGRKTDRIDAEVHARAVEKGSLPLAHVLTPERRQLRMALGTRRTLVEARAQFITTVRGIFRAHGQRVPSCAADHFLDHAAKMPRTEAVAALTDPLLVVLKHLDEQLVRSAVQLEQLCAHEPVVQVLTSAPSIGRITACAFIACIDGAGRFRNAHQVESYLGLVPLEDSSGGKQRLGAITKHGNGYVRTLLVESAWTIINHASNDPLAKWANGVAQRRNPFVAAVATARRLAGILWAMWRDGTYYDPVSLGNATAAGLRTEAELIAQRSEAIRRSAAKDKRERSRARNLLERRTQL

SEQ ID NO: 389352 - protein, 454 aa, unidentified
MEQESISMEVVNPQAAGIDVGSRSHWVAVGQSDKDLREYGVFNQDLFALADWLEEKGIKTVAMESTGTYWQNLYAVLISKGFHVVLCNGKFTKNIKGKKTDVKDCQWIQKLHTLGLLTSSFLPDGKTEELRTYCRQRANLLHLAASTTKKMQKNLRLLNLRLDVVVKDICGLTGLLIIRAVCQGETDPKKLASLRHGNCRKSEEEIAKALQTNGRKDYLFALQQELDTYDHLQKKIEDCDKEIEKMLNEIINSDDNKKQHHIADKPHKRINKNTPKDIDLNLKSYQMFEGTDLLAIEGMSFSTVLALMSEVGLEGIKKFKTAKQFTSWLRLAPNNKVSGGKVLSSKVPKGSNRLKIALRNAANAIGNLKESTPLRDFFQRISFRKGRVSAISATARKLAVIIWNMIIKGVPYFNPEGYLFLDQKRKLGLVKRIKKQIDKFGLTNEDLGLEANQI

SEQ ID NO: 389353 - protein, 327 aa, unidentified
MSSSVAALGIDIAKLKFDVCLIKENGKAKHKVFANTRHGFEQLIAWLASHEIGSLHACLEATGTYGEALAVYLFDAGFTVSVVNPAQVKAFAVSRLTRTKTDKVDAELIARFCLAQQPQAWMPPASEVRELQALVRRLESLIEMRVAEENRLSSGISIEAVSHSLEAHIAYLIEEIKQTERLIREHINNHPNLKEQSDLLDSIPGIGATTAALLLAEITDFKQYKSARQVAAYAGLVPRERRSGSSVRGRTSLSKIGNARLRKALYFPAMTALRCSGFFQQWAAGLRERGKCKMAVIGAAMRKLIHLAYGVLKTGKPFDPNWTMKVA

SEQ ID NO: 389354 - protein, 305 aa, unidentified
MISWVGIDISKSNLVVWVKPQSEGFDVSNTSEGFLELIRRLSQFEVSLILLEATGGYERNAMAALQGANFKVLRVNPRRARSFAVAMGKNAKTDAIDAAVLADFAEVLNASSSKVILPEREALRELVQQREHFVQQRDDNKRRLQQAQLPAVIALIKGHIHFLQTQIRQLDKAINQSMHELDAEKAQRLISVKGIGTVATASLLVYLPELGELDRREVAALAGIAPLNDDSGNHSGKRHIYGGRARVRRALYMSCWVVIRHQPDFKARYEGLRERGKSAKVALIACMRVLLIRLNAMLRDGTEWR

SEQ ID NO: 389355 - protein, 374 aa, unidentified
MENTITYVAMDTHKKQHKIALHYPFQEEIVEFTINNTARDIKKMVKKITKQAPGEVEFCYEAGVCGFTLKRRIEQFDCRCSVIAPSLVPRKPGERVKTDRRDAKKLLMMFKAGLLTEVHAPNEHQEAARELTRLRETARENLKRIRHQLLKFLTRHGYVYSNGRHWTQRHIVWLRTVEFTEPMLTSVFENYFNEMVYCIGRLEALDKEVELLADSQEYKEIVGLLRCFHGIDTLTAITILTEIFEFGRFESPRHLMSYLGLTPSENSSGDKQKKGSITKAGNKRIRRLLNETSWHYRYRYVPTAALKKRRKGQPQWAIEIADAAGRRLSKRHRHLVNNGKMPCKANIAVARELAGFIWFVVTQYHARKNTKDAA

SEQ ID NO: 389356 - protein, 422 aa, unidentified
MKNSAARKMKQVPEGFLIIGIDPHKRKHAAVAITQDMTTRAKFKFDNTREGLESMTERARAEMVRSGCRGVMFAIETGGHYWRNIAYFLDEQGIPFRFINQYTLKRRREGKDLNRRKNDYRDSEVAAQLLCTGEFVESTLPQGVYAELRTAHNAYRRLVKERTRITNLIKALLDSLFPEFTHVFKDPCGVTAMKVLTTGCVPSVMSAMTEEEFVAAIEAKYEGRHLMRRKLKALHGIAKRSIGIAAGARSLSLEVAFLCEKIETIRRHISAIDEDLAKLVHQTEEGKYLLSIRGLNYISVAGLLAELGSFKSYRSAKQMIKMAGSNPTESESGGKRSTHTPMSKQGRPVLRYCAWTAVVPMLRFNADFRAWAKQRRERPVHANPLNGREVIGAALNRLFRLAFALVEKQVYYQPSEPAESVA

SEQ ID NO: 389357 - protein, 318 aa, unidentified
MNVIGLDVSKDTIDATLITTKGNKDYIKIANNTEGFENLINWIKTKRIRKIAISMEATGIYYEQAAEYLSALYTIFVINPLKIKEYAKSQFSHTKTDKADSKLIAEFANRHLDKLTPFRPSENPILYKLINLLQQLKEQKKETQNRLHTAKDIYIKSTHEAIIELLEEKIDQTSKRIEGMIKQKESLNIEYQNLQTIPAIGKETAVILLRHLTDKNFETANKFVAFAGLSPKIEQSGTSVNKKGRLSRYGHRQLKRALFMPAIVAYRMNAFPQLVRNLEAAKKPKMIIIVALMRKLAKIAFYIHKTKKPFDKARHQTV

SEQ ID NO: 389358 - protein, 333 aa, unidentified
MVEGTEGSHHKEGSTKMSKDTTLCAGIDTGKHKLDVAIDGGAERVQVDNNSEGHRSLLAWLRQREVERIGIEASGGYEQAVVSSLRADGFVVIIFQPVQVRAYARFVLQHAKNDTIDAALIARCTAAATDIREPPDARLALLAQHLTMIEQLTEDVGQLKTRREACREERIREFWKREVDRLKVLQNSELKQLVAAIRAHRDLSHRLDLIASVDGVGLRTAVAILVRMPEIGRVTREQAAAIAGLAPYDDDSGLRRGSRHIKGGRQRLRQSLYAAALPAVFYWNPQLKAFYRRLLAAGKPHTLALVACARKLLIFVNTVVARGTSWRSSAVTT

SEQ ID NO: 389359 - protein, 317 aa, unidentified
MNHYSAVCAGIDTGKHKLDVAIDGSDERLQVDNSPEGGRLLLAWLQKRGVERVGIEASGGYEQAAVSTLRADGFVVVVFQPAQVRSYAGFVLQHAKNDKIDAALIARCTAAATDIREPPDARLAPLAQHLTMIEQLTEDVAQIKTRREASRDQRIHDFWTDEISRLKRLIKQELQLLVAAIRTHRDLSDRLDLIASVDGVGLRTAVAILVRMPEIGRVSREKAAAIAGLAPYDDDSGLRRGERHIKGGRQRLRKSLYAAALPAVFYWNPRLKAFYRRLIEGRKPHKLALVACARKLLIFVNTVVARGAPWASVKATN

SEQ ID NO: 389360 - protein, 375 aa, unidentified
MVHPANFIYAGIDIHRESHSVCALDCFGQSLWEETIDNEEKGFSMLYQKIERIAYQKKLKAVFGLEDASGSGLLLAHYLAKKGCSVKTVNPVLVDRLRKKTTHPEKSDTLDAKGVARVLIREGIDTLPNYKISQNNQFAKELRELNNDRNYLVIEQTKLKNQLHALLSLTYSKEYKILFKNPFSQKALRYFKKNPLSQQIIQGEFPYSIEIARNRIRRKTDRLIALIPEIKEIEKEQAEVMKKTDQKIETLPGCGQVTAAAVLSEVKDIARFHSSSALAKYAGLSPRQRSSGKSFHYQKTYSGNRRLNAAIHRIALSQIGRRGCDTAKEYYQRKVSEGKTKKQAITCLKRKLCDIVYLMLKKQEVYNYQPKKLLT

SEQ ID NO: 389361 - protein, 376 aa, unidentified
MERGSLMLNTTTFVGLDVHARSIKAVALDAMTGEVRSATFAYDAAAVAEWVGSLDPAAKCVYESGVTGFDLQKKLSSMGIDCVVGAVSKMIKPSADRRRKNDRNDAEFLARMLSVGNVVEVCVPDDECEAARDLVRALDDAREDLKRCKQRLSKFLMRHGYAFGETTPTGRRKGNWTAAHWAWIRSIEFPEKADDDVLAYYVDAVRQAMENKKRLEKLVEAEASKPRWKKRVDSLRCLKGVDAMTAADIVFEAGEFSRFKNARSFAAWLGLTPSEHSSGESARQGGITKAGNKHLRRVLVEAAWHYISASPHPKDLAKGQAPDPAARRHAAKGIRRLVKRREEMLGRGVHKNKANVATARELACWCWAVGRMVENG

SEQ ID NO: 389362 - protein, 416 aa, unidentified
MNAAGIDVSSRKSTVAVLRPFGEVVRLPFDVAHNTEGLASLAEQLKALDGETRVVLEHTGRYYEPVAKALHEAGLYVSAVNPLLIKEYGANSLRRVKTDKADAVKIARYALDNWADLRDYTPMDTIRYDLKTLNRQFQLASKQRTASANNLIALLEQSFPGIRKCFDSPVRSDGTQKWVDFIHTFWHVDCVRKQSLNAFSERYRKWCKRHGYIFKQGNAVEVYSLAKNAVVLVPKSEVTKVLVQEAANQLTSISRSVEIYRAEMERLASTLPEYPVVMAMYGVGKSFGPQLMAEIGDVRRFERKQSLVAFAGIDPMPNQSGDKNVRSNKSSKRGSPYLRKTLFNIMGIYLKCSPQDEPVYQFLDHKRSEGKPFYVYMTAASNKFLRRYYAQVRDYLSTLDNLPPVDMDSTGLKPSD

SEQ ID NO: 389363 - protein, 338 aa, unidentified
MHKRSLQDVVWCGIDVSATELTVAVLADAFLQQRTFDNRASGHRALIAWLQRQARTVWVCLEATGIYSLDLALALHAAERIAVSVLNPKIVCRFAETLRRSKTDTADAQVLAEHARRMPFVAWCPPTATALRLRAITRHLAALVKQRTAVHNQLHAAQASALMPACVRQDLRRSLRSLERSSQRMRREALALVGHDTQLARRFALLQTVPGIGEASALYLLAELLLLPAGLSVRQWVAHSGLDPKHHQSGSSVQKPSHISRHGNRHLRQALYMPALVAVRHDPYLRAFYDVLQQRQKRKMQALVAVARKILHAIYGMFRSDCGYDGSRLFSHALDTAA

SEQ ID NO: 389364 - protein, 391 aa, unidentified
MICVGIDVAKDKHDCCILDSEGTTLADCFTIPNNLDGFKRLLQTIKDCTQKSDKIKVGLEATGHYSCNILGFLLDNDLPVYVMNPLHTNLYRKSLSLRKTKTDRVDAKTIATMLLSDVDLKSYTDTAYHNEELKSLTRYRFDKVQERAKLKQSVSRLVTILFPELEQLVSSIHGTSIYALLSEYPGAKQISEAHLTRLANILVTTSRGHYRKDRATHIRDAARTSIGSVMPAKSLELKHTIKLIQELTSEINEIEDAIRKIMDELKPPILSIPGMGFYSAAMILAEVGDFSNFNSPDKVLAYAGYSPSTYQSGKLTNCYAHMEKRGSRYLRYALYTATKYVCYWNPVFTEYLTKKQAEGKHYNVALSHATKKLVRLIYALQKSGKAYLAIT

SEQ ID NO: 389365 - protein, 340 aa, unidentified
MHSYFAGLDVHKQVIAYCIKKADGQIVSEGKIKATRNALREWAEGLPQPWVGGMEATMFSHWIFAFLKPHAEALYMGHPAKMKAIQAGKNKSDKMDARTIADLLRCDAFPKSFVISPELGRLRQQLRFRQLVVKQQVAFMNRTAGLLMEAGVEYERRRLHGKQYFSALMRESGWVNNEVKPLLRYSREQIENLGEMDKRLIRLLEKHPQLQRRVAALRTIDGVGPILALSWALETGTPERFPSIKDAQSYCGLTSAFWESAGRQKRQPLSKQRNKHLQTVLVEVAQLAPMHNEKLKSVYEKHKAAGANPNQATLEVARKLVAYLLAVDRAVLRGQWPQAA

SEQ ID NO: 389366 - protein, 319 aa, unidentified
MIRTICGVDVASSSLEARIGPLGASARFANDPTGIAALAQFCRDHQVDLVAMEATGGYEQQAVTHLSDHELAIAVLNPRSVRQFAQSMGRLEKTDAIDAGMIAWYAEVKQSKPITLAPHTQRHLRALVTRLRQLTELRTAQLNQQRLITDPLVQDSFAQLLGLLAEQIAMLAQSIAALIEQDPLWRELNLAMRSIKGVADRTVARLMADLPELGTLSNKTISKLAGVAPIAADSGKHQGKRAVRGGRSSVREILFIVASVVGRYEPDFIAFQQRLRAAGKPPKVVRIALAHKLLVRLNAKAREVRTQIQAASPKRTVTP

SEQ ID NO: 389367 - protein, 322 aa, unidentified
MTSSILATRVIGIDVAKDKLDVSDAAGKIKKEVKNSIKSIIRYVVKKIDQPDQTLVVCEATGGYERALVKALQESGVPVCVANPFQVRQFGKGMGVLEKTDPIDASLIRRFGEVVELRPTPPKSPEHEHHEALVRRREQLMNMINQEQNRRAQTVDKDVIKLIDQTLKLLKKQMKSIDSQIAAFLQEEAKTNNAVVVLQSVPGVGTVTTSTLICDLPELGKVNREEIAKLAGVAPIANQSGTRDRKRSIFGGRSHVRRVLYMATLVASRFNPVIRKFYKRLLEKGKLRKVALVACMRKLLTILNDMVRNNELWRAKKVVTGT

SEQ ID NO: 389368 - protein, 349 aa, unidentified
MIWIGVDAHKRVHQAVAISDQGIAGERTLPNTTAAWAELLAWAGQWPERVWAVEGAWYLGRGVAQYLAAEGEQVHEVSGRLTAKRRTRAVRPGKSDRLDAHAVALLLREEAARLPRVLAQDDQTAAVQLWSRTQAELTKDMTRLINRLHDLLLLCDPEYAGRLPALKTKAAITALLQYQAPGPSAIAREREQVIRSTAAQLELLDRQDRELRRKLERASTARFSPLRQIEGIGPLIACGLVAELGRPRPGFGEEQLAAFSATAPLEASSAGATRHRLNRGGNRRLNMLFHQIVLTQGRMYPPAQAYLARRKAEGLSKREARRALKRLLVRRVFHAWLDCFETNIERVAA

SEQ ID NO: 389369 - protein, 344 aa, unidentified
MNQIIRIGIDTSKYIFVLHGVDAAEQVVLRKKLSRKQVLEFFAKLPPTVIGMEACGASQHWARELSKLGHEVKLMAPQLVKPYVMRNKNDGRDAEGLCEAMSRRSMRFVPVKTAEQQAALMLMGVRDGLIVRRTQLTNTIRGHAAEYGLIAPKGLDAIEPLLARIAQDETLPALARELFVVLGRERARLEGELKAVEAKLMAWHRGDATGRRLAEIPSVGPIVATALVMKTPDPHAFRSGRHFAAWLGLTPKDHSTAGRTRLGKITRAGDEDLRRLLVIGATAVIQQARRGRGHHSRWLLALIQRKPPKLAAVALANKVARIAWKLMATGESYDVARMNPIPAT

SEQ ID NO: 389370 - protein, 385 aa, unidentified
MVKSVGIDLAGTGEHKVRCLDERAQLCDGFGFQTTPDGLAKLEERVFLDGANPVIVFEPTGLAWVLMAVYLRARHPDCRLVRVQSHKVATLRKYLRRSSKSDRIDALTLAKMPFIDSERLEELYLPPAKIYAIQRLARQRKRLESEIAARKKRIGSILDGYLPGLREAFANPWSPQARAFLSTHLNPMATIREGESALNTFLAKAKPRGKRDKVECHRVYLSCQNTAALCESSISAGVVNDDFFAYLQEEIAREIRLMEFAETESEAIAQHLEGLYEELHISDNLRTIPGVGEHTAPIFLATVGDPSRFRSQSAFANYTGVVPAAKQSSDTEAKGLRMTKAGPAIMKWALYQASQIGRRLILSLPGFTTGKWYITARIINKPWVP

SEQ ID NO: 389371 - protein, 364 aa, unidentified
MKIVGCDLHARQQSIAMVDTETGELTEKRLMHEGNAVRDFYTSLEGPVVVGIEATGAMQWFLELLEELGIECRVGHPAKIRAAETRKQKHDRRDAEVILDLLVMKDRFPDIWMPSTEQRDLRTLLRDRHQWVKMRARLQHTLQAIALNHALREGRALWTAAGRRALQDLALPPYTHQRRDELLALYTQLEKRIQQLDKQVESEAQQRPGARRLLTHPGVGPVTALATEVFLGDPTRFATANQVASYIGMIPCEHSSGKKQRLGKLTKEGNALLRYLWIEATLHAVIKDAELKRFYRRKLIQKGMGKARVAAARKLGIRLWIMLRDEIDYAEFCRRGKLRQKGEAHAGMPDYDSGPARAVTGSTE

SEQ ID NO: 389372 - protein, 323 aa, unidentified
METPQVSFKQVVSRGCGLDVHKKVVVATIDGEGLKKQTREFGTVTSSLKELRDWLLENGITHMAMESTGVFWKPVYNILEPAGITVWVVNAAHVKYVPGHKTDKKDSAWLCKLLLAGLLKPSYIPAKEQRELRDLTRYRTKLIQSNASNKNRIIRILEDANIKLSSVLSSTNGAVGTKLIDKICDGEEITMQDVDEVYHKKLAATKEEIYEACQGFITEHHVYMLQIIRQEIAGTQQTIESLTQRIKEVLSPYENALELLTKVPGISSKSVEDLVAEIGLDMGVFPTEKHLASWAGMSPGNNESAGKKKADEQPGETNKLKLC

SEQ ID NO: 389373 - protein, 414 aa, unidentified
MSRKRNKNKIVNEKTVLVTADIGMNNHFIYIQQLHGADLKVFSIKNSRTGFDFLWTRISAFKEKHNLESIVFGFEPTGPYAEPLAYYLKAKKIKLVQVNPAHTKKYKTIVGNSPDKRDPKDPLIIGDLIKMGRGLSVILPEGPDADLRRLSQARESIVEQRNALYNKIHARLAIAFPEFQRILDTKTKSATWILQNYPSPEKVISLGYEKLEENLRKISRGQLKTSKIKALFEAAQVSVATGPGNDYQFMEIDFYLQQINQIDVFLKNVEKEMENTLPKIPYAKNLLSVKGLGIVSVSGLIGEVGGFQNYKSDEQLIKVAGLGLYEISSGRHKGQRHITKTGRSALRKILHMAVLGMISENGIYHNEYKKYIENKKPSLVAMVNICKKLLRLTFALAKSGVDYNSDYKVVKTAA

SEQ ID NO: 389374 - protein, 337 aa, unidentified
MTSQSHNDSACQAHDPAALLSPEERLVVGIDVAKQTLEIAMRGKPSREIRNTKTDITRWIATLPEPGHVLIVLEATGGYENLLVTELVGDGHLVARVNPRQVRRFAQALNVLAKTDRLDAQVIARFGEQLQPRTIDTLSTAHLELQELVTRRRQLVAMRTMENNRLQQVTGKHARKTINTMVTTITRQIDRLDREINDRINSDDEWKAQAELLISMPGVGTVTAVTLITELPELGKLNRQEIAALAGLAPFNRDSGQHRGQRSIFGGRARVRTVLFMAAVAAVRCNPALREFNQRLEQQGKPFKVRITACMRKLLTTLNTMVRDRHPWEDRLQTCSP

SEQ ID NO: 389375 - protein, 420 aa, unidentified
MTVYLERGYKRRELCGPKQYLNLLLRSVLMIYVGIDVAKDKHDCFITNSEGEVLFPVFTIQNNRNGFDDLFSKIQSISSDASNIKVGLEATGHYSYNLLGYLINKGLPTFVINPLHTNLYRKSLSLRKTKTDKVDARTIAMMLMSDVNLKSYSDTSYHNEELKSLTRYRFDKVQERAQLKQSVSRLVTILFPELEKLVSSLHLASVYTLLSELPSAREIGSCHLTHLTKLLENASKGRYSREKAIEIREAARVSIGSNMPAKSLELRHTLRLIGELDSEITEIESEIKRIMDQISSPILTIPGIGYRMGAMILAEIGDFSRFDSPDKILAYAGASPSTYQSGQLESSYSHMEKRGSRYLRYALINAAKYVCHWDETFGAYLQKKLSEGKHYNVAITHATKKLVRLIYAMEKSGKPYIKAA

SEQ ID NO: 389376 - protein, 343 aa, unidentified
MEHYVGLDVSVKETSICVVDGAGQVVREVKVASEPGAILGVLADEAFTLKRIGLEAGPLSQWLYGALAEADLPVICVETRHMKAALSAQVNKSDRNDARGITQMMRVGLYRPVPVKTLASQKRRMLLTSRQLLQAKAHDIESDLRGTLRNFGLKVDLVSRGKFEARIRELVVDCPGLAAITGPLLIAWRTLREQFAVLHRQLLAVVRDDAVCHRLMTVPGVGPVVALTFRATVDVPSRFANSKAVGAVFGLTPRQHQSGEVNRMGYVSKCGDAMMRAMLFEAAQVMLTRTTKWSWLKAWGMKVARHRGMKRAIVALARRMAVVMHRMWVDGTEFRWTNLAEAA

SEQ ID NO: 389377 - protein, 343 aa, unidentified
MSVYVGIDVHRKRSQVAVVTEDGTVELNKNVVNGSEPMLRLIGDLPSGTPVAFEAAFGWGWLAALLEDYGFEAHLVHPLRCKAIASARLKNDKVDAATLAQLLRADLLPEAWIAPPAVRQLRALLRHRAGLVRLGTQQRNRIHAVVADFGYDRSGSYLSGPGRGWLAGLDLPPASREIVTDCLAVIDGLAPLTGRIDTELRQHAKADPRVKILTTLPGVGQFTALVMLAEIGDITRFPSARKLASWAGLTPTVRGSDRTVRHGHISKQGSAWLRWVLNQAAQTAKRSPEFAATYATIAKRRGKKIATIAISRKLLTRAWHLLSEMQDTDTTTTTTTTTPPRRP

SEQ ID NO: 389378 - protein, 345 aa, unidentified
MSLMFFLGVDVSKKTLSVVLTDHKDKTLWSNKSIPNDEVGFKKLVETVIKNTSKKAGKEEYSIAAGMESTGVYGERLAYYLNGNSHNGRIVTYVLNPAAVRAFGTSVMAPNKNDSADAQLIASYLSMAVTKEQISPWKAPSPEGRALRELSRRREELTELHASECNRLEKLECMQEPPEAIVRNVKELISYLEDSIHNLEKEIEEHIDDDPGMREDIELLRSIPGIGDVTSVTLQGESDGLINFASVKGLVSFVGIAPSEHTSGTSVFKKSKISRRGNSRIRHHLYMATLVAARVNPVIKEFYERLLNRGKCKKLALVACMRKMLHIIWGVMKNRKRFDPCYSLK

SEQ ID NO: 389379 - protein, 343 aa, unidentified
MVHYIGLDVSLKRTSICVVNQVGSVVREGVVESEPEAIAAFVRSKAPGAVRVGLETGPTATWLWTELKRLGLPVICIDARHARAVLKMQINKSDRNDAAGIARIMQTGWFKEVRVKDLDSHSVRALLASRALLVKIKRDLENQIRGLLKNVGLVIGRAKFNVFTMRTEELIADRPQMIAVVGPLLKARQAIEQQTDDLDRKVLKLARYDAQVRRFMTVPGIGPITALCFKATIDDPTRFKRSRSVGAYVGLTTRRHASGEIDWTGRISKCGDAMLRSYLFEAAGVLLTRVPKWSALKAWGMRLAKRNGLRKATVAVARKLAVILHPMWIDGTKFNWSKKEVAA

SEQ ID NO: 389380 - protein, 461 aa, unidentified
MVPPSPALSDALQICHPHAAGIDIGEAEHWVAVPPGCDPQPVRRFGTFTADLDALADWLIDCGVTTVAMESTGVYWIPLFELLEARGVQVLLIDPRQAKRAPGRPKTDRLDCKWLQRLHTYGLLAGAFRPEAHVCVLRGYLRHRQMLITYAAHHVQHMQKALEQMHLKLTQVVSDITGVTGMAILKAIIAGERDPQHLAKLRNPHCHHTEDDIAKALQGTWRAEHLFALRQAVELYAFYHQQITQCDQQIKAQLDTFADQSAGRPLPPKARRSKKTNEPRFEARTPLSRMAGVDLTTIEGIEEGTALVILSEIGTDMHRWPSVKHFCRWLGLCPQHKISGGKVLSRRVRPGAHRVAVALRLAARTVQHARTALGAFYRRMRIRLGAPKAITATAHKLARLVYSLLKQGSAYVQQGLDAYESRYRERKVKAMARQAQALGYTLVALGTPEVPNCTALAAPTP

SEQ ID NO: 389381 - protein, 421 aa, unidentified
MQKPPTEFAAVVGIDWADKKHDVCLHIPGSEAFELSVLEHRVAAIGDWALALRERFGGAPVAVCIELAEGPIVSALLEYDFFVLFPVNPTMLAGYRRTFTPSGAKDDPTDARIAVELFLRHRERLSALERESDGMRVLRRLVEVRRDLVQDRVRVTNRLTNVLKSYFPQVLSWFRDKWTDVFVEFVARWSTLQAAQRAKRETLVAFFHEHNVRRASTIEKRLEAIRSEGPLTTDRAIIEPAVLQVEALLGQLRELSRSIERFDAEIAARSAKLADYKLFAALPGAGPALAPRLLVAFGERRERFPSAAALQKYVGIAPVTERSGNQSWVHWRWACPTFQRQTFVEWTEQTLPRSFWARAFYDQHRAKGASHNAAIRALAFKWIRVLWRCWVDQTPYDEARYLSALRKRHSPLLAFAAETPA

SEQ ID NO: 389382 - protein, 367 aa, unidentified
MKKISTVATQQSRKISEHKLTVGLDLGDRSSWCCVLDEAGAIVREQKLGTTPKAMKEVFGAVPRSRIALETGMHSPWVSRLLSQLGHEVIVAHARNVRLIGESRKKDDRIDAQTLARLARIDPQLLSPVKHRSAKAQADLTVIRARAGLVRARTALVNTARGLAKSYGERLRGCNVRNMNAEKAQGLSPELRTALEPLLAGIESLSERIRECNEGIERLARESYPEVAQLKQVKGVGTLIALTFLLTLEDAHRFRQSRDVGCYLGLQPGRRNSGQSEPQMHISKEGDPYLRTLLVQGAHHILGPFGADSDLRRWGLKLAERGGKSGKKRAIIAVARKLAVLLHHLWVSGEVYQPLRLSKLRAMPAAA

SEQ ID NO: 389383 - protein, 326 aa, unidentified
MEHELHYIGIDTAKEKLDVDVLRPDGRHRTKKFANTTKGHDELVSWLKGHKIDHAHICIEATGTYMEPVAECLYDAGYIVSVINPALGKAFAQSEGLRNKTDTVDARMLAEFCRQKRPAAWEAPHPLERALRALVVRHQALTDMHTQELNRTETAREVQRPSIDAHLLWLEAELKRLEKQIKDLTDDDPDMKHRRKLLESIPGIGEKTSAVLLAYIGLKDRFAHARQFAAFAGLTPRRYESGSSVRGASRMSKAGHVSLRRALYMPAMVATSKTEWGRAFRDRLAANGKKGQVILGAMMRKLAQVAYGVLKSGVPFDASRHNPVAA

SEQ ID NO: 389384 - protein, 355 aa, unidentified
MNDAKYIGMDVHTATISAAVRDSAGNLVMEATLETKAETILEFVHGLRGSLHVSFEEGTWAAWLYDLLKPHVTEVLVCDSHKNALLRVGNKNDREDARKLSELLFLNKLHPVYHGETGIRTLKELARSYLTITRDLTRVMNRLKAIYRGWGIACAGQQVYAPRYRAEWLTKIAEAGVRRRAEVYYQQFDVLAALRQEVRRELLAESRKHPAMRLLRQIPSIGPIRAALLIALMQTPHRFRTKRQLWAYCGLALRTYDSGEYSFVGGQLKRSKKAVTIRGLNKNHNHDLKNIFKGAATRAAATAGPFQKFYEARLASGMKPPMARLTLARKIAAITLLVWKKGVRFDAEQLKQQAA

SEQ ID NO: 389385 - protein, 284 aa, unidentified
MQYLNDTELSSHEETRCQFNGSKASIKLGIDVHQDFYVVVMQLSGQNPKPPQRFSKQRFLEWAEKLVRAGAQVHAVYEACGFGFCLQRQLSALGIHCYVVCPQKLDEQNRRVKTDSLDAKALCLKLERFVQGNKAALALVRIPTEEEERARAIHRQREQLVKVRKQLEGQGRSLMVNHGIEPVKNWWKQHAFAALAVPDWMKELLQNTQPILLALQEKIAALTVRLQNAATANQPRGLGAMTSVIIDREIGDWQRFNNRRQIASYTGLCPSEYSSGARLDCKVA

SEQ ID NO: 389386 - protein, 356 aa, unidentified
MTSTKYVGMDVHKESISIAVMNSAGKIVMECVIETKASVLLQFFNGLRGDVRVTFEEGTWAAWLYDLLKPRVSEVVVCNPRKNALLKDGSKSDRIDARKLAELLRGNHLKPVYHGEHGLRTLKELGRSYLTITKDVTRVMNRLKALYRGWGIPCAGHEVYVPRHRSEWLGKISEAGVRRRAEHCYQQLDVLRLLRQQVRRDLLLESRKRPAWRLLGLIPGIGPIRAALLIALIQTPHRFRTKRQLWTYCGLGLETHDSAQYRVVEGQLQRSKKSVTLRGLNQDHNRDLKDIFKGAATKVSSSNSGPFHDFYEHLLAQGRKPTMARLTLARKIAAITLIVWKKEVRFDASYLKSQAA

SEQ ID NO: 389387 - protein, 337 aa, unidentified
MTIIRIGLDTAKHVFQVHGVDENEEPVLRRQVRRGEMEKFFGKLAPARVGLEACGASHHWARVLRGLGHEIVLMPPQYIKPYVKRGKNDAIDAAAICEAMSRPGMRFVPVKSAEQQAALMLLKVRDLLVKQRTMLINAIRGHAAEFGVVAAKGPVKVAELLQRAHAEEAGVPELALGMLSLLSGQLDALDLKLKALESQLLALHKHNPVSRCLATQPGIGPIGAISFALKVSDPQGFRSGRHFAAWLGLTPKENSTGGRHRPGRISRQGDQGLRRLLVLGATAVIRFATAGKTSPWLMNLLARRPKKLAAVALANKMARTLWAMMVSGELYRRPQQA

SEQ ID NO: 389388 - protein, 417 aa, unidentified
MDKEPAIFVGVDWASTEHQVCMIGPDGPVQRAFAHDAGGLGAMVDWLCAQTADPQDVAAAIEVPHGPVVEALMDRGVAVYAINPKQLDRFRDRFSPAGAKDDRRDALVLASSLRTDRHCFRQLKALDPIVVELREHTRMADELKEERNRLTNRIRQQLWRYFPQMLELGEDPGADWFLDIWALAPAPAKAAKLTEKKVARVLSGYRIRRINGADVLAILRRPALTVAPGTVEAAVAHIAAVAERVRLVNRQIKETTRRLDALVDTLAVEPEAEPGQLAEQRDATILRSLPGVGRIVLATLLAEAHQAVQARDYHALRTLTGVAPVTKRSGKSCRVEMRKACSQRLRTAVYHWARVATQHDAKSRARYTALRSRGCSHGRALRSVADRLLAVACAMLESKTTYDPFKPSQMMSRLNTA

SEQ ID NO: 389389 - protein, 320 aa, unidentified
MMAQDDLVVVGIDVAKDKVDACIRAFALRQVFPSAAQGHRKLIAWLRKHKVTKAVMEASGGYERDWAKVLRQAGIEVRIVDPKRVRSFALSAGRLAKNDAIDAEMIAWFAETFSEAPSQRHDAAHEELLALVKARKGLLDLKTRLQSQNEHAAPGPVQKAHARVVKSLATEIAKLEAAISAKIKATPDFAERTEIIESVPGFAETTSANLIAGMPELGQVSNKIAAALLGAAPYDDDSGHRRGERHIKGGRRWVRNAIYMPCLGAATQNNPVLKAFYHRLIARGKPPKVALVACMRKLIIILNTMIARRQKWDPTRYAVA

SEQ ID NO: 389390 - protein, 363 aa, unidentified
MTTPTIATATAGTILAIDLGKDKSVACLDTGSPEGARFESFTTDRARLAKLLSRCQPTVVVIEACLLAGWVHDLRAELGFACRVANTASEAWKFKHLKRKTDKDDALRLAQLHALGQLPTVALPPPATRQWRALIACRQTLVGRRVAVPNRIRALFVAQGLPAPRGAKAWTTTGLDGLALQAQPLADCTPDELWRGLLHLALAEYRHLVELLDHAEHRLDALAKSDRSVQLLETTPGVGPRTAEAIVAHLHQPERFQSGKQVSAYVGLAPKQFQSGETDRRGRITRRGPALLRKLLVECAWVMLRYNGWARAVYLRLTHGGKTHKKQAIVALARKLLVRCWAMLRDQTPWRDKTPAPAAAPAT

SEQ ID NO: 389391 - protein, 400 aa, unidentified
MISVGIDVSKGKSTVCVLKPYGEIVCRPFEMQHVEKDLEAFHNLLQKLDGEIRIVMEATGIYHLPILIFFHNKGYFVSVINPFAMKKYAKDNSIRGAKTDKLDSIMIANYGIEKWFKLQRYEGDEQIYAELKLLGRRYRYYMELHVKALQELTHILDYVMPGIKKLFSSWNEANGKDKLSDFVERFWHFDLITSMSLETFTDEYLVWAKEKKYHRSRSKAETVYELASSGIPTLPSSTPSTKMLVQEAISVLRTVDSSLSLIVTRMQVLAKSLPEYSTVREMGGVGDVLAVKLIAEIGDVRRLHSAKALIAWAGIDPPPYESGQFIGSKRKITKRGSSTLRKIGYEVMRVLKSHPAPKDDAVYNYILKKEGEGKSKKHAKIAGLNKFLRIYYARVIAVYQ

SEQ ID NO: 389392 - protein, 239 aa, unidentified
MVIIGCDYHPSMQQIAWLDTATGEGGERRLEHSGGEAERFYRELKQRGVQVRVGIEASGHTRWFERLLAELGMELWIGNPAKIATQRVRKQKTDRQDAQRLLQLLVEERFPRLWVPSAENRDLRQLLWHRHRLVQMRTVGSYLGLIPCEDSSAGKQRLGRLSKQGNVLLRYLLVEAAQAAVRCDAQWRRRFVRLAMRRQRSIAVAAMARKLAVSLYWMWRKAEGPPAAAQFGSHVGQLD

SEQ ID NO: 389393 - protein, 349 aa, unidentified
MYTEKISTKDKIINYDKYDYYIAIDWSQRNMAIATLRKDANKPKITDVDSDVKLLKTYLSSLKGSKIVTIEETTSTHWLYVELYDYADKILICDPYKNKLLSDGAKTDKLDAIKLCLLLRGGLLYEVFHSLDKTYKLRQLVSDYEQLVKFGTRIKNEKSAIYRGAGKSYKQLEPIDDKTLDWIISQKNRRIELYENQKAEYENRFNEIVKTNKDLKHLKSVNGIGVIGAVKILSSVINANRFENAGKYLSYCGLVQHQKMSGGRSYGKRKARYSRRLKAVYKTAAMSVINGESPLREYYDSLLKKGISQDNARQQVSRRIAIITYGILRTGTKYEPYKWRKSKRKENTD

SEQ ID NO: 389394 - protein, 364 aa, unidentified
MKIVGCDLHARQQSIAMVDTETGVLTEKVLKHEGNAVREFYAALEGPVVVGIEATGAMQWFLELLEELGIECRVGHPAKIRAAETRKQKHDRRDAEVILDLLLMKNRFPDIWIPSTEQRDLRTLLRDRDQWVRMRTRLQHTLQAIALNHALREGRSLWTAAGRRALQDLALPRYTAQRRDELLSLYTQLDKRIQQLDKQVETEARQRPQARRLLTHPGVGPVTALATEVFLGDPHRFAGADQVASYIGMIPCEHSSGKRQRLGKLSKEGNSLLRYLWIEATLHAAVKDPELKRFYRRKLVQKGMGKARVATGRKLGIRLWIMLRDEIDYEEFCRRGKLPQKGKAHAGMPDYNSGPAQAVTGSTE

SEQ ID NO: 389395 - protein, 467 aa, unidentified
MLSGAMQTLAGRDADMWAEAPDATSQRRVASCPVRERPRISWMRGDAPPRISFGRLRSRALGQAPPHRRREQGMIYAGVDIAKTDHVIGAVDERGAEMCRPMPFKNTEAGLERAVAWLEGLAGSPSDVVVGMEATGHYWMACYSFLVARGYSVAVINPMQVKAVRKLKKLDKVKNDRIDAWLIAETLRIGQYDETRLATDEVASLRSLSRYLQSLRGMAAELKTQCVCLMDAHFPEYAGIFSDMFGAGSRAVLSRSPLPFELARRRADSLARDIAEASRRGGKSAGYAARIKAAARSSIGVRLGQEAASFQVKSLIRQIEFADSECAKVEARVRALLDEVEPLVLTIPGVSYATGAQIVSEIGDVSRFRNASALVSYAGLNSSVSQSGQFDSGGGPITKHGSPYLRRALWLAANRARQYDPGLRAFYDKKRAEGKPHRVAVTAVARKLCHIVFAVMRDQVPYDPGRE

SEQ ID NO: 389396 - protein, 453 aa, unidentified
MANGSQFTERYRASMPRYVGLDVHKHFIEACFIDEAGKQLHRCRVAVTRESIQTFVAKCLQPSDHVVMEVTTNTWEVAELILPQVAKVAIANPLKVKAIAEAKVKTDKVDAGVLAQLLRCDFLPQVWIPDKTTRLLREMCAHRAGLVADQTRIKNRIQSLLAQRLISVSVPVLFNGSGRNWLSHLELDAQDRALVNSYLRVLDQIELEENGLQKALTELSFENDQIRLLMTLPGVGPAGAQALYAALGDWRRFKDGAHAASYLGLSPSTRQSANHCYHGPITKAGNSLARWLLTQAARQVAQHPGPLGVFFRRIHKRKNFNVAVVATARKLVTIGFLMLKNNEPYRYSLPAPTQRKLSVFRVEATGSRRSKSKLRLPMQRRQPGTRVQSIPTLDEVYSSENLPPIAKADAVASGERRMLQQMGIADLPERLQVVQTRTYQSRKTAPAPKTNPF

SEQ ID NO: 389397 - protein, 337 aa, unidentified
MKYCGIDLHSNNSVVIVSDEEDRIVFSKRLPNDLGQIRAALEPHREDLAGVVIESTYNWYWLVDGLMDTGYQVHLAHPSAIKKYEGLKHSGDFADATYLAHLLRLGLLAEGYVYPREERGARDLARKRLQLVRYRTAQILAIEGILMRQTGARLKGEAVKRLTAEQVDAFAFAPDVSLAVEANRAVSQTLSQQIEALEKRLQQRVILRPEYRLLKTVPGIGEVLATTIMLETGTISRFTRVGNFSSYCRCVESLKESNGKRKGEGNTRNGNKYLAWAFVEAANFALRCCPQARSFYDRKKSRSNRILALKALAHKLARACYHMLQDQKPFDVHLCFG

SEQ ID NO: 389398 - protein, 501 aa, unidentified
MNKVFSPPFMKIMFIKEVQAGVSIAVVELILVALTLSPKRIPLSGPYPRLFCIVQYKTNGKKTCIGKWLCKGIQTVKGWLLPELLYQEVPDAMEPVVKRCAGLDVHRKNVVATITTEHDDGTIHEETREFGTFKKDRKQLASWLAGHAIELVVMESTGIYWKAIYEALEGSGFEIYVVNARHVKNVPGRKTDVQDSQWLSYLGRFGLLRPSFIPPRKLRQLRLLTRRWLKVQGIIAGEKNRLHKVLDDGGIRLGAVVSDINGVSARAIIDGLIAGESPAALMKYVKGRLKSKIPVLLESLEGTISDSHRFLLHQIRNHIRYLEQELNDLWDEIVKRMNPFKEYWEILQTIPGIDQVSAALLIAEIGVDMKRFGNAHRLASWAGMCPGNNESAGKRKSGRTRKGNSTIRQVLCQVSNSACRTQSQFQSKYKSLVIRRGHKRAIIATGHKILRVIFSILSKLEPYKDPEVNYEEVLVKRNAPRWIKALKKYGHWPGKQQLVAA

SEQ ID NO: 389399 - protein, 334 aa, unidentified
MENIALIGIDLGKNSFHIHCRDRRGKAVYRKKFTRPKLIEFLATCPATTIAMEACGGSHFMARKLEELGHSPKLISPQFVRPFVKSNKNDFVDAEAICEAASRPSMRFVQPRTESQQAMRALHRVRESTVQDKVKTTNQMHAFLLEFGISVPRGAAVISRLSTILEDNSLPLYLSQLLLKLQQHYHYLVEQIKDLESQLKRKLDEDEVGQRLLSIPCVGTLTASTISTEIGDGKQYASSRDFAAATGLIPRQYSTGGRTTLLGISKRGNKKIRTLLVQCARVFIQKLEHQSGKLADWVRDLLCRKSNFVVTCALANKLARIAQALTARQQTYVA

SEQ ID NO: 389400 - protein, 355 aa, unidentified
MTTQTHRVTGGVDTHTETHHAAALDHVGRLLGTREFRAGPAGYAELLEWLQSFGSIDQIGVEGTGCYGAGLTRFLRGHDHSVIEVNRPDRGSRRTRGKFDPLDAESAARRALAAEDHIIPKDTTTIVEAIRALRIARTGAVESRTAAYNQLRNLTLTAPESLRETLRTKTLHRVALESARLRPDKSRLADPIQATKLAMRTIGHRVASLNTEIKALDRQLGQLVKRAAPRTLELVGVGTENAAQLLITAGGNPERLRSEASSAALCAASPIPASSGKTTRYRLNPAGDRDANRALYIITLVPMRYCPQTRAYIERRQAEGLSKREAIRCMKRYVARQTYHAIRADLAAARALDDL

SEQ ID NO: 389401 - protein, 383 aa, unidentified
MKAVCGLDVHKDSIYLCILHPDGELFEQVFGVLTFQLHEMCKLLKKHHVSEVSMESTSIYWIPIWRVLSPHFTLRLVNPYFIKQLPGHKSDVKDAQWIAECTMKELVNGSFVPPEIIQQLRQYDRRIFDLNEEIVRKESKVDAVLQRCNIRLSNYVSNIECKSYRTVVRRLSEGVTDPQELIKEIHGRIINKHGRETILASMEGVVSQAEIDVLRQLREEIDIAESHKKECQDKMSEICQKYFPEELRRLQTIPGIKERAATSLIAEIGTDISKFETANHLAAWSGLRPRNDESNKKVKSRKTTHGNSYLRRTIIQCAWAASRQKDCFFSWFSYHQTVVRRKNKMKVIVAVARKMLVAVWHVLHDNVEYFDFKHDCEESANNG

SEQ ID NO: 389402 - protein, 338 aa, unidentified
MKLYCGIDLHSNNSVVVILDEKDKVIYQKKLDNNLALILQQLSIYKSKISAIAIESTFNWYWLVDGLIEAGYTVKLVNTAAVQTYSGLKHTDDKDDARWLAHLMRLKILPTGFIYPKEERAVRDLLRKRSQLVRQSTTNILSLQNILARNTAQSLSSYKIKKLDDEQAEKLINDPNITLSLKSNLNIIRCLQSSINEIETAVLKQTRIRKEFKKLLTVAGIGKILGLTIMLESGDMNRFAKVGNFSSYCRCVKSERFSNGKKKGEGNRKNGNKYLAWAFIEAANFAVRYNGKIKSFYQKKKAKTNGIIAIKAVANKLARACYHILKDQVAFDVNKAFA

SEQ ID NO: 389403 - protein, 270 aa, unidentified
MQTNQNNQVYVGIDVSKAHLDVGIRPSGDRWQADNTVEGIEELVEKLSRTHPTLIVLEATGGLEMAAVGALGAAGLPVSVINPRQVRDFAKSIGRLAKTDKIDAMVLARFGEAVRPEPRVIPTEQAIQLQALLVRRRQLIEMLVAEKNRVYLTHRIVQPRLKEHIAWLEKELDEIDRDLKEQLQQSPIWREKEDLLRSVPGVGAVTAITLLAELPELGQLNRKQIAALVGVAPFNCDSGICTVNVPFGVAELVCEMLFIWLLYLQVDTIL

SEQ ID NO: 389404 - protein, 326 aa, unidentified
MVVEQVSGSNPKPPQRFGKGVFLGWAAKLKRPAAEVHAVYEACGFGFTLQRQLVALGIKCYVVCPQKLDERNKRVKTDSLDAKALCLKLDRFVEGNRDALALVRVPAEKEEQLRAIHRQREQLVKARKQLEAQGRSLMVNHAIEPVQQWWKRRAFAQLQVPQWMRTLLLNSQPILLVLEEKIRALTVQLQSAAAPNQPRGLGQMTSVVIDREIGNWHRFNNRRQVGSYTGLCPGEYSSGNTRLQSCVTKHGNPRLRAALVELAWRMVRFQPNYKPILKWRALLAKGRLASGAARKKAIVAVARQLAIDLWRFRTGRGTPEQLGLTI

SEQ ID NO: 389405 - protein, 377 aa, unidentified
MKRIKFVGLDVHAETIAVAVAEQDGEVRSLGVIPNREESIRKLVKKLGPVEQLRFCYEAGPTGYVVYWQLTALGAKCEVVAPTLVPVKSGERVKTDRRDALKLARNYRAGELTPVWVPDAAHEALRDLVRAREAAKKDQLRAKHRLGKFLLRHGRRPPTGVKPWTLKYMTWVKQGVHFEQPAQEATLLDYLHEVEHAEARIARLDLAIEEAVKSTPPKMKAVIEGLQALRGIAQVAAVTIVAELGEISRFSRARQLMGYGGIVASEHSSGESNWRGGITKTGNAHLRRVVVEAAWAYRHRPNLGAALRQRQELVSEEVREIAWKAQHRLYTRYRKLMARGKDKGKVITAIGRELLGFIWAIGVKVEAAQKVTERRAA

SEQ ID NO: 389406 - protein, 359 aa, unidentified
MQRNKISFKGQKIYIGIDVHAKTWEICVLTESGYKERHPQQASAKTLFDFLKKHFPGGEYHAVYESGFSGFSTYYALKEYGINCVVTHAADVPTTQYEEVMKTDKVDAAKLARSLRAGDIRPIYIREKENIDDRSVIHIRKTIQKQLSGYKARVKHLLHCNGVEIPERFVRPGTHWSRAFIKWLKEDVVLLSSSRLSLDLLVKQVETIRQTLLDATKSIRRLAQTDRYRNNYELLMSIPGIGVSVAMCILTEIYDVKRFRNENQFASYLGLIPTCHNSGEKTASGEKTFRGNKHLGPMIIEAAWIAIYRDYGLGMAYARYKQYMKPQEAIVKIARKMSNIIFSVLKNSRKYEPYRWDKE

SEQ ID NO: 389407 - protein, 361 aa, unidentified
MNGTMTWAGLDVHARSADAAAIDVLTGELTRARFGVGTEQVVEWLLALRAPARVVYEAGPTGFALYRAARAAGIEVEVIAPSKTARPAGDRVKNDRKDAELLARLAMAGQLSVVAVPSEFVEAARHLARTREQVRGDLMSARHRVSKLLLAHGRVYDGKTTWNRAHRLWLGRQRFEQEPAELAFIDLLAAVDGLIAWRGALDERLSRLASDERLWPTVARLRAFRGIDTLTALALHLELGGDWQRFSSPRKLFSWLGLTPSLDQSGQSKTQGSITKTGSTYARRLLVEAAWHYIRQPAIGATLRNRQSGQPEQILQIAWRAQHRLHRLHGRLRERGKPHNVVTVAIARELAGFLWAAATAP

SEQ ID NO: 389408 - protein, 391 aa, unidentified
MTYVGIDVAKDKHDCYIVNSDGEILANVFTISNDQIGFNLLFQTLQSVAPDLSKVKVGLEATGHYSYNILGFLLDKGLATFVINPLHTNLFRKSTSLRRTKTDKVDARTIAAMLASNVVLTSYTAASYHNEELKSLTRYRFDKVQERAKLKTSVARLVNILFPELEKLVPSLHMNSVYALLSEFPGAKQIASCHLTRLVHLLSKSSKGRYRRDKAIQIREAARSSVGSVMPAKSLELKHTIRLIEVLSEEIDEIETSIREIMDSNPSPILTIPGINYRMGAMILAEIGDFSRFDSPNKILAYAGLSPSTYQSGKLDNAYPHMEKRGSRYLRYALFNATRLVCNWDPTFAAYLAKKRAEGKHYIVAISHAAKKLIRVICAIQKSGKPYCPAT

SEQ ID NO: 389409 - protein, 416 aa, unidentified
MKASKSRIDRSVNDHEMIVGIDVAKHKHVAKILFPNGSESQPFSFSNHRRGFETFLAWVCLHQKRATCNSIIVGLESTGHYWEPLAFFLEAIPRIRVVQVSPKHVKKTKEVYDNSPGKTDRKDAGVIAMLIQMGRFQRLVLPRGPYAELRGYARLRERKVVELGVQRNLLHSLVDWVFPEYGSLFPKLEGKTSLTILRHYTTPEQISRAGLPRLSNAIRQASHGRLSEACAERLMEAASATIGLQEGIEAAAFAIRNIVASLERIQQEIVLIEKQLAKVLDQIPYAQQLLSIPGVGKVTVAILLGEAGDLRRYQKAEELIKLAGLNLFEISSGSHQGRRHISKRGRPLLRKCLFFAALRTVKTQGAFRAVYVRLAQANRMQKTKALVAISRKLLRLVFALVRDDMAYQPRGELRAA

SEQ ID NO: 389410 - protein, 362 aa, unidentified
MAESTTFVAFDQHAATTMAAVLLPGQRTPALHPMTSDLGELRRFVRRLRASGGLRCCYEAGPCGFELQRALATDGVPCDVIAPALIPRRPGDRIKTDRRDASQLAVLSRAGALTTIHIPTEQEEAARDLLRCREDIRADLLRARHRLSKFLLRHGRRFTGTKKAWSKRHETWLRAQTWAIPALDQTHWAYLRAVDEAVARLRAVEADLQALLTLEPLRARVARLRCFRGIDDLTALTIAAEFGDPRRFPTAPSTMAFVGLVPSEHSSGGKRAQGAITKTGNAHLRRVLVEAAWHYRHHPFVGRALQRRQTDAPPDVVARAWTAQQRLHRKYARLAARGKPKQHVVTAVARELTGFVWAVLTQ

SEQ ID NO: 389411 - protein, 364 aa, unidentified
MKIVGCDLHARQQSIAMVDTETGELTEKRLMHEGKAVRDFYASLEGPVVVGIEATGAMQWFLELLEELGIDCRVGHPAKIRAAETRKQKHDRRDAEVILDLLVRKDRFPDIWMPSTEQRDLRTLLRDRHQWVKMRARLQHTLQAIALNHALREGRALWTAAGRRALQDLALPPYSAQRRGELLSLYTQLEKRIQQLDKQVETEARQRPRARRLLTHPGVGPVTALATEVFLGDPTRFATANQVASYVGMIPCEHSSGKKQRLGKLTKEGNSLLRYLWVEATLHAVIKDAELKRFYRRKLIQKGMGKARVAAARKLGIRLWIMLRDEIDYEEFCRRGKLRQKGEAHAGMPDFNSGPARAVTGSTE

SEQ ID NO: 389412 - protein, 347 aa, unidentified
MKFYTRQHQHYCGIDLHARQMYVCILDAAGKVCFSRNLECTPQALLAAVKPFRDDLVVAVECMFAWYWVADVCAREGIPFVLGHALYMGAIHGGKAKNDKIDAHKISGLVRGGMLPQAYVYPPPMRATRDLLRRRCHLVNKRAELITHIQNTVSQYNLPPLEGRIQKRCEREGLLAHFPDPQVRNSIALDLAMIEQYDALLPKLERHIRTCAKEHDRKAFTLLRSIHGADLIIPLVILYEICTIERFPRVQDFVSYCRLVKPGRESAGKLLGHAGGKIGNAHLKWAFSELATTFLRGNAPAQALHERLKKQHGKGKSLSVLAAKLARAVYFMLKRGRIFDPHKFYQD

SEQ ID NO: 389413 - protein, 419 aa, unidentified
MRSVTRLLAEGLFLRYRWRGVGRKSIIFGNEGCLPRCRNRPCTESGEGGCPPIDVGNGVTTESAPNIWRWRTAVEHHAGIDVSLELSSVCVVDGRGKIVREAKVASEPDALVSFFKGLGLPVKLIGLEAGPLSQWLHAGLMRAGFEAVLLETRHVKAALSAMTVKTDRKDARGLAQLIRMGWFRPVHAKSIGSQEIRALLVARKQLLGRLLDVELSIRGILRGFGLKVGQVTRKTFEARIRELVTGHTMLERIAEAMLSARATLQAQYEKLHKAMLAFVREDAVCRRLMTVPGVGPVVAVTFKSGVDDPNRITKSKAVGALFGLTPKKYQSGEKDVTGGITRTGDEMVRTALYEAANVLLSRITRFSKLKRWGIDVAKRRGSKRAKVALARKIGIILHRMWIDGTTYRWAEAKPIAAQA

SEQ ID NO: 389414 - protein, 475 aa, unidentified
MNIKGTKKKNQVVTANIFEQQELLKKAEVIKENLTASTWRGLETNGKFDKNKKLSFISDDMLILGCDVGSETHYVRAIDTRGRELSKSAYSFNNDYEGFQSAKEWAVKIAAEHDKSQIVLGLEPTGHYWFCLATWMIANGISVVQVNPYAVKQTKEVEDNSQLKDDRKDPKLIANLVKDGNFGMPYLPEKIYAELRRLSMFRDQLNEDRIRTINRMHREMKIYFPEYKEALGKVDGAFSLELLKEAPFPDELTALGEEGIRQIWHAAKLRGRGYSRAREILQYAKASVGIKDGSIASKAAVKWFVQKIMELDVELAVIENQINQKCQEIPHTGNVLEISGIGENTLSGILAEMGDISRFDDVKEIQKLSGLGLVACSSGKHKGETKISHRGRKRLRYWLFQAAKSAVAHAEEFKELHMYYTTRADNPLKKMQSLIVIACKLLRIIYTILNTGTKYAPKKMLMDIRRPENKEAIVA

SEQ ID NO: 389415 - protein, 356 aa, unidentified
MLSKKISGNKTKNNSSLTTTESYDHYIALDWSERNMAVARMSKKDTEPKVIDVPSDLKELKLYLANLKGKKILTIEETTTSQWLYVELYDYADKIFICDPYRNRLLSDGPKNDKIDAGKLCKLLKNGMMKEVYHSTNELYELRKLVSYYDDEVKAGVRLLNQKSALYRAENKSWKKKEELESSHVNKFIAAQLEEKIESYEEKKKRYKEEFERISKKNKVLRSLKSIPGLGPISSVTILSTVIDGKRFKSSNHYLSYCGLVKHEKFSGGRSYGRRIPRYSRKLKGVYKSAAVRVASTDNPLREYYDYLLNEKKLPEYNAKHALARYIAKISLGIIKSGEKYKPYKWRENKKEKEAA

SEQ ID NO: 389416 - protein, 417 aa, unidentified
MRKARAIVGVDCGEQRHRFVMIDENGEREASCWVANDLGKIFQAFDELGSLSKTGKLEVVTESIGSLGAIVSQAVHGRGDELFVVSTKALRHYRDLEGQPHKSDDRDAYLAARMQLFGMEGVRTPAPVSEEEQVLARLIRLRFRLMDQKKALGLGLRSRLLDLAPVMASKDWEGPGHSSRAMVAILQRWPGLVGLERAHRKSIEKLLRKVTRNGDACVKMAKHLREAAKTIALEGLVREVLTMEMTILVDQLEANHQQLGQVRKRENELVDAHPVGQRLLTMPSVGYRTAAVLLAESLPQARVRSEAQLATYSGLTPLSRQSGNSSRSRLSRGVNRFLASAHYMSAVNACTRSPIDKTYHDKKRKDFKGHPAEFKKATIALARQRHKVIYRILVKGEIYDASRLAASTVERARKAAV

SEQ ID NO: 389417 - protein, 356 aa, unidentified
MIANKVSRKRKKDNSSSTETESYDHYIALDWSEKNMAIARMGKKNSVPKVIDVPTDLMGLKKYLSNLKGKKILTIEETTTSQWLYVELQDYADKIFICDPYRNRLLSDGPKTDRIDAGKLCKLLKNQMMKEVYHSTNELYELRKLVSYYDDEVRAGVRLLNQKSALYRAENKSWKKQQELEASRVNKFIVAQLDQKIESYHEKHKRYEKEFERISKNNKVLRSLKTIPGLGPISSVTILSIVINGKRFKSNNHYLSYCGLVKHEKQSGGRSYGRRLPRYSRRLKAVYVSAAVRVASTENPMRKYYEYLLNEKKLPDYNAKNALARYIAKVSLGIIKSGEKYKPYKWRDNKKAKQAA

SEQ ID NO: 389418 - protein, 379 aa, unidentified
MPPLRRPISMLDQLTMAAVTTPANAVIVGVDTHKQAHVAVAVTRLGARLAACRVSADQQGYAELLEWARGLGPVDVFAVEGTGSYGAGLASFLRRHATRVHEVSGVDRRKRRRDGKDDTLDAESAARAFLAGTALAVPKSADGASEMVRQIKIARDTAVKARSATLIALKTLLVNAPSAIRERLEPLSDRALIAQCAAHDLVTVQTPTDSVMYAVRAMARRWRFLTEEITSHDAVLDELTAAAAPTLRAAFGIGVDGAAEMLIVAGDNPARIRTEAAFAKLCGACPIPASSGATHRHRLSRGGHRQANAALYRMVIVRLRWHQATIDYVARRTAEGLSKRDIIRCLKRFVAREIYRGLLADHARRTAAIATADTLHIAA

SEQ ID NO: 389419 - protein, 416 aa, unidentified
MQVIFERCAGLDVHRDTAVATVRSLGQRRGSRATETRTFKTTVRALADLGDWLVCEGVELVGMEATGVYWKPVFAALEGRFTCWLVNAAHLRNVPGRKTDVADSVWIARILECGLVRPSFVPVQEFRELRDLTRVRTAVSQERVRVIQRLEKVLQDAGIKLTSVASQVWSKTARAVLEALLDGVTSPVELAALAKGRLRSKREALEEALEHRFRVEHHGVIVRGLLAHIDGLEQRLDAYDAEIAIRLAPHQEVLELIQTIPGVGAKVAQVLIAEIGLDMSAFPSSAHLASWAGVCPGNHASGGKRRGGRSRPGPKWLKAALTEAAWGAVKAKGTYLHAHHMQIKGRAGGFKALGATRHDIVVAYWHIVHDQVPYRELGPDWAARRFSPEQRARRLTAQLEALGFDVTIGPAGTGPA

SEQ ID NO: 389420 - protein, 432 aa, unidentified
MTGGFTMMNSTNTYPIHPKMTRTYCGVDSHRDSHTIVILNCFHEKLGEIKIGSAPSEFAKFIKQAKKYLQTGTTWAIGFEDVSAYGRSFVKYLVERGYLVKHVDASKVATERGQVLHKTDQYDAECCARVLINQFDNLPNANPEDKYFILNGLVTRRNAITKINVMVKNSLHSAVAEQYPHYKKFFSRLTTDSALAFYEQYPAPHHLENVTVDELAEFLHSASKGRLSTTKAELILTTVGRDQVEQVRFQDKKDFTVRSLVRQVKTQLAEIAEIDKEIEEMLTHFDYPLTSIKGIDTLTSAKLISEIGDIGRFKNAKALAKYSGVSPVTFASGMTNLQMANARGNRKLNEIFYRIALTSVMPIGSKGALINPIFRDYYLKKISEGKLKNQALKCVMRRLVNIVFNVMKHQRPYENPQLGYVPKEETQSKEVA

SEQ ID NO: 389421 - protein, 347 aa, unidentified
MRFYTKQHKFYCGIDLHAKKMYVCVLDSAGEIVLHRNINTEREIFLAVIEPFRENVVVAVECMFTWYWIADLCAKEAIPFVLGHALYMKAIHGGKAKNDKIDSHKIAVLLKGGMIPMAYTYPAKMRATRDLLRRRNHLMRKRAELYAHIQNTRSQYNLADSFGRIAKPQNREGVAERFEDPAVQNMIATDFAVITAYDPIIAKMERDIISMANHHDPVAYALLKSIPGIGKILGLVILYEIETIKRFPSVQDFVSYCRLVKSIKESNGKRYGSSGKKIGNAHLKWAFSEAAVLFLKGNEPAKRYLNRLTAKHGKGKALSILAHKLGRAAYFMLKNKEPFDQKKFLGL

SEQ ID NO: 389422 - protein, 361 aa, unidentified
MANGIRWVGLDVHAAQTAGAVFDSATGEVRSRMLPGRPHEVMPWLLELPRPVRAVYEAGPTGYGLARRARAAGIDMQVCAPGMISKTPGDRVKTDKRDALKLARLHAAGQLVLVHVPALEHERLRDLSRAREDVRGDLMRARHRIGKFLLRREIYFPGRARSWTREHRTWLAALRFDDRPSELTFADYLHAHDVLLARRDTLDRAIDEIATDAPWAEIIARLRCLHGIDTLSAFGICAEVCDFERFLAPTAFSAYLGLVPSEHSSGDKRRQGAITKAGSAHARRLLVEAAHHYARPPRIGGALQRRQDGHEPWVIDLSWRAQRRLHARWRHLRTHRHRPGGVTAVAVARELAHYCWELAVH

SEQ ID NO: 389423 - protein, 406 aa, unidentified
MSFDRPGEETAAIRTHFGAIFVSLELSRKTWLITSLSPGGREKMSRHSVPAGDVAGLLARFAELRGKALARTGTSYPIIVIQEAGLDGFWIDRVLRREGIESHVVDAASIAVSRRRRRAKTDKIDGEALARALLAFKRGEPRVCSMAPAPTPEEEDRRRICRERQALIAERVRHVNPRRMRSIRPVIKGLLFSQGVGDYEPLRRDRRRKLASLRGGDGRALGPNLKAQIGRELDRLELLLEQIRAVEAARDALLAPAIEAEAASPPTPSSARMLLRLRSIGPEIAAVLWTEGLCRSFSNRRQVAGYAGLAPTPWRSGSIDCEQGVSKAGNPRLRTTMIQLAWLWLRHQPQSALARWFHQRLAGAKKGARKTLIVALDRKLLVALWKYVAAGTVIEGAVMKGVAANG

SEQ ID NO: 389424 - protein, 451 aa, unidentified
MSRRGQQAGLPIIHDRAAGIDIGSRFHVVAVPPHLCDEAVQTFQAFTGDLERMADWLISIGINTVAMESTGVYWVPVYEVLESRGLDVIVANAREVRSVPGRKSDISDAQWLQRLHACGLLRASFRPGRDIAALRAYLRLRERHLDYAAAHIQHMQKALTFMNLQLHHVVSDITGVTGLKIIRAIVAGERDPQVLARMRDVRCKADTETVRAALIGNYQPEHVFALTQALALYDFYQARIDECDAEIQRTLATLCEGEAPPTTPLPKARHRTEQPNAVNFDTRPLLYQLAGVDLTQIHGIGPYLALRLIAECGTDLSRWRTAKHFTSWLTLSPGCKISGGRVLSAHTRKTSNRVAAHLRLAAVTVGRTNTALGAFYRRLAARIGKAKAVTATARKIAVLFYNAMRFGIDYRDPGADHYERQYRERVIKQLHRRAAVFGFELHPAESAASVS

SEQ ID NO: 389425 - protein, 347 aa, unidentified
MRFYTGQHRYYCGIDLHARTMYLCILEQESGKVVLHRNLRCEPERFLRAVEPYRDDLVVGAECIFCWYWLADLCAQEGIPFVLGHALYMKAIHGGKAKNDKVDAHKIATLLRGSAFPMAYVYPRGMRATRDLLRRRLFFVRRRSELFTHIRMTFHQLNLPAPSAAFHHPRNRIGLADAIPDPVVHANVEADLALAARLDDIIRSLEGTIHQRAKIDDPETYKRLQTIPGVGRILALTLLYEIHNVSRFPRVQDFLSYARLVKSQKSSAGKVMGTSGAKIGNAHLKWAYSEAAVLFLQKNPPGQRLINRLRSKHGRGKALSILAARLGRASYYMLRRNTAFDMERFMN

SEQ ID NO: 389426 - protein, 337 aa, unidentified
MGLYCGIDLHSNNHVLTVIDEADRRVYERRLPNELAITKAALEPYRAELVAVAVESTFNWYWLVDGLMEAGYAVRLVNTAAVRQYEGLKHTDDEHDAFWLAHLMRLGILPTGYIYPKSERGLRDLARQRMRLVQHRSSLITSVQNQVWRSTAVRLRSDTIKGRGQQPWPQISDPDLALSVKAGRAAIDTLTVQIERLEKLLLKRVGLSSQFRMLKTVTGIGPILAMTIALEVGDIGRFAGVGEFASYCRCVDSQRLSNGKKKGEANRKCGNRYLAWAFMEAAHFAIRNLPAAKRFYERKRRQRHPLLAVKALAHKLARACFYVLRDQVPFAPERLFV

SEQ ID NO: 389427 - protein, 440 aa, unidentified
MVRIYFYARSAIPREKGKEMPYRVAAIDIHKKVHMVVVASMAEEVEDTAAAAVEFECRKFGAGASEREHLMAWLRERQVQEVVMESTAQYWKSVWLELEPHFGKLHLAQAQSNRAPRGRKTDFRDAKRLGRRLLASELMLSYVPEPEQRRWRLMTRGRLQLVRDRVRLQNQMEGLLEEARIKLSSVISDLLGVSGRRILEALAEGTRSPAQLAELGDRSLKCTKQELTDALTGAPDPCHIELLKLDLQRLQLLDEQIEKLSRMAAEALRVHQAVVLRVAKMPGWGAESAQQIIAEVGVDAEAFQSPGAFASWAGVCPGSNVSAEENHSSRCPKGNRYVRRLLTEAAQAAVKKKGSRFQNLFRRFLPKLGWNGAIALVRHRMARVLWNVLHDGVEYVECGQDTTPKARKRRAQKLTQALRKLGYQVTLTDVQIQTEPAATA

SEQ ID NO: 389428 - protein, 475 aa, unidentified
MSKSIFKPVSNNLNNHRDILANYKPTQILYAPIDVAKYNHSAMIVNFLGDIIVHKFDFPYSIHGIDFLKDKLQMAYKMTEAKRLFLALESTGHFHENLVAYLKNSGYDIAIIRPVDSKNERDNVHAKTDAIDLAAIARVIIANKGTRSNMPDNTYYNLQRASRTHRQLTWQETKIKNIITMLVDKTFTGLWDPDKQIFSDKWGKASLLFVFHYPTPQQAIKMGAKRLADFFKKHNTKLGIDTAQKIIATAKDTPARPLETMESDIKALKSNIQVLEALMPEIQEHKKQMVKFLVQTPGTYLLSIPGISVVYASDFTAEVGDIHRFPYANQVISLAGTAPRKYQSGEVDKANLPTSHKGKKLLRMTVNQIALSLNAHCPDFRRYYSEKLFSYQDAKPKARTATANRFIKLAFAMMKNETLYNPLTGNPLTSQKEYYNSVFSKVKEKLSGYLGDDIPQDNYLTRIQRQLEEKYGINQ

SEQ ID NO: 389429 - protein, 626 aa, unidentified
MPKKSTGDRPELKPVNVNAAAIDVGSKMHMAAVNPTCTDTPVRTFGTFTQELHDLADWFKACGVTSVAMESTGVYWIPVYEILEQRGFEVMLVNARFAKNVPGRKTDVSDAAWLRQLHSYGLLRGSFRPDAEVVTLRAYLRQRERLVEYAAAHIQHMQKALMEMNLQLHHVVSDITGATGMRIIRAIVAGERNPDVLATYRDVRCHSSIETIRAALVGNDRDEHVFALTQSLELYDIYQAKMLDCDRKLEVLIAALSNKGAKPVGKLSKPRVKTKQVNAPTFDVRTALYGVLGVDLTDIHGLGPSLALKLIGECGTDLKAWPSAKHFTSWLCLAPGNKISGGKVLSSRTRRSSSRAAALLRLAATTVGRSDTALGAFYRRLSSRAGKSKAVTATARAGLHVAGHSGRCRSGCFLGSPRFGRPFSYQPNQFRMTTAVPKVTKANKATASQSRFESQFIYFCLFGAPLVKALPALSAAKVSARTRAPVSFAFPAKRQKRCVSNARQIRRRSRYRRLDLRQSRLQGGFLSVVERSLEHSAAFAFEPVKNLVRRNFAHQYEERRGSGLNGGSGLLHPFVVNADIGQISAERAGRGAKGSASKGHQKDQANQRAPKGASNRTGSRGIDQLI

SEQ ID NO: 389430 - protein, 477 aa, unidentified
MAAKQEATSQVKPNRKQRRDQQRRIWTADPGLEVVHHDAAGIDVGNSEHYVAIAPEKSAEPVRKFGCFTGDLREVVLFLKAHGVRSVAMQSTGVYWIPLYDVLEEEGFEVYLVNARDTKNLPGRKSDVQESQWLLKLHTHGLLRNSFRPVSEIRVLRTYWRQRGDHVHTASECVQRMQKALTQMNLQLANVISDIMGWTGQKILRAILAGERDAEKLAEMRNWRIQASQEEIVASLTGNWRPELLFTLKQEMERYDFCQRQIAECDHEIKQHLDTLPARHRETDPAVQPVAPPKKNKKVQGNSPQFALDKELQRITGVDFTRIDGINVMTAQTIISEVGLDMSRWKTEAHFASWLGLCPHNASSGGKVLRRGTRKVVNRAATAFRIAGSTLRRSNSYLGAQFRRFRSKLGAPKAITAMAHKLAVLFYRMLRFGQEYVDRGQHFYEEKHRQQQISLLNRKATQLGFSVIPATNRPASI

SEQ ID NO: 389431 - protein, 410 aa, unidentified
MLWAAGGGVPPFGVIHQPWESLMPQINDLSRSLTAFEQDQTLVVVIEVSLSSWLVGGALPGVARQPMKKLGPDKDVLLALIWRWKDEASRSGRDIRRVCVAYEAGRDGFWLARSLLEHGIETYVIHSASVSVSREQRRAKTDRLDTELLKRAFLGWLRGERGHCSMVAIPTIQEEDARRPNREREKLVGDRTRVINRIKATLIRFGIRTFKPTLRKAEERLKELRTAEGVPLLENTRGELLRDIARLRMIQEQIKEIEQRRLRDLEASSAKPGPHAMVRLIARVVGIGIETADMLVHEILSRNLRDRQALARYAGLTGSPDESGSRRREKGLSRSGNARVRRGMIQLAWRFLQFQKDSALARWYRERTADRRSSTRKTMIVALARKLLIALWLLVTTGQIPEGASLRPAI

SEQ ID NO: 389432 - protein, 452 aa, unidentified
MARKKRNPKPVPQQLVHPHAAGIDCGATQHFVAVPPDRDPQPVRAFGTFTADLHALADWLEQCGIDTVAMESTGVYWIPLFEILEARGFKAYLVEPGKIKNAPGRKTDVVDCQWIQQLHSCGLLTASFRPADDICMLRSYMRQRDMLVRYAAQHVQHMQKALTEMNVQLHHVIDDLLSAAGTRIIEAILEGERDATTLAAMRDERCKHDETTIARALEGNWRDDHLFALKQAYDLYQVYHGQLAEVDARVEAYLHRFEDKSTGQTRPERRRERRRTRKRNEPTFDMDDLLYRMTGVDLTAIDGIGGHLALSLISEIGIDMSPWKSDKHFASWLCLAPGNHKSGGKQTRRKSATRPSSNRAAQDFRMAAFAVSRSDSALGAFYRRLRARMGSPKAITATAHKIAKIVYNMLKYGTAYVDRGVQYYEDQYRHRVVKNLHRRAEQLGFTLQPKAR

SEQ ID NO: 389433 - protein, 341 aa, unidentified
MSIVVAGFDVHRSQITFDALDEESGELSRGRIASTPEAVGQWVERFPDREVHVAVEAGTGWLFVCEALSEAGAIPHLAEPAETSVLRGPKRRAKTDREDARWLRTLLAEGRLPEAWIPPAHISELRTRTRLRKTLIDERTAWLQRVRATLFHHGVSGAPERLLGAGGREFLEQLELPASARERIEVAFAMVDALDRQLAPLERELRQLARRQSGCKALMAHYGVGELTAPVILCELGDVTRLSSSRKAVRCAGLDIGVHRSDRRSRAGKLSRQGSPQLRWALYESAQAACRPTSPDRADYLALKARGLTHPRASLTIARKLARRSFHTLRELGPRALEPAG

SEQ ID NO: 389434 - protein, 371 aa, unidentified
MGDNILFVGLDVSKATISVGVAPGDRREAARYFGPIGRRPTALRSLCKKLSRDGAQLHFCYEAGPFGYSLYRDLREWNHVCDVVAPSLIPRRPGERVKTDRRDALSLATLLRAGELTAVWVPDACHEAVRTLVRLRGLAADDVARAKQQILSFCLIHDRVYRLGSSHWTKTHRNWLADQKFAHGALGMAYGELLGRLERAEEMLERTRLELRERLTDWALYPMVEAFQALRGFDWQSAAIMVAEIGDFRRFPTAGHLMAYVGLVPSEYSSGDRRRRGTITKTGNAMVRRVLVEAAWAYRYPARQSYRIRNRSGHLPEPIRDKAWQAQTRLCRRMRDLRSRGKHQNAAVAAVARELAGHVWAIAHMVPPVTA

SEQ ID NO: 389435 - protein, 337 aa, unidentified
MDREYVGIDLHRRRSVIYRMNAAGEKLDCVRIDNEPMRFADEVAHAPVGSEVVIEATYGWYWAADLLQDLGYVVHLAHPRGNEWGQRRVKNDERDARDLADLLRLGRLAEAWIAPPATRELREMVRFRAKLSNLRTGLKAQLHAVLAKNGVLPCRGDMWGIGGAAQLDALELPAAYTNRIEILRDLVTMYDREITFLDRDIHLQLRGDTGYEAVQAIYGVGRVFAAVFVAEIGDVHRFASAQALCSWAGLTPTHRESDTKVVRGHITKQGSKLVRWAALEAVVRYHGGEHLHRSFHEIAERRGKKKAQVAVARKVLTLVYYGLRDGEIRCLRDRPAA

SEQ ID NO: 389436 - protein, 345 aa, unidentified
MGFFAGVDLGKRKSQITVLTADRKVVENIKIDNDPKTFVRLFEKYKGDIDVVCEASSNAFWLVDLLEPVVRSIQVGHTSKIRWIAEAKVKTDKLDAGILAELRRVDLFPVIGIPPKRTRELRELVRGIIRMKRQAVRCRNQVHWLLGRHGVAYKRAETSGSRLRELVLEAKLPSPARIAAESVLRVERAIQEEVKHLGAALREEVRGEPELLKTVELLESIPGVGFFSAALLVLELWDIDRFRDEAHLAGYIGLVPSTHQTGQTMWHGRMTRRGNVLVRWVLVQDAWSSIQDDSFFRRRYDYYKAKKGGPRAIIPVARALLATIHRVWTEKKTYDELFGKKTLVG

SEQ ID NO: 389437 - protein, 332 aa, unidentified
METFVGIDIASKNFDVVIRKNGINQKVETFQQTAADIEKLIGKLKPMSPTAVVMEATGIYYVDLARSLYSAGLPVSVINPKSFRHFAELMLKRTKTDAVDAALLAEYGQRMEPQTWEAPSQHLVDLRDVARQINRLTHMKVQSKNRLHALRATKTTSAMVIESEQDVMDFLELRIERMRQHALELIAADERLNRQLENITQAKGIAENSAICMMGELNVLPLTLKAPQVAHHAGLSVRQTQSGSSVNSPGRLSKAGNTYLRSALFMPSLAAGIHDPHAKAFKEALVARGKKKIQAQCALMRKYLMGVWACIKNDTPFDSAKLFSPEHKKACI

SEQ ID NO: 389438 - protein, 399 aa, unidentified
MLNPQALQLRVGVDVGAQRHSVAVGLTDGSLLEEFEIPHTAAGFGDFFGRIEEHAKRHPYPIAVAMEGYNGHVRPLDSLVKARGWRLFNVNNLKLARFKEIFPAAAKSDRIDSAKTLELFQLHDHLPMAGDVLQEVMATPEENDILKRLSRRRRRLVNECGRVMNSLQADLQAVAPGLLQITRYVANLWFLNFLTCRKGLLKLARVRRASLLKVPGIGATYADAIQAWQSRAFFGHDASLVGDMIQQDAARILELKRQIKALEEQMADVAERSSIASQLASIPGYGSVCSAELAGEIGTIERFRSEASLAVYLGMATLDNNSGKYRGSKAPKHVNARAKAAMMVAVDHHRKRVPQSQRYYEKKRADGKRHNQAIRALGRHLCRVIFKMLSEERPYRIDP

SEQ ID NO: 389439 - protein, 355 aa, unidentified
MNDAKYIGLDVHQATISVAVLDSAGKLVMEAILETKAETILQFIHGLRGSLHVTFEEGTCAAWLHDLLKPHVAQVLVCDPRKNALIKAGNKSDRIDARKLADLLYLNKLNPVYHGETGIRALKEVARSYLALTRDTTRVMNRLKALYRSWAIPCAGQRVYAPRYRSEWLAKITEAGVRRRAEIYYQQLDALRSLREQVRRDLLAEGRKHSAMKLLRQIPSIGPIRAVLLIALIQTPHRFRTKRQLWAYCGLALKTSTSGEYRIVEGQLKRAQKFLAIRGLNANHNHDLKNIFKGAATRAAAVPGPFQEFHASLVARGMKPTMARLTLARKIAAITLIVWKKGVRFDAEYLKQQAA

SEQ ID NO: 389440 - protein, 468 aa, unidentified
MPIIRSNAIRIKRFRELKETLRTSRDRLLVGIDIAKAQHVAQVRLAHTRILDKQLGIPNTWDGFAAFWAHLEARQRETGITELVCAVEPTGTYHEALAQFLEGHAVDVVLVSNHVAALNRRTLDGTWGKSDPKDAHNLCDLLERGHVLFYSRPAAPLAALRRLVRLLRHARTDLAACKARFRNTLLPALGPAGAPLPATLVAALPAPLQRLCPIPAAAGAPRRCRARGTPPEALHAPQAGLLPPALAFELTDLAARVTAVQARIATIATELVRIAGPFPAYAWLRSIPGVGPTVAAILLAEVGDIAWYTKFSQLRKLAGLDIIGVASGQWTGTARISKCGRPLLRWALYQAALGAARTPAWRARRETMLAKRQGDRFAFLKANIEVAAKLLRIVWGVWRSGQPYDPGRGAGGPAGRPAIASPAARAGRRGAPPSGQGQAEIVDSRGSQAGRVSARQAVSRQKGTRGRA

SEQ ID NO: 389441 - protein, 400 aa, unidentified
MLSIGIDVSKGKSTVCGMKPGGEIVYAPFEVQHTREGMLELVSLLRSSGEEVRAVLESTGSYHCPVVAALLENGIFVSVVNSLRMKRFCSQSIRKVKTDRIDAMQIALYGLAYWQELQPARLPEDTYRELQLLARQYYQMTSMLIKAKVDFNAICDQVLPGMQELMNDHAGRHKLSDFVLRYRHTTHILEMGETRFRKDYCKWAEKKGYRNCERMAALIFATAQNGIPVLPNAPSTQIVITEAIRVLHTVEASRDAILTQMQALAKTLPEYSLVREMPCIGDTLAPRLIAEIGDVRRFHSKRALIAYAGIDAPPYQSGKFCANNRHISKRGNRYLRKTGYEVMQSYVMHKPANDPIFTFIEKKRSEGKCGKLAMVAGLNKFLRVYYGKVTELYRSLPAIE

SEQ ID NO: 389442 - protein, 315 aa, unidentified
MRIIGMDIHRVAAEVVALHEGAFQKLGRIPVLRAALEEFARKQLTHDDHVVIEATGNAAAVADLLAPHVDRVVIANPKQVRMIAHAKIKTDAIDAAVLAKLYASGFLPEVWMPDAKTLALRRQVARRTQLVRQRVRLKNLIQSILHAHLIPPCAHRNLTGISGRKWLARQALPADERQAVDRHLSQIDQIEQSLKIVEADIAQHALKDPLIRRLMTLPGVDMTVASGVAAAIGDIKRFAGPQKLVAYLGLNPSVRQSGEGPAYHGRITKQGRGQARGMLVEAAWAANPFPWSTTRLLSQDRCAPRPAYRCRCDRT

SEQ ID NO: 389443 - protein, 320 aa, unidentified
MSKYSETYGVDISKDVFDVANTTGFYRQYPNTVAGFKKFIKELEKSAIVVMEATGYYHYCLAQFLFESGQPVSVVNPLSVKRFIQMRLSKVKTDKSDAKAICDYALINPVPLYTGKDQNQAESLQLLRYRAVLKQRTQLKNKIHGEQALGIPSKAVFRSLNRSKKILDKEIKSLETRLLSLVKAEHQQQLTNLKSIPGLGDKTAALLIVLTDGFTKFETASQLCSFAGTTPTIRQSGSSVRGKSRISKMGNQKLRNLLFLCAFSASKYNTACRKIYERIIAKGKSKKLALIAVINKLIKQAFAIAKSGLPYDPNYATKLN

SEQ ID NO: 389444 - protein, 347 aa, unidentified
MEARKRNYNYFVGTDISKHKLDHAVVHEGKVLFHKMTSNDPNGVMELIEDLLAIPGFRMNRAMFCMEHTGIYSNYLLNTLSSHRAAVVLESAAKIRNSLGIVRNKNDKIDAIRIAHYACQNRDKLGLWMPKRRVLQYLAHVTSLRRRLVGLQTAIKKPIKEQRQFFKQSDHRRLSSLCNTTVEAVKHDIEVIDATIHTAIEKDEHLSHLMHIITSIPGIGPLTGLQILICTNEFKDIHDPKKFACYAGVAPFINESGKYRGKAKVSHIANKRMKALLHLSAMCSIRYIPEIKAYFERRTKVDGKPKMSVVNAIRYKIILRVFACVSQDRCYESVYDRNVRPSVGQPC

SEQ ID NO: 389445 - protein, 356 aa, unidentified
MDSKKYIGMDVHQATVSVAVMDSRGRVVRDSVIETKATTILEFIQGVRGTLWVTFEEGASAAWLHDLLKSHVAKLVVCDPRKNALLKAGNKNDRIDARKLADLLRSGLLWPVYHGGAGGVRTLKELARSYLTITKDLTRVMNRIKGLYRSWAIPCAGQKVYSPRYRSAWLQKVMEPGVRRRAEWLYQQLDDLQPLRREARREMLAESHKHPAHSVLRQVPWLGPIRVALLIALIQTPHRFRTKRQLWAYSGLALQTRASGEYRVTGGQLQRAKRQPSLRGLNENHNHELKALFKSTATRASTAAGPFGDFYAALLATGMRPTMARLTLARKIAAIVLTIWKKGERFDPEQLKRQAA

SEQ ID NO: 389446 - protein, 343 aa, unidentified
MQTVTTIGFDIAKSVFQVHGVDSAGQVLIRRQLKRRAVLAFFQKLPPCLVGIEACASSHHWSRELQALGHTVRLMPPAYVKPYVKRQKNDMADAEAICEAVTRANIRFVPTKTPVQQSCLMLHRTRHLFIRQQTAVINSIRAHLAEFGIVAPVGRKGVEELLRIVADPSDKRVPEAARVCLAALGTQLLSLKKQIVEFDRMITAWHRSNETSKRLRYIPGVGPILATALVASVADPRTFRSGRNFSAWIGLVPKQHSSGGKDRLGSISKQGDRYLRSLFVAGALSVIRYAKIHGTKHRPWLTALLARRPTKVAAIALANKLARMAWAMMAKGERYKNPAALSA

SEQ ID NO: 389447 - protein, 359 aa, unidentified
MTIRNTPRPAAVFGIDIGKNVFHVVGLDQGGHPIQRARFRRDTLLQFFERAQPAVVGMEACPGSQWLARKIQAMGHTVRIVPAQFVKPYVKSNKNDVIDAGAIAEAVTRPTMRFVEVKQPDQVDVQALHRVRDQMVRSRTRLICQMRAFCLEYGVAIRQGAGVFKLDLPRVVADLNNDLTPAMRRLLNELFADLGRLEERIRGVTREIEALAAQDEVARRLMTVPGIGPLVATALRAVAGDGRQFRRARDLAAWLGLVPRQHSTGGKTTLMAISKRGNMYVRRLLVHGARSCLLHLDRSRDRLGAWLDGLVKRMHLNKAVIALAAKIARVAWVIMNRPGALAAAATPSKSGGARNPIMG

SEQ ID NO: 389448 - protein, 367 aa, unidentified
MNDLIRIGMDTSKSVFVVHGVDAAERPVLRKKLRRRQVIEFFAKLPPTQVGMEACGGAHHWAREIGALGHEVKLLPAQRVKPYVARNKNDTADAEAICEAMSRPRMRFVPVKTTEQQAALMLAGIRDQLIARRTQLSNAIRGYAAEFGLVAAKGLDKIEPLLERIAADATLPALAKELFATLSAEYAELKPKLGKIDDRLLAWHRSNELSQRLVEIPSVGPVGAPLMVMKIPDPQAFRSGRDFAAWLGLTPKDHSTAGKLRLGVITRAGDETLRRMLVLGATAVIQQVRRGRGRPSPWLVALLKRKPPKLAAVALANKTARIAWKLMVSGERYRGAGASGVAHGNTWALHPNLASLAPCSPPSRRGL

SEQ ID NO: 389449 - protein, 313 aa, unidentified
MKAVQSNVFIGVDVSKARLDVAVAPSGETISFANSEDGIALLVDFLKPRNPELVLFEATGGWEMNAVHHLAAQRLPLAVLNPRHVRDFAKATGQLAKTDAIDARILARFGQAVRPEVRPLKPLELRKLDALNTRRRQIVEMLTAEQNRLVSAPEWVRPDIEELIAILKKRVAAIDRDLNKLIRKSPLWREKDKILQSFPGVGPVTASTIIAALPELGNLNRRQIATLVGVAPLNCDSGTHKGKRKIWGGRADIRSVLYMCAMTAARCNPIIRTFYQRLLQAGKPNKVARTACMRKVLVILNAMMRSQTCWQPT

SEQ ID NO: 389450 - protein, 577 aa, unidentified
MLPRSASAPQALRCIGVGIDTSRYGHYAAFLSDDLQPAADELAFAESADGYQQLQSRFDALARRHGPCPFHVRLDAAGQYADNLLHFLHGLHASGALALTISCGDPQRNKNYRAAVFGPQKSDPVEARAAARFALSERPAPVAPLSDVLRTLRQIASRLHALVRQRTRLINQLHHLLALTFPELALLTKDLAAGWVLELVHRYPTAARLAEASAEDLRGISYLPDQQVGPLRARAGTSVASLRGPAIEELVRDQVRQLRDSGARQKRLENLLAHTYRSLPQDNHLATIPGIGAVTAAVLTAFILDIDRFATPGKLVAYFGILPIEVASGIDRDGKARGPKRFVMNRRGNDLVRRYLWMAALSAIRFNPAVRALYARVVARHPGHKAVAVGHAMRKLLHLAYAVWKTGRPFDPAHFPWPSPAPGEPDDGDAADVSPKQAAGRKPVGPARSAATAACEGSGPDRPGPDQGTSVDFSHVRRQLPMARVLDQLGLAPRLRGTGPQRRGACPIHRGDARGRTFSVNLEQHVFQCFDSRCGAKGDIIDLWARLQGLSLRDAALDLVRTFDLEPTPRGTEKRNG

SEQ ID NO: 389451 - protein, 348 aa, unidentified
MAHFVGLDVSVKETSVCVVDEAGKVILEQKVPTEPADIVALLSSLGATWGRIGIEAGPLSQWLVNALTAADLPVICVETRHMKALLTAQQINKTDRNDARGIAQMMRVGLFKPVHVKTLAAQEQRMLLTSRKLLQRKLLDVESDLRGTLRNFGLKVGAVSRSRYEVRIRELVAGFPRLAAIAEPLLAVRRVMRQQLAVLHKMLLDTVRGDPVCRRLMTAPGVGAVVALTYRATVDQPQRFLHSRAVGAHVGLTPKRYQSGEIDYDGGVSKCGDALLRTMLYEAAHSLLTHSGKWSWLKAWGIRVAQRRGMRRAIVAVARRLAVVLHRMWVDGSEFRWKKDSAAVPAAA

SEQ ID NO: 389452 - protein, 351 aa, unidentified
MVVVGADVHKRSHTFVAVDAVGKQVGQVTVPAVTEGHRKALAWARERFGDELVWAIEDCRHMSARLERDLLASGQKVVRVPPKMMAEQRRVARTRGKSDPIDALAVARAYLREPSLPVASHDEASRELKLLVDRRETLVAQRTATINSLLWRVHELDPAHAPKARSLDLAKHQQALRAWLVTLEGVVAELALEELDDVIALTARANAYAKRITDLTAQAAPTLLAMPGVGPLTAAKLVGESAGASRFHSEAAFARHAGVAPIPVWSGSTAGRVRMTRSGNRQLNTALHRIAITQIRLEGSLGKAYYEKKKAEGMSNREALRCLKRRLARVAFGHLHTDHQNRQPACQTAAA

SEQ ID NO: 389453 - protein, 353 aa, unidentified
MTTMTDPGTRVTGGVDTHRDVHVVAALDERGGRLGVEAFAADAAGYRKSLRWLRSFGTVERVGVEGTGTYGAGLARYLAGQGVAVIEVTCPNRQRRRSHGKSDPVDALSAAHAAQGGDATARAKPRTGNVEAIRALRVARRSATKARNDALNQMRALLVTGPDELRAAYRGTTVWRMVHAAARLRPSDPTTPTGATKFALRDLARRVQTLEAEIDTLDAVLVPLVTVTAPELIARHGVGPETAGALLVCAGDNPHRLGSEAKFAHLCGTSPIDASSGLVVRKRLNRGGDRQANEALWRIVMVRMVSDARTRHYVERRTKEGRSKREIMRCLKRYVARELYPLLAALHEPLDNR

SEQ ID NO: 389454 - protein, 465 aa, unidentified
MPNARKKRAKSRQPTDPTAGLPPLNLNAAGIDVGSAEHYVAVPPDRSPDPVRRFASFTADLHALADWLHACHINTVVMESTGVYWIPLFQILEARGFEVHLVNARHAKNLPGRQTDIADCQWLQKLHTFGLLNSSFRPTDEICVLRSYLRQRDTLISTAATCIQHMHKALTEMNLQLANVISDISGVTGLAIIRALLAGERDPAKLAAFKDYRIKASTHTLAKSLEGNWREALLFNLRQSLELYEVYQQKIAECDARLEAHLHTFDSQIEVHPNPAPISTRRPKKARRHEPHVALHTQLYRSSGVDLTRIDGIEVLTAQTLIAEIGLDMSRWKTEKHFASWLGLCPDNRISGGKVLTRGTRDVVNRATDALRLAAQNLLHSKSALGANYRRLRARLGAPKAITAMAHKLARLVYRMLKFGQPDVDKGMKHYEARFRQQRLQWLQRQARELNLQLVPNQPVPSPVS

SEQ ID NO: 389455 - protein, 350 aa, unidentified
MEYVGIDWSYRRAAWCALSDAGAIVGEGAVSSDEDGLARLVIKRGTEVSAVVEMMSGAIWVRDTLVAAGWEVQIAHARKVRDVAPLACKTDKVDARVLAELCRRDLVPELWVPALADRELRERLRRRMHLVRMRASAMNRIFGLLTQWGLRLSLKRLREPDAMTLLEQRGVPLVWRRSIAEALAVIELLDARIGPIDAELGPLARADTRVVLLDTIPGVGALLGLTIASEIGDVARFGSPRKLVGYAGMAPKVSQSGDRSRTGALSKAGSRTLRWAAVEAAQHAWRPTNPWHQLYTDVATRAGKNPAKSAVARKILIATWHVLSRQQPFKPAAPRRPHPASASSRCFLAA

SEQ ID NO: 389456 - protein, 358 aa, unidentified
MEKRNLLDYTGQHIYVGIDTHNHNWRTSIFTEHFEHKTFTQDPDPDILVNYLHRNFPGATYHAAYEAGYCGFWIHEALTARGIDCIVINPADVPTKDKERKRKNNRIDARKLARSLKNGDLEPIYVPDRVALEDRSLIRARRNAIKDQTRYKNRIKALIRFYGIQLPAQFDKRNWSGAFIHWLEHVAFVRPSGKQSFQFYIDQLKRLRRQVAELNRQIRKLAQEDRYRERVNRLKTIPGVGTITAMILLTELVEIARFKTADQLASYIGLIPGERSSGHDEDENYTDITPRSHHYLRSILVECAWVAVRKDPALALCYTKLLQRMISQKAIIRIARKLLNRIRYVLRTNQDYVLAVVQ

SEQ ID NO: 389457 - protein, 348 aa, unidentified
MDFIGFDLGKVSIGACLVTGDGELIERRIKTDREHTCELLGSRPPSRILIESGTESEWNARLLEGLGHEVVVADPNFAPMYATRSRKVKTDKRDARTLAGACRLGAYSPAHRTSDRQRHVRAQLAVREAMVRTRTRYISLISTLLRRDGLRIHQSGYSPTFLKRLARLELSASLREEIAPLVLPLHSLNEQIKQADLGLRALAEGDEVLARLRTAPGVGVVTAKSFVSTLDEATRFAGAKQARAYLGLVPAERSSGERQQHGHISKAGPGRVRHLLVEAAWTILRRRSPSNTALHDWAAGIAARRGSRVAVVALARKLAGILFALWRDGTGYTACAIKPEEMTAQAAA

SEQ ID NO: 389458 - protein, 341 aa, unidentified
MRLRKVTSAETKGKSFLLEEFDHYVALDWSQETMAIAHMRRRDKEPVVFERGSELKVLKQYLRTLHGTIVLTFEETTTAQWLYLELRQEVDRIVICNPYMNRLLSAGPKTDKIDAAKLCLLLRAGLLTEVFHSDNSLYELRLLVSAYRDLVQASVRALNQRSALLRGHGDSGTHAPFILEHLDKSLELYRHAKQEYQAKFEDFCRHNKQLKLLLPVSGIGTIAAVTILATVVDARRFPRTGNYLSYCGLVKLEHSSGGRSYGRRKPQYSRSLKAVYKIAALAAIRGNNPIREYYEVLLARGVAKHHARHQIARYIATVTYGILKTGTTYNPYQWRTYTKVA

SEQ ID NO: 389459 - protein, 335 aa, unidentified
MEFENFMGIDLSKDTLDYAGVNIDGELLESKGANDRQSIEKELLNFSRDLGIDLNKTLICAEFTGHFGNKLIDVALKLGLNLWMESAYKIIHSQGLIRGKSDPIDALRIMEYAKRFQDKAVLLKPSSSNIQLLKRLSTERDLVVKDIAKYKSQLKQEEGFFDKKYFSQKTKRIQKVKKINEKVLSELEEEIDRILDSDPEINKNFERILAIEGVGKQTAVATIIATENFSRFKTARKFSCHIGCAPFSYQSGTSLHTKGKVSHKANKNIKRLYHMAAVSTIRTKGELSTYYQRKVDEGKHKMSVINAIRAKLIARVFAVVNQDRDYEKKYIHSLA

SEQ ID NO: 389460 - protein, 358 aa, unidentified
MEEVSTIGLDLAKSVFQVHGIDAAGRVVVRRQLRRGEVLGFFARLRPCLVGMEACATAHHWGRELIKLGHTVKLMPPAYVKPYVKRGKTDAADAEAIAEAVTRPTMRFVAVKSMDQQAVLMLHKVRDLLVRQRTMLINALRGHLAEFGVVTARGPAGVKAAIAELHGMQDSLPPLARMALHGLLDRLGAVGLEIRKVEREIVAWCRHDDASRRLMTIPGIGPITASAIAATVSNASLFRSGRQFAAWLGLTPAGAQQRRQGAARSHQQARRRIHPAPARHRGYRRHPAGTPRQPQQGLGDEAAGAQAGEGGLGRARQQDRSDRLGGACAQPILRGACHVDPTRRRPRRRPRVCKGGET

SEQ ID NO: 389461 - protein, 353 aa, unidentified
MKTYYVGMDVHKATIVIAVLDANGKVVSQSIIETSTQAVRDFFQSLRGAVQVTFEEGNHAVWLYDVVEPQVKYLVVCNPKHNHLLKQGSKNDRIDARKLADLLRLNALKPVYHGEHGTRTLKELVRCYECVVKDLSRVKNRLKGLYNSRAIPNRGAELYHQSKRKSWIQKQENAGRKMRAELLFRQMDELKVLKRAARKAMIAESRRHKAQSLLSQVPELGLVRVAQIIATVDSPFRFRTKRPFWAYLGLAVETRSSADHELTNGRVSRRKVKIETRGLNEDYNRRLKSVFKSAATHACSCGVYKEYYEKLVAGGMRPEMARLSVARKLAAAVLAVWKKGQSFDERMIMSRAA

SEQ ID NO: 389462 - protein, 343 aa, unidentified
MKISRIGVDLAKNVFQLHGADAHGKAVWKRKLSRDKWVAALCKTVTTSCEVGMEACAGAHHWARVLTKHGYQVKLIPPQFVKPYVKSNKNDANDAEAICEAMSRPNMRYVKMKSVEQQDIQAIHRVRSELMGHRTAKANQIRGLVAEYGLVAPQQISSLRKVLPRWLEDPGNSLTARFRTLLTGLWDDLAHLDNRIAELNSEIEEIAKSDPMAKRLQQLRGVGPLVATALIATVGNGDQFSKGRQMAASIGLTPRQFSSGGKERLLGISKRGDAYLRSILIHGARSTIAHAKHKDDRLSVWMTELAKRRHPNIAAVALANKTARMAWAMMRNESDYDPEIVAA

SEQ ID NO: 389463 - protein, 345 aa, unidentified
MYYCGADVHSKSTYLVVLDGKGREVFSGAVATEREALLEALKPYLKKGVKVIQETGSSMAFIQSVFEGTGADVVTVHATAMKVITASKKKTDKRDAYHLAWASYKDALPEPVYVPTSSEQELRQLISAQQRIRKGRTGVSNGVRGQLKGLGVVLPARALTKHQGWEELMERRLAPTIDLIVRESYGVWEVQTRALEAVERAIAERTKEDELVKRIKSIPYVGDACAAAVRAYLGDLDRFHGRKSVVSYAGFNPSQRDSGARQVRGHLTRQGPSRLRSVFVQAAHCLIGKGFKGHPGWKTWYERLLHRRGHRHIAVVAVARRLYALAYQVGRSGQVYKTSLSGSVK

SEQ ID NO: 389464 - protein, 348 aa, unidentified
MDKITVVGLDLAKQIIQVHAIDGLGRVVLRKAVRRERLLALLTQFPRCVVGMEACSGAHHWARAFKQLGHEPRLMAAEFVRPFRKSLAAKNDANDAEAICTAVVQPNMRFVSIKSVEQQALLSLHRVRQGLIEERTATINRLRGVLAEFGVVVPQSATALQRALPAVLADEERLPARVQRSLQVLREHLHDLDARIAEFDRAIAQHAKSSAPAQRLVALPGIGPLTASAVVATVGNAQDYRNGRQFAAWLGLVPRQCSSGGKCKLGRITRRGDAYLRALLIQGARSTLQAALRRAPVRHDRLSAWVVQLVRRIGYHKTLVAIANKHARIIWALLARDQALNLARAATH

SEQ ID NO: 389465 - protein, 424 aa, unidentified
MDVVYARCAGLDVHKETVVACVRVAVAGKKVTREVRTFGTTTSELSALLAWLTEMQCSHVAMEATGVYWRPVWHILSEGDFEMVLANAAHIKNVPGRKTDVNDATWIADLLAHGLIRSSFVLDEDFHALRSLLRTRKQLVREQTGHILRIQKTLEDANIKLDSVITDIVGVTGRAMLQAVIAGETNPVKLAELADRRIRASHDVLREALRGRVTDHHRFLLRLHLQQVDALDAAIQQIDHEVDAAIIRMDKEIETGETTLRSLIALLVTIPGISLLAARMILAEIGPDMSRFPTAGHLISWAGLCPGNNESAGKRKSSRLRKGAPWLKTLLVQCAWAAGRTKESYFRAQFLRLKSRRGPKKASCAVAASMLTAIYHMVKNGTVYEDLGADHFDRRSNEVKANRLVGQLAKLGFHVELQPLAVEA

SEQ ID NO: 389466 - protein, 383 aa, unidentified
MSSWRASVKALHPPTQMTNEKLNNSKARVEQVASTKPQTIKLGLDVHADSIMVVRMVDHSAPQPAQKFTPAKFREWVKGQLRLAEAVHSCYEAGPFGYGLHRYLVELGIQNLVVQPVCLDERHTGVNHDKSDAKELALRLDRYVAGNSHALATVRVPPLVEEQKRIASRQREQLKREVRRLAAQGRSLLLTQGYRAKGGWWGARRWAELQVKLPAWLDERLEVFRRLLAVLTVELDAATAVLEAAAPAMRPKGLGGLTYEVIEREVGDWGRFANRRQVASYTGLCGGVSASGQSHHLLSITKHGNVRLRTALVELAWRLVIWQRDCKLVKKWWPLLGQAKATRAARKKAIVAIARQLAVDCWRWRTGRVTPQALGWVMVGPPA

SEQ ID NO: 389467 - protein, 373 aa, unidentified
MNYSTVYVGMDVHKENFSLCCYTNEKEKAEYAQKVEGHYSKVLNYLEAMRFHYGNDALFVCGYEAGCLGFTLYRDLTAHNVKCVILAPTTMAVPAGKKRIKTDKRDAALIARCLAHHDYNEVHVPTEKDEQIKEFIRMRDDHKLALKKVKQQILSFCLRHGIQYDGSKSHWTQAHINWLRSLKLDGVDQETLDEYLLSYDYLTKKLERIDDRIKELAEEKDYKENVHKLECFLGVKTITALSVIVETGDFKRFASAPQYAAYLGLVPGEDSSGGDQNRLPITKAGNRHLRMLLVEAAQCYGRGQIGFKSKTLAARQSGNPSAAIEYADKANERLRRKYYRMTLKNGKKANVAKTAVARELACFLWGMMTENYT

SEQ ID NO: 389468 - protein, 391 aa, unidentified
MVCVGIDVAKDKHDCCILDSDGTVRADCFTIPNNSDGFNRLLQTIQDCTQKSDKIKVGLEATGHYSYNILGFLLDNGLPTYVINPLHTNLYRKSLSLRKTKTDRVDARTIATMLLSDVDLKSYTDTAYHNEELKSLTRYRFDKVCERAKLKQSVSRLVTILFPELEKLVPSLHIASVYALLSEYPGAKQISEIHLTKLTNLLATASKGRYGKDKAIQIRDAARTSIGSVMPAKFLELKHTIKLIRELTSEIDEIEVSIQKIMDELNPPILSIPGVGIQSAAMILAEIGDFSNFESPDKILAYAGCSPSTYQSGKLTNCYAHMEKRGSRYLRYALYNATKYVCYWNPVFAKYLAKKRAEGKHYNVALSHAMKKLVRLIYALQKSGKAYLTAA

SEQ ID NO: 389469 - protein, 393 aa, unidentified
MKDVYASVRAIGMDVHAKFTTVSMRDANGDIVRRERLDHRDRAALRRRLSRWPGEASVVLEASFGWPWLGDLMQDCGLSPMLSNCYKLEQMRKARGMAKTNKKDADLLSLLAFEVDQWWRVWLAPPDVRDAREWMRHRASLVQIQTQTKNRIAALLHRHGILHEFSDLYGTGGRQFLADVCRQCGTAEVSLPPGAVATLADLLDLLAHIRGQLARIAQELRRQLQRSDLARRLDGIPGIALILSHTLIAEIGRIGRFRDHRALANYSLLAPIAHDTGEDTGKPPLGRHLGRRGNRTLKWVFIEAAHGAVRKGGKWRRLFDSVTDGGKNNRSRGYIKVARELVKVVYVVWKKNVAYTDTPPTRPGRSPRQRSEAFLQDTRPGTGQPCRPMAAVQ

SEQ ID NO: 389470 - protein, 363 aa, unidentified
MARTSLWIGIDAGADEMSICATDDRGAVMFEHCCVTKAKAVHELLKRERRRIELIGLESGSSGTGLTRALRKLGYPVAVFEARQASKFLSIRRNKTDKNDAKGLADLARLARESVSEVRVKSPECQRMRSTLIMRQKLVQLRVTMEGALRSLISLNGGKLKSSSSARSFEKNVRSEIDRLRKVEKVDLREDTAPLIALSVATRGYVEMLDNRLRREADANAVCRRFMDIPGVGPLTALSLVSAIEDPHRFRRSADVGAYFGLVPTVRESGQLRTKRRISKAGDKLTRTLLATAAQQHMRWADTAISTWAKGLSSRLQKKGVQTAVARKLAVTMVAMWKAEKAYEPYPNLGRGRVITADTNLAS

SEQ ID NO: 389471 - protein, 345 aa, unidentified
MQYDAGIDVSLEQSSVCVVDAAGKIVKEAKVTTDPHVLVTFFKGLGFPVTRIGLEAGPLSQWLYAGLTQAGFDVVLLETRHVKAALSAMVVKTDRKDARGIAQLIRMGWFRAVHVKSASAQEIRALLTARRLLLDKLRDVELSMRGILRGFGLKLGKVTQKGFETRVCELVANHPMLQQITGSMLLARATLQREHNTLHKALLKIVRRDNVCRQFMTVPSVGPIVAITYKTAVDDPHRIKKSKAVGPLFGLTPKRYQSGETDVIGGISRIGDAMVRAMLYEAANVLLSRTMRFSALKRWGLAVAKRRGMKRAKVAVARKIAVILHRMWIDGTSFRWSNEKAAAHA

SEQ ID NO: 389472 - protein, 400 aa, unidentified
MQQQAERVVIGMDPHKRSATIEVMDAEETVLGGGRYDTDEGGFADMTGYVNRIQPDRERRVWAVEGCNGIGHHIAVRLLAAGEHVVDVPPKMSARTRVFATGQGRKTDATDAHSVALVGTRMVGLRPVVDDQQLTVLRVLADRRRSLGEDHTRIVSQLHQQLLELIPGGAKRDLSAAQAKTLLAKVRPRDAAGKTRRRVAAELIADLERIYQRKKAADKELTELVAATGSSLMKLHGIGPSGAAQLLVDVADITRFPDRGHFASWNGTAPIDASSGDQVRHRLSRLGNRQINRTLHIMATVQLRNPTEGRAYYDRRKGEGKTSNEAMRALKRRLSDIVYRTMLDDAIGHSFSPRRTGPGGQQGNDSYSSAAGSQPQASSSDKPHPSPSKTQPRTPVPTAS

SEQ ID NO: 389473 - protein, 320 aa, unidentified
MQTSSVVLNIGADIGKDKIVVACAEESFVPHKIANRRAELAAWLKGVPAGSRIGMESTSSYHELLAGLAHQLGFVVYVLNPKDTRHYAKAMGLRGKTDRVDAKLIARLIAREHEKLHPWIMPTPEQRQIDRMIKRRAKVSGIRAALGQSLSGLKGFAAELKALKHRLDQLIARIDAKIKALIEADAERKQDYARLRRITGVGPVVGGSLVSTLERVPLKNGDAFVAFTGLDPRPDESGHHVGRRRLSKRGPAELRRLLYLAAMAAAKTKIWKPLYEHHRAKGLSRTAVLVILARRIARVAWSIYTHKTEFDPQRLVAGLT

SEQ ID NO: 389474 - protein, 345 aa, unidentified
MNQIIRIGIDTSKYIFVLHGVDAAEQVVLRKKLSRKQVLEFFAKLPPTVIGMEACGASQHWARELSKLGHEVKLMAPQLVKPYVMRNKNDGRDAEGLCEAMSRRSMRFVPVKTAEQQAALMLMGVRDGLIVRRTQLTNTIRGHAAEYGLIAPKGLDAIEPLLARIAQDETLPTLARELFVVLGRERARLEGELKAVEAKLMAWHRGDATGRRLAEIPSVGPIVATALVMKTPDPHAFRSGRHFAAWLGLTPKDHSTAGRTRLGKITRAGDEDLRRLLVIGATAVIQQARRGRGHHSRWLLALIQRKPPKLAAVALANKVARIAWKLMATGESYEAARIKPMTAAA

SEQ ID NO: 389475 - protein, 407 aa, unidentified
MSNEPHNVVGIDVSKGKSTIAVMRPFGEIVISPFEVKHTSSDLKVLADTLNKLDGETRVVMEYTGKYYQPIARYLYESGLYVSVVHAKIIHDFANNSIRRIKTDKADAVKIANYGLSNWEVLPSYTKEDDTRLMLKTLNRQYNHLMNQYVVARNVLISIADQTCPGLNEVFTNPRKADGRIKWAEVYRRFWHCEYITGFSRNKFISLYNNWCVKNGFRGSDEKASELYLLAKECVPTLPKTEYTKKIVEQAASELISLSDAMASVHREMLSIAKTLPEYPAVLSINGIGETLGPQLMAEIGDVRRFLKRSNITAFAGVDAPPFQSGKFDSKSRRISKRGSCELRKQLFQVVRIIVQLNLYDDPVYQFVMRKKAEGKPYYVYMVAGCNKLLRIYYARVKEYLAAENAI

SEQ ID NO: 389476 - protein, 369 aa, unidentified
MTSNVKFIGMDVHKKKIVIAIADSGREGEVRLFGAINNDLDSLNKFIRKIGYKKDQLRFVYEAGPCGYEIYRHLTAKGIDCMVTAPSLIPKKSSDRIKTDRRDAKNLARLHRSGDLTAVYVPHVEDEAIRDLSRAREDARIVSRKAKQRLNAFLLRHGFVYSGRSRWSKAHMNWIVGITMPHRAQQLALDEYIEALNEALQRVDRLTNQIRIIVSEWRMAPVVKALQAARGVSLVVAVTTVAELGDLGRFDHPSQLMAYLGLVPSEYSTGDHVRRHSITKTGNAHVRRVLVEAAWAYRFPARRSRFLLNRQQGLPKTVCQISWQAQLRLCARYRQMTARGKVKQVVITAIARELAGFLWAIAKQIPAPA

SEQ ID NO: 389477 - protein, 370 aa, unidentified
MKKNNTVAQSPKRASARKQGPITIGMDLGDKTSRYCVLAENGERLSEGSVATTRKAMAQKFAGMRRCRVAMEVGTHSPWLSRWLNGLGFETIVANARQVQLISASSRKNDRMDAHLLARLARVDPLLLRPIRHRSEQAQADLMTIRIRAALVEARTSLVNAARGFAKAQGDRLPSCDADAMGVEKMEALPVGMRERLRPLLEQVESLTEKIKTLETKIEQIARTEYPETALLRQVSGVGTLIALTFVLTVEDRNRFQKSRDVGCYVGLRPRQSESGQSQPQLRITKEGDRYLRTLLVQGAHLILNRRGPDTDLKRWGLMLAERGGKNAKKRAIVAVARKLAVLLHRLWVTGEVYEPLRNSQAGQSSKQAA

SEQ ID NO: 389478 - protein, 408 aa, unidentified
MKPLFVGIDVSSKNNVAYLMKPDGSKHSSFSVQNNLGGAKLLSERIVSALGSMQLERVVIGLEATSIYGDSLVYALREDGRLGRFQRKIHVLNPKQVRKFKEAYSDLPKNDWVDAFVIADHLRFGRINREVYMDDYRYKALQTLTRARFDVIQNLTREKQRFANYLFLKCSGMAQDKDIQNTSATTIALMEHFETVDDLANADLEELTAFITETGRGKFADPDATAKAVRAAAKGSYRLPKTVNDTVNQAMAVSIASMRALKGQVKVLDKAIEQQFEIIPNTLTSIPGIGKVYSAGIIAEIGDIHRFDSQASVAKYAGLVWNRSQSGDFEAEHSRMIKSGNRYLRYYLLEAANSVRRCDSEFRRYYDLKFKEVNKYQHKRALALTARKLVRLVFRLLKDNRLYIPPEG

SEQ ID NO: 389479 - protein, 412 aa, unidentified
MDVYCGIDWAEDHHDIAVVDRDGRLLARRRISDDAAGLAQLLGLLAEHGDTPEDPIPVAIETPRGLLVACLRATGRPVYPVNPMSVARYRDRHSVAGRKSDHGDSFVLASVLRTDMHAHRPLPADTELAQAIAVLARAQQDAVWDRTTAHNRLRSHLREYFPAFLAAFADARGGITRPEARAVLAAAPTPADAAKLTVTQLRGILKKAGRSRGLDTEAARLHEAFRAGQMRQLPLVEQAMGRQALALLGQLDAACAAADDLEHAVTQSFNLHPDAGIITSFPGLGALTGARVLAEIGDDRSRFQDAKGLKAYAGAAPITRASGKTRSVTRRKVKNNRLNAAGYNWAFSALTASPGARAHYDRRKDTGDRHAAAQRNLFGRLLGCLHHCLTTGQHYDEATAFPAATKKISQAA

SEQ ID NO: 389480 - protein, 429 aa, unidentified
MTRISAGVDVSKNRSTVCIIDQDGKVIMRPFLVWHSTEELDFLADTLKRLNGEVRVIMESTSIYQYPIALHLKEKGIFISIVNAYKVKKFANTDFIGGKTDKKDSRTIASYGISYWDKLVEWQIPKDTYFNLDLLNRTYMNAKKHRQIILQELQHYIDCAMPGMDKELHSLNLNTKKDFMLDFVEKFWHRDEIVNMTEAEFTEVFTAWAKKKGYRPVEGKAAKIYAIAKSCIPYYPANPTVKTILQCIVDKLSGVNRTLVTIVTQMIEEAKKLPEYQIVREMPGVGDPLAARFFGSAGDIRRFKNSKALVAYAGIDSPPDESGDFSSTHRHITKKGSKVFRDTGYEIMMALRAQKRTWEKVRKNPEVYDYMLKKEAEGKPRKVAKIAALNKFLRIIYARIKELYDNMALAERAKAKTKSKTKAKTKATA

SEQ ID NO: 389481 - protein, 322 aa, unidentified
MQDKVMTEKAMAAVYVGIDVCKERLDVYLHPIAIHFAVANDRCGWRRLKRVLADHAVARVVMESTSKYHRAAHRSLSAAELAVAVVNPLRARLFAEATGALAKTDAIDASILALMAERLEPAAVQPLRDSVEAVQELSRARRAAIEERVAIVQRRSTAVSPFLRRELARRTRTLDGHVARLEAELQQVIAADPVLVRRQTILCSIPGVARTTAVALIASLDEIGQLSSKQASALAGLAPFAQDSGPRKGRRHIRGGRQDLRNALYMAALSAARFNPDLVAFNQRLRHNGKPPKVALIAVARKLIGLANTLVREDRTWSAQHA

SEQ ID NO: 389482 - protein, 342 aa, unidentified
MKQIYAIGIDVSKSKLDCAVISSDYEVIEEKEIVNSDKAISSFITQVLKRLGAGMSELLICCENTGIYNRPLERVCNQMGAQLWVEHALKIKRASTDMRGKNDKKDALRIAEYAIRYQDKQVLFKEDKQEVKTLNNLLKVRETLLTQQVAINNQLKEAQSHDPESYKVLKTAYKKALNCLAKSLKEMEQKINELIAKDQQIQQNVELMSSIPGIGKQNAVNFIIATNNFESFNSAKHLACYAGVVPFQNQSGTIIKRDRVSKMANKNLKKLLHLAAMAAVRFDPELKAYYQRKVQEGKNKMSVLNAVRNKLVHRIMAVITRKSPYEKKNQVSDNLETNLLAF

SEQ ID NO: 389483 - protein, 427 aa, unidentified
MDYTQNAKIAQVTEKTLIIGVDVGSETHYARAFNWRGQEFSKKAFSFGNDLGGYLAFAKWLDAYRQSMGAEKIMVGCEPTGHYWFNFARYVKQSSMTLVLVNPYHVKQTKELDDNSPTKNDRKDPKTIAKLVSEGRYTFPYMPEGIYADLRQAVSSRDRIVKELNALTNRIQRWLQIYFPEFLKVYGKFSAESALLVLETVPYPADILALGAEGVNQIWREHKLRAVGMKRATTLVEAAQKSVGMDGGVCARLDLQLLLEDFRRKQKQLEQITEVLEAETRKVPHIEKLLAIKGVGLITAAGFLAEVGDVRRFDSPKQIQKLAGLELKENSSGKHKGQSSISKRGRKNLRKILFQAVLPLIRSNDEFREVYHYYTTRRKNPLKGKQAVVAVGCKLIRVFYAILTHGVDYDANRLRTDIIRPQEQQAA

SEQ ID NO: 389484 - protein, 340 aa, unidentified
MNATTYGLDVAKRVLQMYWVDPQTGEIANRRFGRDELIRFLAQRPAGRVALEAGGSGHWWARKIQALGHEVVLLHAQFIRPFVQTNKTDAADARAIWTAVQQPGMRTVAAKTQDQQAMLGVHRIRALLVKFRTMQVNQLRGLLYEFGVTFRAGRQAGLKEIRARMAELEEALPGVMLCSLQEQLQRIDGLEQEIDRLEQRIGSWQKQEAACRAIAAVPGIGTLTATALVATVGEAKAFKSGRELAAFLGLVPRQSGTGGKIRLGSISKRGDAYLRTLLIHGARSVMYHTKAPTAWQKGIQARRPANVAAVALANKMVRTAWAILAHGRVYQKDHVSMKPG

SEQ ID NO: 389485 - protein, 342 aa, unidentified
MEHTTIAVDLAKSVFQVAVSHRPGHLDEERRLSRDRLLPFFAQHPPATIVLEACGSAHYWARQLQPFGHTVRLLPPHDVRPYVRRNKTDRTDAKGLLEANRNEEIHPIPVKTIEHQAIASLHRLRSTWLATRTARLNTLRGLLREFGIFIPVGAQHVGPHVRALLVEPTPVPLLLHTTLAAACDEIAMLETNMRAVERQLGALAAEMADVTLLQTVPGVGVITATALVALVADIRRFPSGRHFASFLGLTPKEDSSGSRRRLGAISKQGDVYVRMLLTHGARSVVWHAKTAARPTSLQQWASQTEQRRGRNVAAVAVANKLARIVWAVWAQHRPFAADPRHG

SEQ ID NO: 389486 - protein, 507 aa, unidentified
MELSSPVASLVPSPVLNAVVTVVDAFVAFAEIPFRRVPFLRGSGRSPVGEGDTAMGRKRDKNSKTTSATLPLMRRDAAGIDIGATEIYVAVPADRSAEKVRSFPTFTQDLYALADWLKQCRVKTVAMESTGVYWIPLYQILEDRGFEVYLVNARHVKNVPGRRTDVSDCQWLQFLHSVGLLKASYRPEQEVCAVRSLLRHRESLVQMAAKHVNHMQKALDQMNLQVHHVISDITGQTGTAIVDAILAGERNPLLLARLRNERIKASEEVIAKSLVGDYRPEHVFTLRQSRDAYRSYQKLIEDCDREIRRCLEQFKPPHEPDVPTAGEEKTSAKTPSAESVLRSELKRVFSVDLTKIPGIRVGIAQSLFGEIGPDFRKFRSASAFASWMGLCPDNDISGGKVLWVGTRKVKCRAATALRMAAQSLHHSKSALGDFYRRMRAKLGAPKAITAAAHKLARIIFHLITTRQEFDDSRFAADQKRHHKRQEARLRAKAKTMGFQLVPLEQKR

SEQ ID NO: 389487 - protein, 436 aa, unidentified
MQVNTNRARVSIGIDAAVVAAHQVAVRGEVREDFKIRPTLAGLAELTQRLKPYAGAMVVAEPTAGTWLPLAHAVADSGCGIGFVANRDSARLRSAIVGASKSDVIDADMLAHCEEILGVVPVPVPPPGQIALRRAMRRRHIATVDAHRAECRLWALAAWAFPDLWRATGGHTLAQPLLGRWPHLESLSRARLASITDLVAAHSRDQDPHRRAERIRDAGTGWARFWQGHLDLDALAWEVAAMLDDVAFADQRQADATRQAIRLWQQHWPDDPLVSIPGMGPVSSAAIRGWWGDATQFATAKAAVAHTGLNPSMWSSGLTESPSRRITKQGPAELRLALYQAANVARRHDPQLAEHYRRLMTERGHNHISANTAIARKLACRAWAIATTDRAYQPRDLDGNPVSYDQATALAAGLAVDDDIRARRRGHARRGRLSPI

SEQ ID NO: 389488 - protein, 347 aa, unidentified
MTEAYDGRQVVGMDLHRRRSVLVRMTEDGQRLGTARITNSPAALRAEIAKAGTDPRVVLEATYGWYWAADELAAAGAEVHLAHPLGVKAFAYRRVKDDVRDARDLADLLRMGRLAEAWIAPPAVRELREITRYRQKLVGLRTSCKDQVHAVLAKLGIPVTCTDLFGAWGTTWLDGLQLPQPYAGKVCSLRQLIGELDAEVTMLTEVTADLLAGYRGYQVIQQLPGIGPVLAAVIVAEIGDVTRFRSAAQLASWAGLTPRHRESDVKVIRGHVTKQGSRLLRWALVEAVQRTPSGNRVRDVKDGIIARRGAQARNIAKVAAARQLLTLVFYGLRDGQIRCLSAPAGTG

SEQ ID NO: 389489 - protein, 399 aa, unidentified
MNRPDYAVFLGLDVGKDEHHATGLDHAGKRVHDKPLPQSEDKISELLQTLSAYGRVLVIVDQPASIGALAVAVARDAGIDVAYLPGLAMRRIADLHPGSAKTDARDAYIIAEAARSMPHSLRRVDTGDEALADLEVIVGYDDDLAGEVTRISNRLRGLLTQINPGLERVLGPKIAHPAVLELLKRFGGPTGLAGASRRQLLAVAKPRAPRSYTALIDALRHALDAQTVTVPGTRAAELVLPQLATQLTGLLAQRKAAAEQIEEMLDAHPLSLVLTSMPGIGVRTGARILLEVGDGSAFPTAGHLAAYAGLAPVTRRSGSSIRGEHPSRAGNKQLKRAFFLAAFASLHDPISRAYYDRKRAQGKKHNAALVCLARRRIDVLHAMLKHGTLYEPRPTAQAA

SEQ ID NO: 389490 - protein, 410 aa, unidentified
MQVVYERCCGLDVHKDTVAACIAITEGGRVYRDKRVFGTTTKDLLELSDWLAEHSITHVGMESTGVYWKPIWNILEDQFDITLVNAQHFKSVPGRKTDLKDGEWLSDLLRHGLLRKSFVPDKPIRELRDLTRNRAMLAKERARLSCRIQKVLEDANIKLASVASDVLGASGRAMLKAIVRGESDPAILADLAQKRLRAKLPELRSALTGCIDDHHRFLLRQWLELLDVIEGKIAEFDQQIDQKVTPYQEAVTTWMAIPGIDRVAACCLVAEIGANMDQFPTARNLSSWAGVCPGNNESAGKKRSGKTRRGGVWLRRVLCEAAWAASHCKKSYFHAQYQRLAGKRGKKRALIAVAHSMLSVAYVLLKEHRAYQDLGADYFQRANRENVTKYHVKKLQKLGYDVSLVVTTPT

SEQ ID NO: 389491 - protein, 358 aa, unidentified
MTTAAPHHEPGNTTEATLFVAFELSEKTWKLGFTTGHGQKPRERTVSARQQECVLDAIAQAKRRLGLPDTAPVVSCYEAGREGFWLHRFLQGHGITNQVVDSSSIEVNRRRRRAKSDGLDVRKLLSMLIRYEHGERQVWQVVKVPSVEAEDHRHLHRDLETLKQERASTTTRIQGLLSRQGIRLMSLTKLPEQLDALRLWDGSPIPPGLRRRVLRVYAHHTFLSAQIAAVEAERRAQLQTSTEAHIDKVRQLMQLKGIGINGAWLLVMEFFGWRAFTNRREVGGLAGFTPTPYQSGDSAREQGITKAGNRHVRWMTTELAWSWLRFQPDSALSVWFRERFGSGGKRLRRMGIVAVARK

SEQ ID NO: 389492 - protein, 321 aa, unidentified
MMITNRTKPYVGLDVSKKVLELAIHESDYRGCHPNKASAFAELIAELIALEPARIVVEATGGLEKPVVAAMHTAGLPVVVINPRQVRHFAKALGQLAKTDRLDARVLAHYGAAIKPPLRPIKSAAEQDLDALVGRRGQLVGILIAEKNRRATAPNDTVREEIDEHIEWLEGRIAALDQQLKQLMKTSAVWNHTNQILRSVPGIGPVVSFTMLADLPELGKLNRQQISKLVGLAPLNRDSGQKHGTRHIYGGRTSVRSILYMATLTAIRHNPVIKAFYERLIANHKVFKVAITACMRKLLSIVNLMVRNGTTWKPADALVSA

SEQ ID NO: 389493 - protein, 371 aa, unidentified
MKHNSIFIGMDVHKNSIDIAIAESGRTGQVRHYGKINGTLAALNKAVGKLVGKGDRPHFVYEAGPCGYQIYRHLTARGFDCTVVAPSMIPRQSGNRIKNDRRDSLMLARLHRAGELTAVYVPLPEDEAIRDLSRAREDAKSDEKRSKQRLLAFLLRSGHRYSGRSPWSQAHMRWLADIKMAHPSQQIVLQEYIDTISQCTLRLQRLNEQIRQLLPQWRLFPVVQALQSLRGVSLIVAVTTVAEIGDFKRFQNPEELMGFLGLVPSDKSSGEKIKHGSITKAGNSHVRRMLVEAAWAYRFRARVSRALLKRQEDLPQPICDIAWKAQLRLCARYRHFWAKGKVKPVIVTAIARELCGFIWAIAIKTDIPVAV

SEQ ID NO: 389494 - protein, 345 aa, unidentified
MSEITTVGLDLAKSVFHVVCCDRRGKIIRRKKLSRHQVRRFFAQLAPCLVGMEACSTSHYWARELIKLGHEAKQIPTQHVKGYLRGNKNDYNDCLAIAEAVVRPQMRFVSIKTVEQQDLQSLSRYRQSLIRSRTGESNRIRALLAEHGVSVSRGLSALRKILPCLTERHDGQYSEELLTMLQLGYQHLVLLDEQIAALDRTLRRVTQNDPNCQRLEEIPGFGPVSASAFVSHVGDGRQFRRGRDVSASVGIVPGQHSTGGREVLLGISKRGNKALRTLLIHGARSAIRNVGDKQDPISCWIRRTLARIGIHKTIVAYANKMARIGWSLLRHGNRFDPNYRMVAAA

SEQ ID NO: 389495 - protein, 347 aa, unidentified
MRFYTKQHVHYCGIDLHARNLYLCILDQAGKTLVHRSLDCGREDLLRVLSPYRKDLVVAVECLFCWYWLADLCDDEGITFVLGHALDMKAIHGGKSKNDRIDSYKIAALLRGGNLPYAYVYPRAKRATRDLLRRRLFLSRKRAEFLTHVQNTNTQYNLPPLEQRVRKTKDRGAVIEHFEEERVQMSVAVDVDLLEAHDKIIRELELFLVHEVRKDHNAGFFLLRSIPGIGEILALTLLYEIDDIKRFPRVQNFISYARLVKGIHESDGKTKKSTGGKMGNVHLKWAFSEAAVLFLRGNVIGQKYFAKLEKKHGKGKALSILAAKLGRAVYYMLLRGKPFDLQKFVSG

SEQ ID NO: 389496 - protein, 507 aa, unidentified
MHRMNHMAGWARDVTVRFVFGVVSEEHPLSRFASAPRGFSRQLINELPETDVDYWPRGPDAALQRRENPRMTVIETTDPVSIGIDAAVVADHQVAIRGPGVRDDFRVSPTLAGMSKLTERLRPHAGALVVVEPTAGTWLPLTMAVTDAGCRIGFVQNRDSAKLRSAISGRNKTDAIDADMLARCEHVLGVHDAPIPLVGQVGLRRALTRRHQMVVDAHRVECRLWSLLIWVMPDVWRAAGGHTIIQPLLGKWPDMRALSRARVDSITKIVAAHSRDSDPPKRGERIRDAARGWAEFWDGRLDLDAIAWEVTELCDDIASADRRTGAATDHALQCWQQQWPHDVLLSVLGVGPICASTTRAWWGQGTHLRSAKAAGAFIGLNPSNWESGLSASPSRSITKEGPAAMRLAYYQAANVARRRDPQLAAHYRKLMCERGHTHIQANCAIARKLAARTWAVLQTGEPYEPRDLDGRPIDEVAAVELAESLNVPSEHRRRNRATNPRRGRLAN

SEQ ID NO: 389497 - protein, 422 aa, unidentified
MKKRRYKATNVKRVNWERINAQAQGQRIIFGIDVAKEDFFAVLMKADHSVIETLKWAHPQQSRELVAHLLHDLKCSHLEVVMEPSGTYGDALRGYLSERGVSVHRVSPKRVHDVAEVYDGVPSLHDAKAAYLIGRLHLQRVSKPWPALSEARRDQQALVAELDLFASERQRNLNRLEASLSRHWPELEHILDVKLVSVLSLIGEYGSAQEVAAHRSEAQQLLQRIGRSQLDAEKVQHVLDSSATTLGIPCTEGERHFLQMLGRELVRSHQRVQAIEHRIAHAVAADALLTHMATVVGKTTSVVLGATVGSPVEYPNPHSYLKALGLNLKERSSGKHKGQLRITKRGPGQARRYLYFAALRWLYRDRVIGAWYQNKVKRDGNRKGKAIVAIMRKLVLALWYVAQGEVFDSRKLFNTQPLGLAA

SEQ ID NO: 389498 - protein, 427 aa, unidentified
MSYRIAGIDVHKRMIVVVVADVDVAGDYEFERRQYGSTPAQLRLLAAWLVEQGVEEVVMESTAQYWKPVWASLERYWKPICEKWEGRGPMSGSLHLAQAQSNRGARGRKNDFADAERLVRRLVAEELTLSFVPDAEQRLWRTVMRTRYQLRCNQVQLQNRLEALLEEAHLKLSSLVSDLLGLSGRRMLQAMAEGETDPAVVAARADCRLRATQEQLCDALGAYQELHPVYRRLLKTALEEWERIEAQIAQLGQEMASLIGPQQEQVQRLAEVPGLGVDSGQQILAEVGASAATFPSGRALASWVGVCPGEEQTAGVNRNRRSPKGNRQMRRILNQAAHAAVKLKGSIFALLYRRYVVRLGHNQTIAVIAHRLCRLIWKILHEGVRYDERGPAVSQRAKQRRTARMIRQLRSLGYSVELLHAAAGVPA

SEQ ID NO: 389499 - protein, 448 aa, unidentified
MNPVVGLDVSKGESQVQAFLDKGKPYRKSFSIKHTLDGLDRLLEFLREIEKLADGKQPSVILESTGQYHMPVIQFLEEQQYVYIIVNPLISHRARSTNLRKVKTDAIDAYQLCELYYKEELEPYKKRGIHLLNLRNLTRQQETVSSTAVQTKLQLQSILDQIFPEYRGVFGDLYSKISLQILSIFPTSKEVLSVSESDLTNKIAELCTTRSEKWAKEKAIKLREAALRNPFQNNLYQSHIFNLRMFINIVLQYQEHLSKLAAEIDALAKEIEEYEIIQSISGVGEKIAATIISEIGEIERFNHPKKLVAFAGIDPSVYSSGRFTASINRITKRGSSRLRQALFMAVQCGIRDARKQKSSEEIIPRNKKLRKFYDKKREEGKPFRVAIIACANKLLHWIYALKRSLPKCGLKITFKYIGKNLPILKRKAYLLYPFLVYHASFKFFIEKS

SEQ ID NO: 389500 - protein, 331 aa, unidentified
MHARTMHVCVVDAEGVTRVHVNLPCVPGRFLQVIEPYRERLVVCCECLFAWYWLADLCREQGIAFVLGHALYMKAIHGGKSKSDKIDSEKIARLLRGGTLPQAYVYPKEMRATRDLLRRRMFLVRQRGQALAHVANTFTQYNVATPEKKLSYHKNRAGVAERFQDQSVQRAVQSDLQLAEHLDEQLRGIELYLIQHAKIDDPQAFARLQTISGIGPILAMVIVYEAHDIGRFGSVQQFVSYCRLVKCSHESAGKKTAGHGNKIGNAHLKWAFSEAAVIMLRESAGAKKFVARREKKHGKAKAISILAARIGRTVYWMLKRKECFDEARFLK

SEQ ID NO: 389501 - protein, 346 aa, unidentified
MKKPFKFSNTEAGFVTFKEWILDLKERHEKDKVVPGMEPTGHYWFNLGKFLQDNEMKPVLVNPHHVKKSKELDDNNPTKNDRKDPKVIARLVKEGRYMIPYLPEGVYADLRTASNMRFQIQSELTRIQNRISRWVNIYFPEYKTVYGKPDAVSGMMILKQAPLPEDILTLGVEGVNQIWRDAKMRAVGKARAKTLIEAAMHSVGAKEGTMAERMEIRMLLEDYESRNNHLQEVMTLIEELVKQIPMAEKLMDIKGVGIKTVSEFLAEIGNVSRFSNPKELQKLAGLALVENSSGKHKGQTTISRRGRKRLRYLLFEVAMSLVAKNPEFRELHNYYTTRRLNPLKKM

SEQ ID NO: 389502 - protein, 359 aa, unidentified
MNVKTIGIDLAKAIFQIHGVNEHGKCLFNKQLKRAQMISFFANLPPCLVGMEACSSAHYWARKLQGLGHTVKLMAPQFVKPYVKTNKNDAADAEAICEAVSRPNMRFVPMKSSEQLAVLALHRARQGFVKARTAQANQLRGLLAEHGIIIPKGIAHIGKHLPEILEEYENGLPGTFRQLLERLGEHLKALDRQVQELEVQLQSWHRENVASKKLAQIPGIGPLTASALIASVGDAKSFKNGRQLAAWLGLVPRQHSSGGKQTLLGISKRGDSYLRTLLIHGARAVLRVAERKAQHANSWLAGVMGRRNHNVAAVALANKNARIVWALLAQEREYEANYGVVARPTSVPRHQLRSDSNSN

SEQ ID NO: 389503 - protein, 327 aa, unidentified
MMFIGFDISKDKVDLCWLRDPITNKKKTKVFKNNHLAFREIKQWLLSTTKTIAEEIVITVEPTGVYHEPLMYFLYQQGFNIILANPSKAKKYAEALNVVHKTDRSDAIMLASYGYAKQSTVNFWQPEAKEIRELKSLLRRLDALESNKQREQNRLEASEFNATSERVTQSLKETINFLDDEIKKLKSDIDSHINSFPDLKKNRTLLETIPGIGPVMSRELTYIFAAKNFSRAKQAAAYCGLIPRLHESGKMKGRTTMSKLGPSKIRSKLYMAAVVAGQWNYKIQQQKIALLNNGKTSMQIIGANMRKLIHICFGVIKNQEAFKLQES

SEQ ID NO: 389504 - protein, 400 aa, unidentified
MRVVGMDIHRSFARVAVLDEGQITQELRVDLVYGPLVNFARTLSLEDEVVIEATGNSAAVERLMRPYVKRIAVANPRQVRAIAHARVKTDKIDAAILARLHAAGFLPEVWVPDDDTLKCRRQIAERMGVLEQIVRLKGRIQGVLHSNLIPKYTGHLFGKAGRKWLDSLPLPDEERAMLGRLVVELERVSAQMAELDKMLAQQSLNDPRARRLMTIPGISSIVALTVLASIGDVSRFPTAQKLGSYFGLTPKIRQSGGQPARHGRISKQGNGDARKMLVEAAWSAKTAPGPLRAFFHRVQRKRGAAAAAVATARKLAVMIWHVLSADIDYAFARPAFTAMKLRKVALKAGAPREYGKAGPGRDYWIKEIRHKEMEYVERAERAYEQMVEAWSDKPKKPALG

SEQ ID NO: 389505 - protein, 396 aa, unidentified
MATIGIDVGGHRHVAARCRDGEAKADRELLRLGQSRAGFDALDAWLAASPQPVELVTMESSGHSWMPLASHLRRRGVEVAVVNPLIPRYFAKSRLARTKSDPADARILAEMAMRDRPVARDPLAGVELRQAARYAMTLVEEQRRVCQRLYRLVELGFPELRELFDDPTCRTARALLRIAPTAQAASRRRTATLAAANRGPGRRGLGTARARRLQMSAASSIAVPELETEVAFEVDQLLDQFDLLETQIAAAEQRVAGLLDGGTAALLQTIPGVGPAIAATLMAEIGDIGRFTDFDQLLAYAGVHPAERSSGQKGASPETSWRMAKTGSAHLRLAAYRIAVVGLQHNPVIAAHYARKRAAGKSPMNALGHCMRKALSLVWGVWRNQTPFDPNWKLRA

SEQ ID NO: 389506 - protein, 319 aa, unidentified
MISPMEAMIERCAGLDVHQETVVACVLFGPLDKKPKTSIETFSTTTTGLLALSDWLATLQVSDVVMESTGVYWKPIWNILEDSFHLVLANARHVKNVPGRKTDVKDAEWLAKLLRCGLIENNFVPPEDIRDLRDLTRYRKKLIHHRTSEQNRIHKILQDANIKLTSVLSDIFGLSGRRILEAILNGEKIETDGLRKMVDWRTKASITDIASAINGRIRRHHRDMLRYHWDHMGYLEQTIEELEKQIDQLLSPYRKEVELLDGIPGVNKAAAATFIAEMGVDMSVFKSAKHLASWAGVSPGNYESAGKKKRVKPHKEIKL

SEQ ID NO: 389507 - protein, 390 aa, unidentified
MSSSPAVAAASTIYLGLDVHKDSITIAVLPNEAKAPTRLERLPNDLPRLKRFLDRCARDGALAACYEASGAGYVLHRAMREWGYACTVIAPSLIPQRAGVQRKHDKRDACDLARLFRAGELTPVRIPSAAEERVRDVVRCRETFQREILKSRHYILKFLARRGFVFRDGTNWCTPHLRWLEHLTSETSPLAPADRLVFREYHALLAYKLQRRDELDRQIEHLALTPALAGAVARLQCFRGISLHGAMVLATEIVAWRRFERPGQLAAYLGLVAREYSSGDRERKGSITKAGNSHCRHVLVQAAWTYHYRPHLSVEIQRRQHGQPPAVVTHAWKAQQRLHQRYQHLVFRKRPQIAAGAVARELVGFLWAVMQDLPQDLPQDLPTAEGRTIA

SEQ ID NO: 389508 - protein, 361 aa, unidentified
MVVNVGVDLHKTQFTVSVRDSKNQFAEYQTTDEGYKKFLSRVSAWQKKGAVVRVGVESTGNTRFFKNQMEQAGVEVVVINTLKFKVVNESVKKTDRHDAATIAEFLEKDMLPEAKLCSEQSEQLRRLIKVRTTLVRTNVTVKNQIHALLTGLGMKDSKASLQSKRGRQKILDTLKAENGLVVQPLFETIERLEENVKMIEKELEKLTEGDEAVRLLLTIPGCGPITAWTIRAFTDDINRFSSAKKYSAYAGLVPWVQNSNETVHHGRITKRGPEELRTALVQLVLGMRRCKQTLSWRLMERYNVMKSNKGSGKSIIATARKVSKIVWCMLAAGEEFNVNLMVDKKLKAKADAMRNKAKKSA

SEQ ID NO: 389509 - protein, 336 aa, unidentified
MKEFSSCIGIDISKDTFHVCVKQLVGEQVSIKGTHSFENSYVGFTEFLRWALTKTKNSETLYVMEATGIYHEELTHFLYSNTKTVAVVLANKIKHFAKSLNIKTKNDKADASMIAHYGLERCPEPWEPMMLQMKSLRDLCRERLSLKQNIVALKCQLHALDHAHGTLEFVFQMKQKQVKFMEINIQEIEQEIKRITMEDNDFYERVKKIETIKGLQLITIVTILSETNGFAQFNNIRQVVSYAGLDVAERQSGLFKGKTRISKKGNSRIRQCLYMPALSATNHNDGIKALYQRIVERNPTIKRKGVVAGMRKLLILTFVLWKKNEAYNPNYRWNTD

SEQ ID NO: 389510 - protein, 377 aa, unidentified
MGKDTAFVGLDVHKETIAVAVAEDRRGGEVRYIGEIANTRETIRKLVAKLSKAHEALHFCYEAGPCGYGIHRQLTDMGHDCELVAPSMTPSRPGDRVKTDRRDAVLLARLHRAGELTRVWVPDEGHEAMRDLVRARTAAMENLRRARQQLSGFLLRHDRVFRAGCNWTKKHRVWLSGLRFQHPAHQIVLQEYIHAVDDAATRLARIEDQIRTLVPTWSLAPVVEAIQAMRGVSFISAVTVMAETGDLGRFDNPRQLMSWLGLVPSEYSSGPRTARGGITKAGSKDARRVLIEGAWTYRCHAAVGKEHMARLEGLPQEIRDIAWKAQIRLCARYRRLSACGKPATLVVTAIARELAAFIWAIARMVTPNTRLAPAAAC

SEQ ID NO: 389511 - protein, 447 aa, unidentified
MEEVVMEVLFKTCAGLDVHQKTVWACVRRLHPSGRVTKEVKCFATMTKDLIALAMWLKERGVTHVAMESTGVLWKPVYNILEEHMDVWLCNARDMRNVPGRKTDVKDCEWIAQLMQCGLLKKSFVPPKPVRDLRDLTRTRTCLEDDKTRVVNRLHKILEDANIKLSAVASDILGKSGRAMLNKLIAGESDPAELASLALGKLKKKTASLADSLQGHVSEHHRFMLRVQMEQVCALEKEIDVLSERIEQVMAAADAQRRRDEEAAKACEETALKGEQKEKPPLPFLEALKLLMETHGIKRRGAENILAELGTDMSVWPTDRHCVSWAGICPGNNQSAGKNRSGASRKGNSWLRRALNNAAWGGSRSKQSFFAARYSRLVKRRGKPRTIQAVGNSMLKAIYHMLKEHKPYRNLGREYYASINTKAQKRKLVKSLEALGYSVELKALPAA

SEQ ID NO: 389512 - protein, 344 aa, unidentified
MEQYAGIDVSLELSSVCIVDAQGKIVKEAKVASEPEVLIGFFETLGFAVDRIGLEAGPLSQWLHAGLKRAGFDAVLLETRHVKAALSAMTVKTDRKDARGIAQLIRMGWFRPVHAKSIGAQEIRALLVARKQLLGRLIDVELSIRGILRGFGLKVGPVTRKNFEVRIRELVAGQAMLERIVAAMLSARAALKAEYAKLHKAVLTIVRDDTVCRRLMTVPSVGPLVAITYKSAIDDPHRIAKSKAAGALFGLTPKKYQSGETNVTGGITLAGDEMVRTALYEAANVLLSRITRFSKLKRWGMDVAKRRGSKRAKVALARKLAVILHRVWVDGTTYRWAEPKPIVA

SEQ ID NO: 389513 - protein, 482 aa, unidentified
MKKRNIYQNQSQELLSLFEQAANNAKVMCVPIDYAKKDHVVMFCNGYGDILRKPFSVKNSPQGVDYLTDQVMRSCRQRAISEKHVFFGGEDVGSFADNFVSTLRCQGWLVAGVNAHEAKTQRENLQASTDRLDLMGIAKSLLNRRANCSPAQSGIYLNMRTVVRHRRKLVDIKTEVRNRIHTVVDRLFPGFLDEAKSGITSFSKSSLWLMKERFSAPQIRRRRRSTLIEALRRLGTKKPECTADTLQQYATQVLKPPQDYVHMLQLSLAQHVKHFCCLQESIGQFEKEIAVNLAQTQGAFLTSVRGIGIVLAAGVSAEIGNPYEQKPLNNLVSYCGIIPRVKQTGGPQGETKTGKVAKRCNRILKDYAVQSASHLGLHGPADLMADYKRRDAASQHADFGMTRRYLRMAMCLMRTSQIYLPSGLRKAQAQIEERADYYLMNWPYLREKWQKLEALETAFKADHPLGQWRKIVQQFYGIKLTL

SEQ ID NO: 389514 - protein, 363 aa, unidentified
MYSERTSVGLDVHARSVAAAAIDSVTGELKQARLTPSHDHIRSWLDGLAGPVAVTYEAGPTGFGLYRSLTEAGVRCVVAAPAKLQRPAGDRVKTDAKDAVHLARLLRLGEVSPVTVPSVAQEAARDLVRAREDCRGDLMRARHRLSKLLLRQGIVYSGGQAWTGAHDAWLRRQRFDNRATQLAFESDYDAVLAVSARRDRLDTAINDSAADSEFTPVVRRLACLRGVSTLTAFALAVEIGDWYRFSGNSIGSFVGLVPSEHSSGASRVQGSITKTGNTHARRLLVEAAWHHRARYAPGKTMHDRWELAPPAARARGDAGNRRLHARWVTFNLRRKRPVIANVAIARELAGWCWSLAVLDSDTS

SEQ ID NO: 389515 - protein, 331 aa, unidentified
MEQRKTIIGIDVSKKTLDVFIKTIEVHLQISNDSEGFKKLLALLKATKLKPEDCLFVLEFTGGYEYRLVQFCQSKMYSYVRISGLALKRSMGMVRGKSDKIDAKRIAGYGYEKQSKLEAETGGLADIVRLKRLLSQREDFVTDRKAYDHRYSELQYMMDLNDKDSMLKRYKKLAADLQKLIDKTEEEIRKLIKANDAFQLNFDLLTSIKGIGEINGWTMIAYTENFTSFENGRQFGAYIGVVPYDFTSGTSIKGKSRTSKMANQQIKALLQMAARAAVIHDKELNLYYERRTALGKHHMAVMNEIKFKLVLIMFAVVKKQKPYVDKYKIAA

SEQ ID NO: 389516 - protein, 405 aa, unidentified
MFEIEDVGVFLGLDVGKSNHHGHGLTPAGKKVFDKPLPNSEPKLRAVFDKLTAKFGTVLVIVDQPASIGALPLTVARDAGCRVAYLPGLAMRRIADLYPGEAKTDAKDAAVIADAARTMPHTLRSLELTDEITAKLTVLVGFDQDLAAEATRTSNRIRGLLTQFHPSLERVLGPRLDHQAITWLLERYGSPAALRKAGRRRLVELIRPKAPRMAARLIDDVFDALDEQTVVVPGTGTLDIVVPSLAASLTAVHTQRRAMEAQINTLLEAHPLSPVLTSMPGVGVRTAAVLLVTVGDGTSYPTAAHLASYAGLAPTTKQSGTSIHGEHAPRGGNRQLKRAMFLSAFACMNADPASRAYYDKQRARGKTHTQALLRLARQRVSVLFAMLRDGTFYQSRTPNDVELAA

SEQ ID NO: 389517 - protein, 394 aa, unidentified
MILVGIDIGKNQHTFSIIDKDTGEILSNPSVFNNSQKGFLLLIKKLSSYNKSELLIGMEDTGHYHFALLKYLLDSRYTVALVNPTTTDLTRKLQGGITKNDPLDSLTICDVIGSNQRKKPYRITKINRFDLYEQKQLTRHHHNLKEELNIYKNRLQKSIDIVFPEFNSLFRSKYGIVYMNVLKTFASAEKIADSDIRTIRKCFEYDGRGKRIPLSAEQLKATAKTSVGIPSVAEEIQIRHLICQIEMIEEQLSEIDKKIEEFSLQNNSPILSIPGISHFSGTSILAELGDICNYTKASQIIKFAGVAPYHYESSQFTAQHTAITKKGSRYLRKTLYQIILPVINHNRVFTAYYNKKLAEGKGHRCAQGHCIRKLLRVIYHLLSTGQTFDPALLV

SEQ ID NO: 389518 - protein, 366 aa, unidentified
MKKPSTTALRRIRKLQDGQLTIGLDLGDRSSFYCVLNRAGEVILEERVTTNPEAMKKTFEKMPASRIALETGTHSPWVSRLLTELGHEAIVAHSRNVRLIGESRRKDDRLDAQALARLARIDPRLLSPIQHRSAQAQADLSVIRARYALVRARTALVCAARGLTKSFGERIRGRNPKGFGSSTTEALGPQLQVALAPLLSALETITDRIREYNVQIETLAEESYPEVALLKQVKGVGTLIALTYVLTLEDPRRFRKSRDAACYVGLQPGRRNSGQSEPQQHITREGDSYLRMVLVQGAQHILGPFGEDSDLRRWGLKLAERGGKRGKRRAIVAVARKLAVLLHHLWISCEEYEPLHNTRKRRLAAA

SEQ ID NO: 389519 - protein, 373 aa, unidentified
MEEYSETYVAFDTSKLRNAVAIAEGGRRGEVRFFGEIDNTEAAVRKLVRKLCGQHKRLVFCYEAGPTGYGLYRLLKELGYECLVAAPSLIAKKPGDRVKNNRRDALSLVRQLRAGELTGVWVPDEHHEAMRDLSRARDAAVADLRRKRQQVSAFCLRLGRVYKGETKWGRAHLNWLMSQKLPHAEQRIAFEEMLLGVRQAKERIERLEAALRASLPDWSLGHVVPALMAMRGIDAISATTLLCEIGDLSRFPTPRALMAFLGLVPSEDSTGDRIRRGPITKTGNWRARRTLVECSWSYRHPPRVGRDKAAKVAAAPRAVREIAWKAQTRLSARYRHLIRKGKLKTVAVTAVARELSGFIWSINRALLEKGEAA

SEQ ID NO: 389520 - protein, 462 aa, unidentified
MSEQRGEEGGSERARAIEGLPVVRAQVGGIDLGSQRHWVCAPGLEGRGREIADFGATTPELQRLLEWLKVRKVESVAMESTGVYWIAPQEVLEAGGLEVLLVDTRQLARVPGRNKKTDPTDCEWIQRLHSCGLLRGAFRPPEQVSMLRTLVRDKANLVAEAGDGVRRMQKSLDQMNVRVHRAVSDLDGVTGLAIVRAIVAGERDARKLAQLRDRRCRQSEAEIAEQLSGHWREDHLFSLRQSLKMYEATQERITAYEQEIVRKRAEMTPAERAGQTAPAVKNPHKANAIRKRGEEPRRQAWYRMSGVDLAQIDAIGVGTIDVVLSEYGPDLSRFPTEKQFISHATLAPHVPRSGGKALKKKKRYSASTRVAAALRMAALALRHSPTALGAYYRSLARRIGGDVAVFATARKLATLIYRLLRWGQPYVDEGAQTFEERHRQQRIRSLTARAKELGYHLLPTTT

SEQ ID NO: 389521 - protein, 341 aa, unidentified
MKQPSYSTGIDIASDDYVVSISTTPGIALHGPKTFDNNRQGFKELDAWFKQIKIKLKEMIICMEATGVYGEHLCYFLHSHNYTVSVDPPLKVKRAFKIDGHKTDPVDSLQIAEYAIRFFDELNIWEPREDIVEKMKALITTRELLVNHKTATTSSLSALNRKAVRPTAANRTLKSHIQTLTKKIKTLEKEMDKLIQKEPQMSQTVMNLKSLPGIQNLLAFNVLVITNGFKTEKHYKEMNSYLKIAPVKHESGTSVYKKPRTPKFGPSIMRKLLHLAARSVVTHKSDFRKYYIRKQKEGKANKLILNNVENKLVKIMCAVIRDHNSYIPNHISIHPNLLKNA

SEQ ID NO: 389522 - protein, 406 aa, unidentified
MLDIHKSQITACVRVPDGDGGRRQETREFRTTTAGLITLADWLRSWSVTVVGMESTGVYWRAVFYLLEDEFECQLFNARHLRHVPGRKSDVQDAEWGCQLIEHGLVRTSFVPPRPLRDLRDLVRYRKAKIQERGREVQRVEKTLQDAGIKLSSVASEVLGVSARKMLDALISGTHDPEVLAELAKGALRKKIPALREALEGRFTGHHALLVGQMLAQIDFLDETIQTLSERVEELTRPFSREIELLDTIPGVDQRAAEMLLAEIGPDMSRFPTEHHLASWGGMCPGQRESGGKKHSAATRKGSKWLRGTLTECSKAIVRTKGTYLSARYHRIKSRRGHAKATVATGHKILTAAYHVLNQGIPYHDLGEQFFYRRDTENTERYRRRLIHQLERLGHQVTLQPLEEAA

SEQ ID NO: 389523 - protein, 348 aa, unidentified
MRYYQGRHPFYCGVDLHARKMYVSVVDEAGTLVQQRNLDAGPERFLSLIRPYRTGLVVGCECMFAWYWLADLCRDEGLDFVLGHALYMKAIHGDKSKNDRIDSEKIARLLRGGMFPPAYVYPREMRATRDLLRRRSHLVRMRTDAIAHVVNTTSQYNLPAFDKKLRNAANREGVAEQFPDPSVRRMIESDLSLCDHLDEQIRTLELDLVRSARLDDPQAYQRLQTIPGVGKVLALVLLYELHDVGRFADVRNFVSYCRLVRPKHESNGKTTSAAKKKKIGSAPLRWALGEAACLMLREVPEAKRLVARLEKKHGKAKALAILAAKIARAVYWMLKRKEAFDVTKCFKP

SEQ ID NO: 389524 - protein, 409 aa, unidentified
MNKVDIAPFEVFCGIDVGKTSNHIVALDRHGDKPLINRKVPQEEAEIRAALEEAVDFGLALVIVDQFGAFGRLVVGVAKSMDIPVAHMPPRRFRQVAETYGEDKFDEKDAFILADASRTTPRNIEFVGNRAESMAEIKVLSSRRDDIVEERTRCYNRLHDFIHQVSPPLEELFSKRKLHNDLEIRLIARYGGPIGFRQAGRARASTWAAELKYHCVDGPKKVEQVFDVLDRQTVMLPGAAVIEEQIRSIASRIIELLAEEKRLNLMIEQRAKMIPEVDLLQSIPGVGPVYAALIAVEIGDIGRFRDSNHLASYAGVAPRKEESGTSVHKRRKRKGGNRRLKNALMQSSQRSVQCDPVARAYYERKRAEGKKHLQALRALARHRVTVIFAMLNEGTFYEPPVEVDENGRG

SEQ ID NO: 389525 - protein, 365 aa, unidentified
MTTRQHSTSSSTDPPVRREVVLGVDTHGEVHVAAVLSPLGKVLDTESFPATAAGYRRLLVWARKRGTVRRVGVEGTGTFGAGLSRYLLTQQIQVFEVNRPDRTARRLLGKSDPLDAQAAARAVLSGRARARAKSGDGPVHSARIFKLAKDSAVKARTQAINQLKAVLVIADPALRERLSSLGNAELFRTCATLSPPGGGGDEDAVAQATHMTLRMLAERIEQLTGQINELNQRLTRLVERHAPQLLVPVGIGPDSAVTLLITMGDNPERLNTEASFAALCGVSPIEYSSGRRSTRRLNYGGDRQANAALHRIVFTRLRHDPRTQAYYERRTQEGKTRREIIRCLKRYAAREVFNLVRPVSRTPTL

SEQ ID NO: 389526 - protein, 314 aa, unidentified
MILALRCIGIDVSKHRLDIFDDAIGAAESIANAPQPITEQVARWRCGNVFVVFEATGIYDHELAAQLRQAGIRFARINPARARDFARASGRLAKTDAIDAHMLANFARAMLPPEEPAPEPARNALALLAKRRDQLVQMRAQEKNRRSEAKDHAMIADIRRLIDFLDGEIAMIEERITAFIEAEEPIAEDARLIRSIPGVGPVACMQLIAQMPELGRIGPKQVAALAGLAPRNVDSGTYRGKRTIGGGRKRVRDALYMAALNAIRRSSSFRAFYQRLRTAGKPAKLALIAVARKLLTVLNAMLRDRKPYLAATVT

SEQ ID NO: 389527 - protein, 353 aa, unidentified
MITIGVDAHKQLHMAVAIDDAGREVARWRGPNSPSGWQQVSAWGAALDGACRWGIEGAWNYGRGLAQDLVASGAEVYEVNPRWTAQQRQRARKPEKSDRLDARAVALLVWREAAALPVVAADDDTAVLELLVTEREGAVAEATRLRNQVHQLLLQLDPEYHTQLPNLRTSAGIAAVANYAARASDTLAQHRAGAVRRLAERLQLALAQAKALADQIAGLVAIRFAPLTQICGVSLLTAGALAGILGPGRRFATDAQLAAYAGVAPLEASSAGRVRHRLNRGGNRRLNAILYRIVLTQSRHSPEAKGYLARRMGEGKTRREAVRALKRFVVRAIWRRWQECLKAPEAVPSGRAA

SEQ ID NO: 389528 - protein, 345 aa, unidentified
MNKQVSRPQAMVFCGIDVSAASLSVALIEPSGGLTQREFANCASGHRALLAWLAQCSDRVRVSLEATGIYSLDLALALDASGTVELAVLNPKLVNRFAQTLRRSKTDAADAVVLAEYSQRMPFTRWQRPQASHLQLRTVGRYIESLVVEQSGLKNRLRTAEQTSTTPRAMLADLRRALASFERRVAKMRREALLLVRAEAALWERFQLLTSVPGIAQVSAIRILSELVLLAPTMSVRQWVASSGLDPAHQQSGTSLHKPSRISRAGNRHLRAALYMPALSAARYDPHIGAFYRALRQRHKTGLQALMAVARKLLHAIYGIFKSGTPYDGRRLFPNIQTEVESIAG

SEQ ID NO: 389529 - protein, 344 aa, unidentified
MVTFGVDAHKRTHTIVAVNDRGTPVGQTTVGTTSQDHLVLLRWAARFGAERRWAVEDCRHLSRRLERDLLAAGESIARVPPKLMAHVRDSARTYGKSDPIDALAVARAAQREPNLPLARLDGPDREVRLLVDHRESLISERTRLICRLRWHLHELDPAWEPKARSLDAQRTLDEVRGRLQDHVGVVARLAVELTERCAELTITIKALEKEITELTTQLAPALLELPGCGALTAAKIIGETAGVDRFKSRDAYARFNGTAPLPVWSSNKARHRLSRTGNRQLNAALHRIALTQARWHPPAKEMIERRKSGGNSGREALRVLKRRLSDAVFQALLHDQTAGLTLAA

SEQ ID NO: 389530 - protein, 332 aa, unidentified
MDKTIEFSQVVDRCCGLDVHKKVIVATVEGTGIARETREFESTTRSLTKLKEWLLELGVTHVAMESTGVYWKPVINILESGGFTLLVVNAQHIKYVPGHKTDKKDSAWICKLLRAGLLKGSFIPDRARRDLRDLTRYRRKKVQEVTAERNRMLKVLEDANLKLSSVFSDVSGVTCTKVIDAILEGRTDPDYLTSLCTHGRLRSSKEQIHDAVEGSFTEHHKFMLKAIRRSIAGLEEEIAELEAEIDRRCEPVQEEIERLCTIPGIDKTGAKELIAEIGVNMEVFPTAANLASWSGVSPGNNESAGKKKLARKPRKQGNQGDNHRMRLGREPH

SEQ ID NO: 389531 - protein, 402 aa, unidentified
MIFINCLGIDIGKSESVVAHYKDEVLVKEMVIQNNQNGYRYLKNYIKHLDSLFILFESTGIYSRGMKRFCEIHKIDYLEMNPLEAKFKTSSLRSWKTDKSDAHKLALLAFRMKDSKVQRQSEEIYFELRERARFHLEMEINQNRLKVELVETLHQTFPGLEKLFTNRYSKIALNIAKAFPHPDFVSTLTHDELVEKVLHSTDKGISVNKAHKYVQKLIEIKNNSFPNVDKSSFLLQKVQYLCDKLLIGIEEMKEFDQEMIDLAKNTTEFENIISIPGIGELTAALLIGELGNIREFKTNKQLNAFVGIDIKRYQSGTSKSRDTINKRGNKKARRLLYLIIMNIIRGRNHYQSHIVDYYYKLREQPHGKTHKTAVIASINRLLKTIHYLIVNNKLYDYQKAPH

SEQ ID NO: 389532 - protein, 355 aa, unidentified
MTDVKYIGMDVHQASISIAVLDGGGALLMQSTIRTQACTLREFLRGLEGTLYVTFEEGTWSAWLYDLLSPHVTQAIACDPRHNALLKSGNKSDKIDARRLAELLRAGMLKPVYHGQRNAHRLKELSRSYLTLVHDSPRVMNRIKAIYRSQGIRCAGQRVYSLRYRVNWLEQLREPGLRQRAALLYQQLDGVQTLRKQARRALLAASRKHPAHRLLLSVPGLGLIRVALLLALMQTPHRFRSKRQLWAYAGLALVTRTSADYRLVHGSLERSRKPIAIRGLNQNHNHDLKEIFKSAALRACRLPGPWRDSFTQRVEQGMKPELARLTMARKLAALTLVLWKKGEPYNPEKLIMQAA

SEQ ID NO: 389533 - protein, 344 aa, unidentified
MKIAVLGIDLGKNVCSLVGLDLSGAVVLRRRVRRDTLIDLVAKLPSCIVGMEACCGAHHLGRLFAAQGHDIRLMSPEYVRPYIKAQKNDDRDAEGIAEAATRPTMRFVEMKTEDQLDMQTLHRSRERLIGERTALINQLRAILLDRGIVVPQGKRKLEQYLVILMNEHDGERLSARMRMLVADIRAQWQELDRRIGEFDAEFVRWAKENEDARRLVTIPGVGVTISTALIAAVGKAETFEHGRDLAAWLGLVPRQSTTGGKPRLMGISKRGNKYLRKLLIHGARAALPYVAEKDTALGRWAKSLLSRVHQNVAVVAFANKLARICWAVLRSGQRFAAKGAPLVV

SEQ ID NO: 389534 - protein, 347 aa, unidentified
MSNTNIVTIGIDLGKNTFHVVGLDATGAITLRKKRSRNQLDQSLGNVPRCLIGMEACAGAHHLGRKLEKLGHQVRLLPAQYVKPYLKGHKNDFRDAEAIAEAAQRPTMRFVPLKSAEQLDLQALHRVRSRLVTQRTAVINQIRGFLLERGLPVRQGAAALRLALPQILSMPSESLSPQVVRLIQDLAEDWRYLDRRVALVTKEINKLAEQDAHCRRLMSAPGIGPIISSAMIAAIGTGDAFQKGRDFAAWLGLVPKQISTGDRTILGRISRRGNRYLRTLFIQGARAVLLRRQTWARHGFGAWLEAASKRLHSNVLVVALAAKLARMAWSMLAKGRDYEASFLGHTA

SEQ ID NO: 389535 - protein, 389 aa, unidentified
MFYIGIDIGKFNHCACVVSSEGEVLIEPFFFTNNLEGFESFIKAVKKYKSPRHIVGLEATGHYGDNIISFLIKRDYEVALINPLTTDAKRKSKIRKTKNDKKDTFLICSVLFDRDYTKVTQRRLDMKQARELTRYHASITEDINQKKNRLQKCIDIVIPEFNTWFKTKYSKTYMAVLKEFGSSYNLAEANLTHLKNVLTPKSKGHHVEIDASSLRDNAKKSIGENNEVIVLEIKMLIENIELLTSQLKTVDKKIEELAAKLDSPIFSIPGIGIYSGMSILSEIGDIHNFSSAVKVMGYAGVDPGTYQSGEYSAPQTALSKRGSRYLRKSLYQCILTVCKYNLTFNKYYRLKRSQGKSHRCAQGHSVRKLIRVIYKLLSENIPFDERQLI

SEQ ID NO: 389536 - protein, 337 aa, unidentified
MEPTTIAIDLAKRVFQIHFVDPDGTIHSKVLKRVQMVPFFANRPAARIVMEACGSAHHWARQLTALGHEVRLIAAQFVRPFVKSNKNDAADAAAIWEASQRPGMRFVAVKSADQQAMLALHRMRQQLVRIRVMQVNQLRGLLYEFGVVLPQGRRPSIQAAQTAIATLADQLPGMLIDSLRDQLSRLHLLDDQIQRIEQRIIEWRRGDEACRRISEIPGVGPLTATAAVSVIGEARTFRSGREFAAYLGLVPRQNGSGGKVKLGGISKRGDVCLRTLLIHGARAVISSSKHLPAHMRDLLARRPTNVVAVALANKMARTIWALLAYGRTYQPAAALPS

SEQ ID NO: 389537 - protein, 319 aa, unidentified
MTQSDLVVVGIDVAKDKADACIRSLTERKTCPATGPGQRSLIAWLRKHRVGKAVMEASGGYERVWARALRQAGIEVRIVDPKRVRSFAESAGRLAKNDKIDAEMIAWFAETFSEAPSQVDDPAHEEMKALVKGRKSLIDLRSRLEMQKEHEAPALVRKARARLLKKLAGEIATIDTAIGAKIKATPAFAERAEIIQSVPGFAEATAVTLLAGLPELGQVSDEVAAALVGVAPYDDDSGKRHGQRCIKGGRRWVRNALYMPCVGAATLNNPVFKAFYERLIAKGKAPKVALVACMRKLIVILNTMIARGEKWDPKRYQVV

SEQ ID NO: 389538 - protein, 428 aa, unidentified
MSPLPEQPFTAWVGIDWADTKHDICVQAAGESRRESGCIAHQVAAIDEWANALHRRFGGRLAVALELAKGPIVAALQKYDFLVLFPINPATLAKYREAFQPSGAKNDPGDAELALDLLLHHPERFGPLRPQSVPMRTLVSLVERRRQLVGDQNRLTNRLCDMLKQYYPQALEWFDDRGTVLFCDFLERWPTLRSVRQARTAVLETFFHAHHCRSASRISARIESIRSAAALTDDPAIIGPCRLHVLALVAQLRAVLAAIVQFDLEIAAVVHTLPDYALFEDLPGAGACLAPRLLAAFGEQRERFRSADELQKYAGIAPVTERSGKKSWVHWRLQCPKFLRQTFVEWAAQTITRSFWAGAYYRQQRAKGSSHHIAVRALAFKWIRILYRCWQTRTPYNETVYLNALAKRGSPLLGKQGDSVKMGSCSPI

SEQ ID NO: 389539 - protein, 320 aa, unidentified
MQTPSAVLNIGADVAKDAIVVACSEGSFPVREVANQRAAVLAFLQSLPAGSRIGVESTGTHHELFAAVAHQLGFLVFLLNPKDTHHYAKAVGLRGKTDRVDAELIARMIAHEHTKLHTWIPPTPQQREIDRLIKRRATLISLREAVAMSLHELDGFAGELKALRTRFNQLIARIDLRVKALVEASPERKQNFMRLCTITGVGPIVGTALVNTLERVPAKSADAFVAFTGLDPRPDDSGQHRGKRRLSKRGPAELRRLLYLAALSAVKTKPWRLLYEHYRARGLSSTAALVILARRIARTAWSIYTYKTEFDAARLTNPLT

SEQ ID NO: 389540 - protein, 388 aa, unidentified
MIYVGIDVSKYKHDCYILTDFGDVLNDGFSFENTAEGFGELQKELERCRNDEIRIGFEATGNYAINLKMFLERIGFDYMEINPLLVKEYMRSNTLRRTVTDPICAKTIAGYLSEKAYKPHQSSFYSKFALKQLTRLRNTLVTGRSRYLIQITNVLDCIFPEFKPFFKNKFSVTALYILAHYPSPKAISNMNSSSYETLRRVSHGKFSLDKFVKLKSLAKNTVGVFHDFYRIELKTLIDLHSQIDSKIVELESQITDIINDINPPTASIVGIGPISAATIVSEFGDVSKFNNPAKLLSFAGLEPGFFQSGTSEHHGHMVKRGSSPLRNALMNCSRSVKLHNEVFAAYYQKKINEGKSHIVALNHVAKKLVRLIFALETKGVMFDPSLSR

SEQ ID NO: 389541 - protein, 341 aa, unidentified
MDQILRIGMDTSKQVFQLHGVNGAEEPVLRRKLRRSQLIDFFAAQPRTVIGIEAGGAAHHWSRTLSAMGHEVRIMAPQFVRPYVKRGKNDAADAEALCEAMSRPAMRFVPTKSAEQQAALMLVSLRDRLIRGRTQLTNAIRGHAAEFGLIAPRGVDKIEPPLVRLTSEMTLPALARSLFSQLGAEFAETEARLKQVDAALLAWHRQNETSQRLTQIPGVGPIGATMLSLKTPDPNGFRSARHFAAWIGLTPKDHSTGGKIRLGAITRAGDETLRSVLVVGATALIRQARRGRGRRWPWLQRLLERKPPKLVAVALANNRRIAWKLMVSGQRYDTAHIMCGA

SEQ ID NO: 389542 - protein, 405 aa, unidentified
MKHDIPAPTGAIDWASESHVGAVVDHHGGLVACYDFSHTAAGLASMLRRFAQHGVAAVAIERPDGPVVETLLDADFDVFVISSRQLKNLRGRYGSAGNKDDALDAYVLADVLRTDRRRLRPLERDGDHTRALRALTRARKDLIAARVALSNQLLANLQITLPGAIGLFHQLDSPISLAFLRRFTTADKAAWLSAKRIDAWLSYQGYAGGKTGTALHAKFLAAPVGIRGAEADARGTVTLALVNAIEQLNTQIADIERGIRSDLADHPDAHIFTSLPKGGTIRAATLLAEIGDARGRFPTDDALAALAGAAPSTRRSGKLHSVTFRFACDKKLRDAIVNFADDSRHASPWAADIYRRARDRGHRHPHAVRILARAWIRVIWRCWQDHTAYQPIRHAGAQRLLDQAA

SEQ ID NO: 389543 - protein, 354 aa, unidentified
MKHIGMDLHSTTTDACVRNGKGKIVLRRQIATTKGELEKFILGIQGPKRVAVEESQLADWVTRVLKPHVDEVIRCQPRFNKLISESEDKRDKTDAESLSELLYMNRLKRVHHPEAVYRTLREAVRAYWIASREVTRAKNRLKAFFLFNGLPEKGDTIYCVRSRSRNLQKLEPLEGNAELARLLYERMDHCRQLKAKHIRVMRESAKPVKDAVHLLMTIPAIGPISAYTLVAYLENGRRIPNKRKLWRYAGLSLRRHQSGSTGTEGASHSGNRMMKQVVMSAAITIVARSESNALSALWEKEILQKVDPKRARRNLARKIVVIAQHLLRSKEAYSDERMSGKKASPQEHGCNKGE

SEQ ID NO: 389544 - protein, 371 aa, unidentified
MKKSSIFVGLDVHKNSIEIAIAEAGRNGEVRSYGKIDGSLGALDKVIRKLVSKGYELHFVYEAGPCGYEIYRHLAAQGFDCMVVAPAMIPKQSGNRIKNDHRDAQMLARLHRAGELSAVFVPFAEDEAMRDLTQSREDAKLADKKAKQRILAFLLRHGHHFNGRSHWSQAHLRWIAGIKMPHPAQQIVLQEYVDAFTECTRRVERLTGQIQQLLPQWRMVSVVKAYQSLRGVSLIVAATTVAEIGDMTRFTSPVELMSYLGLVPSEHSSGEKTKRGAITKTGNGHVRRVLVEASWAYRLPARVSRELRKRQEGLSQEICDISWKAQLRLCARYKRMLAKGKPKQVIVTAIARELCAFMWAIAHEVEFPIMA

SEQ ID NO: 389545 - protein, 427 aa, unidentified
MPYKIAGIDVHKRMLHVVVSDVQVDGEYDFTRRIFGSLPEALCSLAAWLVEQQVQEVVMESTAQYWKPVWGTLERYWKPSCQTRKGALATTGALHLAQALSNRGRRGRKKDFRDAERLVKRLVAHELVLSFVPDVEQRLWRTVVRTKYQLTRNRVQLQNRLEALLEEAHIKLSSLVSDLFGASARRMLGAIADGETNREALAALADRGLRATQEQLQDALGVCQELNPVYRRLIRMVLDEVASIDKRIDQLNQEAANLLRPHEDQVKRLAEMPGLGVDSAQQVIAEVGATAATFPSEKHLSSWVGACPGDEESAEVNRSRRSPQGNRHVRRILNQAANAAVKLKGSIFEILYRRYVPRLGHNQTIGIIAHKLCRLVWKILHRGIRYEERGPEVKKASKQKRTRKMIQALRRLGYRIEPGPSQSAITA

SEQ ID NO: 389546 - protein, 318 aa, unidentified
MTSPAAFVGIDVAKAQLDVCVRPGGDRFAVDNSPQGLAELLSRLQTLRPAHVVLEATGGLEHPAAALAGAGHHVAVVNPRQVHDFAKATGRLAKTDALDADTLALFAERIRPQPRPLPDQAARDFEALLLRRRQLLEMRAAEHNRLGSTAAPAVRASLQAHIAWLGRQLDKVDRELAEVIQASPVWRVKDELLQSIKGVGPTVSHTLLAVLPELGTLTRQQIAALAGLAPLNRDSGLRRGQRSIGGGRAEVRSLLYMAALSAARYNPWLRGFSERLRRAGKASKVRLVAVARKLLTIANAVLRERRPWDPALCGTERG

SEQ ID NO: 389547 - protein, 411 aa, unidentified
MHHKQRHIYVGIDLHKHHHTAVIINCWHERLGEIQFENKPAAFTDFFIKVRQLVPENMTLVFGLEDVGGYGRALATFLVDHGQMVKEVNPALSYAERNSYPTMQKSDSWDAECVARVLVNKLDFLPDAEPKDVYWSIKQLVTRRNALVKAQGALKNQLHVQLSHHYPSYKKFFAEVDGKTALAFWERYPSPSCLEGVRIDELTAFLQAVSHNTCSRKKAKEILELVKTDGTTTKQYQETRDFLVQSMVRDLRFKKQEMALVEGELRKLMKLLDYQLETMPGIDVVTASALVAEIGDIQRFPNANKLARYAGIAPVHFGSGGKGKDHKSKQGNRTLHALFYQLAIQQIQVAKESKKPRNPVFYEYYQRKRKEGKTKGQALVCIMRRLVNIIYGMMNHKTAYQLPNITERKVI

SEQ ID NO: 389548 - protein, 311 aa, unidentified
MPDDTIGIDISKATLDIHRLSDGKMMSFSNCPAGFKALSKFCAQTTVTRVVYEATGAYHGGLERALGAHLPLVKVNPLQARRFAQAQGVRAKTDAVDAKMLAAMGNAFALQPDEPATKIQHDLKELRSFRSGLIKDRTGIMSRLKTQTLPITCRQSKTRLAQVDKNIAEINAEIDRLINSNDTLANSMKILRSIPGIGAVCASTILIEMPEIGSMDRKQVACLTGVAPMTRQSGQWRGKSFIQGGRKVVRDALYMPALVAMRFNPDLKAKYQAMIKAGKPPKVALTALMRKLIELANALIKANRNWVKKAA

SEQ ID NO: 389549 - protein, 361 aa, unidentified
MPGTMTYVGFDVHARSTHAAAIDVMTGELTRMRFGAGIDAPVDWLKTLSGPVRACYEAGPTGYGLYRAAVAAGVGIEVIAPGLTPRGKGDRVKTDRKDAELLARCLIAGSLHPIVVPSMHVEAAREVTRAHDACRRDLMNARHRVSKLLLRHGRVYPEATTWSQKHRRWLAAQQFREPMSEFTWADLIACVDGLTARKKTLAERIGKLATDPAWWPTVARLRAFRAVDTLTALAVHLELGGDWARFEKATRVGSWLGLTPSRSQSGEHDYHGSITKTGSQLARRLLVEAAWHYGREPRVGATLANRQEGQPDHILQISNRCQHRLHHLYTSMRARGKHHNVTTVAVARELSCFLWAAATAP

SEQ ID NO: 389550 - protein, 393 aa, unidentified
MRKPKKHKKPLNDLSRSLTPFDPNQTLIAVVELSKKSWLVAGIIPGVEREPLKKLAADQNELLKLIERWRAEAEKAGHKITRIAVAFETGRDGFWLARWLRARGIEAHVIHAASVPVPREHRRAKTDRLDTQLLKRAFLGWLRGERDHCKMAAIPTFAEEDARRPHRERDTLVGEHTTIINRIKATLARLGIRDFNPTLKEAPKRLEHLCTPEGEPIPPNTLCELKRDFARKQFVAEQIQQIEKARLEQLKQAPKTRPNLMVLVLMRVIGIGIETADMLVKEILSRNLRDRRAVARYGGLTGSPDESGSQRREQGLARSGNARVRKGMIQLAWRFLEFQKESALAKWFEVRTKNARTSRKKMIVALARKLLIALWHLVRDGIVPEGVVLRPAH

SEQ ID NO: 389551 - protein, 404 aa, unidentified
MWYAGVDWADQHHDALVINEQGQQVGSIRVDHSLQGFAKLTTFLQQIIGSEPKEQMACIIETTHGLLIAALLEAGWPVYPVNPRTVDRRRSASGAKTDTIDAYLLAKTGRADFADLHRLTPDSAQVAELKTLTRDQDGLIQMQTRLVNQLTACLKAYYPVALELFAKLQQHTTLVFLQTYPTPQAASAASQEQIASVLKQAGHPNPSKAAPAIFATLKLPHLTADAVTTRTKSRLMLALVSQLMPLLEQIAAYDKEITTLFLTHPDHEIFSSLPRAGKRLAPRRLSEVGDDRTRYVGAASLQALAGTSPVLFQSGMYSKAHRRLGCIKPLRNALHQFAWQTTQSEPWAMQYYQRKRAEGKSHTVALRALANVWVRIIFAMWLHHRCYEAITFETAQQRHARRAA

SEQ ID NO: 389552 - protein, 426 aa, unidentified
MRVLYDRVAAIDVHKDMVKVAIRVPGAKRGTRKTDVLEFRTFYGVLQEMARELRRRGVTHVVMEASGVYTDPVYYALRELDFEEVMVINPAHAKALKGHKTDAKDAIRLLDLYECGLLSGSCIPDPDLREVRDLARYRMKTVQARTSEIQRLQKTLETAGIKLSSVVSDVTGGSATAMIEALISGERRGSVMAGLAQTRMRTAGKMADLSMALAGRFTGHHALMCRLHRDRITIFDDAVKDLDAKIAPLVARYAREAELLKTLPGFGDVIVAGWLGAIGPAPHQHFATASRLASWATLCPGNYMSAKKSKGGRTGDGGAYIKPLLTQAAWAAVRVPGRLQARFHRLVRKFGGPRNKGAQKRAITAIAHTLLKIAYSVLKTGKPYADLGADFYTRRESPDARQGYLMRQLQKLNPGCVITIIPAEAA

SEQ ID NO: 389553 - protein, 380 aa, unidentified
MDVHSTNFTLCSFEPGYGFEADKIFGQTQIKEDIFNSTVKYINKLKSMRPDVDVVCGYEAGCLGYNLHRKLKAKEIESVILAPTTMAVSRNCSKKKNDYRDAITIAKCLASSAYKAVYIPDDKDEDVRDFIRMRDDHKTALKQIKQQLNAFCLRHGHHYDKTKWTGLHLNWLRKLELSKLQRETVEEYLVTYETLTSKITALDIRIEDIASEERYAEKVNKLKCIKGIKTHTALSFVCEIGDFNRFKSADKFAGFIGLVPGECSSGNTERMLGITKAGNRHLRRLAVEISNTYRRGTVGRKSAALKERQKDMPKDVVAYADKATNRCQRKYQRMMFKGKNSNQAVAAVARELCCFIWGMMTGHHSRTAQAEASVYRSELD

SEQ ID NO: 389554 - protein, 327 aa, unidentified
MQYIGFDIHKRYTFYTQMDGMGQIQRQGKLTNSREALAEFFGDVAEPARVVIEASMNWYHLYDLLEELEIPVTLAHPLRTRAIAEAKVKTDKVDSTILAHLLRTDLVPAAYIPPRAIRDLRELLRYRAALVKLQTMVKNRIHAILLKHGYQCPYSDAFGVKGRVWLTTLDLRSVYQQALRGLLTVLDTLHAQIQEASRTIDQEAKATPMAQQLCTLPGVGHYTALLILAEIGEVARFPDPKHLVSYAGLAPSVHGTGGRVYTGHISKQGSTWLRWILIEAAIRAATRPGRFQHLYQRIAQRKGPKLARVVVARELLTTTYWMLRHAN

SEQ ID NO: 389555 - protein, 465 aa, unidentified
MAPKSKQVKSKERKRLPRSLKTIQPNAAGIDLGSREHWVCGPPREDGTPNVERFGTTTPDLVQLADWLKEQGVKTVAMESTGVYWIPLYEILDSRGCEVLLVNARHISNVPGRKTDMLDCQWIQLLHGCGLLRGSFRPSDDICRLRALIRERNTMVEQRSDWVRRIQKALDQMNVCVHHAVSDITGVTGMAIIRAMVEGERDPHALARLRDARCRKSEKQIAEELTGNWRPEHLFNLRQALKMYDQLCAVIDDYDAEILTYITKHQPENAGPTPAPRHSSKSKARNLAKRGQEPLRQALYGFSGFDLTTIDGIGVDTASVVLSELGLDFSMFPDESHFVSYLRLAPNLSISAGKKVPSKFKPTTCTRVSTALRMAALTLRNSKSALGGYYRRIAWRKGASVAVFATARKLAQLIYRLVRYGQAYVDTGVEAYDARFNRRRLKFYTKALKSMGYTVQPLTQTTSAT

SEQ ID NO: 389556 - protein, 456 aa, unidentified
MQKKFTKSKKEKKRVSLNQAWPLINPHAAGVDLGAREHWVAVPENGDAPSVRSFGTFTRDLEALADWLQQGQVTSVAMEATGVYWIPLFQILERRGFQVLLVNARQIKNVSGRKSDIADCRWIQRLHAYGLLGASFRPADPYCVVRSYLRYRDELVAARSVQTQHMQKALQQMNVQLTQVLSDVNGVSGLAIIEAILQGQRDPLELAALVDRRVKASLAKIARALVGDYRAEHLFVLKTACELYHAYEAKIADCDQELARQLAQLPDRVDVSTRPLPAKVGQTHISEQMRLGLYRKLGVDLTAVEGFGPLVGLTVLSEVGPDLTKFKTEKHFASWLGLCPDNRISGGRVLSCRTRRVVNRLSDILRLAATTLERSQTGLGAYYRRMKAKLGAAEGVTATAHKLARLLYRLLKHGEAYVRQGLADYEKKHADRKLKALKKTAASIGFDLVQRQAVTP

SEQ ID NO: 389557 - protein, 348 aa, unidentified
MNSLHYIGFDVHKKAISFCVKTAAGEVVEEGSVLAQREVLRQWASARPQPWRGAMEATLFSAWIYDTLKPYGEQLEMAHPAKMKAISSGKKKSDTIDARTIADLVRCNLLPACYVAPPRIRELRRLLRYRSLVVSEAVRMKNKMAGLLMETGALYVKEKLHRKKYFASLLEELEEVPESVIDLLRLSRGALEMFENTQKRLVRELLADPELAQRVERLMTIPAVGEITALTWALEVGDPQRFPSCSDAMSYCGLTAALKSSAGKQQRGPISKQRNHWLQTTLIEAAKLAPRWNPQLAALHARELERGHRNRATLAVARKLVTYLLAVDKSRQPFQLRVPLEEPTQKAA

SEQ ID NO: 389558 - protein, 348 aa, unidentified
MTVVFLGIDLAKNVFALHGVDAAGKPCLVRPQVRRDQLTELIAKLPPCTIAMEACSGAHHWARTFSAFGHTVKLIAPRFVIPFRMGGKRGKNDQADAAAICEAMQRPAMRFVPVKSVDAQSMLALHATRQGFVQARTATINRLRGLLSEFGIVLPLKAQTIRKRAAEALEGLPGWARFACTDLLSEVGRLDERIDTYDTHIRLSAQHDATCRRLMHMPGIGPTIASALRASVGGGHDFDNGGQLASWLGLVPGQYSSGGKNRLGRITKAGDSYLRMLLILGARAVLAAAAGKKDRISRWAVSLAERRGYWKAVVAIAAKNARMAWAMLSKGEDFKPVEDALPSDVAPA

SEQ ID NO: 389559 - protein, 410 aa, unidentified
MSLFCGIDWATEHHDVAVIDDDGRVVARGRVSNDAPGFAAPLTLLAEAGDSAADPIPVGIKTDRGLLVAALRETGRVIYPINPLAASRYRARYAVSGAKSDATDAVLLANIVRTDPGAHRPLPADTEAAQAIRVLARAQQDAVWARQQIGNQICDLLKDFYPAALVAFAELADGGLARRDARTILTAAPTPVQAAKLTPARLRRLLLKAGRKRYLDRDIERLREVFTDTYLHQPPAVENAMGIHLTALLGQFDAACAAADALAEAAIAHFEHHPDAEIITSFPGLGMLAGARVLAEIGDDRSRFTEARGLKAFAGSAPITRASGKKTVVLHRHIKNRRLAAVGPIWALGSLRASPGARRHFDARRTAGDWNHQAQPHLFNKFLGQLHHCLHTGQLYDEHVAFPPPLQLAA

SEQ ID NO: 389560 - protein, 406 aa, unidentified
MAGAVCAGVDWAKDAHEVLVQDADGERLWGETITHDEAGIIRLCRTLVTLKVARVAIERPDGLLIERLLDPGLTVLAIHPNKVAAARDRFRAAGGKSDRFDAFVLCELARTDSHRFQPLVPDSDQTKALRALTRGREVLVEQRVALCNQLRAELERFWPGATEIFRDLDSPISLAFLERYPSPADARGLGEKRLAQFLARHGYCGRKDPAELLARLRNAPSGRAADLEADARRSLVLALVAALKPIVEQITLLTSEIAHAVHAHPDGHIFLSFFKHPKSVITAATLLAEIGDCRARYPTAEHLAADAGMAPVAVESGRRKVACFRRGCDHRLRHATSTLADSTRHWHPWAHRNYADARARGHDHPRAIRTVGRAWTRVLWRCWQDHVPYDPERHNTLQRQLLIVKG

SEQ ID NO: 389561 - protein, 480 aa, unidentified
MNVKTNKTKKQANVENQAVNLLSKEELCKRIEGVEKELKSYTWRELETNGKFAKNDKLSFITDDMLIVGCDIGSETHYIRAIDIRGRELSRKAFEFSNTAEGFEAAKAWMLELAVQNRKSQIVLGLEPTGHYWFTLAAWLITAGISVVQVNPYAVKQSKEIEDNSQLKDDRKDPKLIANLVKDGNYGMPYLPEEIYADMRRLSMFRDQLTEDRIRNINRLHRELKIYFPEYMDAFGKIDGSFALEVLKVSCIPSEITELGTEGLRNIWHEAKLRGRGYSRASEIVEYAEKSVGLKDGSSVGRETVKWFAKEIMKLDEQLAWIENTLHKKCMEIPYAENILEIKGVGENILAGIVAEMGDISRFDDVKEIQKLSGMSLVACSSGKHKGQTKISHRGRKRLRYWLFQAAKSAVSHAEEFKELHVYYTTRADNPLKKMQSLIVIACKILRVIYTILKTGRDYDPQKMLKDIKRPKAALAAKAA

SEQ ID NO: 389562 - protein, 387 aa, unidentified
MPQRDDLSRSLVPFQQDGTLVAVVELSRSSWLVAGIVPGIGRHPLKKLAPDEEALLRLLQRWRDEAAGAGRTITRLAVAFEAGRDGFWLARWLRARGVEAHVIHPTSVAVSREHRRAKTDRLDTELLKRAFLGWLRGEPDHCSMAAVPTLEREDAKRPSREREGLVGERTRIVNRMKGALARLGVRGFKPGLRKAPERLAALRTAEGAPLPPNTLAELRRDMARLRLVREQIAELEAARLQRLEEEPGSRPHAMVRLLARVIGVGVETADMLVREVLSRDLRDRRAVARYAGLTGSPDESGRRRREKGLAKAGNARVRHGMVQLAWRFLLFQRESALARWYRERTADARGGTRKTMIVALARKLLIALWRLVTTGAMPEGVVLRPAA

SEQ ID NO: 389563 - protein, 361 aa, unidentified
MFPYRTFIGLDVHARSVVAHAINIDAEQPVRKKFPYDPFQVIEWARTLPGPTTVVYEAGPTGYDLARHFSDAGIECVVAAPSKLQRPTGDRVKTDARDAAHLAKLLQLGQIVPVAIPTITAETARDLVRAREDCRHDLMAARHRLSKLLLRHGYVYDSTTWTQKHLAWCRAHRTGTPAYTAAFDAAYETVEQTLTRRTRLDAAIKEMAADSEFTPVVHRLGCLRGMGTLTAFALTVEIGDWDRFTGKTIGSYLGLVPSEYSTGGSRRLGAITKTGNSHARRLLVEAAWHHRREYRPGYSPSLEKRLALAFPAARARGQVGNERLHRQWVRHTVRRKKSTVACVGIARELAGWCWSLATLTE

SEQ ID NO: 389564 - protein, 386 aa, unidentified
MQKLNDLSRCLTPLEPDGTLIAVIEMSQSSWLVAGIIPGVERQPLKKLKVDESTLLNLLHRWREEAEKAGYRIKRISVAFEAGRDGFWLARWLRARDIEAHVIHASSVAVSREHRRAKTDRLDTEMLKRAFLGWLRGERDHCKMVAIPTIKDEDAKRPNRERESLVGEQNRIINRMKATLIRLGIRGFNPKLKKAAERLEGLRTPEGEPIPLNTLAELHRDMVRRRLVSNQIRQIEDARLEHLKQAPSDGPNAMVRLLARVIGVGIETADMLVQEVLSRNMRDRRAVARYAGLTGSPDESGTKRREKGLARSGNARVRRGMIQLAWRFLMFQKNSALAQWFQTRTKNARGTRKPMIVALARKVLIALWRFVREGVVPDGVVLRPAS

SEQ ID NO: 389565 - protein, 347 aa, unidentified
MMVVLGTDAHKRTHTMVAADHSGAEIGSITVSATSEGHLRALKWAAQWDDRKWAVEDCRHLSRRLEADLLAAGELVVRVPPKMMAGARRSARTRGKSDPIDALAVARAALREPDLPVAQLDGPSREVKLLVDYREALVRERTAAQNRLRWRLHELEPGFDPPAGSLDVYRTLDQVEELLGTHQGVVADLARAEVARIREITREANRLRAEITSRVATIAPSLLELPGCAGLTAAKLVGEAADITRFRNRDAYAMFAGTAPIPVWTGNSEKFRLNRGGNRQTNAAIHRIAITQLRIHPPAQELVARHTSNGKSKRDALRILKRRITDVTYRTMIKDTRAHQAAQPVAA

SEQ ID NO: 389566 - protein, 360 aa, unidentified
MRIIGCDLHARQQTLAMLDTESGEVVNRTLMHEGNEVREFYSQLPRPVLVGIEAIGPMQWFLNLLEELGIECQVGDAAKIRAAEPRKQKHDRRDAELILKLLVEKRFPAIWMPSRELLDLRALLLHRHQWVRLRTQVQNALQAIALANGLRRGPGLWSYDGQAKIAFLPLPPHASLRRSALQAMYGHMEEEIEKLTVQVAEQVEHRRGAQLLMTHPGVGPVTALATDVFLGDPQRFADGKALASYVGLIPEERSSGRRRRLGRISKQGNPLLRFLWNEAGAHAARRDPELRRFYRRKLMQKGLGKARVAVARKLGIRLWIMLRDQIDYQELCCRGQKQSGAACAGMPEVGNGANRHRPVE

SEQ ID NO: 389567 - protein, 406 aa, unidentified
MTHQPSSPKRFVGLDVHKHYLIAVAVDADKNEVMPPRRVPLTHLDDWVRKTLTPQDAVVLEMTTNTFQLYDDLLPHVQSVTVVHPPYVALITRAQVMTDKIAARILARLHAAGLLPPVWVPPDEVRDHRALVAQRAKMMRLASQARNRLHAVLHRHHLLPPEGEAFTPDKHTWWLALPISALERARVQSDLDTLVFAWTQVEHLEEAMLGLAAQDERAVLLLQLPGVGLITTLTLLAAIGDITRFPTASHLVGYAGLGGRVHDSGQTHHTGRITKAGRRDIRAAMVEAAHTAARTHPHWQQELARLELRLGKNKTIVAIARKLLVAVWHVLTNGEADRYATAEGTARKLLQHAYRLGAENRQGLSTGEYVRAQLDRLGVGVELKAVPWGKKRVLPLPPSRQKGSAG

SEQ ID NO: 389568 - protein, 341 aa, unidentified
MKNKSFIGIDISKNVIDVSIFCEETPIKDFSHDVFNNSRKGFGEMCTWLKKNHVVLSNSLFGMEFTGSYSMELEKFLNTRNYQFCMLSTHVVKHYPMGPKDKSDKIDSAKIADFLYRYNGTECVKPYNMPDKTMQRLKALMNERRFLVEQRTCFMNRRQLCTTKEDTQLYDGYIKKLSHDIENIELEEQKLLATDDSLLSTYKNLLTIPGIGFVNAINVIVITRNFTAFETARQYASYVGVAPHFRTSGTSVKWRPRPSARCDGQAKADLSMAATVVVQYDAELQSFYNRKLGGKQDSDTKRKALNAVKFKLVLRMFAIGKQNRKWEPLDSKSSNEKLAIS

SEQ ID NO: 389569 - protein, 315 aa, unidentified
MTQTNITTAGIDTSKAKLDIAVHGRTEGWQVANALPGWRALAANLAKAGVTRIGIEATGGYERGVVEHLRSAGFTVLLLQPLQVKAFAKVHLRRAKNDALDAVLIAACAAALDPPEIAPDPRLTELADYLTFLEQIEEDIRRFKTRLEHIGEPALRRIVDSDIARLKARKAAQIRDIAKRLRAYDDLAKRLKLVLSVPGIGERTALAIVIRMPELGRVSREEAAALAGLAPFDADSGQHRGQRKIAGGRSRLRRSLFAAALPAAFRWNKALIALYARLMAKGKVHNAALIACARKLLIYANTVVQRGTPWTEKAA

SEQ ID NO: 389570 - protein, 389 aa, unidentified
MKIYVGIDIAKLNHFAAAISSDGEIIIEPFKFTNDADGFQLLVSKLESFDKNSIIIGLESTAHYGDNLVRYLVTELYQVCVLNPIKTCQMRKNNVRKTKTDKVDTFVIAKTLMMQDDLRFITFFDLDMMDLKALGRFRQKTIKQRTRLKIQLTTYVDQVFPEIQYFFKSGLHQHAVYALLKEAPSPKEIASMHMTHLANLLKVNSHGHFTKELAKELRVLAQKSVGANDSAISIQITQTIQQIELLDSQLEKIEAEMTDIMKFNDSVIMTIPGIGYINGGMILGEIGDIHRFSNPNKLLAFAGLDPSVYQSGNFQAKTTRMSKRGSRVLRYALVNAAWNVVRNNATFKAYYDAKRAEGRSHYNALGHCSGKLVRVIWKMLTDNVEFNLK

SEQ ID NO: 389571 - protein, 330 aa, unidentified
MSLFIGIDISAKSFDLVVRKQNKSNKSKCFEQSFGGHQSCLNMLKKLKPTLIVMEATGVYYLDLAVHLYNAGLPIAVINPASFKRFAELMLKQSKTDSIDAALLAEFAQRMEPRLWVAPSEQCLALKDLGRQVQRLTADKAKAKNRLHAFQSKKATLAILVKDMVKSIDNYEKRISLLTDAALEIIHHDEALSRQFQSMMSAKGIGQTSAIAILAEFSILPKEMKAKQVSRYAGLDVKLSQSGTSVNGASRISKAGNAYLRAALFMPAMSAVRHDGNAEAFKSALVSRGKKKIQAIIAVMRKYLTGLWSVYLSGETFDSSKLFSPVHKKA

SEQ ID NO: 389572 - protein, 384 aa, unidentified
MLAVTSLSERPAAIRVDLGAIFVSMELSRSKWLITSLAPGGGERMSKHTITGGDLPALFERFALLQEKARARTGQDFPIVVIQEAGLDGFWIHRALEKEGIESHVVDPASIAASRRARRAKTDKIDGEALVRVLLAYKRGEPRVCAMVRPPNPEEEDRRRIMRERKALITERTRHVNRIKGLLFAQGVMGYEPTRRDRRKRLNTLRTGDGRELPGHLKGQILRELDRLELLMSQIKAIEDERDEIIVTHEAAGPAAMLMKLKGVGPEFASVLWSECLYRRFENRRQVAAYAGLAPTPWQSGQIDREQGVSKAGNPRLRAMLIQLSWLWLRHQPKSALSLWFEERVTRNGGRLRKPTIVAMARKLLVALWKYVSSGVVIEGAVYS

SEQ ID NO: 389573 - protein, 310 aa, unidentified
MEAIYVGVDVSKDRLDVAVRPSGEAFVVTRDGKGLNELVERLQGMAPTLIAVEATGGFETIVAAAIAGANLPLAVVNPAQVRHFAQAVGQRAKSDPIDAAIIARFAEAVKPEPRPVPDADARLLMELVSRRTQIIEMLVAERQREKRADAVRVRKSLARHIATLEKELPVIDRDIDTLVRGSPVWREKEDLLTTMPGIGNTLARTCLAHIPELGSLDRRKIASLVGVAPFTRQSGRWRGKSMIGGGRAAPRAAVFMAALTASRCNPVLRAFYRGLLARGKPKMVALIAVARKVLTILNAMLSDKKQWQPA

SEQ ID NO: 389574 - protein, 347 aa, unidentified
MDHYTHYVGIDVSKHTLDVMLWHRHQGAIIKAACQTSNDAPGHQQLVQWLTEQDAPIETTVLCLEHTGRYDDALLEHLTLGGWICALEKTTVLQKVKPEHHRKDDAFDADLLAEYAYRYRDKLSLYQACDPVIEQIRLLYGERRRLVTHRATVKQLQREQGYNRAGRPSQAEAFAQKLWSEQRAFYDGQIKALDQKIDDLVASDEGIRHRYEQVKGIDGFGPKTSLKWVCLFYGQQHLDARRISSRYGFAPHGEGSGTSRHRPERSTGHGSGEVRKLLTLCARSAGTHHEKYRRYKERKLAEGKDSQLVTNNMINKLIRVACAVWNEDAVFDPNHVSRFVQNAIATP

SEQ ID NO: 389575 - protein, 389 aa, unidentified
MFFLGIDIGKNSHVASLIDDKKKVIFKAFSFSNSTEGASSLIKKLEPFCDSLDIAMEATGHYWINLFSFLLQKNFSVHLINPIQTDGWRNSTEIRKRKNDTIDSILIADLLRYGDFIESSLSNEDYLSLKNLTRFRSYLISSTGDLKRKTIALLDQVFPEYEKCFSNVFGKTSKEILLSFTTPQEFENISSSKLSKALENITMKKFAKKKIEELSEKAKTTIGVKFCLDSFSLQIKMLIEQISFIETQVESIEEEISTIMTKLNSPITTIPGIGPVIGATILGELGDISRFSNASKIVAYAGLDSVVSQSGNYEAKSMSISKRGSSYLRKVLFQAALIAEFCDPVFSDYYQKKIAQGKHHLVATNAVARKLCYTIFAVLTKNEAYKIQQ

SEQ ID NO: 389576 - protein, 310 aa, unidentified
MSDIFVGIDVAQDHCDMYVYPLAQKITFGICDMEDVISRLRDFQPAMIVMEATGGLEIPVAAELVAADLPVTVVNPRQVRDFARALGILAKTDAIDARVLALFGEKVRPTSRPLPDARMRALRELVTRRQQLVEMRTMESNRRRMLRSERASTSIQFMLDTIENEIHKLDLEIKKHITKSPIWQKKADLLKSVPGIGNTTAPLLVVMLPELGKLNRRQIASLVGLAPMNRDSGTLRGHRTIIGGRRMVRTALYMPTICAIRFNPIIRRFYERLRTAGKPPKVAITACMRKLLIILNAIVRKNVPWVPYIA

SEQ ID NO: 389577 - protein, 399 aa, unidentified
MLNPVSSQLRVGVDVGSRCHSVAIGLSDGSLLEEFDIPHTAAGFEDFFARIERHAKHYPDPIAVAMEGYNGHVRPLDSLVRARGWQLFNVNNLKLARFKEIFPAAAKSDRIDSRKTLELFQLGDHLPMAGEVLQEVMATPEENNVLKRLSRRRRRLVNERARVINSMQADLQAVAPGLLEITQDVGNLWFLNFLTCRKDILKLARLRRSSLLKVPAIGPTYADRIQAWQQGACFGPDARLVGDMIRQDAERILELKQQIKVLEDQMAHVAKRSSMACQLASIPGYGAVCTAELAGEIGTIGRFRNEASLALYLGMATLDNSSGKFRGSKAPKHVNARAKAAMMAAVDHHRKRVPQSQRYYEKKRAEGKKHNQAIRALGRHLCRVIFKMLSQERLYRIDP

SEQ ID NO: 389578 - protein, 454 aa, unidentified
MTREPQAPQTVALLEHEHQTLSMEEAPHRRRRVSLQEKGEGLKRIVERCAGLDVHKASITACMRTPGEGGEPHQQIRKFSATTRGLLQLRDWLASFAVTLVGMEATGVYWKPVYYMLEDDFELWLLNARHLKNVPGRKTDVKDAEWICRLVEHGLVRPSFVPPKEIRELRNLTRYRKAQIEERTREVQRLEKVLQDAGIKLSSVATRALGVSGRAMLDALTSGTTDPEILAELARGRLRSKIPALREALEGRFSAHHGLMVGRMLAHIDYLDESIAELSMEIERVIAPFSEEVKLLDTIPGVDRRTAEVLIAEIGANMSQFPTHRHLASWAGMCPGNDESAGKRRSGKTRKGSKWLRSALIEAAYAAARSRGTYLAAHYARLKGRRGPKKAAVAVGHSILVICYHILQRGEPYQELGEDYFNRRCSEEAYRKRLVRQLERLGHRVVLEALPQPA

SEQ ID NO: 389579 - protein, 348 aa, unidentified
MLTYLKLKPKVMENSPQCQWVLGIDVSKDSMDACLIRQTDGQLFEQKFHNNLSGFKHLKSWCKEKQCECKGQTLCCMEHTGLYTRPLVHYLVSREVKVWLESSLQIKRSQGLVRGKTDKVDAQRIARYANVYQKKAQVIQISSLTLEKLKDLQANRTRLMKALQSLRVSAQELQQFDPDSGKVIEKVNREAIRGLETSLDKVDEQILAYIRQDEALKQKYDLMLSVKGVGKVLAALLLVYTQGFTRLADSRKLACYSGVAPFAYQSGTSIRGKTGVSKFANNDLKRVLHMAAVSSIQHDSELHLYYQRKVQEGKNKMSVINAVRNKLLSRVVAVIKRGTPYQLQLKNN

SEQ ID NO: 389580 - protein, 355 aa, unidentified
MKFYCGIDLGARKTHVCLIDEEDHKLLDKKMDNNLGVIECVLRPYKSSLEVVAESTINWEWLVYGLQKYGYEVKLAHTLGLKAITWSKKKTDTWDAFTLAKLLRGRLIPEAYIYPYELRPVRDLVRERIRLVTKRATEYGAINRTLLKYNIQGFDRNAVKHLSEQDMHELYHHPFVRTKATMELQRIELLTEQIRHIEKAVFARARQDPLFSLLQTVPGIGDILALTILYEVGDIGRFAHTRAFCSYCRVVPGIHQSSARAYRSPNSKQGNRYLKWSFSQAALLSIRYYPQIRRLYDRLAAKRKKAARLVARSIIAHKLAQAAFHVMKQQVAYNEELLLRFSGDYAEGKAVTPSL

SEQ ID NO: 389581 - protein, 308 aa, unidentified
MLGIGIDVSKAVLDVAVGGQEQVRRYANDAKGVRRLVKWLHTLTDVRIVIESTGGYEVAVADACVASGLWIARVNPRQARDFARAVGQLAKTDSLDARVLAEMAATLHARLRPHQVAPSWQAELQAWLRRRRQVLEALQRTRQQWDMALPSLRRLMAKTMTVLRKEMVAIEAHLTELTQAHSTPALRSAKGLGPVFQTTVLALLPELGRLSRREIAKLVGVAPLNNDSGKMLGKRRIYGGRADVRIALYMATLSAVRWEAGLREHYQQLRARGKAAKVAMVACMRKLLGILNARRREELRAEELSALA

SEQ ID NO: 389582 - protein, 284 aa, unidentified
MRKHTTFVALDDSKRTIVAGILRPGVQGPELRQLPNEPRHLRHLVTRLKREGPVGICYEAGPAGYGLYRQITALRVPCQVIAPALTPAGDRIKTDRRDAAKLVRLFPAGELTPIHVPDEAAEAARDLLRCREDVQEDLLRWLHPLVKFLARHGRIYREWRHWTWLRSQRFALPVLERTYQEYRFTVEQLVARRAALEQEILALAETEPYRERVGWLRCFRGIDTRSAMGLLTEVGGFPRFPQPRELMAYLGLVPSEDSTGGRERGGSITKAGNTHARRILVEAA

SEQ ID NO: 389583 - protein, 348 aa, unidentified
MEMVGGLDLHRSQITFRTVDLRTGEVKRGRIYPGAREAFREWLERFEAGTEAHFALEGTTGWRFVAEEIERRGFVAHLADPAELSTLRGPKRRAKTDHADCELMVNLLLEGRLPESWIPPAHILELRALVRLRKTLLDQRTEWQQRLQAQLFHQGVVAGLRLRSPQDRRRLTGVEMSPAGRQTMGTGLVMLDDVDAQLEPLSAQLVALAKAQPGCRALEHELYGVGWLTAVAVVAELGDCRRFHSADQAVRCSGLDITVHESNGKRPGGHLARQGPQVLRWALFEAAQCAARKGSPDHAYYLKVRERIDHNRACLSVARKLCRRACHILRDLGDAAMAPPASQEPKAA

SEQ ID NO: 389584 - protein, 386 aa, unidentified
MPQLNDLSRSLVILEQDATLIAVIEMGQSNWLVAGIVPGVERSALKKLAVDESALLKLLNRWREEAEKAGHRIERIAIAFEAGRDGFWLARWLRARGIEAHVIHASSVAVSREHRRAKTDRLDTELLKRAFLGWLRGERDHCKMVAIPTLAQEDAKRPNRERESLVGEQSRIVNRMKAALARLGIRGFNPKLKKAVERLDGLRTPEGEPIPPNTLAELKHDMERRRLVRSQIRDIEGIRLERLKQAPGDGPHVMVRLLARVIGVGVETADMLVQEVLSRNLRDRRAVARYGGLTGSPDESGKKRREKGLARSGNARVRRGMIQLAWRFLMFQKGSALAHWFYARTKNAPQTRKTMIVALARKLLIALWRLAREGAIPEGIVLRPAL

SEQ ID NO: 389585 - protein, 378 aa, unidentified
MKKGELSDKKVVINQQPNRRFAMKSYTTKTIYLGIDVHKKTYAVTAICDGQVIKKDTLRADPSTLISYCKKYFSGAEIYSAYEAGFCGFHLHRHLKSEGINNIVVNAAGIEVAVSDRVKTDKRDSLKLATHLSQGKLKGIFIPSIEQEDHRAVTRLRDKFVCERSRLACQIKALMYQHGLIKADETRRISPKWIKELETLTLLSGLKFALRQYCSLWLHVNEKIAEIDHEICIQAQTDGSIEIMYRSVVGIGPTSARVLANELGDMSQFHNERQLFSYVGLTPSEHSSGEYVRQGHITRQGKPILRKILIQVAWKAIKLDDSLKRAYEQLAKKVGAKRAIVAIARRIAGRTRACFRTGELYRIEGITIEQEKNAVYEE

SEQ ID NO: 389586 - protein, 419 aa, unidentified
MSFKILKNNCCGLDVHKTWIYAYIGITDSFKRTEYKQARFSSFTKGLQELCLWLAKYNCIDVCMESTGKYWIPVFNVLEKNNIFVTLSHPKYTKPQKGNKTDRKDAKWICDLYMCGMVKPSFIPPADIRQLRDLVRYRFKLTCMITGEKNRAHNCLTVSNLKLDDVFSDIFGKSSRSITEQILQHPGEVFDVAPFVDSRCKTPIEEIQAAVDGAISHEQAVKLRQCLKHIDELEMHKAEIEREIFRLSQKYESVLDLIRTIPGFDKNPLTAIQVLSEIGADMSVFPTAKNLVSWAGCCPRNDQSSRKIKSTRISRAGSYFKPVLVQIANALIKSKKHPEFTTRYRRIKARRGHKKAIIAICRMILTAIWHILSDLKPYTPEGFLESHPVKEGKVLSSSQALNFFKQRGYIIKDEPLSVS

SEQ ID NO: 389587 - protein, 415 aa, unidentified
MALKIVYQICCGIDVHKTFVVACIASTNKQGVTTYKRHRFSTFTQGLKELLQWLLDNHCKDVCMESTGKYWIPIYNVLEKDCNIVLAHPKYVKAIRGKKTDKKDAKWIADLFKHDLVAGSFMPPTDIRQLRDLMRYRFKLTCFMSSEKNRLQNCLTVSNIQLASVVSDTFGKSSQRILDKILENPDDTSFDIEPLIHGSMKKKLPELELAIDGFITPEQAGKLKVIKKHFEDLESRKAELEKLILALASPYQQELDLILTAPSFKNKFTAIGIISEIGVNMEAFPSAKHLCSWAGLTPTNNESAGKKKSVRVSKAGCYIKPLLVQCANSVVKSEKHPEIRNRYLRLRKRRGHKKAIIAIARMLLTALYNMLKNKEPYNAELYRKSDALPVNREITIEQAILIAQFQGYKIKSAAE

SEQ ID NO: 389588 - protein, 411 aa, unidentified
MGLLHEALPGSTLVVAIDPGKVSNRVWLSTGEAGEVVPPLSLPVLRPGLEQLHRLVVDHAGPAAPVFAIEATGGLHQAWLRELNQRFPGSVRLFAPSETTAARAQLGSRRFKTDDRDCAALTYLARQGQGRPVPDQEQDALAAAVRHRRGLIGEHKVAQQRLHDQLHALCPGLAAPEGHGRALPVDSVIGQAVLDCAAAFAGRPPSVRSLRARARGRVLTSEAEFWVHRWRACLPPPADASARAARLARSLARWRAIDADIAAVDAEITALLAGSAGQILTTLPGVATSRAAAFAAFSLPIDRFPSAEHLYSATGLAPGSYRSATINRRTPISRQGLPEHRDALMNLAWGLSQHCGPFIDRAHELRARGLRPIPVRIALARHACRLAYTLLQTQQPFDEQRYRRARHQSER

SEQ ID NO: 389589 - protein, 313 aa, unidentified
MNQEKYIGMDVHAATISAAVKNAEGKLLMECVLETKAATILEFIQGLRGTLALTFEEGTSAAWLHDLLKPHVSRLVVCDPRKNALMRDGNQNDRVDARNLAELLRTNQVKAVYHGEHGTRALKELGRSYLTLTQDTTRVMNRIKSVYRSWAIPCAGTSVYSRRHRAEWLAQLVEPGVRIRAEHLYEQLDSLEPLRQAARRELLRESRKHAAVKLLRQIPAIGPIRSALLVAILQTPHRFRTKRQLWAYSGFAVQTYDSGEYRFVRGKLHRNRERITVHGLNRNHNHDLKNLLKGAAWKKGVSFDPKQLQRQTA

SEQ ID NO: 389590 - protein, 452 aa, unidentified
MAKLAKKKQTAKGLRFEVVNPNAAGIDISPKEMQVCVPADRDGDCNRTFDVYTEDLHYIAEWLKACRIDTVAMESTGIYWLPVFRVLKDAGFDVILVNASDVKNYSGRKTDADDAEWLMMLHSYGLLKPCFQPENIARTMRNLIRHRDNLIRSASREVLHLQKAMEQMNLKLDNVFSDILGKSGQAIIKAIISGERDPKKLSALADPRCKTSKEEIEKSLQATWDEEHLFEMKQSDTLYQTYQQLIAECDDKISEIATKYAAMVDAPKAELLRSGKYNTKKNQIGFDVEKAAFELWGVNVMRIPGMSRASLLRLLGELGQNFTTKFADVSHFLSWANLVPNNKISGGALLSSKVPKKKNPVGIVFRQAANTLKAAKCPLGDYFRHIRAKGGHLQAMVATGKKLASIFFLMVQRKVEYDENIYANQRKAELQNKVLHLQKRLTRMQLELANCG

SEQ ID NO: 389591 - protein, 360 aa, unidentified
MSDGSKGRPKITAGLDLGGKYSYLFLIDQESGEVVEEGRLRTTPEALRRRFGSEQPMRIAIEAGTHSPWVSRVLEECGHEVLVANARKLRLIYANKRKTDEVDAENLARLARLDPKLLYPLKHRGEDSQAHMAIIRSRQALVGARTQLVNHVRGAVKSFGARLPKCPARSFHKRASEHIPEALLPALGPILEQIGSLTERIRDYEPQLEAISKEHYPETELLRQVEGVGGLTALTFVLTLEDPYRFERSRSVGAYLGLVPATERSGERDPQRRISKEGDQMLRKLLVGSAHYILGPFGSDSDLRRHGEKIASRGSKNSKKRAAVAVARKLAVLLHRLWVTAEVYDPLYNAHRSQEREEAA

SEQ ID NO: 389592 - protein, 353 aa, unidentified
MANPMANLTIGVDLGDRYSELYVVDAAGACVETGRIRTTVAGLEQWFGGRPPARVVLEAGTHSPWASRVLPQLGHEVLVANPRKLRGLYENDSKDDRVDAEYLARVGRLDPALLKPITHRGEAAQADLAVLSSRDVLVRARTLLINHTRGVVKALGGRLPRCSAEAFARRVGPHVPPAVRPALAPVLEQLQQLTTTIRGFDRAVEHRCAQSYPETARLRQVTGVGPVTALAYVVVLDDPTRFRRSRAVGAYLGLRPRRSQSGEQDPQLRITKAGNPFLRRLVVQAAHYILGPHGPDCDLRRHGERIAARGGKNAKKRAVIAVARKLAVLLHRLWISGAVYEPLRHSTALAQAS

SEQ ID NO: 389593 - protein, 383 aa, unidentified
MKAVCGLDVHKDSIFLCILHSDGELFEQVFGVLTFQLEEMRKLLQKHHVFEVCMESTSIYWIPIWRVLSPHFTLRLVNPYFIKQLPGHKSDVKDAQWIAECTMKELVRGSFVPPEIIQQLRQYDRRIFDLNAEIVRKVSKVDGVLQRCTIRLSNYVSNIECKSYRDVVRRLSEGVTNPNELMKLVHGRIVNRHGAETILASLTGVVSQAEIDVLRQLHEEIDIAESHRNECQQRMLEICEKHFPEELERLQKIPGIKERAATSLIAEIGTDMSKFETANHLASWSGLRPRNDESNKKIKSRKITHGNVYLRNTIIQCAWAASRQKDSFFSRFSYHQTIVRRKNKMKVIVAVARKLLITVWHVLHDKTDYVDFKPDREESANNG

SEQ ID NO: 389594 - protein, 348 aa, unidentified
MDNATRWIGIDLHRRRSQVAVIDEHGELALSRRIVNDRETMFELLGDPEGAHVVLEATYGWEWLAELLEEAGYDVHLAHPLRTRAIAAARVKTDAIDAKTLAHLLRAGFLPEAYIAPRELRDLRELLRHRATLTRMRSAVKNRVHAILAKHGIPREHSDLFGKSGREFLATLELRDAPRRRLDSLIALICDFDREIETTTAEIEQRAKADDRVDVLTQIRGVGRYTAMLIIAEIGDINRFPTARHLCSWAGLTPSVRSSDGKARLGHITRQGSPALRWALVEAAQKITTGSGPLREKFERIAKRRGRKIAKVAIAREILTLAYYGLRDGEIRCLARRSRASAKEKLAA

SEQ ID NO: 389595 - protein, 403 aa, unidentified
MISVGIDVSKGKSTVCILKPYGEIVSKPFNITHTQKDLSELSSMLFRLNDEVKIVMEATGIYHLPVLTYLQEKGFFVSVINPYLMKSYRNESLRKAKTDKIDSRIIANYGIDHWFKMKEFQTSGEIYEELKLLGQQYRHYMKLHLLSLAELTHLLDLTMPGIKNLLASWNETNRKDKRSDFVERFWHYDVITSMSEQEFTEEYILWAKEKKYVPSQEKAKVIYTLAQESIPTLPSETSSIKMLVTEAVRVLKEVDATLGLILSRMQEIAKTLPEYSVVREMGGVGNTLAPKLIAEIGDVRRFRNGKALVAFAGIDPPPYESGQFVGCNRQISKRGSASLRKVGYETMRSLKMRSRPEDPVYRYVVKKESEGKSKKSAKIAGLNKFLRIYYARVTELYKIYNLI

SEQ ID NO: 389596 - protein, 390 aa, unidentified
MANIIYIGLDVHKEKIQACAFLAAYGFGEDRVLANIELGGNYQEIIKFASTLKKKFGKETRFVCGYEAGCLGYSLCRHLQRCDIECHIMAPTTMSKEPGVRIKTDRRDAEMIARCLAYNTYKGVHLLDEEDESVRDYIRMRDDFKQMLKVVKQKILALLLRLGIRCDTCKTPWTQKHLQWLKNVDMGKGLNRETLDEYLKELDHLKDRIDNFDTRIHELCDTERYKENVKKLICFPGIKEHTALSFISEIGDFTRFGKAKNFAAFLGLVPGEQSSGSKVHRTALTKSGNIHLRRLATEAAQAAIRSSPSYKSKALKARQEGAPEEVIAYADRARDRIIRKYKKMIRGEDLLGGHKAHNVVVAAVAREMSCFICGMMNGWYDGADLDKLQT

SEQ ID NO: 389597 - protein, 350 aa, unidentified
MDRYIALDVHKQSCTLAVVGPTGRRLGSQVLETNGRALVSAIRAIPGQRHLCLEEGTQSAWLCELLGPHVADLVVTLPAKRRGPKDDLRDAWALAQDRRTGALRTVVYKGSGRMGGLRQAVRGYTMLTADTVRVKNRIKALYRSRGILTDDAIYHSGKRGSWERKLPEGQRRLAALLGGQLDAVKQGRDEAERWLREEAKKQAVVKLLSSAPGMGSIRSAEVVAIVITPERFRSVRQFRNYCGLGVVTRSSSDWVQQSGRWVRAQTIQTRGLNRNRHPLLKAVFKGAATTVIHQLTEHPLHRDYQRMLDAGIKPNLAKLTLARRIAAAVLAMWKHQEEYDPMKQCRKQPV

SEQ ID NO: 389598 - protein, 466 aa, unidentified
MSESVTSGGPRVGMLAQAPPASETGSAALGYLGLDVGQSEVTACLLLTDGREAVRRWSVPNTRLGAEVLVGRVVQLADQHGLGRLRIGLEATGLYWWPLACLLNDTPALQGLQYEVYALNPNLVHGLKKVYTDTGKTDPRDAFLIAERLRIGRLPAPFQLDVVYAPLQRLTRYRMHLSQTLAREKGYFLNFLFVQFSGFSQEKPFSDTFGPTSQALLEQFSTEELAQASLEDLTSFIQQQGHGGFTDPRLVAASLQRAARQSYQLNSALQPPVGLVLAMTRATIRILQAQLVTVDQTIARELRAVPAHARTIDSVPGLGPVWTAGLVAEIGNIQRFTDDGAVAKYAGLVWPPHESGDFQAQDSRLSKAGNSYLRYYLVEAANSVRQHCPEYRHYYLTKFAQSPKHSHQRALVLTARKLVRLVDALLRTGSVYRSPTSDQNQEEVRTTPHAARPRPQRRARLVTSAN

SEQ ID NO: 389599 - protein, 463 aa, unidentified
MPKRSKSREAKKNLPSQSAPRLDVLDQINLNAAGLDIGDDEIYAAVPQDRDNPSVRVFQTFTRDLHALADWLQDCGINTVAMESTGVYWIPIYEILEARGFQLFLVNARHIKNVPGRKTDILDCQWIQQLHTYGLLQASFRPPQEICALRDLARHRDNLVRSASRSIQHMQKALQMMNLKLTNVISNITGLTGLSIIRDIVAGERDPLKLAQHRHPRCAKSQEEIAKALEGHYKPEHVFALKQALETYDFYHRQIQACDAELEKRYAALEPRTDPTHKPLQPRKRNRRKPEKNAPAFDLRLYLYQLAGVDLTQIPGLNALTVHKVLTETGVDMSPWPTVKHFTSWLGICPHNDKTGGKVIRTKTKKTQNRAAAALRMAAQSLVHSNSALGSYHRRMRARLGKPEAITATAHKLARIIYAMLKNQTEYIDPGKNFYEEQARQRAIKNLHRKAHRLGFDLVPHPA

SEQ ID NO: 389600 - protein, 409 aa, unidentified
MQVLYPRCCGLDIHKKTVVACMLLTDPDGTIHRSVRTFGTMTADLLALGDWLHLYEVTHVAMESTGVLWRPIFNVLEEGRTLLLVNAQHIKAVPGRKTDVKDSEWLADLLRHGLLRPSFIPPPAIRVLRDLTRYRKNLVELRTQEINRIHKVLETANIKLGAVASNVVGVSGRRMLEAIKQGEADPQVLAEMAKGRLREKLPALRLALDGRVQAHHQRLLGELLDHLDYLDRAIHRVEVDIAALVSKEEKAVELLLTLPATGPVTAATIIAEIGTDMSRFPSAAHLASWAGVCPGNKRSAGKQLSGASTKGNKQLKTILCEIAATIARTSGTYLHALYQRIARRRGKPRAMMAVAHSLLVSIYYMLRDQVSYQELGPDYFDQLHTQQLERHYIRRLEALGFQVTLTSAG

SEQ ID NO: 389601 - protein, 369 aa, unidentified
MKKNSRSVAGQASKDKLKQNEQLTVGIDLGDRSSCYSIQNADGEEIESGKMATTAEALSKHFRGEPRLRIVIEAGTHSNWVRTHLEKQGHEVIVANPREIPGITRSPNKSDPKDAGKLALYGRVDPRILHPIQHRSLQAQHDLAVLRSRHALVGARTKLINAARGLAKSLGHRLGKCGSEQFAQRAGQELSAELEPSLRPLLRALESLNQQIHELDGTLQRMARDKYPESARLDQVWGVGVQTALAYVLTLEEPERFAKSRMAGSFIGLQPRRSQSGGRDPQLGISKAGNGHLRWLLVECAQRILSRRAADSELRQWGLKLCERGGKNAKKRAIVAVARKLSVRLHKLWVSGEAYDPWYGRGQQSAVAA

SEQ ID NO: 389602 - protein, 402 aa, unidentified
MNAVGIDVSKGKSMVAIMRPFGEIVSTPFEIKHTASDIHSLVELINSVEGESRIVMEHTGRYYEVLAHQLSEANLFVSAINPKLIKDFDNDSLRKVKSDKADAVKIARYALDKWQNLKQYNVMDELRNQLKTMNRQFGFYMKHKTAMKNNLIGILDQTYPGVNTYFDSPARSDGSQKWVDFASTYWHVDCVRKMSLNAFIDHYQNWCKRKKYNFSQSKAEEIYGKAKELVPVLPKDDITKLIIKQAVDQLNSASTTVESLRTLMNETASKLPEYPIVMAMKGVGASLGPQLMAEIGDVSRFTHKGAITAFAGVDPGVNESGSYEQKSVPTSKRGSSDLRKTLFQVMDVLIKTHPQDDPVYQFLDKKRAQGKPYYVYMTAGANKFLRIYYGRVKEYLSSLPES

SEQ ID NO: 389603 - protein, 281 aa, unidentified
MFYLGIDVAKAKLDCCLLDMTNGKRSTKVVANSRAGLTDLLGWLGKRHTEPSHVHVALEGTGVYHEMAACGLHDAGLSVSVVNPAQVRAFATGMGVRTKNDMVDSHVLARFAMHAQPMRWSPPAPEARILQALMARREALAQDLQRERNRHEKAEITAPTALVLHSILETIEFLERHLASLQREIDDHIAAHPGLKANLMLLQSIPAVGPQVGRTLLAIMHARHFDSAEQLAAYLGLVPVQRQSGSSIQGPSRLSKAGPRAIVESGVRGALGNMRRRWRFS

SEQ ID NO: 389604 - protein, 371 aa, unidentified
MHYNKLLQMLDHTPYLSVGLDVGADFTWMSIALPNGSFIGKPFKVIHNDPYSRELAVAKIKEAQEMYSLKSRCFLESTGIYHIPLLCFLRDKGLDCFVINPIITKNSTNINIRKLHNDKFDLKKAALVGLNSSLKTSVIPDEDIADLRNLVRDYYYFKDLQSAVVLKLNAELKVSFPAYLKVFSKITTKSSLKLLRACPLARDMLATPKEELVGLIRSTARFGEAYALNKYEAILEAAKDSAIFGRALPSNAVRIRLYIESYQTYQKHLDTLLLALHEAVDKLQGTPVYDRICLLQSLRGVGFLSSVVLMAEMGDFDLFSSLKKLYAYFGLDPAVKQSGKLNGDKVHMSKRGSSLARRVLHMVALNNLKVD

SEQ ID NO: 389605 - protein, 409 aa, unidentified
MDAIVERCCGLDVHQATVVACFLVGRADAKPRKEVRTFGTMTRDLLALRDWLHAAGCTHVGMESTAVYWKPIYALLEDTFTVIVGNAYHIKNVPGRKTDVKDSEWIADLVRHGLIRPSYVPPKPLRELRDLLRYRRKLVESRSAERNRLLKLLETANIKLSSVASNVFGVSGMRMLTALVAGTATPDEMAALARGVLRKKIPDLERALEGRMEEHHRFLLQLQLCRLEQVDDALTPLDHRIDQQLAAYRDVHTRLTQIPGVDRIGAAVLVAEIGTDMRVFHSPAHLAAWAGVAPGNHETGGKRQHAKVRRGNVHLQSTLFEAAKGAAKTKGSYLKDKYHRLKARRGAQRATMAIAHKILIAAYHMLATGTDYADLGAAYLDQLDNTRVTANLVRRLERLGYQVDLRKAA

SEQ ID NO: 389606 - protein, 345 aa, unidentified
MNGSKHTATQVVGVDIAKRVFQLHWIDAETGEIMNVQLKREKFLEHFVNRAQCLIGMEACGGAQHWARKLIELGHEVKLLPARMVKPFVGRNKSDAADARAIWTAVQQPAVKAVTVKSEAQQAVLALHRMRSQLVKFRTAQINGLRGLLAEYGEVMPQGRAGITKGIAAALANLVDRLPPVLLDTLREQWARVGQLDEQVAEIERRLRAWHKEDKASRRIAEIPGVGLLTATAAVAAMGDPKSFKSGREFAAWLGLVPKHTGTGGRIRMLGISKRGDTYLRTLLIHGARSVIAHSKQPSEWVTNLSRRRPANVAVVALANKMARTIWALLAHEREFQKGYVSQPA

SEQ ID NO: 389607 - protein, 376 aa, unidentified
MSEITRLMLLIVRVGVDLAKNLIQVHAVDASGRRVVARAFKRDQFFGWCEQLPKGCVVAMESCSSAHHWARRLRALGLDARLIAAHFVTPYRMEGKSGKNDATDAAAICEAASRPSMRFVPVKTPEQQGIMSLHRIREGFKEERTACINRIRGVLAEFGLVFGQSPKVLRAHLADVLEDASNELSYTARLVLQEAFEHWRNLDDKLLWCDRQIGQHVRGSAQAKRAARITGIGEVTASAVTAGVGDFRQFKGGAQFGAWLGLVPSQNSSGGKVSLGRITKRGDDYLRTLLIQGAKSAVMSAHKRQDPTSRWLVQLKDRIGWQKACVAMANKNARILWAVMTRDAAFDPKHVSIKPQCKVPPGQRAATSPPSAACTA

SEQ ID NO: 389608 - protein, 319 aa, unidentified
MAQNDLVVVGIDVAKDKVDACIRRFTLWQTFPNTAQGHRKLVAWLRKYQVGKAVMEASGGYEREWRNVLHNASIEVRIVDPRRVRSFALSAGRLAKNDPIDAEMIAWFAETFSQAPGQIPDAAREELAALAKARKALVDVKIRLQAQDEHAAPEPARKAHARVLKSLAAEIDKLEAAISAKVNATPEFAERAEIIESVPGLAQATSAILIAGMPELGQVSDEVAAALIGLAPYDDDSGKRRGERYIKGGRRWVRNAIYMPCLGAATQYNPVLKAFYQRLLAKGKEPKVALVACMRKLIIILNTMLARRQKWDPNRYVVS

SEQ ID NO: 389609 - protein, 417 aa, unidentified
MEVLYDISCGIDVHRDTVVVTVRKRNGLSKEHVETRTFETFHDALLKMAAWLVEHDVPIVGLESTGVYWKPVVRVLQEQAPRCVIWLVNPAEVKKVPGRKTDVNDSQWLSKLVMHGLVSPSFLPGPELEELRKLTRYRTRVVAQQTSTKNRVLKELESSCIKLASVCSDVFGASGRAMLDALREGGHTPHAIAQLARGRMRSKLDLVERAVTGSFSTATQFVLKQLLRTLDQIQSDLGELDAAIRQRLAPYTAEVELLRSVPGLEVLSIAAIVAEIGPDMSVFGGADKLAAWSGLSPGSNESAGKAKSAPTRKGDKYLRTRLVQAAWSAVKTRGTFWKQKFGQLVARLGPKKSIVAIARKMLVATFYILRDGTPYREPVPVPPSPRSVRRLVERLEALGYQIVHPQALPLALPQTLP

SEQ ID NO: 389610 - protein, 311 aa, unidentified
MSDKTTVGIDVSKFALDIFIDTSERLIHLENSASGIMQLLKEMEGLHISGVIMEATSRYHSLAESMLISAGLPVAVINPRQIKNFARAMGKVAKSDSIDARIICEYGRRMKPEFRPARDNGLQDLALLLTRRRQLVQNRVMETNRLQEKNGMYIETGIAEHIAWLNSQIDTLDQEIKYRLNQNTALSPKRKMLEKVKGIGPVTQAAILSQLPELGELTRRQISALVGVCPYDRDSGQLRGKRAIWGGRAGLRATLYMAMLSAVRYNPQIKDFYTSLIARGKPKKVAMTACIRKFITVLNAMFRDQKDWVYS

SEQ ID NO: 389611 - protein, 298 aa, unidentified
MHSENIAAYIGLDVHKETLAVAIAAPERLGEVRYYGTINNEAQAVRRLFQKLQGLYGNILSCYEAGPCGFGLYHQLTAMNIKCQVIAPSRIPKSPTDRIKNDHRDAISLARLLRAGELTPVWIPDLTHEAMRDLIRARAAAKRDSRVARQRILSMLLRTDKRYAGKHWTGKHRTWLANQSFSQPSQQIAFQHYCQSLEQIEDRILQLDQEISRLLPEWSLCNLVCQLQALKGVGQLIAITLVAELGDFSRFSNPKQLMAFLGLVPGEYSSGNSIRPRGITKVGNSELRRLLWKVRTSP

SEQ ID NO: 389612 - protein, 409 aa, unidentified
MDVVIERCAGLDVHQATVVATVRVPAASGARTVVTETFGTMTPDLLALREWLRAHGVTHVALESTGVYWKPVYYVLEEGFTLLLINMHDLKRVPGRKTDVKDSEWLAQLLECGLLRPSFVPPPPIRELRDLTRYRVQQLQDRTQEVNRLCKVLEDAGVKLTSVVSDVMGVSGRAMIAALVEGTTDPVVLADLARGRLRKKLPELQRALQGRFRTHHAFLIQQIFAKIDFLDETLDRLAGEIDRRLLPFEPTIALLDTIPGVDRTGAMMLIAETGGDMRRFPSDAHLCSWAALCPGQNESAGKRRSGATRHGNRYLRGTLIQCALAATRKQGSALQARYHRVKRHRGHKKAIVAVAHQILRIAYFIMRDGVPYHELGADYFDRRHTDRAVRRHVHQLEALGFHVTIEKAA

SEQ ID NO: 389613 - protein, 425 aa, unidentified
MEVVQRTPRTPAFLPGTSLPLAAHRQTTLRSPGLTAGPLLRGIPAVLHEVGVRKTIPTGKEAIAKLQQPSQEVLPMTSNTKVLVKAKYAGIDFHKRTSVVALGDDEGRVLEQVTLINDHQQIEKYFSQFVGLECVIESCRGYEWLVEQLEELGHTVHMGDSRSIKLIAQTRCKTDKIDSRILLELLAKNFLPKCYQASAKERILRELVRHRSQLVRSAVKHKLRLHAHLDKENKSIFNPFTLQGRRQVQEVKLTEARRAQVDDELEIIDFLELKIAEQDAKIKYVARTNPDVALLKTMPGFEVLTSIAFLAEVGDIERFRKASQVSAFLGLVPRVYSSGNTRRNGRITKCGSKLMRWMLVQAAWNAIRTSPNLRSFFASIKKRKGQRVAIVAVARKLATIGYHVLKEKVEFNETMLDAGSSRATF

SEQ ID NO: 389614 - protein, 349 aa, unidentified
MLADELDYVLGVDTHRDEHVLAVVSAPAGAPVAGMEFAADRRGYQAALRFAAQYATGRRAWAVEGTGSYGAGLARFLAACGESVLEVSRTPRTERRLRGKDDTLDAVRTARAALASETLALPRAGQRREALRLLLVARRSAVDVRREALTQLRAVIVTAPEPLREGLRRLSEGKLLDRCSRFRRTGSARADELATRLVLRSLARRIQTATVEADQLEREILAHVRALAPALLDEPGVGPIVAAQLIVAWSHPGRLRSEACFARLAGVAPVPASSGQTTRHRLSRGGDRQLNRALHTIVLHRRQHDPATRDYIAKRIAEGKSRRDATRLLKRYLARHLYRLLENQEPLMT

SEQ ID NO: 389615 - protein, 343 aa, unidentified
MQTVTTIGFDIAKSVFQVHGVDAAGQVVVRRQLKRRQVIAFFQKLPACLVGIEACASSHYWSRELQAIGHSVRLMPPAYVRPYVKRQKNDMADAEAICEAVTRANMRFVPTKTPEQQSGLVLHRTRHLFMRQQTSVINAIRAHLAEFGIVAPVGRRGVEELLRIVADPNDKRVPEVVRACLAALGSQLLSLKKQILDFDRMIMAWHRSNQMSKRLNCIPGVGPLLATALVGSVADPKTFRSGRNFSAWIGLVPKQHSSGGRERLGSISKQGDRYLRGLFVAGALAVIRYAKTHGTKHRPWLTALLARRPTKVAAIALANKLARMAWAMMATGERYNYPASLKV

SEQ ID NO: 389616 - protein, 350 aa, unidentified
MSQRNAPRPAAVYGGDIGKNIFHVVGLDSGGEPVQRTRFRRDTLLQFFGRAAPAIVGLESCAGSQWIARRLQALGHKVRLIPAQFVKPYVKSNKSDIIDAEAIAEAATRPTMRFAAIKSEEQADLQALHRVRDQMIGTRTRLINQMRAFCLECGIALRQGAGLFKLDLPLVLDDASNDLSPAMRKLLTDLFADLHRLEQRISDVTREITAIADREDVARRLMTIPGIGALGATALLAAVGNGRQFQRARDLAAWLGLVPREHSTGGKQKLLGISKRGNRYVRKLLVHGARSCFRHLDRTRDRLGSWLDGLQNRMHPNKAVVALAAKMARIVWVVLTKPGALYERRDPAFA

SEQ ID NO: 389617 - protein, 409 aa, unidentified
MKQVTTEEDELNDQRAHVWVGIDAGKAHHWVTAIDNQGAMLWSKKVGNDESAILDSLAEVLALGENFTWAVDIVGTTSALLLALPASHGQSALYVPGRIVNRMAGAYRGEAKTDARDAYVIAETARHRHDLTPIRMPAEIIADLKLLIAHRSDLVSDRVRMLNRLRDLLTGIFPRLDRAFDYAKHKGALTLLTGYQTPAALRRMGQARLTKWLSRRGVQGAPAVAEVALEAASGQQTQIGNETIAAQIVADLAAQILALDMRLRALENQITTIFRAHPQSEIVESMPGMGPILGAEFLSSAGPLDNYADDGHLAAAAGLIPVPRDSGRRTGNMHRPKRYNRHLRRALYLSAQTSVIREGPNRDFYLKKRGEGYKHTQALLALSRRRVSVLWALLRDNRTFTQAPPIRAA

SEQ ID NO: 389618 - protein, 342 aa, unidentified
MKKITTIGIDLAKNVFQIHGADQQGRVKIRKQLKRNQVLTYFANLEPCLIGMEACGSAHYWARKLVEQGHTVKLMAPQFVKPYVKSNKNDAHDAEAICEAVMRPTMRFVPVKNSEQQAVLSLHRARAGFVKARTAQGNQIRGLLSEYGIVIARGIHHINKRIPEILEDADNGLPHLMRALLKRLSDHLIEINNQVIALENEIKLWNAQNEHSQKLTAIPGIGVLTASALVATIGDAKNFSSGRQLAAWLGLVPKQSSSGGKSVLLGISKRGDTYLRTLLIHGARAVLQHAPNKKEENAKWMQQLLARRNKNIVAVALANKNARIVWALLTKDENYQLNYVSP

SEQ ID NO: 389619 - protein, 419 aa, unidentified
MGYSKIIALDLGKFTGPLQRTHAIPLPIREDRQRSSTKGDCMGYSKIIALDLGKFKTVACVMNAADRSHVFETIEMSPTAVHDLLARHATEDPRQTRVVFETCDCAGWVHDVCVALGLPAVVVSANSEAWRWQRVKRKTDRDDALKLARLSLLDQLTAVHVPDPGRRQVRRLILHRRSVVSRRTMSRNAIRSIFSQQGIALARGNKQWTRAGIAQLTEHAKPLSECANELDLWRGRLHVELQLIEAADEQLKLVDRKLDELQRSDARVKLLQTVKGVGPRVAEAVVSHLGDPKRFKSAAHVAGYAGLVPKQIESGQMSRFGHITRRGPALLRSMLVEAAWVVWRHNPWAQAFVNKVSRGSKARRHIAIVALARKLLVSLWAMLRDGTRWRDPSCGLAPISPPEDTGPNVAVSSVAAAML

SEQ ID NO: 389620 - protein, 310 aa, unidentified
MLKTFVGIDIASEKIDIFIDSNDEYLTVPRSKNGISQLLKTLENYDVELIAMEATGGLEDFVACELDANEYNIAIVNPKKVRDFAKALGKLAKTDSIDAKVLASFANKVRPAKTKLLSQEQVYLKQLVRRRKSLMLMEQMERNHLRTESNASVLETIENVLDTLEDSIKSIEDEIDKAIAQNDDLNSAVEIMSSVPGVGKVVAQTILAELPEIGSLNRGSIAGLAGLAPFNCDSGLMRGRRRIWGGRSKVREVLYMSALVSVQYNSKIKDYYEQLQKRGKPKKVALVACMRKILLILNAMVKNQSHWQEF

SEQ ID NO: 389621 - protein, 333 aa, unidentified
MNPNSCKGQAPAHKEGTEKMAAGTVQDVGIDVAKRWLDVAVFQTQEQARFDNDKDGWAKLSKWLKGRNVRAIGMEPSGGYERGVAKALRKAGLPARNVNPHKLRHYARALGRLAKNDRIDALLIARYTAELPTRPVQCDPIAEQLADLVVARRQLSDDKVSLANQLEQVREPTVKRIFTQRLRRIEFDIALLAKRMADLVASQPAFAARDRLIQSFHGAGPVFSHTVLALAPEIGQASRREIAALAGLAPYDFDSGTFKGRRIIWGGRHAVRRVVYMAALTASRSNPVLKAFHQRLIAKGKEPKVALVAVARKILTILSAMIQNNEPWNPNRS

SEQ ID NO: 389622 - protein, 315 aa, unidentified
MSERFVGIDVSKDSLDVAVRPDEERWQTPNREQAFFQLIFRLQALAPTLVIVEATGGLERAVVAALAEDGLPVALINPRQAREFARATGRLAKTDKIDADDLAFFGEAIRPEVRPLPDAAVQVLSALTARRQQLVKMLTAERNRLRTALAPARPSLREHIRWLEKERDKVEAELQRHIDRNLTLHNKFTLLCSMKGVGAATGYVLLSDLPELGRLNRKEIAALVGVAPFNRDSGRWRGKRTTWGGRASVRAALYMAALVASQHNPVIRSFYQRLIQAGKPKKVALTACMRKLLVILNAMVKNNTPWDPDYAKVRA

SEQ ID NO: 389623 - protein, 390 aa, unidentified
MIYVGIDVAKDKHDCCILGSDGEILFSPFTFQNTLQGFDELYEKIWSLTSDLTEIKVGLEATGHYHLNLLRSLLDNGLPSFVINPLHTNLYRKGQSLRKTKTDRVDATSIAMMLLTDRTLKPYSDTSYHNEELKSLTRYRFDKVQERAKLKTSVSRLVSILFPELEKLVPSLHMSSVYALLSEFPGASFVASAHLTHLKHLLYDASKGRYGRDMALSIRDAASSSIGSVIPAKSLELKHTIHLIEVLTAEIDEIEKAINAIMDTIDSPITTIPGIKNRMGAMILAEIGDFSRFDNPDQILAYAGLSPTTYQSGQLTSSYAHMEKRGSRYLRYALFNAAQYVCIWDPTFKAYLAKKRGEGKHYFVAISHACKKLVRVIYRMQLTGEPYRTA

SEQ ID NO: 389624 - protein, 349 aa, unidentified
MTKYLGIDVGDRNCHLCVLDNDGKVQRRYVCRTERGPLAAELKELACDGEPVVAILEAGQHSHWIAELSQEAGLDTIVANPRSVRIIYEGNRKSDRNDAEHLARLGRVDPQLLKPVTLRSTEAQAQMTVLRSRDVLVRTRRALINSARGLAKTVGARLPPCDADAFAVKVSECVPRGLEVALMPLLATVDDLTKRIRALDGEIRRRTKERPEAKRLLEIQGVGDITVLAFMLVVGDPNRFSTARDIGPYLGLVPKRDQSGAKDPSLRISKAGNGFLRRLLVNCAQYIAGPHSPDSDLKRFANRIGPAGSVDRRKAIIAVTRKLAVLLLRLWQTGQPYQALRGTAELQAS

SEQ ID NO: 389625 - protein, 348 aa, unidentified
MAHFVGLDVSVKETSVCVVDDAGKVVLEQKVPTEPSDIIALLSSLGVTYGRIGIEAGPLSQWLVNALTVADLPVICVETRHMKALLTAQQINKTDRNDARGVAQMMRVGLFKPVHVKTLVAQEQRMLLTSRKLLQRKLLDVECELRGTLRNFGLKVGAVSSSRYEARIRELTVGFPRLAAIAEPLLNVRRVMRQQFAVLHKMLLDTVRDDPVCRRLMTAPGVGAVVALTYRATVDQPQRFAHSRAVGAHVGLTPKRYQSGEIDYDGGVSKCGDALLRTMLYEAAHSLLTQSRKWSWLKAWGIRVAQRRGLRRAIVAVARRLAVVLHRMWVDGSEFRWRKDSAAVPAAA

SEQ ID NO: 389626 - protein, 346 aa, unidentified
MNHIGMDSHITTLDFAVINEAGGLIKAKSVATSVNGFMGFVKTVSPPRTIYMEEGTLAAWALETCVRFGEKLVITDPKKNHWIGSSGQKDDPLDALKLAELGRGGYIKEIHHPVGQRRRFRELMIAYHDTVRSTTRIKNKIKARFRQNGIQCTGATVYLETYREEWKRKLPQEATLLLILDGLWRQLEQSEQTEKELLAAARAQAKHYPEIKHFEALPGIGFISAATISAMLETPYRFANKRKVWMYAGLGIMTRSSGGKTYSEKLSTDYNRLLKYTMKQAAEAAIRTEDNPFRRKYLDMTLLHGIAPHRAKLTIARDMLATMWAMWRKGEKYNPEIREKAAYKQD

SEQ ID NO: 389627 - protein, 402 aa, unidentified
MTDRTLSAGVDVGKEHHWVAVVDDAGKVVFSRKLPNEEQAIRAVISEIDQLGTQVSWAVDLTTVYAALLLTVLADAGRTVRYLTGRAVWQASATYRGGEGKTDAKDARVIADQSRMRGEDLPVLHPTDDLISELRMLTGHRADLVADRTRTINRLRQQLMAVCPTLERAAQLASDRGWVVLLTHYQRPKAIRRVGVTRLAKFLADAGVRNAAPIAAAAVTAAKAQTVRLPGEDIAAALVCELAQGVIDLDERIKAADSAIEDRFRRHSLAEVITSMPGFGFRLGAEFLAVVGDPTLIQSADALAAWAGLAPVSRDSGKRTGRLQTPQRYSRRLRRVMYMSAITAARCDPASRIYYQRKRDQGKRPIPAAIALARRRTNVLYALIRDNRTWHPESPPITTSAA

SEQ ID NO: 389628 - protein, 359 aa, unidentified
MDSIKGSTRRVVGGVDTHKDLHVAAVVDEQDHVLGTGCFATTRQGYRQMLAWMRSFGILRRVGIESTGSYGAGLLRFMQAASVEVLEVTTPDKHDRRRRGKNDDLDAQNAAHAAFAGKRTVTPRSRDGMVEALRVFAVCRKTAVAARRVALQMIQTTIVSAPDGLRDTLRSMTRMQLVRTLAAWRPDLTAYRDIEAAYRISLKSLARRYLELHDEIADLDEMISAIVVDLAPELIARNSIGHNGAAQLLLTAGDNPERLRSEASFAALCGVSPVPASSGKTIRHRLNRGGDRAANSALHIIAIGRLRTDPVTKAYVARRISEGHSKLDAIRALKRYIAREVFHIITRRHGEINQTRFAA

SEQ ID NO: 389629 - protein, 461 aa, unidentified
MTSPDKPSKGKQKTRSTPTALPMIQPLVAGIDVGSTQHWVCGPAQDETPNVRVFGTTTAELNALADWLVEQRVKSVAMESTYIYWIPIYELLESRGIEVVLVNARTLHNVPGRKTDFSDCQWIQLLHSCGLLRGSFRPNESITRMRALHRQMANFVVERSRCVQWMQKSLDQMNVQVHRAVADLTGTTGMAIVRAIVGGERDPARLAMHRDRRCHKSVEQIAQYLTGSWREEHLFNLAAALRHYDSLQETIASYEARLLEELTALQPTERLQESVPRHPNPTKERAIRNRGEQEARTTLWRFAGVDLTRIDGISTGAAQIILTEVGPNLAAFPSEDHFISWLRLCPRTPISGGKPIKKRRNGLGANRIATALRMAAVALQRSKTALGAAFRRVARHKGAAVAVFATARQLARLVYRMLRYGQDYVDIGYSAYEQKFEARRLAALTETARTFGFTLTRAAAD

SEQ ID NO: 389630 - protein, 370 aa, unidentified
MSDLSKVFVGLDVHKDSISIGVAQAGQQPARFVGKIAHDVPKLLKQLERIAQPADMLIVYEAGPTGYGLQRALTARGYTGQIIAPSLIPRRPGERVKTDRRDCLRLAELTRAGELKAIWVPQPEDEAIRNLARAREDAVNLRTQARHQLKAFLLRAGVAYSGKTSWSKSHARWLATLSFAHASDQIAFTEYCQAVSSADERVQRLTGALSQAIAGWRFESVVRALQALRGIDEVAAIGLVAEIGDIGRFAHPRQLMGYLGLVPSEASSGDRVRKGAITKAGNAHARRLLTEAAWNYRFTPRLGYRAQRRQEGLSESIRAHAWKAQLRLTARFAKLRARNVQINKICVAVARELAGFIWAIARTTAQPATK

SEQ ID NO: 389631 - protein, 392 aa, unidentified
MIYVGIDVASQKHDCFLLKDTGEVFSKTSFTIKNDFEGYKKLHNSILQFVESTKDSNVRIGLESTGHYSKNILLYLIKQGYQTTLINPILTNMDRKASTVRKTKTDKIDAEAICKFLDKNRFDFKPYTLLSYHIDALKSLTRQRFSLVKQMTQQKLIFQRLVNVIFPELLSHFSNDYSESVLNILYSYPTPKKLAKAHKESITKLLHSRCKITSSEILELAKNSIGQSEEYLGFELKHTIDMILFYQSQIEIYNKQIEIELNETEYGKIITSIPGVGIITGAMIISEIGDINNFTTSDQLLAYAGLDPSVYESGKFESSHNKPSKRGSKYLRWAIHQASSVIWQHDNTFKDYYLKKIKESKHHYVAIGHIDKKLIRVIFSLLKNKSMFIPQK

SEQ ID NO: 389632 - protein, 369 aa, unidentified
MTFFIGVDLHKTQFTVHVRTEEKVESLDQIKQYPTTVAGYAEFLSRIETYRATGAAVKIGVESTGNTRFFKNQVEKAGAEVTVINTLKFKVINESTKKTDKHDASTISEFLSKDMLPESYLCGKETENIRRLLKSRERLVRSTVGQKNEIHALLVSLGLSDELRSLQSKKGRQKILDTLESNNDYVLEAQSVKLMFEIIERIEESVKTIEKQISELTKDDEMVNRLMTIRGCGKITAWTIRAYTEDISRFATAKKYAAFCGLVPWVQDSNETIHHGKITKRGPQELRTCFVQLVLGIRRCKDTSEWRMMQRYEYMKKNKGSGKSIVAAARKMAEIVWAMLSDKQDFNADRMKGVYKPMILADEALSAIN

SEQ ID NO: 389633 - protein, 358 aa, unidentified
MSELTFIGLDVHARSVAAGVLEGSTGEVRSGAAPPRTAELVPWLREQGESLSVAYEAGPTGFGLARACAAAGIPCLVAAPSKIARAPGERVKTDRRDALRLAKLLRLGELTAVRVPTPSEEAARDLVRAREDARADLMRARHRMSKLLLRQGLVWEAKAWTGAHERWLAAQRFEERGLALAYEEGVAAMRSVCARRDALDAAIREEAAEEPWAGVVGRLACLRGVSTLTAFGLATEIGDWQRFDGRSLGAYLGLTPSESSSGERRRQGAITKTGNGHARRLLVEAAWHHRRRPGPSRELARRREGQSALVRERADAAGRRLHHRWQSFDRRGKRSTVAAVAVARELAGWCWSLAVMED

SEQ ID NO: 389634 - protein, 317 aa, unidentified
MTEHNIGAAGIDTGKSTLDVALAGDFSQLQVDNDAAGHRGLVSWLRDNGVERVGIEASGGYERTVVSDLRKQGFTVIMFQPIQVRAYATYRQQRAKNDRIDAALIAACTATATAIKDAPDPRLEAFAEPLTLIEQIEEDIARCKTRLEAFRDPRHRDLLKAEIKRLKAWRAAEIKRMVAELRRHDDLARRLDLIESVPGIGLRTALAVLVRMPELGTLSREQAAALAGLAPFDDDSGKRHGARRIAGGRTRLRKSLYAAALPAAFQWNPALINLYQRLIRDGKPHKVALVACARKLVIFANAVVARGTPWTKNTIPT

SEQ ID NO: 389635 - protein, 316 aa, unidentified
MEQAVLGIDVAKKKLDAALIFNDKVLVKKFDNAVKGFELLQGWLMSLHLERVHTCLEATGAYSEAVAEFLHERGHRVSVVNPLRIKGFAKSDLKRNKTDTADARTIAEFCLAKDPDPWHPLPPEIKQLQALTRRIESLQGILNSEQNRLELAAPKVRSSLKRIIRTLEKEIELVQALIKEHIDHHPNLKDQRDLLQSIPGIGEKTAAVLLGELEFAAFPSARSLAAHSGVTPAQFQSGTSVDRTRLSKLGNGRIRKALYFPAITALKYNEIVKTFASRLTQKGKTPMQVICAAMRKLIHIAFGVIKHNRPFDPNLA

SEQ ID NO: 389636 - protein, 459 aa, unidentified
MVSHRGSTPSLGTFEQINWHAAGIDVGTEEIYVAVPEGCDGDRVRVFPTFTVDLERISDWLKQCQITTVAMESTGVYWIPLFEILESRGFEVYLVNARHLKNVPGRKTDVLDCQWIQQLHTYGLLRASFRPSEEICALRAVVRQRNMLVRYRAAHIQHMQKALHLMNIQLTQVLSDITGVTGMQIIRAIVAGERDPQLLAAYRHNGCAHTPEDIVKALQGHYRREHLFTLQQALELYDLYGQQIAQCDAELEAMYREMDPPNAPPTAEVTQPPPVRTTKPRKNQASFDLATSLYQMAGVDLTRIDGIDALTAQVVLSETGLDMGKWPTVKHFTSWLGLCPQNEITGGKVKHRGTAKTRNRANTALRVAAQAVWRSQSAIGAFFRRIRSQHGGAVAVTATAHKLARMIYHSLKFRTDYRDPGTQAYDTQQRERAERSLRRQAARLGFAVTPVEPSPAAVS

SEQ ID NO: 389637 - protein, 375 aa, unidentified
MAKNTRFVGLDVHAETIAVAVAEGRGQVRSLGTIPNRPEAVRRLLGKLGKASDLRVCYEAGPTGYPLYWQLTAMGIACEVIAPSLAPAKPGDRIKTDRRDAERLASSYQAGTLTPVWVPDAKHEALRDLVRAREAAKQDTKRAKHRLGKYLLRNGQRPGSGCRAWTAVWWQWVRKLELPHTEQNTTLLELILEVDHQSQRVVRFDGAIDRAVAAAPEHLRAIVAALQALRGVAQETAVTLAVEFGSFARFERATKAMGYTGLVASEYSSGTKKRQGAITKTGNSHLRRALVEAAWHYRHRPRLNQRQKQLQRELPPTVAEIAWTAQERLHRRFWALTNKSKPSPKVITALARELVGFVWAIGKETEQAFAERRAA

SEQ ID NO: 389638 - protein, 408 aa, unidentified
MQRYYLGVDWADKSHQLYAADESGKKIKELEVQQTAEGLAEFGRWLDERRSAGTELWAAIEKPQGRIVDFLLDHGVVVYPVNPKALDRARDRFRMSQSKSDGFDAYVLAEFLRTDHTHLRALEPDSAQAQELKMLTRDHQRLLRQKTRLLNQMTITLKEYYPRALEVFDDLETQIARDFLHAYPTPQGLSRMTRPQWKRFAKGEHHLSEARWQELWEKINKPQITIVDHVVRAKAKLLLALVAQLEVGVKAVHDYSQEVERFFAALPAAKIARTLPGAKSATTMPTLWAELGDAKNRWNSFRHLQAEAGTVPVTKASGKSRMVQFRFACKKRLRTAMYWFAFNSLMRCEWANKYYRDQRAKGHSKHQALRALGAKWLKIIFVMWRDHKPYDENYHLANIARHAMRQAA

SEQ ID NO: 389639 - protein, 274 aa, unidentified
MDHIGIDVHKRDSQIYILAEGGEVIERRIRTEPERFDAVLGTRPRARIVIEASTDSEWVARCLEALGHEVIVADPNFAPMYATRTRKVKTDRRDARALAEACPLGAYRPAHRLSDPQRHVRGRLVVRDALVRTRTRYISIIRALLRQHGYRVPSGSAEHFVHRVQSLPLPGRLRSVVAPLLALMRPLNAQLTYSDATIEHLAVQDPRVSRLRSVPSIGPVTAAAFLAAIDDAQRFHHAHQLEATSASCPASAARARRNAGARSPRPATRAPAGS

SEQ ID NO: 389640 - protein, 347 aa, unidentified
MLHAGLDLSRKKLDVCLLSHRGEHIDQLAVPPDVDSLKTLARRIDEVHREPVGAVVESMTGARLVHDTLEAEGWDVEIADAQKVKGLAPLACKTDKIDSLVLAVLSHRDLVPAIWLPDPRVREERELARFRMHLVKHKSALKCRIHSTLINFGRPCPVTDLFGVEGRRLLARLDVPEPWRGNVTASIELIDDLERQIDQINRRLREGQADHPYVPLLLTVPGIGRVLAFTIAAEIGEIERFPSPQKFAGYTGLCPRVNQSGDKDRRGPLTKHGPTYLRWALLEATMHALRHPAYRERYRRTKKRLGKQRGAKVAQVDVARRLAHAIWHMLTRNQEFAPRGAAFRLAA

SEQ ID NO: 389641 - protein, 316 aa, unidentified
MSVETWFVGIDVAKDRLDVAVHPTDERWTGSNDPAGIEALSEQLVRLAPQLVVLEATGGFEVPLVGALGAPGLPVVVVNPRHVRDFAKALGRLAKTDRIDATVLAECAARVRPVVRPLPDEEARELHAWLARRRQWVEMITADENRRQQAAAPIRRPIEGHLRWRRCQLAALERELTTRVRRSPVWRESETLRRSTPAVGPVLARTLLADVPDLGRLTGQQIAALVGVAPFNRDSGPRQGHRSLWGGRAPVRGVLDLAALVATPHNPVIRAFSQRRVAAGKPWKVVLTACMRKLLTILNARMKHRTAWKPVPALGA

SEQ ID NO: 389642 - protein, 327 aa, unidentified
MEVMIGVDVSKAKLDCLWLKDQHTLKVKTKVLANTVDGHQALLAWVQKNTGASLAECHFIMEATGVYHEGLAYALHEAGARVFVVNPARVRDFAKSLGSRGKTDKKDSMVLARFGAVNSLSCWQPEAPEIRTLRALLSRLDALEKDIQREENRLEKAEVSQASAQVIASIRLMLKALKEEKKRLEQEINDHINRHPKLKRDRQLLETIPGVGAVLSRLMMAVIQSRDFSTARQCAAYLGLNPVPWESGSSIKGPPRMSKAGPALVRAKLYMGAVVASKWNPDIKAHRERLLARGKSKMSALGAAMRKLVHICFGVLKRQSEYVPQVA

SEQ ID NO: 389643 - protein, 426 aa, unidentified
MKVLYERVAGIDVHKDMIKVAIRSPGDKPWARKTEIVEYRTFYGVLQQMAGELRKRGVTHVVMEASGVYTEPVYYALAEQDFDEVAVINPAHAKALKGHKTDAKDCARLAELFECGLLHGSYIPAPELKEVRDLTRYRMKTVQARTSEIQRLAKALESAGIKLGSVASDITGTSATAMIEALIDGERRGAVLAELARGRMRTAGKLAELSQALAGRFTDHHALLCRLHLDRIAIFDTAVAGLEGQIAAKAAPWRREQSLLKTVPGFGDAVAQAWLGEIGPAPHRHFATHEKLACWVTLCPGNNISAGKRKHGRSGDAGTYIKPMLVQAAWSAIRVRGRLQARYHRLVRRFGGEKNPAAKKKAITAIAHTLLKIAYQVLKSGQPYQDLGADFYTRRESPEQRQAWLLRQLQKLNPSATITITPPEAA

SEQ ID NO: 389644 - protein, 394 aa, unidentified
MKLVGIDVGKNSHHFCVMDKETGEFNVTPSSFPNNKEGFDFLINSLKPYSKKSILLGMEDTGHYHVALLKFLLSNGYTVALINPKTTDLTRKMEGGITKNDKLDTITICDVLDTPERKKQYRITKVDRFDLYEQRQLTRHHHNLKEELNVYCNRLQKSIDLVFPEFNTLFSSKYGIVYMNLLKTFGSAEVIASTDIRTIRKFFEIKGKGNRISLTPEKLKECAKNSIGISSEVETIQIKHLVSQITLIKEQIAEIDKKIEEFSIPNNSPILSIPGISHFSGTSILAELGDIGNYSKPSQIIKFAGVAPYHYESSQYNAQHTAITKKGSKYLRKTLYQIILPVINNNPVFKKYYLLKISQGKGHRCAQGHCIRKLLRIIYHLLETGQSFDSALLR

SEQ ID NO: 389645 - protein, 344 aa, unidentified
MNEVITIGVDVAKSVFQVHGVDDEGHVVIGRQLRRSRVLPFFKKQAPCLVGMEACATAHHWARQLIELGHEVKLMPPHYVKPYVKRSKNDAADAAAICEAVTRPSMRFVSVKGTEQQSVLMLHRARELLVRQRTMLINAIRAHMAEFGIVAPVGVPQVKKLLRIIADTDDARLPSLARTCLDGLARQFLSLDKEINAAEKRIHAWHRSNEVSRRLKTIPGIGPIIASALAASITDPEVFKNGRELAAWIGLVPRQNSTGGKQRLGKISKQGDQYLRWLLVAGAMSVIMHAKRRGTTYRPWLADIIARKPTKVAAVALANKTARIVWALLRHGGTYQKAVAVQAT

SEQ ID NO: 389646 - protein, 369 aa, unidentified
MIQHTTNTIWVGLDVHSASITAAILHDDSPEPEIVRLSGDLNATRKLFRKLAKDGVPRACYEASSAGYVLQHTLDHDGFRCEVIAPSLIPILPGDHRKTDRLDAAHLARMYRSGHLTSVTVPDIDQEAVRHMVRARLFLRRQITRSKHRIMGILRTTDHRFTGSKTYWTKVHRAWLAKLRREMTGPMQIVLASELEMLEYLETSQRSMDTRIGEVAQQKPWREPAEALCCFRGIQALTAMTILTEIGDIKRFKSPRQLMGYTGLVPSERSSGEKQRRGPITRSGNKYLRRVLIESAWHYSKQAGATLKTERRRMGQDPAIVGIATKAQHRLRRRYLHLSKTKNTNKAVTAVAREFVGFIWSMLMEIDRH

SEQ ID NO: 389647 - protein, 342 aa, unidentified
MLYVGIDVAKNKHDVTALNVPGKTVLKPLTFSNNKAGFELLDLSLRQLNQDCLIALEDTGHYAFNLLNFLHEQGYKVYTYTPLLIKEFAKSLSLRKTKTDKKDAHGIALKLLSDPNREQFQHDNRQVELKILARHIHRLKKKQSDWKVQYTRCLDIIFPELDKIVGKHSEYTYQLLTCYPNPQKRLEAGFDKLIEIKRLTASKIQDILSVAPRSIGTTSPAREFEIIENIKHYKRLIDKAEKCVNDLMAEFNSVITTVTGIGNRLGAVILAEIQNIHAFDNPAQLQAFAGLDSSIYQSGQIDLAGRMVKRGSPHLRWALIQAAKACARFSPAFKAYLKTKLE

SEQ ID NO: 389648 - protein, 344 aa, unidentified
MGEVITIGLDIAKSVFQVHGVDDAGTVVIRKRVSRSKMLEFFADLPPCLVGIEACPAAHHWGRELQALGHTVKLMPPSYVKAYLKRSKNDANDAAAICEAVSRPSMRFVAIKTREQQAALMLHRARQLLVRQRTMLSNAIRGHLAELGIVSAKGRNGTDELLEIIMNGADSRIPLVARNILKVLAAQYSTIGTEIASIGKSILAWHRSCEPSRRLEEIPGVGPIVATALVAEIGDWKAFRSGRGLAAWIGLVPKQHTTGGKDKLGSITKQGNRYLRWLLVAGAMAVIRYAQKHGTKKRPWLGRLMERRPTKVAAVALANKIARIAWAIMTRGERYKEPELLLAA

SEQ ID NO: 389649 - protein, 410 aa, unidentified
MEVLYPHCAGLDVHKDSVVACVRHMAEGKVTTVVKTFMTTTGELMLLSEWLSGESITHIAMEATGVYWKPVWHILSDGEFELVLANAAHVKNVPGRKTDVNDATWLADLMAHGLIRASFVPDEQTQQMRALLRTRKQFVRERSSHIQRIQKTLEDANIKLDSVISDVLGASGRRMIEALIAGLTDPAAMASLAHERIRATAAELEAALRGRVTAHHRFLLKLHLDHLDAVDAAIARIDEEVDGQVEPFRLAVQLLSSMPGVSSLSAEVIVSEIGVDMSRFKTEGHLISWAGLCPKNDESAGKRRSTRMKKGAPWLKTTLIQCAWAATRVKGSYLQAQYLRLRSRRGAKKAIGAVAASLLTAAYHMLNNGTFYKDLGANHFDIRNKRKQVLRLINRLQNLGYEVQITPQVA

SEQ ID NO: 389650 - protein, 330 aa, unidentified
MDQTVIGIDVSKAELVIAVHPSGETWTSATTAIAMETLVTRVCDLRPQLIVMEATAGYELPLAAACSAAQLPIVIVNPRQVRAFAQAIGRTAKTDVIDAAVLALFGARVQPAPRPLADAATRALAGLIARRRQLLEMLGAERRRLEQAPPTGPITRDLRNHIRWLERRVADVDDEIGTAIQHSAVWRVQEDLLRSVPGIGPITARTLLAELPELGRLDRRAIAALVGVAPFNCDSGQFRGQRRIWGGRASVRASLYMAALVAARHNPVLAPVYRRLRKAGKRPKVALVAVMRRLLTMLNAILKHQCRWNPKVASTPASPSRPARAATVGA

SEQ ID NO: 389651 - protein, 353 aa, unidentified
MMLIGVDPHKSTHTATAVEPGTNTEVASIRIDATLREYRRMLTWAARWPQRRWAIENAEGLGRHLASWLLARGEHVVDVPSTATARVRQLSRGGGRKNDRIDAAAAACVAALQGDARPLAAEGIADALAVLDERRVNLAQARVRAVNQLHALLRALLAGGAPTDLSAANAAALLRSVRPSGEVERVRKAVAGDLVAEIRSLDTRLKASAKTIADLVEKSGSTLTQTAGIGPIIAGRLIGRTGRPSRFVSSAAYANYTGAAPVEVASADKARHRLSRGGDRQLNSALYTVAMTQIRMSGSLGNTYYKTKIAEGKTPREARRCLKRRLADHVWRVMTSDERRHTAMPYLPDSHTA

SEQ ID NO: 389652 - protein, 359 aa, unidentified
MEAQRKALSFKGQNIYIGIDVHLKSWSVTLMSEATQLKRFSQSPDPDALYAHLVRNYPEAEYHSVYEAGFCGFWIHYRLVGLGIHNIVVNPADVPTTTSEKLRKTDAVGSAKLARSLRAGELKGIYVPGSESLETRSLIRLRDSITKDQTRLKNRIKSHLRYLGIEIPEEFSGPGRCWNRRFVVWLKGSETGTAYGRQTLDFLVRQYEALRGQRLEMLRAVMALSRTERFEKPLENLMTVPGIGQLTGMSLLSEIDDIRRFKSADQLAAFIGMIPMCHSSGEREGVGDITVRRSARLRSVLVEASWVAVRQDPALSMAYGNYCKRMAPGKAIIKIARKLVNRIYFVMKRNQPYVKRVVA

SEQ ID NO: 389653 - protein, 380 aa, unidentified
MEKACGLDVHKDSVFACILDEQGKKIFEKRFGTLTPDLDKLRDTLVEHGCGRVGMESTSIYWIPIWHILESDFDLTLANPYFIRQLPGRKSDVKDAQWIAECIQKDLIKKSFVAGETFQQMRQYARQLRRLTKNRVRIEQQLDNQLQRCNIRFSNYVSNQGSNVSMRKIIKAIIGGERDHAKLCKLVHGRTLNKHGKDVITNSLSGFIQQVDVEMLIQCMDQIDLIEKQQATCLNHLEELANTHFAEEISLLCTIPGIKKFSALCILAEIGNDMSYFQKANHLIAWAGLRPRNDETAEKIKSRKILHGNKYLRQILVEVSWAVARSNKSFLGKKFKNLANRMKSQKALIAITRKILVVVYNVLKTKQPFDPKRNLQAVVA

SEQ ID NO: 389654 - protein, 382 aa, unidentified
MQHKQVKTVKEIFVDWYKHTKIMNVLKVNLGIDAAKDSSECNLSVLTAELEVKVIASKLFLNTASGLQELIKWQKKNHPAGCPKVHAVIEASGVYHERFALGLQQAGYCVSVVLPNKAKKYMESLGLKSKNDRIDAKGLARMGCEQKLEEWSALSPFYQKLRTYTRLHEDIQQKRTDTSNQLHALKHSAVQMKDAIKVLERLSSVFDKELARTKQLIDDHIATSAEVQEKMDKVCSIKGVGSLTVATVVAEANGFDLIENIPQLVSYAGYDVVEDQSGKRTGKTKISKKGNHHIRRILHMPALNMVTYQVGAMPALFDRTLDKHGIKMKSYVALQRKLLILIYTLWKKNTAFDEHYHKPVSARVEEVETSSRHSLEEADITI

SEQ ID NO: 389655 - protein, 346 aa, unidentified
MREIIRIGMDTSKHIFVLHGVDAAEQPVLRKKLLRKQMLEFFAKLPPSVIGMEACGAAHYWARELGKLGHEVKLMAPQLVKPYVTRNKNDGRDADAVCEAMGRPRMRFVPVKSAEQQAALMLAGIRDGLIARRTQLSNAIRGYASEFGLIAPKGLDKIEPLLARIAQDESLPAMARDLFAMQGRDYAQLQGELKAIEARLLAWHRANATSRRLAQIPSVGPIIATSLVMKTPDPHAFRSGRLFAAWLGLTPKDHSTAGKTRLGKITRAGDEVLRRLLVAGATAVIRQVRLGRGQPSRWLLALLKRKPPKLAAVALANKVARIAWKLMVTGENYDAARLNAAPTIVT

SEQ ID NO: 389656 - protein, 407 aa, unidentified
MKKKEVIEFEQVVERGSGMDVHKDVIVATIQGKDIKTQTKSFKTFTSSLIKMKKWLLKNKVTHVAMESTGVYWKPIFNVLGDDFEILLVNARHVKNVPGHKTDKKDSRWLAKLLLSGLLKGSFIPERPIRELRDLTRYKTKLTHQISAEKNRFQKILEDANIKLSSVLNDVFGATGTKIMNHILSCESYRPEQLLQYVNGRVKASRADIKEALTGYVTIHHRFMLKTIMRNIERVETTVAEVEQQIETCIEPYKIERELLESIPGVGKDGATKIIAEVGVDMEQFPDQNHLASWAGVCPGSNESAGKNKSGRITYGNKYLRSLLVECGWAASRTKNTYMSAKYKSLVGRRGKKRAVIALGHKILIATYFIIKDKVAFNELGADHLNNFRRNRLIAYYKQQLEKLEAA

SEQ ID NO: 389657 - protein, 366 aa, unidentified
MKTSITPIGTPVGIDVHKRRCKVVELNQGEIKVRKPIANTREEWLEMLTELPPDAEIGLEVSTAGYFAMSVLEEAGWRERTHWVHTAGIDSNRRQKNDRLDAERLARKLAAHHLDPLPEAWFPPPEIRALRLRARARCWLALLRTQCKNHLQSLLQMHGLLPPGSDPFGAAGQKWLAQQTLPLPLTESLPQIQRLLKLLEEEIAISEKYLQAVEAQFPELALLRTIPGIGTILAPVIWSEIGTIERFRSAKALANNTGLVASYYDSGDVQVSGPITRQGSRWLRWAFVTAANVAIQYRNPFARRYHRLRRGKKPNVAKAAIAHSLARCVYGVLKHGCPYREDRWGRKVGALEQETRRSARSTKTAV

SEQ ID NO: 389658 - protein, 431 aa, unidentified
MTRLATDEFVAFIGLDWADAKHDICLQVAGSDKREVKVLEHKPEVIEAWATALLQRFGGGPIAIALELNKGPIVEALRKYDGFVLFHINPMMLAKYREAFTPSQAKDDPSDAELQLELLLWHRDKLTPLAPQSPEMRALAQLVEHRRRLVADRVRITNRLTSTLKTYFPQVLPWCPTKDSMLFCDFLGQWPTLKAVQLARRSTLERFFRHHHVHGEQRINERLDAIKSAVPLTTDEGVIASNALMVQALMAQLRVILEAIERFDQAIAERAQSHPDYALFEALPGAGPALAPRLLVAFGEQRERYGSAQEMQKYAGIAPVLERSGKQSWVHWRRQCPKFLRQTFVEWASVSIRFSFWARAYYEHQRDKGATHQAAVRSLAFKWIRIVFRCWQSGTPYDESVYLAALQRRGSSLISNLAQSSKKGEKEAKKP

SEQ ID NO: 389659 - protein, 345 aa, unidentified
MESMYYIGLDVHKKTISYCVKNTSGQVLQEGKIGATRGELDGWMKTLPQPWSVAMEATIFTGWIYDHLLPHAAQVKVAHPLMLRAIAAAKKKNDRIDAGKIADGLRCDFLPECHMAPTEIRDRRRTLRYRHLLVRQMVQLKNRVSGLLMETGVSYNKQKLHKVGYFRELLSSNQEIHPNIRPLLKLSRDAIVRLQKTEYALVSSLQRDPLLADRIKRLRTVPGVGPITALTWALEMGEVSRFPSIKQAISYCGLCGDEKSSADKVIRTPLSKQRNKHIQRVLVEAAKLAPRENHELALVYETEKQKGNANRATLAVARKMVAYLLAVDRGKRDFVPAEDHRGAAA

SEQ ID NO: 389660 - protein, 411 aa, unidentified
MKKLLERVCGLDVHRDTVKACARIPKEGKPDEREELIKTFGTTTPDLLLLRDWMKALGVTDAAMESTGVYWKPIYHILEDDFRVILVNAAHIKNVPGRKTDVIDCAWIAHLLECGLLSASFIPPKPIRDLRDLTRYRKELTQERTREVQRLHGVLQNAGIKLSSVASDIMGVSGQRMIKALMEGTTDPEVLADLAKGRLRAKLPGLRKALTGRFRDHHAFLTSEILAHIDYIEETLERLSKRIEEAIRPFSAQKEVLKTIPGWNDKTAEATISEIGVDMSKFPADGNLSSWAGLCPGNNESAGKHKSGKRRKGNKWLCAALTESANAVIRDKDSYYAALYARVVRRRGHKRAVIAVAHSMLVAAYHMLRTNKPYHELGGDYFDNLNREAIERICVKRLERLGYRVTLQSVA

SEQ ID NO: 389661 - protein, 293 aa, unidentified
MDKEIKMGYCIGIDVSKKRLDVDKLGKPMEVNNDELGITSLIGELTLLLNQGQLDLVLCEASGGYEQKLLRACHVNGIPIHLVHANNIKYFSRSKGIKAKTDKLDAKTISAYGNERKPEPDIFYLNETSEKIRLMLKRREQLIADKRREVCRLDKIENLDILEMIKAHIEWLDKSIKDIGGKLLDLKKSDDVKESHALLKSIPGIGDLLANYLIAFLPELGKLSHKALAALVGVAPFNHDSGEHQGKRFIQGGRSKLRQLLYMAAMTSIKWNMPLQSAYSTANRSSIPLQIDH

SEQ ID NO: 389662 - protein, 354 aa, unidentified
MITIGTDFHKRTSTYNVRDENGKQLQRKKLENRPELITEFLEQFPGPKRLAMEATRNWGLFYETVKPHVNEFLLGHPRRMKQITESQTKNDLQDADLICQMALGPFFPKAYVPGLDCRQMRSLLRFRNFLVGQRKSIRNQIQILLDRNLWPTQRPQSFKNPFCKRGLNWLKNVELPERERFILDRSLQSFTQLSQQITELENFVEAQSLEHPDLAYLRRVPGFRRSKVNTYIVLFELDDIQRFRKAKHLSHYAGLIPSEHSSGDKHRTGRLVKEANHFLRTAFIESTFAAIRQDKGLKLYYQSVKERAGSGAAIIACARKLSYAVYHVLKNKVDYQPYQPSVTTCHSLSVPAKG

SEQ ID NO: 389663 - protein, 419 aa, unidentified
MEETEDEEQIVERIASLDIGKAEVVCCIRVPGAGGRRRQEVATYSTMTRSLQRLAERLLELGVTRVVMEATSDYWKPPFYLLEAHGLEVWLVNAKDVKHLPGRPKTDKLDAVWLCKVGERQMIRASFVPPPPIRRLRDLTRYRVDLLGERTAEKQRVEKLLEDAGIKLSVVASDIFGVSGRDMMRALIAGQRDPKALAALARHRLKAKIPQLEEAFTGFFTDHHAYLLAKMLTRIDALDADIADLDAKIDEQIAPFAVAVARLTEIPGIGLTAATAIIAEIGVDMTRFPTAGHLASWARFAPGVKESAGRKKGAGSTGHGNRYLARALGEAALAASRTDTFLGQRYRRLARRRGKQKAIVAVGRSILIIIWHLLSNPDARFRELGPDFYDTRISAGRQIRNHIAQLEALGYKVTLEPAA

SEQ ID NO: 389664 - protein, 348 aa, unidentified
MLEDSEAFIGIDAAKSRNAIAIAEAGREGEIRYLGEVEATPQSMRKVVARLAAKYQRLHFCYEAGPTGYGLYRQLTALGHDCIVVAPSLIPRKPGVRVKTNRRDAIALARLLRAGELTDVWVPDEPHEALRDLVRARDAAVADLRRKRQSVTSLMLRHGRIFPGKTTWGARHARWLQEQHFEHPAHQIVLQELVLAIQHAHERLERIEAAIAEFVPGWSLAPAVEALQALRGVNLISAVTFLVEVGDLRRFESPRQLMGYLGLVPGERSTGDTVRKEGITKAGNSRARRTLVESAWTYRYPPRIGKVKLSHLQRVTPAIRDTSPGKRRADCARGSGRSRRGARSQRWP

SEQ ID NO: 389665 - protein, 400 aa, unidentified
MLSIGIDVSKGKSTVCGMKPGGEIVYTPFEIQHTREGMSELVSLLHNSGEEVRAVLESTGSYHCPVVAALLENGIFVSVVNSLRMKRFCSQSIRKVKTDRIDAMQIALYGLAYWQELQPTRLPEDTYRELQLLARQYYQMTSLLIKAKVDFNAICDQVLPGMQELMNDHAGRHKLSDFVLRYRHTAHILEMGETRFRKDYCKWAEKKGYRNCERMAALIFATAQNGIPVLPNAPSTQIVITEAIRVLHTVEASRDAILTQMQALAKTLPEYSLVREMPCIGNTLAPRLIAEIGDVRRFHSKRALIAYAGIDAPPYQSGKFCANNRHISKRGNRYLRKTGYEVMQSYVMHKPANDPIFTFIEKKRGEGKSGKLAMVAGLNKFLRVYYGKVTELYRSLPAIE

SEQ ID NO: 389666 - protein, 310 aa, unidentified
MDVIIDKGCGLDVHKETVVACVMGSGIKKEIRTFSTMTGDLFQLKSWLSEKGITHVAMESTGPYWKPVFNVLDDSFDVILANARHIKNVPGRKTDVKDSEWICKLLRSGLLAASFVPPKAIRELRDLTRYRRKLTQSISAEKNRVQKVLEDANVKISSVVSDTFGVSASRMIEAILAGNLDAESISDLAVGKLKGKKEELKKALVGNFQEHHRFMIQASFNHIGSLEKIIAELDQEIARKLKDYHKEYELLQTIPGVKEQGAASIIAEIGADMGIFPSEGHLSAWAGMSPGNNESAGKKKVERRPTAIRI

SEQ ID NO: 389667 - protein, 405 aa, unidentified
MRQVFVGLDWAEDHHDVFVEDDTGKRLGGGRLPEGVEGVARFHEFVAGHVDDPADVIVATETDRGLFIGALVAAGYTVLAVNPMSTSRYRERHSTSGAKSDPGDAKVLADLARTDAHNHRPVAGDSELAEAVKVLARAHQTMIWSRQRHTNQLRSTLREFYPAALEAFDNLAGRDALAVLAIAPTPTIGKLLSRSKIAAALRRGGRQRRIDERSVEIQTALRTEQLEAPALVADAMDASVAALVAVIAEMQTQVDRLEVELADRFEQHPDAKIIRSLPGLGMTLGARVLAEFGDDPNRYADAKSRKNYSGMSPITRASGKHHVVLARYARNRRLADACYQWAFATLTASPGARLFYDQRRAAGDTHHRALRALANRLVGILHGCLRHHTIYDEHTAWAHRLNLAA

SEQ ID NO: 389668 - protein, 528 aa, unidentified
MSKCRRRTVRGGTLVLKKIDESLRKRVREIGGDKVGVVPVDVAKKRVCAMVTDFYGTVLAAPEVFPVTAAGLGLLDRRIATVQKEHGLKQIVIGLEQTGRLHEPVRRVLRRHWEVKLIHPLVTKQLRQGISRDVKTEGMDVDALSRAVISCYGSADRPLPVAYERWRVLHRAREQLVDDRAALKIRMHERIHAVLPGFAAQFDSLWTSPAALALLGQFEGPEAMRQFSEAGLRRWLHDHGAACTRSRAERLVAWAADAVPPAATATTEAAVLRADLEHLALLGRQIERYEHEALELLVQSPYVLLLSAPGISHVLGGGLGAEAGPMSNYPTGRSLSGRAGLYPRRYQSDETDVQGCAMASGEPFLRDVLMKSGRCLIMRGGAFFAWGDSRRAAQRCEKQIVAAMANRFCRIAHAMVLAGQTFCHPNAKPAVSVLGKLLNVAADLGIGAEAVTALALQAAARIPPSSRPTEIDSLQTGAWKQDNRPREYGASPCTTRQITQTTVPALLDWLHRAESNHDIASNAAFGSP

SEQ ID NO: 389669 - protein, 344 aa, unidentified
MEHYAGLDVSIKETSVCVIDSTGRVVREVKVPTEPEAILAVLSDEDFNIKRIGLEAGPFSQWLYGELAEAGLPMICVETRHMRAALSAQVNKSDRNDARGIAHMMRVGLYRLVHVKTPASQKRRMLLTSRQLLQAKARDIENDLRGTLRNFGLKVGIVGAIKFEARIRELVANHPDLATIVDSLLVARRVLREQLSVLHRHLLAVVRDDDVCRRLMTMPGVGPVVALTFRATVDVPARFTNSKTVGAIFGLTPRRHQSGEIDRMGGISKCGDAMMRTVLFEAAQAMLTRTIKWSWLKAWGMKIARHRGMKRAVVAVARRMAVVMHRMWMDGTDFQWKREEVAAA

SEQ ID NO: 389670 - protein, 411 aa, unidentified
MEVIHPRCAGLDVHKDVIVACVRCVTAPQHREVRSFGSTTSELLALADWLAEHGCTAVAMEATGVYWKPVWHVLEDEFELVLANAAHIRNVPGRKTDVNDATWIAELLAHGLIRPSFVPPRQIQELRDLTRTRKQLVREVSQHSLRIQKVLEDANLKLGSVLSDVLGKSGRAMLHAIIDGQDDPATLAALAQGTARHKTAELREALRGRVSEHHRDLLRLHLQVIDALQATLVNLDATVGKALAPIRSSARLLTTMPGVSDLTANVIVAEIGVDMARFPTAGHLISWAGLCPRSDESAGKRRITRVRHSGTWLKTTLVTAAWSAVRVKTGYLRAQCLRIKARRGAKKAILAVAASMLTAAYHMLRDGTEYRDLGAAFHDQHDRSKTIRRLLKRLSDLGCDVPLEPHMATAS

SEQ ID NO: 389671 - protein, 416 aa, unidentified
MDTQYALRIGLDWADQKHDLMVLAAGAEAPMHCEIDSAPESIDHWLAKRRIEHPAGRFAVCLEQTRGAVCYALLKYDFIDLYPANPSTLARYRHAFSPSRSKNDRCDAELLLDLLVKHPDHLRRLEPDSAAMRKLTLLCEARRKEVDGRTRLANRLQSLLRDYYPQALGLCGQKLHSPLALDFLGHWTTFQALRRARKTTITHFYKSHHASERTAARCLETIAASCPVTDDAAIMETSILRVRILLEQIRVANQAVKTLEDEIEKTHPEADASALFASFPGAGKALAPRLCGGFGSDRTRFASTESFQAASGIAPVTEASGKAHWVHWRWSCSKFLRQTLVEYAHESRKRSAWAKTFYDSQRAKGNGHHAALRALAFKWARIMYRCWQNRTPYDEEQYMQSLKKHGSWLAQATEAA

SEQ ID NO: 389672 - protein, 352 aa, unidentified
MDKGNKLDFSGQHIYVGMDVHKKSWSVSIHTEQFEHKTFTQPPEVEKLTHYLQRTFPGATYHTVYEAGFSGFWLHDQLREKGINCMVVNPADVPTKDKERAGKTDRVDCRKLARGLRNGEIKGIYVPPRVKVEDRTLVRTRQSMVRKQTRCKNQIKSILFFYGITIPEESHWSRQFINWIESIHMERASGDFALKVHLEELKHLRQIIANLNRAILSLSRTEEYRADVLLLKSIPGVSTLTAMILLTEIVDISRFPSLDKLASYTGLVPDIKSSGETEYSTGITFRRNAALRTLLIESSWVAVRKDPALMMAFTKFSLRMKKTAAIVHIARKLLNRIRFVLIKQERYVTAVV

SEQ ID NO: 389673 - protein, 424 aa, unidentified
MIATFYGEILEKPFDIDASMSGFTKLKTLIGRHKVKANTRVVVGIETTGHYYEHLVFKCHLEGYHVRTINAATTAKEREALLNWSKTDNLDLMAIVQSVIHGRGTSNELPTGNIAKLRKLTRARRELTSERTKTKNLIRMHMDHIFREYQGKTVWINGKRKISKPLTDVFGKASRYLMRHYPHPSDILKLGEEGLRDLSIRENLKLRDKSIQLLLEYAEGSISRPKEQLDADIFLLSQKLDRLDLLDDQIKVLERKIEELFIVMDGAVVLSVQGIGLVTGAELVAEIGDLSDFDEAGQLIKLAGTNPIVKQSGDNRPSYYGVSKQGRRPFRNIVYQVGRSLAVNNPEMQQRYQKLKERGKHSRQAYIALGNRMIRLAFAMIRNHTLYQTEDKNYVLLEEISKKIRKTNVKKFFETHVSPIKCAS

SEQ ID NO: 389674 - protein, 339 aa, unidentified
MNCTVFGLDLAKRVFQLHWIEMETGEICRRQLKRQQVAEFFSNRRSCVIAMEACGSAHYWGRKFAAMGHEVRLIAAQFVRPFVKSNKTDLADAQAIWEAVQRPGMKFVALKTEEQQSVLTLHRMREQLVKIRTMQINQLRGLLYEFGADLPQGRQKGMARIPEELARLEDSLSAMFIDAMREQFRRIEILNQDIAGIEKKLLLWKKHDEASKKLLAIPGVGLLTATAAVATIGDAKTFKSGREFAAFLGLVPRQSGTGGRVKLLGISKKGDVYLRTLLIHGARSVIRHQNEHTPWLEKLLLRRPHNAAAVALANKMARTIWALLAHNRTFQKDYVASAA

SEQ ID NO: 389675 - protein, 511 aa, unidentified
MHKRAERPAPARRSELVNNCAAGENFAGERPASARSQSLTRHPKRVTESQLGEPQALAPTSNRESPQEGHYIGSMDGRAKRRKNQQHRKKTMNEPAPWQQYQAFGGLDWANEKHSVIVVNQTGKVIEDFEIDHSALGWKKFREKLQPYGSIPFAIETSHGVAVEQLLEAGMIVYPLNPKSAQAYRERKAPSGVKDDRLDGWSFADALRVDGHGWKALRPEEPLIKELRLLCRDEVTLIDQRTAFINQLRHALADYYPAALEAFDDWTSVSAWMFLQRFPTPESLAKAGKRKWQNFLHSRRLWGSTQGPRRMEIFARAGEFTGTPPTTKAKSLLALSLVQMLFVVEKQLALYRQRIEELFARHPDHELFGSLPGAGPKIAPRLLAEIGDDRERFGSDPQNLQCFAGTAPVTRRSGKQRKFYYVHQRWACDKHLRHALHHFAEKSLSRCVWAELYYEHHRQKNQSHANALRRLANRWLKIIYKMWIDRTLYNAELHHRNQVQHGSWIFRLQKS

SEQ ID NO: 389676 - protein, 409 aa, unidentified
MSNDASAAVFVGLDWAVHTHAVCLIDGAGAALDRFEVTHDRDGLAELMRRLARHGQRLRIAIERPSGLIVDALVEAGHEVFPIHPNAVKASRPRYRSHGAKSDASDAYLLADLLRTDGHRWRALAPQSDDVRALRALVRSRDDLVAARVAAANQLTSTLQAFWPGAAVIFADVASPIALAFLRRYPSPLSAKRLTEAQLQRFCKAQHYSGRRSAADLLARLRAAATGHVGAHTEQAMAEVVRAQVAVLAPIVTQITELTRRIEQFMHSLPDGLLMMSFPRAGQVCAAQILAELGDVRERFPSADQLAAEAGTVPVTYQSGKTRSVAFRWACNHRLRQAITCLADNSRHANDWAKAVYQAARARGCDHTHAIRILARAWLRVIWRAWTDRKHYDPALHGSALALASTQGG

SEQ ID NO: 389677 - protein, 504 aa, unidentified
MPAGECDPDARHSSCALAQRIVAFRREAEEHVKESLRFPSVLCSRRKELNVSLIYRRCAGLDVHKKSISVSAQMRVVGAQPTTESATFGTFTSDLQAMADWLKVRKVRHVAMESTGVYWKPVWNVLESTKWKFDLLLVNPQLVRALPGKKTDREDSERISGYLQQGLLRGSFVPPQATRELRELTRRRAHLQGDRNRVINRMGRLLETANVKLGSVISNIVGKSGRAILQAISGGESDPKALAGLTTGRLKCTQQDLEQALAGRYDEHLQWCLRELLEDLDALDRRVTAVELRIGQLTVDQRDVIARLGTLPGVDVITAQTILAEIGTDMSQFPDARHLASWAGLCPGNKESAGKRFSGRTRRGDRYLRRILVQNAWAVAHMDDCALTALFYRVAAHAGMKKAAVAVAHRILMLAYYIIRDGTQYREAGGDYYDRRNPAKTAKRLTRRLEKLGFAVTVKAPKEEPPKLRPGPLPAQTCKRCNAWGIACIHVRPRPAGAPEAPSR

SEQ ID NO: 389678 - protein, 321 aa, unidentified
MLTIAASEDGTLDAVRFAGKLDSERVWAVEDCWHVSGRLERGLLATGDRVLRVAPGLTETSRRAVREPGKSDPIDATAIARAAIREGLDTLPAAFLDEQALEIRVLTDYRDQIITERARLINRLRWHLVAIAPAAEAEIRPAGLLGPQIRARLARKLARLPLSPQLRIAKALLKRINEIYREELELLAELKTLIEARCPQLLAEHGCGTVTAAIIIGHTAGSQRFTSEAKFARHAGTAPIPASSGNTQRHRLHRGGNRQLNRAVHIIALSRARTDPATRAYLDRRHAEGKTKREAIRCLKRHLARRIWHVLYATTPPAKTR

SEQ ID NO: 389679 - protein, 342 aa, unidentified
MLYVGIDVAKNKHDVTALNVPGKTVLKPLTFSNNKAGFELLDLSFRQLNQDCLIALEDTGHYAFNLLNFLHEQGYKVYTYTPLLIKEFAKSLSLRKTKTDKKDAHGIALKLLSDPNREQFQHDNRQVELKILARHIHRLKKKQYDWKVQYTRCLDIIFPELDKIVGKHSEYTYQLLTCYPNPQKRLEAGFDKLIEIKRLTASKIQDILSVAPRSIGTTSPAREFEIIEIIKHYKRLIDKAETCVNDLMAEFNSVITTVTGIGGRLGAVILAEIRNIHAFDNPAQLQAFAGLDSSIYQSGQIDLAGRMIKRGSPHLRWALIQAAKACARFSPAFKAYLKTKLE

SEQ ID NO: 389680 - protein, 366 aa, unidentified
MIELEVQRCAGVDIGKEEVVVAVHVPGPDGRRQRMLRTYSTMTRQLLRLRDWLVEQGVTRVGMEATGVYWKPVFYLLEDVIQECWLVNPQHVKQRRRGRKTDVTDAEWICQMVEHGLVAPSLVPPPPIRELRQLTRRRAVLIAERTREKNRLHALLEDAGIKLGVVVSDVFGVSGRRILAALITGQRDPYLLADLAVGTLIHKTPALVEALTGRFVQHHALLADQILAHVDYLDTAVEQLDQHIDAAIAPFRHLIELLITLPGVLHRTAQVIIAETGGDMTVFPTAAHLAAWAGLCPGIHASAGTHHPTRAPKANKWLRRASARPPPPPPAPKPTSAPATDAWPNAAAPAAPDSPSRTASSPPPGT

SEQ ID NO: 389681 - protein, 344 aa, unidentified
MDFIGFDLGKHLSQICIITSDGELLEHRIKTEREQLNRLLGSRPQARILIEAGTESEWVARLLEALGHEVIVADPNFAPMYATRSRRVKTDKRDARTLAEACRLGAYRPAHRTSDNQRHVRAKLAVRETLVRTRAKYISLIRSLLRRDGLRIVAGAARSFHVRLAALHLSAELQEEIKPLLVLMDALNEQIKRADDNLAQLVKEDPVVKRLTSVPGVGTVTATCFVATLDNVSRFPDAKQARAYLGLVPSEYSSGERQQRGPINKAGPNRARYLLVEAALAILRRRNSQTAALHDWAMKIKERRGMKIAVVALARKLAGVLYAMWRDGTDFKSLAASDNEAVAA

SEQ ID NO: 389682 - protein, 340 aa, unidentified
MFHVGLDIHSTRISICVLNEAGHVAHRSQVRSTEEMLLTLRGLPGPFEVCYEASCGYGHYHDLLRPPAARVLVAHPGQLRLIFRSKAKNDRNDDERMAKLLYLGETPAVHVPSPEVRAWRELINCRGQVIAKRTRAKNTVRALLRGAGMAPPKKPGLWMKAGLRWLREPDLPTAPQRLRRDLLLEEIEALTRQVRRIEEELNRQARKTPAVALLRTIPGVGARTAEAVAAFIDDPHRFPNAKAVGRYFGLVPCQDQSGERNRLGHITARGAPIVRQLLAEAAWQAIRRSPRVRPFYERTRREDSQRQKITLVATAHYLARVMWAMLRHGTAWRESTTRAA

SEQ ID NO: 389683 - protein, 346 aa, unidentified
MVLIGCDYHPSWQQVCWFDRATGETGDEKLVHALGDAEKFYRRFPSPVRVGIEATGNCQWFLELLNRLGHEVWVGDAAKIRASDSRQQKHDKRDARLLLQLLMEDRFPRIWTPTREQKDLRQLLIHRYKLVGLRARVKNELQHLAMNQGVTRKGKLWSKAGEKVLRELPLAPWAGQRRKDLFRVREMLNEQIDLLDRAVVEAAEKNEKARLLMTQPGVGPITSMAFVLTMGDVSRFQRGKQVASYLGLIPREYSSGGKQRFGSISKQGNRFLRMLLVEAAQIAVRYDPGFRNEYLHRCHKKAKGVAKVATARKLAVRLYWMLRTNTGYPEVVRVESSSRVALVGAS

SEQ ID NO: 389684 - protein, 349 aa, unidentified
MKKIFISIDFSKEKFDATIIKAEDLSEMLSVGHQEFINKVSGYRKMLRWVDSLCGADTCEDWLFCGENTGGYSQMMSDYLYSKGYDLWIENALSIKRAFAMKRGKSDRSDSLKIAEYAMRYQDKARLYEPLSPALSQLREVFLYRHMLVRHKCSFEVRRIEKRFTQQKSSAKTMISQSSRHILTELKHEIQKCDQRIQELLRSDEELNRIFGIITSMPGVGTINAVCLMVFTNNFTKFDYNARKIACYYGVAPFARDSGTSVHSAPKVGYLANKMIKSLLSQAALAAVNFCPAMSMYYHRLVDKGKKPMVALNNVKNKMLTIITAMVKNDCKYQPECISINARSEMLNK

SEQ ID NO: 389685 - protein, 344 aa, unidentified
MAYYTGIDVSLRSVSICVVDDKGEVCLEAKVAAEIDAIVERLRRFSSEVKSVGFEAGTLTQYLTYGLQAAGFEVICLEARQVSVTLAAMRNKTDRNDARGLAQILRTGWYSRVHVKSLQSHQVRALLASRKAILTKCVDLENELRGLLKVFGIRLPSRVGHGSFDAELRETVSNDGMLACALVPLLDARTVLYKTYLKLDNAVKGLVRVDPICRRLMSIPGVGPVTALTFKAAVDDPNRFKSSRTVAAHFGLTPRRFQSGEVDNPGHISRAGDADVRSALYVAAHSLLTRNAQWSTLKAWGVRLAKTRGHRRAVIAVARKLAVILHRMWIDGSEFRWGAGETAA

SEQ ID NO: 389686 - protein, 335 aa, unidentified
MIVIGVDVHKHSLTAVAVDELGRALAEWGGPVEGEVVGWARALGEERLWAVEDCRHVTRGLEQTLLGEGERLVRVPPRLTAPQRRRGRSRGKSDSIDALAVARAALQEPLLDGPRPGEGTLRELKLLVDHRDDLVAERRRCQQRLRWHLHELDQRLAVPLGALDRAVWIDRLGRQLARGEQTTQVRIARDLLARCRTLTRSIVELDRELQARTKTIAPGLLELAGCGALSAAKLLCEIGPIDRFRTDAQLARHAGVAPLDASSGKHQRHRLDRGGNRQLNCALHRIAVTQGRVHAPARAYLERKQNEGKTRRKRSAASNDNSHAPSTRRSRTNHY

SEQ ID NO: 389687 - protein, 371 aa, unidentified
MVWTAPYGISCARMRLSETHSWEPSVEQIIRIGMDTSKYIFQLHGVDAAEQPVLRKRLGRKAMLAFLAKLPSTVVAIEACGAAHHLARELGKLGHTVKLIAPQLVKPYVPRNKNDGRDAEGLCEAASRPRMRFVPVKTVEQQAALMLLGVRDQLVARRTQLSNTIRGYAAEFGLIEAKGLDKIAALLATIAHDESVPVLARELFATLARDYAQVQVELKAIEAKLVAWHRTNALSRRLAQIPGVGPVTAAALVMKAPDPHAFRSGRLFAAWLGLTPKDHSTAGKTRLGKITRAGDESLRRLLVVGATSVVKQAKGKHKRGSGWLLELLERKTPKLAAVALANKMARIAWKLMTTGESYDSARTDTRVASAA

SEQ ID NO: 389688 - protein, 408 aa, unidentified
MEVVVVVGAGLDVHKSKIVACCIDGRSSPPQVVSCVFGTFRDELERLCQWLLKRECTHVAMESTGVYWMPVYRVLEGSFQIVLGNARHMANVPGRKTDLTDAQWIAKLLRHGLIQRNFVPPRTIRDLRLATRYRRKLIQTRTASQLRVEKLLQTTNIKLTSVLSDLFGVSGRLMLSALAQGLTDPNKLAALAKGTLRNKRVDLTRALRGSFSQDDARLLEVELKVIDDLDKRLRHLGLLIDDKVVPFADAIAWLDTIPGVDRVLAIDLIAEIGTDMTAWPSDGHFAAWTGTCPGNRESAGVRRHARARDGNPYVKSILIQAAVCASHTVTSYLAARYRRLAVRRGPRRAVVAIARAIAVAVYHMLSKQQPYIPPKVADPAVARQQRCNHLVRELTKLGFDVSFKPMNL

SEQ ID NO: 389689 - protein, 372 aa, unidentified
MGHHTEAFVGIDTSKLRNAVAIADSGRGGEVRYLGEFPATEAAIQKLVAKLAAKYGHLTFCYEAGPTGYGLYRLLKSLGHESLVVAPSLVPKKAGDRVKTNRRDAVSLAKLLRAGELTAVWVPDERHEAMRDLSRARLAVKKDLQGKRQQISSLMLRLGRIYPGKTTWGPAHMKWLMAQKIEHREQRIALEELLEGIRQESERVERLENAIREVVPEWSLAEVVAALQAVRGIDLIAAVGVLAEIGDLSRFQNPRELMGYLGLVPSESSTGDKVKRGGITKAGNGRARRILVEAAWSYRYPPRVSRDKQPKVEAAPRRVREIAWKAQTRLCGRFRSLERKGKRRTVIATAIARELSAFIWAINRELMAHRQA

SEQ ID NO: 389690 - protein, 420 aa, unidentified
MELKDCAAFVGIDWADQEHAVCLIDSEIQTPELSVLAQDPEAIDDWVAEIQRRYPGQKVAVCLEQKRGALIYALMKFDCLVLVPINPKQLSRFRDAMGPSGAKDDPRDASLLAELLMKHSEHLRAWLPDDVDTRRIRLMGEDRRNLVDARTALTNRLKSLLKQYFPLALLVCGTRIYGDLACQLLMRYSSLDKLQAASDDELGAFYREHHCYRRQLVAKRLQLIRQASPLTTDPAILEASVLAVEILLKQLVTLNQGIDQYDMRIATGMQAHPDASIFESLPGAGAAMAPRLLAAMGSDRERLTNAQEVQQLSGIAPVTKQSGKTRVVQRRWAASKFLRQTFHEFAAHSIKYSAWAKAYCDMMQARGNKFQAAVRALAFKWIRIIFRCWKDRTFYDEGTYITSLLKRQSPILKYFASSEK

SEQ ID NO: 389691 - protein, 350 aa, unidentified
MKKIVKQVVGIDVAQKVLVVCLGRMYDDWSPELYANKTFANTVKGIEALMLWVKKQTDQHIAVRFVMEATGVYHEMLAYFLEGKGYEISIVLPNKISNYMRTLDVKTVTDSTASQAITMFGLERKLDIWKRPKEIYRKLRQLTRERDQLVGERTMVKNQLHAEQTEAYPNKSSIKRIKDRIKMLDKQEKEIMKEVAAMIAQDSELQKMIIIICSLPGIGLLTAAVVLAETNGFDLVRNRRQLASYAGFDVIEKQSGTSVKGKPRISKKGNKYLRKVMHCPALTAIRHDERFKAIFARIVSRHGIKMKAVVAVQRKLLEMIFILYKTGKRFDKDYLMKTKAEKSEHELIKN

SEQ ID NO: 389692 - protein, 342 aa, unidentified
MKDTMIGVDLAKNVFQLHGASMTGEVLFRKKLSRGQFLRFMGSHPAAIVVVEACGSAHHWARELMAQGHEVKLIAPQYVRPFVKRQKNDAADAEAIVIAARQPEMRFVEPKTPDQQARAVLFRARERIVHQRTELVNALRAMLYEYGHVVPVGLGHVKRLEATPNDAARDLPDLVREEGHDLLAQIGEKTVRIDNKTQKLASLAKQTDVARRLQTMPGIGPMTAVAVEAFAPAMQNFKSGRNFAAWLGLVPRQFSSGGKERLGKVSKAGQVDIRRLLIIGAMARVNWASRKATSTDPWMMRMLVRKPRMLVAIALANKMARMIWAMLTRQEDYRNPALTAAA

SEQ ID NO: 389693 - protein, 389 aa, unidentified
MTKLFCGIDVAKFEHVASIYDPSSGEIILDSLHFDNNDKGFQSLLSHLSKLNKDNELFVGFESTSHYHQALFNYLTARKYKCYLINPYITSKFRSISLRDVKTDDIDSKSIAQFLSFDYCNLVNEEFLINELKDLAVQRHSLMTDSSRMKIKLKSYLDRVFPELESLVDIDVLAVRAILKKYPTARSISSARIDRLKNLAREASKGKYSPSKVESIKEAAKASIGIHSPSIALNIVQCIETLELKERQIDTVDKEIKKHPTVLNSPLHQLTGINDIEIAYIMSAIISITRFSSPGKLVAFAGLDPKIRQSGTWKASTARMSKRGNKLLRYALIWTAYNMTRKSGPMKDYYDSKKSQGKSHYNALGHCASKLCRYIFWILNHPDKEFKYQ

SEQ ID NO: 389694 - protein, 400 aa, unidentified
MKGFFTYEIIGIDIGKNKHFFCIMDQQTGEIISQPISFSNDKEGFDFLIQKIKSYSKDSVLIGMEDTGHYHFALLKYLLDLQYTVALINPKTTDFNRKMQGGITKNDKLDTINICDVLDTPERKKQYRISKVNSFDLYEQKQLTRHHHNLKEEENVYKNRLQKCIDIVFPEFNKLFNSKYGTVYMNILKTFGSAENVANTDIRTIRKCFEIEGRGNRISLTPERLKECARSSIGISSSAEVIQIKHLTAQIELIEEQLTEIDKKIEEFSIQNNSPILSIPGISHFSGTSILAELGDISNYSKPSQIIKFAGVAPLHYESSQFNAQHTSITKKGSKYLRKTLYQIILPVIRHNQVFYKYYQLKISQGKGHRCAQGHCVRKLLRIIYHLLKTNQQFDPQLLR

SEQ ID NO: 389695 - protein, 375 aa, unidentified
MEGAPMLDTTTFVGLDVHARSIKAVSLDVMTGEVRCATFGYDAGAVAEWVRSVDPKAKCVYESGVTGFDLQKRLSGLGVDCVVGAVSKMIKPSADRRRKNDRNDAEFLARMLSVGNVVEVWVPDDECEAARDLTRALEDARDDLSRSKQRLSKFLLRHGLAFDERTPTGRRKGNWTRAHWSWIESIRFAEGADNDVLAYYVDAVRRAAEEKARLEGLVEAEARKPRWRRRVDSLRCLKGVDTATAADLVFEAGEFSRFRNARSFAAWVGLTPSEHSSGESDRRGAITKAGNKHLRKALVEAAWHYLTCSGRPKDLAKGQAPDRVARRHAAKGVRRLVERREALLARGVHGNKANVATARELACWVWAVGLMAEEA

SEQ ID NO: 389696 - protein, 440 aa, unidentified
MRIMYERCCGLDIHKASIAACALISEKGKPQEETRRFGTMTADLRELAGWLQQKGIRHVAMESTGVYWKPVWNILEPAGFELLLANAQEVKVVPGRKTDQKDSQWIADLHKHGLLRNSFVPPRAIRDLRDLTRTRAILTQEHTSICNRIQKVLEDANIKLGSVASDVFGVSGRAILRALMKEENDAEALADLSKGLLRKKIPQLRRALEGQVTAHHRSLLTGQWSRMEFLEREIVDLETQIAERMKPTPEETAWTLPNTAEDAPAPLSPREEAIQLWMEIPGVGWTAACSMVAELGVNMDQFPSAAHVASWAALCPGNNESAGKRLSGKTRKGNVWLRRTMCEVAWAASHTKDTYFAAQFHRIASRRGNKRALMAVAHSILVTAYHMLKHKRHYQELGADFFDAINRDKVRDRLVQRLAKLGFDVTLKSKDSIASDSQKN

SEQ ID NO: 389697 - protein, 353 aa, unidentified
MKKVFIGVDVSKEKLDATIIEKTEGQHVVAGYETFDNSKDGIRKLSGWVRKTTKTAKEECLYCAETTGGYDRLLCEQLYAKGHTVWRESALEIKRSSGLRRGKDDKTDSKAIAEYAMRHADKAEPYRPTDRKIEELRELYLYRDSLVEERKVKVTRAKEIKATCASSPSANFMYKTSMEDAKRIESRIRECEKRINRLIASDENLARNYGHVTSVKGISLVNGVALLVYTGNFIRFDNPNKLATYYGVAPFRNRSGSSVDSRADVRCYSNRKLKGQLSQAALIAVLYNPTLKAYYDRLIAAGKPRSVVLNNVKNKLLHILFSLVVHDCDYEENHEWKRKLGNDGIEKTVAVSD

SEQ ID NO: 389698 - protein, 400 aa, unidentified
MSERREQVWAGVDAGKGHHWAAVVDGSGATLWSKKIDNDESAILAALGEILDLADEVRWAVDISGTSSALLLALLAAHGQRAVYVPGRTVNRMSGAYRGEAKTDARDAYVIAETARHRSDFAVIDVPAQLAADLALLTAHRSDLVADRVRMINRLRDVLTGAFPALERAFDYSAHKGALVRLTGYQTPAAIRHRGRARLTAWLAHRGVRGADAIAATALEAAQAQQTALPGEDVAAQIVSDLAGQILALDERLKRIDKQIRATFRAHPQAETIESLPGMGPILGAEFVVAAGDLSAYADAGHLASAAGLVPVPRDSGRRTGNLHRPKRYSRRLRRVFYVSAQTSIIREGPNRDFYLKKRGEGCKHVQAVIALARRRASVLWALLRDGRIFTSAPPVTQTA

SEQ ID NO: 389699 - protein, 348 aa, unidentified
MKIVKQVLGIDVAQKELVVCLGRMQDDWRPELYAHKTFVNTAKGFEIMLLWVKKQTEESIPVRYVMEATGVYHESLAYFLEGKGYEVSIVLPNKISNYFRTLDVKTITDKTASEAIAQFGLERTLDSWRRPKEIFRNLKQLTRERGQIVEHRTMAKNQLHAEETEAYPNKKSVARIKAQIRFFNKQVLEIKIEITSLVKQEKEVSKSIEIICSIPGVGLLTAVTVLAETNGFELIRNKRQLTSYAGLDVREKQSGTSVKGKPKISKRGNRHVRKAMHLPALTAIRHGERFKAIFIRLVSQHGIKMKAVVAIQRKLLELIYTLYKTNKMYTEEHLTLNEIGYERQTSVA

SEQ ID NO: 389700 - protein, 349 aa, unidentified
MTMTSLTDQRTVIGGVDTHRDVHVAAAIDDLGRVLGTAEFPTTLAGHRRLLRWLRRHGEVRLVGVEGTGAWGAGLMRFLHAEGIAVVEVDRPNRQRRRRHGKPDPVDAEAAARAALNGDACGVPKARDGLVEAIRALRVARRSAIKARTQAANQLHALVSTAPDDLRAELRELPLVKLATIAARFRPGPPDTAIAGTKTALREIARRWTALGDEITRLDADLEILVAQAAPTLVARHGIGTDTAGALLVAAGDNPDRLRNERSFAALCGTSPLEASSGMHRRHRLNRGGDRQANQALWRIALVRMSSCPRTRDYVERRTKEGRTKKEIIRCLKRYIAREVYADLRHLDL

SEQ ID NO: 389701 - protein, 424 aa, unidentified
MKVTYKTCCGVDVHKSFLVATIITTTGGIEPSYQKKRYSTFNNSILEFKQWLLDNDCHDLCMESTGKYWIPVFNLLEDEINVTIANPKWVKAVKGNKDDTKDSKWIGDLFRLGLVKGSYIPCKKIRILREFTRYRYKIVSCRSSEKNRYQNALTVCNVALDSVVSDIFGKSSTSIIDYLLEQSGNSINHEEIASKLLKSLKSKEDAVIESIEGYQMTDSQKYRMHLVRAHMDYITAEINDVDREIEKLISSDPDFENAIQFLMTIPGVKRDSAITVISEIGIDMTQFSSSKRLCCWAGLTPGSNESGGKKKSVRVTRAGVYLKPALVQCAHAAVKSEKSPYYKKKYESLMKRRGKKRAIVAIARMILTAIYQMLSTGESWNPSDLYKIDILEALLEKQKAKAIKQAMKLLQREGLYPPPEPIAS

SEQ ID NO: 389702 - protein, 417 aa, unidentified
MKIVRPICCGIDVHKSVLVATIASTGEDGVTSYEQRSFSTLNPDLARLRDWLLERGCPEVCMESTGKYWIPVFNALEGHVGVAVVHPKYVRAIKGKKTDRKDSRWIADLFRHDLVRTSFIPPRLIRECREIARYRAKLVGMRSSERNRYQNCMTVSNIGLGSVLTDCMGVTARAVMGDLASGEPFDEARVRSLVRGRAKAKADLVVDAVRGCRIDDAQRFKISESLGHMARLDEMIAACEAELRDRLEPHRDAVALLCTIPGVSELSAMLILSEAGTDMSVFEDAAHFASWAGLAPGCDESAGKRRSSRTTRAGQYLKPVLVQCALASTTAKAAAGDYFAAKYRRLRARRGHKRAVVAVARMMAVCIWHMLSTGEVFNPSDLDAPGRRRERRALTEQSALELLRGMGYDITAPEPAE

SEQ ID NO: 389703 - protein, 330 aa, unidentified
MFYLGIDVSKAKLDCSLLLDQASTKRKSKTFANSKSGVANLLEWLARHGVLPDHLHAVMEGTGVYHEQTALALADAGATVSIVNPAQVRDFGRGLAVRTKTDGIDSLVLARYGALLKPAAWVPPPQEARVLKALLARRDALAQDLQRERNRREKVDATDTPELIRQSIDDSINFLKQQLAKLQQDIDDHIGRHPNLRQDLDLLTTIPAVGPQVGSNLLSVMHCQHFSSAEQLAAYLGLVPIERQSGSSLRGKARLSKAGPPRIRAVLYMAAVVATKYNPHVKALYERLLAKGKTKMSALGAAMRKLVHLCYGVLKTRVPYLAEYTKTACV

SEQ ID NO: 389704 - protein, 355 aa, unidentified
MTDKPIAGIDIAKDGLDICVDDDARVERIANRAEAVGAWLDRMGPRLVGFEPTGGHERMLIAALRERSIPFLRVHPNDVIAFRQSRGVKAKSDPIDARLIHDFVTQELSRRGWHGSVIADERLRALAARRRQLLDALQAERCRLALAAVAAVRDSLAQVIAALAGSLEAVEAELAAALADNPETAALARLLQTIHGIGAVTATALLAQLPELGWLTGKPIAALLGLAPHTRRSGKTRSRETTSQGRAGPRQALFNAARAAIRHPSPFQEFYHRLVTQNRRPGKVALTAVMRKLLITANAVARDRQAWRGRQTAPAPRAGGTQCRPHGEPIARRAGRVKAAAAPRAVALSASLDAV

SEQ ID NO: 389705 - protein, 320 aa, unidentified
MASRESLFIGIDVSKPTRDVAFGADPHAPRETIPSTDEGVQLLVTRLQRLQPTLMVLEATGGLERMVVAHLLQAGVPTARVQPRRVRALAHAEGRQAKTDRLDARVLARCAERVRPPHHQATDEQRASLRALLVRREQVIPMRTAEINRLTAAAPNLRPGIQKHMDWLDQETRARAQERDNEAERTDEVRRKRELRDSVPGIGAITALNLLLRLPELGTINRTEAAAVVGVAPYANQSGAQHKPRHSSGGRRDGRSVLYMATLAATRRRLVRRAFDQRLCQAGKPRKVAIVAAMRKLLTILGAIVRQQKPWDPAVHTSAP

SEQ ID NO: 389706 - protein, 352 aa, unidentified
MLTKTKGYIMNSTTQEVYVGADLHSSNIVLSLTDNAGTEIIKKKVKTNITDIDKVLSPFKSQIKVIGVESTFNWYWFVDGLVDLGYNVKLGNPAKMKQYTGIKVTNDYTDARWLAEQLRLNIFPECYIYPKELRSVRDALRCRQLHVRRKTQTFLSFNGLLARYGYTETKAKDALKDWTLDDIENVFQDHFLCQELWVLIESTRFTGEQIKCLENLVRKFIKSTWQYKRIQQLPGIGDILGMTIVLETGDFNRFKSAGCYASYCRTVKSIRTSNDKKKGQNNRKNGNKYLAYAFMEAANFAVMHYPQVQSWYDRKKKRTNDIVARKALASKLSKAAWHVMKGEDFDMKMMFG

SEQ ID NO: 389707 - protein, 263 aa, unidentified
MREAKQTGRVSLGIDVATAKCDVAVLLPGKLARRTCAMDATGCAALATWVRQQGAEPVPACLEATGAYGAALALFLYEAGSQVSLVTPARIAADAKSRLARTKTDQADAALSAPCCQTPQPLPGTPPAAEVRALQALVRRVELRQERAQQEVKRQQRGIHSPAVRASREATRTFLRAEVAKTPRLIQEPLERSAELQQHLLLLRSSPGVGAWTAARVRAEIDEVRRAVAARQLAASAGLTPRERTSGSSVHRPPRLAKTGTSR

SEQ ID NO: 389708 - protein, 364 aa, unidentified
MDIMHYVGLDIHKKTISFCVKLADGTIVSEGVVKATRKDLDRWMATLPRPWMAAMEATIFTSWVYDHLLPHAAAVKVAHPLMLRAITVAKRKNDRIDAGKIADLLRVNLLPECYMAPQELRDLRRSLRYRNLLVRQSTQMKNKVSGLLMESGIEYSKQKLHQKAYFSELLKRKGEEQLPPSLTPLLELSRTTIETAQKMERQIVRGLEQDPLLAERVERLLTIPGVGPITGLTWALETGEPGRFRSVKQAVSYCGLCGSEDSSAGKQKRTPISKQRNKHLQSVLIEAAKLAPRYNPELAQVYQQEKDKGNHNRATLAVARKMVAYLLAVDRRKTGFVIPPAEKVVSPEKVTSAAEKVASAEKVA

SEQ ID NO: 389709 - protein, 387 aa, unidentified
MPQPNDLSRSLVALDQNSTIIAVIEMSQSTWLVAGMLPGIERQPRKKLEPSPERLLAVLHRWQDEAVRAGRTITRIAVAFEAGRDGFWLARWLAARGVEPHVIHASSVAVSREHRRAKTDRLDTELLKRAFLGWLRGERGHCSMARVPTIAEEDAKRPNRERDCLVGERTRIVNRIKSTLARLGIRNFKPTLRKAAERLATVHTPEGMPLPPNTSAELQRDMARLSFVVSQIREIEEARQKRLEQQHETGPHAMVRRLARIVGVGVETADLLVHELLSRPMRDRRAVARYAGLTGSPDESGARRREQGLARAGNARVRRAMIQLAWRFLMFQKESALAVWYRARTADSRSGTRKTMIVALARKLVIALWRFVTTGEPLEGVVLRPAS

SEQ ID NO: 389710 - protein, 343 aa, unidentified
MNEIIRIGMDTSKQVFQLHGVSAAGETTLRRQLRRKAMVAFFEKLPSAVIGIEAGGGAHHWGRLLTSLGHQVKILPPQHVKPFVKRGKNDAADAGAICEAMVRPSIHMVPVKTVESQAGQMLIKTRDRLVRERTRLSNTIRGHAAEFGLIAAKGLAHIKPLLVRIAADETLPPLARELFAFHGEEFVQLQIRLAAIEKKMAAFHRKSETSRRLEHVPAVGPNGAVRFAIKESDAKAFRSGRAFAAALGITPKDHSTAGKRRLGGITKAGDPMLRSTLVLGATAVIKQAELHPERAAPWLVALLKRKPRKLAAVALANKVARIVWKLLVSGETYNPERAFARAV

SEQ ID NO: 389711 - protein, 427 aa, unidentified
MNEPQYKPTLCVGADVHKDEIVLRAVDKALGHEVLERFHVTNNRPGAQLATATIAQAATDLGYARIEIGWEATGMLWIPFHRYLSTEPLLHPFELELVCFNPKLVAKFKDGLVLRSPKNDDRDAFDIAARIRFGELPVTYVPGNFWQGLRRLTRYRYRLSKALSQEKMRFQSYAFLKASDWKRVKPFANILGATSAALLTQFTVAELQEMTHDQLVDLIARRGRGRFADPTATARLVRQALRTSYPIDPRMDDMVTASLAAMWDHIRYLDRAMKRLDQHIARYIELIPNPIITIKGLGAVITAGILAEIVDVLRFEEHKHLAQFCGLTWRKSSSAGFVSQNTRLTKVGNVYLRYYFILGANLLRQHNLEYKAYYWRKYQQVSKYQHKRSLVLTARKLVRLVHALLTKNVPYVRPRMTDPGLEDDGLQ

SEQ ID NO: 389712 - protein, 323 aa, unidentified
MNKDMNYFGIDISKDVFDVTDSKGSHFQFKNTLKGFKEFLRLLDNRSHCVMEATGYYHYQLAYFLRDNDINVSVENPLSVKRFIQMKLSKIKIDKSDSKLICEYAQQVDLKLWEGHSRHQIECLQITRLLSVYTKQSTMLKNKLHGEEVLGNPSLFVVRSLKRSLKATQKEMAILEERLLRLVRQTHQDLLTRLETIPGIGRKTAIMLIVLTDGFKRFTSASELCSYSGLTPLIRQSGSSVNVRARISKMGNKKLRNLLFMCSFNACKYNKACRELYERIVAKGKSKKLALIAVCNKLLKQAFAIAKSGLIYDETYRSTLVKN

SEQ ID NO: 389713 - protein, 407 aa, unidentified
MDNKTIKYYLGIDVGKLNHQVILCDSEGKPVAKSLKFPSNFQGYQILTKYMEQYVIREQFPDIHAGLEATGSYWLSLYEQLKKLNLQEVTVLNPLQVKSYRNEGIRGSKTDTIDCLLIVKVLRFGDYKASDLPNGDLLALRQLTRLRLDLVKMTTSLKLRVISVFDTVFPEYQHLFTDIFGESSRAILDEAIDPESMSQISTEKLTQILKKVSHGWFGENKAVEIKQAAHQSIGIRLGIDAFSLSAQILLAQITHLEDQVEKLDIEITGRLKALNSTLTTIPGIGDVLAATIISEIGNFDRFAVLKDGAEKLVALAGIDPKMKDSGILKGKAVMSKRGSPYLRRAIRQAAFAASVRGKDPMLSGIYQKKISEGKHFEVALSHVENKMIHVVYSLLKSGKEYRPYGKA

SEQ ID NO: 389714 - protein, 392 aa, unidentified
MVISVGIDVSKDKHDCFIVSSEGEVLADVFTIPNTIEGFHCLLQRIRDCTAPQDKIKVGLEATGHYSYNLLGFLLDNGLATYVLNPLRTNLYRKSLSLRKTKTDRVDARTIASMLLSDAGLKPYTDTAYHNEELKSLTRYRFDKVKERAKLKSSIARLVCILFPELEKLVPSLHIASVYALLEEFPGAKQVANTHLTRLKALLETASNGHYKRDMALEIRNAAKNSIGSQMPAKSLELQHTIRLIHELDAEIEEIEEQIQSIMDELHSPITTIPGLGFRMAAMILAEVGDFTRFDSPDKLLAYAGMSPSTYQSGQLKNCYPHMEKRGSRYLRYALYNAAKYVCQWDPTFSAYLAKKRAEGKHYNVAISHAVKKLVRLIFAMEKSGVPYLLAA

SEQ ID NO: 389715 - protein, 436 aa, unidentified
MDADYANRLRWFRQFKEHVNASANTLIVGIDIGKDTHHAFLGTPAGRTIYRRLIFENSIYGFDRLLFLIKRYLSAEQLAEAVIGVEPTSVYHKPLAEYLITTGYAVVYVTNAAIKKNRAILDGRWDKNDTKDAANVADLVSRGRCHFYDLPDINLRDIRNLLSLRKRLKKQEHRLITRIRNNLVAQYFPELDGAWYSSQQENMAIVRFCLSPQKVAELSFDDFCRMVTRRRRGIRQYQRLRHIHDAAEQSIGCRQGSSVGFEAQLLVENLQRAREQIAEVEEQLYLICDSYKEYELLQTIPGFGPYVSAVVLGAIGYAQRFENAKQLLRLAGLDLNASRSGKRSQSAVPVISKAGKADLRYALYQAAKVATSRTVEFKAYFERILKGRQKEKGIKTKMRVKVSAKMLVIAWTLMKTLQPYKAGLLAIDEPVQPRGR

SEQ ID NO: 389716 - protein, 343 aa, unidentified
MALKIVYPICCGIDVHKTFVVACIASTNDKGVTTYKRHRFSTYTKGLMELSQWLCENECKDICMESTGKYWIPVFNILEDSCNITLAHPKYVKAIRGKKTDKKDAKWIADLFKHDLVAGSYMPPLEIRQLRDLMRYRFKLINFMSSEKNRLQNSLTVSNIQLGNIVSDTFGKSSMNIIETLLNNPLDTSFDLEPLVHGSMKQKLPELELAIDGYITPEQAEKLKVIKQHYEDLGSRKADLEKIILSLAESYTEEINLILTVPSFKNIFSAIAVVSEIGVNMDVFPTAKHLCSWAGLTPTNNESAGKKKSVRISRAGCYIKPLLVQCATSVVKSEKHPEIRNRY

SEQ ID NO: 389717 - protein, 366 aa, unidentified
MHDCRAGTVSVGLDVHAASIRLAAVRADELLEECTLPYDHEAVERRLRRWPGVRCCYEAGPTGFGLQRYLIGRGIACEVVAPGLVPSRPGDRVKTDRRDARRLARLFAGGLLEPIYVPSPEAEAARDLVRAREDARLDRMRDRHRLSKFCLRQGRRLPGKSWGVSRRKWLSAQRFPFPAQQRAFEDYLHAIDLIDRRVQLLERAIAEAAGQGPWAELVGRLRCLRGVDTLTALALVVEIGDFDRFQGAEGLMSFVGLVPCEHSSGERRKQGSITKVGNAHVRRLLVESAWHGRLRPQVGYELARRQRGQDPFVIDRAWRAQQRLHRRWWRMAARGKPQQKIVVACARELAGFVWAIATDQPLRQAG

SEQ ID NO: 389718 - protein, 315 aa, unidentified
MTVLGIDVGKEFIDCELLNEKRAAKKVPNSVRGFEQVVAWLRNRKIGRVHACMESTGGWSDELAFFLHERDHVVSIVNPMQIRAFGQSELSRTKTDRADAGLIARFCAAMHPPPWEPPKPAERRLKQLIRRRRSLVDMRTQEANRLESPGNENVRDSILSVMDVLEDQIDELDNQIKSTIDEDDDLRGKRNLIESIDGIGPITSATILGETPHIENFRNSKALTAFAGLCPQIRQSGSSTSSSRTTKIGNRAIRKALFMAALAALRSNDVIKAFADRLRERGKHRMEIVVATMRKLLVLVFGVLKTGRPFDPQRA

SEQ ID NO: 389719 - protein, 397 aa, unidentified
MNKIVHYIGLDVHKDSIAVAIAPQNSTEVRRYGIIGGTLDAVDKLLKRLSQANIELRLVYEAGPCGFVLCRHLRSKGIHCDLVCPSLIPKKASDRVKTDRRDADQLARLYRAGELTPIRVPDQEDEAIRDLIRARTAAVYDQRRARNRLKGFLLRLGFRYTGKTSWNDAHKRYLSGLLMPRPVQQIVFQECIHTIDDATQRVARLTQAVEDALPGWKWEPVVRALMSLRGLQELSAMTVIAEAGDLSRFENPRSLMHFFGLTPSEHTSGNKRVLGGITKCGNTHCRRVLTEAAWHYRLKPLVSEAMQKRQEHQSKEVRLIAWKAQQRLHKRFKVLAVRKKSVVAVTAIARELVGFLWAIACQVKPAQRPPAPEIIRTCRGKVYRLDPEKKMQKTKNS

SEQ ID NO: 389720 - protein, 423 aa, unidentified
MNKQTTTYTAFVGIDWADKKHDFCIRSAHEDDSSKTFGVIPHNPAKIEEWVLSLQEKYGGQLAFAMELATGPIVYALQKYDFIDIIPIAPSTLAKYREAFSPSRAKDDPTDAELALDLILRHPERFKKLKPQSTEMRSLIALVEQRRKLVQDKIRVTNRIRSTLKQYYPQTLEVFDRIDTFAFCDFIERWPTLEKVKRARQTTLIAFFQDHNMRRKDLIEKRIGLIDSAMPLTKDKAVISTNSLQALVHIDFLRTILRSIKKYDEAIAELAPQHDDYTLFASLPGAGPTLAPRLLAAFGEQRERFASAAELQQYAGISPVTERSGQKHWVHWRWHCPTFLRQTFVEWSAQTINKSFWAGSYYRQQRDKGASHNAAVRSLAFKWIRILFACWKNKKPYNESQYLSALQRRGSPLIANLGITENA

SEQ ID NO: 389721 - protein, 431 aa, unidentified
MLKINPLSTLYVGIDVSSKSNFVCALDFYKNKYINSSFANNQPGAEELAKKILECLKEHPDLNTIIAALESTSVYSIHIANFLSSCEELMHFKPYVFVLNPKCTANYKKSYIGLGKSDPIDAFVIADYARAGNIETEPWRGSQFLALKRLTRHRLHLVECMTREKTYLVSNLYLKFSELQMLEGDDRPFCDIYGATSSSVLTEYLSPEEIIDSSEEDLISFLAEKSRNRIKDISKTAELLRKAARDSYRLDKALYEPLNVSIASSFNCIETFKKEIKLIDTAIEREIKGLNPNAFIILQSIDGIGPVFAGGIVAEIGDISAFHSSDALAKYAGLTWKSNQSGDFDGEDTPMSKAGNRYLRYYLGEAANSMRKHNATYGAYYRKKYNEVPKHQHKRALALTSRKFVRLVYGLLARNQLYSGVSLDTSIKDSN

SEQ ID NO: 389722 - protein, 340 aa, unidentified
MICYAGIDLHATNSVLVVIDEADRVRYQKRLRNDLPLILAALEPYRTPVQGVVVESTYNWYWLVDGLMDAGYRVHLAHAPALPQYSGLKHADDQHDAQWLAHLLRLGLLPTGYIYPKAARAVRDLLRKRSQLVRHKTMVVLSLQSLLTRLTGTQLSLPRLRQLTPEGIRALVPFPEQVQAVESSLTVVQCLEQEIHTIEGTVREAGRTQPGYALLQTVPGIGPILAGTILLEAGDLQRFATVGHFASYCRCVGSEHVSNGKRKGAGNTKNGNKYLSWAFIEAAHFAIRYEAVIRDYYQRKQARTHPLVALKAVAHKLARACYHMLRAQVPFDMSRAFGGS

SEQ ID NO: 389723 - protein, 411 aa, unidentified
METIFRCCAGLDVHKSSVEAHVRRLEPDGTLEQQTRHWGTMTGDLKLMAEWLAGLGVTHVAMESTGVFWKPIYNILEERFTLLLVNARHIKQVPGRKTDVKDCQWIAQLLQHGLLRGSFVPPRWQRELRDLTRHRTQITAEKGRTANRIHKVLEDANIKLGSVASDILGTSGRAMLQAMIAGEQDAARMADLAQRQLRGKIPELERALQGRLTEHHRFLLRLLWQQLQDQEALLAELDRRIEACTRPFALQRERLTEIPGIQTRVAEALLAEIGPDMKPFPSAAHLSSWAGMCPGNNESAGKKRSGRTPPGNRWLRQALVQAAWAASRAKKSYLAAHFRRLVGHRGKKRALIAVGHSILVITYHMLSRSQRYQDLGADFLDKLDPKRLTRYHVKRLESLGHTVTLAPAVSA

SEQ ID NO: 389724 - protein, 421 aa, unidentified
MPNIEIGVDSMVKENFIYVGIDLHKETHTAVMIDCYNQKLGEITFPNRPAAFPKLVTKVKKCNTDGKEVVYGLENAYGYGRALAVWLIDKGYLVKDVNTAISHRQAKHRGAMYRKSDSDDAEAIALATLNMLDKLPDACPNDAYWSLGQLVHRRDNIMKQRTRLVNQLHEQLCIAYPSYKSFFNDISRPTALYFWEHYPSKKYLKGKSVEDLRAELVPVSHNKCSTKTCEKILDAVASDKVKNNAYQDARDMVTLSIVSDLQHYDSQLAEVDKMLEQMYKMLGCTLTTIPGVNVITAVKILAEIGDIKRFSNANKLAQFAGIAPLHLSSSGKGKDVATKQGNRRLQATIYFLAIQMVQLSSKGTPRNPVVRAYYEKRKAEGKTSQQALICISRRLISIIYGMLKNGTEYRMPVVENAGENR

SEQ ID NO: 389725 - protein, 399 aa, unidentified
MFCGWDWGSTHHGVCVIDDHGTIIKQWLVQHTHDDLGQLFGELAALADPLDLPVAIERSEGLVVGLIAAADHPVLMAEPTGFNAARPRWGSTGTKSDAGDAFMLADYARTDGHRLRRVAPVAEATRELGVLVRARACVVEARTAASNQLWAVLAEHWPGAAGLFQKLTSKITLAFLTDYPTPQAAARLGEGRMGQFCRRHAYRGGKPPAELIKRLRAAPAAASPISPEILAAIVAGSVAQIRVLNAEIRRLEDAIEGALASHPKAAVLENLPRAATVSLAQLIAEIGPLLDRCDSPEQVAAICGAAPITRASGKTRTVGFRYAANKPARVAITGFADNSRHSSAWAAERYRQARSRGARHPHAVRILARGWLRVIWACWHTNTAYDPSRHREEQLATIA

SEQ ID NO: 389726 - protein, 408 aa, unidentified
MDVIVKRCAGLDVHKRTVVACVRIASDAEVRREVRTFGTTTGELLELFDWLSDNDCTRVVMESTGVYWKPVWHILESGFELVLANAKHVRNLPGRKTDVSDSVWLADLLAHGLIRGSFVPPLPIQDLRDLTRTRKQLRQEMSRHTLRIQKILEDANIKLSGLVSDILGVSGRAVLQAIIAGESNPEALVAVTNGRLKASHDSLVAAARGTTRDHHRFLLELHLKQIDEIKNTIASVDAHIETVVRPLREHVERLVTIPGVSLIVALVILAEIGVDMSRFPTVQNLLSWAGLCPRSDESAGKHRSTRLKPGDPWLKTILVQAAWAATRVKGSYLQAQFLRLKARRGPQKAIVAVAASILTATYYMLRDHTTYVDLTASHFQKHDKQKTADRLVRQLSALGYSVTLEAAA

SEQ ID NO: 389727 - protein, 385 aa, unidentified
MIYVGIDIAKLNHFASAISSDGEELIKPFKFTNDNDGFQLLISKLDSLDKDSLIIGLESTAHYGDNLVRYLVAKNYKVCVLNPIKTSTMRKNNIRKTKTDKVDTYIICKTLMMQESLRFVTFYDLDLMDLRALGRFRQKTINQRTLLKIQLTSYVDEIFPELQYFFKSGLHQKSVYALLKEAPTPEAIASMHMTHLLKVNSHGRFDKKMAQQLRVLAQKSIGASDSSLSIQVTHTIQQIELLDSQLERVEAEMTEIMKFNDSVIMTIPGIGYINGGMILGEIGDIHRFSSPNKLLAYAGLDPSVYQSRNFQAKKTRMSKRGSKVLRYALVNAAHNVVKSNATFKTYYDAKMAEGRTHYNALGHCAGKLVRIIWKMMTDNLEFNLE

SEQ ID NO: 389728 - protein, 373 aa, unidentified
MNQNVIYIGIDVDDVQYHGSALDKCTGEVLDFRCRPTLKGLIGQLKKVREYFGDGKLALCYEASYVGFSLQRDLNDRGYDCEVVAPSSIPRRGGKAVKTDRIDAMELAQFYANGLLTIVTAPAVEIERDRDLLRSRQRLVQQQGSLRRHILSLLRRNGYHYKAESERKTHWQKHHYGWLDRTTDGCSGSLKMNLSLLLRQLESLDEILLAYGEEVEALAATPRYRESVEALVCYQGIKNLFALTMITEIGDVKRFAHPRQLVSWMGMDIREYASGGKSNRLGITRQGNRYLRTAFIEANQRGYRTARLSKAILTRRANSKPEYIAVADRCLRRLAKKGNHLLLAGKHPNKVKVACAREMVGFVWESLNQAAVA

SEQ ID NO: 389729 - protein, 323 aa, unidentified
MIKYTETFGIDISKGVFDCYGSIQGHLQFSNTAIGFNKFLERLSINSLVVMEATGYYHYRLAQFLYKKNRIVSVVNPLSVKRFIQMKLAKVKTDKSDAKAICEYGQINAVPLYTALTDVQSECLQLFRLLDSYLKKRTMTKNKLHGEDVLDIPSKDVYRSLTRNKKHLDSEISSLEEKLLSLVKKEQQQQLTLLKSIPGLGVKTALFLIVITDGFTKFETAAQLCSYVGITPTIRQSGSSVRGRSRISKVGNKKLRNLLFLCSFSACKHNKSCREIYERIVNKGKSKKLALIAVSNKLLKQAFAIAKSGHPYDETFVSVLMSK

SEQ ID NO: 389730 - protein, 454 aa, unidentified
MSGNRTKPTGLPIIHEFAAGIDIGSRFHVVAVSPDLSDEPVRTFQAFTTDLQRMADWLIETGIKTVAMESTGVYWVAAYEVLESSGIEVILANAREARAVPGRKSDVNDAQWLQRLHACGLLRASFRPGREIAALRAYLRSRERHLDYAAAHIQHMQKALTFMNLQLHHVISDITGATGMKIIRAIINDVRDPDILAAMRDVRCKASMETVRAALVGNYQPEHVFALKQALALYDFYQQCVAECDIQIEHAVAALNANRQKPEAPLPKARHRTKQPNDVNFDVRSAMYQLAGTDLTQIHGIGPFLALRLVAECGTDLTRWRTAKHFTSWLTLSPGCKISGGKVLSAHTRKTSNRVTVALRLAAVTVGRTDTALGAFYRRLAARIGNAKAVTATARKIAVLFYNAMRFGMDYKDPGAVHYEQQYRDRVLKQLHRRAAQFGMTLQPQNPAIVECVS

SEQ ID NO: 389731 - protein, 338 aa, unidentified
MIVIGLDVHKQSVTAVAVDEAGRPLDEAVIRVGSDALVGWASALSGERLWAVEDCRQLTRWLEQQLLGIGEDLVRVPPKLTVPERRAGRTRGKSDPIDALAIARAALREPDLSRPRAGERVYWEIKLLVDHRDDVVDQRRRTQQRLRWHLHQLDPTFEVPLRMLGRSSHLERVSRWLARRDQELQVKLARELVSTIRSLNQTVAELDQELEHRVSEVAPKLLELPGCAAVTAAKLLAEIGPIDRFKSDAQLARHGGVAPLEASSGRVQRHRLDRGGNRQLNSALYRIAITQARYHAPARDYLERKRAEGKSRREALRCLKRILVRVVFQTLKASPALT

SEQ ID NO: 389732 - protein, 417 aa, unidentified
MINDVRWFVGIDWATQSHCVCLLDAEGRRVGQHEFAHGGAGLAELCDWLLAKTQAAPGQIAVAIETPHGPVVEMLLEHGFVVFAINPKQFDRFRDRFTVAGAKDDRRDAYVLGGSLRTDRAAFRQLAADNPVMIELREWSRMADELKQERTRLANRLRQQLWRYYPQAAKLTDDVADDWFLALWQKVPTPDSAAKASEKTIARVLTAHRIRRLDAATVLKTLRETPLFVAPGTTQAACAHIRSLAARLHLVNQQIKEAQQNLDRLCAQIEGEENASGQSFEQCDVTILRSWPGIGRINLATLLAEAAEPLRRRDYHALRALAGVAPVTRQSGKQRFVVRRLACNRRLQSAVHHWSRVAIQHDAAARQRYDALRRRGHGHARALRSVADRLLCGLCAALKRQIPYDADHNSAKTSAKA

SEQ ID NO: 389733 - protein, 349 aa, unidentified
MKIIGCDFHPIYQQIVMWDKATGEMLERALSHERKEEVRAFYAGLQGPVRVGIEASGQSQWFEQLLAELGPEVWIGDAAKIRASCERKQKTDRRDAELLVKLLEEERFPRIWVPTPAERDARQLLLHRHKLVRMRTQLKNQLQALALNQGVQRKRKLWSAAGRKPLEALPLLPWASRRRAELLVLLDQLEASIGELDGAAAEQANTRPAVRRLMTHPGVGPITALAFVLTMGPAQRFRRGKQVASYLGLIPTEHSSGGRGQRLGHISKQGNPFLRGLLVEAAQSAVRHEPEMRREYQRLAQRKCRALAKVAMARKLAVRLYWMLRTEVDYAQLIQGSHAGQLESFRGRV

SEQ ID NO: 389734 - protein, 416 aa, unidentified
MNAVRIDVSSRKSTVAVLRPLGEVVCLPFDVTHDIAGLASLVEKLKALDGETRVVMEHTGRYYEAVAKALHEAGFFVCAVNPLLIKEYGANSLRRVKTDKADAVKIARYALDNWADLRDFTPMDAIRYDLKTLNRQFQLASKQRTASANNLIALLEQSFPGIRKCFDSPVRSDGTQKWVDFAHSFWHVDCVRKQPFAAFCERYRKWCKRHAYLFKLSNAEEVYALAKRAVVLTPKSKVVKVLVQEAANQLISISRSVEVYRAEMDRLAAMLPEYPVVMAMYGVGKSYGPQLMAEIGDVRRFERKQALVAFAGIDPMPNQSGDKNVRSNKSSKRGSPYLRKTLFNVIRTYLQCAPQDEPVFQFLNRKRAEGKPFYVYMLAAANKFLRRYYAKLRDYFASLDTLQPVAPIPTILKATL

SEQ ID NO: 389735 - protein, 365 aa, unidentified
MKKNSTVQQSPKRATARKAGPITIGMDLGDKTSRYCVLGEQGEIVQEGSVGTTKKALAQKFGALRRCRMAMEVGTHSPWVSRLLKSLGHEVIVANARQVKLISQSSRKDDRLDAQTLARLARVDPQLLRHPAPQRRSASALDGDSGASGTVEMRSSLVNTARGLAKSVGERLPKCDTDQMGVERMEGLPAELQQALQPLLEQIESVTEKIKESDGRIEQIARTKYPETALLKQVSGVGTLIALTFVLTIEDRDRFQKSRDVGCYVGLRPKRSESGESQPQLRITKEGDVYLRKMLVQGAHYILGYRGPDTDLKRWGLRLAGHGKNAKKRAVVAVARKLGILLHRLWVTGEVYEPLRNSRARPAAA

SEQ ID NO: 389736 - protein, 341 aa, unidentified
MGLYMINNFLGIDISKDRFDVFLSFISKKGKRETRKRSFKNDDHGFQSLLSFLQKHNVEEVKACMESTGCYGETLAEFLHNAGHFVSVVNPYCIKCYARSKLIRQKNDQIDAEIIADYCQKQEPSRWTPPSPELKKLKHLYRCSAALKDELALVNNHLERKERLPKEVVNAWGDLAMNIEQKIETIKNSIHELLKQHKELLENFQLLLTIPGIGEESAIAILAEVPNIRAFRNARQLAAYAGAIPRNITSGSSVYAKPRLSKVGSRTLCKALFFPAIVAKNHNPIVMSFCQRLKEKGKHNMAIVGAAMRKLLHIIFGILRSKSAFNPEHIKNYRASEGLVI

SEQ ID NO: 389737 - protein, 400 aa, unidentified
MRVVFGIDVSKASSEVAILVSGEKVHGYTIPNDAIGFNRLLGDLKTVHEPEIVFEATGVYSRRLQAFFEDNSYAYTRLNPLESKKQLDSLRVRKNDKIDAEKLAASQLILNRKPSYVQEALYQELCDLSRFYQNLTEDVVCSKNRLHKVLQVTFPELENILSAPTGEQYWNLVMTFPCNSFVLESDDATLTAIIRQSTAKRISEKRVTYLVDKLTKLANQSYCAVKKTSPVIEKVKYYAGELLGLSEHRQGVLEEMVAWAQSLPEYEILLSIPGIAETTATSIIGELGDIRRFHSANQINAFIGIDLRHYESGNFLAKEHITKRGNPYTRKILFKCIHNIALASHTNPCYIADFYEKRKRQSQVTSTKPHTIASIHRLIRTMYYLITHNKLYDHTSTQNR

SEQ ID NO: 389738 - protein, 426 aa, unidentified
MNNTQNQKIAQVTDKTLIVGVDIGSENHYARAILARGFEVSKKPFPFTNTEEGFESFVNWTHNLAAAHKLTKIMVAMEPTGHYWFAFVAFLKKYDVQVVLVAPQHVKHSKEMDDNTQEKDDRKDPIVIARLVPEGRYLIPYIPEDVFAELRVAFNRRCELVEEQVRIANRMIRWFDIYFPEYRKIYGRIDAKTGIMILKRAPLPADILDIGVDGICQIWKDAKLRGYGSKKAKQIYSAAEHSVGMKGGASVRWKLWQLLEEYELIERQLHDILQLIEDLLHQIPGADKLLNIPGAGLVTVAGFLSEVGDIKRFSDPKQIQKLAGLAVVENSSGKRKGLPGISKRGRSRLRWVLFQLARSMVMFNPEMKAYHQYYTTRKENPLKKLQSLVAISARIARIFYGILKNGTEYDPEIVMKDGSSIESVGD

SEQ ID NO: 389739 - protein, 450 aa, unidentified
MKKKNVSMEIINPCAGGIDVGSRSHFVAIGQAEKDVKEFGVYDEDLKSIAQHLLDNKIKTVAMESTGTYWQNLFSTLQNAGLEVILCNGKFTKNIKGKKTDVQDCQWIQKLHSLGLLSGSFLPDSVTEQLRTFCRHRGNLIDISASTTKKMQKYLRLMNYRLDVVVRDSVGLTGLLIIEAICKGENNPSVLSEFRHGNCRKSKEEIEKALHGNDRKDYLFALQQEYDLYKIIQSKIEECDKEIEKVLSYQISIDKNKSALKIDAKVYKKVNKNAPKNMDLNQLAYQYFGGVDLMSIEGVSHSTVIALMSEVGLEGFKKFGTSKQFTSWLRLSPNNKISGGKVLSSKIPKGSNRLKIALRNAANAIGNLKESHLSIFFNRISFRRGRHAAVSATARKLAVIIWNMVVKKIPYNPPSKYEFLDQKRKKKVIEMRKLISKFEISTNELGFAGT

SEQ ID NO: 389740 - protein, 331 aa, unidentified
MLKGGFCGIDVGASEFVVKLVREGEQRANCKTFQNTEPGRLGVCRYLSKAGHLVRVCLESTGTYGLDLALELDETDGVEVMVNNPRTVRRFAQALMKRGKSDRIDGDVLMQFAQRMPFTRWKRPSGAALELRAISRRIKSVTQARTAEKNRLHAASASKTTPKIVRRDIQQTIARHQKSIAGLTAEALKVIAREPELKNKFQLMVTATGIAKTSAIQILGELCVLSSDLGSRQWVAHAGIDPRHETSGTSVDRKPRISKTGNKYLRCALFMPALVARHHDAHLKAFADRLQAKGKQPIQVVVAVMRKLLVGLYGMLKNQQPYDGKKLFALP

SEQ ID NO: 389741 - protein, 373 aa, unidentified
MVSGHRFFDRFVHLKIHHPMAKRPSKTKSKATIAPETTLPGLSGAVGIDVSKAKFNACYMADSQSRAQGGEFTSDAAGHAKFLAWLDRVGAGRALHLCMEETGCYGQALAAFLHEAGHHVSIVNAALIKNYGRSLNVRTKNDVVDARLIAQYTLERVPKRWIPLASRHQALRDAARRRDQINELIIKEKNHLEASLSPQISALIRDHIDHLKNCKAELEKLMDQLLAEDPQLAHNAKLLATIPGIGKVSAINLLAEMPPLDGFTSARQFCAYAGLTPRENTSGSSLRGHSRLCKQGRGVLRRIMFMPALSLMGSKSGPLRAFANRLLNKDKKPACVVGALMRKLTALAFAIIRSGKPFDPNYASSFGQAVPQN

SEQ ID NO: 389742 - protein, 362 aa, unidentified
MTMLAEPNEKVEDPAILDAAVGGDTHRDTHYLEMLTGAGVLISRITIDNDADGYAEALAWIAEHTPGPRVLIGLEGTRSYGIGLCRALQAAGLEVVEAEQPKKAQRRGRGKSDPIDAHLAALTVLRMPADRKVLPRNDGDREALRILLGARREATTIKTKQTNRLRALLLTGDDDDRALSKGAMSDARLGTIARRRARKGENTEQQVRREEATRLALAIRRVTSELKANKTHLTELVEEFVPGLLDTVGIGPVSGAQAIVSFSHVGRCRNEAAFDALAGASPIQASSGRTHRHRLNRGGDRQLNRALHDIAKTRWRHCERTKAYITRRQAEQMPDREIRRCLKRYIARELFRTLTAAGVDNT

SEQ ID NO: 389743 - protein, 389 aa, unidentified
MKIFVGIDIAKLNHFAAAISSDGEILIEPFKFTNDADGFQLLVSKLESFDKNSIIIGLESTAHYGDNLVRYLVAEFYQVCVLNPIKTCQMRKNNVRKTKTDKVDTFVIAKTLMMQDDLRFITFFDLDMMDLKALGRFRQKTIKQRTRLKIQLTTYVDQVFPEIQYFFKSGLHQNAVYALLKEAPSPKEIASMHMTHLANLLKVNSHGHFTKEQAKELRILAQKSVGANDSAISIQITQTIQQIELLDSQLEKIEAEMTDIMKFNDSVIMTIPGIGYINGGMILGEIGDIHRFSNPNKLLAFAGLDPSVYQSGNFQAKTTRMSKRGSRVLRYALVNAAWNVVRNNATFKAYYDAKRAEGRSHYNALWHYAGKLVRVIWKMLTDEVEFNLE

SEQ ID NO: 389744 - protein, 379 aa, unidentified
MKKTYYIGLDVHKETIAIAHTLGQSRKEATYHGSCGGSNLAAEGALRKLAKKLGVGFKELKVCYEAGPTGFVLARRLRHLGLECVVMSPSKTERKPNEKIKTDKRDAKKIAKLFRNGDITEVRVPPALDEAVRSVCRARTDSSDDLSRAKQRLNSFLLVNGFRYSGKSRWTAAHMRYLRDLSMPDPYLRITLEEYIQAVDSCIERVERITQRLKDILPQWEWKPVVEALMACKGFQEVAAMTIISELGDLRRFDHPRKLMAFLGLVPGEDSTGSRRRQGAITKCGNSHARWMLVECSQHYRKAPKIGSALSKRQEGQGKNVKELAWRMQNRLHARYVKLKARGKREPKALVAIARELCGFIWELQNKLNLPIPGEKPMS

SEQ ID NO: 389745 - protein, 380 aa, unidentified
MEAAMEATAVPCRVLAGIDVHKKMLAVVVRRDQNGETSYQKRAFGTTRSEIEHLTAWLQHNFVTEVVMESTAQYWRPVWYGMEAHFTLHLSHPLQTRAPRGRKRDFRDAQRLADRLSAGDLEESFIPGAEQRAWRWLARTRVDLQRKITRVRNQVEGVLEEGGIKLAAVVTDLFGISGWCMLERMAAGETDTEALVELAQGKLLKKKAQLREALKGSLPSHCRLLLRQHMEQVTLLRRQVVELTAELGRALKQHAGIVERLCKLPGVDHCAAQALPAEIGPRAAAFATPEQFASWIGVCPGSQESAGVSYSTRSAKGNRYLRRVLCQIAWAAVHSKGTFFKQLFNRLKPKIEAKGAVWAVAHRIAKVIWLMLAHEPKSGS

SEQ ID NO: 389746 - protein, 416 aa, unidentified
MKLFVGIDVSSEKLDVCFLTDDNQLSILSEISVANDIEGASFIRETILEFNNSYHFDQIVIGMESTSMYSFHPSMFFHEDEKLKKLNTLVTIENPFRVKQFSRMFDENKTDRNDALRIADFLRIQRFTTSPIKEEKYMALQRLTRTCYQLIKQLIRTKQHFLENLTYKCNTLAREMRDESTSLFSATLISLMTEDFTLDELAELPLEAFCDLLQEKGKGRFKQPEKIAKAIQRAITMSYRLGALAQESINVVLSVLVREIRALEKNIKELDKAIEQVIVVIPEYQCLTSIPGVGKVYAAGLIAEIGQIERFEDQTKLAKYAGLSWKVNQSGNYQSQNTPLTKQGNRYFRYYLVEAANSVKNYLPEYKAFYQSKYKEVPKHQHKRALVLTARKFTRLVDTLLRKHQLYTPPRSVIEK

SEQ ID NO: 389747 - protein, 351 aa, unidentified
MNYNTVYVGMDVHKESFSLCAYTIEAEKASHYQRTEADYKKVLNYLEFLRTIYGDDANFICGYEAGCFGYTLYHQLTANNVKCIILAPTTMLEQRSKKRIKTDRRDAEIIAKCLAQHNYSPVHIPTAKDEETKEFLRMRDDHKLALKKVKQQILAFCLRHNYRYDGKSHWTAAHLKWLKALTPEALYKEILDEYLLTYQTLSDKIERLDKRIEELATQDEYKEAVKKLCCFIGVKTHTALSVLVEVGDFKRFASAQHFASYLGLVPGEDSSGDDQNRLGITKAGNRHVRLLLTEASQCYARGQVGFKSKELKSRQSGNTPAVIAYADKANERLRRRYYKICLLYTSPSPRD

SEQ ID NO: 389748 - protein, 343 aa, unidentified
MKLYAGIDLHSTNNYLGIIDEKSKRLFKKRLPNNLGVILMALEPYKEDLSGIVVESTYNWYWLVDGLQEHGHKVHLANPSAIKQYEGLKHTDDKWDSFWLAQMYSLNILPEGYIYPKEKRPVRDLLRRRLFFVRQRTANILSLQSMITRNIGIKMSARAIKKLTESDTKKVFESPHLVLSADSNIAVIRFLTEKIKKIEKEVRSQVKLRKEFKCLLTVPGIGDILGLTIMLEVGDIKRFPKVGDYSSYCRCVKTERLSNGKSKGKGNKKNGNKYLSWAYIEAAHFARRYCPKAKKFYQRKMAKTNKIVAIKALSNKICRASYYVMRDQVLFDEHKLFDNRVQQ

SEQ ID NO: 389749 - protein, 575 aa, unidentified
MAMLLDAPTREEASAQMIGVGIDTARYGHRVTFLRSDRQPAAPPLDVEESHAGYQRLRQALERLAREPRVQFHVRLDAAGQYAANLEQFLRGLPLPLEISVGQPARNAAYRRVHYPKRKSDDTDSRAVARFAVVEQPAATPATSAELLMLREVASQLDSQVKQTTRLVNQLHGLMARVFPELATLAPDLGAQWVLRLLEQYPTPERIARARQASLTAIPYLTDKKAAALQAAACQSVGSLRGPFAETLVRQAVGEIRLSQQIEKRLSELLLEAYDALPKGPHRLLTTIPGIGRATAAVLVAKVVSIDRFATAEQLVSFFGAFPEENTSGYDRRGRPVPPRTMQMSRQGNDLVRRYLWMAAQSAIVHNPAVRPLYLRQRARGKRGDVALGHAMRKLLHLVFAIWKTARPFNPAHHPWESADGSKTAAGHRQEVILQGKVVTAATCKVEVSAAAVNPPTPATLAAPAAAATPSPLRPHVDYAFLRSQITLERVLEHLRLLEGLRGSRQRRGACPIHGSQNLRSRTFSVNLDRDVFQCFDGACGTAGNVLDFWAAFHRLPLYEAALHLAQTFGLRLNP

SEQ ID NO: 389750 - protein, 407 aa, unidentified
MQLIFVGDDWSEEHHDVCVLDEAGKQLARRRLAEGVAGVGELHELAGGFAESPSDVVVGIETDRGLWVAALVGAGYQVYAINPKSVARYRERYKLSGAKSDPADAKVLADLVRTDRHNYRTVAGDSPAAQGIKVMARAHQRLVWLRRRQLNALRATLRESYPAALVAFGEELEGADALAVLAKAPTPEGGRALSLSAIQAALRRGGRQRNLERRAEQIRQALRSQQLALPEGAGTAYGAVVLSAVAVAGEMNRQLARLEAELASHLDAHPDAEIIRSQPGLGTVLGARVLGEFGDDPDRYVDAKARKNYAGTSPITDSSGKHRFVKARWVGNDHLKDACYLWAFAALSGSPGARRYYDALRERGKGHNAALRALANRLVGILDGCLRHRCTYDERIAWAQRQAKRAA

SEQ ID NO: 389751 - protein, 350 aa, unidentified
MLIIGVDFHSRFQQIAMVDTETGELIERRLEHGNGEAKKFYARLQKPVRVGMEATGYAQWFERMLAQLGHELWVGDAAEIRAAMVRKQKTDSRDALHILDLLLQNRFPRIWIPSPAERDLRQLLRHRHKMVCLQTSLRNQLQALAMGQGICRKKKLWAARGREELEALGLDPWASRRRQELLEILDRLDSSLAELDRAVIKEAEGCPAALRLMEQPGVGPVTALMFVLTIGPVARFRRSKQVVSYLGLNPRESSSGGRQRLGAISKQGNSLARYLLVEAGQTASRYDEKLRRDYQRLKFRRGSTVAKVAIARKLAVRLYWKLREQPSPVPPARMQGSSESALVGASLSSV

SEQ ID NO: 389752 - protein, 357 aa, unidentified
MKPKDKLADFRSQELFVGIDVHKKSWTVTIRLENLELKTFSMNPSSEELKNHMKTKYPQGKYHSVYEAGFSGYWLHRELTELGFNNIIVSPTDIPTSGKERLRKTDKIDSRKLARELSAGNLKGIYVPSLLFQELRGLSRQRYQQTKKLTRIKNQIKSYLNYYGQDLPENCELLHWSMKFICYLRTLEFSYEMGKEQLENYIDELLLLRSRKLKILQSLKKHLQKHNLYNKIKLLITVPGISYITATTLLTEIADIHRFNSTDSFASYIGLVPSTKSSGEKDKVLGITVQFNRYLRQLLVEASWVAVRNDPALTLSFTNYSKRMCNQKAIIKIARKLLNRIYYVLKNEKEYVRSVVA

SEQ ID NO: 389753 - protein, 333 aa, unidentified
MVAGTNGSLDKAGTTKMTQTNTLTAGIDTSKAKLDIAVHGRAECWQVANTPQGWRRLVAALVQIGVERVGIEATGGYECGVVAQLRAAGIMVLLLQPVQVRSYARVHLRRAKNDRLDAMLIAACAAGLDPPSIEPDARLAKLAGYLTFLEQIEEDIARSKVRLEHIKEIRLRRIVLADIARLRKRRRVELARIVAALRSHDDLACRLDLVGSVPGIGERTAVAIVVRMPEIGRISREQAAALAGLAPFDRDSGVHKGQRRIEGGRARLRRSLFAAALPAAFRWNKALIALYARLIARGKAHNAALVACARKLLVYANTVVQRGAPWTERPATT

SEQ ID NO: 389754 - protein, 400 aa, unidentified
MTQSNATHSAVEERTVAERLSAASDVHAAYIGLDVHKASISVSIAEAGRQAPEFRGEIPNEPKAIDKLVRQLSQRFDGQPLLFSYEAGPCGYGVYHQVQATGHDCEVVAPALIPRKAGDRVKTDRRDAQMLARLSRSGELTPVWVPTPEQEAVRDLTRAREDMKAIELKARQRLGAFLLRHGKVYAGKSKWTQAYFRWLETVRFETPVQQIVLEEYVDAVKAAQRRVAGLEAQMRAVLPSWSLAPVVEALMAMRGISLIAGMTVLAELGDISRFDSPRQLMAYLGLVPSEHSSGGSRRQGGITKTGNGHVRRVLVEAAWSYRFPARKTRAIQQRAETTSPTVQAIAWEAQKRLCGRYRRLADTGKVTQQVTTAVARELAGFLWAIACEAMGKPHGSRATA

SEQ ID NO: 389755 - protein, 480 aa, unidentified
MNVKTNKTKKQANVENQAVNLLSKEELCKRIEDVEKELKSYTWRELETNGKFAKNDKLSFIKDDMLIVGCDIGSETHYIRAIDIRGRELSRKAFEFSDMAEGFEAAKAWMLELAVQNRKSQIVLGLEPTGHYWFTLAAWLITAGISVVQVNPYAVKQSKEIEDNSQLKDDKKDPKLIANLVKDGNYGMPYLPEEIYADMRRLSMLRDQLTEDRIRNINRLHRELKIYFPEYMDAFGKIDGTFALEVLKVSCIPSEITELGTEGLRNIWHEAKLRGRGYSRASEIVEYAEKSVGLKDGSSVGRETVKWFAKEIMKLDEQLAWIENTLHKKCMEIPYAENILEIKGVGENILAGIVAEMGDISRFDDVKEIQKLSGMSLVACSSGKHKGQTKISHRGRKRLRYWLFQAARLAVSHAEEFKELHVYYTARADNPLKKMQSLIVIACKILRVIYTILKTGKDYDPQKMLKDIKRPKAALAAKAA

SEQ ID NO: 389756 - protein, 389 aa, unidentified
MDLAGRRLSKARLPEGVAGIARLHAMIGDQLGNDIDESEVAIGIETDRDPWVAALVAAGYTVFAVNPLQAARFRERSGVSGAKSDAADAHVLADMVRTDSHQLRPVAGDSPEAEAIKVLARAHKTLIWERTRHTQRLRHALREYFPAALEALDDLDTVDALELLGKAPDPASAARLTRGQITAALRNARRRDIETKTDRIHAALRGEHLGRAAVITTAYAATTRSAVAVLSTLNHEIKALQGQVDEHFGRHPDAEIILSQPGLGSLLGPRVLGDFGDDPERYATAKARKNYAATSPITRASGKKKVVAARFVHNDRLVDALNSQAFSALHASPGARAYYDKQRARGLDHGPALRQLANRLVGILHGCLKTRTCYDETTAWAHHVEKAAA

SEQ ID NO: 389757 - protein, 375 aa, unidentified
MRDHSEVFVAFDTSKLRNAVAIADAGRDGEVRYLGEIDNTPAATAQLVKKLTGKYGRLAFCYEAGPTGYGLYRQITSLGHECIVAAPSLIPKKAGDRVKTNRRDALGMVTQFRAGELTAVWVPDPRHEAMRDLTRARGAAVEDLRAKRQQVSSFLLRLGLHYPGDKTWTKTHMNWLAKQKLAHAEQRIAFEEMLLAVRQAQERIGRLEAAIRGAIPDWSLAAGVDALMAMRGIDMVSATAFLAEIGDLSRFRTPRELMAYLGLVPSEHSTGDKVQRGAITKTGNRRARRILVECSWAYRHPPRVGKKKQDKVAAAPPPVREIAWKAQHRLYGRYRALIRKGKAKTVAVTAVARELCGFIWAVNREITTASAVARP

SEQ ID NO: 389758 - protein, 345 aa, unidentified
MKLSRVGVDLAKNVYQLHGVDRHGKTVWRRRLRRGQWLQALMETAEPGCEVGMEACTGAHHWARLLQARGYTVRLIAPQFVKPFVKSNKNDANDAEAICEAMSRPHMRFVSVKSVEQQDIQAMHRVREELKVHRNAKANQIRGLVAEYGLVAPRTLLALRRAIPEWLEDAENGLTGHFRSLLHGLWGDLLTLDDRLEELDKEIGKLARSNEVTKRLQQLRGVGPLVATALVATVGDGQQYAKGRQMASALGLTPRQNSSGDKFRLFGISKRGDVYLRTQMIHGARAVVSQARHRDDPLSRWVTDIAKRRHPNVAAVALANKTARIAWAMLRNDTEYDAGLAVGRA

SEQ ID NO: 389759 - protein, 332 aa, unidentified
MIFVGIDVGCKELVFVIRHQGKSSKAEIVTNTFKGHQAIIKKLEKLSDSVRICVEATGVYHLDLVLALSRAHLDVMVINPKTSHNFAKVLMKRTKTDNVDAEILAQYAERMDFTPWQCPSSKALEIRACSRHLEELSYQCTRLRNQIHAMKSNGTTPVYLLKDNQQALVSLEKRIVSIRNKAVQVIEQDELIKMRYELLLSIKGIAQKSAVQILGELLVLPEDMSARQWVAHTGLDPRQFSSGSSVNKKPRLSKAGNQHLRRALFMPALSGVRWEGNVKAYYMHLANDNGLKKIQAVCAVMRKLLHAIYGMFKVGKPFDGTRFYKFPSGKAA

SEQ ID NO: 389760 - protein, 372 aa, unidentified
MEERTKFHVGLDVHKDSISVAAAELGRAPARLIGKVTHDLNKLLKVLAKIGSAEQLHIVYEAGPTGFGLQRALKERGYLCEIIAPSQIPRRPGDRVKTDGRDCIQLAECSRAGQLSAVWIPEPGDEAIRDLARAREDAVNSRVQARHQLKGFLLRHDIRYPGKTSWSIAYYRWLSTLNFDAGATQTAFTEYWHTVEAADERVERLTKALVASITGWRFEPVVRALQALRGVAAITAISLMAEIGDLARFSHPRKLMGYLGLVPSEHSSGERTSRGSITKTGNAHARRLLTESAWNYRFKARIGREALARQEALPESIRATAWKAQLRLTQRFAALRNRGVQINKACVAVARELAGFIWAIGLQVRREEEQAA

SEQ ID NO: 389761 - protein, 413 aa, unidentified
MRKLYRRVAGLDVHKDQVTACVRIARKGEDPFEEIQEFGTTTAQLLVLRDWLAANEVTLVSMEATGVYWKPVYYILEDEFEAWVVNARHFHNVPGKKTDDNDARWLAELTQHGLVRPSFVPPRDVRELRDLTRYRKTQIQARTAEVQRLDKVLQDAGIKLSSVASRVLGVSSRAMLDAMISGTTEPEVLADLAQGRLRAKLPALREALRGRFTARHALLVSEILGHIDYLDEAIERLSAQVKEAIRPFEEKADLLKTIPGVDELTAQSLIAECGPDMSRFPTHRHLASWAGMCPGNDESAGKRRSGKTRKGSKWLRDTLVQAAHAAARTKNTYLASQYARLQGRRGKKRAAVAVGHSILVSAYHVLSRGVPYQDLGEDWLLTRDRERQTRRLVKQLARLGHIVTLDPAEVVSA

SEQ ID NO: 389762 - protein, 335 aa, unidentified
MQTLKQAVGIDVSKDELVACFGSLNSELKQSISSAVCFKNNPAGFKALVTWANKLSDNNLFVWFVMEATGVYYENLAYFLSENGYQLTVLLPNKIKNYMKTLDNKSKTDNLDAYAITLFGLEKTLKKWQIPDNLFKKLKELTREYINIKSLSTRAKNRIHAKEHAYKPTAETLKRIKEQLNLYNKQLKEIQNEIEELIKQNTDLYNKINNIQKIEGVGLMTIVTIIAETNGFELIENAKQLTSYAGIDVVHNQSGYSTGKTRISKKGNGYLRRALYMPALSAAKHNEKLKQIYTRLVIKKNIKKIAVIALMRKILLLIYTLWKKNVEYIPNYKPI

SEQ ID NO: 389763 - protein, 320 aa, unidentified
MMAQNDHIVVGIDVAKDKVDACIRSLSQRHTFPNTAQGYRKMIAWLHKHKVNKAVMEASGGYERDWARVLRLAGIEVRIVDPKRVRSFALSAGRLAKNDTIDAEMIAWFAGTFSAAPGQPHDAAREELRALVKARKHLLDLQTRLKSQNEHDAPEAVQKAHARILKSLATEIARLEAAISAKVKGTPDFAERAEIIESVPGFAETTSASLIAGMPELGQVSDEIAAALIGLAPYDDDSGKRRGERHIKGGRRWVRNAIYMPCLGAATQNNPVLKVFYQRLIAKGKEPKVALVACMRKLIIILNTMIARRQKWDPSRYALN

SEQ ID NO: 389764 - protein, 338 aa, unidentified
MDHFVGIDLHSNNSYIAVIDTDNNRIFKKKARNNLSVILKVLTPFEKQIKGIVVESTYNWYWLVDGLIDNGYKLHLANPSAIKQYEGLKHSDDITDAFHLANLLRLGILPEGYIYPKQERPLRDLLRKRIHLVHHRTALILSFQNLVARNLGSKMHVSTISKLNEEDLEELFEDEYLILSAKASISTIHFLRLRIVLLEKVIAKAAKLKSEYKLLKTVPGIWNILAQMIMLETGPIERFKKVGNYASYCRCVQSNRISNSKSKGKGNRKNGNKYLSWAYVEAANHALWNYEYVKRYHQKKMAKTNNIVAIKAIAHKLARACYYIIRDQKEFDPAKAFA

SEQ ID NO: 389765 - protein, 370 aa, unidentified
MTKRSMFVGMDVHKESIDISLAEEGRDGEVRHYGVIPGDLEAVAKVVRALRAPSRRLRFVYEAGPCGFGIHRYLTAQGEDCVVVNPSSMPKRSGDRIKTDRRDGDALARLHRAGELTAIYIPTPEDEALRDLVRAREDAVGLSTQAKHRLKAFLLRQGRRYPGRAGWTRPYRRWLADLSFPLAPQHIALQEYRDTIDETERRVERLTDQLRQQTPAWRWAPVADALQALRGVSFVTAVGLVTEIGDIRRFTHPRELMAYLGLVPSEYSSGPSVRRGGITKAGNPHARRLLAEAAWAYQGVPRIGRQMLSRQETLPKPVCDIAWKAQLRLTSRFRKLVARGKAKPKVATAIARELTGFIWAIAREVPAPPA

SEQ ID NO: 389766 - protein, 346 aa, unidentified
MNQIIRIGMDTSKHIFQLHGVDAAERPVLRKRLRRKQVLAFFAKLPPTVIGMEACGASHYWARELGRLGHEVKLIAPQHVKPYVTRNKNDGRDAEGTCEAMSRPTMRFVPVKTAEQQAALMLAGIREQLIARRTQLSNTIRGYAAEFGVTAAKGLDKIEPLLAQIAQDENLPALARELFATEGREYARLQAELKAIDARLMAWHRANACSRRLAQIPGVGPIGATALVMKTPDPRAFSSGRHFAAWLGLTPKDHSTAGKTRLGKITRAGDEVLRRLLVAGATAVIQQVRNGRGRPSPWLLAVLKRKPPKLAAVALANKIARIAWKLMTTGESYDGARMPGASAVAA

SEQ ID NO: 389767 - protein, 387 aa, unidentified
MQKPHDNSKASPAAFTQDNTLIAVIELSLSSWLVAGLIPGVSREPLKKLEPNPEDLLKLLHRWRDEAIKAGRLITRIAVAYETGRDSFWLARWLRERGIDAHVIHATSVTVSREHRRAKTDRLDTAMLKRGFLGWLRGERGHCTVAIVPTMEEEDAKRPYRERDGLVHEQTRVVNRMKSALIQFGVRNFNPKLRKASVKLETVRTPESKSLPPNTIAALRRDMERLKIIKQQIKAIEQARLQQFEQKPEALANRMIYLLARIYGLGLETADLLVHELLSRTLRDRKAIARYAGLTGSPDESGSKRREKGLSRSGNARVRKIMIELAWRMVKFQPDSALVQWFKQRTENAKRSRKPMIVALARKLIIALWRYANDGVIPEGFRLHLAA

SEQ ID NO: 389768 - protein, 389 aa, unidentified
MSTCTATASTIESTASARVLLLAFELGETGWLLGFSPGFGEKVLRRKIASRDTAALMREIAKAKTHLRLGDEVAVRSCYEAGRDGFWLHRFLETQGIDNAVIDSASIEVNRRKRRAKTDRLDVVGLLDLLARHWAGSHKPPFSVVSVPSPADEDLRHLGRELKLVKKDRTRISNRIKGLLANVGLVLNGRRDMKGQIERLRLWNGEPLPQHLKARLLRYAADFELHSARIRELEQERRALLRSEEAGASIAKVWRMLELKGVGIETAWCYGMEFFGWRDFANRRQVGSLAGLTPTPHDSGTQEREKGIGKDGSRWVRGVAIEQAWAWLRFQPESALSQWYQSRFGGGSKRMRKIGIVALARKLLIALWRFVEFGELPEGAVRTLRARLA

SEQ ID NO: 389769 - protein, 338 aa, unidentified
MLHSGIDLHKRTIALSTVTADGQPVRDAELPTTRAAVRAYFDALPGPHRAVVESTSNWYWLRDLLAGAGVDLRLGHSKYIKAISYAKVKTDAVDAATLAQLLRSDLVPEAHMVSAEWREARDLLRARLQLVSQQVRCKNTVAGLLAQYNVTAPAALPPLVQLRTAMLAEQCALLGAQAKRLAATLNPGLIPTPDVQRLLWIPGIGRVVAFTIWLEVDGIQRFPSARDFVSYCRLVPGAGNSGGRTRHKRTKDGNRYLKLAFSHAAVRAIQYYPEIQRFYRALARRKPPAVARAVVAKELARIAYFVLSKQEAFNGAFKGKPLSRTKQPKWPRLASPPV

SEQ ID NO: 389770 - protein, 355 aa, unidentified
MESTKYVGLDVHTEATTVAVMNSAGKLIMESIIETKAITIRQFIQGLRGDLHVTFEEGTWAAWLYDLLKPYVTKVVVCDPRKNTLLKVGNKSDRIDPKKLAELLRNGSLSAVYHGENGVRTLKELARSYLTISKDLGRVMNRVKALYRSWAIPCAGTQVYAPCHRSEWLSKITEAGVRRRAEHYYQQLDALQTLRHEVRNDLLLESRKHNATKLLRQVPCIGPIRAAQLVALMQTPHRFRTKRQLWTYSGLGLETRDSAQYRYVEGQLQRSKKPQQLRGLNANHNHDLKNIFKGAATMASISAGPFHDFYEALLTKGMQPTMARLTLARKIAAITLIVWKKGVRFDAEHLKQQAA

SEQ ID NO: 389771 - protein, 410 aa, unidentified
MKIAGIDVHKKVLMVVVIDASTPEEKPTRRRFVTMPSELQRFRIWLQQQGVEEAVMESTAQYWRWVWLELEPHMRLHLAQAFSNRAPRGRKHDFKDAERLVRRLIANELILSFVPNGEQRNWRSLTRMKVQLTRDRVRLQSQMECLLEEMRIKLSIVVSNLLGASGLRILHALAEGETDPKKLAQLGDERLQCTEEQLVDALTGRVQPMHREMLALQLQRLQLIDQQIAQLNGLIAQAMKPHQDAVIRLAEVPGLGVDSAQQIIAEVGVQASTFPSAAELTSWVGTCPGKDETAEQNHSSRSAKGNKYLRRVLNQAAHAAIAKKGSHFQVVFRRLLPRLGYKSAIWAIAHRLCRVVWKILHEGVQFIEQTPEVCSREKKKRAQMLARALRRLGYEVTITPMNQLAAKPAI

SEQ ID NO: 389772 - protein, 402 aa, unidentified
MNAVGIDVSKGKSMVAIMRPFGEIVSPPFEIKHTTSGINSLVELINSVEGESRIVMEHTGRYYEVLAHQLSKANLFVSAINPKLIKDFDNDSLRKVKSDKADAVKIARYTIDKWQNLKQYNVIDELRNQLKTMNRQFGFYMKHKTAMKNNLIGIIDQTYPSVNTYFDSPARSNGSQKWVDFASTYWHVDCVRKMSKNAFIDHYKNWCKRKKYNFSKSKAEEIYEKAKELVPVLPKDNITKLIIKQAVDQLNSVSTTIESLRTLMNETASKLPEYPVVMAMKGVGTSLGPQLMAEIGDVSRFTHKGAITAFAGVDPGVNESGSYEQKSVPTSKRGSSVLRKTLFQVMDVLIKTHPQDDPVYQFIDKKRAQGKPYYVYMTAGANKFLRIYYGRVKEYLSSLPES

SEQ ID NO: 389773 - protein, 367 aa, unidentified
MLHSDYTIGCDAHKYFSLFVVLGETGDLVQRTRVNHVPGAIGAFLSQFPEGTPVALETVGNWYWIVDEIEEAGCIPLLAHAAKAKVMMGNVHKTDKLDAQGLATLQYLGKLPSVWIPPAEVRDERELPRTRMNFAKHRSMVKNRIRSTLAKYALSLDTDSDIFTPKWRPQLLTLLDQFPPETARCVHQHLQILAALNDHIQQLEGRILERIQITPTMQFIQTVPGPAKVLAIIIEREVGSIDRFSAAKHFGSYCGLVPRLSASAGRAHYGRMVKQCNTYLKWAFVEAANVIVAHRHHPNWRGRYAVHLYERTRRRKGHSVAVGALARYLAESTYWVLKKSEPYREPPHWAPGGKKSPISLSQGQARG

SEQ ID NO: 389774 - protein, 361 aa, unidentified
MTPSTAGIDPHQETFTVGIVDVHGIELVHETFLNSGAGYGEAIDFMATHSVRQIGIEGSATWGAHVAIAVTAAGFDAREVPSRRVAAQRRARRADKTDATDAIACARALQAEPTLGPVQTLEVYDSLVAKIEAVLQHRHALVATRTVMLHHLGDQINKLPTEIRDRLDHTGKIESRLRRLDDIEQPENVTQAGEYRLDWLQAFIERDRAARREIRQLETVIDRLLDEHGTTLREEAGIGPITAATLVCEVGDPFRFRTESKFARWCGTGAVALTSGEGANEPVRHRVDFGGNRRVNSMLYIASITQARDLPEAQHYLARKRTEGKTKREARRCHKRHLANRVIRRMWKDETARKHRSIVAA

SEQ ID NO: 389775 - protein, 349 aa, unidentified
MRSFQPPPNTRFYAGVDLHAKSLFLVVRDHDGQVRFARNLPAQPEPFLRAIAPFRDGLLVACECVHPWYWLADTCRDHDLPFVLGHAWAMKAVHGSKTKCDRKDAEAIARLLKGGNFPPAYAYPRERRGLRDLLRARLRLVRQRAELYGHVHTARRQANLPPVSNDVKYLSKRAAITADIADPFVRRRVDTDLALLAPLDTAIRQLEADLEDAARQHFPTELAVLQSTPGVGPVLSLTILLEIDTIDRFDTRQQFCSYARLCGAVQESAGQRTGVGNRKAGNAWLKWAFSEAAVLSAQKDERIGGLLQRLASKLGKAKALSALAHKLGRAFYHMLHTKEVFDVNRFVRH

SEQ ID NO: 389776 - protein, 440 aa, unidentified
MIDTNQNKEIEFAAFVGIDWADLKHAWALQIPGHLEVERGDLDHTPQAVEDWVAELGRRFGGRPIAVALEQSRGSLLFMLTKYAHLVLFPVHPTTLYDYRKGFRPSGAKSDPSDAGLLVDLLVRHREKLRRLNPDTEQTRTLQFLVEARRKFVSDKTRYSNRLTAYLKMYFPQVLGWFSEVTSPIAGDFLERWPSLQKVQKARPETLRKFFIQRHSCTLDNVDRRLEEIRSALTATHDVAVACSCSAAVLALVRIVRTVRDAILSYDQQIETLARQHPDFAIIDSLPGAGPALVPRLIAALGTQRDRYQSASELQSYSGIAPVLASSGKQHWVHWRWACPKFVRQTFHEWAAHSIGSSAWAKAYYEQQRANGKPRNTVVRALAFKWIRILFRCWKDRKPYREDFYREALARHQQRASKRAPVQLQWKTCAGFSKITAIPS

SEQ ID NO: 389777 - protein, 462 aa, unidentified
MMVDELAAVVHTEQAVTGCVSFLGQTNDLRRSTAMTAQRDCSGKAVLVAIDVAKNWNTVLMETPDGRRQRFRVANNRCDHDRFVQWLKAQDARCQIALEPTGNYHRPLAHRLFAEGFEVHLVSSVAAARLREAMYNSWDKNDPKDAVVILEMLRQGRVLHYHDPVAVGIHDLQEISKTYVQVTRARTRLQHSILTHHLPLYWPEFGRYWHSSRADWFVRFLLRFPVPKAVRELEQEEFIQEAWPLIGRKVNKRARLEEIYELAGQTVALPINPESYSVQAFRLQLQRYLSLNGLRDQLESWAQDVLAENEDAQLLRSLPGIGPVLALVILAEAGDLRRFGHHRQFLKFCGLDLAKSQSGSSRGRERLSKRGNARLRYAFWMAASVAIRMRENSFRDKYERYIRSDPTDPDLKRKALTAVAAKMARVVYAIVKTQTPYRAYFEAAVPSGSIPLSRAVEAVRTS

SEQ ID NO: 389778 - protein, 376 aa, unidentified
MMNESGKVVFKAFSFPNTSDGGNSLFSKLSSYSSSTSDFEIGMEATGHYWLSVYSFLFEKGFLLHVINPIQTDGWRRGTEIRKRKNDIIDSLLIADLIRYGQFVETRLADEDLFSLRTLTRFRTYLVESISDLKRKVVCVLDQVFPEYQSIFSNIFGKTSKEILLQFSSPIDFEAVSSETLAELLAQLSRQKVGIAKAQQIKAAASSSFGVTFAKNSFTFQLKTLIEQISFIEKQVKETEAEISGIMGKLESPITTITGIGSVTGAAIISEIGDISKFDSPRKLVAFTGLDATVTQSGEFEAVHNVMSKRGSPYLRKAIFQAALIASFKDPVLSAYYQKKRAEGKHHLTCVGAVARKMCNIIYAVLKNNQPYVPKA

SEQ ID NO: 389779 - protein, 338 aa, unidentified
MNIVFLGIDLAKNVFQLCGLNQAGKPVYTKRTGRKELLQTLANIPACLIGIEASTGAFYYWQREFEKLGHKVRVISPQYVKPFVRGQKNDGNDAQAIVVALMQPTMQFVPPKSPEQQDIQALHRARQRIVNHRTATVFQIRGLLLDRGIPIGSAVSRARRAIPLILEDAENGLSSRMRRTIAELYDLFNDPGRRIHFFDKEIETVFRQSEACQRIAKVKGIGPETATAVVAIGKGTEFKNGRHFAAWLGLVPRQHSSGDRQVLMNMTKKGDKHLRTLFIHGARAVVRVATNNNDGHMNQWVNRLKERRRFNKTTVAVANKNARIIWSMLRNDTGYQVV

SEQ ID NO: 389780 - protein, 409 aa, unidentified
MGLYCGIDWAENHHDFAILNDLGDVVRRGRVSNDAVGFARLLEAFAEAGDTAEDPIPVGIETDHGLWIAALRASGRVIYPINPLAASRYRSRHSVSGSKSDSADAVMLANIVRTDATAHRPLPADTDSALAIRVLARAQQDAVWSRQRFGNEVRSLLKEYFPAALTAFQSLEDGLTRPDARSVLAAAPTPTAAAALTRPQLRAALKRAGRSRFLDRDVERLRGILRTPALRQPPQIEAAMGISLMALLRQFDAACAAAETLAAHVSVLFSEHPDAKIITSFPGLGPLAGARVLAEIGDDRNRFATARGLKAYAGAAPITRASGKKTFVLHRHVKNRRLAAAGTIWAFSALQASPGARRHFDARRAGGDWNHQAQRHLFNRFLGQLHHCLTTREFFDELHAFPPPLPIAA

SEQ ID NO: 389781 - protein, 341 aa, unidentified
MSQFYVGMDLHTSNLQICIMDQDGKAILEKKTSCCLTQILELLSSYGPDLKIAVESTYNWYWLVDGLMEAGYDVRLAHAYGLKLITGAKVKTDRRDARRLARYLRLDELPEAYIYPKEKRPYRDLLRRRMNLVQFRSAAYTSLRIQFRQYNYDTFGFDELKGIDDDIIEGLTLPDPTKLYTKMTLQHIHLFSEHIKVLEREIKNSVKTEPEVELLKTSPGIHDILGMTIYYKAGDVHRFKSDRHFASLLVVPPISSSGDSSSRGRGGKQGNPYLKWAFCQAATHAGRYYTDCRRFKERHARRRSGSLGRLKANNILAHKLATAAFFILRDGVPFDHSKMFN

SEQ ID NO: 389782 - protein, 419 aa, unidentified
MNKIETKKQRIVNAKTLIVAIDIGKTTDTGYCRCPSGEECKPFEFSNNAEGFKKLWDRICWMKMSHHLEEVVVGFESTGAYGEPLAHYLRQKPVKLVQVNPMHTKRMKELQGNSPGKTDRKDPKVIADIIGLGHALSVVIPEGAAAELRRLTLARERSIGRRTALYNQLQDLVFIVFPEFLQVMKDVKTQSAQYLLHHYPTPQDIVACGSESLTRILRQVSRGKLGEVRAQALYDAAAQSVGLQEGRRGILLEIEEILSALEACKRFIEKMEEEMVPYLEQIPYSDSLLSVKGIGEITVAGLIGEVGDFRQFRTLREMMKLAGLDLFEISSGKHKGNRHISKRGRPLLRKLLYFAAINTIRKGGVMHASYQKYLERGMPKMKALIAIARKLLGILFALVRDHSQYVESYSPKEVLNLAA

SEQ ID NO: 389783 - protein, 321 aa, unidentified
MTYIGIDVSKDTFVVAYSSEKNSKTKVFKNTTKGIHEFITTISKDEHHCVMEATGNYSALLVYLLSEAGITTSLENPLKVKNFARAMLSTVKTDEIDARLIALYGEKMQPAPYRLRSDAILTLKQKRTVIRQLKKQLIATRNLKGSMEVLPFFDAKCKKSIEKTIAFLEKQVKDLEENLTTLARSEYKKQMDLLTSIKGIGVTLAAALIMATGGFTYFDNAKQLTRHLGLSPTYQQSGTSVYFKGHINRNGDSSLRGQLYVAAFASLRCNTECKACYDRLRSNGKPGKVAIIAVANKLIRQAFAVVTQEKPYVDGYVSSKK

SEQ ID NO: 389784 - protein, 310 aa, unidentified
MDHYIGIDVSKATLDIASLPDGESWTVTNDDQGLAELAPRLVALAPALIVLEATGGFEMLAALTLAKAGLPIAVVNPRQVRDFAKAMGRLAKTDALDASLLAAFAQRVRPEPRPLPDDAAQLLESLLTRRRQLVDTLTAETNRLGFARGPVKRDIRQHIRWLEKRLADVDGDLQDAVAASPLYQATSDLLRSVPGVGPVTALTMLAALPKLGHLSRHQIAALVGVAPMNRDSGAARGKRMVWGGRAPVRAVLYMAVLVGLKHNPVLRGFYDRLRAAGKPFKVAATACMRKLLTILNAMVRQKRRWDPQSA

SEQ ID NO: 389785 - protein, 340 aa, unidentified
MPLYGGIDLHANNSVVVLLNEQDEVIYQKRLPNDLTTIVGQLAPYHAEVQGVVVESTYNWYWLVDGWMEASYRVHLANPAAMQQYSGLKYSDDHSDARWLAHLLRLGVLPEGYIYPKAARAVRDLLRKRVHLVRQHTANVLSVQNIMARNTGARFSIKRIHALTKQELTSMLTEELQVLAITSSLTVLDCLRHQIKTLEQTVHKRLHHTPTYEQLLTVPGIGTILAQTLTLETGAIHRFPSVGHSASYCRCVDSTKSSNGKRKGTGNVKNGHPYLAWAYMEAAQFALRFQPAAQRFYQRKLAKSRNNTVLARKAVAHKLARACYYVMRDLVPFEATKAFG

SEQ ID NO: 389786 - protein, 428 aa, unidentified
MNYNQNEKIAQITSQTLIIGVDIAKYKHVARAQDFRGLEFSAPLYFENTNSSFICFIEWIKKLMDQNNMEKVIVGMEPTGHYWLNLAHFLKEQNIKFVVVNPMHVKKSKELDDNSPTKNDVKDARVIAQLVKDGRYAEPNIPQGVYAELRVARKIRDLLSVDLQAVQGQVHNWIDRYFPEFLTVFKDWEGISAIQLLKLNLLPHELVELSEQEILEHLRKAVKRAVGLSKIKELKQVAMVSIGIREGSDMAKLELRTLIDKYELIIEKFEELESNIDKLLEQIPGVEQMLAIKGIGKDTVAGFFSEVGDLSFYSHPRQIIKLAGLSLKENTSGKHKGQTKITKRGRKTLRALLFRVAMPLVAKNTAFKALHEYFTKRQNNPLKKMQSLIAICNKLIRILFTIGKNQCEFSEERMLRDIPHMAVLQKAA

SEQ ID NO: 389787 - protein, 347 aa, unidentified
MRFYTNQHRYYCGIDLHARSMYVCVLDSQGQILLHRNMPCAPESFLKAVAPYREDIAVAVECIFTWYWLADLCSKQNIPFVLGHALYMKAIHGGKTKNDKIDAHKIAVLLRGGMLPMAYVYPPEMRATRDLLRRRMHLMRKRSELLAHIQNTNSQYCLPQFGKKIAYKTNRQGVAEQFSDLSVRKSIEMDLSLIDHYDKLLTEVELYITQTAKVNDVNVFYRLRSVHGIGKILALVILYEIHDIERFPTVQDFVSYARLVKCAKESAGKRHGTSGKKIGNVHLKWAFSEASVLFLRANPKGQRWVEKLSSKHGKAKALSILAHKLGRAVYYMLKRKQAFDMNKFFNS

SEQ ID NO: 389788 - protein, 336 aa, unidentified
MLNESGRLIQQSILATRAAAILDFIGGMRGTLHVTFEEGTHSSWLYDLLSRRVTRLVVCNPRKNALMKSGNKSDAIDARKLAELLRADMLSPVYHGEKSAMEVQHLARSYALLTEDTTRVMARIKAVFRGQAIACAGKKLYGKKHRDEYLAELGTGALRRRAEFLYQELEAVQQLRRQAKRDMIVECRKYPETKLLCSVPFLGPVRAAVLIGRVQTPHRFRTKRQFWAYCGLALEMRDSGEYRMVDGQVERRKRPAQIRGLNWNHNHELKNLFKAAATSASACEGVFREFYLGLLKKNMQPEMARLTLARKIAAIALNIWKKGEAFDAEHLKLQAA

SEQ ID NO: 389789 - protein, 344 aa, unidentified
MEAHVSVVGLDIAKSVFQVHGADAAGKAVIRRRLKREEVEAFFRRLPPALVALEACPGSHFWARLLRDIGHDVRLLPAQYVRPYVKTNKSDAADAEAICEAVTRPTMRFVPIKEEMQQEVLVLHRVREMLIRQRTQLINSIRGHLAEFGISAPNRAHNIGLLTKLIEDEEFDELPAVARHALRYLVEQLREAKTKLFRIDQDLMRIVKGSDACRRLMTIPGVGVVTATALVSSMREPSDFKSGRHFAAWLGLVPRQHSTGGKENLGGISKRGDGYLRRLLIHGSRSIMRWRSRSWLWLSKLRERRPANVAAVAIANKTARVVWALLMFGGTYGHPGKGATMRAA

SEQ ID NO: 389790 - protein, 343 aa, unidentified
MQAITTIGLDIAKSVFQVHGIDAEGKVVIRRQLKRRYVLAFFQKLPSCLVGIEACASSHHWSRELQALGHTVRLMPPAYVKPYVKRQKNDAADAEAICEAVTRANMRFVATKTPEQQSCLMLHRTRHLFIRQQTAMINAIRAHLAEFGIVAPVGRNGVEELLGVVADPGDKRVPEVARACLAALGAQLRMLKAQILEFDRMINAWHRSNDTSKRLDGIPGVGPALATALVASVADPKAFRSGRNFSAWIGLVPKQHSSGGREKLGGISKQGDRYLRSLFTAGALAVIRYAKIHGTKHRPWLTALLARRPTKVAAIALANKIARMAWAIMARGERYKEPVALAA

SEQ ID NO: 389791 - protein, 404 aa, unidentified
MLGASNIKEAVFLSRVWVGVDAGKGFHWAVAIDEEGEVLISRKAHNDEADLSALVEEALSLGPDLVWATDQPGGSTALLLALLWEREQRVVYAPGVAVNRARDAHRGESKTDARDARLIAELARMRRDLATLEPGAQLLAELRLLVAHRRDLVLDQSRSIVRLREALVALFPGLERTLDLRTRGPLVLLTRYQSPGALRRSGQKRVEAYLRSKGVRNAARLAENALRAAKAQRVVLPAEGIAAGIVRELTERALGLKERIAELDQELEDRFFAHPLSEVLESLPGMGPVLGAEFLVAVGDPTETFENADRLAAYAGLVPAAYDSGKRVGNRRRMRGGNKLLKSVFYRSAFSSLRHHQASRAFYERKRAEGKKHRQALIALARRRVNVLWAMMRDGERFDPVRAA

SEQ ID NO: 389792 - protein, 346 aa, unidentified
MEHYVGLDVSLKLTAICIVDRTGKIQREGVVPSDPEAIAAFIESHAPHVTRIGLETGATSTWLWTELNRLGLPVICIDARHAKAALKMQINKSDRNDAVGIARIMQCGWYKEVRVKALDSHAVKALLVSRALLVKIKRDLENQIRGLLKNLGLVIGPAKMNVFALRAAELTADRPELAAAVTPLLNARVGIAQQIADLDRKVMKLARNNAQVQQFMTAPGIGPVTALCFLATIDDPRRFRRSRSVGAYVGLTTRRFASGEIDWTGRISKCGDKMLRSYLYEAANVLLTRVAKWSALKAWGIRLAKRSGLRKAKVAVARKLAVILHRMWIDGTEFKWSSKETAKQPA

SEQ ID NO: 389793 - protein, 355 aa, unidentified
MDSKKYIGMDVHKESISIAVRNGTGKIVMECVIETKASMILQFIEGLRGDLQVTFEEGTSAAWLYDLLKPHVTKLVVCDPRKNAAMREGSQNDKIDARRLAELLRLNHLSPVYHGEHGLRSLKELVRSYLTITKDLGRVMSRVKAIYRSWAIPCSGKQVYAPRHRAEWLGKITEPGVRRRAEFYYQQLDALRTVRQQVRRDLLAEGKKHQAWKRLCQIPSIGPIRSAVLLGILQTPHRFRTKRQLWTYSGFGIETQSSADHRSVYGQLQRAKKQISIRGLNQNHNHDLKNLFKGAAIVASSKPGPFQEFYAALLTKGIRPEMARLTLARKIATIVLIVWKRGACFDAQYLKPQTA

SEQ ID NO: 389794 - protein, 373 aa, unidentified
MGKHKLGFVAFDSAKEKHAVAIADDGRNGEVRYLGEIDNSPDAVRKLVAKLSRQYERLHFCYEAGPTGYGLHRQLTDLGHVCDVVAPTMIPKRSGDRVKTNRRDSVTLVKLLRAGELRAIWVPDTVHEAVRDLTRAREVAMLDLKKKRQQLLGFLLRHSRIFPGGKNWTKMHERWLAKQTFNHPAQQIVFQDHLEVINAAQVRLAALEQQLREIVPTWTMAPVMAAYQALRGVSFLVAVTFVAEIGDVRRFATPQQLMAFLGLVPSERTTGDTVRRGSITKTGNHRARRVLIEGAWTYRFSARVGETLRGRLKDLPLNIRNIAWKAQVRLCARYRRLIAKGKKTPVATTAIARELAAFLWAIGQQVAPHKPAT

SEQ ID NO: 389795 - protein, 339 aa, unidentified
MKLYAAIDLHSNNSVLVILDERDRVMYERRLPNELPAILNELKPHRKKVQGIAVESTYNWYWLVDGLMDAGYSVKLVNTAAVKKYDGMKYSGDEHDARHLAHLLRLGILPTGYIYPKKERAVRDLLRKRAQLVRCRTAQILSIQNLVTRSSGHGIAANDIRDLDEGALKELCGGNQMRALAVQGNLTVLRCLDEQIHGLELVALKQAKLKPQFEKLLSVDGIGNILGMTIMYEAGDMERFAKVGQFASYARCVSSSRWSNGKKKGEGNRKNGNKYLSWAFMEAANFAIRYNERIRTFYQRKQSKTHRIVALKTVAHKLARACYHVLTNQVEFDLARAFA

SEQ ID NO: 389796 - protein, 380 aa, unidentified
MEKACGLDVHKDSVFACILDEQGKKIFEKRYGVLTPNLMELRDMLVEMGCGRVAMESTSIYWVPIWHVLDGDFSLTLANPYFIKQLPGRKSDVKDAQWIAECLQKDLIKRSFVADSMLQQVRQYTRQHHRLTKNKVRLEQQLDNQLQRCNIRFSNYVSNQGNNVSMRKIIKAMRDGERDPAKLNRLVHGRTKNKHGKQIIADSLCGVIQDVDIEMLKQCMEQIELIEKQQATCLNHLEELANQHYAEEISLLCTIPSVKTLSSLCILAEIGNDMNVFSNASALVGWAGLRPRNEESAGKIQSRKILHGNKYLRKILVEIAWSASRSHKTFLGKKHTILSKRMKSQKALIAIARKMLVIIYNVLKTRQPFDPNRNMQAFAA

SEQ ID NO: 389797 - protein, 312 aa, unidentified
MKIICGVDVSKAKLDACIEPGAGFASFDNTPAGIAELAAFCRQHGAELAVMEATGGYERLAFLLLWETGMPCAMTNPRSVRLYAEAMGILEKTDRLDASVIARFARAKNLQPTPAPTSVQRRMKALVARLRQVTDDLVVQKQRRSSLLDNAEILASLDEVITLLKRQSRTLEGEIASMIDDDPLWAHLSDTFRSIKGVADRTVAWLAADLPEIGTYSNKAIAKLVGVAPIANDSGRRRGKRPVRGGRAGVRSILFLVAATAARYDNSLGDFRDRLLAAGKEKMVVRIALARKLLVRLNAKAREARAQYANAT

SEQ ID NO: 389798 - protein, 355 aa, unidentified
MQSNKISFKGQNIYVGIDVHLKTWHVTTLTESGYKYSFAQHADAKELFDRLNKKFPEAHFMSAYEAGFCGFSAHYALTEQGIENIVVHAADIPTTGKEKAMKTDAVDSEKIAWALKRNELTGIYIKDKRYMDDTNLIRLRQRFIMDLSRQKNRTKHLLYTQGVTYPERFRNCRTHWSRNFMKWLREEVELLSEQKLSLLLLCEQVENTRKAILKVTREIRRLSTTDRYKENYDLLITVPGLGLITSMSMLTELDNDIVRFPNERRFVSMLGLIPTCHDSGEKKVSGEKINRGNKHLGPLIVEASWVAIQRDYQLGAYYSSCCQIMKPHKAIIKVARKLACRAYAVLKTKTKYELS

SEQ ID NO: 389799 - protein, 401 aa, unidentified
MDATVSGNRKEGFTMYYVGIDIAKLNHFASVVSSDGEVLVKPFKFTNDNDGFCTLLSALASYDRGSLIIGLESTAHYADNLVEFLVSKRYQVCVINPIQTSTMRKNNIRKTKTDKVDTLVIARTLIAQPHRFFSQEDIDLMHLKNLGRFRQKNIKERTRLKIQLTAYVDRVFPELQYFFKSGLHQKTIYALLKEAPTPELVASMHLTHLAHLLEVSSHGHFNKEQAKELRILAQKSVGSSDRALSLQVTQSVEQIELLDRQINDVESEMTEIMLGLDSVIMTIPGIGYINGGMILGEIGDIHRFSKPCQLLAFAGLDPSVYQSGNFNASHTRMSKRGSRVLRYALINAAHNVVKNNNTFKAYYDAKMAESRNHYNALGHCAGKLVRILFKMLTDDVAFNLE

SEQ ID NO: 389800 - protein, 378 aa, unidentified
MRIVCGLDVHKDSVYLCILSSTGEIVEKVFGVLTFQLAKMRDLMLKHHVQEVGMESTSVYWIPIWRVLEPHFKLKLVNPYFIKQLPGHKSDVKDAQWIAECMLKELVRGSFVPPERIQQLRQYDRRIFDLDDEINRKLSKLDATLQRCNIRLSNYVSNTDSKSYKEVVARISEGVTDPKVLVEEIHGRIINRHGRKTIIAALTGVITQADSDMMRQIREEIDVAERHKQECIDKMQEICEKEYSDQLRNLQTIPGVKLRAATSLIAEIGTDMSHFETANHLASWSGLKPRNDESNKVIKSKRITHGNRYLRRTIVECGWAASRTKGCFFSRFSYHQTQVRKKPKMKVQIAISRKLLICAWHILSKNVPYQDFCEREIS

SEQ ID NO: 389801 - protein, 466 aa, unidentified
MKARDPPLPRGRWIVASSTSVKLLTYLVPPETRPARATARPGRSAAREGLTVVEVLHERCAGMDISKKDVKVCIRVPGGRGGRYRNEVTTFGSMTGQILELRAFLLEQQVTLVVMESTGDYWKPFYYVLEGAPFELLLVNPRHVRGLPGRKTDVSDAQWLADLGAHGLVRGSLVPPPPIRVLRDLTRTHADLTRDRTREYNRLQSVLEDAGIKLTSVASKINGVSCRLMLDALVAGERNPKVLAQLAKGSLREKQADLTQAMTGRFTDHHTFMVRLHLQVIDQLTTAIDQLTTKIEVVTEPFRPQLAVLETIPGVSTHIAVVIIAETGGDMTKFPTAGHLASWAGVCPGHNQSADVTKKAKTRPGNSYLKGALGSAAMSSMQVHETFLQDRHHRLKPRIGGLRTIVALEHSILRSVWHMLTTDQPYRELGAGYHQRRHPQNALRSITRQANRLGYTARFDPIPQTA

SEQ ID NO: 389802 - protein, 358 aa, unidentified
MSSPAMQLPSNVTVGLDLGDKTSRVYAVSAAGDRLREATIFTTAADLTRYFGQQPRWRVVLEVGTHSPWVSRALAALGHEVIVANPSAMYGRKRRRKRNDRLDAEFLARQGRADLQLLYPIQHRTPAGQQHLEVLRARDQVVRVRTKLINHVRGAVKATGGRISRCSTDAFAKRAALEVPDILQPAVTPLLGLIAELTRQIAGFDRQIERLIAEQYPVAQRLQQPAGVGPLTALAFVLLVEDPGRFAKSRDVGAYFGLVPRLDESSSSQPQLRISKAGDEFGRRLLVSAAQYMLGPFGLECDLRRHGEAIAQRGGKNAKKRAAVAVARKLAVVLHRLWISDRPYEPDYLQSRRHQHAT

SEQ ID NO: 389803 - protein, 291 aa, unidentified
MESMRWVGVDVHAKESVAAVLDQATGENSTHRVAGRPDEVLEWLATLTQPFRAVYEAGPTGYGLVRRAQVRGLDVVVCAPGHILKNANDHIKVDKRDAVRLARLLSAGELRLVRIPQPDEEQLRDLVRSREDVRVDLTRIRNRIGKFLLRRELYPPKHAESWGVLHRKWLQQLRFEDRASELVFEDALHAHEILVARREQLEQALAEIAESSIWSGTVARLRCLRGIDTLSALGLVAEVGDFRRFVHPRFLSSYLGLVPSEHSSGEKRRQGGITKAGSKHARRLLVEAACQ

SEQ ID NO: 389804 - protein, 404 aa, unidentified
MWYVGLDWADTHHDIVVLDEAGRRVDSRRFAHSHDGLNELKQCLLSIAASPDQLACIVETSHGLLIAFLLEAGIPVYPVNPKTANQLRKAAGAKTDRIDAYLLAKTGRFDLADLRRLEPDSATVQEVKTLTRDQDALIQTQTRLVNQLTACLKEYYPAALHLFAKLQQRSTLVFLQTYPTPQAAASASVEEITATLRTGKHTNPTQAAPKIVEELHRPQLVANPVIVRTKSRLMLSLVKQLLVVIQEIKSYDEAIRPLFLSHDDQELWSSLPRAGKRLAPRLLAEWGDDRSRYADAASVQTLAGTAPVPFESGNYAKAHKRFACVKPLRNALYQFAWQSTQHEAWARDYYQRKRAQGKTHSMAVRALANVWVRIIYAMWVSKTSYQTATFEAARHAHAPRQHVA

SEQ ID NO: 389805 - protein, 340 aa, unidentified
MAMTVKLGLDLHARDVVVCRQNDGQQPKPVCRMSHKELLDLVAGLIAAGHRVESCYEAGPCGYGLHRKLIQMGARNRVIVPRKWDAEGRRVKTDRRDAREICDALDRYLRGNTTAFSVVYVPTEEQEEARALGRQRGMLVKERQRCVVRGHGLMLTAGVQADPDWWHPKAWSELAKTLPPELRARIETWQRQALHFESEIEAWTKRVESMGEKQILVKGLGLLTNTLLGMEVCDWARFGGRRKVGGYSGLCPSEYSTGTRRRQGSISKHGNPRMRHLLVEAAWRLLRWQPDYPPLKKLRQALGARARKRAVVAVARRLAIDLWRIHTGRCTPEQLGLKVG

SEQ ID NO: 389806 - protein, 346 aa, unidentified
MNSVGIDLHRNRSHIVVIDEHGELVLSKRIVNGRETFLELLDGLEGESQIAVEATYGWEWLAELLEDAGYEMHLAHPLRTRAIAAARVKTDAVDAKTLAHLLRADLLPEAYVAPRELRDLRELLRHRIGLTAMRSALKNRVHAILAKHGITREHSDLFGKGGRQFLAQLALREAPRRRLDSLIALICDFDREIDATTREIDQRAKADDRVDVLTQIRGVGPYTAMLIIAEVGEIARFPDARHLCAWAGLTPTVRSSDGKARLGHISRQGSPALRWALVEAAQKCTTGGGPLREQFERITKRRGRKVAKVAVARQILTLSYYGLRDGEIRCLARRSRASAKEKLAAT

SEQ ID NO: 389807 - protein, 345 aa, unidentified
MKITTVGIDLAKSILQVHGVDERGKAVLRKQLKRKDVLSFFANLTPCLVGMEACASAHYWARELAKLGHTVHLMAPQFVKPYVKTNKNDRNDAEAICEAVSRPNMRFVPVKTAEQQAVLALHRARQAFVKARGAQANQIRGLLAEFGIVIPKGIGHIGERLPQIVEDGANGLPGMMRQLAARLGEELKALDQQVGEIERQIKLWHRDNEQSRKLADIAGIGPLSASAYVATLGNVHSYKNARQVPAWLGMVPRHQGTGGHVKLGPMSKRGDVYLRTLLIHGARSVIRQVERKPESADGWLKSLIARRNKNVAAVALAAKNARIAWALLAHGRSYESDYAARRAGA

SEQ ID NO: 389808 - protein, 341 aa, unidentified
MTAIGIDTHKATLAACAVDALGAPLDERTFPNDPTGHRALAAWARRVAPDGIVGLEGSASYGAAAARFLLTDGLAVREVPPQLSRRERIRTRRAGKSDPGDALAIARVTAREANLPPVRVADRTMEIGLLIEAREDAVAESTRVRNRLHADLMVLMPGYQAEATNLVAECHRRSIARRLRRLNGVQAGLALGRLAKLRALDAEARSLTTTIAGLVGVHPLLAMPGVGVVTAAKLIAETGDVGRFRSPDAFAALAGVAPIPASSGQVSRMRLNRGGNRQLNRALHTIATVQAAHHPPAKAYLARKAAEQKSSREAIRALKRQLVRTVFRLLRVGAHDLELAA

SEQ ID NO: 389809 - protein, 385 aa, unidentified
MTTTGQGSAFIPGDYDVFAGLDVDKRSMAVTFADHGTMQKSLKLPYSARQLLNYTGKHFPGQRVAFVYEAGPTGFGLHDELRAASQLCLVVSPSTVPRAPRNKVKTNRLDSKKLAEGLRGGQLRGIHVPPSSYRELRHLVQLRDTQVAQLTATKLRIKSLLLCEGIEFPATDGKWSGRALRQLEAVPCNASVRFKLDQLIDTLQFHFLSAAKVQKQIRYFCQNDPELNQCLSFLTSLPGVGTITATHALARLGDWRQIKDVRQIAGFLGLVSSEHSTGDKENRGEITRIGDKRLRSKLIQCAWTAIRKDPELRAFYRRIYERHPKKVAARKAIVAVARKLTTRMYAVLKEQRPFVIRADNSIAPLTAEETTGHRERLDAAQNAQP

SEQ ID NO: 389810 - protein, 403 aa, unidentified
MSKESVTVFGGVDTHKDVHVAAVVDERGRILDTAPFEANSKGYEALQKWLERFGTLAKVGVEGTGSYGAGLARYLQDHDVEVVEVNRPNRQMRHQRGKSDPVDAEAAARAALNGEATVVPKSHDDSVESIRVLRIAFCSARDTRTRLALQIRDLIVTAPAALRESMPLRTKERVVHCAGFRPKDPRDPLESTRLALKTLSRRYQDLSEEMAELTKVLDQLTKEANPALRAAKGVGVDVAAILLVAAGSNCQRLRNESAFASMCGVSPILASSGQTNRHRLNRSGNRQANNALWRIATVRMTCDEETKTYLARRTGEGKTKRDVTRCLKRHIVREVFWLLQNPAYEEVGPQLRATRTSAHISLQAVSDDLGVWPTKISRIERGLEHDPEFVERYEAWLVNRTTA

SEQ ID NO: 389811 - protein, 396 aa, unidentified
MAIPTKKGSTKTTTTSPTSLPVIRPRVAGLDVGSSQHWVCGPPSADGTANVRVFGTTTDQLHELATWLRDQGVQSVAMESTYIYWIPIYELLESQGIEIVLVNARQLHNVPGRKTDFSDCQWLQLLHSCGLLRGSFRPGEAITRLRALQRQLANLVAERTRCVQWMQKALDQMNVQVHRAVTDLTGVTGMAIVRAIVGGERDPVRLATHRDRRCRHSQNEIARYLTGTWREEHLFNLASALRLFDALATEIAAYDARLLREIEALQPPERHEEPVPAHPNPAKEKALKARGEQPARTTLWRFAGVDLTRVDGISAGAAQVILTEAGPQLAAFPSEDHFVSWLRLCPRTPISGGKPVKKRRNGLGANRIAGVLRMAATSLQRSKTALGASFRSNRPP

SEQ ID NO: 389812 - protein, 347 aa, unidentified
MEKVIRIGMDTSKSVFQLHGVNAAEQVVLRKALRRRKVLEFFARLAPTKVGMEACGGAHYWARELRALGHEVFLLPPQYVKAYVKRGKNDRADAEAICEAMSRPTMRFVPVKSAEEQAALMLAGLRDQMVRRRTQLTNAIRGYAGEFGLVAPRGLSKIEPLLVRIAEDESVPELAKDIFAAYGQEYAELERRIAKVETRLMAWFRQSEPSQRLTQVPGIGPIIASMLVMKVPDPGAFHSARHFAAWLGLTPTDHSTAGKHRLGVITRAGDEDLRRLLVGGAISVIQQADRGRGSPSPWLLGLLKRKELKLVAVALANKMARIAWKLLVSGENYDPRRSKVRALDKAA

SEQ ID NO: 389813 - protein, 423 aa, unidentified
MEVLHPCVAGLDVHKDSVVACVRVMSGGKAKRECRTFDTTTAALEALRDWLVSCGCTLVAMEATGVYWIPIWKILIGGEFAMNLANARHIKAVPGRKTDMNDAMWIAELAAHGLIKASFVPDEEYQELRTLMRTRKQFVREQTSNVQRIQKTLTEANIRLDSVISDIMGVNGRRMIEAMIKGVRDPGKLADLGDRRLKATRKELYDALYGRLTEHHRFVLKLHLDQYDTLEQTIRLIDAEVEKRITRLDRQAKAAETPLSRLVELLVSIPGVSYLSAITILAEIGVNMSRFPTAGHLLAWAGLCPGQNESAGKRKRCRLRKGAPWLKAILIQCAWAAKRSKNSYYRAQFYRLQARRGPQKAICAVAASILTAIYHILKDGVPHQDLGVDYFDKRKPEARAKRLVAQLAKLGFEATLQPLARVA

SEQ ID NO: 389814 - protein, 402 aa, unidentified
MNAVGIDVSKGKSIVAIMRPFGEIVSPPFEIKHTASDIKSLVSFINSVEGESRIVMEHTGHYYEVLAHQLSEANLFVSAINPKLIKDFDNDSLRKVKSDKADAVKIARYALDKWHNLKQYSVMDELRNQLKTMNRQFSFYMKHKTAMKNNLIGILDQTYPGVNAYFDSPARSDGSQKWVDFASTYWHVDCVCKMSLNAFTCHYQNWCKRKKYNFSQSKAEEIYGKAKELVPVLPKDDITKLIIKQAVNQLHSASATVESLRTLMNETASQLPESPIVMAMKGVGSSLGPQLMAEIGDVSRFTHKGAITAFAGVDPGVNESGIYEQKSVPTSKRGSSNLRKTLFQVMDALIKTRPQDDPVYQFLDKKRAQGKPYYVYMTAGANKFLRIYYGRVKEYLASLPES

SEQ ID NO: 389815 - protein, 377 aa, unidentified
MKRIKFVGLDVHAETIAVAVAEQEGEIRSLGVIPNREESVRKLVKKLGPVEQLRFCYEAGPTGYALYWQLSRMGAKCEVVAPTLVPVKAGDRVKTDRRDALKLARNYRAGELTAVWVPDAEHEALRDLVRAREAAKKDQLRARHRLSKFLLRHGRRPPVGITAWTVKYLEWVKRDVHFAVKAQEATLLDYLHEVEHMAARIVRLDSAIEEAVKVAPAKMRAVIEGLQALRGIAQISAVTIVAELGEVTRFSKARELMGYAGIVASENSSGERQRRGGITKTGNAHLRRVVVEAAWAYRHRPAIGFTLRKRQENLSEEVKEMAWKAQHRLHARYGKLMAKGKNKGVVVTAVGRELLGFIWAIGVQVEAQQKDSLRQAA

SEQ ID NO: 389816 - protein, 423 aa, unidentified
MRFIGLDVHRDFCEVAIAEGGELRLAGRVQTEPEALALFAQSLGGDDEVALEATGNALEIARIIEPHVGRVVLANPKAVKGITRAGPKTDKIDARTLAQLLAGGFLPAVWLPDEQTRILRRRISARAQLVRQRTRAKNQVHATLMRNLKGKPPVSDLFGARGRRWLAAQDLPADEQETVAACLRQIGFLDGEIGLVERTLAEQLLASAELRRLLTLPGVNFVTAAALLAAIGDIRRFPSARQLVSYLGLDPRVSQSGVEPARHGRISKQGPGETRHVLVEAAWHAARTAGLLRAFHQRVAARRGGNVATVAVARKLAVIAWHMLSRGQDYAFARPSLTREKIRKLELATGAERQKGKRIGVWVTKEQHRLDKELAAQAELAYRRLVQDWQPAIKGTGAAPGRASCGPSSGQAARQETAPTPAL

SEQ ID NO: 389817 - protein, 332 aa, unidentified
MTITAWLGIDIAKQKFDVALNWNTRRRAKVFRNDAEGWQALLRWLTDLGVGPVHACLQATGRYGDGLALQLHDAGHRVSVVNPAQIKHFGRVKLGRNKTDRADAALILDYCRLFEPAAWTPPPAALRELRDLVRTREALSGARVEWTNRRGSGQGSAAADAAMAGVIARLEAEIAALDRAIEGGIGRDEDLRARHDLLISVPGIATHTAAVILCELPGPDVLRTAREAAAYAGLNPSHRQSGSSLDAPSRISRIGNATLRAALYLPALAAIRWNPLVVALRQRLRDQGRLKPKQIVAAAMRKLLALCFGVLKTGKPFDPDHAKSTEEAAATA

SEQ ID NO: 389818 - protein, 411 aa, unidentified
MEQIHDRVAGLDVHRDEVAVCVRRPGPRGGVHTDKARFSTTAGGLAAMASWLAECEVTLAAMEATGVYWKPVYYALEGRFELWLCNAHHVKNVPGRKTDMSDAEWLADVAAHGMVRPSFVPPPAIRELRELTRYRKTQIDVRAAEIARLEKVLQDAGIKLTSVASKVLTQSGRAIIEALIAGQRDPAALAGLAKGKLRPKIPQLTAALAGHFGAHHAAVAACILGHLDFLDAAIARLDEQVAARVTEGYQPAARLLADVPGLERRSIEVIIAETGADMSRFPSPGHLASWAGLCPGNHESAGKRRKVATTPGNQWLRRTMIESARAAARTKGSYFGAQYRQIARRRGPNKAAVAVAHSLLDVIWHILTTGEVFTDLGEDYFTSRQDKEHQARRLIGQLEKLGFTVQLTEAG

SEQ ID NO: 389819 - protein, 419 aa, unidentified
MKPTDTQPFTAYVGIDWGDTKHDICLQAAGSDRREFDCIAHQVPRIDEWAKALHQRFGSPIAVALELSKGPIVYALQKYDFLVLFPINPSTLAKYRVTFKPSRAKDDPTDAEMALDLLLHHPERFKPLQPQSVAMRTLLSLTEHRRELVDDKTRLTNRLTDNLKQYYPQVLDWFEQRDTILFCDFLSRWPTLTQVKRARQTTLKAFFYAHNGRRPQVINARLDSIKATVSLTDDRGVIVPCKLRTLTLVAQLRITLQAIDQYDHEIAGLATTLPDYALFQPLPGAGPHLTPRLLVAFGEDRERFQSADEVLKYSGIAPVTERSGKKHWVHWRLQCPTFLRQTFIEWAGQTINKSFWAGAYYRQQREKGSSYQVAVRALAFKWIRILYQCWKTQTPYDETKYLNALRKRGSPLIKNLSLN

SEQ ID NO: 389820 - protein, 418 aa, unidentified
MTKKLDTTFIQVVHPVCCGLDVHKKKISACLITLDEHGQEQYDIEEFGTFTNDLLNMKEWLTNNGCPIIAMESTGVYWRPIHNVLEGFMEVILVNARHIKNVPGRKTDISDSKWLAGLLRYGLLRGSFIPPKEIRQWRELTRLRRTYTESLADYKRRIHKLFETANIKIDSVVSDLFGVTGRNLISLLCNESELSLENIRENAKGGLKSKFKELHSSIQGFFEDHHRFQLIGMMEVIAGFEKKIAETSERLDNLTAGHQDLLDRLDEIPGIDKKSAQSILSEIGVTLDEFICMGALASWAGLCPGNNESAGKRKSGRTSVRNHPFKTILIEVAWAAVKKKGSYYRAKYFKLKARRGPKKAIVAIAHRISKAIYNIIKNGDTFKDLGEDYLTAQTRQRTINNIKQRAKQLGYELVPCMN

SEQ ID NO: 389821 - protein, 348 aa, unidentified
MSQSKQYVGLDVSLKETSICVIDDVGKIVWRGRTESTPEAIASAVKQHAPYAVRIGLESGQLSSWLFHGLKVAGLPVICIDARHAKAALSLKVNKTDANDAFGLAQIMRVGWYREVTVKGLDCQAVRALLVARAQIVSQITTTKNCVRGILKTFGRVLPKGLRSQFPGRVRAAIDGDPILGAIIEPTLRVLEAMRAQLLVYNKAVIQRARGNDTARQLMSAPGVGTVVALAYMTGVEDPARFKRSSSVAAYFGMTPRRYQSGEVDHAGRISKCGDGMVRGLLFESAKVLLSRSARPSALKTWGEALGKRIGPKKATMAVARKLAVILHRMWTTGTTFQWNTEAASPAA

SEQ ID NO: 389822 - protein, 492 aa, unidentified
MDIEDIEVFVGIDVGKTHHWATALTKGGKKVFDKALPNDEARLRALYEKLAAHGHLLVVVDQPATIGALAVAVARDMGITVGYLPGLSMRRIADLTPGSAKTDAKDAAVIAGAARTMPHTLRAISTSDEDAAALSMLTGFDLDLARQVNQTEGRIRGLYTQIHPALETILGPRPGHDAVLEVIAAWPTPTALRKAGRARIDAKLKKHGARRHAAWAGKIVSALGRQTVTVTGTEAAGTVLPHLARQLIALHSQRADVAARVETLVRAHPLHEVLTSMPGVGVGTAAVFLAETLGKTFDTGAQLASYAGLTPVTRRSGSSIRGERVCRTGNKRLKHAMFLSAFASLRDPVSRTYYQRKRDQGKRLGPGPARPGPPPHPHPARHDPRRSPLRPATSHETTRSRLTHHIGAPPTDFAETLGQDRSPTTTSNPDRTPAAQGPWGPPPAPFTTRRKHPQDGPGRLHAADTPTTPTQLTDRPRPPHLYHFWDLRTVAV

SEQ ID NO: 389823 - protein, 343 aa, unidentified
MSINILGIDIAKNTFQLHGADDMGKAVLKKRLSRDQLGAYVANLPQCKIVMESCGGANYWARVFIRSGHSVKLISPQFVKPFVKTNKNDANDAEAIVEAASRPSMHFVPIKQVEQQDIQSIHRVRSRIVKNRTALINEIRGLNLEYGIPISPGAAKVKRSLCAIITDNTNELTPLSRDCMQDLYDELIGVEIRLKALDKKIRQLCRQNETCCRILKVPGVGELTATAMVAAVPNAKEFKNGRHMSAWLGLVPRQSSSGDKRVLLGISKRGDRYLRTLLIHGARSALSHYKHRDNDYGRWLTAKRARLSFNKAAVALANKNARIIWSLLNTGEEFNCGVQTATT

SEQ ID NO: 389824 - protein, 387 aa, unidentified
MQTETLATTVETTARDHSNTLFASLELSKAKWLVTANSPGEEKFSTYVVAGGDGASLLVLLARLKAKAEQRRGVSVKVVVIQEAGLDGFWIHRLLVQSGIESHVVDPASIAVARRHRRAKTDAIDGVSLLRTLMAWARGERRVCSMVRPPSPEEEDQRRLSRERGTLLKERIQHTNRIKGLLSGQGIRGYDPLKPDRLDRLDALQTGDGRPLPERLKAEIRRELARIDVVATQLATVERARDALVRRQMMERTNPSALLIKLKGVGIEFASLVWLEGLFRSFTNRRQVAAYAGLAPSPWQSGGTNRDQGISKAGNHRLRHVMIEIAWFWLRHQPNSALSRWFHNRVGTAKGRVRRIAIVALARKLLVALWRYVTQGIVPEGATLKAA

SEQ ID NO: 389825 - protein, 320 aa, unidentified
MAKPIEPIRIGIDVSKAELVIARSDSKSLEKIANTPRAISRWLKTLPGGTPLAFEATGAYHRTLASLAHQAGFALYLLDGYRLNRYRDGIGNRAKTDPADARLILRYLSKELSELKSWVPPHEAFYRIQSLLRRRASLVHTRVALTQSLGDVPELKNASKRLSNNIKDIERLIERCLKEAMAEVGWRPDAQRCKAIEGIGDLTSVALANTFHRGEFKSSDAFIAYLGMDVRVRDSGKQVGRRKLTKKGDPELRRLLYNAAMSARRTKAWAGQYETYLSQGLKTTQALVKLARKLARIAFALMKNQSTYRPKVPVTCCAVP

SEQ ID NO: 389826 - protein, 409 aa, unidentified
MDVVISRCAGLDVHQATVVATVRVPSPTGGRDVVTATFGTMTPDLIALREWLQAYGVTQVALESTGVYWKPVYYVLEDGFTLLLINMQELKRVPGRKTDVKDSEWLAQLLECGLLRASFVPPPPIRELRDLTRYRVQQVRDRAQEVNRLCKVLEDAGVKLSTVATNVIGVSGRAMLQALVEGTTDPAVLADLARGKLRKKLPDLRRALTGRFRPHHAFLLEQVLAKIDFLDEALDRLMAEIEARLGPFASMLAALDTIPGINRVGAISLLAETGGDMTRFATAAHLCSWGAMCPGQNESAGKRHSGKTRKGNRYLRAALIQAALAASRAKGTALQAQYLRIRRHRGHKKAVVAVGHQILEIAYYLMRDGGSYHELGPSYFDQRNKERTIRRHLKQLEALGVHVTIQEAA

SEQ ID NO: 389827 - protein, 344 aa, unidentified
MNHEVVIVGLDLGKSWFHVIGMDRVGRIVLRRRLNRAQLGELSATLPACRVAMESCPGSQYWGRRFVAQGHEARIIPAQFVKPFVKSNKNDYNDAEAIAEAGSRDTMRCVPLKNSEQLDLQATHRVRQRFIIERSAVVNQMRALLLENGIAIPIGRALFARRLPDVIADAENGLTVRVRALLERLRGRWLALDAEISEVTGLLTHHAEDSELCRLAKTVPGIGPIVSTALIAAVGNARAFRRGRDMAAWLGLVPRQYSTGGKTTLGRISKRGNVYLRQLFIQGAQALYTHMKREKSRLGQWLRDLELRAHRHVVVVALANKIVRICWKVLTSGEDYRPFPAHGA

SEQ ID NO: 389828 - protein, 401 aa, unidentified
MEGPIISIDVSNGCSHFRCFIDRNKAFGKVHKIKHDVDGFQYLLDCMERLNEKTNEEVCVVYEATGVYTKPLTRFLNKHKVRHYMVNPLQAAKMRKTDLHSKKTDKNDPNSIAKVYYDKDLYEYADEEPIYHTLRVMNRNYEDQLDHLRKYKVTFQNILSIVFPGYGSLFKNPYCDIALAILKKYPHPDMIRNKKPETVANYIEKHTCHHKDSCLKWAVKVIEYANKTYPGCDKDEIEVIELLRIIKELEVCIASCDTQLNEMVQLAEQLPNYFLILSIDGIGPNLACRILAEIGDIKRFGNTKQLISYAGIDPHISQSGDVDGLHLSISKKGNKRLRCLLYLAVTCNLRLKKENDPIQQFYKKKKQQSAPLKPKAARVACTNKLLRIIYGMCNNGCSYQK

SEQ ID NO: 389829 - protein, 316 aa, unidentified
MEPIVAGIDVGKATLDVAVRPGTARRTVANDAAGWAEVVAWLRTAHVTHVVLEATGGYEVDVALACAGGGVTVSILNPRQVRRFAEALGLLEKTDRADAGALAEFALRIKPRATRLPDEGQRALMALVTRRRQLMDMITAEANRLHACRDVAVRKGINATLAFLRRQVKGLDGDIDRQVRKTPLWRDDVELYESIPGVGRVVATTLVAELPELKTLPAKKLAKLVGVAPLARDSGTSVRGKRPIYGGRASVRAKLYMAALVGVRFNAVLKAHYTQLLARGKEKKVALVACMHKLLTILSSIAKSRTPWREIALAAP

SEQ ID NO: 389830 - protein, 363 aa, unidentified
MDTNIITNQKKSRVSFFGQTIYLGIDVHKKNWSVTVYLGGTFFQTFHQESKSLVLANYLHSHFPGAVYKACYEAGFCGFSVQRELSSLGIDCIVINPADVPQTNKGSLSKTDASDSKRLAIALSKGMLNPIHIPDRVTEADRQLIRYRKKIQVQLQGRRKSLKSIFHIAGVIIPVEHDKPYWTGNFVKWLRSLALAETSLNKTIQLIVDDVEVFRKRLLETNKLIRELSVSDRYSEVFTVLSSAPGIGIITAMTMLTEIGNIERFDTFARFNSFIGLCPSEFSSGEDTRKGGMTPRNHSAIRPLIIEAAWIAIRTDPVLALKFNELIVTRTKKRAIVVIARKLLSRIYCIWTKKQEYEKGILK

SEQ ID NO: 389831 - protein, 425 aa, unidentified
MNYKQNEKINQVKESTLVVGIDIGSITQYARAFDWRGIELGKVFTFSNSREGFEAFKAWMQHLQDKYKKSDVIVGIEPTGHYWFDLGAYFEDEGILLVMVNPYAVKQTKELDDNSQSKNDRKDPKVIAKLVTEGRYCAPYTPDGVYADLRIMVANRKRLIREMTQIKNRFARWFAIYFPEYTDVFGDYEAQSSMLLLKKVCTPEAIVELGAEKINQIWRDAKLRAVGMKRATTLCEAAKRSIGLKKGSSAARYEMKLLLEDYEYKKAQLDAVMEEIEKLCRKIPESEQMLAIKGIGVITVAGFLAEVGDVRRFESPRQIQKLAGLSLRENSSGKHKGQTTISKRGRSKLRAVLFNAAIPLIAKNPEFRSLHEYYTTRANNPLKKKQSVIAISCKLIRVFYAILANGVTYDAQKMLSDIRRQPQTA

SEQ ID NO: 389832 - protein, 347 aa, unidentified
MRYYAGLDVSLEETAICIVDETGQVIRELRAASEPDALVETLAATGLSFERVGLEACSLSSWLHQGLTRVGLPALCIETRAAKAAMGAMPNKTDRNDARGLAQIIRTGWYRAVHVKSPSCRSWRALLTARRMVLNKRRDVENGIRALLREAGLKVGTPSRKNFPARVRELVADDKVLASLAESLLSVIEVMTREVDRLTKRVLDEVRVEPTCRRLMTAPGVGPLTALAFRATIDQPSRFRRSRDVGAHLGLTPRRYQSGETDVQGRISRCGDELARTALYEAAHSLLIRGTKWSALRAWGMNIAKRRGMARARVAVARKLAVILHRMWVDGSEFRWGKQIVAQGAVA

SEQ ID NO: 389833 - protein, 436 aa, unidentified
MEKMRENAAGIDIGAKKVFVSIENQEVKSFYTFTEDFELLRDYLLKHKVKTVAMEATGVYWSILYEILVEVGIDVWLVDGRETKQVPGRKTDVKDCQWIQQLHSLGLLNRCFVAEGDIKDLRYFVRLREDNIRTSSMHINHMQKSLTEMNIRLKEVISQIHGVSGMKIISAILAGERNKKVLLNMCDTRIKKNKKEEILKSLNGKYTKTGLFALQQAYNGYYFYQNQIAQCDKEIEVIMKRIGNNCNDKDLAGKRKPIRHNKPDVANLGANLVNVFEGKDASVISGITDYTWMQILAETGTDLKKWLTEKHFTSWLGLAPGQHWSGKMRRNKRKKGHPIAGQIFRKIAQSLIESKNIALGSFGRRIRAKKGPGIAIKAVARKLAILYWRVMVKGVDYAEEGIKNYEEKILAQKRKTIQRLALDLNMLVSGNQDVMV

SEQ ID NO: 389834 - protein, 426 aa, unidentified
MKNINVLTTLFVGIDVSARTNVCLAMDFNSNVLLRLDVANNQIGADTLKAKLLDLIHRNDFKTTIVALESTSFYGLHISNFLSADEELIPHNVYVHPLNPKMISNYRKSFIGLGKTDSIDAYIIADFARVGRITTEPWKGPQYLALQRLTRHRLHLVECITREKAYMVSNIFLKFSELAVLKEGDHPFSSNHTATAEAILTEMLSLEDLIRLSSEELIEFVCSHSKNRYSHPEEVCKLLKKAARDSYRLDKTLYEPLTVSIASSFNCIETYEREIKSINKAIEKTLKGLCPDAFTVLQSIPGIGQVFASGILSEIGDIHAFHSADALAKYAGIYWNRHQSGDYEADDTSMSKTGNKYLRYYLIEATNSIRCHEPSFAAYYRKKYDESKTHHHKRALALTSRKTIRLIYSLLDKNQLYSANRVQITP

SEQ ID NO: 389835 - protein, 454 aa, unidentified
MTVPKPERLRIENLPTVFPNAAGLDIGSAEIVAALPPDRNVTPVRTFTTFTPDLKQLVTWLLDHHIDTVAMESTGVYWIPIHEMLEAAAIRVYLVNARHFKIVPGRKSDYNDAQWLQKLHALGLLTGSFRPDDEMCVLRSLLRHRAQLIEHRSPHILHMQKALKLMNIQLPEVLSDVTGVTGMAILRAIVAGERRADVLAKLRRPGCRRTEQDIIHALTGTWREEHVFVLTQSLDVYDFYTTKISECDYRLDQQFSSMKPRFDIEGEPPAPPASRTKKNSNSKNQPAYNVRAHLVRLLGIDLVDIIGVSESVAQTVISEIGTDMSRFPTSKHFCSWLNLAPHNDISGGKVLRSRVMKAHNRAGQALRQAAQACSRSRSLFGAFYRARSARSSSEEAVVATAHKIARVIYHMLTCHEAFKPESIQAFDQKRQERDLKHLQKRAKALGFILQPMTP

SEQ ID NO: 389836 - protein, 391 aa, unidentified
MIYVGIDVAKDKHDCFITNSDGEVLFKAFTITNNLDGFNELHQKIASVMDDVTKVKVGLEATGHYSYNLLGYLIDKGLPTYVINPLHTNLYRKSLSLRQTKTDKVDARTIASMLMSDVNLKSYSDISYHNEELKSLTRYRFDKVKERAKLKTSVSRLVCILFPELEKLVPTLHITSVYALLSEFPGAKHIATAHLTRLTNLLSEASKGRYGKDTAITFRDAARASIGSNMPAKSLELKHTIKLIQELDSEIDEIEKEIKIIMDEINSPILSIPGINYRMGAMIIAEIGDFNRFDSPDKILAYAGFSPSTYQSGQLDGAYAHMEKRGSRYLRYALYNATKYVCHWDPTFAGYLAKKRAEGKHYNVAISHAVKKLVRVIYHLEKTKQQYIKAA

SEQ ID NO: 389837 - protein, 240 aa, unidentified
MTHACAAGVDVGRDFFDVGLAPSGQVFRTANGPGGIQALVGRLERAGVSKVVLESIGGYAARLVRALAEAGFEVGVIDPKRIGALRIAEGKRAKTDRLDARLIARFALIMQDAARPVPDAKAFEIRALSTRRRQLVEMAAMEKVRLKQTLDEAVADSCRQMISILSEERARVETRLQAELLATAERARHARLLQTIPGVGPAVSMTLLADLPELGRLDRKAVASLAGLAPHPNQSGTRKG

SEQ ID NO: 389838 - protein, 311 aa, unidentified
MQEIFVGVDVAKDWLDIHHPGRGARRIENTPKAVRTFARSSARQGDWIIFEASGGYDRLLREALEVAAVRFTRVNPRQARDFARAMGVIGKTDRVDARMLSELGARLRPAQTLPLAASRRALQAQATRRRQLVEMRKQESTRLQQTADIEARADIRSLVTVLDRRIAKVEARITTLVAADAELAAIDRRLQTVPGVGPIVSVTLIAELPELGRLDRRRIAALAGLAPIARDSGKHIGRRRIGGGRPIVRTMLYIAALHASRRCDTFKTFRNRLESSGKPVKAAITATARKLLTVLNAMLAAGADFRHEAHD

SEQ ID NO: 389839 - protein, 505 aa, unidentified
MATTMARCKPASSPPPGTRQSQAQAQRQAYRRRKTRAQGKGEALRQQEAAHVEALPVQHPHAAGIDVGSRSHWVCVGFATEAPSCLIQEFPAHTDGLKAIAAFLRAHGVTTVALESTGVYWIPLYELLQAEGFEVLLVDPSYSHQLRGRPKTDRRDCQWIYRLHTVGLLAAAFRPDEMACQLRAYLRQRANLVRSASRHVQHMQKALEQMNLKLTEVLSDITGVTGRSILRAILRGTRAPEKLAKYRDKQCKASEAEIAQALTGSYREEHLFELKQAYEAWQFTLKQVATVDAQVALQLGRMKCDRALPPLKPKPRSKRRVNSPGFDVRTALYYVVGLDLTEIEGISELTALTLISEIGPGVSKFPTVKKFCSWLGLCPNWKKTGGRVKSSRTRRGVNRAAQALRVAAQSLHHSQGALGAFLRRMKGRLGAQAALTATAHKLARIVYLALKHGMTYVRQSQEDYEAQMREKQLKALKRKARQLGLEVVEKASGVVATAAAAPVQG

SEQ ID NO: 389840 - protein, 450 aa, unidentified
MGSNYAGVDWASEKHDLLVADETGEAILAATFAHDERGLTALCNALVRLKVQLVAIERPDGLLIERLLDAGLRVMAIHPNQVTAARPRFRAAGGKSDRFDAFVLCELARTDSHRFRVLVPDSDQTKALRALTRAREDLVATRVALANQLRTELERYWPGAAVIFKDIDSPISLAFIKRYPSPKDAHGLGAQRLGWFLARHAYSGGKEPAQLIRKLRNAPEGRAGDQEIEARRAVVLALVTAIEPLVAKISELTSEIGHCLRAHPDGPIFLSLFKGPRSVITAAELLAEIGDCRDRYPTADALAADAGMSAVAIESGKRKVAAFRFACDKRLRDAFCVLADTTRRWHPWAGDHYARAIGRGHDHPRAIRTLGRAWCRVIWRCWQDRTPYDPTRHRGLQQHILVTIPSSSGPRPDLVATQRTLGAAVTGPAARRAEREALDGKPTSANTPGG

SEQ ID NO: 389841 - protein, 437 aa, unidentified
MSDKKSVELRVSVDVGYRRHSVAIGLPSGEVLEEFEIAHRPEGFAEFFSRIEKHQKVRDCEVAVAMEGFNGCARPLDALVRRRGYRLYNINNLKLARFKEIFPGAAKSDRIDARKGLELFQLSDHLPLAKEVLQEVKGTPRENEVLKRLTRRRRRLVDERVRVISNLQTDLQAVCPGLLEITKNAGNQWFLNFLLSADTLPQLARLRPATLLKVPAVGRKYARLIEDWQKRAHFSEEVEWVSEMIQEDAQRCLDLDEKIKALRAKIKEVAKDSKIVKVLLSIPGFGTICTAELAGEIGTLERFSKEGSLALYIGMSTLDNSSGKYQGSKQPKHVNTRAKAAMMVALDRHRKYVPESQRYYEKKRSEGKKHNQAIRALGRHLCRIIYKLLKEEREYEIRLEKGNNKGKVSPRSLIKTQIRKAKISAKGTNNKIYQQST

SEQ ID NO: 389842 - protein, 375 aa, unidentified
MLRFRLMIKRGLNGTATSIRKVKRSMKYYAGLDVSVKETSVCIVDESGNVCREKKVISHPDDLVAVLSDPAFNFERVGLEAGPLSQWLFEGLAKAGFAVLCIETRHTKAFLKAQQPNKSDRNDARGIAHMMRVGLFKDVHVKTLTSQKRRALLTARKLLQEKAIAMENDMRGLLRNFGLKVGTIRAFKFDERIRELVEAVPDLAEIIEPLLAARQKLREEFAKLDRKVRGEARVDPVCRQLMTVPGVGPIVALAYTSTIDIPARFRHSRAVGAVLGLTPVLNQSGESRRIGHVSLCGDAMLRGLLYEAAQVLLIRVKKWSWLKAWAMNVAKRHGAKKAIVALARRLAVVLHRMWVDGSEFRWTRETRSTTTSATA

SEQ ID NO: 389843 - protein, 549 aa, unidentified
MKLCSSIVDPESKLSYAPVVGREGRLIIGALCPSQSLVSGVSVFNIGDVFIRQSEGDPVKEIAGVSAPLRPQLLAQSLVAKTRKREQIISQPQKQSQRATHNSVSNLPPHLQHININAAGIDVGSDRHLVAVPEGRDTISVRQFGTFTADLQSIADWLEQCGVTTVAMESTGVYWIPLYEILEQRGFEVYLVDARRVKNVSGRKSDVLDCQWVQELHTYGLLAKAFRPAEEVCVLRGYMRQKEMLVQTAAMHIQHMQKALQQMNLLLHNVVSDITGVTGMKILKAIIAGERNPQVLAKERDPRCRNSTETIAKSLVGNYRPEHLFALRQAVELYEIYQTKIADCEAAIVAYLEQQDHRTEDEPPAPPKPISARDRMRGGTDVRAKLYKMSAVDLFAIPGLAADTLLTLASEVGLDISPWQSEKHFTSWLALCPGTRRSGRRVLSSKTRPSANRAAQAFRMAAATQARAKTALGAFYRRIRARSGGREAITATAHKIARIFYSMLKNQTEYVEIGQAAYEQKFKERRLRSLNHQATALGYQLTPITAGSF

SEQ ID NO: 389844 - protein, 397 aa, unidentified
MIAVGIDVSKSKSTVAILNGDGSIRAKPFDVHHVADELQALVDYIKRTSEPPTILMEPTSHYHYPLLKAFTEAELPVCLINPYQMKKYGDTELRKAKTDKRDSLRIAQYALEKSYSLIPYTPQDQKYEDLRFLSRQYSQRISTLTVAKVQLLSLLDETMPGITTILPLKSRDPDNCVLLRFIKRFKSFDVIRKMGKTRFLDSYQVLVKKTKDRFAGSKGLAIYELVLSSVTTRGENPLSAMTQDQCVDLVSTSQKAADEINLQMRIIAETMPEYKVLRSMAGVWDRLGPIILGEIGDIRRFHSGKALNAYAGNDAPPYQSGQFESRNRHISKRGNPALRKACFEVMQALKLTKPQDDPVYLFLLKKEQEGKPYNVAKMAAVNKFLRIYYARAMELYK

SEQ ID NO: 389845 - protein, 345 aa, unidentified
MQPMYYIGLDVHKRKISYCVKDGSGRIHAEGSISATRLDLDHWMRSLPQPWSAAMEATMFTGWIYDHLKPHAAVLKVAHPLMLRAIAAAKKKNDRIDASKICDCLRCDFLPESHMASTAIRERRRTLRYRNLLVRQMVQMKIKISALLMEAGVSYNQQRLHKAGYFRELLATNPDIDEGLCSLLRLCRETVVRLGKNESALVRSLERDSLLMERLERLMTIPAVGPITALTWALEVGDVQRFSSIKKAISYCGLCGSEKSSGNTVQRTPLSKQRNKHLQTTLIEAAKMAPRNSPELAMLYDKEKQKGNANRATLAVARKLVAYLMAVDRGQRNFQVAKTSSNIAA

SEQ ID NO: 389846 - protein, 311 aa, unidentified
MNNTIGIDISKDTLDAHRLADGQHKQFLNGKTGHAQLVKWIGKQSDPLIIFEATGAYHRQLERVLGTHIIPFVKVNPKQARRFAQASGKLAKTDRVDCEMLAKMGAALQLMPKPFTAENLYDLKELLSARRALIKDRTAAKARKATVINALIKQQLEKRLRQIKNDIAKIDALMLDVAREDQYMSERLDILFSIPGIGVITALMILVDMPEIGALNNKQVASLAGLAPMSQSSGKWMGKARIQGGRPNLRNAIFMPALVAIRHNADLKTKYDQLVTAGKEKKVAITAVMRKLLVLANALLRDNRKWAEKAA

SEQ ID NO: 389847 - protein, 352 aa, unidentified
MRDLPAAAVTYGIDLGKTWFHVVGLNTNGLPVKRAKFNRSGIQAFFVNIPCALIGMEACPGSQWLARKLKALGHEVKIIPAQFVKPYVKSNKNDTVDAAAIAEAVTRPTMRFVQIKHHEQVDLQALHRSRELLVSTKTRLINQMRAFCLEYGVAMRPGPGAFKASLPTVLADDRNDLTPSMRGLLAELARDLLGLEERVAGLTQKIHAIAAQSESARRLTTIPGIGDLTASAIVAAVGSGKQFRTARDLAAWMGLTPAQFSTGGKTILSGISKRGNNYVRRLLIHGARSCVLHLDRTRDRLGKWLDGLQSRMHHNKVVVALANKLARIAWVILTKPGASYERHDPRFAAQTA

SEQ ID NO: 389848 - protein, 455 aa, unidentified
MAPRHQKTKQKIHTQLPTCHPHAAGIDIGAREIWVAVPPGSDSKPVRGFDTFTEDLLKLRDWLLACGVRTVAMESTGVYWMPLFQILEAAGLAVCLVNARHCKNLPGRKTDIQDCQWLQYLHSVGLLRGSFRPPEHICAVRSLLRHRNRLVRCAADQVRLMHKALTQMNVQLQHVISDLVGVTGEAIVQALLAGERDPVKLARLKDHRIKASHDTMARSLRGDWRPEHLFTLSQSYQTWQHYQKQITATDEQIELQLATWDARVDVQVQPLPAPRTTHRTAQRNEPQFDARTECYRVLGVDLTALPGFQAPTALVLLAELGPDFAQKFPSAKHFASWLGLCPDNRITGGKIMSSATRDVKSRVAETLRLAAQSLWHAPQNYFGELYRRWKARLGGPKAITAMAHKLARIVWHLLKHRQAFNPEVFRKEEEKMRRKKLARLQNTAAALGYRLVVSQ

SEQ ID NO: 389849 - protein, 477 aa, unidentified
MEKIGYLGMDVSKGSCDFLLLDSSKEPLEEGFALDDCKHGRKTLSALIDRWFSGGLTHLYCGLESTGGYENNWFSLLCSLAAGSAVKGKTLKVARVNPKAIKATGQAALLRTQTDQTSAFSIASYLMNWPKKITYSPQGGRPADGQWMVARQQVGYITMLHKQKTQLSNQLEKLIYQHTGELLVYCRHGVPGWMLRLLNRYPSREKILRAGCDKLALIKGISAEKAARILGKLDTEQPASSPMSCHTIKATARQILHLQAQIQAEDAYLISRYNDHPDAKLLESIKGVGIASAVRLVVQIEDITRFADAKKLCAYFGVHPTWKQSGDGRWKSHMSKQGRSSVRATLFMCSLSAIRCNREFKALYHSFRKKEMNHFQAMGVVMHKLLRIVYGILTHQRPYDPGIDRENRKNAEKVRQEIKKKNKQASDKNQSGRQRFMQQNLNGVDQPPISRRAWKKRKQEASQSSTKEECAGSPPAD

SEQ ID NO: 389850 - protein, 401 aa, unidentified
MVSDFKKGRYNLMKIFVGIDIAKLNHFAAAISSDGEILIEPFKFTNDADGFQLLVSKLESFDKNSIIIGLESTAHYGDNLVRYLVAEFYQVCVLNPIKTCQMRKNNVRKTKTDKVDTFVIAKTLMMQDDLRFITFFDLDMMDLKALGRFRQKTIKQRTRLKIQLTTYVDQVFPEIQYFFKSGLHQNAVYALLKEAPSPKEIASMHMTHLANLLKVNSHGHFTKELAKELRVLAQKSVGANDSAISIQITQTIQQIELLDSQLEKTEAEMTDIMKFNDSVIMTIPGIGYINGGMILGEIGDIHRFSNPNKLLAFAGLDPSVYQSGNFQAKTTRMSKRGSRVLRYALVNAAWNVVRNNATFKAYYDAKRAEGRSHYNALGHCAGKLVRVIWKMLTDEVEFNLE

SEQ ID NO: 389851 - protein, 348 aa, unidentified
MRFYSKQHKYYCGVDIHAKTMYLCIIDQEARIIKQKNIKSNPAAFMKAIEKYRDDIVVSAECMFTWYWLADLCAKEHITFILGHALYMKAIHGGKAKNDRIDAYKIAYLLRGGNIPMAYVYPPEMRATRDLMRRRNHLVRKRAELLGHIQNTNHQYNLPPLPKNIRFKGNREGLIEHFRDECVQKSMETNLFLIDHYNSLLLKLEHYICKKAKVHDHEALLRLLSVPGIGQTLALVILYEIHDIRRFPRVQDFVSYSRLVKPSKESAGKIYGHSGKKIGNAHLKWAFSEASVSMLRGIPDVKKYKEKLARKHGKAKALSILAHKIGRATYYILKRKEVFTIEKFLVTT

SEQ ID NO: 389852 - protein, 351 aa, unidentified
MDKITTVGLDLAKQLIAMHAVDARGQVVLRKVLRRDALLGWSATLPPCEIAMEACGGAHHWARELTQQGHSVRIIAAEFVRPFRKSGKNDANDAEAICTAVRQANMRFVAIKSVEQQAALCVHRLRQGLVEERTALINRMRGLLTEFGVVAPLSPEKLRRELRLCLDEEKTHVPLMVRQLVTDELAALDALEQRIADYAAQIAAQVRDNVSAQRLQGIAGVGALTAAAMVATVGQPQAFRNGRQFAAWLGLVPRQHSTGGKSRLGRITRRGDAYLRTLLILGAKSALQAALRKPPPLRHRLRQWIVDVFTRIGYHKTLVAIANKHARIIWALLVKGEDFDVQRLTLTAVAA

SEQ ID NO: 389853 - protein, 424 aa, unidentified
MESASTTTGSDAPEQPVDAVTGGIDWASDDHAVAVVDDEGRQLARKRVEHTAAGLRAMVGFLARHGVVEVAIERGDGPVVDALLDAGMTVVVISPNQLKGLRSRYGSAGNKDDRFDAYVLADTLRTDRARLRPLTRDTEATRTLRATVRARRDLVKHRVALCNQLRAHLQATFPGAVGLFRDLDSPISLAFLARFDSQERADWLSTKRLAAWLASVGYCGRKDPADLYARLRAAPRGPVGPDGVARAHVARAMLTVLDGLVEQISTLEAQIAEQLALHADAHIFRSLPRSGTVRAARLLAEIGDVRARFPDAASLACLAGVAPSTRRSGKHRVVTFRWAVDKELRDAVCDFAADSRLANPWAARIYDDAIERGKDHPHATRILARAWLGVIWRCWQDDTAYEPARHHALQAMQQTAVQHTAEAA

SEQ ID NO: 389854 - protein, 389 aa, unidentified
MHIVAIDIAKFHHDAIVVDDDTGAIVVEPFRFGNNDEGFKTLMQNIRPYLKGKHLIGFESTGHYGHNLMMFLLDHKLTVGIVNPLSTKAEREKKIRKTKTDRIDCYVIYKVLSSRDYARMSRKKLKLQEAKTLTRAYNNLMEDIRLYKNRLQKCVDIAFPELNGLVTPYTKRYNAILKEFGSAKVVAKTHLGTIKKVLSIKGRGNHTKVDPHELKTLAQRSIGQNIDANNLEIEYLLGMIEFLEEKKKIYTKKIEEYARQLNSPIFSIPGIGYTTGLSILSEIGDIALFSSATKVVAFAGVDPSVYQSGEYQGNGLAISKRGSRYLRKALYQCILTVCNNSSTFKNYYNLKKSQGKTHLCAQGHCARKLIRVIYKLLTQNIKFDETALV

SEQ ID NO: 389855 - protein, 370 aa, unidentified
MRDDSEVFVGIDTSKLRNAVAVAEGGRGGDVRFLGEIESSATATAKLVRKLAARHRRLTFCYEAGPTGYGLYRQIRQLGHESIVVAPSLIPRKPGDRVKTNRRDAVGLAKQLRSGDLTAVWVPDPRHEAMRDLTRARQATVEDLRRKQQQMSAFLLRIGRHYEGKTTWTKTHLKWLASQKLEHVEQRIAFEEMLLAIRQADERIERLEQAIRNAVPDWSLAEVVTALMALRGIDLISATGFLAEIGDLARFQTPRELMAFLGLVPSEESTGKRIKRGSITKTGNRRARRILVECAWSYQHPPRVSKHKQARVAAAPRVVREIAWKAQCRLSGRYRALVRKGKLKTVAVTAVARELCGFIWAIHRESFAAR

SEQ ID NO: 389856 - protein, 493 aa, unidentified
MAVSYPHCAGLAVHKKTVVACCMTPGPKGEKVVEQHTFGTMTADILVLSDWLTRKPITHIAIESTGEFGKPIYNLLEGHFAILVVNAKHVKNVPGRKTDVKDAGWLADLLRHGLLRGRFLRPQAQRDLRDRTRQRTNLVQDRATVVNRLPKVLDWANIKLTSVATNVTGASARAMLEAILEGQLEPQVLAELAQGRMRNKLPELERALAGRVREHHRLLLAHHLAQIDFLDAQIAVFDAAISKQVEQGGAPPPDQWQEPPPEIGAKQTPAANDDQLLDWALAVALLDTIPGIGQRLAEQLLAEIGADMSRFPTAAHIARWAKLAPGNNASAGKRYSGRTGHGNRWLRTSLVQAAHSAIKVKDSYLRSCYQRLAGRCGAQRAIVAVAQRILTAVYYMLIRREPFRELGATYLDERNKAKVVKGATRRLEQLGYRVTLQPVAVAAPRQSATTAIFRSVCRGNCRTLRRAPNWGQRACGSGCGAARPGSCCCWPTV

SEQ ID NO: 389857 - protein, 429 aa, unidentified
MRFIGLDVHQGFCEVAIREDGKTRSVGRIATDRGALELFAGSLDPTDEVVMEATGPAMEIARIIRPHIARVVVANAQDVRAISHARVKSDRFDARTLAELLAAGMLEAVWIPDTETSGLRRRVARRAALVRQRTRAKNEVHATLSRCLLGRSPVSDLFGKKGRAWLSEQKLDGEEAETVHGCLRQIDFLDSEVAVIDQKLSEWAAGSEDARRLMSIPGVGAGVAVTLMAAVGDISRFSSPRQLVAYLGLDPKVRQSGDEPARHGRISKRGNAQARSVLVEAAWVAMRQPGPLHAFGERIRARKGSQVAAVAVARKLACLCWQLLTKGEDYAFARPSLLRVKLRRLQIDAGAPPRRTRHDGQRVSASAAERDAERELTERAEAAYRRLITDWKATGPAKKRGAGATHGHAPSKPPERQAARQAQAQTPAL

SEQ ID NO: 389858 - protein, 370 aa, unidentified
MNKSNQTISSSGGNRASVRQHGNRVLKLGLDMHYRQVTVAMQEEGGRIKGAGKMSHQAFGNWVNKKLAEGWQIESCYEAGASGYWLDRQLVALGVKNLVVAPKAMGQGGKQQKTDRRDSAELVDSLDRYLRGQDKALSVVAVPSVEQEEKRALIRYHRQIMADRGRYEARGKGLLCAQGLEVGGRWWQGKGWRELNSDPRLKEWIKEQLEAWRQKVLGAEAEQKGLRRRIEALAPAILPKGVGAYSAAVLEYEMKGWGRFNNRRPVASYTGLCPGIHQSDGRGKEGSINRCGNRIVRWSLVEMVWRLMVWQPHYGPVRQLAAGLVRSKRAKRRLVVKAARRLAIDLWRLSSGQTTAEKLGLVLQSNGQSK

SEQ ID NO: 389859 - protein, 421 aa, unidentified
MSEKDVSNYTVYVGLDWADSKHDVCIQTPESDKRDFAVVPHSPEALDDWVNSLKSRYGGPIAVGVELSKGPIVSVLQKYDFVVIFPINPSTLAKYREAFQPSRAKDDPTDAEIAVDLLIRHGHRFTPLKPQSAEIRALATLVEQRRQLVGEKIRITNRLRSTLKQYYPQVLAWFDHIDTPLFCAFLKRWPSLIQARRVRASTLKKFFHEQHMYREVVIERRIGAIKNSVSLTDDDAIINPYRLTAEVLVDQLELVLEAVNRFDEEIEAVASRHPDYALFKSFPGAGASLAPRLLVAFGEQRNRFGSAADIQMYSGVAPVTERSGKKHWVHWRWQCPTFLRQTFVEWAAQTINKSYWAGQYYYQQRAKGQTYQAACRSLAFKWIRIAYRCWQAGVAYDESKYLKALAKRGSPLVGSGVSEIA

SEQ ID NO: 389860 - protein, 348 aa, unidentified
MEKVAGLDVGVKHSTLCVVAKEAQSTRVVRRARTVTTPVAIGDWLISAGISRVGLEAGGQSSWLARELESRGLMVTVMESRRQRAFGAYSKVKTDERDARLIGEALASGLHTKVHVRSAWSQEVRAMLGARLQLKRQSHQCRQFVRGQLRAVGIELARGSGRGWWAEARAAAVDRGGMLGTSLMAMLAAGEALREQIAVLDKEIRRVARQDAACRRMMTAPGAGVLTSLALRASLDDAERFERSAEVGPYLGLTPSRYQSGALDRRGGITKQGDGLVRSYLYEAAVSLLERQRRDCPLRRWGLANQHRLGKRRTRVAVARKLAVLMHRLWRSGETFDWNRGKDVSTNQ

SEQ ID NO: 389861 - protein, 301 aa, unidentified
MDKFNHFVGIDISKKTFDAALIMGGDTTLIKHQVFKQNATGFAAFSQWLEHHKIAGEEVLICMEHTGLYTYGIIDYLTAAGLHLWVEMPLRIKKSMGLQRGGDDKAAAIQIALYAYRYKDQVSLWKPEQAIVLELRQLSAQRDRLKLALNQLIIPLQELRDACPDAAIVKLQVKLQAPVIKAIEKSITEIETKIDNLIAEAPAVQSTIARVSSIKGVGKQTAIHVFIYTKGFTTFSSGKQLASYCGVVPFTKTSGTSVRYKTQVSPFANKHLKKLLHLCAMAAIQHNEEIKGISNNSVFID

SEQ ID NO: 389862 - protein, 386 aa, unidentified
MQKLNDLSRSLAPLEPDGTLIAVIEMSQSSWLVAGIVPGVERQPLKKLAADEIALLKLLHRWREEAEKAGRRIERTAVAFEAGRDGFWLARWLRTRSIEAHVIHASSVAVSREHRRAKTDRLDTELLKRAFLGWLRGERDHCKMVAIPTSKDEDAKRPNRERESLVGEQTRIVNRMKATLIRLGIRGFNPKLKKAAGRLEDLRTPEDEPIPPNTMAELRRDMDRRRLVSDQIRQIEEARLDRLKQAPGDGPHAMVRLLARVIGVGIETADMLVQEVLARNMRDRRALARYAGLTGSPDESGTKRREKGLARSGNARVRRGMIQLAWRFLMFQKESALAQWFRARTENARGTRKLMIVALARKLLIALWRLVREGVVPDGVVLRPAQ

SEQ ID NO: 389863 - protein, 366 aa, unidentified
MYDTLNQKNITAWQDLRNKAAHGKYGEYSSEMVGDMISDLHATNHLVVVIDDKDQRVLEKRLANDVALTVDTLGPYRDQLSAIAVESTFNWYWLIDGLEDAGFVACLANPAAIKQYEGIKHTDDPYDAFFLAHLMRLGILPTGYIYPREQRGVRDLLRRRLSLVQMATRLLLAVQSQIWRSTGVNISSSRIRRPDFELPLPPGPVHEGAIAQWRLFQQVQVEIHGLEKLALDLYQGEDNYQLLQTVKGIGKILGLTIGLETGSISRFHQAGNYASYCRCVSSQRISNGKKKGENNRKAGNRYLSWAFSEAAHFAVRFEPKVQRFYERKRQKRNGILAIRAVAHKLSRAVFHMLKQHEPFDVERAFG

SEQ ID NO: 389864 - protein, 338 aa, unidentified
MTIETLGVDIAKTVFQLHGVNRSGRIVMRRRVMRDQLLAVIAQIDPCTIAIEACTGAFYWQRKFEQLGHQVRIISPQYVKPFVRRQKNDGNDAEAICTAARQPHMRFVPKKSIEQQDIQALHRARQRMVNHRTAVVSQIRGLLLDRGFAFGKSITRARRIIPEILADLENELTDLAREAIGELHDLLQDLDRRIASFDKKIERVFRQSEVCQRIAKVKGVGPKTATAVVAAIGDGTEFKNGRHLAAWLGLVPRQHSSGDKRVLLGISKRGSQHLRTLLVHGGRAVVRTAGNKSDPINRWVNQLRERRGYNRAAVAVANKNARIIWAVLRTGEAYGSAR

SEQ ID NO: 389865 - protein, 426 aa, unidentified
MGCGPPQGETPNVRVFGTTTAELNALADWLAEQRVTSVAMESTYIYWIPIYELLESRGVEVVLVNARTLHNVPGRKTDFADCQWIQLLHSCGLLRGSFRPNEPITRMRALHRQMANFVVERSRCVQWMQKSLDQMNVQVHRAVTDLTGTTGMAILRSIVAGERDPVRLAMHRDRRCHKSIEQIAQYLTGTWREEHLFNLAAALRHYDSLQETIASYEARLLEELTALQPAERQQESVPRHPNPTKERAIRNRGEQEARTTLWRFAGVDLTRIDGIGTGAAQIVLTEVGPNLAAFPSEDHFVSWLRLCPRTPISGGKPIKKRRNGLGANRVATALRMAAVTIQRSKTAIGAAFRRISRHKGAAVAVFATARQLARLVYRMLRYGQDYVDVGEKAYEDHFKTRRLAALTETARSLGFTLTKEDPMVGV

SEQ ID NO: 389866 - protein, 343 aa, unidentified
MQTITTIGLDIAKSVFQVHGVDAAGQVVIRRQLKRRYVLSFFEKLPPCLIGIEACASSHHWSRELQALGHTVRLMPPAYVKPYVKRQKNDAADAEAICEAVTRANMRFVPTKTPEQQSGLMLHRTRHLLIRQQTSVINAIRAHLAEFGIVAPVGRKGVEDLLGVIADASDKRVSEVVRGCLAALGSQLLGLKKQILDFDRMILAWHRSNQTSKRLNCIPGVGPLLATALVASVGDPKTFRSGRNFSAWIGLVPKQHSSGGRDRLGSISKQGDRYLRGLFVAGALAVIRYAKIHGTKHRPWVAALLARRPTKVAAIALANKLARMAWAMMATGEPYNYPAGLRG

SEQ ID NO: 389867 - protein, 457 aa, unidentified
MKHYFLGGDVSKGYSDFVILDNRKQRVEENFQLDDTIAGHSLLYDRLLIFFEKHPDAELCAALESTGGYENNWYKTLSKFQGSLNVKTARLNPAGVCKNNEAGLKRIITDKISAQGVAEYLIAHPEKVIYQQQDYWASLRKQWSFIKMLTKQSTQLFNQLESLLYSANPEIMKYCQEGTPGWVMNLLQQYPTAAKLGKARAISVARIPYISTSRAKELVAVAKTSIASATDAITGQLICATVGQIQHLQKTIKAQTKILVEECTLPEVELLKTFTGIGDYSAIGLMLEIQAVERFSTVKRLASFFGLHPVYKISGDGIGAVRMSKKGRKEPRAILFMVAMSAITSNALIRDLYQQHVAKGMEKMAAIGLCMHKILRITYGMLKNNTPFNPEKDLENRARTSAQPQKEKKDKSRRYQDFDAHAPISRRQRKKREERQLSKNAVSVECGISTPVPQFSS

SEQ ID NO: 389868 - protein, 410 aa, unidentified
MRLCVGDDWAEDHHDIEVMDEAGQVLARRRLPEGVAGIGQLHELIGRFLPAGGEAEVQAGIETDRGPWVAALIAAGYVVFPVNPLQASRYRGRRGVSGAKSDSGDAHMLADVVRTDAHQLRPAAGDSAEAEAVKVLARTHKTLIWERSAVVLRLRAQLREYFPAAVAAFEDLDAPDTLELLGKAPDPARAARLTRAQVSAALRRAGRYKITARTDAILAALRSPQLGQPAALTAAYAAAVRSLVAVITTLNEQVKALQGQVEAHFGRHPDAEIYLSQPGLGAITGARVLGEFGDDPCRYASAKNRRNYAGTSPITRASGKRKIVAARFVRNDRLIDALMIQAFAALRASPGARAFYDAQRAKGLEHNDALRRVASRLVGILHGCLKTRTCYDEATAWAHRENVPQSEAAA

SEQ ID NO: 389869 - protein, 344 aa, unidentified
MKALKSHVAGIDVHKEMLAITVLIGELDGEPKEYQFESSTFTDDLMALGLKLKEMGVTDVAMESSGIYWKPVFNVFNPLGLKVVVANAAHIKNVPGRKTDMNDSRWIAELHRFGLIRASFIPDGEFQRMRLLSRHRTNLTEDLARVKNRIQKVLEDGNIKLSIVVSDIFGVSGLKVLKQIAGGYTHPNILITEVTTKIKRMEEMKKALTNCLTTEHCFVINVLMKQYEELKNRIEEVENELCKKVEPYAHLVEELDKIPGIDAILAMGIIAEASANMSSFKDERAFAAWSGVASGNNESAGKKKRAKCRKGNPALRKMLIQAAQKATTARNPFIDLNTTNSAFA

SEQ ID NO: 389870 - protein, 358 aa, unidentified
METLKLTVGIDVSKDDCKCNLSKMTSELTVKVIASKTFLNNEKDLQELLKWVAKNSAGYGPLRTGIVIEASGVYHERFALGLQQAGHRVSVVLPNKAKKYMQSLGIKTKNDHIDARGLAQMGCEQHLEEWSPLSSFFHQLRTYTRLHEDIQQKRTDTSNQLHALKHSATEMRDAVQILEKLIEVFDKELGTIKMLIKKHIDSNREVKEKVEKICSIKGVALLTTATVVAETNGFELIKNIPQLVSYAGYDIEEDQSGKRVGKTKISKKGNGHIRRILFMPSLQLKSHQVGIFPQLYERTFNKHGIKMKSYVAIQRKLLVLIYTLWKKNQKFDEHYYKKISARVEKVETSSRVSLEEAV

SEQ ID NO: 389871 - protein, 455 aa, unidentified
MTKVTKKQKPIQVSEDMPVINRNAGGIDVGASEVWVSVPPDRDEEPVKRFETFTRDLYAMADWLKQCGIGSVAMESTGVYWIPVFQILEQRGIEVILVNARHAKNVAGRKTDWLDCQWLRILHTFGLLAGSFQPAAEIAVLRSYLRHRQMLIEYAAAHIQHMQKALTQMNLQLAHVVSDVTGLTGMRIIRAIVTGERNPQRLAEMRDWRTKSDEETIAKALEGNYQPEHVFALRQALELFDFYQQQIQVCDQQIRDYLRSLESKTDPENNPMKPARAKKKNRRNDPSFDCRHEAYRISGVDLTQIDSISESAALTILSEIGVDMGPWKTEKHFASWLTVCPNNKITGGRIFQRRTRKSANRVRDVLCLCAQSLFNSRSALGAFSRRMRSRLGPEKAIVATAHKLALLIYRLIKFGKDYVDIGEDAYEQQYQKRAVRNLARKAKEFGFQLVALAEA

SEQ ID NO: 389872 - protein, 361 aa, unidentified
MRIVQINELDFKGQNIYVGIDVHLKSWSVTVLSEHSVLKKFSQSPDAKALHMFLTSNYPGASYHSVYEAGFCGFWIHRRLTGLGIKNIVVNPADVPTKGKEKLRKTDAVDSGKLARELRSKSLTGIYVPSDAVLEMRSLIRLRSQIVKDSTREKNRIKALLRFHGIEIPEAFTKHTVGNWSKRFLKWLREVELSTEYGRKTLDLHIEQLVSLRKMLLQETRSMRTISRSVPFSETIRLLTSVPGIGITTAILLLVEIDDVTRFPGSDSLANFIGLIPMCHTSGDHDGTGDITIRKHATLRCALIEAAWVAIRKDPAMTLAYEGYRKKMIAQKAIVKIARKLVNRIFFVLKRKEEYVPCVVK

SEQ ID NO: 389873 - protein, 367 aa, unidentified
MKQQTSATSETLVKGRNIIDFTGKTIYVGIDVHQKDYQVAKVRDGICLGNHRMSANGDLLIKHLLSHYPGTEFKCVYESCAWGFNLQRKLTAAGMQCMVVHAADVSTNDKERKRKTDKVDALKLARNLAAGEMRGIHVPDETIQKERNLIRYRTRLVGDINRSKNRLKSLLKYQGIEIPAQYAKNNWSRNFLTWIEGQASSDELLADTLLLMLEQMKLLRQLLLKTEKKLRELRNGKYQSKIKLATSMPGIGPTTAMLFLLEVGDIKRFKNFDALNDFVGFCPDTNSSGETDRKLGITARRHKQLRSALIEAAWQAIRIDPALMNSYQELVKRLKGAQAIIRIARKLLRRLRAVLLTGIEYQKGVVA

SEQ ID NO: 389874 - protein, 414 aa, unidentified
MRKIYQNVAGLDVHKKIIAVFVILLGADGVWRQEKRNFGTMTADLLALSDWLTTLGVTHVAMESTGEYWKPVFNILETNFEVIVVNAQHLSKVPGRKTDQSDAEWIAELMQYGLLKASFIPPVGQRELRELTRFRSTFVKERATLVNRVQKVLESANIKLASVATDVLGVSGRAMLDAIVQGQIGPESMAELAKGRLREKREALVKALEGRVKPHHRFVLTELLCQIDSLDETIARFDREIEEYCRPFEEAVVLLDTIPGVSRTTAEVIVAEIGIDMSRFPTAGHLASWAGVAPGNNESAGKRLSGKTRRGNKSLGAALNQAAHGAAHTKNTYLAAQYHRLAARRGRKKAIMAVAHSILVIAYHLISRQESYHDLGANYFDQRKPEVTAKRLLKRLEQLGYQISVQPSLVPVSA

SEQ ID NO: 389875 - protein, 313 aa, unidentified
MQQPSHVGIDVSKHHLDVAFPGVSKVWRTPNDASGIAALIRRVQRLNSPHVVCEATGGYTRRLTSDLAAGAVPLSRVNPRQVRDFTRATGRLAKTDEIDAAAILRFADAMQPPASPAPSPEQVRLTDLVRRRRQLVDAAAQEKQREPIPGQPLVTSSVERHLAFLVGEIGAIDQAIADAIEADGMLARRAELLRSIPGVGVVTAATLVAELPELGTTGNKQIAALTGVAPMNRDSGMSRGQAHIAGGRMSARCCLYMATIVAIRCNPAIRPFYKHLREQGKPPKVAIVAAMRKLITTANSMLAHDRPWRADPA

SEQ ID NO: 389876 - protein, 391 aa, unidentified
MPTTNLHNSIDFKGQIFYIGLDVHKKTWAVTIRSMSVQVAHFTQPPGAAALARYLQKTFPGGSYYSAYEAGFCGTGIHEQLCKLGIINIVVHAADIPSTDKQKKNKTDLHDSRAIAEHLQKGNLKGIYVLSREQQELRSLFRLREGKVKDVIRANNRLKSSMMYFDIVVPESINKKEYLSLRALTWLDNYQMVSQAGKITLQQYAGELKHQRTQLYQLTCLLRKQVQDTDAKSYEYLLSAPGIGGITAMGLIAEIGDFCRFDDPDKYCSMLGLCPWEDSSGDTIKTKGMQPRCNRHLRPLLIEASWAAIRKSPALFAYYSKHAARNNKAAIVKVARRLALIARALVIKQQRYQPDYLTEEKQKTVKASSKRFSSGITEQHENKQPGNVFTS

SEQ ID NO: 389877 - protein, 347 aa, unidentified
MNYIGVDCHISSLDFAVVNERGITTKRAKVNTGVKEFIDFVKAVPKPRKIFIEEGELADWLLETSLKHKEQLIITDPKINKWIGKAGQKDDTIDAEKLAQLARGKYIKEIYHPVNHRRRFKELIFAYHDTVKSQARIKNKIKAGFRKNGIKCSGTTVYSAKHRGQWRKKLTKNKVTQLVVEELWAQLDQLGISKEKFKSNVRIQSKQYPEIKRFMKIPGIGLIHAATISAIIETPHRFANKKKLWMYAGIGLMERSSGEKVYSRKLTREYNRPLKNAIKQAVESSIFANDNQFRRQYLRLTLEDRIASHKAKLTVARSLLAALYGMWKKGEEYDPDIDVKRREKEKI

SEQ ID NO: 389878 - protein, 353 aa, unidentified
MEKVSKLDFTGQHIYIGLDVHKKSWSVSIRTPQLEHKTFTQPPEVEKLTNYLEKTFPKATYHTVYEAGFSGFWLHDRLKEKGVDCMVVNPADVPTKDKERTGKTDRIDCRKLARGLCNGELKGIYVPSRKQVEDRSLVRTRQSMVRKQTRCKNQITSILYFYGITIPEETRWTKQFLNWLESIQMERASGDFTLKTHLEELKHLRQLIANLNRAILSLSRTEEYRHNVILLKSIPGISTLTAMILLTEIGDVSRFSSLDKLASYAGMVPDIRSSGETEYSNGITYRRNAALRSLLIESAWVAARKDPALMMVFNKHSLKMKKSQAIVHVARRLLSRIRFVLKNQQKYVLATVN

SEQ ID NO: 389879 - protein, 401 aa, unidentified
MTVPTHEQIEVFLGVDVGKGQHHAVAVSRTGTILFDRTLPNDETRLRELIDTLTHHGPTILVVDQPATIGALAVAVAQDMGITVGYLPGLAMRRIADLYPGEAKTDKKDAAIIADAARTLPHALRHLKTTDTQVAELSILSGFDDDLAMQITATSNRLHGLLTQIHPALERAIGRHIAHPAILDLLEHYPTPAQIRRLGHSRLATRLSKKAPRMGARLADDITTAISEQNVVVIGTSAAETVIPKLAEQLSSLQRQRSDVAAKVEALVEAHPLYPVLTSMPGVGIRTTARIITETSGKHFATAGHLAAYAGLAPVTRRSGSSIRGEHRSRRGNKKLKRVLYLSAFAALQDPDSRDYYDRKRAQGKSYNQALVALARRRCDVLFAMLRDGTTYQAHPRPSAA

SEQ ID NO: 389880 - protein, 400 aa, unidentified
MEFIFGIDVSKTTSNIAILVDGKPVKQFKINNNAKGFETLAKELNPFKEPSIIFESTGVYSRSLKNYLLHENYRFTRINPLRAKKDMDSFRHNKTDSLDAPGLAKAMSMHHYDPTELSDPIYSKLHPLERFYQEQNEDIVREKDRLHKILSITFPEIENLLSSTNGNLYWNLVQKFPSSDFVKKYDIYTLSKVVLQSTPKNMGVGRSQRIASRLIELAKESFLMTNVDYEIREARYHAHEVQRISHLKSQLISEMAELSKNLPEIKILISIPGIGIKTAVCLTAEWGDIRRFYSSNAINAFVGIDLIHYESGNYTAGEHIRKRGNAYARKILFKAILNIISASKMIPTNINLVYKRKRQSSGSKGTKKIVISAIHHLIKTIYHLVLNNEMYDTKMFSGEH

SEQ ID NO: 389881 - protein, 344 aa, unidentified
MTSMHFIGLDIHKKTISYCVKDVSGTVLSEGTVAATRAQLDDWVKTLPAPWTVAMEATMFTGWIYDHLLPHAAAVKVAHPLMLRAIAAAKKKNDRIDASKICDCLRCDFLPECHMVSAEVRERRRTLRYRKLLVRQNVQLRNKVSQMLMESGVVYNKQKLHKVGYFKELMETNPDISRELKPLLAICRETIVRIGKTESALIRSLRRDPLLHARVERLMTIPAVGPITALTWVLEVDDVARFHSVKQAVSYCGLCGAERSSAETIKRMPISKQRNKHLQSVLIEAAKLAPRLSPELALVYDTEKQKGHANRASIAVARKLVAYLLAVDRSGREFVVAGERRAAA

SEQ ID NO: 389882 - protein, 345 aa, unidentified
MTQYKRIGIDTSKAVFTLHGIDQQDRPILRTNLRRAQLIPFFKKLPPTDIALEACGGSHYWARELTILGHMVRLIPPQYVKPFVKRGKNDRNDAEAICEAAGRPGMHFVPVKSVTQQAQGMVLKVRETLIGQRVALTNTVRGHAAEFGIVAGKGAGKIVQLLSAIEQEAAIPPEAREMFVLLTQQIDEIDARIKEVDAKLNAAHKTNEVSQRLVTIPGVGPIIALTLAVEIDPGMFESGRHLAAWAGQAPKERSTAGKQQMGGISRAGNERLRALLVSGATSVINVALRPGSRQMTDWLRALLLRKPRKLAAVALANKMARTAWAMMKRGETFRRPSSAAGAVAA

SEQ ID NO: 389883 - protein, 341 aa, unidentified
MYYIGLDVHKKTISYCIKTASGTIEREGKFGSSRQELDCWLKTLPQPWSAAMEATIFTGWIYDYLLPHAAAVKVAHPVMLRAIAAAKKKNDRVDAGKLADCLRCDFLPECHMASTETRDRRRTLRYRQLLVHQMVQVKNRISGLLMETGVAHNKQRLHQINYFRELMATSQEIDDSIRPLLRLSRETVLRLQKTENGLVSSLLRDPLLAERVRRLRTVPAVGPITVLTWALEMGDTSRFRSVKHAISYCGLCGDEKSSADKIMRTPLSKQRNKHIQRVLVEAAKLGPKLDHDLASVYEKEKQKGNANRATIAVARKMVAWLLAVDREQRDFVRSENHSRAA

SEQ ID NO: 389884 - protein, 345 aa, unidentified
MTIVESRLITGGVDTHADTHVAAALDPIGGLLGVEEFPVTPAGYARLLGWLGAFGTVGLVGIEGTGSYGAGLARHVTAAGIRVVEVDRSDRQDRRRQGKSDPLDAVSAARAAQSGRARGAPKGRDGAVEAIRALMVAKRSARAERTQTVNQARSLLVTGPDDLRARFAGHTVAALVSELATLRPRPGDVVGYATRIALRELGRRAEFLDSQLERLDELIVPLVTVRAPGLLALHGVGPDTAALLLIAAGDHPARLRSEAAWAHLCAAAPIPASSGKVTRHRLNPGGNREANHALWRIVITRMSAHAPTRAYVERRSGQGLSKKEIIRCLKRYVAREVYRHLRTAA

SEQ ID NO: 389885 - protein, 379 aa, unidentified
MFENITYVALDDHKRKHQVAVLPPGVEREDAVTWRVENTPAGIRKMVRKVLKMAPGDVRFCYEAGPNGYVLQRQISKYDRVTCVVVAPSRTPRRPGERVKTDRRDARKLVGLFRAGELQSIVPPMEEEEAIRDLVRCRSMAQMKATASRHQLDKFLTRNGYIYRDGKNWTRRYWDWLRCLNFDDWRRETTFQTYVFGIEQDEDRVKRLDLEIVRAAEEEPYRALVGFIRCFLGLDTLSAMIVTTELYAAGRFTTAPCLMGFVGMVPSESTTSWDPRRGPITKAGNGHVRRILVEAAKHYRHPPRVSKALAQRRKGQPEWVIAIADKAQTRLHQKYWKLVMGKGKHPNVATIAVARELVGFIWAVLIQAATTQSIDELVA

SEQ ID NO: 389886 - protein, 460 aa, unidentified
MKDHQDVSASPAQARRASEALGIVHPDAGGIDIGSQKHYVAVPPDRDPEPVRCFGCLTPDLQALARWLVACGIKTVALEATGVYWIPPMQVLEEYGLEVYLVDARQAKNLPGRKTDVKDCQWLQQLHAHGLLTRAFRPADAICVLRSYWRHRKDLVEMTSMQIQLMQKSLEQMNLQLHKVLSDVTGVTGMRILKAILAGERDPVVLAQMKHPLVKSSQDTIAQALTGDWRAEHLFTLRQALELYDVYQQKIEACDQEIQKYMQSLDARAEAKDLEPRQSGTRRKNQVHFDLRGQLYELTGTDLTSIDGIDALTAQTVVSESGIDMSRFATEKHYSSWLGLCPNHQITGGKVRRRRTRKVHNRAAQALRVAAQSLHKSKSALGAYSRRMRGRCGPAKAITATAHKLAILIYRMLKDGRTYVDQGQQAYEKQYQERTLQMLKRRVKQMGYALVDLRSGELVS

SEQ ID NO: 389887 - protein, 412 aa, unidentified
MQIIHECCSGLDVHAKTVVACLIRRGKKQTRTFSTMTDDLLRLSDWLVEEGCTHVAIESTGVYWKAVFNILEGVLEVILVNAQHVKAVPGRKTDVKDSEWLADLLRHGLLRASFIPPLEIRELRELTRYRQSLIREQTALSNRVQKLSESGNIKLSQVASDALGVSGKLMLRAVADGETDAEKMAQLARRRMRSKIPELRRALEGRMTKAQRWVLGELLTRYEEIERAVERVERQIDEEVNQGPDPFVEEAVTLLQTIPGIGESVAETIVSEIGVEMGRFTTDGHLASWAGMCPGNNESAGKRKSGKTTKGSTYLRAALTQAAWAASHAKGTYLQAQYQRLAKRMGKKKALVAVGHSILVIVYHVLANRASYEELGGDYFDRQNVVQQRTRLIRKLEALGLKVTVEELPVAA

SEQ ID NO: 389888 - protein, 384 aa, unidentified
MRTEQAYTGSGDVLVLAVSLELAAAKWKVALHDGRRDKPAVHTVAEPQAAARLQEVLDLIEAHKEKWSLPADVRIAVSYEAGQEAFWICRALQARHIECYVVDPASIPVERHQRRAKTDRLDVIKLVINLRAWLRGERDRMHVVHAPSPQDEASRQLMRERGQLQKEVLQHLDRMRKLLATLGCWDAVNHRAFAGRLQRDEVCCHNGAPLPRQLRERLLRECERLALVEQQLAALEKTRQTEVPALGRQRCDALERLHGIGEVGASRLALELFWREFNNRREVGACVGLVPQPYDSGDSQADQGISKQGNRRVRALLIEIAWNWLRYQPNSALTKWFNQRTQGTGPNRRARRIAIVAVARRLTIALWRYLRDGEIPKGAQLKSI

SEQ ID NO: 389889 - protein, 343 aa, unidentified
MNTCKVTQNASKGKSQSIDGNDHYVAVDWSLRVMAIAHMTRRSKQPTVFERPSDIKYLKDYLDAMTGRVVVAIEETTTAQWLYLELVDHVDEIIVCDPYRNRLLTDGPKTDKIDAAKLCTLLRAGLLKAVFHSASDLYELRHLVSAYEDLVKAGVRAQNQQTALAQGHGDKGNSAPFILEHLTSNIELYRTSKQQYEQKFLELSRHNKHIRNLLDVTGIGIIGAVKIVAIVVDARRFPRSGKYLSYCGLVEHKRMSGGRSYGRRQPRFNHALKAVYKVAAMAAISGTNNPMRAYYDFLLAKGVAEHNARNAVARYIARVTYGILKTGKRYRPFQQRTQERQVA

SEQ ID NO: 389890 - protein, 343 aa, unidentified
MQAVTTVGLDIAKSVFQVHCVDMQGNVIIRRQLKRRQVLAFFRKLPSCLVGVEACASSHHWSRELQELGHTVRLMPPAYVKPYVKRQKNDATDAEAICEAVTRPNMRFVATKTADQQSCLMLHRTRHLFIRQQTAVINAIRAHLAELGIVAPVGRKGVEELLRVVADGSDSRLPEIARACLAALGAQLRTLKVQILEFDRRIMAWHRSNAASRRLDAIPGVGPALATALVASVADPKAFRSGRDFSAWIGLVPKQHSSGGKDKLGGISKQGDRYLRSLFTVGALAVIRYAKIHGTGRRPWLTALLARRPTKVAAIALANKMARMAWAMMAKGEHYKEPVALAA

SEQ ID NO: 389891 - protein, 308 aa, unidentified
MDHFAGLDVSVKDTSVCVVDEAGKIIREVKVASEPDALLTVLNNPAYHFKRIGLEAGPLSQWLLSALAEASLPMICVETRHMRAVLKARINKTDRNDARGIAQMMRVGLYRPVHVKTLRSQKLRTLLTHRKLLQSKAIAIENDLRATLRNFGLKVGMVGTAKFEARIKELIESLPDLTLLVEPLLVVRRALREQIGILHRRLLAIVRDDEVCRRLMTVPGVGPVVALTYRATVDVPGRFRKSKSVGAVFGLTCSRDQSGERDRPGAISRCGDEMMRAMLYEAAQNMPVRSTHGPGSRLGRCRSSSAAA

SEQ ID NO: 389892 - protein, 365 aa, unidentified
MEKISTAKMKRQVAARTKKRTIGMDLGDRSSRYCVLDENGDVIAEGSVATTKPAMGKLFGAMVGCRIAIETGCHSPWVSRQLQGFGHEVIVANPRNVRLIGESTRKDDRLDARTLARLARIDPNLLGPVRHRGAEAQAHLAVIRARHALVKARTLLVNAARGLTKAFGERLRKCDPEQLGVHAVSGLSAETQAAVAPLLAEVETLNEGIAAYQRQIERLAKEHYPEIALLKQVKGVGTLSALTFVLTVDDPHRFRRSRDVGCYIGLRPGRRNSGKSQPQMRISKEGDTHLRSLMVQGAHYILGPFGSDCDLRRWGLKLAERGGKNAKKRAVIAVARKLAVLLHKLWVSGEAYEPLRNNSEVVTAA

SEQ ID NO: 389893 - protein, 435 aa, unidentified
MSLKEYARNPQQRKAYVQQPGLLLVGVDVSQAKHNACIGTQTGITCRKLVFTHRREGFQRFEQTLRDHLVKTSCRRLLIAMEPSGIYWQGLYDRLRSCGYDVCLVSCQAVRNNRKTMQEGTSKTDEKDAYSVLDLLRQGKFFLPVERDAALQAAYRLMHRYIALKKRGSQLRNQLRAAIHLTFPELNPLIKDLTHPTSLRFLQATPTPAAILRYGRQHFLETWQPRPRCGQWRPQKFQQLYDLAQQSIGLTDPYRIDEFEIPALAHDLADTLAKQQLWLDHAMALLEPRPDFQLLRQLPRIGAPTAAAILTALGDIRQYTNGKQLVKLAGLDVRLFESGSSIRKLPKISHVGSAYLRHWLYHYALRLVAHDPHFRAYYQRRKQQSPGKGAGQRALMAVCDKTIRMIYRILTDHAPYNPQKDKSIAEYYAAQRKAA

SEQ ID NO: 389894 - protein, 358 aa, unidentified
MDGSKEHPHMTAGLDIGDKYSYLCLIETQSGEVIEEGRLRTTPEAFLRRFSSEPPMRIAIEAGTHSPWASRVLEECGHEVLVANARKLRLIYANKRKTDEIDAENLARLARLDPKLLYPLKHRGEDSQAHLALIRSREALVSCRTQLVNHVRGAVKSFGARLPKCPARSFHKNALEHTPEALWPALGPILEQIGSLTERIREYDRKLQTISEESYPETDLLRQVEGIGVLTALTFVLTLGDPYRFEKSRSVGAYLGLVPASDRSGERDPQRRISKEGDQMLRKLLVGSAHYILGPFGSDSDLRRHGEKIASRGGKNSKKRAVVAVARKLSVLLHRLWVSGEVYDPLYNAHQRQSEEVA

SEQ ID NO: 389895 - protein, 360 aa, unidentified
MISERTSVGLDVHARSVVAAAIDERTGELVQRRMGSSTEEIVAWVTGLPGPVAATYEAGPTGFGLARALTAAGVRCVVAAPSKLQRPVGDRVKTDARDAVHLARLLRLGEIVEVVVPSVESEAARDLVRAREDARGDLMSARHRVSKLLLRQGIQYTGGKAWTVAHDGWLRSQWFELVGLQAAFDAAYEAMIQAVDRRDRLDAAITRMAADSEFTDVVNRLCCLRGVSTLTGFGLAVEIGDWTRLDGHRIGAYVGLTPSESSSGASRALGGITKTGNGHARRLLIEAAWHHRPAYRPTSPIMRARWDRASAAARARGHAGNQRLHDRWVGFQVRKKRSVVANAAIARELAGWCWSLAVMT

SEQ ID NO: 389896 - protein, 421 aa, unidentified
MNNRIIVPNTLILGIDIAKENHYGQFVVNGEYIKKPFLIKNTRESFECLLDSIRQLKAKYNLDYVLVGMEPTGHYWKNLAYYLKSQGIELCLVNPYHVNKIKELEDNSPTKNDKKDAKIISKLIYQGQYLNCMFEEELYVNLRLCSNNRQELKKQFISEKVRLIALLDEYFPEFKKMFSDILGKSALCILKTCPFPQDIVNIGVSELTQKLLDATHNRVGFKKAELVFNAAKTSIGVPVGLEGARYRLRLILRQLEALQKELDDVEKLMEEYLLQTGYSEYLLSIKGVGIVTAAGFLAEIGDISKYDSYKQIQKVAGLNLKETSSGMKKGKTKISKRGRSNLRNILYQAATVMVAKNTAFKEIYTHLTKRQENQLTGKQAIVALSVRLIKVMYTLCKKKTTYTHDKVHGLTSYGILKFIVL

SEQ ID NO: 389897 - protein, 337 aa, unidentified
MEYFAGLDVSMEETHVCVVDRDGKIILEARTPTAPKTIAAALAKGPSVDRVLFETGRMAPTLFHGLTALGLPVVCVESRQAYQALRSLAAHKTDRNDARGLAHLARTGFFKPVHVKSLPSHAVRALLIARKKLVGQRVTLENQIRGLAVAFGVRLPRGLSSGFAEKAMAAGCGIPGLDGAMRGLLAARDAILKAIVAINTDMKSLERSSSACRRLMTIPGVGRLTALAFAAAIDDPDRFRRSRDVGAYLGLVPRRYQSGEIDYTGSISKCGDARLRTLLYEAANVMLTRYRGSLALKTWALDIARRSTMRKARVALARRLAVIMFAMLKHGAEFEPA

SEQ ID NO: 389898 - protein, 395 aa, unidentified
MFIVGIDIAKRSHEAIIIAEDGQVVRKAFSFRNNCTGYNLLLEQVRRLTLVKSQIVFAMESTAHYWLALYARLLKDGYAVMVLNPIQSHSLRELYIRKAKTDARDSLIIADLVRFGRCKASNVPQDKILALRELCRSRAYLVDMAADLKRKLIALLDRIFPEYESLFDSVFSKASIAVLRKYSTPQKVKNAHLGKLTDLLMESSNGHFGEWKAHQLKEAACSSFGIDDSDGVYSMLLGMFLEQILSLTAQADSLEKQISVFFQEFNNPLTSIPGVGTVLAATILSEIGDVTRFSSADKLLAYAGLDSSVKQSGEFKSNQNRMSKRGSPYLRRAIWLASTVAVHRDPMFQTYYEKKISEGLHYMNVIGHVSRKMTAVIFAVLRDGQPYQPILQSAG

SEQ ID NO: 389899 - protein, 372 aa, unidentified
MNYNTVYVGMDVHKESFTFCAYTIDAEKGSRFQRTEADYKNVLRYLEFLRTVYGNDANFICGYEAGCLGYTLYHQLTEHHVNCVILAPTTMLEQRSKKRIKTDKCDAEIIAKCLAQHNYSPVHIPTAADEETKEFLRMRDDHKLALKKVKQQILAFCLRHNYRYDGNSHWTAAHIKWLKSLKPEALYKEILDEYLLTYTALSDKLERLDKRIEELASKDEYKESVKKLCCFIGVKTHTALSVLVEVGDFHRFASAQNFASYLGLVPGEDSSGDGQTRLGITKAGNRHVRMLLTEASQCYARGQIGFKSKKLKSRQAGNSPQVIAYADKANERLRRRYYKMVLGKSKKPNVAKTAIARELACFMWGMMTDHVA

SEQ ID NO: 389900 - protein, 352 aa, unidentified
MKYALEQESILGVDTHLDVHVAAVINQFGQLLGTQSVSTNTAGYLQLFQWASAFGALKRAGVEGTGTYGAGLCRFLCDKGILVLEVNRPNRASRRLNGKSDSLDAENAARSVLSGVSKAIPKQQSGACEAMRIVSVARRSAVKAKTQSINQLRAMLVSAPQSVREELWKAKASDCAKACAMIASLGDTVVLKALSKTLKSLAKRWLALSEELKDYDQQLETLTQEHAQQLRSRFGVGPQTAAILLTVAGDNPNRLKNEAALASLCGVNPLPASSGKTTRHRLNRGGSRTANNALWTIAMVRMRSDPRTKIYVERRTHEGLSTKEIHRCLKRYIVRELFPLIMGDLGALAGVP

SEQ ID NO: 389901 - protein, 322 aa, unidentified
MNKYKETYGVDISKDVFDVHGSSSGHNQYKNDATGFKKFLKDLPKDSLVVMEATGYYHYRLAQFLYKNEVVVSVVNPLSVKRFIQMKLAKVKTDKSDAKMICEYGIINEVPLYNALTDVQSECLQLFRTLDNYIKHRTATKNKMHGEEVLGIPSKFTYQSLRRTKKYYDTEIKKIEAKILSLVKEEQQEQLTLLTSVPGIGQKTALFLIIVTDGFSKFETASQLCSYVGITPTTRVSGSSVRGRARISKVGNRKLRNLLFLCSFNACKYNKACRELYERIVNKGKSKKLALIAVANKLIKQCFAIAKSGRPYDETYVSVLPR

SEQ ID NO: 389902 - protein, 399 aa, unidentified
MEVIEMYLVGIDISKYKHNCFIATETGVTLKAFVFENNQAGFKSFHQVLQELKPDSEIRIGLESTGHYGTNLKQFIVTSGYTYLEFNPYLTHQFSKARSFRRAKTDKFDAKTISNMLGTVDYKTLHTQFYHINELKQLVRDRDDILTNRSKTLVKLTSLLDLTFPEFKPLFNHELGVTARFILRKYQTATAIAKLTMKDFEGLKSISKGRLTYPKFSKLKMIAKDTIGSQSSIYTKRIQMLLNDYDYFDESLSEIDEEITNLFSASESKLKSIPGLGRIQAATIYAEIGNIQLFSSSKKLIAYAGFDVSINQSGMSEYHGKLVKHGSPLLRKAIWTYALPALKFIPSIHDYYQMKKSQGKHHKVALTHVCRKLIRMIYFIEFNRVDYDDTKIKTISVLE

SEQ ID NO: 389903 - protein, 398 aa, unidentified
MTESSDYESVQVFIAVDVGKDTHHAVAINRSGKRLFDKALPNDENKLRSLISDLKQHGQILLVVDQPATIGALPVAVARSEGVLVGYLPGLAMRRIADLHAGEAKTNARDAAIIAEAARTLPHALRTLKLADEQIAELSMLCGFDDDLAAQTTQASNRIRGLLTQIHPALERVLGPRLEHPAVLDLLQRYPSPEKLASLGEKKLAAQLCKLAPRLGKRLAADIAQALAEQTVVVPGTNAAAVVLPRLALQLITLRKQRDEVALEVELRVLAHPLYPVLTSMPGVGVRTAARLLTEVACRAFASAAHLAAYAGLAPVTRRSGSSIRGEHPSRRGNKALKRALFLSAFAALRDPLSRAYYTRKMSQGKRHNQALIALARRRCDVLFAMMRDGTFYTPQGS

SEQ ID NO: 389904 - protein, 471 aa, unidentified
MLLRARGSVSPLAPGSPGGTTSQASSPGTRGEERVDEVTDEPLYRDRVCGIDIGKAGLVATIRVPSDKNPARRAAETRSFGTTKREVLALADWLRCWQVPAVVMEATGDYWKGPFYRLEAEGFDCVLADARQVKNLPGRPKHDPGDSRWLAACFERGAVTSCFVATPEFRVIRLHTRYRRDLTEERTREKQRAEKLLESAAIKLSSVVTDLHGVTGRDIMDHLIAGERSPRALAQLARGRARRKISQLEAALEGAEFFTPAHAALLAAMLARIDRVNAEIARLTGVIETLLEPCEEQLQQAESMPGWGRRAAQDAVAETGVDMTRFPTGGHLASWAGRTPLESSSGKRQGKAKAKKGNRYLSGLLGETAVAAGKTQTREGARYRRLSRRRGKAKAQVALGNTQLKVYHKLLSSPGTRYTDLGPDYYERQASTRRQIAHHVGKLGALGFEVTLCRIPEPDPGPGPADSTQAA

SEQ ID NO: 389905 - protein, 419 aa, unidentified
MTFHLARGYVGTNKSVDQSSVKYSFGGSAMFYAGIDVAMDKHDCVVLDSDGNVVFEVFTFENSREGFKTLKKVFQSCSKNPKKIKVGLEATGHYSDNLLEFLNSIGFAPVLFNPLHTNLFRKGLSLRKTKTDHVDAHTIAIMLRTEDLKSYSQQSYHLAELKSLTRYRSMLVSDCSRHKISLVRLCQILFPELKNLVPSLHLSSVYTLLSELPSADKIANCNLTHLTALLSSASKGHYGRDKAIEIRDTARASIGIKSVVKELELQQTIELIQIYQQQIEAVEEQINSLMDEIDSPITSIPGIANRMAAVILAETNNFQDFERAEQVLAFAGLEPSVYQSGQLTSTHSKMVKRGSKYLRYAIFNATKYVCHWDPTFSAYLAKKRAEGKPYNVAVSHAAKKLTRVMFYLVKTNKEFVSQA

SEQ ID NO: 389906 - protein, 405 aa, unidentified
MISVGIDVSKGKSTVCVLKSYGEIVLSPKDYRHTTTELDVLASKLATYDEEIHVIMEVTGSYHLSIAAHLKKAGYLVYIINPLEMKRYRCQRIRNPKTDRIDAFTIAQYGIDFWYRVPVDRSIDKSRSELKFLGTQYLNFMKSRQDRCLALCNIMDRTLPGIYGKIETFNRNTGRDKLCDFVYDYYHRDCIMKYSEQKFCERYQAWTKKKGYRYRENEARQLYRIAKDSIPTLTATENTKMMVREIVTVLRAVNISIYRILSQMQVLAKQMPEYETVMAMKGAGDSIGPRLIAAIGDPRRFHSEKALIAYAGIDAPPYQSGKFTGTERHMSKRESKIMRKLGFELMDSINKHQANYQEDAVCQYFLKKRAEGKAYRVAMFAAYNKFLRIYHSKVSAVLKEYEAMN

SEQ ID NO: 389907 - protein, 418 aa, unidentified
MDEDGNTRGSRRYVALDIHKHYCIIAAVDRDGRVVLPAVRVEHADLEGWLKKNLRTSDHVVIESTTNAWHVYDLLAPWVERVVVANPIKVKQIAQARVKTDIRDTLILARLLAANLVPDVWVPPAHVREMRQLLSQRRQLVETHTQIVNRMHSVAHRHHLKHERGKRFNEKNTVWQRDNRLSKVEQFQLELEMENRGYIEKQISRIGKEVAKMSHQKPWAESMTYLMQLPGFGVITAMTVLAAIGEVKRFETAKKLASYSGLTGGVDQSGTHLVQKSITKEGRKELRWAMVEVAQRAVKSDPRWTRKFQELHKRMHRNQVIVAIARQLLELVWYVLTRRQAYRHFSQERIAYKYLTWAWQMDEVARDGLTRQQFARYYMMRLGIGQDLTRIALDPKHPRKISSEAELLVLRPDLNHIE

SEQ ID NO: 389908 - protein, 459 aa, unidentified
MNRKQRRETMRKIQSEEISLEVVHPNAAGIDIGNESHYVAVPPSRDSQPVQRFGCTTAELKAMAAWLKQCGIRTVAMQSTGVYWIAVYDILEQAGLEVYLVNARDTKNLPGRKSDVQESQWLMKLHTYGLLRNSFRPAQQIRTMRTYWRQRNDLVQSTGRHIQRMQKALTQMNLQLANVLSDVSGVTGQAIIKAILGGERDPHKLAEFRDPRVKASEEQIAQSLEGNWQEELLFVLKQEQDGYEFCRKQMAECDRQLAQYLQQREDRSQGAPLPEEKRKTRLKKKKGNAPQFDLRQGLFRLSGTDLTRIDCIDVMTAMTVISEAGWDMSKWKTEDHFVSWLRLCPDNRISGDKIIGKGRLPTNNRVNIALKMAASSLRLNNTYLGAQFRRLRTRLGAPIAIKAMAAKLARLVYRMLRYGMKYVDRGAAFYELQNRQLQIKRLKSKAAKLGLQIVQAPAA

SEQ ID NO: 389909 - protein, 363 aa, unidentified
MKKFIRIGVDLAKNYFQVHALVSDVGPAVTRKLRRSKMHEFFSQIEPSLIGMEACGSAHYWARELKAMGHEVLLMPPAYTKPYVKRGKNDAVDADACCEAMSRPGMRFVPVKSAEQQATLMLHKTRELLVKQRTMSVNALRGHLSEFGIIAAKGIGRVDELLDLVESDTTLPNAARASAKVLAHALEGLDKAIDDLEDEITNAQAQNEMTRLLYKVPGIGKIIASVIAASVPDPSVFKSGRDFTAWLGLTPRQNSSGGKQALGAITKQGNRYIRKLLVLGATSLLNVVGKRKGALRDWIVGLLAKKPARLSGRENPRHLLHCRRRPWPESSSATPRPRSKSHPPKNARPTKAASPAGDSKASS

SEQ ID NO: 389910 - protein, 373 aa, unidentified
MFHFTTLFIGMDVHKESFSLCYYDMMANQFKHSTKVGPNVSYIVNYVNELRRLYGQDAEVLCGYEAGCLGFTLYHQLQAHGIPCIVMAPTTVMKEGSKRVKTDKKDAAQLAKALAFRSYRPVHIPTVEDEQVKEYIRMRIDHKVALKKIKQQILAFCLRHDFRYTEGSSNWTQKHVRWLRSLNPDGLYAEILTEYLLTYEKLVDQIERYDARIEQLGQSDSYQEKVSRLSCFIGIKTLTALSIVTEIGDFNRFATAQHFASYLGLTPSENSSGDKERRGAITKAGNSHVRRLLIEAAQSLAKGTIGYKSKELKRRQSGNRVEVIAYADKANERLRRRYRTLVLGKNKKQNVAKTAIARELSGFIWGMMTGRIA

SEQ ID NO: 389911 - protein, 319 aa, unidentified
MNKSTLIFGIDISKDNFDVYGKALGHKRYANNAKGIKTFVKALPDQAHCVMEVTGCYHHRLALFLQERSIALSIVNPVVIKRYIQMRLKRVKTDKSDALMIYGYGCDQPLELWQPDPVYVERGRELLSLVQMYLKQSTALKNKLHALESRGQCKGKAIFSIKRQLRTLKKECLLLEQEIEHLIKDNEPSLFARLKTIPGIGKKTAILLMLNTGNFEGFANYKQVSSFLGLAPNERSSGSSIRGKSRISKTGDGLVRNHLFMCSFTACIHNPQCKALFDRIVAKGKSKKLALIAVCNKLIKQAYAIAKSGLPYDPNYARN

SEQ ID NO: 389912 - protein, 348 aa, unidentified
MKLDKRDYKGKEVFVGIDVHKKSYAVAAVCEGVLVKNWSMKANPKQLVEQLKRFFEGAQIQSVYEAGFSGFSLHRFLNSKGIKNIVVNPGSIATRANSRVKTDKKDAKKMSQHLSKSLLRCIYIPSEEVEDRRSLTRGRDQVVKRRQAIGNQIKMKIYYLGLFISDARISESYMKEVELLELSAGHKMILEELVEAWRTETDRIKRFNKALSEQAKVDKLETIYRSAPGVGVISSRILSNELGDMSRFDNEKQLSSSTGLTPSEYSSGEHVRKGHLTRQGSPQIRAILVEIAWRAIREDRNLFEIYHRIKNRREGKRAIVAVARKILIRLRKCLKDRILWQDLGPLMG

SEQ ID NO: 389913 - protein, 388 aa, unidentified
MIKQDLWESNGGRTVVGIDPCSEFLQLAILAPNKETEFKKLPLSPSITEEIAKSTDPATTQIAIESYGSYGKLFVYDLLRKGYDVREVNPHISKKLSSLYSEEHSDQKDAESLAKALLLIPDLPKISITDKKQWLAKLTRTRKKLVKDLNGYLNRLHIALTESYGVVYKSLFKILFAKKALKFFEDYPTINDSISDNDAKKRLGKEKRDLLIQAGKWEDDCYLDTLRTEIRGIIGIIRSINSTKIALEENIQEIADQVEEMRILRTFPGIGGIAGATLLSEIGDIERFGQESYLSAYCGVSPVIWQSGTGRIRTKRRKRYSRRLKAILYFISLSQIRLNPESKAYYQRKRNEGKTHWQAMNALSRQLIKIIYYMLKNKMPYQRTPRAN

SEQ ID NO: 389914 - protein, 412 aa, unidentified
MRLFAGDDWAEDHHDIEVMDQAGRVLAKKRLPEGAAGMAQLHALIGQFVPEDDMDSADVVIGIETDRGPWVAALAAAGYTVFPVNPLQASRYRERHGVSGAKSDAGDAHMLADMVRTDSHQLRPAAGDSPEAEGVKVLARTHKTLIWERTRAVQRLRHQLREYFPAALEAFEDLDAADTLELLGKAPEPARAAKLTRAQVSAALKRARRRNIPDKATAILAALRSEQLGQPEALTAAYAATVRSLIAVITVLNEQVKALQGQVGEYFGRHPDAEIYLSQPGMGKVLGARVLGEFGDDPSRYRDGKARRNYAATSPLTRSSGKKKVVSARFIHNDRLVDALSTQAFAALNASPGARAFYDELRARGIEHNDALRRLANRLVGILHGCLKTRTLYDEATAWGHRQNLPQSSVAA

SEQ ID NO: 389915 - protein, 351 aa, unidentified
MPMLEGNIDHVIGVDTHRDAHAAAILDRNGGLLAQLEVPSSQAGYEELLAVVAQRAPGRRCWALEGTGCYGAGLASFPADHGEWVTEIDRPKRTGRTQAKSDPLDAIRAGREALSREHLATPRQRGQREALRVLQITRAGAVKVAADARRHLKALLVTAPEPLRAGLRGGTWLRQVRACAALTAQPNDPVEYRATVRALRITAERALAAHTEATQLGKELAILVRMVAPALLAQPGVGPVTAAQVLISWSHPGRLRSEAAFAMLAGAAPIEASSGRVVRHRLNRGGDRQLNRALHTIVMLRERYHEPTRRYVARRTAEGRSEREIRRCLKRTVARQLFRLLERQAPTRVTA

SEQ ID NO: 389916 - protein, 356 aa, unidentified
MLYVGVDAHSKTSWITVMDEKGKILKREQINSCRKDVRRSLGRYRQSVKAVVEASRSWGPIYDWLDEVADDVILAHPGKVRAIAEARIKTDKIDSETLAHLLRADLIPQAYAPPKEIRAIKRVLRQRMFFVRIRTMLKNRIKALLAQHSVEIPQVSDLYGKKGLRWLKNLTLPEPDGKLLNEDLNLLLVLNERIAATESLIAELSEGDDAVDWLFSLPGIGKFLSVLIRYEVDNIDRFSSSKKFTGYTGLVPSTYASGERMVHGRLTKRGNKWLRWAFIEAVTPAIRKSSMLRRYYDKIKSRRGCKDARVATARKLAELAWTVWTERRMFAESGKKNLRRTKDYSRTPAALISSWA

SEQ ID NO: 389917 - protein, 352 aa, unidentified
MIIGCDFHPSFQQIAYVDQETGEYGERRLGHREEAVRFYGSLAGRQVVVGMEATGNDRWFRKLLGELGQQLLVGDASAIHASAPREQRTDKRDARHILKLLVENRFPSVWQPPAGNEAQRQLLMHRCRLVRMRTRLKNQLDSIAKSEGLTGSRKWSSKRRQQIEALPLTGWYAARRADLLLLLDGLEQRIQPLDRAVEEAARQDAEARLLMTHPGVGPVISLAYVLVIGDWRRFPRGKQVGSYLGLIPSEASSGRRQQQMGHITKQGNTLLRWLLVEAATTAQRHDAGWHRQYVRLSRTKHHGVAKVAIAHKLAVRLYWMLRSGQGYEQMMERGSHARQSECPVGLSTRPTE

SEQ ID NO: 389918 - protein, 387 aa, unidentified
MKTNQIKPIHDRNTSTPSPGQSNPAVAAAPAPPAPVRHVFMLGLDVDLLNVVTAIQCDRGAIALAQKFSRAQLLAWVQKQTAAGHEVHTVYEACGFGYTLHHALVAAGAHSLVTTPMRLSPERRRKNDRLDARALCVRLSRHREGHAHELKPIRIPSAAEQQRRELGRQREFFKRERGRLENHGRALRIEFEHQTLPAGWAGPRKWKQIAPQCSEFVRGQLEPVVLQIRACQARMQELTARIQATVAQEKIPTGLGALTVALLEGEVCDWKRFRHRKAIGSYTGCCPSEHSTGGVQRFGHIDRHGNKHVRVLLVEAVWRLLRWQPDWHARVKYLQKLKHGASLKKKIAVALARQLAIDLWRWRTGRCTAAQLGWTVESAKDEAGTAQ

SEQ ID NO: 389919 - protein, 401 aa, unidentified
MDNTTIFYVGIDVSKDKSDICIKDEKGNDLIHRFEITNKKADLEMLYETIESIKSKTPGNSDVVFGMEATGIYSLPLYSALKRDGCKVKLYNPIQTNGYRKINIRKTKTDPIDSAIIADMLRHSEPPQVSDIQDMNLYQLRELVRIRHRLIEKQTLCKIQLLRNVDTVWPNYSNVMKRVMGKTSLAIMKKYSVPSKVIGESFDQFYELVKKKSRSKISRSTAEEIYAHAGNTLTVPELDEVISIEIKTLITQLELYDEQINSVEGKINHMMKLTDTKIMSIPGIADILGPTILGEIGNVERFSNVKKLVAFAGLDPVVSQSGRFENKSGKISKRGSPLLRQALFLAANTAIQNDENLKRFYAKKRSEGKHHFSALNAVAAKLLRIVYWVLKNNREYQIQPN

SEQ ID NO: 389920 - protein, 329 aa, unidentified
MEQLYCGIDLHKEKHNGCIMDSKGNVVREREFSSRPEALERFITGIPNTHLTVAVEACGMWRPVHKKLTELGYTVKLANPLKTHQIATNKKTDWVDAKILADLLRTNYLPEVYIPNEETQKLRDLCRHKSSITRIQTQVKTKIKTNLLREGLIYPKNLWTKKMLTNFKKQNQDQNTTNLLNVYDCVHAEETEAKNRIEKISRANKQTTLLMSLPGVAEFSALFILAEIGDIKRFPTPEHLISYCGLCPGIYQSGSKEHTVEKHAVNKWLKWILYESSGKAAQIDSRFRNHYYKIQKRKGMQTARRSTARKMATIIWHMLNNQEPYREVA

SEQ ID NO: 389921 - protein, 320 aa, unidentified
MSVPSVTVGIDVAKAHVDVCVLGAKTDAQRLSNDAEGHSALAAMLQPLGVGLVVMEATGGYEAALACALQAAGLPVAVVNPRQARDFAKSMGRLAKTDAVDARMLADLAAVLVRREDLERFLRPLADERQQWLAALVTRRRQLLTMLHSERQRLQITPKQLHASIEAIVAAIKAQLEDVEAQMVTHVRERFGELDRLLQSAAGIGPVASATMIAELPELGRLNRREIAALVGVAPMANDSGSSKGRRRVQGGRFEIRRVLYMATLTATRYNPAIKAFYERLKAAGKLPKVALVACMRKLLTTLNAMVRTGKPWDESLHSA

SEQ ID NO: 389922 - protein, 462 aa, unidentified
MKRKAKSQATHSGLAVVNPNAAAIDIGATIHVAAVGADRASDPVRSFGTFTADLHRLADWFAECGVKTVVMESTSVYWIPIFELLDERGFEVILVNARDAKHVPGRKTDVSDAQWLQRLHSYGLLRASFRPKGEIVELRAYLRQRERLLDTAASHIQHMQKAMTEMNLQLHHVVSDITGATGMRIIRAIIAGERDPAVLASMRDTRCHSSAEVIEKALTGHYRAEHLFVLEQALALYDVYQQKVAACDIRIESVLNELISVRGSKEDASANGSGSPRRRSRQSNGPDFDVGKALNALLGKDLTRIHGIGPYLALKLVSECGDDLSAWPTAKHFTSWLCLAPSNKISGGKVLSSRTRRSRSRAASLLRLAAVTIGRTDTALGAFYRRLSARAGKSKAVTATARKIAVLFYNAIRHGMDYVDPGASYYETRYRERVVKNLHRRAKAFGFILQAAEIPVAEQAVS

SEQ ID NO: 389923 - protein, 362 aa, unidentified
MSNSITWVGMDVHKESIVTVSISGDSGTVMTRWETPNTAKGKERLAGRIAGLGKARCVYEAGPCGYDLRRFLDGKGIPCDVIAPSLIPTRPGDRIKTDRRDAEKLARIHRMGELTAICVPTPAQEALRDLVRAREDANEDLVRCRHRLQKFLLRQGRRFEGKSWTREHWRWVRALTFDDANAGTVLAEYVLAVDQQLERVARLDARIEEEAQNPGIAPAVARLKTLRGVRTLTAMTIHSELIDLSRFASPRDLMSFIGLVPSEYSSGGKQRRGSLTRAGNAHLRRVLVEAAWHYRHPPHRTGKTIRKRREGQPPDVIETARKAEVRLYRKFTRMVMRGKRTTVAAVAVARELAGFVWAIGRI

SEQ ID NO: 389924 - protein, 272 aa, unidentified
MNATTVAVDVAKNVFELAIADAQWRVTGSARLTRGQFERWFDNREVALVIMEACGSAHHWARTLRARGIEVRLLPAQYVRAYVKRNKTDAADARALLEAARASDMKPVRVKSVEQQALQALHRTRSAWLATRTRRINALRGFCREFGLVVPEGAATGIARIARYLADEHSGIPGMLRGSMRLMLEEIRLLEARVAQLERELAEIAAASPACQALLSVPGIGLITSTAMVAAVGDPRSFDSGRRYASFLGLTPREHSSGDKRVLAVSVRSAPS

SEQ ID NO: 389925 - protein, 332 aa, unidentified
MSIVSTVGIDLAKNVFSVHAIDELGQVVVRRSLSRAKLSELVAQLQPCLIGMEACSGAHEWARRFATFGHVVKLMAPKFVAPYRKSGKNDGNDAEAICEAVSRPNMRFVPVKSTEQQSDLTLHRVRQGFVEERTATLNRLRGLLAEFGHVLPLRPSELHRRVPLLLENLPARVATCAQDLLEHARQLHAKALEYERQIKLHVHSNALACRAQTRLGIGPITASALVATVGNGRDFKNGRQFAAWLGLVPRQYSTGGKTRLGHITKRGDPYLRTLLVMGARAVLQRAVSLTDPLSRWALAVRERRGYHRACIAVAAKNARVAWALLAKEAAAA

SEQ ID NO: 389926 - protein, 404 aa, unidentified
MSVHAAPVTVSTIVVAVDVGKTSVMASVTDDARRRLMGPVEFAMTRSGLAAAAQRVSAVAPSCLQVKVGVEAAGHYHRPVVDYRWPAGWEVLELNPAHVAEQRRVMGRRRVKTDGIDLEAITELVLAGRGRVITERDVLIGELAAWAQHRSRRVATRTATKNQLLSQLDRAFPGLTLALPDVLGTKIGCLVAAEFTDPARLAALGVNRLIRFAAARDVQLRRPVAERLIKAAKDALPTRDAMVARRVLTADVCLLTELDSRIVDAEAELARLLPLSPFSPLTSVPGWGVIRVSNYAAALGDPTRWPGPKQIYRASGLSPMQYESAGKRRDGSISREGSVALRRALIDLGMGLWLTEPAAKTYAHGLKDRGKRGGVIACALAHRATRIAHALVRDHAVYDPHRWS

SEQ ID NO: 389927 - protein, 354 aa, unidentified
MRLYQTTTEFNCGVDLHARQMYVCVVDKEGKILVHRNIRDNDFEFFLKLVQPYRPSLTVCSECCFCWPWLADACEEAGITFVLAHALYLRSIQADKKKNDRVDSEKIAQLLRTNMIPYSYVYPKTIRPIRALLRRRMAYVWRRSEILTWQTCGLISEGLPEIEVQSRPRDRWEQKLLERHTNEYMKITVETDLALIREYDRQIDRLERTIMAVSKKDRWRDLHVVMSVPGVGEVLAMTLLYEIGDINRFPTHQDFASYCRLVKGAVESAGIIKGMRGGKMGNGYLKWAMKEAVLVAKRSHPDIKAMAQRLERKHDKQTANAIIAHRLARAIFYMLKHGMTFSMDLFSKRLEHAA

SEQ ID NO: 389928 - protein, 351 aa, unidentified
MNTQQTACPKLYIGIDIHKRSWKVHCATDLFAGKSFSMSPDPKQLHSYVSKHFKEYEVTVAYEAGCCGYHAHRCFESYGWRSLVVNPADIHRKGKEKHTKTDKIDAQLIARELKDNRLQSIIVPDRKREELRSLFRRRNDLVKDFRRVKSYIKMQLLYFGIREPEEFDNDHWSHKYRNWLDDIMFEYPTAKATLESRMRFFRFVDQELRDVSTQLRRYCKVNYKKDYLLLRSIPGIGGIVACGILCELGDLRRFNNIKHLAGYVGLAPSMYQSGNSQRTMGMTPRANRLLRSYFVEASWQAIRADPVMQAYYRKHQGKNVKSIIVKVARKLLSRTLAVIKTEVPYTIGVIE

SEQ ID NO: 389929 - protein, 363 aa, unidentified
MRMKKHMRHLIAEVPGRNSKVGITIGIDLGDIWSHYCTLNEDGEVVDRGRFRTNPSGVDKRFRDLERARVAMETGTHSIWVSEQIQELGHEVIVANVRELRAISHSDRKSDKVDAEKIARYARLDPEILRPITHRTVGQQETLTLIRARDVLVRLRTGAVNSVRGLAKPCGYRLPASSTLTFAKRCLTVLPPGLAQALGPLLQQIADMTVKIKQYDREIQKLTETAYPETQALIKVYGVGHLTALTFVLTLGNKQRFQRSRDVGCYLGLRPRRSQSGDSDPQLGITKAGNGYLRQLLVECANHVIGPHGKDSTLRRWGLSLGARGGSHARRRAVVAVARKLAVLLHRIWITQEVYVPFYEVAA

SEQ ID NO: 389930 - protein, 352 aa, unidentified
MTLVGCDLHSRKQQVAVLDTETGEVLEQELLHEGDAVERFYRALPRPVTVGIEATGYTLWFHAVMQRLGHTLLVGEAAKIRAMVVRKTKTDRRDAQHRLDLLKHERFPTVWIPDPTTRDLRALIAHRVRLVRMRTMVKNGLHAIALNQRVALGPSRWTKRGLAQLQALPLPPHTARRREDNLELLTWLTTRIDQLDERIAAAAATNARAQRLLTHPGVGPLTALITVLVLDPAERFPTSKHVVSYVGLAPAINASADKYHLGKITKPGNALLRWILGQAAPLATRADGELKRAYCAVLHRRGRPKAKVALARTLLVRLYIMLRDQIDYEEFRRRGRMRRAQGALNPVSAPPL

SEQ ID NO: 389931 - protein, 433 aa, unidentified
MKIRYEDRQKRKQLAITDDTLVVGVDIAKNYQWARFVDFRGIEHDHALKFKNRKGGFETILTKIRTICKQEGFKKVVVGMEPTGHYWKAFANWLEKQADITVVLVNPYATKQAKELDDNSQTKSDKKDALTIAKLVAQGRYFELYLPHDVYAELRGLSTVRTSLNKRKKAIKNTITAILDEFFPEYVDVFKNPLKGKASRHILKTCPFPKFITELGEDGVTKEIKMAVKKTVGRKKARQLVEAAQESIGVDYGEEAARLKLSLLIDELELLEQQTEELEKQMSCVLSETDYAEFLLTIKGIGIITLAACLGELGDPTRFDNPRQMSRMAGYNLVEDSSGKNKSGTKISKRGRKNLRSVLYQMALTMVATNEEMKELYNYLKTREKDPLRKMQALIVVSKKILTIIHTLAKKKESYDPDKVFGHVRREQLKSAA

SEQ ID NO: 389932 - protein, 320 aa, unidentified
MMIPHKNPVVGIDVAKLAFVIAIHESPKTLEFQNTKQGISQFIRWLDQMNVKRKHIRIALDSTGGCEHALWEALELAGFDVRQVPSNRIWAFTKSEGILAKTDAIDAKIIARFAHSKPGIGRRLPSETTRKLGVLIAKRRQVVKIRTMLKCQIKQHRDPQIIALDEEHIALLNRQIKTLESQILETQAGDVELAQKTELLRSIPGIGPVLAATLLGEFPELGQIRRTSAAALAGLAPLNHDSGKKHGKRFIKGGRKPVRDTLYQAALVASIHNPQLRVFAQRLKAKGKPHKQVMIAVARKLLLSANTVLKRNKPWVIEMK

SEQ ID NO: 389933 - protein, 374 aa, unidentified
MWRFFPPLLKGEERTGARPIRPRSAVGKIDFQYGPRPSMLQTRTVTRAYNYSIARIYKEGKSMTKNIVGVDIAKETFDSFALQNNESRHHQYDKKGISEFVRWAKKNKVELVVMEATGGYEQPLFIALAEKGIHVAIVNPRYVKDFARALGKQAKTDKIDAKILALYGDRIEPEKTSLPPEKQRLMKKLVQRRRQLLGMRTMEKHRVDKTDDKNIKRGIRRIIRCLDREIECLESRIKQIIEHDPQYQKKDRILQSTPGIGAVTSSVLLSSLPELGHLNRRQIAALVGVAPINRDSGKKKGKRYIRAGRKEIRCALYMPMLTIIQHNRKLKKMYDRLVQSGKKKIVAVIACMRKLVTILNLMLKENTAWNHNLA

SEQ ID NO: 389934 - protein, 326 aa, unidentified
MEHELHYIGIDTAKEKLDVDVLRPDGRHRTKKFANTTKGHDELVSWLKGHKIDHAHICIEATGTYMEPVAECLYDAGYIVSVINPALGKAFAQSEGLRNKTDTVDARMLAEFCRQKRPAAWEAPHPLERALRALVVRHQALTDMHTQELNRTETAREVQRPSIDAHLLGLEAELKRLEKQIKDLTDDDPDMKHRRKLLESIPGIGEKTSAVLLAYIGLKDRFAHARQFAAFAGLTPRRYESGSSVRGTSRLSKAGHVSLRRALYMPAMVATSKTEWGRVFRDRLAANGKKGKVILGAMMRKLAQVAYGVLKSGVPFDAARHNPVAA

SEQ ID NO: 389935 - protein, 363 aa, unidentified
MGYHTEAFIGVDTAKLRNAVAVAESGLNGQVYFYGEIDNTEAAMRKLIRKLESKYKRLTFCYEAGPTGYGLFRLIKELGHNCSVVAPSLVPRKPGDRVKTNRRDALNLAKLLRAGQLIAVWVPDERHEAMRDLVRAREAAHIDYTRNRQQVSSFLLRLGRYYPGKKTWGKAHLKWLAAQKLDNYEQRIAFEELLLAVRQSRERIERLEQAIRDSLPEWSLAPVVEALQALRGIDLISAVVFMSEIGELSRFASPRQLMAFLGLVPSERSTGESVIRGCITKAGNRRARRILVEAAWSYRHPPRVGKEKQKKVEAVPRTVREIAWKAQTRLCGRFRKLTRKGKLSTTVTTAVARELSALSGQLT

SEQ ID NO: 389936 - protein, 344 aa, unidentified
MEKLSRIGMDTSKQIFQLHGVDEAERAVLRRKFRRKDVLAFFEALAPTAVGIEASGGAHYWARELTRLGHQVRLIAPQYVKPYVKRGKNDAADAEAICEAMSRPTMRFVAIKSAESQAALMLAGMRERLVRHRVQLANAIRGYAAEFGLVAAKGRAKLEPLLLRLQSDATIPLLARELFIEHAKEYAQLTAQLAAVDAKLMAWHRANEVSRRLARIPGVGPVIASLLAMKTPDPHAFRSGRQFAAWIGLTPKDHSTAGKTRSGVITRAGDETLRSLLVVGATAVIWQARRGSARYASPWLLALLKRKPPKLAAVALANKIARIAWKLMATGESYDVRRALPAIT

SEQ ID NO: 389937 - protein, 338 aa, unidentified
MAKMYAGLDVSDKETAICVLSANGDIVLETSAATNAAAIGDVLKPYRRVLDKVGHESCAKAMWLNRELIRKKWPAICLDAMHTHAALAANKNKTDRNDARGIAEVLCRGIYTTAHVRTEVSQKWRSVLTHRKAILRKRLDLERLTAANLKLVGGTLVRDGKNWIAKPQARRRLDSDFVDVINGTIRLIRVLRDEGERLDAMVMKLADGDPVCRRLMTMPGVGPVTAFSFRCAVDDPYRFSSSRTVAAHFGLTPRTYQSGESSYTGHISRRGDSEVRSLLYQSAACVLNISKSPWRLRLWGKELAKRKGFKVAAVACARRMAVILHRMWITERDFQLVT

SEQ ID NO: 389938 - protein, 344 aa, unidentified
MKIAVLGIDLGKNVCSVVGLDPSGAVVLRRRVRRDTLIDLVAKLPSCIVGMEACCGAHHLGRLFAAQGHDIRLMSPEYVRPYVKAQKNDDRDAEGIAEAATRPTMRFVEMKTEDQLDMQTLHRSRERLVGERTALINQLRAILLDRGIVVPQGKRKLEQYLVILMNEHDGEGLSARMRMLVADIRAQWQELDRRIGEFDAEFVRWAKENEDARRLVTIPGVGVTISTALIAAVGKAETFEHGRDLAAWLGLVPRQSTTGGKPRLMGISKRGNKYLRKLLIHGARAALPYVAEKDTALGRWAKSLLSRVHQNVAVVAFANKLARICWAVLRSGQRFAAKGEPLVV

SEQ ID NO: 389939 - protein, 368 aa, unidentified
MTNLTIGAVTSDANNRQSAVVTPLALVIKLGIDVHAKEYVVVRQVDEAVSQPAQRFNLEGLLGFVRRQVAVARSVHSCYEAGPFGYVLHRQLSALGVQNLVVRPRDWSTYGERVKTDQRDAAALCSCLDRHLAGNQGALALVRVPSEAEEQARAVARQRQSLVRERVRLTLQGKSAALLRGHRLVGEWWRGNRLAKLAPDLPPELLVILKRWQQVILLLEAQVQALTEQLEQAAPPGLPCGLGSMTWEILSREVGDWHRFRNRRQVASYTGLCPGEHSSGASRQQGSITRHGNPRLRHLLIEAVWRLFRFNPEYRGIAKWRDQFTAARVTQARKKKIVVAIARQLAVDLWRLSTGRTTPAALRLQLSS

SEQ ID NO: 389940 - protein, 402 aa, unidentified
MVFVGIDWADKEHEICVISQDGTELARFRVPHTRQGLEALKKRVLQHINAPEGALCFLETSQGFLVQFLLEAGFPVYPLNPKVVDYRRKPSGAKSDAIDARLLADIGRSDWHRLRRLNPDSEHIQKLKMLCRDQDTLLEDATRLTNRLIACLKEYYPVALELFSRITLPVALDFLKTYPTLQAARSASVPELAAFLKAHRHPRPNLTAQRIYEKLHAPQLEASRATTQAKSYFLLTTIAQLDPVLAGIKAYDEEITRLFKSHPDSLIFASLPGAGTRLAPRLLAGWGDDRGRYEKAAAVQALAGTSPVLYQSGKYRFARQRRACVKFLRRALHLLAFQSTRLVPWAQDYYQRKRAAGKTHHEALRALANIWVRIIFAMWLNRRPYDESVFLAAKAKHAPLAA

SEQ ID NO: 389941 - protein, 432 aa, unidentified
MQDEIYYRRCAGIDVHKKVLVVCLRIGRKSETRTFGTLTHELRNIVAWLKDNGCQMAAMESTGSYWKPLYNIFEQEGLPAMVCNAHHIKNVPGRKTDVNDAQWIAKCLSQGLLNPSFIPDREQRELRELTRFRQSQIQERSRNINRLQKFLEGANIKIGSWLSDVEGKSATQLLELVIGKPDFTVEDVAARMNKNMKSSAEELFLSLEGYMTPLQRELFAHIMEIIRQQTAQIEKTDAMIKRNLSDNYKAAVKALDEIPGIGEISAEQIIAEVGTDMSRFRTPQRLSKWAGVCPGNNESAGKRKSGKTPPGNKTLKSTLTQSAQSAKRKKDSFFHAQYNRLVTGRGKNKATMAVAHSLLIAIFFVLSGKQFVDLGADYYTTFNREKKINSHVKQLSKLGVNIPKDVLRDIMFDATRKGDDSRASPTIKSPSV

SEQ ID NO: 389942 - protein, 324 aa, unidentified
MTTAHIGIDISKAKFDAALLSAEGKYKHKKFDNTPDGFAAFVAWLLTFGNDKPLIGMEATGAYSIPLADFLVAESYTVSVVNPAKIHAFARSELSRAKTDKADAKLIARFMREKNPPPWNPPPANIRELQAMLRRVEDLLEMQQMERNRLDTAEPSIADSLKVILDTLEKELETVRKRIKSHINNDPDLKRRRDLLESIPGIGPATSAWLLTLLSPHYGFTNAKQAAAFAGLSPKLQESGKWTGKTTLSKTGDPGLRKALYMPILSAWQHNPTIRAFCQRLEARGKNGMATACAAMRKMVHIAFAILKSGKPFDPEFKLAKEAA

SEQ ID NO: 389943 - protein, 384 aa, unidentified
MSISSRAAVSTQLNAIFVSLELSRSTWLVTSLSPGRGERISRHQVKGSDVPARLERFVQLQAKARERTGEQYPLVVIQEAGLDGFWIHRCLVREGIESHVVDAASIAASRRSRRAKTDKLDGEALVRTLLAYKRGEPRVCAMVTVPSAEDEDRRRVCRERRSLVVERIRHVNRIKGLLFAQGVGDYEPLRTNRRARLEELVTGDGRPLPSHVKREIERELDRLELVMRQIKEVERERDAMLEAATDEPPEPASARLLQLRGIGPEFAGVLHAEAFFRSFSNRRQVACYAGLAPSPWQSGNMDREQGVSKAGNKRLRTTMIQVAWLWLRHQPHSELTRWYAERVQANGGRIRRVMIVALARKLLIALWQFSSAGVVPKGALLKAA

SEQ ID NO: 389944 - protein, 363 aa, unidentified
MNETYYIGFDVHKKSVSYCVKTASGEIVQEGQCTARRDVLRMWAGAQPGPWQGAMEATLFSAWIYDTLKPYAQQLHMGHPARMKAISAGKKKSDRLDARTLADLLRCNLFPDCYVLSPEMRDLRRLLRYRHLVVSQSVRLQNKMAGLLMETGAPFVKARLHGKKYFTQLVQTLEEVPESVKDLLQMSRGALEMFEATQKRLVKRLLAEPALQARVERLCTIPAVGPITALTWALEIADPFRFPSIGDAVSYCGLTGAFRSSADQVQRAPLSKQRNAWLQSTLIEAAKLAPRWNPQLAALHQKELERGHRNRATLQVARKLVAYLMAVDKSGQPFQVHSSPVREAELAAKKPEKAPCPVTLPAA

SEQ ID NO: 389945 - protein, 346 aa, unidentified
MLHAGLDLSRKRLDFCLLDESGEQVEVGAAPPDADGLRSLARRLARHDQPVRAAIESMNGARFVHDQLELAGWQVEIADALKVKGLAPLACKTDRIDAWVLAELSRRDLVPAIWLPDPSVRAERERARFRLHLVRHRSSLKQRVHAVLLAHGKPCPVSDLFGVAGRALLERLALPEPWAGTVAASLRLIDELDLQIATGEAELRRLGADHHYVPLLMTVPGIGWVLAYTIAAEIGDIDRFGSPRKLAGYSGLCPRVYQSGESDRRGPLAKQGPKYLRWALVEAAVHASTHPAYRERYQRTKTRLGKQRGAKVAQVDLARRLAEAIWHMLTRNQPFAPAGATDPLTA

SEQ ID NO: 389946 - protein, 342 aa, unidentified
MDYYAGLDVSLEETSVCVVDGDGAVVHEAKVATEVEAIAETLRRFAGSLARVGLEAGPLSPWLHGGLHGVGFAVICIETRHLKASLGAMRNKTDRNDARGIAQMIRLGWVRMVHVKSPESHALRLLLTNRKTLQRKALDIENEIRGTLKAFGLKVGKVSRRSFEKKVCELIGDQPWLGEMVRPMLTARAVLLDQFTRLHRMMLDAVRRDEVCRRFMTIQGVGPVTALTYKTGVDVPQRFAKSKNVGAHFGLTPRRFSSGEIDYQGRISKCGDAMVRTALYEAANVVLTRTTRWSALKAWAMRIAKKRGLKRARVALARKLAVIMHRMWLDGSEFRWTDEAPA

SEQ ID NO: 389947 - protein, 397 aa, unidentified
MYIVGIDIAKRKHEAAVIDGEGAVIIKPFSFTNNCSGYNRLLAMLTKAKLPLDEVSFAMEATGHYWLALFTRLQKEGFRVQVINPVQTNSIRSFYIRQAKTDPRDALLIAEVIRFGHFSESTLHPENIYELRELCRGRHAIVSMQADVKRKVVALLDQVFPEYETAFTNMFGDTSMAILQTCPTPKELSEMPLEELCHLIEVSSRKRFRMVKAQELQGLARNSFGFAMAGDVFSTMIRLYAKHLVFLKQQVQEMDRKIAEIMDTLDTPITTITGIGPTLGAYILSEIGDISRFSSAAKLAAYAGIDPTMRQSGEYNGVRNRMSKRGSPYLRHAIWLAASSAVLHDPALKLYFQKKRDEGKPYMASVGHACRKMVSIIYAVMRDNKAYTPCIPNEISA

SEQ ID NO: 389948 - protein, 371 aa, unidentified
MWWTTPAPGIECAKRGSLNNESPEGVVHMQVSTIGVDLAKNVFQVHGVDNAGKVVITRQLRRKQVIDFLSKIPACLVGMEACGTAHYWAREISKLGHTVRLMPPSYVKGYVKRSKNDAADAAAICEAVTRPSMRFVPIKSADQQALLMLHRTRDLLIRQRTQLINALRAHLAEFGLVAETGREGLAQLAEIITDECNREALPSAMKQALQAIVDQLAALELQIGALDRAIHAHHRANDMSCRLETVPGIGVIGATAIASTVTDPSNFKSGRDFAAWIGLVPRQHSTGGKERLGGISKQGDRYLRRLLVIGATSVVQHARRHPQKHPWIIRLLARKPAKLVAVAVANKMARIAWAIMAKGGHYRAPELAAAA

SEQ ID NO: 389949 - protein, 370 aa, unidentified
MLNATTFVGLDVHARSIKAVALDAMTGEVRSATFGYDAAEVAEWVRSLDPAAKCVYESGVTGFDLQKRLSSMGIDCVVGAVSKMIKPPADRKRKNDRNDAEFLARMLSVGNVVEVWVPDDECEAARDLARALDDAREDLKRCKQRLSKFLLRHGLVFSETTPSGRRRGNWTAAHWAWIKSISFAEKADDDVLAYYIDATRQAMEDKARLERLVEAEASKPRWKRRVDSVRCLKGIDVTSAADLVFETGEFSRFKNARSFAAWIGLTPSERSSGESVRQGGITKAGNKHLRRVLVESAWHYLGCSPHSKDLAKGQAPDPGARRHAAKGVRRLVERRRAMLERGVHKNKANVATARELACWCWAIGCMVENG

SEQ ID NO: 389950 - protein, 287 aa, unidentified
MDKPPTFVGVDVSEHRLDVHLRPSGEHFTVSHDEAGVAALVERLTALAPALVVLEATGGMEVAPAAALAAAGLPVAVVNPRQVRAFARATGRLAKTDRLDAEAIARFAEAVRPPVRPLPDEATRRLAALLARRRQLLEMLVAERNRRHMADPILREGIDAHLRWLEEALDAIGRDLGEAVQASPVWRAKEELLRSVPGVGPVSARTLLAELPELGSLTRRQAAALVGVAPFNHDSGRMRGKRAIGGGRAALRACLYMAAVAAVRAGNPAIAGFYGRLRAAGSRPSWR

SEQ ID NO: 389951 - protein, 410 aa, unidentified
MNQQRHTQALPPLSPEREFAALIGLDWADQTHALCLYDCATDQSESSTLAHSPEAIAAWAEALRERFESRPVALCLEQAKGPLISALAAYEFITLYPVNPATAARYRQAFKTSRAKSDPSDAQVCLELLRQHRDKLTPLLLDDPKTRQLGRLLEARRGAVDLRTLLTNMLRDALKSYYPQALQLAGQDLFAPLACQFLLKWPALDQLQKARPETVRKFYYAQRCRRPDLINQRLAAIAQMRPLCADRALIEPAILQVQMLVRQLLPLGLAIKEYDSQIEQLFALHRDAAIWQSFPGAGPTLAPRLACAFGSERSRYPDAVAIQQYSGIAPVTEKSGKNQHWVHRRYSRPHFIHQSFFEYASQSALHCKWAKLFLQEQIARGKSHSSAVRSLAFKWSRSRGIRLLARAHPL

SEQ ID NO: 389952 - protein, 457 aa, unidentified
MTKPKRSRREREMSPVHAGAAAIDIGATMHVAAVGPGRDPEPVRSFGTFTADLHRLADWFKQCGIKTVAMESTGVYWLPAFEILEQRGFTVVLVNARDAKHVPGRKTDVTDAQWLQRLHEYGLLRASFRPERRIAALRDYLRQRERLLDYAASHIQHMQKALMQMNLQLHHVVSDITGATGMRIIRAVLAGERDPAALAALRDQRVKASEEPIRRALVGNDREEHIFALSQAVELYDAYQTKVAACDVRIEAALKELEASCPPPAAPLPAPRHRTQQPNALAFPAREALHRILGIDLTQIHGLGPYLALKLVGECGTDLSAWPSAKHFTSWLCLAPSNKISGGKVLSARTRRSSNRAAALLRLAAVTVGRTETALGAFYRRLAGRVGKAKAVTATARKMAVLFYNTLRHGMDYTDPGASYYEDRYRRRVLTNLQRRAKSLGFVLQAVESNPDGVGVS

SEQ ID NO: 389953 - protein, 348 aa, unidentified
MLADQLDYVVGVDPHRDLPALAVVHVVSGAVVFEKTVAANSDGYALALKLVEVHALGRRAFAVEGSGSFGAGLTRFLSGRGERVLEVSRLRRERRSGGKTDALDAVRAARSVLAQERPATPRAGGERQALQALVAAREGAVNAKCAGLGQLRDLLITTPEPLRSELRPLTQARLLRRLAATRPDTRRDPELRGSMLALRSIARRVLELTAEERALGREIEALTRKLAPQLLEQPGVGPHAAAQLVLSWSHQGRIRSEAAFARLAGAAPIPASSGQTVRYRLDRSGDRKLNRALHMILVTRKRLHPPTIAYIERRLQEGKTRREANRCLKRYLARSLYRLLEHGAPLPT

SEQ ID NO: 389954 - protein, 407 aa, unidentified
MISVGIDISKEKFTVCALEQGSKIIWKPFDVSLNKTKVVELLEKLEKLKEEVKITMEATGKYHLPILYELKDRGYFVTVINPLKMKQFCRALNFRKAKNDKIDAKQIAEYGIMYWKELEDYKVDEENYRVLKELNRNYQHYMDLRINQMNFIDQTVHQTFPGIKKLIPHGSGDFSKDKLLDFLEKWWHKDLILEKTEEEFVEEYKTWAKEKRYHPTVNKAKAIYKLAEDSISTQPSHNSKIETNIREGINLIKQINQILNSILSQMIEISEALEEYQEAKKFSGISDKLAVQIVAEFGNLSKFKNKKSLISFMGIDSPPYESGNFKADQRKISKRGNAILRKVGYQAMKCMISAKNPENEIYNYMIKKEKEGKAKKVCKFAGLNKFLRIYYARVMKSKACKTGLKVA

SEQ ID NO: 389955 - protein, 374 aa, unidentified
MDDHSVAYVALDTSKLRNAVAIAEAGRNGEIRYLGEIDNAPAATAKLARRLARKHAALTFAYEAGPTGYGLYRQIKSLGHDCIVVAPSLIPQKPGDRVKTNRRDALSLARQLRAGDLTAVWVPDPHHEAVRDLTRARGAAVRDQRAKRQQVSALLLRLGLHYPGKTTWGKAHMAWLAGQKLAHLEQGIALEEMLHAVRQAGDRIARLEQAIHAAVPDWSLAPSATALMALRGIEFIAATTLLAEIGDLTRFRTPRELMAWLGMVPSEHSTGERIRRGAITKTGNRRARSVLVECAWSYRHPPRVGRDKLARLEAAPPAVRDIAWKAQSRLTARYRALRRAGKLDVVAVTAVARELAAFIWAVGVAVGSGRTPEV

SEQ ID NO: 389956 - protein, 347 aa, unidentified
MNTITIGLDIAKAVFQVHGEASGRIVLQKRLRRSQVADFFAKLPRSLIGIEACGSSHYWARTLRDLGHDVRLIPAAYVKPFVKRNKTDARDAAAICAALGRPDMRFVAIKSVEQQAARAVERSRDLLVKQHTQLMNSVRSQLAELGIIAPQGRRGFMALLQLITAGDPQIPPMLLAALRMLIGQIEQLGKAIAQLERQIVAEARAHPAMRRLATIPGVGPLTAHAIVTAIGDGKQFATARDFAAWCGLTRRVDQSADKRRERGISRQGEMRLRKLLALGASTIMRHLRSCPARATAWQHGILARRPIKVAVLAQAAKNARIAWAMLQSGDIYRTPTIAAAVTTVPAG

SEQ ID NO: 389957 - protein, 424 aa, unidentified
MVDDDELEVIVERSAGLDVHKDIVAVTVRVPGPGGVIEKHQAEFATFTDDLCGLRDWLVALGVTRVGMEATGVYWKPVFYVLEEDFECWLLNARHMHNVPGRKTDMADADWICRLVRFGLVRPSFVPAKPIRELRNLTRYRRTRIEERTRETQRLDKVLQDAGVKLSSVASDITGRSGRDMLNALVTGTRDPEVLAELARGRLREKLPQLQAALKGRFGPNHALVVGEILTHIDDLDESIGRLQVGIDELIAPFAEARDRICTIPGVDTVLAEAIIGEIGVDMSAFATAAHLASWAGMCPGQHESAGKSTKGTARHGDSWLQRNLAVAAMAATRTKGTYLAARYGRLVARRGKRRARKAVGHSILIGCWHILHNGDDWNDLGGDYFDRRQDPQRLARRKLNELRSLGWTITDNPDGTTTIAPAA

SEQ ID NO: 389958 - protein, 410 aa, unidentified
MEVIHARCAGLDVHKRTVVACVRVAAGDGVRHEVRTFGTTTAELETLGAWLRAEGCTHAVLESTGVYWKPVWAVLAAEDLTLVLAHAAAVRNIPGRKSDVKDARWLADLLAHGLVRPSFVPPAAQQALRELTRTRKQLVREITAHTQRIQKLLESANVKLGSVLTDVLGPSGRAIVERLVAGETDAERLADRLHARSQAKRPAVVAALHGARLQPHQRVLLRQHLALIGSVEASVAVIEAEIAAALESFRGAVERLVTIPGISTTAAAIVVAEIGTDMTRFPTAGHLRSWAGLCPRLDESAGKHGSRRIRKGAPWLKPILVQSAWAAVRVPNSYSRALYHRLARRGGKKPAIVAVAAALLTAIYHMLLTDQPYRDLGPHHLTAADRRRKAHRLATQLKHLGYEVTLHEAA

SEQ ID NO: 389959 - protein, 358 aa, unidentified
MQSNKISFKGQKIFIGIDVHAKSWKVAIAPEVGIVKGHSQKPSAKELFDFLKKNYPDGEYHAVYESGFSGFSTYYALTEVGIDCMVIHAADVPTTQYEEVMKTDRVDAAKLARSLKAGQLRGNYVLEKQYIDDRSVVRIRRTIQKQLNGYKSRVKHMLHCHGVEYPERFSKKQAHWSRAFITWLMKDVRLMSDTRTSLDLLIKQVEVIRSTLLEATRQLRELSQTERYKRRHDLLRTIPGIGPITTMCILTEVCDVRRFHNENEFAAYLGLIPTSHSSGEKTVHGEKTFRGNRQLGPMIVEAAWVAIVRDAGLGIQYLQYKKRMEPQKAIVRIARKLSNIIFSVLKNEKEYVPYQTGN

SEQ ID NO: 389960 - protein, 392 aa, unidentified
MIYVGIDIAKDKHDCFITNSDGEVLFKSFTISNNPDGFETSFQKIQSVSDDLTKVKVGLEATGHYSYNLLGYLLDKGLPTYVINPLHTNLYRKSLSLRKTKTDKVDARTIASMIMSDVNLKSYSDTSYHNEELKSLTRYRFDKVKERAKLKTSVSRLICILFPELEKLVPTLHMASVYALLSEFPSAHAVASAHLTRLINLLSQSSKNRYGKDTAVMFREAARNSIGSNMPTKSLELKHTIKLIQELTSEIDEIEAAIKQIMDEEIQSPILTIPGISYRMGAMIIAEIGDFCRFDSADKILAYAGMSPSTYQSGQLDNCYSHMEKRGSRYLRYALYNATKYVCHWDKSFGEYLAKKRSEGKHYNVAISHAAKKLVRLIFAMEKSRKAYLPAT

SEQ ID NO: 389961 - protein, 438 aa, unidentified
MWRNSQWLLSIFQKGALPVKVVYQTCCGIDVHKSFLVATIIKTTSGVQPSYQKKRFSTFNNSILEFKQWLLDHSCRDVCMESTGKYWIPVFNLLEDELNVTIANPKWVKAVKGNKDDTRDSKWIGDLFRLGLVPGSYIPCKQIRILREFTRYRYKLTSCRSSEKNRFQNALTVCNVALDSVVSDIFGKSATSVIDYLLEQSTGSINHEEISSRLLRSLKKKSESVIESIEGYQMTDAQKYRMRLVHAHMDYITSTISEIDSMIDSLVEPYENAVQLLCTIPGVDRSSAITILSEIGTDMTQFSNSKRLCCWAGLTPSNNESAGKKKSVRITRAGVYLKPALVQVAHAAVKSDKSPYYKQKYERIMKRRGKKRAIIAVARMILTAVYHMLSTGEAWNPTDLYKIDMPEPLKNKQKEKAVKQAMKLLIAEGLIKESQLAS

SEQ ID NO: 389962 - protein, 369 aa, unidentified
MEKDTIYVALDDSKRKLVVAMLRPGATEPEEREIPKDPPHIQRLFGRLQRGGPVQACYEAGVSGYDLYRQLTAGGVTCQVIAPALTPRRPGQRIKTDRRDARKLVRLFRAGELTPIHVPDEAEEAARDLVRCREAVRRDVVRWRHRLLKLLDRHGRLWVAEKNWTQRHWTWIRGQHFALAALQRAFEATVFALEQALARQAALDQDIEALAGTVPYRDPVGWLRCFRGIGTLSAMVLLAEIVDFQRFRRPRELMAYLGLVPSEYSSGETQRRGGLTKAGNTHARRVLVEAAWHYRHRPTVGRALARRSQAQPEAVVGQAWRAQQRLHRRYRHLIGHGKRPPVAVAAIARELVGFLWAAMTRRETRVQVA

SEQ ID NO: 389963 - protein, 347 aa, unidentified
MKKPDYFVGIDIASATFTSTIGNMGEKWQILVKPVQFANEYDSFSKYLKWLQDHDVKPGNSVICMEATGVYTEILAHFLVVNQYWVAIEPPLKVKRSFHPAGHKSDPVDSCQISEYAYRFWDELSLWTPREEILEQIKTLLTVREQFVTEKVAHQNALQALKRKFVRTTLAELLHENTIGELKEHIYQIEVEIQNLISQDPDFQNKVALLISIPGVGLLLAAHMLIVLESAPNPFSPKTLAAFIGICPYEDSSGTSINHKPTSRHYGPPGLRKLLFLASLSISAHNLQFRNYFLRKVQEGKPKQLVINNIANKLLKIMVAVVRTNTTFIPNYRSVNPGLLKMALTMS

SEQ ID NO: 389964 - protein, 319 aa, unidentified
MLNQSCYLGVDVAKDTLVVAYERHRWQFPNSKEGHRKFIAQIKKLPGTMHVVCEATGPYHLAMCLALQEAGLAVNICNAAHIRYFGRSEGILAKNDPIDAGLIERFANSKRPPADPPLCREHLALNEMVAHRRQLVDMIKVFRTHRQQVSEAALLEEIHQSIAVLQKRLEALERRLRQKIQAHASWKQTFEKLTKVKGVGFVTALTLLAKMPELGSLNRGQCAALSGLAPYDDDSGKHSGRRSICGGRYEVRSVLYMSALTSVRYNPILKAFYQRLLAQKKPFKVAITAVMRKLLIYLNTLLKVPKTAPTPTTTTVTAT

SEQ ID NO: 389965 - protein, 404 aa, unidentified
MDTTVSDFMKGRYNLMKIFVGIDIAKLNPFAAAISSDGEILIEPFKFTNDADGFQLLVSKLESFDKNSIIIGLESTAHYGDNLVRYLVAEFYQVCVLNPIKTCQMRKNNIRKTKTDKVDTFVIAKTLMMQDVLRFITFFDLDMMDLKALGRFRQKTIKQRTRLKIQLTTYVDQVFPEIQYFFKSGLHQNAVYALLKEAPSPKEIASMHMTHLANLLKVNSHGHFTKEQAKELRVLAQKSVGANDSAISIQITQTIQQIELLDSQLEKIEAEMTDIMKFNDSVIMTIPGIGYINGGMILGEIGDIHRFSNPNKLLAFAGLDPSVYQSGNFQAKTTRMSKRGSRVLRYALVNAAWNVVRNNATFKAYYDAKRAEGRSHYNALGHCAGKLVRVIWKMLTDEVEFNLE

SEQ ID NO: 389966 - protein, 312 aa, unidentified
MTDQCYGGIDVSKDCLDVMVLPERQSFSVDNNAAGCSELVNRLRGLSIVAVGIEPSGGYERSVIRALLAAGLSVRRINPNKLRQFARARGVLAKNDRLDARLIAEYVAIMPTRVVQRDPAAEQLAEVVTMRRQLCDEHVAVANQTAHLEDTMLRRLNKRRLARLEADILLLDRRMAEIVGGNASLARRYELLTSMRGVGPTLAFTLIALLPELGQMGRKQIAALVGLAPYDFDSGRLKGHRCIYGGRLPVRNVLYMAALSACRYNPTLKVFHRRLAGANKKPKVKIVAVMRKMIVILNAMLRDNVAWQPNST

SEQ ID NO: 389967 - protein, 370 aa, unidentified
MKKKILYIGLDVHKKSIDVAITDARANGRVRSYGKIDGTLEALDKLVGKLKSPGADLHFVYEAGPCGYPIYRHLTSKGHSCSVVAPSLVPKRSGDRIKTDRRDAVNLVRLFRAGELTSIYVPTAEDEAIRDLLRCRVDIRRIERKTRQQLLAFLLRHGHYYPGKKNWTKGHMNWLAELKPAHRAQQIVLQEYIDAANECTRRIQRITEQIQGLVAQWSRAPFVRAYQALRGVSLIVATTVVSEIGDMNRFKNPKQLMAYLGLVPSEHSSGNRIRRGSITKTGNSHVRRVLIEAAWTYNLRARKTKLILKRQQGLDDRICEISWKAQLRLCGKYRRLFARGKSKQAITTAIARELSAFIWAIDKQVQQLSA

SEQ ID NO: 389968 - protein, 405 aa, unidentified
MRYYMGVDWADVQHAIWVADEQGTRVLTRAIAHTAEGFAEWGRWLDEQRTAGTELWAAIEHPDGRVVDFLLNHGVLVYPVNPKALDRARDRFRPSRTKSDPFDAHVLADFLRTDHARLHALQPSSEAAQELKLLTRDATRLVREQTRLVNQLTATLKEYYPRALEVCEHLTAHRAWAFLRAYPTPATAADLTAKQWQRFARAQGWPAAEAARLWARLQQPQLPVPPHVVRAKARLVAVLVTQLEAAVAAVTEYREAVTRCFATLPAAEWATTLPAGHGMTVPTIWAELGDAPGRWSSWQHLQGHAGTVPVTVRSGQYCGVAFRFACNKQLRTAIHQFALCSLTRSDWARAYYDRQRERGHRHHAALRALGAKWLKIIFVLWHRQVAYDETHHLATMARQHLRQAA

SEQ ID NO: 389969 - protein, 353 aa, unidentified
MSKILAIDLGKNNSAVCIFDRSSLKSKFKTIRTRKQVMHDLFVEYQDQIEIVLFETGSQMGWVADILWALNIPFKAANTNHPAWKWKNNPNKSDRKDAQRLAMMYNTGFFPSVHVPKREVRQKRSLINYRDDLVKRITKVKNSIRAILSREDVHLPSGKKGWTIKALDQIRKLSIPLKDITDLEQIWKGHLYSELESLDGLTALLKNVECKLNALGEADEKVKRLRTIPGVGPRLSEAVAAIIDDPHRFKNSRHVSSYLGMVPRRWQSGAVDITGRISKCGNKLLRTLLVEVSWLGLKEPWMREIYDKVKHGDKKRSKVAIVALARQLLVRCWAILRDESCWDGDHAKRFVNC

SEQ ID NO: 389970 - protein, 420 aa, unidentified
MADDRCRLGSDDVVIGLDLASAEHQAVVLTAAGQRLTRFRIPHTRAGLEELLRRTTPAALGRAGGARVFAFEATGHLWEAVAYALRGRGERYVVVNPLATFRVREARQLSRVKTDLTDAEQIAELCRTGLVTRTQLETRPYLALRRAWGEYARLREERARLKVLVAHQLYGLFPEFLRVWADLLQPGALAVLRTGLTPAAMAALSLTEFVAQVRAHRAGHRIWRFKLAQVHREAAQTIACPDGLDVLAREVQRAVARMDVLTAHMTAVAAEIDVVLAELEEVPYLRTIPGLGWASVAGLLAHVGAITKYHHGRQLIKLAGTNPSRRDTGQTVGRGQRMSRRGRAGLREVLYLATLSCLQHNLRIRAHYDRLIQRADRPLPKMQALGACMNKLLLYAFAVMHRREAFQLDHDWQRPRARVA

SEQ ID NO: 389971 - protein, 314 aa, unidentified
MAFLHHPPAHCLGFDVAKTTIAVSNGSAKAARTITNSRRTIRSFLKANRPDFFVCEPTGGHELLLLEEAAKAGIACHRADTNKLKGFIRSFGTHGKSDAIDAALLAAYGRERWQILPLWRAPDAQEARLRSLVRRRQELVTMRVAEQNRAKAPGNGELAASFRAIIAILNRQVHALDAAIQALVDNTDAIRQRIEVCTSMNGIGLASAAALLATLPELGSMTRRQAASLAGVAPHPNDSGLKKGYRKMRGGRPEVRTILFMPAIRAAAGHGEFAGFYKRLIARGKKPIAAVAAVMRKIVITLNARLRSAAIPQS

SEQ ID NO: 389972 - protein, 391 aa, unidentified
MIYVGIDVAKDKHDCYIVSSEGEIIAEMFTIPNNMKGFDLLLDRIKSAPEELDKVKVGLEATGHYSYNILGYLLDKGLATYVINPLHTNLYRKSLSLRRTKTDRVDARTIATMMMSDVSLKPYTDTSYHNEELKSLTRYRFDKVRERAKLKQSISRLVTILFPELEKLVPTLHMASVRALLSDCPGAKQIASAHLTHLTSLLQASSKGRYGREKAIEIRDAARKSIGASMPAKSLELRHTLSLISVLDAEIGETEDEIKRIMDDIASPILTIPGISYRMGAMILAEIGDFTMFASPDKILAYAGLSPSTYQSGQLTSSYARMEKRGSRYLRYALFNATKFVCNWDATFAAYLAKKRSEGKHYNVAISHAAKKLVRVIFQLQRTGQAYVPAA

SEQ ID NO: 389973 - protein, 344 aa, unidentified
MQIAILGIDLGKNSCSVVGLDNSGHVVVRRRMHRTSIIKFTGGLVPCVVAMEACCGAHHLGRLLRTQGHEVRLMSPEYVRPYVKAQKNDERDAEAIAEAATRPTMRFVELKAEEQLDMQTLHRVRDRLVGERTALLNQLRAVLLERGIAIPQGRRKLEQHLDAMLGGPESADVAPRMRRLLRDMRTEWQALDRRIEAFDEEFAVKVRTDPVACRLATIPGIGVLNATALVAAIGNGENFARGRDLAAWLGLVPRQATTGGKPRLLGISKRGNKYLRKLLIHGARAAMPSLARSGTALGAWLRGLLARAHPNIVVVALANKLARIVWAVLRHGREFERTDVVASA

SEQ ID NO: 389974 - protein, 377 aa, unidentified
MATTRTVLRDQLTAKPGDLYMSFELGDKHWHISIGGERRSVSHYIVEAGHTEEVADCIAKAAARLHTARVHSCYEAGRDGWWLHRWLTELGVDNIVVDPASIEVNRRARRAKTDRLDADKLLAMLVRHHRGERVWSVLREPSPSDEDARRAHRELQRLTHERIAHTNRISSLLVLHNLRPRIVIGGRDWPVWWNEHREQVPPTLRAELEREAARLKVVKEQVRAIEAARAKELAEGKQPLVAQLVRLRAIGAKGAWVLVKEVFGWRHFANRRELAGSLGLVPTPYASGDSEIEQGISKAGNRRVRALLVELAWSWSRLQPGSALTQWFNRRFAGAGKRMRRVGIVALARRLAIALWRYLQTGEIPIGAQLKPAGSGI

SEQ ID NO: 389975 - protein, 371 aa, unidentified
MSELPAGAKPARLKVEISPYLPWARKPETELGAISTIAVPHPDSRSGPSPHLQGRVMDEQHAVFVGIDVSKDRLDVHLRPSGEAFCVSREAKGLDNLVNRLEGLSVALVVLEATGGFETTVAATLAGIGLPLCVVNPRQIRDFARAMGRLAKTDTLDTEVIALFAERVQPEARPLPEPVRSHLAELVGRRRQIIEMIGMETNRSRQAVDEHLAQGLAGHIAFLQKELDAVDQDIGDAIKNSRAWRETEALLKSVPGIGDVTARTLLAELPELGTISRHKIAALVGIALINRDSGLMRGRRAIAGGRTSVRAVLYMAALTAIRRRSPFRAFYDQLTARGRPKKVALVAVMRKLLTILNAILRDRTPWHHENA

SEQ ID NO: 389976 - protein, 357 aa, unidentified
MEKLYLGVDLHKRSCWVTVLDADGHLVESRKLGTEKWELEEFFGKVAKPAALAVEATFNWYYFLNVIEPLGLELHLVHPWKTRAIASARIKHDKLDSRVLAELLRTGFLAEAWIAPRAVREQRQLLRYRVHTVQWATRAKNSIHGVLNRNGIRLPLGSPFGPRGREFLSEVELPETDRWEVSGQLVQLDLLRHQLGELDREIRKRSKASPVAQALEQIPGIGPFIASLLIAEIGDIWRFPTAKHLASYTGLVPSLYASGEHRWGGAITKQGSTVLRWALVQAAHRAALSPRFQDFYQRQRARHGAGKATVALARKLAVIAYYRWRQALHAAGPPKVEKVRECSWGSAWSDDRPLNSD

SEQ ID NO: 389977 - protein, 353 aa, unidentified
MQIVGALDVHRRQITHKTLDLATGDVRRGRLSPANRESVREWLERFRGCEAEFALEGTTGWRYVVEEIERAGHVAHLADPAETAAKRGSKRRAKTDRTDCDLQLKLLLAGELPESWIPPAHIVELRTRVRARKTLVDQRSAWQLRLTAQLFHQGVPAGINPRTRAGREALARVELSPAGRELVSIALRMIDVLDLEIVPLDRGLRALAARQPGCRALSERLYGVGPVTATAVLAELGDCRRFTSSDDAVRHAGLDVTVYQSDSRRAAGHLSHEGSPVLRWALYEAGQQATRQTSPDHEYFLQVRERTDHKSASLSVARKLCRRAYHILRELGEQALAPVDVDAHVEEAIHAAA

SEQ ID NO: 389978 - protein, 345 aa, unidentified
MSKLSSDLSTVTVVGLDLAKHVFQVHCIDTEGRVVLNRSLRRREVADFFRRLPPCRVGMEACGSAHHWGRTLISLGHDVKLMPPPYVKPYVRRQKNDAADAEAICEAVTRPSMRFVTVRSIENQAVLMRHKVRELIVAQRTQLLNALRGHLAEAGVIAAQGACNARALAALVAAGDDEVPTCVVQALLPLVEQLRHLDAAIAEADKAILEAARGSADARLLMSIPGIGSLTANAFVATLGPDGVGQFSGPREFAAFLGLVPRQRSSGGKERLGRITKMGNVYLRKLLVVGAHAVLHHHARHEDPLRLWARKLLATKPFKLVAVAIANKLARIAFALLSRQARYAA

SEQ ID NO: 389979 - protein, 404 aa, unidentified
MRYIGMDVHREFAQLAVVEDGLVRDEGRIGVTPEALTEWATTLAPEDQVALEATGNSDAIAVLLTPRVARVVVSNPSKTRAIAEAKVKTDKVDARILAQLLAADFLPPVWLPDPRTRALRRQVVRRAHIVRARTRIKNQVHAILARNLCPTPPVSDLFGKTGRHWLSRQDLPDDETGTVQALLRQLDFHGGELAIVDRELAVDALADPVVARLMTIPGIDAIAGISIVAAVGDFTRFPDPDKLVAYVGLNPKVRQSGNSAPVHGRIAKAGRAHVRGVLVETAWSAVRAPGPLRAFYRRIAARRGHQKAIVATARKMTILAWHLATKDEDYAFARPGLVAHKRRKLELAAGAPSRRGNHRQPGAAYNDKSRRDAETEQAARAERAYELLVAHWQARPSPTRSATP

SEQ ID NO: 389980 - protein, 334 aa, unidentified
MKSDTVHIGVDVSKEKLDIFVPAKKEGARPMTKEVDNDIKGFRELRDLARKANATVCVEPTGGYELELIAFMHKFDVPIAYTDALRVRQFARAEGNLSKNDTIDAALISRFADKIGVRVLEPQEVEAVELKRKAKFRQTMVDSRTAMINRLETEIDPEMKALLKEQIRLAGRIIDKAEKLCLDTVKKNERMDSLRERFTTIGGVGDLTAISILSSLPEIGTLSDGKLNRLVGIAPEEKQSGTKEWQRRIWGGRKDVRNALYMAAVASIKWNAILGSYYHKKRAEGHPHKWAIVPTMRKLLSLLNRIARDPGFTPMPEPESTKQNANVGRRKKAA

SEQ ID NO: 389981 - protein, 354 aa, unidentified
MSQQCSTAIARMGIDIGKSVFHVVGLDAKGKPVFRNRFTRERLLEFLARASPTIIGMEACPGSNWLARKAIGQGHQVRIVPAQFVKPFVKSNKTDIVDAEAIAEAISCPTMRFTQPKTEAQLDLQALHRVRQRLVSSKTAIVNQARAFLLEYGLTIGAGPAYFVRDMPSILTDDGNALTPAMRDLLQEQWQEYRSIEARLLQLRRQIEAIAGADDVATRLISVPGIAHLTATAITAFAGTGMQFKSGRHFAAWLGLVPGEFSTGGKQHLLGITKRGKLPKRRKMVVSRRERWVPIRTRRFCSWCDVRWRPTICATRTSKYQNLHCYLGILKSVHFPVRFTDGSILRRVNGGVGI

SEQ ID NO: 389982 - protein, 349 aa, unidentified
MSMLADQVDAVIGVDTHKHSHTAAVVTPTGGLVADVTIPTDAFGAKRVLAFAHEHAPGRRVWAIEGTGSYGSGLTTYLLEQGEWVVEIDRPARPARRNGAKSDELDAVRAAREALSREHLAQPRRRGDREAIRVLACTREGAVLTRTRAIAHLHGLVVNAPEGIRNQLRKLTTDELLERCARLRTGPSQSVEHRSTITALRSTARRALACEAEAADLESALELIVERVAPGLLDEPGVGVLSAARLLNAWSHAGRIRSEAAFANLGGVAPIPASSGQTVRHRLNRAGDRQLNRALHTIVLSRLQHDAETRAYAARRLAEGKTAREVKRCLKRFAARRLFRILERSAVAA

SEQ ID NO: 389983 - protein, 483 aa, unidentified
MKPKPEEQNKRATNHPTQHHWHEMNRKQRREMMRKMQSEDLSLEVIHPDAAGIDIGNESHYVAVPPGRDSQSVRRFGCTTAELKAMAAWLKQCGIRTVAMQSTGVYWVAVFDILEQAGLEVYLVNARDTKNLPGRKSDVQESQWLMKLHTYGLLRNSFRPLQEIRVMRTYWRQRNDLVQSAARHILRMQKALTQMNLQLANVLTDISGATGQAIIKAILAGERDPHKLAEFRDPRVKASEEQIAQSLEGNWQEDLLFVLKQEHEGYEFCQKQMAECDRQLQQYLQQREDRSHGAPLPEEKRQGRRKKKRANKPQFDLREGLFRMTGTDLTRIDGIDVMTATTVISEAGYDMSKWQTENHFVSWLRLCPDNRISGERIIGKGRLPTNNPISIALKMAASTLRESKTYLGAQFRRLRTRLGAPIAIKAMAAKLARLVYRMLRYGMKYVDQGAAFYELRHRELQIKRLKAKAEKLGYRVTPIPAAA

SEQ ID NO: 389984 - protein, 339 aa, unidentified
MGFYSGLDLHSNNCVIGVMDETGRRLRKKRVPNELSAVEGVLAPYREELLAVVVESTYNWYWLVDGLQEGDYPVRLAHPAGNKPYSGLKHTDDGDDAYFLADLARVNCLSEGYIYPRQTRGVRDLLRQRGRLVQERTSHVLSIKNVIVREGGQALTRSQVEGLSDEAIAQLVRDSYGQVGIKALGKVLGVINEQIRHLEKTVLAQAKPDPVYQRLQTIYGVGPVLGMTIRLESGEMSRFPTVGDYTSYCRGTGSQRLTNGKPKGENNKRNGNAYLAWAFLEAAHFAVVNYPLAQRFFERKRAASNRILASKALASKLSKAAFYVMRDQINFDPERLFRS

SEQ ID NO: 389985 - protein, 391 aa, unidentified
MIIVGIDIASEKHDYFMIHKDTGVIFSSSSVTIPNNECGYKKLHSDILSFSGAIGDSDIRIGLESTGIYHTNIIAFLISHDFQVMMINPILTNMARKAEKVHSPKNDNLDSQTICKYMIDHSDEFSPYTFTLYHKQTLKSLSRKRFFIVDEYRKAKLVLNNLVQITFPELKSLFSSIYGESAIAILKEYGTPKKLAKAHISKVDSLLHGRCKCSAADIIEAAKHSVGISDDCYAFEIMDAIENLEFIQHRIEKYDVQIKRLVDELCPNLLTVPGIGYTTAGLIAGEIGDAKRFHSAESLISYSGVDVTVYESGKYKAKHMMPSKKGSRYLRYALFQVARIVRLHDPVFKAYYAKKQAEGKHYYVILGHIQKKLCRLIYSLMKSGSNYEIRS

SEQ ID NO: 389986 - protein, 356 aa, unidentified
MSRDVKYIGMDVHKEAIMIAVLNDGGKLAMESIIETKASTLLQFIHGLRGELHVTWEEGTWAAWLYDLLKAHVHQVLVCDPRRNALLKEGNKSDKVDARKLADLLRTGMLRPVYHGEHGLRTLRELGRSYQTISQDLNRVMNRVKALYRGWSIPCAGTQVYAPRYRQEWLGKIEHAGVRRRAELLYEQLDGLQALRRTLRPELLAESRKHKASKLLRQIPCIGPIRAARLVGLMQTPHRFRSKRQLWTYSGLGIETHDSAQYCYVHGQLQRSKKPQQIRGLNRNHNHEMKEIFKGAATRASCGVGPLRDFYVTLLDKGMKPEMARLTLARKIAAIALTLWKKEERFDAEQLKPQAA

SEQ ID NO: 389987 - protein, 369 aa, unidentified
MNEFSKYVGLDVHQETIAVAVADTAGEVRYMGEIVNTPEAIAKVVAQLKRGTGRLAFCYEAGPCGYTICRQLRGLKQDCQVVAPSLIPKKPGERVKTDRRDALSLARLHRAGELSPVWIPDEAQEALRDLTRAREDMKHLQRQAKQRLLSFLSRHGHRYTGRSRWTQAHWRWLEGIKFARPEQQIVLQEYIDTVQACGRRVASLDREVETAAHASPVWPVIEALMALRGISLLAAVTVVAELGDLARFSGAPQLMAYLGLVPSEHSSGKRERRGGITKTGNSHVRRVLIEAAWTYRHAARKTAIMQRRAERTAPEVQEIAWSAQKRLCQRFRNLMARGKLKNQVCTAIARELVGFIWAIGQHVIPLSRA

SEQ ID NO: 389988 - protein, 346 aa, unidentified
MNQIIRIGMDTSKNFFQLHGIDSAERPVLGRKLRRNEVLAFYARLPPTVIGMEACAAGHYWARELRRLGHEVKLIAPQHVKAYIKRNKNDGRDAEGLCEAMSRPTMQFVPVKTDEQQAALMLMGVRQQLMTRRTQLSNAIRGYAAEFGLITAKGLDKIEPLLARIAQNESLPALAREMFTLQGRDYARLQVELKAVEARLMAWHRANADSRRLAKIPGIGPIGATALVMKAPDPGLFPSGRHFAAWIGLTPKDHSTAGKIRIGKITRAGDEMLRSVLVAGATAVIQQAKNGRGRPSPWLLTLLARKPPKLVAVALANKTARIAWKLLTTGESYDGARMPVASALAV

SEQ ID NO: 389989 - protein, 337 aa, unidentified
MFMQVYGIDLSMEKFDVNFIDAKEKEKNKEVKNGVVSISRFLSSVPEDGILCAEHTGAYGDLLVSLCNQASIPIALVPGYTIKHSLGLVKGKSDPLDSRRIREYGERFTDKLVFSEYDVESIVELKQLYTLRHQLVKARKALLASDKGRSHLPLQNVSVHNHLQSVLSGLDTEITAVEEEIKALIKANQDLNENYELVTSIKGIGPVIATDLMIKTGNFKNIDTARKAASYAGVCPFPNTSGKMAGKSKTSPFADRTLKSLLYMGAKSAVKHNKEYRLYYQKKELEGKPHYLIMNNVSNKMLRTIYSVVKNKTPYSQDHVCLDPRERNINSSTKKVA

SEQ ID NO: 389990 - protein, 488 aa, unidentified
MSKLDICMTGLALTFTLCVTGGVCMPSKKTPKKRELDELACVFPNAAGLDIGSAEIVAAVPPDRDAEPVRVFVTFTPDLHALVAWFVACGIDTVAMESTGVFWIPIYELLEAAGITPYLVNARHVKTVPGRKTDWNDAQWLQKLHALGLLQASFRPDAEIRTLRTLVRYRAELIERRAPHINHMIQALKHMNIQLSLVLTDITGKSGLAMLRAIVAGERDVQQLAQFRESGCKHSEAEIAKALTGTWDDAQLFILQQAVEIFDYYTAKITACDDKLEQQYQAMESRAEKDAPLPDLPPAKKDSRSKNALTFNARAQIARVVGVDLVAVMGLSAVTVQTILSEIGTDMERFPTLKHFCSWLGLAPHNDKSGGKVLRSRTMKVRNRANQAFRQAAQSVAQSDSSFGAYYRAMRARLGPKQAIVATAHKIARVVYHLLKNGEPYQEESAEIYERKRQERELKHLARRAQKLGYTLAPVPAIVPGSQPEGGG

SEQ ID NO: 389991 - protein, 404 aa, unidentified
MIYVGVDWSENHHDVCVMGPQGEVLGKGRVKDRVEGVARLHEMVAIHAEDPSEVVVGIETDRGLLVGALVAAGYAVYAVNPLSVDRYRDRHRVSGAKSDPGDARVLADLVRTDRHLHRLVAGDTELAEGVKVLARAHQSLIWSRQRHLNQLRNALREFYPGALEAFGTDLGSADALAVLGAAPTPTVGRALSVRRIAGALKRGGRERRLAERAEEIHAALRSSQLEAPALIARAYGEVVRSTVRIVAEMTSQIEVLASELRSRFEEHPDAEILRSLPGLGLVLGARVLAEFGDDRTRYADPKARKNYAGTSPITKASGRTRVALARFARNRRLADALDMWAFCSLASSPGARRHYDEHRARGNTHHQALRSLANRWVGILHGCLRRRQCYSELVAWPTVDEVAA

SEQ ID NO: 389992 - protein, 371 aa, unidentified
MEHDSTLYVGLDVHKDSITVAYALGAGELEVLGKIGVTKADIDRLCKRLQSKARHIRFVYEAGPCGYGLYRQLVQKGFDCMVCAPSLIPRKPGERVKTDRRDAVRLVRSLRAGDLSAVYVPSVEDEAFRDLARAWVSSKDDLKRARQRLKAFLLSHDVRYTGRADWGPAHRRWISQYSFDSAWQHLAFEELRRTIEDRLAQCERLEAALREAVVNWRFYPAVLALQTMRGVQFTTAVGMLAELGDLSRFAHPRQLMAWLGVTPSEHSSGEKRSQGSITKNGNSYARKLLVEAAWSYQHPARVSPNIQRRHEGIPKPIVDRAWDAQVRLCRRYRKLVARGKQKNIAVVAVARELSGFIWDISRLAMSLAVRP

SEQ ID NO: 389993 - protein, 515 aa, unidentified
MSKKWHLHDAMKNPKSSKSTKSIYRNQNELLKAIFERSGDPRKVLCVALDYAKSKHVALCCDGNGDILRKPFPVHNSTEGVAFLIEQITATAQRRKIPKCNIFLGGEDEPSYVVNFTEALRARQYLVLRVNAAEAAENRESFNASTDVLDLLGIAKTLLSRRASATGAVRPRGSKKQEITTDIYFEIREITRSRRALVRQQTGASNRIHALADQLFPGFLDAKKSGITAFCKASMALMAERFSAPEIARRRPKTLAAFLAGHGIRESDEIAAKLIALASEALPPVTSRLSGLQRVLSATVDLRGCLERNAKALREEASILLASTPYCMLTSIPGIGFTLAAGLAGELGAPERLRSLDSLCAFAGIVPSTYQSGGPDRPASQGRTPARCNHILKDWTGQSAQKIHLYGPPELKDRITRWNNNGQHGIFAGARRYLRLVRCLVLNQSPYLDPKARTHLASMEDHADAATQAWNILLRKWRTIPGGISLIADESCPLGNWRRVVMQSRSIELPLPLRP

SEQ ID NO: 389994 - protein, 343 aa, unidentified
MKLHVLGIDLGKTVFHLVGLDSAGRVVIRKRCSRAQLLAFIANLQVQLIGMEACSGAHFLGRALREQGHEVRLMPAQYVKPYVQTNKSDYLDAEAIAEAVQRPRMRFVPIKTEEQLDLQALHRVRERWVMRRTAVVNQIRSLLLERGLTLPKGRSHLDKQLPRILEDAELNLSDSFRVLLAQLRLELEQLAARIEEMDRVIQKTARENEDCQRLTEIPGVGPVTATALIAAVGNASAFGKGRKLSAWMGIVPGEYSTGGKQKLLGISKRGNKYLRRLFVQGARSVLQQRHKQAPGLSEWLAQLLVRTHQNVVVIALANKLVRMAWAVLCKNERYRAPVFAGTT

SEQ ID NO: 389995 - protein, 356 aa, unidentified
MLYLGIDQHARQITISLRDENGDVVMARQVSTRPEKIQEFFQRLTRERLQSGESFVAVLEVCGFNDWLIRMLRDYRCHKVILIQPDDRKICKTDRRDAAALSELLWINRDRLLHGKPVRGLRQVDIASATDQEERRLTMLRKNAGRDLTRVINRVRQILRRHNLQWEMPTKTFPTVAAVAWLKQIVLPEIDRLEMNHLLADLEHVQQRIKELEKVIGQRSGASKEVAILSSIPGMGRGFTAMSLACRIGRVERFPRAHSLANYWGLTPGCRNSGESDQRLGRITKAGSPTARWLLAQLVYKVLRRDGRLREWFKRIKRRRGATIARVAVMRKLTTIIWHMLRKEKTYAECRAAAAA

SEQ ID NO: 389996 - protein, 327 aa, unidentified
MNSICLSTDSLPVLGLDVAKKSVQAELRRAGGKTVRFGFENNAKGFAQLARVLKEHNVPKVWAGLEATGPYSHALALWLHGAGHRVSLLNPRRVKQYARSAGKRNKTDLLDAAIIADFVCAHRPAPWQPPTLEVAQLRALVRRREELSLMLQAEKNRLEGVASNVSCSLRRIIATLSAERARLEKLITQQIRSHQQLSCDHQLLCSIKGIGSLTAAILLAEMARPGQVERARQAAAHAGLVPRREESGTSVRRNRGLSKEGNRYLRKALYMPALVAIKYNAPLRHFASRLRAAGKPKMSIVCAVMRKLVHIAFGVLKHQKPFNPSLA

SEQ ID NO: 389997 - protein, 424 aa, unidentified
MKVTYQTCCGVDVHKSFLVATIVKTTGGIEPSYQKKRFSTFNNSILEFKQWLLDNNCHDVCMESTGKYWVPVFNLLEDEINVVIANPKWVKAVKGNKDDTKDSKWIGDLFRLGLVKGSYIPCKKVRILREYTRYRYKLVSCRSSEKNRYQNALTVCNVALDSVVSDIFGKSSTSIIDYLLEQSGTSINHEEIASKLLRRLKSKEDAVIESIEGYQMTDAQKYRMRLVRAHMDYITAEINDVDKMIENMISSNPDFENAVQFLCTIPGVKRDSAITIISEIGTDMSQFSNSKRLCCWAGLTPGSNESAGKKKSVRITRAGVYLKPALVQCAHATVKSDKSPYYKKKYESLVKRRGKKRAIIAIARMILTAIYQMLSTGEQWNPSDLYKIDMPAALVEKQKAKAIKQAKKLLQREGLLPPDEPLAS

SEQ ID NO: 389998 - protein, 351 aa, unidentified
MNRKVTDSILTVIGIDIGKNTFHLVGLDQRGAIVMRQKLSRGQVAARLANMPPCLIGMEACVGAHHLSRQLLALGHDVKLMPAQFVKPFLKGQKNDFRDAEAVAEAVQRPTMRFVPTKSVDQLDLQALHRVRARLVSQRTAIVNQIRAFLLERGIAVRQGLRFLRHALPDILANRADLLTPRMVNMIEDLARDLHHLDERIDEVTGEIETLARNDEACQRLMTIPGIGPIIASAMVATIGDGSAFRRGRDFGAWLGLVPRQISTGDRTILGRISKRGNSYLRMLFVQAARVVLLRPTNWPKHSFGRWLEAAAKRMHHNVVAAALANKLTRIAWSVLYHGRGYEPRMSAELA

SEQ ID NO: 389999 - protein, 343 aa, unidentified
MQAMTTIGLDIAKSVFQVHGVDAEGKVLIRRQLKRRYVLAFFQKLPPCLVGIEACATSHHWSRELKALGHTVRLMPPAYVKPYVKRQKNDAADAEAICEAVTRANMRFVETKTPEQQSCLMLHRTRQLFIRQQTSVINAIRAHLAEFGVVAAVGRKGVEHLLAVVTDASDHRVPELARACVAALGAQLRMLKAQILEFDRRIMAWHRSNEISQRLDELPGVGPALATALVASVADPKAFRSGRNFSAWLGLVPKQHSSGGKHKLGSISKQGDRYLRSLFTAGALAVIRYAKLHGTKHRPWLTALMARRPTKVAAIALANKIARMAWAMMAKGERYKEPVALAA

SEQ ID NO: 390000 - protein, 461 aa, unidentified
MRKARRAGRKPGKKIVDVTAGMEVLRPHAAGIDVGNAEHYVAVPPGRSDPSVQTFGSFTADLHRMAKWLQACHIETVVMQATGVYWMALYQVLEGYGLQVYVVNAKYTKTLPGRKTDVLECQWLQKLHTFGLLNNSFLPPEQIRVLRTYLRQRENLVAAAGTCIQQMQKVLTEMNVQLANVISDVSGKTGMAILKAILSGERDPQRLAALADRRIQASRQEIAQSLEGQWREDLLFVLRQVHDLYFFHLESITGCDRQIEAHLKTLAVKVDRATQPLPAASRLPHRKHIPQTNLREELYRITGVDLTRIDGIQVQTAQVVISEVGVDMTPWPDEHQFASWLGLCPNNRITGGKVIRRGTKKVLNRAATALRLAAQTLHRSKSYLGAKYRRLRARLDGPVAITAMAHQLARLIYRLLRFGTEYHDKGMQHYERHYRETQMQWLKKQAAQFNMQLIPTQGVVK

SEQ ID NO: 390001 - protein, 468 aa, unidentified
MTVDKKLWRNRKERKEWARRLQSEDPGLEVVHPHAAGIDVGNSAHYVAVRPERDLQPVRRFECFTADLRRLADWLRSCGVKTVAMQSTGVYWIPLYEILEERGFEVYLVNARHTRNLPGRKSDVQESQWLLKLHTYGLLNNSFQPPAEIRALRTYWRQRGEHVAGAATCIQRIQKALTQMNLQLANVISDISGLTGQAIVRAIVAGERDPRKLAQFRDPRIQASEEEIAKSLEGNWRPELLFVLQQELEMYDTYQRRIAECDLQLQKHLASLANNVPPRPPEVEPDGKKRKRAKPAKNAPRFDLSCQLQRITGVDLTRIDGIDVMIAQTLLSEVGVDMSRWKTEAHFASWLGLCPDNRVSGDKVLRRGTRHVVNRAANALRQAANALIRSRSYLGAQYRRLRTKLGAPKAITAMAHRLARLVYRMLKYGQRYVDKGTEYYEQRYRNQQIQLLRKNATKLGFHITEARA

SEQ ID NO: 390002 - protein, 372 aa, unidentified
MDEGIKVFVALDVHKDSIVIGAAQAGSRVPARQVGRTAHEVNKLLKALAKLGAPSEVHVVYEAGPTGYGLQRALAARGYRCQVIAPSLIPRRAGERIKTDGRDCLKLAESSRSGDLRAVWVPDPADEAIRDLSRARDDAVTARTQARHQLRSFLLRHDRRYPRKTAWTAAFHRWLATLNFGPDGAQTAFIEYQLAVQAADQRVERLTQALIGSIAGWRFESVVQALQALRGVAAVSAIGLVAEIGDLARFEHPRKLMGYLGLVPSEHSSGERTARGSITKTGNAHARRLLVEAAWNYRFKPRIGVQAMRRQQTLTSDIQATAWKAQLRLSRRFAALDARGVQRNKVCVAVARELAGFVWAIGRQAMSTTPIH

SEQ ID NO: 390003 - protein, 414 aa, unidentified
MKSARNTLPTEPANGVTGGIDWARDDHAVSIVDDRGREIVRSTVEHNAAGLRELLVVLERAGVAEVAIERPDGPVVDTLLDAGITVVVISPNQVKNLRGRYGSAGNKDDRFDAFVLADTLRTDRARLAPLLPDTPATITLRQTSRARKDLVAHRVAVANQLRAHLQIVFPGAVGLFAALDSPISLAFLTRFDCQDRADWLSINRLAAWLASVGYSGRTDPAVLHRRLTSAPRGTAGTDHTATTAAFVAVLSALTAQIKALDDDIAQQLARHADSQIFTSLPRSGTVRAARLLSEIGDCRARFPTPESLACLAGVAPSTRQSGKVKHVGFRWAADKQLRDAVTDFADDSRRANPWAADIYNRAIARGHDHPHAVRILARAWLYVIWHCWQDEVAYDPAKHRALQTLLNQDQPRAA

SEQ ID NO: 390004 - protein, 347 aa, unidentified
MRFYTKQHPFYCGIDLHARSMYVCILNQEGEILLHRNMKASPETFLKAIAPYREAMVVAVECIFTWYWLADLCAQEGIPFVLGHALYMKAIHGGKAKNDKIDAHKIAVLLRGGMLPQAYVYPADMRATRDLLRRRMYLTRKRAELLAHIQNTNSQYNLPEIGKKLAYQANRDGVAERFPDPAVQKSMEVDLALLGYYDPLLRDLELHIVKAAKQHDAHTLYLLQTVPGIGKILSLVLLYEMHDIQRFPRVQDFVSYCRLVKCARESAGKRYGTAGAKIGNAYLKWAFSEAAVLFLRDNPAGQKYLTRLEKKHGQGKALTLLAQKLGRAVYYMLKRQKAFDMHKFLHE

SEQ ID NO: 390005 - protein, 360 aa, unidentified
MFSERTSVGLDVHARSIVGCGLDTASGTVARRRLTPTFEGVSSWLAELPAPVAVAYEAGPTGFGLARQLTAAGIRCVVAAPSKLQRPPGDRVKTDARDALHLARLLRMDQIVEVRVPGVEQEAARDLMRAREDVRGDLMRARHRLSKLLLRQGIVYYGGRPWNGPHEVWLRGRRFTVPGLQLAYDTALETVLLTVARRDRLDRAITEMAANSEYTAVVRRLCCLRGVSTLTGFGLAVEIGDWHRFTGSTIGAYLGLVPTESSSGAQRSQGSITKTGNTHARRLLVEAAWHHRKAYRPGVTMRARWDQAPAAARARGHEGNHRLHHRWEVFTARKKRPVVANVAIARELAGFCWSLAVLDD

SEQ ID NO: 390006 - protein, 400 aa, unidentified
MRTVFGIDVSKASSEVAILVNGEKIHGYTMLNDAIGFNRLLNDLKTVHNPEIIFEATGVYSRRLRVFLEEYGYAYTQLNPLEAKKQLDSLRVRKTDKIDAEKLAHSQFILNRKPTYAQEEVYQHLRDLSRFYQNLTEDIVRAKNRLHKVLQVTFPELENLLSTPTGEQYWNLVMAFPCNEFVLSLSQSNLCEIIRQSTSKRISEKRIAYLTDRLIKLAKQSFCAVKKTSPMLEEVRYYAQELLRLSEHRQIVLDDMVALAQPLPEYDILRSIPGIAETTATSIIGELGDIRRFQSTNQINAFIGIDLRHYESGNFLAKEHITKRGNPYARKILFKCIHNIASASHTNPCHIANFYEKRKRQSTTASTKPHTIASIHRLIRTMYYLITHNKLYDYSLTQNR

SEQ ID NO: 390007 - protein, 343 aa, unidentified
MKHIGMDIDSVMTHISVLSERGREILHTKVPTRETDLIAFMMSVPGPKQVTLEESQMADFVVRCIEPHASKVIRCLPQHNRLIMESEEKCDRVDARTLADLLYMDRLKAVHHAPWEYRQLREGVRFYWISSRELAIAKNRLKAFYLFNGIHCSGDKVYSPRYRTVFIEQAGKRTANMSLLEQLYQQIDFCKTKKATHIRILRELVQPFRQDMKNLITHPGIGFIGACTLIAYLENGWRLKNKRKLWKYCGVGVRRHESAGKGLRKASRQGNRYLKDVVMTAAATIANRRTADNALTGMWRAGIAAGVAGDRMRRNMARKVAVLVQRSLRFKEEYRDDRITTTP

SEQ ID NO: 390008 - protein, 413 aa, unidentified
MDALRPSYFVGIDWASATHAVCVLDVAGRFVWQGMIPHTAAGLTDLVRRLARLAPPVEIAIERPSGLLVDTLVEAGFRVVPIHPNALKATRPRYAAAPGKSDPGDAYILADVLRTDGHRFRPLRAPSDATRALRAAVRTRDDLVATRIHLANQLRSVLESFWAGAAALFADIDSPIALAFLDTYPTPESAARLGEQRLARFLQRHAYCGRRSAAALLTRLRAAPEGRAAALESETRGQLVRSLVAVLRPLVEQLRELEGLIAAQLAQHADGALLQSFPRTGTVHAAQLLAELGDDRVRFASAAQLAAEAGVAPVTHSSGKHRGVACRFACNKRLRQAATTWADNSRHGHPWAAAVYRQARARGCDHPHAVRILARAWLRVRWRCWQDHTPYDPQRHGRALPFLTSPHRAPAAA

SEQ ID NO: 390009 - protein, 434 aa, unidentified
METKGKFDKNDKLSFVSDDMLILGCDIGSETHYVRAIDTRGRELSKSAFGFSNMAEGFESMLDWSTKLAAANDKKQIVLGLEPTGHYWFCLTTWLVAKGISVVQVNPYAVKQTKEVEDNSQLKDDKKDPKLIANLVKDGNFGMPYLPEKLYADIRRLSMFRDQLNEDRIRNLNRLHREMKIYFPEYKDAFGKIDGAFSLELLKEAPFPDELAALGTEGMKQIWHEAKLRGRGYANASSILEYARKSVGIRDGADAGKQAVKWFVSRIIELDEQLSDIENQLNQRCNEIPYAKNILAISGIGENILSGILAEMGDMSRFDNVKEIQKLSGLGLVACSSGKHTGETKISHRGRKRLRYWLFQAAKSAVAHSEEFKELHVYYTTRKQNPLKKMQSLIVIACKILRVIFTILTKGTTYDPKKLLGDIVRPDQSIPQAA

SEQ ID NO: 390010 - protein, 467 aa, unidentified
MKLLYRCCAGLDVHRDTVSACIRRRVRGQAEATIEEQVFGTFTQDLECLRTWLKKNKVRQVAMESTGVYWIPIWNVLERHSRFTLTLANPATVRALQGQKTDRIDARRIAEYLQYGLLRGSFIPPKPIRELRELTRMRVHIQQDRNRVINRIARLLETVNLKLASVASNIAGTSGMAMLRLLASGVRDPERLAQCAQGQMRIKIPALLLALDGRPDAHFRWMLSEFLTQLARLDEQRARVDARIEQLALPDEDRLRRLSTIPGVDRTTALVLLAEFGTDMTQFPTPGHLASWAGLCPGNAESAGKRFSGRTRKGDRYVRRILVQSAWAASRCHDCFLAALFFRTAQRRGMKKAAVAVAHRILIIAWHILAEAGVEYYERGGDHFDRRHPERTARKLTRRLEAIGYKVTLIAPPKPPRPCSKPRVGTPPTPPVHPSVCARCARWGMPRCICLVKRNRTPSPPQSERPL

SEQ ID NO: 390011 - protein, 329 aa, unidentified
MSEATQLKRFSQSPDPDALYAHLVRNYPEAEYHSVYEAGFCGFWIHYRLVGLGIHNIVVNPADVPTTTSEKLRKTDAVDSAKLARSLRAGELKGIYVPGSESLETRSLIRLRDSITKDQTRLKNRIKSHLRYLGIEIPEEFSGPGRCWNRRFVVWLKGAETGSAYGRQTLDFLVRQYEALRGQRLEMLRAVRALSRTERFEKPLENLMTVPGIGQLTGMSLLSEIDDIRRFKSADQLAAFIGMIPMCHSSGEREGVGDITVRRSARLRSVLVEASWVAVRQDPALSMAYGNYCKRMAPGKAIIKIARKLVNRIYFVMKRNQPYVKCVVA

SEQ ID NO: 390012 - protein, 475 aa, unidentified
MNIKGSKKKNQVLSVNIFEQQEIIAKADAIKAELKASTWHELETKGKFDKNDKLSFVSDDMLILGCDIGSETHYVRAIDTRGRELSKSAFGFSNTAEGFESMLDWSTKLAAANDKKQIVLGLEPTGHYWFCLTTWLVAKGISVVQVNPYAVKQTKEVEDNSQLKDDKKDPKLIANLVKDGNFGMPYLPEKLYADIRRLSMFRDQLNEDRIRNLNRLHREMKIYFPEYKDAFGKIDGAFSLELLKAAPFPDELAALGTEGMKQIWHEAKLRGRGYANASSILEYAGKSVGIKDGADAGRQAVKWFVSRIIELDEQLSDIENQLNQRCNEIPYAKNILAISGIGENILSGILAEMGDISRFDNVKEIQKLSGLGLVACSSGKHTGETKVSHRGRKRLRYWLFQAAKSAVAHSEEFKELHVYYTTRKQNPLKKMQSLIVIACKILRVIFTILTKGTTYDPKKLLGDIVRPDQAIPQAA

SEQ ID NO: 390013 - protein, 338 aa, unidentified
MIVIGLDVHKQSVTAVAVDEAGRPLGETTILVGSEELLGWAGALGSERLWAVEDCRQLTGWLERQLLALGEELVRVPPKLTVPERRAGRTRGKSDPIDALAIARAALREPDLSRPRPGERAYRELKLLVDHRDDLGDERRRTQQRLRWHLHALDPTFVVPLRMLARASHLERVGRWLARQEPELQVRLARELVARCRSLNRAIAELDQELELRVTETAPALLELPGCAAVTAAKLLAEIGPVDRFQSDAQLARHAGVAPLEASSGRVQRHRLDRGGNRQLNAALYRIAITQARYHADACAYLERKRSEGKSRREAIRCLKRLLARVVFNTLKASPALT

SEQ ID NO: 390014 - protein, 389 aa, unidentified
MKIYVGIDIAKLNHFAAAISSDGEIILEPFKFTNDADGFQLLVSKLESFDKNSIIIGPPSTAHYGDNLVRYLVAEFYQVCVLNPIKTCQMRKNNIRKTKTDKVDTFVIAKTLMMQDDLRFITFFDLDMMDLKALGRFRQKTIKQRTRLKIQLTTYVDQVFPEIQYFFKSGLHQNAVYALLKEAPSPKEIASMHMTHLANLLKVNSHGHFTKEQAKELRVLAQKSVGANDSAISIQITQTIQQIELLDSQLEKIEAEMTDIMKFNDSVIMTIPGIGYINGGMILGEIGDIHRFSNPNKLLAFAGLDPSVYQSGNFQAKTTRMSKRGSRVLRYALVNAAWNVVRNNATFKAYYDAKRAEGRSHYNALGHCAGKLVRVIWKMLTDEVEFNLE

SEQ ID NO: 390015 - protein, 355 aa, unidentified
MESVKYVGLDVHQSTVSVAVLNPEGKRMMQSVIATKATAVVDLLKGLRGALHVTFEEGTHSAWLYDVVVRHVARVVVCNPRKNALLKSGNKNDQIDARKLAELLRAGMLSPVYHGEQSTRTLQQLVASYTALTEDTGRTMRRIKALYRSQAISCAGKKCFGKRHRGEWLEKLSDSGQRQRAGWLYEELDSVQALRRQARLAVIAECHKYQAAKLLRSMPFFGPLRTAVLMARVQTPHRFRTKRQFWTYCGLGLETRTSADYVVKDGEVMRRRKPVYIRGLNWNYSHELKNVFKSAATVASTMEGPFREFYAMRVANGMLPAMARLTLARKMAAIALVLWKKGETFEAQHLKLPAA

SEQ ID NO: 390016 - protein, 336 aa, unidentified
MDTVCATVGIDVSKKKLDIALLVNNKIKTKVLENSIEGHRALLDWLGKTKLPLSALHVCMEATGVYSEPVAMALHQAGLVVSVVNPACIKGFGHSENIRNKNDTIDAGLIARYCAAMKPAPWAPPPLEQRQLRAWSQRVQALKDIRQQEQNRLEALTIGGMDEVGLHVEQHIAWLSAEIKKLEDDIDDHIDRHPGLKHDADLIATIPGIGMTTVAKILGEVGDIRRFDGAKAFAAFLGVTPKQRSSGTSIRGRTMISRAGSTSLRASLYMPSLVARRHNPILRQFAERLAMTGMAKKAVIGAVMHKLAHLIYGVISNDKPFDPNYLSKGLAIQDGI

SEQ ID NO: 390017 - protein, 373 aa, unidentified
MNSKINNLEANINLIDMKINEKKFIGKAFVGIDVHKSNWKICVLGELNFKKEFSCDPYPKALQTSLKNLLPDFEFECAYEAGFCGFWIHDALNEMEGISCIVVNPADIPTSDKERAQKEDKRDARKIAIHLKAGVLDGIYVPDKDFVALREIQRIHFTVTKDLARSKNRVKSFLFRQGIEICKEQFKKPSNHWSNKFINWINSLELCPKLKFVLEELMANVIRLRNQKLRILKQIREEIKSKQELEIRYNKLIKINGVGLISCITIITEVGDIKRFKTYEKFHSFTGLIPSTNSSADIEKIRGITNRANTRLRSVLVEVAWVSISKEPELLHYYNELKQRMNSNKAIIRVAKKIASKIRYELLKDDQELKVAA

SEQ ID NO: 390018 - protein, 347 aa, unidentified
MKILALDLGKFKTVGCEYEGETGAHRFRASITTPVALEQLVKEVKPDRVVIEVCNIAGWVCDRLRGLGVEVQVANSSDDAWRWRKVRKKNDRCDALKAAQLSAVNQIRAVHIPVIEVRQWRALIAFRQQLVRRRGRIKNHIRDLLVVEGMVLPRGGKCWTQLGMGYLEGLAKPLKEVSLHELWRGELEIELRQLREVQAEIAVAEEKLEAIAKADPRVALLRTIPGVGPRLAEAIVAWLDQPERFQHAREVSAYVGMVPKELDSGETERRGRITKHGSRLVRSLLVEVAWAGMRYNPWVRDTYQRISGGKKSRKKIAIVAVGRRLLVRCWAMLRDGTSWRAPIRKAA

SEQ ID NO: 390019 - protein, 377 aa, unidentified
MNRNDSLATLYTVDADHSTALTVDHSAGVDLHKDNFRIHIRNKSGEVLYRKTVSKHKRERLLEILEPYKGNIVVGLESTYNWYWLYDTLMMNGFPCILGHAYYLSKQKMDKHKDDDRDAANMSDLLRVGRFPVAYACDYDRRSVRGLMRLRVELMRDHTSYLLRNQCIGDQYLMEEASLAHAGYPPETINDIDLALTINAEMQAELMQRVERLDHYILERALIQDRELYELLAAVRGIGPVTALTILYETGDSNRFKNQQTYSSYCRLVRPKWQSSGKEVGCGNARSGNPYLSWIYNSLAVQSIRNIPMIAAWYGQLKKKRGSRTARRVLAHRWATTAFFMLKRREPFNFEKFLGTALYAKLKAATDAKLLRSRTKE

SEQ ID NO: 390020 - protein, 409 aa, unidentified
MEVLHARCAGLDVHKDSVVACARIATNTGVEQHVDTFGTTTSGLLALSDWLEGHGVTHVAMEATGVYWKPVWHILESSFELVLANAAHIRNVPGRKTDVNDATWIADLLAHGLIRGSFVPPTAVQELRALTRTRKQLVREKATHVHRIEKVLQDANLKIGSVLSDIIGQTGRAMLEAIVGGETDPEHLLACVGKRRLKASRAELLEALRGRVSPHHRFLLKLHLQQVDSLDRAIQAIETEVGESLRPFRAAAELLTTIPGVSDTAAAVIVAEIGIDMSRFPTAGHLISWAGLCPKNDESAGKRRSTRIRKGAPWLKTTLVQCAWAAARAKNTYLHAQFLRLKSRRGPRKAIVAVAASILTAAYHMLRNGTTYQDLGSLYFDHQDRRQAAIRLARRIQRLGYEVELREAA

SEQ ID NO: 390021 - protein, 341 aa, unidentified
MSIVFAGLDVHRSQITFDALDTETGEIATGRISATPDAVEKWTERFSGRELHVALEACTGWYFVVRALERAGAVAHLAEVTETRALRGRKRRAKTDRADARWLRTLLAEGRLPEAWIAPDHICWLRIRTRLRKTLSDESTSWRQRLQATLFHLGLPSLPERLKGEPARLWLAELELPAAAAERVEVCLAMMQAIEAQLAPIDAELRAYSRRQPGCRALCRHFGIAGATAPTILAELGDVSRLRRSRQAVRLAGIDIGVDRSDRRSRVGKLTKQGSPELRWALYEAAQSACRSTSPDHAQYLELKERGLSHTRASLTISRKLARRCYHTLRELGPAALQEAA

SEQ ID NO: 390022 - protein, 320 aa, unidentified
MLSFCGIDVSKDRLDAMVLPDEQCSSVPNDAAGWAALVEQLRGCSVTAIGIEASGGYERGVIRSLHTAGMPVRQVNPFKLRQFARASGVLAKSDPLDARMIASFVAIMPTRPAQPHVPAIERLAEMLAVRRQLSAEKVAAENGSRLLEDAMLQRLSRRRIARLAADIDLLDKCLVEIVMADAGLAQRYRLLTSMPGVGPVLACTLIALLPELGQMSRKQVAALVGVAPYAFDSGKLKGRRCIWGGRAHVRHVLYMAAMSASNWNPGLKAFHDRLRAAGKLPKVAIVAVMRKMITTLNAMVRDGVVWADRHSGRHTVPTAR

SEQ ID NO: 390023 - protein, 417 aa, unidentified
MQSRKFGSQSEHTRTVVVAVDISKDTFTAYFRCLLTGKQRSVRSYPYHRKGVEQLYDEAQKFAAENGSMHMILGLESTGVYHLGMVEFFKDKPVEIQQVNTLHVKRMKDITDNTPTKTDWKDPRVIADLIELGRGLRMGVAEEVFLELRQLTHARERVIADYTAVGNKLSNLVHILFPEFHRFFTNIHGSTARKMLKMYPLPSQIGQLGENDLYDFLKKESRGRYNREFAEGLFEAAKASLGCVQGAQNYITEIHVLIDLCELMYKAKKSYEDRIYSLITELPLAKVLLSFKGVGPMTTATILGEYTGFEGFETIAEVLKYAGMNLTECSSGKLHGRRRLAKRGRPLIRKILYFAAMNMVRKGNEFHDKYQRYINAGKPKVAALMAIARKILRIMFAMSKSGQSFNKEYAQKYLKAA

SEQ ID NO: 390024 - protein, 351 aa, unidentified
MDEYIAFDSHKRYTWVERWEANTGKIRQYRVEHAPGAIRQALAGCRPGTAVAIEATANWYWITDEIEQAQGVPRLVHPRKAKLMMGQINKTDQLDTHGMNVLQRNGTLPTVWIPPAPLRELRELTRTRVVLVAQRTRWKNRITATLAKWGLPASEYSDPYGKKARAELETRLASLPEQTRWATRQMLQQLDSLSAQIREFEQRLEELVQITPAMQWLETLPGVGVILSATIALEIGEIGRFLSAERLASYSGTVPRVHSSGDRTRYGRTRPDVNRYLKWAFAEAANSTAVNCRRFPERHVSQLYARLRVRKGHNKAVGAVARHLAEAAFHLLSKQQVYRDPTAKGGRTSEV

SEQ ID NO: 390025 - protein, 328 aa, unidentified
MEPEYIGIDLHKAFFQACAITTTADRQWEQRWPTTDAGIAALLTRCGQHSRVAVEASSPTWAFVDRLVAHVGTVTVVDTRKTRIKAGYAAKTDRLDARRLADALRRDSVVGIYYPPPAIRDLRELCRYRCQLARTQASVKQRIHALLLRHGVTAPTRSLWGTRGAAWLADLALPSWSGHSLGGLRALLNEVRQQLVPVLAAMRTTAATDPIARALDAQPGFGPVFSVTLRAEIGVITRFPDGPHLASYAGLVPRVEQSGSRRWSGRITKAGSPWLRWTLIEAAIHQFRRQDAFGRWARQLAVRKGILKARVAVARALCDELLAAWPRP

SEQ ID NO: 390026 - protein, 454 aa, unidentified
MAKKREKRECKAVVLEPDAAGIDIGAEEIYVAVPPDRDEESVRMFSSFTCDLHALADWLQQCQIRTVAMESTGVYWIPLFQILEARGLEVYLVNAHYLKSVPGRKSDVSDCQWIQYLHSVGLLRASFRPTMDICAVRSLWRHRASLLQMASEHILHMQKSLSQMNLQIHHVLSDITGASGQAILDAILAGERNPVQLAHLCNCRVKSPREKVAKALEGDYRPEHVFTLKQSLDGYRYYQKLIAELDREIQRLLQTLPSAVETGQEIPQRTKHSAFQRQGNDPGFDLRGQLYRIAGVDLTDIPGVSAVTAQVILTEIGPDLHRFRNASAFASWLGLCPENRVSGGKVLSCKTRKVKSRAALALRLGANSLCRAKGYFGEFFRRMRAKLGTAQAITATAHKIARVLYHVLLTKQPYAETVFHRSDEHARRRAEMRLRKQAALLGFQIIPVPADSAT

SEQ ID NO: 390027 - protein, 371 aa, unidentified
MPHLSLFDNSQNQGRMTKLQQFADFTNKKIYVGIDVHKKSWSITLFCEKNYLRTFSQPPSVDALEKLLRRDYPNADYLCGYESGFSGFWIQRQFQSRNINCHVLHSADIPQTHKHKTAKTDAIDSHLIAQALSAGTVNSIYIPELEVEGHRSLIRHRDRLQKDIHRCKNRIRSLLFQFGYIVPDRFANNWSNKFIQWLKTFETDQHSIRTTLNHMIEQMEILRASLLRVNKDIRSLQQNEKHKTLMTNLLSVPGVGPLIAITLITEIADMRRFGSFRQLNSFVGLYPMEYSSGEHEYKGNITIRHNMYLRKLLLEASWIAIRHDPALFLTFEEWKRRMTAKRAIVKIARKLLSRIRHVWLNNITYTKGVVK

SEQ ID NO: 390028 - protein, 341 aa, unidentified
MPTITIGLDLAKHVFQVHGVDATGQVVIRKKLRRSEVIEFFKELPPSLVGMEACGTAHHWGRELTALGHNVRLMPASYVKPYVKRGKNDAVDAEAICEAVARPTMRFVDIKSAEQQSGLMLHRTRELLVRQRTALINSLRGQLAEFGLIAPKGVWSIPDLHALAQGASSTVLPDAVRGCVGLIMGQIDELQTRVQAIEKVIRTNHRASEVSLRLQTIPGIGVITASAITATIGDIKAFKSGRHLAAWIGLAPRQSGSGGKVHMGRISKKGDAYLRKLLVLGATAVIRYCRNKPELAGWINALLQRRPARVVTIAVANKMARIAWAVMSRGEAFRQTASAIA

SEQ ID NO: 390029 - protein, 424 aa, unidentified
MVRAIGMDVHRDFCEVAIAEAGAVRSAGRIATRPASLELFAASLAPTDVVALEVTGNAGEIARILEPHVARVVVVSPHDTGISRARAKTDRLDARALAKLLAAGELDAVWMPDEWTRAMRRRLARRDQLVRARTRAKNEIHAVLVRRLQGRPPVTDVFGVRGRRWLSELELPADESETIAGCLRHVDFLDAEVAALDRAIASEALRHRDVLRLMTVPGVSVITASTFIAAIGDIRRFPSARNLIGYLGLDPRVRQSGPSPARHGRITKQGSASVRHVLVEAAWVTVRAPGPMRAFYERVRARRGAQVAAVATARKLASLFWCLLTREQDYAFGQPSLTRRKVRKLELAAGAPSRKGQVRAGDGLRNKQIRDAERALAAQAEDAYRRTIADWKATSPQKAGASVTPGRASQRPSKGKAARQTTSP

SEQ ID NO: 390030 - protein, 408 aa, unidentified
METTVACGAGVDVHQGTMVVTVRVPGPGGQRQVTTQTFGTMTSDLLAIRDWLQSLGITHVAMESTGIYWRPLYYLLEEQCTVLLVNMQHLKHVPGRKSDVRDSEWLAQLLEWGLLRSSLVPPQPIRDLRDLTRYRKRQIEDRAQEVNRLVRLLEDAGIKLASVATDVMGVSGRAMLAALLQGQSDPAALADLARGVLRRKLPALREALQGRFRTHHAFLLTQILSKIEFLEEAIDHLTAAIDEHVRPFEADLARLMTIPGVARRNATTIFAETGGDMTRFPTAAHLCSWAAICPSQHESGGKRRSGKLRDGNRYLRGALIEAGLAATRAKGTALQARYYRVKRHRGHKKAVVATAHQILEISYYLLRDQMTYRELGADYFDRRDRDRTVRRNVKQLEALGFTVTLEAA

SEQ ID NO: 390031 - protein, 314 aa, unidentified
MNDRKVAGIDVSKLTLDVALLPGGETLQLGNEAAGIGELVKQLKSSGLDLVVMEATGGYETAVASALVAAGLRVAVVNPRQVRDFAKATGRLAKTDRIDAQVIAAFGVAVEPHILQLPDEQARELDALLVRRAQLVAMRVQEVNRLGLSQGAARKQIKLHIAWLDKAIDKLDLDLTAGLRSSPAWRAKDELYRTLKGIGPVTSSAMVLALPELGRLDRRAIAALVGLAPFNCDSGNMRGRRRIYGGRSRIRSLLYMAATTATRSNPVIQAFYQRLKLRGKPHKVAIVACMRKMLTILNAMARDGTPWTPEKAVQ

SEQ ID NO: 390032 - protein, 334 aa, unidentified
MDFTYFIGTDISKNELDIAVYKSKELLYHAKISNESKVIRKFLKELNKLEGFSLQEAIFCMEFTGIYNNHFVYELVKKKANVWLEPASKIKKSMGMVRGKNDKLDAIRIGKYAYKNSDEARLWKPRRNVISKLHHFTTLRRRLLTVKNILSTPLKEMDLYVEKSVSSKCKNFSKRTLNSIEADIKKVEKEIDQLIAEDPGVARQVELITSINGVGKQTAIGAIVTTNEFKDIRDPKKYACYSGIAPFPNESGMFKGKDKVSHLANKRMKTVLHMAALSAIQYNTDLRRYYERKLAEGKNKMSIINAVRNKLIHRIFACVQQNRKYENSYATTLV

SEQ ID NO: 390033 - protein, 315 aa, unidentified
MAQFRTVVGIDVSKQRWDVALYPEPVVASFATDAAGWAGLLAWLGTEAPGCVVACEPSGGFERPLIAALSEAGVAVRLVDARRVRRFAEASGRLAKNDRIDAAVIAHFAATFPGPLVQRDAARERLAEWVRMREQVQAELLAATNQVTHLRQPPLRRLAEQRIAALRRWLARIEAGIAAAIAAVPSLAAKAALLGSVPGIGPVIAARLLAELPELGQISGRQAAALVGVAPFDRDSGGRHGHRAIAGGRAKLRAGLYMAALVAAKHNPVLRAFHDRLRARGKPAKVALTAVMRKLVVILSAMLRSATPWNASAYA

SEQ ID NO: 390034 - protein, 382 aa, unidentified
MEHYAAIDVSLEWSSVCVVDAEGEIVREAKLPSEREALVGFFVESGLAFEHIGLEAGPLSQWLHAGLVEAGLPAILIETRHVKAALKAMTVKTDRNDARGMAQLIRMGWFRTVHVKTLQAQEIRALLTARKLLLAKLRDIESSIRGILRGFGLKVGAISKGKFEARSRELAAGQAMLERVTEPLLRARAALGAEYATLHRHLLATVRQDEVCRRLMTVPGVGAVVAMTFRSGIDQPQRFIRSKAVGAHFGLTPKKYQSGEIDRTGRITKVGDAMVRTALFEAAHVMLTRQLRFSALKAWALRVAGRHGMKKAKVALARKLAVVMHRMWVDGTTFRWGEAAVPAAPETPQARQPPRQPGPVAGTRGSGEAANARVAGGPDHVR

SEQ ID NO: 390035 - protein, 356 aa, unidentified
MTNVKTNFTEQTIYVGLDVHKRSWNAALFLNDHYLRNVHQPPSPQALWKFLQTNYPGADYVCAYEGGKFGYWIQRQLSGNGIRCIVVNPADIPSTHKDEVSKTDTRDARAIAMALQCGQLRGIYIPTQQQEADRSLVRHRKKIWRDLVRCKNRIKGFLDYTGVELPDKFSNSNWSRNFLQWLSAIKFDYVSNRVTLDYMIREAELLRKELLHISNDIRKLMRSSAYKKMYYLLRTITGIGPLTAALLITEIGDMKRFSSFYQLNSFIGLLPSEHSSGEKELKGRLTIRRHRQLRSDLVECAWTAKRTDPALSLFYSDQLKRGKESKLIIVKIARKLLSRIRCVWLTGKPYERGIMK

SEQ ID NO: 390036 - protein, 380 aa, unidentified
MDVHSSNFTLCSFEPGYGFEADKIFGQTQIKEDIFNSTVKYINKLKSMRPDVDVICGYEAGCLGYNLHRKLKAKEIESVILAPTTMAVARNSSKKKNDYRDAITIAKCLASSAYKAVYIPDEKDEDVRDFIRMRDDHKTALKQIKQQLNAFCLRHGHHYDKPKWTGLHLNWLRKLELSKVQRETVEEYLATYEALTSKIAALDVRIEDIASEERYSEKVNKLKCIKGIKTHIALSFVCEIGDFNRFKSADKFSGFIGLVPGECSSGNTERMLGITKAGNRHLRRLVVEISNTYRRGAVGRKSVALRERQKDMPKDVVAYADKATNRCQRKYQRMMFKGKNSNQAVAAVARELCCFIWGMMTGNYSRTAQAEASVYRSELD

SEQ ID NO: 390037 - protein, 354 aa, unidentified
MLYLGIDQHARQITISLRDEDGDVLLARQVSTQPAKINAFFQQLTRRRLTDGESFTAVLEVCGFNEWLIRMLKDYRCHKVILIQPEERKKQKTDRRDAASLSELLWVNRARLLQGKPVRGLRQVDISSTTDQENRRLTTLRKNAGQAQTRIILKIKHMLRRYNLQWEMPTKTFPTQRAIAWLKKLALPEVDRWEMDHLLMDLEHAQRRVQELEKVIAQRSATSDAAALLATTPGVGAYTAVALACRVGRVERFPRSHSLANYWGLTPGCRDSGETRRPGSITKAGSATARWLLAQMTRQVLRKDTRLREWFKRIKRRRGSSIARVAVMRKLATTIWHMLTKKKTYAECRALSAS

SEQ ID NO: 390038 - protein, 463 aa, unidentified
MPPLFTAHTIYRKGEQDNDRLSEQHSRKAGNHQGKRDYPENPILSSGFHTNTKYAKNIIVATIVTTNKDGISEYLQKSFSTINSDIQRFHNWLIENNCYHVCMESTGKYWIPIFNYLENDIDVCLTHPKYVKAIKGKKTDKKDSKWIADLCKFDLVRCSFIPPKDFRQLRELSRYRFKLVCMKSSEKNRIQNCMTISNVGIASVLSDPFGKTATEIISYLLEHTADSMDEKAVRKLIKKGAKSKSDEIIEAIKGYTIETDQAKKLELARGHLEYLDDMITQTEVELYVRIKPYYEFVEFVSTMPGMTELSSTIVLAETGVDMDIFDDAKHLCSWCGLSPANNESAGKKKSVRLAKAGDYLKPMMVQCALAAIKSKKQPYFAIKYGRIKKRRGHKKAIIAIARMMMVCIYHMVSEKKPFTPTDYEELMDPQNHVESVVLNENNVFAYLESLGYDSSKLVKRNDN

SEQ ID NO: 390039 - protein, 416 aa, unidentified
MNAAGIDVSSRKSTVAVLRPFGEVVKLPFDVTHSAEGLAALVQQLKSIEGETRVVMEHTGRYYEPVAQALHTAGFYVSAVNPLLIKEYGGNSLRGVKTDKADAMKIARYALDNWSELRDYTPMDTIRYDLKTLNRQFQLASKQKTAVSNNLIALLEQSFPGVRKCFDSPVRKDGTQKWVDFVYTFWHADCVRKNSLNVFTERYRKWCKRHGYFFKQSNAAEVYELARSVITLVPKGPVAKVLVQQAASQLTSISRSVETYRAEMNRLASMLPEYPVVMGLYGVGESFGPQLMAEIGDVRRFDRKQALVAFAGIDPMPNQSGEKNVRSNKSSKRGSPYLRKTLFSIMMCLLQSAPADEPVFQFLDRKRSEGKPYYVYMTAGANKFLRRYYAKVRNYLATLDNLPPVDMDSTGLNHLN

SEQ ID NO: 390040 - protein, 341 aa, unidentified
MWIIGCDYHPSVQQIACMETETGQLRELRLAHCAEAEAFYRELKGSGVGVRVGMEATGHARWFERLLSELKFELWVGDPAEIRAKRVSKQRNDRMDAAHILKLMLEDNFPRIWMPSSENRDLRQLVLHRHRMVGMRTRVMNQLQAIAMNEGVRRKRALWSQKGRTQLESLSLPPWTTRRRQELLHFVDEFDPTIDELSEAIKEEAERWPEVQRLMTHPGVGPITALAFVLVLGTPDRFHCGKQVGSYLGLIPCEESSADRWRLGHISKQGNAVLRYLLGQAALSAAHCDEQWRHQYAHLAMRRNRSIAKVAMARKQAVRLFWMWRRSWDYEQLNKFGSHVG

SEQ ID NO: 390041 - protein, 402 aa, unidentified
MNAVGIDVSKGKSMVAIMRPFGEIVSTPFEIKHTTSDINSLVELINSVEGESRIVMEHTGRYYEVLAHQLSEANLFVSTINPKLIKDFDNDSLRKVKSDKADAVKIARYALDKWQNLKQYSVMDELRNQLKTMNRQFGFYMKHKTAMKNNLIGILDQTYPGVNTYFDSPARSDGSQKWVDFASTYWHVDCVCKMSKNAFINHYQNWCKRKKYNFSQSKAEEIYGKAKELVPVLPKDDITKLIIKQAVDQLNSVSTTVESLRTLMNETASKLPEYPVVMAMKGVGTSLGPQLMAEIGDVSRFTHKGVITAFAGVDPGVNESGSYEQKSVPTSKRGSSVLRKTLFQVMDVLIKTHPQDNPVYQFIDKKRAPGKPYYVYMTAGANKFLRIYYGRVKEYLSSLPES

SEQ ID NO: 390042 - protein, 426 aa, unidentified
MNCKQNQKINQVEETSLVVGIDIGSTNHYARAFDWRGIELARIFKFSNSGEGFGRLSHWMQGICERHGKAKIIVGIEPTGHYWFTLGRYLREQGIKLVMVNPYAVKQTKELDDNDPSKNDGKDPKVIAKLVLDGRYSIPYVPTGAYADLRILSADRQRIVKEIGQIKNRFARWFAIYFPEYCEVFGSYESKSSMLLLRVASTPESIVALGVEGICRIWREAKIRAVGTKRAMTLYETAQRSIGHDQGTSAAKLEMALLLEDYEAKAKQLAFVMAALESTLREIPEAEKLLAIKGIGIISVAGFLAEVGDLRRFESPKQIQKLAGLSLRENSSGKHKGQTTISRRGRDKLRQVLFNAVIPLLATNEEFRSLHQYFTTRTVNPLKKKQSAIALCGKLIRVFYAIMVHGVEYDGKKMLADIHRKEPMTA

SEQ ID NO: 390043 - protein, 391 aa, unidentified
MIYIGIDVAKDKHDCFITNSDSEVLFKAFTIFNNLDGFNDLYQKIESVMDDVTKVKVGLEATGHYSYNLLGYLIDKGLPTYVINPLHTNLYRKSLSLRQTKTDKVDARTIASMLMSDVNLKSYSDTSYHNEELKSLTRYRFDKVKERAKLKTSVSRLVCILFPELEKLVPTLHMASVYALLSEFPSAKHVATAHLTRLTNLLSESSKGRYGKDTAITFRDSARASIGSNMPAKSLELKHTIKLIQELDSEIDEIENEIKIIMDEINSPILSIPGINYRMGAMIIAEIGDFNRFDSPDKILAYAGFSPSTYQSGQLDGAYAHMEKRGSRYLRYALYNATKYVCHWDPTFAAYLAKKRAEGKHYNVAISHAVKKLVRVIYHLEKTKQQYIKAA

SEQ ID NO: 390044 - protein, 344 aa, unidentified
MSVYVGIDVHRKRSQVAVIDAKGEVLANRNVPNGVEPILKVIGGLPPGTPAALEAAFGTGWLVELLEDYGFDPHLVHPLRCKAIASARLKNDKVDAAILGQLLRADLLPEAWIAPPAVRQLRALLRHRVQLVRLRTLLRNRIHAVLADHGHDRPAGCWSGPGRAWMASLQLPAVSREVVDDDLALIDALETVIDRLDWEIHQRARSGPRVKVLTQLPGVGPFTALVILAEVGDVSRFGSARKLASWAGLTPTVRGSDRVAHYGHISKQGSVWLRWVLCEAAQTAKRSPQFAAGYQAIATRRGKKIATTAVARKLLTRAWHLLTDAEHAAATQPAAASAPQAGTR

SEQ ID NO: 390045 - protein, 414 aa, unidentified
MLYIGIDWATDSHTVTLLAASGEVLESLVIENRLVGFLALLDAIRKHLRKLEPAATCSAVSFAIEDQNQRLTDFLLAQGFEGYLIEPSRIKGYRLRYRSSGNKTDPDDSFILADVLCRDRDQLPRIAPDSDVVRTLKTLLRDRESFVHDQTRLTNRLTACLRQYYPEALDFFEDVAGKTALDFIAAFPDFAAASQLSRREVKRFLVEHHCHHETRLERILTVLGISPTPVPAVVVRTKRQQALAIIRQLRTVQVAVAEYDAEIERLGEENEEVKRFRGLPGGGPITGAGLSTLFGEDRTRFKSATAVQSLAGTAPKTIQSGQFRTACFRFGCNRFYRAMLQQMALGALRSSVWAKQYYRGKRKEGKTHQHALRCLANLLLKIAYAIWRDRTEYSEDHHLAQIMRHQLRPTSNSV

SEQ ID NO: 390046 - protein, 359 aa, unidentified
MTSLTDSIDLREVVDVVIGVDTHVHTHSAAVVDARTGGVLGEITVEATCEGYAELIEFTERHAALRAWAIEGTGSHGAGLTRTLSERSEVVIELDRPVRAKRRNGAKSDPLDAIRAAREALARPRLGTPRTGGDRQALAVLVTARRSAIQAAGDAQRQLFALIIAAPEQIRSRFRGQQLKTMIRTAAAMRTHTTWDLETTTTVTTLRTLARRSQHLQAEADDYEKTITAIVKSWRPDLLDQPGIGPITAAIVLCAWSHPGRIHSEAAFAMLAGAAPIPANSGQTTNRYRLNRYGDRQLNRALHTIAITRQRCHQPTRDYTARRTTEGKNPREIRRCLKRYIARDLYRRLENPPSPLDAT

SEQ ID NO: 390047 - protein, 476 aa, unidentified
MELLYHRCAALDVHKASVVACRVRTLPNGQKEQEIRSFGTTTPELLRLLDWLLEWGCTHVAMESTGEYWKPVYYLLEGHVELLLVNARHVQQVPGRKTDVKDAEWLADLLRHGLLKASFVPQREQRDLRDLTRQRANLVAERTRVVNRIQKVLESANIKLSSVATDLQGVSAQAMLAALVKGEASPEEMAELARGRLQEKREELEAALTGRLREHHRFLLTTHLEQLAFLNRQIAQFSARITAQIDRLSAPSPPPAGTGSGEPPGPVSPPPPATGPRPAADPSPAGAASPAPPGSAPAARLPWTPLPPPTYRAAIGLMDPIPGINVEGAENVLAELGTEMRQYPSAAHAASWTGIAPGNHQSGGKRRAVKTPPGNKALRRALVIAAHGAIKTKDSYFGALYRRVKGRRGHKRAIVAVAHALLGVIYYVLLRQRPYEELGAHYLDERQPEKSAKRLVRRLRELGYEVTLAAREPVAA

SEQ ID NO: 390048 - protein, 331 aa, unidentified
MQAGEGIIGIDISKDSFDLVLRGTGREQHRVFTNDLKGFKAMLAWVEKQPEQVLHICMEATGSYWEGVAEYLYQAGYTVSVVNPYQVKRYADFLLNRNKTDKADASLIAEFCEKERERLRVWEPHPPEIKALRSMERRLDQLRDMKQQEQNRLKSGVSDPVVIESLQENLKHLEDQIKALMKKIKEHVDQYPELREKQNLLTSIPGIGMLTAIKLIAEIGEIEDFASASQLAAYAGLAPKQFKSGSSVHKQTRISKQGRTELRRCLYMPAVVASEHNPIVMDLKRRMLASGHANMEVIVAAMKKLLHLAYGVLKSGKPFDPDYGNQFCFNP

SEQ ID NO: 390049 - protein, 311 aa, unidentified
MTEHNIGVDISKSYLDVFRLENDKAQRFDNSAAGFRALTKWLGEAPVARIVFEPTGPYHKAFEGAFGKTFPLVKVNPLQARRFAQAHGTRAKTDAVDAQMLARMGAAFDLEPQAPCSKETLVLKDLHVARAVLIKDRTRLRNRAQTQDIALLKRQTKARLAQVERQIAELDAEIAALIEAHEATARNRDILCSMPGIGAVTAAAMLTLLPEIGRLHRKQVASLTGLAPITRQSGQWQGKSFIGGGRKPLRDALYMPALVAMRFNPDLKVKYEGLRAAGKPAKAAIVAIMRKLIETANALVKADRTWTPKNA

SEQ ID NO: 390050 - protein, 373 aa, unidentified
MPRYSTAFGMDVHLRSTTVCALDAETGEAVTRRFRGNPWGEVAEWMSGFPGPSLAAYESGYLGFAPQRELSGLGVDCVVAAVSKVPRSAADLSSKNDRNDAARMAKAILSHDISPVWVPSPEIEGLRDLAGAHDAATARLAAAKQRLLAFLARRGYAYGGTTPAGNPRRYWTYDFLRWLDKVRPADDGGIRALAALRNEVEAAAETRDDLLAEYRAAVAAGPLSAEVEALQSIKGCGFALAAAFASEVGDFSRFRSGRQVTSYFGLAPKQRSSADSVRLGGISGAGNALVRRLAVEGSWSYVQAGHQPKLMPKGSGVPLEVRMHGRKGSERLLRRREEMLARGMPQAKANAATAAELVRWLWALGAMCREATE

SEQ ID NO: 390051 - protein, 433 aa, unidentified
MNPNRLQVGIDFSQKRADFCLLFPDGQPLISHQDFANTRMGYQKARQMLLDSLQAYPFDGLDVSGEATSYYWFPFFWQMAHDAELGACDLSLFLLNPRQVHWFKKSLPPDDKTDATDPFYIAERTRTRRPKAPWDPQDDWLPLRFYTRLRFRLAQALTREKNYYLVHLFLLHNTYRRNQPFSDPFGVTSQKVLGGEKSLPELINLPLEELAEQLDEWSSRTLEDPLETARKLQQVARESFLLEEPLLTPVQHILDLTLEHIRFLEVQMAQVEGWMAAEAQAHHPEVLFLATIPGVGLVLAAGIAAEIGDLGRFFQTPKWDQKHKRYRTKTLREVEDAVAKLAGLWWPRADSGDFAAEDRPLAKTGNRYLRYYFVQAANGMRRHIPAYARFYGLKFREATRHKHKRALVLSARKSIGLFVGLLHRKEAYRSQEG

SEQ ID NO: 390052 - protein, 407 aa, unidentified
MKLIHERCAGLDVHKDTVVACVRVQRQEPEVRTFATTTSGLLALADWLAQNRCTHVVMESTGVYWKPVWHVLSDGELTLILANAEHVRNVPGRKTDVKDAVWLADLLAHGLVSASFVPPAEIQELRDLTRTRRQLVRQRVQHVQRIQKTLEDANIKLESVISDVVGVSGRAMLEAIIAGETNPAILVTLAHRNLRADRAALLEALLGRVTAHHRFMLRTHLDQVDAANKTIAIIDAEVERALGPFRGQVELLKTIPGVSDLVAWTIVAEIGVDMTPFPSAAHLLSWAGLCPQLKESAGKRKSTRLRKGAPWLKPVLVQTAWAAARKKDSYFRSQFARIKTRRGPKKAVIAVAASMLTAAYFMLRDGTAFEDLGTNYFDRVDRPRTTKSLVRRLEKLGYHVELKEIAA

SEQ ID NO: 390053 - protein, 388 aa, unidentified
MNVGADKSEPLTAVHTDLGAIFVSLELSRSSWLITSLSPGGGEKMSKHSVPGGDFAGLMERFAQLQEKARRRTGQSFRIIVVQEAGLDGFWIHRALQNEGIESHVVDAASIATSRRRRRAKTDKIDGETLVRALLAYKRGEPRVCAMVKVPTPGEEDRRHLCRERKALTAERVRHVNRIKGFLFSQGISGYQPLRRDRRQRLEELQTGDGRAFPQHLKALVNRELDRLELLLKQIKTVEAARDALLAVGQTGKPAPAAMLLDIRGIGPEFAAILWSEGLFRHFENRRQIAAYAGLAPTPWQSGAVDREQGVSKAGNPRLRTTLIQLAWLWLRNQPRSALSVWFHERVSRNGGRLRKTTIVALARKLLVALWKYVTAGVVIEGVTMKVA

SEQ ID NO: 390054 - protein, 351 aa, unidentified
MDRKTSDSIVTAIGIDIGKNTFHLVGQDKRGAIVLRQKLSRGQVAARLANMPPCLVGMEACVGAHHLSRQLLVLGHDVKLVPGQFVKPFLKGQKNDFRDAEAVVEAVQRPTMRFVATKSVDQLDLQALHRVRSRLVSQRTAIVNQIRAFLLERGIAVRQGLRFLRHALPDILGNRADVLTPRMVHMIEGLAGDLQHLDTRIDSVTGEIETVARDDQACQRLMTVPGIGPIIASAMVATIGDGSAFRRGRDFGAWLGLVPRQISTGDRTILGRISKRGNSYLRTLFVQAARVVLLRPANWPKHSFGQWLEAAAKRMHHNVVAAALANKLTRIAWSVLYHGRGYEPRMSAELA

SEQ ID NO: 390055 - protein, 417 aa, unidentified
MTDFAALLGIDWSDTKHDLCLIDAAAGRRETSVLPHSPHRIDEWATGLRARYGGRPVAVCLEQSRGPLIYALLKYDFLTLYPVNPRTLARFREAFSPSRHKDDPPDAEHLAELLLHHRERLRAWHPDDERTRALRLLVEHRRRAVGDRTRISNRLTSLLKCYFPQVLEWFPDLRTELVCDFLLRWPSLDALRRVRRETLLKFFRAHHSVRKDALEKRVNSIKEALPLTTDRAVLRSSAAMTRALCAQMKATLSAIREFDREIAEVCSAHEDYELFESLPGAGAVYASRLTAALGSDRGRWRSADEVACPAGVAPVMERSGKSCWVRWRYFCPKFLRQSFVEYAGESIKHSFWARAYYEQQRAKGKSHHAAVRALAFKWVRIIFRCWQERAAYDEVRYLESLRRKGSPLLTYAASNPA

SEQ ID NO: 390056 - protein, 347 aa, unidentified
MEHIAIDLGSRESQVCVRRADGEILEERRVGTRSLGKYLKGRPKSRVVLEACAEAFSVADAALETGHETVVVPASLAPSMGVGDRGIKSDVRDARNLSEASCRMSKLPRVHVPTKASRDRKAMCGMREGMVQARTKLINTVRGWTRPQGLGVVRSGAPTTFPARVVEHVAERGGTIPPYVEQVLRAIQALSVEIDKADQAMEEAAASDPTCELLMTAPGVGPTTAVRFAAAIDSVGRFANAHKVEGYLGLTPGEHSSSQRKRRTGVTKAGSSKLRWVLVQAAWAARRYYKDHPMVLWSHEVEERRGKQVAVMALARKLAGVLYAMWRDGRPYNKEHNQSPRAASVAV

SEQ ID NO: 390057 - protein, 356 aa, unidentified
MTERSTETIGMDLGDKRSHLYVLDNLTGEGLERADIATREKRVQKWFSRREPATVVIEVGSDSGWVSRLLAELGHEVLIADPRRVRRLAGKEDKDDRLDAEFLARIGRMDPKLLKPIKLRSEQTQVALGLIRSRDNLVQARTQLVNHVRGMVKTVGVRLPKGSSESFHKLQAQIPEKLRETLHPVMVSIQSLTEQIRCYERLIEEKSERDYPETEILRQVAGVGAITALAFALVVEDPSRFSHSRTVGAYLGLARRKYKSGESDPELRISKQGDRLLRRLLVNSAHYILGPFGPDSDLRRWGLRYAAGGGKNAKKRAVVAVARKLAVLLHRLWTTGEQYEPLRNSKRSPRGAAEAA

SEQ ID NO: 390058 - protein, 332 aa, unidentified
MLTDSGYKERHPQQASAKTLFDFLKKHFPDGEYHAVYESGFSGFSTYYALKEYGINCVVTHAADVPTTQYEEVMKTDKVDAAKLARSLRSGDIRPIYIREKENIDDRSVIRIRKTIQKQLSGYKARVKHLLHCNGVEIPERFARPGTHWSRAFIKWLKEDVVLLSSSRLSLDLLVKQVETIRQTLLDATKSIRRLAQTDRYRNNYELLMSIPGIGVSVAMCILTEIYDVKRFRNENQFASYLGLIPTCHNSGEKTASGEKTFRGNKHLGPMIIEAAWIAIYRDYGLGMAYARYKQSMKPQEAIVKIARKMSNIIFSVLKNSRKYEPYRWDKE

SEQ ID NO: 390059 - protein, 430 aa, unidentified
MKSNTQNAKIEAITEKTLVLGIDVGSETHYARAFDYRGIEYSKKPFKFSNTEAGFVTFKEWILDLKERHEKDKVIPGMEPTGHYWFNLGKFLQDNEMKPVLVNPHHVKKSKELDDNNPTKNDRKDPKVIAGLVREGRYMIPYLPDGVYADLRTASNIRFQLQAELTRIQNRISRWFNIYFPEYKTVYGKPDAKSGMLILKQAPLPEDILTLGIDGVNQIWRDAKMRAVGKARAKTLIEAAEHSVGSKEGAISARMESRMLLEDYESRNIRLQEIMTLIEELVNQIPMAEKLLEIKGVGIRTVSGFLAEVGDISRFNNPKELQKLAGLALVENSLGKHKGETTISRRGRKRLIYLLFEVAMSLVSKNQEFRELHNYYTTRRLNPLKKMQSLMAIAAKLIRVFYAMLTKGVDYDPKKMVSDIKRPAVYLQAA

SEQ ID NO: 390060 - protein, 409 aa, unidentified
MKLFVGIDVSSKDLVTSRISEENHEVVSRGNFVNDLKGATELKKQIINTANSNQIDQVIIGMEATSIYSFHPAMFFQEDIDLKAFNTQSVVVDPKKTKRFHDVFAEDKNDQIDAYYIADYLRVGHYSIGIVRQENYIALQRLTRSRYEIVQSLVRAKQHFIENLYYKLNKLVISDELNTSIFGSTMMQLLTEDLTTDDLLNISINDLTDYLAEHGRGRFADPEALAKTIQKAVRSSYRLDKVVANSVDAVLSVYAEEIKAFQKMIKDLDKSIEKVVKVTDDEQILRSIPGIGPVYAAGILAEIGQIDRFDNEAKLAKYAGLSWREKQSGSYTSDNTPLKRTGNTYLRYYLVEAANLVRTHDPVFGEYYQRKYKEVKHTPSKRALVLTARKLIRVIYFLLKNHQIYQEKR

SEQ ID NO: 390061 - protein, 351 aa, unidentified
MDTQQTATLKLFIGIDIHKRSWKVHCSSDLFGGKTFSMGPYPEQLQSYVLKHFSGYQVTTAYEAGYCGYHAHRCFKSYGWDSLVVNPADIHRKGKERHTKTDRIDAQLIARELKDGRLESIHVPDMEREQLRSLFRRRNDLVKNYRTIKNLIKSQILYRGIEVPPEFDNSHWSHNFRHWLDTLDFKYSGARLALDSRLRHFRFIDQDLRDVSTQLRRQCKTYYKKDYMLLRSIPGIGGIVACGILCELGDLRRFRSLKHLAGYVGIAPGIHQSGDNLRTTGISRRAHRLIRSYFIEASWQAIRTDPVMQTYYRKHQGKNVKSIIVKVARKLLSRTLAVIKTETPYVVGVIE

SEQ ID NO: 390062 - protein, 351 aa, unidentified
MVTLVKQPSRLIVGVDSHKETHQAAVLDLNGTLLANERFAASSTGYHELETWLNTLGEIERVGMECAGSYAAGLARFFRERHVEVIEVNFPHRAVRARRGKDDPIDAEMAARKVLSGEASAIVKDTTGAIESIRLLKVARESAIKGRTNALLQIRDVLITAPAELREHVEAAGGRIRRVNRAAALRPDLARMDDPLQAAKLSLRTLARRVTILTEQIEEIDVHLGGLVATCAPTLLSRVGIGTQHAAQLLVTAGQNFDRLHSEAAFARLCGAAPIPVSSGKTNRMRLHRGGDRRANKTLHLIAVNRLRLDPATKVYMERRRTEGLSKKDVLRCLKRFIAREVYNALKEDLL

SEQ ID NO: 390063 - protein, 337 aa, unidentified
MNFIGVDLHKQTISICVVTEDRQVICRQRLACAWEEKILEFFAQWTPYYVVVEATASYEWFLKLVEPMADRVVLAHPKKLRVIAESTRKSDKLDAQVLAEFLALDMIPEAHRPTPRVREHRSLVRHRVYVQRRITSVKTKIRRILSNYNLDRPNLFSSSGLEYLAEVKVSAADRFVLDQLVEEWQQHHRRLLAVAKQLRAFAKQAPVAEREGRAVLDSIPTVGPVTVDVVLSELGDVRRFRSQKQAVSYAGLAPGYRESAGRAKQLGISKEGSKLLRWILVEAAWRLVGKTRYWGGIYERLRNRCGPKKAIVAVARRLLCVMVSMLQNGRRYQLAKH

SEQ ID NO: 390064 - protein, 377 aa, unidentified
MRNVRFIGLDVHAETIAVAVAEARGDVRSLGTIPNRPESVARLVKKLGKPEQLRACYEAGPTGYVLYWQLSELGVKCEVVAPTLIPVKVGDRVKTDRRDAEKLARCYRGGDLTAVWVPDAAHEALRDLVRARLAGKRDQLRARNRLGKFLLRHGRRAPEGTKAWTAKHLLWVKTQRFEQAAQQMTLEDYRHEVEHAAERIARLERSIDAAVEKLPVKMRAVVEALQSLRGVAQVSAVSIMAELGEVSRFARARQLMGYSGAVPWEDSSGQRVHRGSISKAGNAHLRRIVVEAAWSYRHRPAIGHSLKVRQRHCSARVCELAWKAQHRLHQRYARLTARGKSKQHAVTAVARELLGFIWAIGVEAERSHDTKEIKHAA

SEQ ID NO: 390065 - protein, 349 aa, unidentified
MRALHAGFDLHGNSNYLGMIDGDGKRVFRKKLSNDLGWIGKVLVPFKEELVGIAVESTYNWYWLVDGLMKEGYKVHLANPSAIQQYEGLKHGDDKHDAFWLAEMLRLGILPEGYIYPKEERPARDLLRKRGHLVKLRTSLVISLQNILSRHLGRKVSVNDVKVLKEDRVTPLLESSEDLALAGRVSKEAIDFLTHQIRRIEGVVEKRMEVKEEYRYLLTLPGVGKILALTMMLETGPIGRFATVGDYVSYCRKVPSQWTSNGKRKGAGNRKNGNKYLAWAYAEASELARRFYPEPRVYYNRKMQKTNASVAHSALAHKLARAGYYVMRDQVPFESQKLFGRGQGWNGEP

SEQ ID NO: 390066 - protein, 315 aa, unidentified
MALRRIFVGIDVAKDWLDLWLAPSNRFERIANGSAGWVQLVTLLEPLGAGVVVAFEATGGYEDGLRRTLLAAGFDVRRLNPLRVRLYARSLGRNAKNDRIDARIIARYAEVADTTPEILDPARERLAELVSHRRRLVEERVAVGNQTAVLGSALLKAQNGKRLALIEQQVDQTDELIADAIGAAPDLCAKRALLMTLKGVKQVTATTLVALLPELGRITRKAIAALVGVAPFDRDSGRFSGTRSIAGGRSAVRTALYMAARAAALSKSTLGSFYKRLITAGKPPKVATVALMRKMLTTLNAILRDNKPWNFAAST

SEQ ID NO: 390067 - protein, 344 aa, unidentified
MYFIGVDHHKQASVMTIVDKLGLELKHGRVLNLRERIKHFLAGYHPFTAVLEAGRSSYVMADLLRELGGEVKMANALQVKAIAHARIKTDKRDSRMLAELLRGNLIPEVYQRGEGNRQAQRVMRLRAHWVAKQTEVKNKIRALLAHQREEIQLEVAKREERLFSGKGIEFLRSLPLDGSEKMILDDLIQGYEEAQAHIQKTDGLVGHLYGEIEEAARIDTVPGFATTLSVLVAVEIADIRRFPTVGDLHSYAGVIPSTYASGERLHHGRITKQGSAWLRWAAVEAVYPAIKKDLGLRVLFHRLAKRKGPNVAKVAVARRLLTIIYRVLSEKRDYIPDKMTRSAA

SEQ ID NO: 390068 - protein, 340 aa, unidentified
MNYYTGIDVSLEYSSVCVLDSNGKIVREAKVLSEPEALIAWFGSLGFSVERIGLEAGPLSQWLYAAMKEAGLAVELLETRHVRDAFKAMPVKSDRNDARGIAQLMRLGWFRPVHCKSMEAQETRSLLTARKLVQSKLFDVKNSLRGILRGFGLKVGKTTELEFAGRIKELVAGHPHLEMIANSLLAVHEVLRNEFKAFEKKINTIVRSDTRARLLMSAPGVGPIVALTYASAIDDPDRFKSSKQVGAHFGLTPKKYQSGETDYTGRISKIGDSSVRTVLYEAAHVILTKPLKGCSALKGWATRIARRAGMSKAKVALARKLAVIMHRMLAEGKPFNAAMA

SEQ ID NO: 390069 - protein, 458 aa, unidentified
MAKSKKKAKSPSEKSVSMRIINEHAAGIDVGSRSHFVAVGQDLDKDVREFGVFDMDLRECASWLKSRNVETVAMESTGSYWQNLYDVLIESGFEVLLVCGRQTKNMESKTDVKDCRWIQFLHTVGLLNSSFLPDLDTEELRTIYRHRDFLLKQGAKYICKMQKSLRLMNFRLDIVLSDITGVSGQAIIGGIISGETDPVKLAALANYRVKASKEEIARALSYNGRRDYLYELSDSFDIYQSYVKKIEACDKKIEEIIRSQIVKLNKPQTDPPPLDHKKKVNKNSPKIPLEKLSWQWNNEVNLMAIKGVSHSTVLTINAEVGQSIDKFPSAKAFTSWLRLSPNNRITGGKIISSHVKKGSNRVSAALRHAADSIGKQIDAPLYPFFQRILFRKGRCAAIIATARKLGVIIWNMLTKKEAYKPYDTTKIESQIRDKQIKKINKLMKSFNVQVSELSLAIA

SEQ ID NO: 390070 - protein, 372 aa, unidentified
MSKSSILFVGMDVHKETIDVAIATNRLNGKVRHYGQIRNRIDAIDKLVAKLKREAGTLKFVYEAGPCGFGLYRHLTRKQHLCDVVAPSLIPKTPGDRIKTDRRDAMRLAQLYRAGDLTPVYVPAVDDEAIRDLSRAREDAMLDQKAARQRLKSFLLRHGIRYEGRANWNEAHLRWLTEVIMPTPAQQIVFQEYVNTVTERTQRMQQLELMLKTQVKDWYFAPVVRALQAMRGMRFINAVTVVAELGDLTRFDNPRQLMCFLGLVPSQYSSGEHTKLGPITKSGNRHARRNLIEAAWAYRYPAKVSREIQIRQENLPLIFRQIAWKAQVRLCARYRKLVARGKHKNVVVVAVARELVAFMWDIAHYVNLRPVR

SEQ ID NO: 390071 - protein, 315 aa, unidentified
MTTSSGNLVGIDVAKEKLDIAVLGEKKASQVGNDERGITKLIKDLQMLNPELIVVEATGGYQRAVVLGLYEAGLPVAVVNPSRVRQYARASGLFAKTDKLDAFNLAEFGKQMKPRKFEAKSEAGRYVSALLVRRRQLEEMLKAEKSRLRTTPAAMRSSVEHIIEVLKEEIKQLEKDLDKFMKENEEWQAQEQILTSAKGVGRITATTLLAELPELGKLDRKKIAALVGLAPMNANSGKKRGYRKTKGGRMEVRNVLYMSTLVATRYNPLIQAQYQQLLKRGKVKKVALTACMRKFLTILNAMMRDKVPFRQTVIV

SEQ ID NO: 390072 - protein, 320 aa, unidentified
MRFYTKQHQFYCGIDLHARTMSLGILNQEGEILVHRNMPAGPDPFLKTIAPYREHLVVCVACICTWYWLADLCAREGIPFVLGHALSRKAIHGGKAKNDNIDAQKMAVLRRGGMLPQAYVYPAAMRATRDLLRRRMHLMRKRAELRAHIQNTHSQYNLPEIGKKLAYKANRDGVAERFPDPAVQKRLEVDLALIDHYDHLLRAVELAVRKTAKQHDANTLYRRRTVPGIGEIRSLVLLYEIHDLQRCPRVQDFVSYGRLVKCAKASAGKRYGTSGTKIGNASRKWAFSEAAVLFLRANPAGQKSLARLENKHGKGKALTI

SEQ ID NO: 390073 - protein, 400 aa, unidentified
MLSIGIDVSKGKSTVCGMKPGGEIVYAPFEVQHTREGMSELVSLLHNSGEEVRVVLESTGSYHCPVVAALLENGIFVSVVNSLRMKRFCSQSIRKVKTDRIDAMQIALYGLAYWQELQPTRLPEDTYRELQLLARQYYQMTSLLIKAKVDFNAICDQVLPGMQELMSDHAGRHKLSDFVLRYHHTTHILEMGETRFRKDYCKWAEKKGYRNCERMAVLIFATAQNGIPVLPNAPSTQIVITEAIRVLHTVEASRDAILTQMQALAKTLPEYSLVREMPCIGDTLAPRLIAEIGDVRRFHSKRALIAYAGIDAPPYQSGKFCANNRHISKRGNRYLRKTGYEVMQSYVMHKPANDPIFTFIEKKRSEGKCGKLAMVAGLNKFLRVYYGKVTELYRSLPAIE

SEQ ID NO: 390074 - protein, 370 aa, unidentified
MAQSTVFVGMDVHQDSVMVAVLPEGAQECEEVRQLPHDLAKIRKLFARLSKRGAVRACYEASGCGYVLQRALAKWGVACEVIAPSLIPVRSGDRRKTDKRDAAKLARLYRAGELTAIRIPDEAEEQVRSLVRCRETFTREILKSRHYVLKLLLARGHVYRVGSNWTQAHWAWLRKVTLEGADAITLRTYLELLEYKLIQRDGLDKQIEQIAFAEPYREPVGRLRCLRGVDTLTAMTLVCEIGDVRRFASPRQLMGYLGLTVSEMSSGGAERRGGITKAGNARARRVLVEAAWHYRRPARHSRSLRARQEGQPSAVIAHAWRCQKRLHKKFEALVYRMAPSKAVVAVARELVGFVWALLRDDTDVLAPRVR

SEQ ID NO: 390075 - protein, 441 aa, unidentified
MSKCSYVARLRLSFKTRTSLISYYLESGDFMNDLLQYLFVGIDVSKENNQVYVMNFFQEKLASFSTPNHQSGAQVLEAKLLDILDRHHLSKIIIAMESTGIYSAHIATYLSASKFLFPFDVRVYVLNPKISRNYRHSFSDMDKTDPKDAYILADLARVGRCEKLTPFKGPQKIALQRLTRHRHHIAELLAKEKVYALNNIFLKFSEFKGVLSNDFSKTAVELLLNFKSVDEIIDVPLEDLVEFVMTSSKNRFADSNQIALTLKAAARNSYRLDKMAYEPINLSLVASFNCISTYQTELKSIDLAILKQVKGLNQNHYLSLISIPGIGPVYASGILAEIGQIDQFDSDDALAKYAGITWRKSQSGSFDAEDTRMTKTGNVYLRYFITEAANLARIHNPVFKEYYQKKFDEVKTHQHKRALALTARKLIRLIYGLLSTDRLYK

SEQ ID NO: 390076 - protein, 347 aa, unidentified
MDQVVRIGIDTSKHVFQLHGVNAAEQPVLRRKMCRKEMIDFLAKCTPTAIAIEACGASHHWARLLTSLGHEVKLIAPQLVKPYVKRGKNDAADAEALCEAMSRPTMRFVPVKTADQQASLMLVGMRERIVAAQTQLVNTIRGYAAEFDLTAAKGVSHISPLLERIMVDEAVPALARDLFGSLAEEFSQLDERRRHIEAKLMAWHRNNECSRRLARIPGVGPIGAVLLVMKAPAPEQFSSGRQFAAWMGLTPKDHSTAGRVRLGIITRAGDKALRSTLVVGATSVLRQVRVGRGKGASFWLAEMLKRKPPKLVAVALANKIARIAWKMMVTGDAYRSNATRLSATSAV

SEQ ID NO: 390077 - protein, 373 aa, unidentified
MKDYSEVFVGMDVSKSRIAVGLADGGGAAEVRFLGEIEASEASVTKLVRGLAAKHAKLTFCYEAGPTGYGLYRLIGALGQECRVVAPSLIPRKPGDRVKTNRRDALSLARLLRAGELTAVWTPDERHEAMRDLVRTRSGAAFDLRVKRQQTGAFLLRLGRVYPGKKTWGGVHRKWLASQAFAHLEQRIAFEELLAAMDETKARVARLEKAIEEAVPDWSLAPMVTALMAMRGIDLVAATAILAEVGDLGRFQTPRELMAWLGLVPSEASTGDRIRRFGITKAGNGRARKALIESAWCYRFPARIGQAKLARVEAAPAVARRIAWKAQTRLCARYRALMRNGKLKAVAVTAVARELAGFVWAIHRALETEQAVA

SEQ ID NO: 390078 - protein, 413 aa, unidentified
MANEAIKVIAGIDTHADTHHVAVINEHGKPLADREFLAVGSGYRKIVDFITSYGTVTAVGVEGTGSYGAEIARTLRAAGLTVLEVNRPNRAARRLKGKSDPLDAYEAAKSVLDGRTTSVPKAKDGPVECLRILRAGRASALKARTAAINQIKGLLVSAPDKLRAKYRAMATSTLIPALQRTRPSGHTADPEYVTLLTLKALATRCQSLAAEIAAADAALQEIIDAYAPMLCDLPGVGTDVASQLLVTVGDNPDRLGNEAQFASLVGVAPVPASSGKTTRHRLSRGGDRHANHALYQVVLVRMASCQRTKDYVAKRTAEGKSKREIMRCLKRYAAREIYRQITNPQPAPDNSDLRQTRTTLGITISTAARELGQWPSKISLLERGLLRNDILATNYRRWLREQQPESAIQNAIL

SEQ ID NO: 390079 - protein, 377 aa, unidentified
MSNCTRYLGLDVHAETITAAIAEGRGRIRSLGKFPNRPEAVRKLMEKLGGGRNLKVCYEAGPTGYALYWQLTKLGVDCEVIAPSLIPKKAGDKVKTDRRDAERLAQSYQSGDLTPVWVPTPEHEALRDLVRQRAAAKSDESRAKHRLVKLLLRHGLREPGESRAWTHPWWRWVQALKFEHEARQVTFADCIAEVLHMGERLARLDQAIERLVKSAPEHMRAVIEALQAFRGVAKLTAVTIVTEVGTFQRFRRPTEMMGYTGLVPCEYSSGERQAKGAITHTGNAHLRSVLVEAAWHARHRPWLNLRLKKLLPTLPAGVAEIAWKAQERLHRKFTKMIYCRKHAGVVATAVARELVGFIWAVGCMVEAQHTNTLARAA

SEQ ID NO: 390080 - protein, 417 aa, unidentified
MSKIIERCAGIDIGKRFLLCCVATGAAQEESCMQTLRFDTTVPALERMRDWLHREGVTHVVMESTGSYWVPVFNILEDHFTVVLANPEEVKNRKGHKTDRKDAEHLADLLRHNHIRSSYIPPRATRELRDLTRRRVQLMQDCTRERNRVQKLLEHANVKISGVLSDIFGVSGQRMLVALLEGEATPEEIANLARGQAKRKIPQLTEALEGHRMTAHERFLISSCMRHLACLEEEIEDLDAEILRRMRTPPFDNAFELLQTLPGIGELSAAAILAETGTDVASFPTAEQMASWAGVCPGNRESAGIQKGSHTTHGNVYLRTALVQCAWSASRKQGSVFEARFKQLVKRVGPKRAIVAVAHQMLIIIHCMLKGGVSFRGAEDAPRRHRRQRRAHHHLRCLRRLGVRVHILGDTSPGQLP

SEQ ID NO: 390081 - protein, 435 aa, unidentified
MTFLSRLCKGLELSRLKEFRQLKKQIQGSENHLVVGIDVAKDRHHAFLGTATGKTLVKKVIFENSASGFSELLARVEAVRAQSGLSGVVFGLEPTSNYHKPLGRYLISKGCHVVLVGGKAVKNNRELLDERWDKHDTKDAANIADLVSRGKCFYYDRPSGQIEELRELHSLRARLKKEEHSLNLRIRNNLLAKHFPELDSFYTASERETLAIVRWCLNPQQIAGMPFDEFFKRVAPNARGIGQKLRLQKIHRLAHESIGCPVDSAVQLQAGLLVEKIKQVREQIVQVEQVIQQLCVQFPSYEHLLSIPGFGPYVASKVLATIADPRRFDTAKQVIRTAGYDLCADRSGKSSDQSVPVISKKGNSQLRYALYQAALIASSRHRFFMAYFARMLQGRERERGIRTKMRVKLAAKMLVIAWTLMKRGEPFNPEYLKVQ

SEQ ID NO: 390082 - protein, 340 aa, unidentified
MPVIRIGLDVAKNVFQAHGVDEHGQVVLRKQLRRREVLTFFASLPPCLIGIEACSASHHWARELTALGHQVRMMPARYVKPYVQRGKSDALDAAAICEAVSRPTMRFAAIKSVEQQSALTLHRAREILVKQETMLANLIRGCLGEFGIVAPLGIRRMAELVGIIRDEADSRIPPHARIAMTAVADQLGDLQRRIKEIEQAIRAWHRNNDASRRLATIPGVGVITASAIAATVATPTEFKSARHFAAFLGLTPKQHSTGGRQRLGRISKQGDGYIRRLLILGGTALVRYARGAGGTVWAKQLLARRPARVVTVALANKAARIIWALLVRGGVYRSAAPQEA

SEQ ID NO: 390083 - protein, 335 aa, unidentified
MKEITTVGVDLAKSVFTVHGVDAAGRTVLRKTVRREKLMELMVALPPCLIGMEACGGAHDWARKFEAHGHRVGIMMARFVAPYRKSSKNDGNDAEAICEAVARPNMRFVPVKSAEQQAILSLHRVRQGFIEQRTATINRIRGLLAEFGMVLPQRAEQVRRAAVVVAEELPILAREAVADLRAHLSYLDQRIAQYERQLIELARQREAAVRVQRLPGVGPLTASAITASISDGHEFANGRQFAAWLGLVPRQYSTGGKARMGRITKRGDAYLRTLLMLGARAVLQSAAHKTDRLSRWAMALRARRGYHRAIIAVAAKNARIIWALLANNREFAPPA

SEQ ID NO: 390084 - protein, 507 aa, unidentified
MHFDMGPLAYVRGVEASVSLRSELRGRLWSNHFGWQSLFDVGHAPSWEHWTKSRPADQSLTGHPMSFDRLKRPRRRKRLPGHKLKPSWATLFVQNSKPHLSMKPTYFLGIDAAKHKMRVALSNRSEHVLFEQDLPAQATGLRQLLAAIKRQVNDPQQLLVLIEATGLLHLNWSAALTKAGYAVAVINPLIARRLYTLQNSIRDNKSDPIDARGLCTIGLLHGEKLLVHYRFSLRPEQFTLQRAQSVRKALRSALTNLKKTYQSLMDLSFPELGGLLQLDGVGIRQLLIQAPTPAAIAGKRLSTLEKNWMVRPKAAALKALAADSMADPDLAAASGPALVALLQSVAAMEARLHALDQQIAKLACTSVDPQTKALIETIPGFGPVNVAKILAWLPTEILHSGSNRKVAARLQAFMGNDPRLRQSGQWKGHTKMSKRGVEMLRTAFFQSAFSAAHNDPELRAYYQCKRAQGKTHEVALSHLMRILTRRLVAVLRSGKPYQSHYNLKNAA

SEQ ID NO: 390085 - protein, 435 aa, unidentified
MTFARLLDPAFEDDHDPFRYYDPAGEPLEDRLYLPCGVDPHSKLCGVAFVHPLPHRQDVLVEREIRNNSLEDVTWLIETGRRLAPQFQAHPIYVFEATGPFWKPYRNFLHQAGLATATICGRQSHHARGTGTRKTKNDLKDAYTIAKVFKQGESHASRIPPEPLASLREYTRLHLFFVEYSVAIQNRMYNLRYQLHPDFDRHFSQPVLPTTLALMEEELVYPEHLKACSLDTLTQLIRQASHGKLGAELAQALVQSAHTTFSVPTAGEALSFNLRMLAQAYEQIHRLVLPPIRQRIEEGLTRLPFEQHLDEIPYFGPIVIGTFLGELGLPTWFCTVDSIVARFGFDPSVSESADKPSGATHLTKRGTKYGRRIMWLVARNRAEYTSEGQALVRKEMEQNGLSYDGAICVLAARLVRIAFAMVRDGSHFDLKRAFA

SEQ ID NO: 390086 - protein, 392 aa, unidentified
MYSDGSKHSSFSVPNNRNGAKIIVDRVTSVLLLQDIPQVVIGMEATSVYGDNLMRFLRESGSLGQFERSLHMLNPKQVKKFRDAYSDLPKNDHVDSYVIADHLRFGRINKEVYMDDYKYQALKMYTRARHQLVQELTREKQRLLNTVFISFSGLTQEKIFSDKFGATSMALIEEFSSLDELAYMSTDELVDYIRKKGKNHFENPEEIAEAVQRAAKNSYRPPQVIADAAKQMLAISMNTIRLLQKQIKEYDKAIEKMLEAFPQTLTSVKGIGNIYAAGIIAEIGDINRFPSQASLAKYAGLVVWTQHQSSDFEAEDKRMIQGGNHHLKYYLCEAANALRICDPEFKRFYALKYKEANKHNHKRALALTARKLVRLVYTLLKTNRLYIPPEEY

SEQ ID NO: 390087 - protein, 352 aa, unidentified
MEIVSGLDLHRSQITFRTADLRTGEVERGKIHPGTREAVREWLDRFEPGTDAHFALEGTTGWRFVVEEIQRRGFAAHLADPAELSERRGPKRRAKTDHADCELMVNLLIEGRLPESFIPPAHILELRTLVRLRKTLVDQRTEWQQRLQAQLFHQGVVPGLKLCRAEDRRRLADVEISQAGRQMIETGIVMLDGFDAKLKPLSAQLVALAKAQPGCRGLQRGLYGVGWLTAVAIVAELGDCRRFHSADQAVRASGLDVTVYESNGKRPGGHLARQGPQVLRWALFEAARCAARKSSPDHAYYRSVRDRIDHNRACLSVSRKICRRACHILKELGDAAMAPPEPASASRRPKAA

SEQ ID NO: 390088 - protein, 414 aa, unidentified
MRSWNEIAYYAGFDWAKDHHDVIIVDRSGQIVVDLQIEHNASGWQRWREHLAALDAGVAVSVETSQGVVVEQLLQSGVSVYPVSPASAKRYRERKIPSGNKTDRVDAWSLADALRLDGHGWKALAPEDPLVAELRLLCRDEVALIEERTALINQLQSALHEYYPAALEAFGDWTLPSAWAFVERFPTPQLLLAAGKRKWEKFLHTHRLARSQTYQKRLESFARAGEFVSGEALTRSKSRLALARVRMLRTLQGQLDAYRTEIEKLFAEHPDHNLFGSLPGAGPKIAPRLLGEIGSDRARYEDPTGLQCLAGTAPVSYQSGQIHKVYLRRHCNKPLRHAVHLWANSSRRYCAWAAVYYDQLRARGKSHACALRCLGQRWLKILWKMWQTGTPYDSELHTRNQLQHGSWVLKIQSA

SEQ ID NO: 390089 - protein, 368 aa, unidentified
MKINTTTPVVSTSTPVVTNGFTLGLDLGDRSHHVCVMDATGQIIREGALSNTRPALAKLLADFPRATVAIEAGTHSPWISRYLTELGAKVIVANPRKLHAISRSERKCDQRDAQMLARLARVDPALLHPIQHGTAQAQHDLLGLKLRDALVRTRVNLINAVRFTLKSLGHSVRNPSSESFHKTVLADIPADCLPVVQPLLTVLAQVTEQVKGMERDLVQRSKKDYPATQRLQQIAGVGPLTALCFVLKIGDPQRFSRGRDVGAYLGLCPRRDQSGGTDKQLRISKCGDGLLRRLLVSAAHYVLGPFGPPCALREHGQRLTGTGSIREKKRAVVAVARKLAVLLLSLWKHGTDYEPRATASPVLVMVPA

SEQ ID NO: 390090 - protein, 343 aa, unidentified
MNEVTTIGLDLAKNVFQVHGVAASGKTVIRRRLRRSQMISFFKKLPACLIGVEACPTSHYWARELQALGHEVRIMPANYVKPYVKRNKNDAADAQAICEAVTRPTMRFVAVKTAEQQSLMMLHRSRSLLIRQRTMLVNAIRAHLAEFGIVGPVGLRGVQKLLKIISDPTDERLPSLARTCLESLVASLTMVERQAACNEHRIHAWHRSNEASRRLESIPGIGPIIATALVASVSDPSIFKSGRELAAWIGLVPKQNSTGGKQRLGRISKQGDQYLRWLLVAGAMSVIRQARKTNFESNPWLGDLEHRKPTKVAAVALANKIARTAWAVLAYGETYRQTAPVEA

SEQ ID NO: 390091 - protein, 466 aa, unidentified
MQSRDPPTTTGMVDCCFEHACQSPDLLGPARDTPGLATAWAGRFVVREGLAVVEVLHERCAGLDVSKKDVKVCIRVPGGGGGRYRNEVTTFGSMTGQILELRAFLLEQQVTLVVMESTGDYWKPFYYVLENAPFELMLVNPRHVRGLPGRKTDVSDAQWLADLGAHGLVRGSLVPPPPIRVLRDLTRTHADLTRDRTREYNRLQSVLEDAGIKLTSVASKINGVSCRLMLDALVAGERDPKVLAGLAKASLRDKRDQLTLAMTGRFSDHHAFLVKLHLQVIDQLTAGIVELTTKIEVVTEPFRAQVALLETIPGVSTQIAVVIIAETGGDMTKFPTAGHLASWAGVCPGHHQSAAVTKKAKTRPGNSYLKGALGTAAMSSMQVKETFLQDRHSRLKPRIGGLKTIVALEHSILRSVWHMLSTNQPYRELGAAYHQRRHPQNALRSITRQANRLGYIVQFEPIPQPV

SEQ ID NO: 390092 - protein, 299 aa, unidentified
MKNISITRYNVGVDFGSEQMDAKLAAQYEDGTRKILFSRRFENKETGFKNLDGWLKEKCRCKDAEIRISCEATGVYHERCCYFLDGLGYYVTVEVPSRVKSYKKSYGFNSKNDKIDATALAYMGLERNLRKWEPINSFYYELRMLTRYHQSVQEMHTSACNQLHAQQAGMRISELVVKQLKANIELYEKQLAELERAIEEKLTSEPEVKRKMEYTTKDMKGVGMMTVAVMLAETNGFSWFTNRRQVVKYAGYDIVEDQSGKRRGKTKISKKGNAHIRRALYFPAINLVYIQCKTICRQV

SEQ ID NO: 390093 - protein, 408 aa, unidentified
METLHRRCAGLDVHQKEIVACRRIVAGRKVRSELARFATTTQGLMALSAWLAEAKITHVAMEATGVYWKPVWHVLCHDFSLVLANASHIRNVPGRKSDANDATWIADLLAHGLIRASFVPPQPIQDLRDLTRTRRELTREIVRHTQRIQATLEEANIKLASVISDILGWSGRRILKAIVSGQNDPRRLAELGHPRLACTREELAAALEGRLRDHHRFLIGQHLKTIEQIEATIAEFDARLEAALAPFRDDAERLKGVPGVNDNVAQTVISEIGVDMKAFPTADHLLSWAGMCPRLDESAGRKRSRRLRKGAPWLKPVLVQAALAASKVKNSSLRTRYLNLKPRLGHKKAIIAVAAAILRIIYHMLNDGTFYQDLGPDYRRPRNPERTARNLANRIRSLGFDVEIKKAA

SEQ ID NO: 390094 - protein, 447 aa, unidentified
MKKTKKEVVEMAMMNPNAAGIDIGSTEHWVAVPEDRDAERVRRFTAFTCDLHQIARWLKKCGITTIAMESTGIYWLNLFLLLEDYGFEVFLVNARNVKNVSGRKTDMSDAEWIQKLHSCGLLSNSFQPDNYTRELRTYTRHRQNLIRQASRYLQHMQKSMEQMNIKLHKVIRDLAGKTGMSIVSAILDGERDTEILAELRDRCVRASKETIMKSLEGTWREEYLFTLQQAYDSFHFVHAQMQQCDENIEKALKKRETIEVPGEDKDPVNKKKKTKNKNTPKFDVDSYLKTQLGVDITQIDGIDSLSGLNILGEMGSDFSKWPTRKQFLSWLNLVPNNKQSGGKLISSHLMNKKNTAGHIFRKCGSCLWKSKGPLGDYYRIQRAKNGGKAAAIATGNKLASIVYTMVTHQVEYDESILVKMKRHSQQKRLDNLQKKVAHIQKELEEAA

SEQ ID NO: 390095 - protein, 316 aa, unidentified
MTSPQPFVGIDVSAKHLDVAVLPAGTHFTVAHTDSGIASLVSRLRDLDPQIVVLEATGGYEIPVAYSMSEAHLPVVIMNPKVLRHFAKSTGKLAKTDKLDARVLAHYAQAIQPAVRPLKDPEQAELGTLMSRRRQLRDMIVMEENRRRTTTPRVRGNIDQHLAYLRQLLKDLDRDIHDAIRRTPLWHEKSEILQSFNGVGPKVSASLIADLSELGTARRTQISALAGIAPMNRDSGQWRGKRTIQGGRPAVRQALYMAALVASRRNPVIREFYQRLRQAGKPPKVALTACMRKILVILNAMLKNGTYWNPQLPIAA

SEQ ID NO: 390096 - protein, 412 aa, unidentified
MEVMYPRCAGLDVHKETVVACVRIVAGGEVSRSVRTFATTTASLIELGEWLEVNGCTHVAMEATGVYWKPVWQVLADGAFELILANAAQVKSVPGRKTDVNDATWLSELLAHGLVRASFVPEPAIQELRGLLRTRKQLVREKASHVQRLQKTLEEANIKIESVLSDVMGRSGRAMIQALIDGETDPAKLAALAHWKVRASAATLREALHGRIKRHHRFLLRLHLQQVDALDAAIAEIDREADAGLACFRDAVKQLSTIPGVSELSAQVILSEIGTDMGRFATAAHLRSWAGLCPRNDESAGKRRSTRLRRGAPWLKAMLVQCAWAAARTKATYLHAQFVRLRGRRGPKKAICAVAASILTAVYHMLKDGTFYEDLGAAHFDRRRPEMQARRLVKRLSELGFSVELKPVAAIT

SEQ ID NO: 390097 - protein, 431 aa, unidentified
MSNYLNSLVVGIDVASEFSFVSVLAPNGSQFRKPFKVFHTAAGFNYLIEQIKKAEEEFSTKPVFFMESTGVYHLTLFHFLKDMKFETFVINPLVTNCNKNKNIRKVKNDRNDALSIAQLGKFEDIKVSSDSDIKIFTLKLLVRDYYKLIDTRSGFKMKLSSSLCISFSGYQKVFSNTCGLVSIKILKEYPTPQAVISAPKQDIIDILLNSRKGLKWAEKKYSNLVEASVNAQFVSLSSPWLSVSITTSIAIYEAIDAEIATLLNKIKCYIDSDEMPLTFRKNILLLMSIPGIGYNTAITILAEIGGIDKFVTPKQLVAFFGVDPAVNESGNFKGDKVKMSKRGTRFGRRALYAAALASIRMKRNGEATNHVLLKYYKENLKGKKAKVALVAVMHKLIKYLFAVLRNQEEYQVRDPKLHQKMFLENQNAQAA

SEQ ID NO: 390098 - protein, 349 aa, unidentified
MIWIGVDAHKKLHQVIAISESGVVGERTIPNTAAAWAALLEWARQWPERIWAIEGAWYLGRGLAQYLAEQGERVHEVNGKWTAQRRRGMRRRGKSDRLDAHSVATLLREEADTLPRVYAQDDKLAAVQLWSRTHAEVTKDTTRLINRLHELLLLCDSEYKGKLPELTTKAAIAALRTYTAPGSGAIAREREAVIRASAAQLALLDEQRNDLRRKLEHAARSSFRPLMAVEGIAEINACAIVAECGMPRPGFGEEQLAALGGLSPLEASSAGGVRHRLNRGGNRRLNMVFHQTVLTQGRMYAPARTYLARRLAEGKTARKARRALKRLVVRRVYRAWRACFETDAERVAA

SEQ ID NO: 390099 - protein, 405 aa, unidentified
MFCGIDWASERHAVCVLDDAGHQATAFEIAHTAEGFDQLLARLRRYRDPATLPVAIERPDGRLVDRLLEAGHPVVAVQPNAIKAWRDAEVLSGAKNDPGDAALIADYLRLRQHRLRVLQPFSAETRALRAVVRTRDDLVDQPTTASNQLGACLDAFWPGAKGVFADLASPITLDFLARYPTPESAASLSERRMAAFLTKHGYCGRRPAAELLARLRAAPPGLCGTVEVEARRDAVLAMVRVLRALVAAIKDLDRAVVAHLGEHPDAEIFTSLPRSGRINAAQVLAEWGDCRPAYVDAEAVACLAGATPVTKQSGKHTAVSFRWACNKRFRQAICTFADNSRHGSPWAAKVYAEALARGHDHPHAIRVLARAWIRVIWRCWIDQVPYDPAKHGAAHKLTEMATSAA

SEQ ID NO: 390100 - protein, 429 aa, unidentified
MKKSLRSRPVLAKGRAVVGIDVGKRKHAATALSPQGEVIAQLASFPNTRQGVDRLENEVLRKAGGPGKVLVGMEATGHYWMCLYHELTRRGYTCVVVNPLQTNARSSARIRKTRTDKIDSLTIARLILSGEAKATRVPNPKTTELRLLVRHHRRLIHAAGDMERYAHTLVDRVFPEYADVFCKVFLSSSQQLIREIGLTPTKLVEHAEQVRELLRRAGRGRIAPETIDQLLAAAKQSIGTRQAEDLAEAQLRSIFDYLATVRQQIADIEKQIDERVAPLASPLFSLGLGSALVATIHAETDPIGDFASPEQYVAYAGLDPSLHDSGDTIHRRGKISKRGSPLLRHALFLAAFVVCRRHDYFRRIYRKHLSRGKKHRNALVIVARRLARVIWRLLTDGRPFTARPPKIVSPVTKPRKSAKSTRKAVVARV

SEQ ID NO: 390101 - protein, 342 aa, unidentified
MEITQNLIGVDIAADTFALTPYDSGSSKYGRCENFESTPEGLEKLQTYLEDHHMTSSNTVFCLEATGVYVERLAYFLVAKGYRIAIEAPHKTKRAFYPLGAKTDPLDSKQLAEYAFRFFDQLPFWSPSEVIVEQIRVLLTTREQLTRQSTASKNALKAIQRKMVRTPPAESAFESIIEHLQNQIKQIDQEIKNRTSGNSTFGPTVALIMTIPSVGFLLAAHLLTLSEGFTRPLEPRSIASHLGICPLAYQSGTSVRRRSKSRGGGNSILRKLLYLAAMGLRTHQPKYKHYFLRKTGQGKAKSLVLNNIENRLLKLICAIVRTGTPFIPDYRSVNPMFLRKVA

SEQ ID NO: 390102 - protein, 436 aa, unidentified
MRGCRCSMIMGFTKPIEHFNLQRKKVITMNTLYVGIDVSSKSNVVYLMLPNGDKHSNFSVANSHEGSTLLVKKIYSALTSHSLDTVLIGLEATSVYGDNLVYFLREDATLAPFNRKIHVLNPKQVKKFHDTYNDLPKNDYVDSFVIADCLRFGRINKEVYMEDYRYKALQNLTRARFFAVQNLVKEKQRFMNVLFKKYSTMTQEKVFSDTFSTTALAVYDEFESAEALANMDLHELTDFIIEKGKNRFPDPDAVAKAIQKAARSSYRLPKTVNDSVNQVLSISITSMKALESQIKEFDKAIKALMELLPNVLISIPGIGPVYSAGIMAEIGDINRFDNQASLAKYAGLAWKQHQSGGFEAEVTRLIPSGNRFLKYYLCEAAFSLVRCDKEYSDFYHLKYKEVNRCQHKRALALTARKFVRLVFRLLKDNRLYCPAK

SEQ ID NO: 390103 - protein, 338 aa, unidentified
MKLYGAIDLHSNNNVTVLIDEQDQVVYQKRLPNDLPLISQQLSGYRDVLQGIVVESTFNWYWLVDGLMDQGHRVHLANTAAIQQYEGLKYTDDHSDARWLAHILRLGVLPEGYIYPKEERAVRDLLRKRGQMVRQRTTNLLSIQNLVTRNTGRSISSNRIKTLQADQVDQLLPNPDLALAVKANLAMIKCANGQIDILERTVTDRIKLREEFSFLKTVPGIGQILALTIMLETGQVQRFPTVGDYASYCRCVGSQKLSNGKKKGRGNTKNGNKYLAWAFVEAANFAIRYSARIKSFYQRKKTKSHGVVAIKAVAHKLCRACYYIMKEQVAFDVDKAFA

SEQ ID NO: 390104 - protein, 333 aa, unidentified
MQPFKTVVGIDVAQDSLAVSIYNGKSHEVLEFDYTQTAIRKNLLNRFKKEKESVVFVMEATGIYHTQLAYMLCENTFKVSVLNPFVIKKYAEMNLMRVKTDSVDAKLIAQYGYEYQNKLLFYKLKNDARVHVDNIIKAIDDLLQQKTMSKNQHHALKKQAHHSKDILSSYDRHIKFISKEIIKLEKLLEGLLNESFAEEYKLLRSIPGIGLKTSSMIIAIFDSFKAFENPKQACSFAGIAPNPYQSGTSVKGRGRISKRGNPLARKILYMGALSATIHNPMIRSQYQRLIENGKPKMVAMIAAANKLLRQAFGVLKSGIPFDKEYMKVCKIMV

SEQ ID NO: 390105 - protein, 391 aa, unidentified
MKKDSKKQTKSKLEAKKVAEIQSHAQLTEFDAKSLVIGVDVGDRTCSYCVRTLGREIVLEGTLATKAEAIVEMFQGLKHQTVVIETGTHSRWIAQLLEVLGHEVIVANARKLKMISENNQKSDQVDARLLSELGCCNPDWLHGVYQRSEATQNDLLVARARQGLVDMRTGLINQVRGVVKSFGCRLPKCSSEAFAGIAKIQVPEVLKAGLSGILETLEQLDDQIHHYDCHVEHLCNTKYEMVAKRLLQVNGVGPVTTLVYILTIEDESRFERSRDVGPYLGLVAKKRQSGQRDPRLGITKEGDEMLRKLLVNCAHHILGVNGQDSDLRRWGLSLVRAAERKGIGHARKLAAAAVARKVAVLLHRLWVTGAVYEPLRNSERRAAASAGSAAA

SEQ ID NO: 390106 - protein, 435 aa, unidentified
MYCIDDIRLAQFRQLKKEIRGSEEYLIIGIDVAKEKHRAFFGTAQGKTLFKNVVFDNTIEGFEKLDAYVERIKVQYSLPKVVFGIEPTADYHKPLAEHLLKCGLMVVFVGGAAVKHNRQLLNGRWDKNDDKDSANVADLIAQGKCMFYEYPLMTLRNVRILNALKRRLKKREHGISAYIRNHILAQYFPELDKYYGSSETLAVVRECLDPSAIAGMEYDDFCRTVAPGKMTLARERRVGAIWRTAVNSVGCTMGEAAFHEAQIAVDSLKRVRQEIKTVEDKLEDACLEFPEYTYLLSIPGFGPDVSAKILGAIGDPHRFTSDKQVLRLAGLDLCAKRSGKTSDRATPIISKQGKADLRCALYQAAFIASIKSKDFIPYFTNKLAGRAKEKGIGTKMRVKLAAKLLIIAWTLMKKKDCFDPKYLKLENRVARKTAA

SEQ ID NO: 390107 - protein, 351 aa, unidentified
MSINHYIGFDVHKKSISYCVKAADGKIIEEGKLRATHQVLREWAQKRTEAWHGAMEATLFSSWIYDVLKPFAGELQIGNPLMMKAIGAAKKKYDKLDARKIADLVRCNLLPVCYVASAEMRDLRRLLRYRNLVVGQAVQMKNRMSGLLMEVGAEYSKQRLHGAKYFSELLDQLEEVPESVKDLLRLSRGALETFAATQRQLLDRLQKEPLLVKRVKLLRSIRGVGEVTALSWALEVCDPRRFPSIGDAVSYCGLTSALNSSADKQQRGPISKQRNAHLQTVLIEAAKLAPRWNKQLAAFHDRELKRGDRNRATLAVARKLVAYLLAVDKSGKRFEVRNPPAREMEEVGRVA

SEQ ID NO: 390108 - protein, 398 aa, unidentified
MAAVMIGIDPRKATHTAVAIDSAQTQLGTIRVRACAAQASQLVEWAAGWPDRTWAVEGAGGLGHLLAQQLLAAGERVIDVQPKLGARVRLLSARTPGKSDPADARSVAVAALRSPSCQPVAADDHAVVLRAWSRRHRQLSRLRSQAASRLHAVLCELIPGGVPRNITADRAAAILAAHHTAGPVAATWHDLAEEHVADLRRLDAKLREARTKITAAVKASGTTLTEVLGVGPVVAATVIGDVADITRFPTADRFASYNGTAPIEVSSGPRKVYRLSMRGNRRLNHAIHMAAVTQIARKHSPGHAYYQRKLDEGKTPAEARRALKRKISNAIYARLQAGARPQATGPGGQLGNDTETSAAGPHPERQLFRQATPGPATTLRPPAQPRRRKTPRTPQRTA

SEQ ID NO: 390109 - protein, 341 aa, unidentified
MDTIGIDLHKRESQLCTITDDGELIEQRIVTTRERFTTVLGNRPPARILLEASTESEWVARHLASLGHTVIIADPGFAPMYATRSSRVKTDKRDARTLCDALRLGAYRAIHRASDAQRHIRAELAVRDALVRTRTRYIAIVKAFVRREGLRLPSGEAEHTVAKLERLSVPAALTQELAPLVALFEPVNAAIAAADARLMALAKEQLVVARLCTMPTIGPVTAMAFVAALDDVSRFPSAHQVEAYLGLVPSEYSSGDRRFRGRITKRGDVRTRWLLVEAGWRILRSSHPDVAGLKIWAEQVARRRGKRIAAVALARRIAGMLFAMWRDGQDYHASVVISNVA

SEQ ID NO: 390110 - protein, 313 aa, unidentified
MTLSPCLIGIDVSKSQLDVCVRMQAGERRFAVANDARGIKSLCKRFKLLRPERIVVEATGGYERAALVAFQSQNLPVARINPRQARDFGKASGVLAKTDRLDARLLAAYGAALKPALTKPIPANIERLRALVARRRQLRDMRAAEACRRAQAIYDDMQAEIDRFIDILNAAIAKTNKDIARLIAEQDDLAQRAALLRSAPGIGPVAAATLLAELPELGSLTKKQIAALVGVAPFACESGKWRGRQHCMGGRKSVRDLLFMAALSATRTKSPIAEFYKRLCLAGKPHKCALTAVIRKLAITLNAIVRDRRLYAP

SEQ ID NO: 390111 - protein, 352 aa, unidentified
MRHFIGCDAHKKYSVFVAIDETGNVKPAVRVNHDRELYRGFLRGLPAGSEIAVETIGNWYWIVDEMEEAGHRPRLAHARKSKLMMGEIDKTDKLDGRGLATLLRNGTLPEVWIASREVRDQRELLRLRMTLVGMEIRLKNRVHAILAKYAIQLEEVRDVFSQQGRRLLLGATLENLPPHTAKVIRQHMELLESTEQQRKIAEERLKSIVKETADVNLLMTLPGVGWILGTVIAFEIGDIDRFSRAPEIASYAGTVPRVHSSGGKTRYGRVHPDVNRYLKWAFVEAANVIVMHQKRLGDVHVVRLYKRLRQRKGHGRAVTAVARHLAEAAFWVLKKQQPYQQPQGCRVSSTHR

SEQ ID NO: 390112 - protein, 359 aa, unidentified
MLVERTSVGLDVHARSVVAAAIDGVTGELRRARLTPSHEHVRSWVGDLAGPVAVAYEAGPTGFGLYRALTAAGIRCVVAAPSKLQRPSGDRVKTDARDALHLARLLRLGEITAVAVPSVEQESARDLVRAREDCRGDLMRARHRLSKLLLRHGIVYSGGHAWTGAHDAWLRRQRLNTAATQMAFESDYEAVLAVTARRDRLDAAIGELAGDSEFTPIVRRLGCLRGVSTLTAFALAVEIGDWHRFSGNSIGAFVGLVPTEHSSGASRVQGSITKTGNSHARRLLIEAAWHHRPRYGPGKTMRDRWELAPPAARARGDLGNRRLHQRWIRFNLRGKPAVIANTGIARELAGWCWSLATMD

SEQ ID NO: 390113 - protein, 306 aa, unidentified
MYSVDWATIKTFQIYNVKTKKLVEIKPTEDAFNEFFNNLPGSHSFYIEEGGADTFKLLALKNGQKVYTISGKKIKAIRESLSVEKTDENDARIIGKVADEHLEYFHKFNEGDKLTAKIGVLHREYVKIVKDSTQKKNQLLAFENKLALLVSENVVKKIIDKRKATIKALASEISTINSQLTKLIQKAPIWENYLKDIKGVGPITAAGIIGSVKDITRFPNRYSLRHFAGMITKQGNPDYNRHLKQALYNFVEGIIQNRTEPWRALYDNMKLFYKGKHEDWTKGKVDNFAKKFVQTKFLDRMYKECA

SEQ ID NO: 390114 - protein, 369 aa, unidentified
MDQHSVAYVGFDTSKTKHAVAVAEGGREGEVRYLGEIEAAPAAVERLLGKLARQYKSLHVCYEAGPTGYGLYRHVRALGQVCDVIAPSLVPIRPGDRVKTNRRDAVTLARLLRAGELTSVWVPDEVHEAVRDLVRAREAAARDLRHKRQQVLSFLLRHGRIFTGHRHWSRAHLRWLAGQAFNHPAQQIVFQDQVDAVGDAQVRLERLDRHLAELVPTWSMAPVVAACQAMRGVSFLVAVTFVAEIGDVRRFESPRQLMAFLGLVPCERSTGDTVRRGGLTLAGNRRVRRALVEGAWSYRHPARVTETIRVRLEGLPKAVREIAWKAQVRLSARYRRLVAAGKRAPVAVAAIAREMAAFLWAIGRVVEPA

SEQ ID NO: 390115 - protein, 328 aa, unidentified
MCTLGIDVSKNKIDLCLLTAGPGGKKKHKVLTNEPAVARKVVDWLNAQKCVPESVTVVLEATGIYHENLAYGLHEAGVSVCMANPCRVREFAHGMDILNKNDAVDAFVLACYGELKSPAVWVPPSPEVRKLRALLRQRDAPREDVQRTVNRLEKANSTSTPQEVIRSLERTKSWLNEELARIEKLITDHTDNDPGLKADLDLLKSIKGVKEQVGREMLALLKDGTFKSASQVAAYLGLTPVEKTSGSSVRGRPHMSKTGPSGVRVKLYVAALTASRWNKQAKAIYERLVAKGKAKKAALGAVMSKLVHLCFGVLKTRLPWDENYVATA

SEQ ID NO: 390116 - protein, 404 aa, unidentified
MWYAGIDWADDHHDILVIDEKGHQVGSLRVSHTAQGLTKLNTFLEHIVGTTSKEEMVCIIETTHGLLIAHLLEGGWPVYPVNPRTVDRRRSASGAKTDTIDAYLLAKTGRADLADLHRLTPDSEKVSELKELTRDQDGLIRMQTRLVNQLTACLKAYYPGALELFAKLQQKSTLRFLQTYPTPQAAMAASEAQLQEVLRQAKHPNPKLVAATIFQQVHQPHLQADAVTARTKARLMLVLVNQLLPLLEQIAQYDREIDTLFLTHEDHEIFASLPRAGQRLAPRLLAEIGDDRSRYRDASSLQALGGTSPVLFQSGMYSKAHRRLGCIKPLRNALHQFAWQSTQSEAWARDYYQRKRAEGKSHTVAVRALSNVWVRIIFAMWMDHRCYETAIFERAQQQHARRAA

SEQ ID NO: 390117 - protein, 343 aa, unidentified
MTKTPIAVLGIDLGKNSCSLAGLDAAGAVIIRRRMTREGTIKFVAALPACVVAMEACCGAHFLGRTFASQGHTVRLMSPEYVAPYVKAQKTDNRDAEAIAEAATRPTMRLVTLKSEAQLDLQVLHRARERLVAGRTRLINQLRAMLLERGVILPKRRAPLIKRLDELMAGELPISQRARQLLQDLRDEWMEQDRRIKAYDDELMALTREDGAARRLATIPGIGVVNATALLAAVGDASAFAKGRDLAAWLGLTPRQHSTGGKTKLLGISKRGNKYLRTQLIHGARAAMAHVAKKATPVGTWVRQLLTRAHPNVVVVALAAKLARIAWAVLRHGSNYDHRTATV

SEQ ID NO: 390118 - protein, 479 aa, unidentified
MIRSVGIDLSRTGNHQVCCLDEQARPCDSFSFDSTLEGLEKFEKRIFLGGATPTIVFEPTGLAWIPMAAYLRARHPDCQLVKARLQKVAALRRYLRSRAKSDRVDGVTLAKMPFIDAEQLDEAYLPPAEYHALQRLTRQRERLMKSITIRKNRIGAIINGYLPGLRKAFTNEWSDRARLFYRQRLNPFTVVHGGKDALETLFVSAKAKGAVTESHRVYQLCQKLVEFYEKSRAAGMINEDFFDNLQDEISCELRLMETEEAEVERVSGRIEELYRHLHPSDHLRTIPGIGVRTAQVFLAVIGDPNRFRNQSAFANWTGVVPGARQSADSEGKGLRMTKAGPAMMKRALYQAGDIARRYDPQLADLYYREMVQHGKTHLQAMGAVMSHLGARILTVLRENRLYELRDNQDRPISKMEAIGLIQQFKVPEETRQARRRRKPNEGRLTGRRTREAAKAPQSGPLIPPLKIVYCAEELQSTAN

SEQ ID NO: 390119 - protein, 343 aa, unidentified
MKLMRVGVDLAKSVFQVHGVDRHEQVVWRRKLTRANWLRVFIETVEPGCEVGMEACGGAHHWARVLQAHGYSVKLIAPQFVKPYVKSNKNDANDAEAICEAMSRPNMRFVAVKSVAQQDVQAVHRVRAEVSKQRKAKGNQIRGLVSEYGLVAPKELVHLRAAIPAWLEDGENGLTGRFRRLLNALWHDLRALDQRMLELDREIAQIAAADPVAKRLQRLRGVGPVIATALVATVGDVRQFANGRQLAAALGLTPRQNSSGGKERLLGISKRGDAYLRTLLVHGARSALRTARNKEDRLSRWISRIAETRHHNVAAVALANKTARIAWAMMKNGTDYEPDRAAA

SEQ ID NO: 390120 - protein, 409 aa, unidentified
MERLIERVCGLDVHKQTVAACVRVPGSTGARAQHVRTFGTTVADLLALRDWLEVHEVTHVAMESTGVYWKPIYYVLEERFTCLLVNAAHVKQVPGRKTDVQDCVWIAQLLEHGLLRGSFVPPAPIRELRDLTRYRKVLIQDRTREANRLHKFLEDAGIKLASVATDILGVSGRAMLEALVRGTTDPEVLAELARGKLRAKLPALRQALRGRFRPHHAFLVSQLLAHLDYLDETITTLSERIEEVIAPFADELARLDTIHGVARRTAEVLIAELGVDMNQFPSDRHLASWAGLCPGNNESAGKHKSGRTRRGNRWLRAALTEAALAAIRTSNSAFTARYRRIMRHRGHKKAVLAVAHAMLVTAYHLLARQTAYQELGADYFDRRQGERVTRRAVQLLERQGYRVTLERAA

SEQ ID NO: 390121 - protein, 285 aa, unidentified
MHSVTTIGLDIAKSVFQVHGVDAHGKVVVRRQLKRRYVLPFFKKLPSCLVGVEACATSHHWSRELQALGHTVRLMPPAYVKPYLKRQKNDAADAEAICEAVLRPSMRFVETKTPAQQSCLMLHRTRHLFIRQQTAVINAIRAHLAEFGIVAPVGRNGVEELLDVVADPNDKRVPEIARECLAALGAQLRMLKTQVLQFDRRILAWHRSNETSKRLDEIPGVGPALATALVASIANPRAFRSGRDFSAWVGLVPKQNSSGGKESSAASPSAAIDTCAACSPPARSP

SEQ ID NO: 390122 - protein, 442 aa, unidentified
MSYKIAGIDVHKKMLAVVVSDVEVDGEYHFEQRQFGTNPEQLRSLAAWLLEQQAEEVVMESTAQYWQPVWEALERYWKPIREKREGASRRSGTLHLAQAQSNRGRRGRKRDFPDAERLVKRLVARELTLSFVPDAEQRLWRTVTRRKYQLTRDKVRLQNQLESLLEEAHIKLSSWVSDLLGASARRMLKALSDGETNPAALAALADQNLRATPEQLCDALGACTDLKLVYRRLLKMALEQLQFLEQQIGQLDQEMASLLCQHQDAVQRLAEVPGLGVDSAQQIIAEVGPTAATFPSEKCLSSWVGACPGDDESAGVNYSHRSPQGNRHLRRLLNQSANAAARTKGSIFEIVYRRSVPRLGHNQAIGAIAHRQCRLIWLILHRGVRYEERGPAVTKRSKQKRTARMVRQLRSLGYSVELINSQQVAPGQPSDFDPDWLDELVF

SEQ ID NO: 390123 - protein, 399 aa, unidentified
MHYLGLDISKNLSYIAHYEDQKLINEFLLTHTKQSFQKFRVYVSSLVNPIIINESTGVYSRPIYDFCTNNRFKFYELNPLEANFKTKSLRANKTDKADAHKLVLLGSSLPSLTSKHQNRELYDELKEYARFYLELEKQENVLKVQLLETMHQTFPFFEKLFKNRYSTISLNLAHVFPHASMVSDLTKEEITEVISNASLKGMSAIKIEKYGDKLIHLANESFPCVSKDHFLVKKVRFVAKSLLHLQEERKHYSQEMINLAQQLPEFVILLSIPGFGRLTTALFIGELGDIRRFSSHKKLNAYVGIDIRRYQSGQSHYKDTINRRGNKKARKLLYLIVLNIIRGQSRFRNHINDYYYKLKSQPYGKPHKTAIVACINKLLKTIHYLIMNNCTYGYEMSPH

SEQ ID NO: 390124 - protein, 405 aa, unidentified
MVDIMVSDFRKGRYNLMKIYVGIDIAKLNHFAAAISSDGEIILEPFKFTNDADGFQLLVSKLESFDKNSIIIGLESTAHYGDNLVRYLVAEFYQVCVLNPIKTCQMRKNNIRKTKTDKVDTFVIAKTLMMQDDLRFVSFYDLDMMDLKALGRFRQKTIKQRTRLKIQLTTYVDQVFPEIQYFFKSGLHQHAVYALLKEAPSPKEIASMHMTHLANLLKVNSHGHFTKELAKELRVLAQKSVGANDSAISIQITQTIQQIELLDSQLEKIEAEMTDIMKFNDSVIMTIPGIGYINGGMILGEIGDIHRFSNPNKLLAFAGLDPSVYQSGNFQAKTTRMSKRGSRVLRYALVNAAWNVVRNNATFKAYYDAKRAEGRSHYNALGHCAGKLVRVIWKMLTDEVEFNLE

SEQ ID NO: 390125 - protein, 354 aa, unidentified
MTVTIVEEARPVTCRTVTGGVDTHADTHVAAALDPVGGLLGVREFPATAAGYAGLLGWLGGFGTVCLAGIEGTGSYGAGLARHVTAAGIRVVEVDRSDRQDRRRQGKSGPLDAVSAARAAQSGRARGAPKGRDGAVEAIRTLMVARRSAAGERTRTSSQARALLLTGPGDLRIRFAGHKPAALVTGLASLRPRTGDVAGHATRIALRELGRRAQFLDGQLGRLDELIVPLVTARAPGLLAVYGAGPRTVALLLIAAGDHPGRLRSEAAWAHLCGVAPIPASSGKVARHRLNPGGDRQASHALWRIVFTRLGSDPATRAYAERRTAEGKSKAEIIRCLKRYVAREVCRHICPAGG

SEQ ID NO: 390126 - protein, 431 aa, unidentified
MSTAMSGLSAGSAAVVRPSSSSLSSSSSSSSSSSSSSSSSNRMYYLGLDVHARQTTLEMLNDRGQTVKRQTIRGGLDKVVEEVEKLPGPLSIAYEASCGYGYLHDRLAPLAKRVVVGHPAQMRLIFKSKRKNDRIDGGKIAKLLYLDVMPQVHVPGVDVRQWRGLIEFRAATLNRRVALKNQVRALLRGLGLAASVPRGLWSKKGIVWLKDLSGLGETEALRRDMLIDELSEVNRRIKLLEQALAKIAAAHPAVRLLMTIPGVGIRTAEAVVAYVDDVNRFGKMTQLGTYFGLVPCQDSSAAVNRLGHITKEGPATVRKLLCEAAWQARRRSRRVSGWFERITGGDTDRRKIAAVAVARKLVVVMGHMLRSGEAWREGPASTSSSTNTSMRTGCARRLRGSPPEDTVTGNDRRSSVAGAVAGPTVNGERRR

SEQ ID NO: 390127 - protein, 340 aa, unidentified
MDAEYAGRQFVGIDLHRRRSVLVRMSEAGQRLDVVRIDNDPVTLGLEIAKAGESPEVVLEATYGWYWAADVLAAAGAHVHLAHPLGVKGFAYRRVKNDVRDAADLADLLRMGRLPEAWIAPPEVRGLRETVRHRCKLVALRSGLKAQVHAVLAKQGVHVPMSDLFGAGGTKLLDELALDAPFHARVLSLRRLIDAFTFEIDILAERTCGQLARHRGFTAVQAIPGVGPVLAAVFVAEIGDVTRFPRPEKLCSWAGMTPRHRESDTTVHRGRITKQGNHLVRWAAIEAVQRLYGGAIGRTRARLAERRGANIAKVAAARKLLTLVYYALRDGHVRCLARPA

SEQ ID NO: 390128 - protein, 393 aa, unidentified
MVCVGIDVAKDKHDCFIISSEGEILADVFTIPNNAEGFDTLLQAIRRSTRPEDKIKVGLEATGHYSYNILGFLLDKGLPTYVINPLHTNLYRKSLSLRKTKTDRVDARTIAAMLMSDVDLKSYTDTAYHNEELKSLTRYRFDKVRERAKLKQSVSRLVTILFPELEKLVSSLHSASVYALLSEFPGAKQISSTHMTHLKAVLKNASQGRYGQEMAEAIRNAARSSVGSVMPAKSLELQHTIRLIRELDAEIEDIETAIQAIVDEMQSPITTIPGMGVRMGAVILAEIGDFSRFDSPDKILAYAGMSPSTYQSGQLSLSGAYSHMEKRGSRYLRYALYNATKHVCHWDPTFAAYLAKKRAEGKHYNVALSHAAKKLVRLIFAMEKSQRPYCAAA

SEQ ID NO: 390129 - protein, 351 aa, unidentified
MKSRAKAVPTTIGLDIAKNFFQVHAVDAAGKVVLRRKLSRGEVLRFFEAQPKMLVGIEACGTGHYWAREIAALGHEVRLLPPTYVKPYVKRGKTDAADAEAICEAVTRPNMHFVPIKTAEQQAALMMHRSRELLVGQRTALVNALRGHLAELGIVTAKGVHRVADLLAELVGVDDRKIPPLARASLRCLAAQIEAVETQIDKLEALILEWHKGNEASQRLARIPGVGPITASAVVATIGDASSFTSARHLSAAWGLTPKQNSSGGKSRQGGISKAGNTYLRRLLFIGAIAVIRSRKAQEAGSWLARLLERRPAKVVAIALANRTARVIWAMLRSGEAYRPAKSPGTSAVAA

SEQ ID NO: 390130 - protein, 410 aa, unidentified
MEVLYPRCCGLDVHKETVVACLRLVIDGKVAKEVRTFSTTTASLMGLSEWLSENHCTHIAMEATGVYWKPVWHILDDGDFELVLANAAHVKNVPGRKTDVKDADWVSDLLAHGLIRASFVPDSPTQEMRTLMRTRKQLSREKSSHILRIQKTLEDANIKLDSVITDVKGLSGQKMIEALIAGQKNPAKLARLADHRVKASQETLREALRGRVPKHHRFLLRLHLNQIDALDAAISKIDQEVEAGIAPFRTAVEQVTSIPGVKELSARAIISEIGIDMSRFATDAHLISWACLCPRSDESAGKRRSNRIRKGSPWLKTTLVQCAWAAARTKGTYLQAQFHRIRSRRGVKKAIVAVAASILAAVYHLLKNGTMYQDLAPNHFDRRNKQRQKNRLVQRLAELGYAVQLAPLPN

SEQ ID NO: 390131 - protein, 341 aa, unidentified
MGEVNTIGLDIAKSVFQVHGVDAAGAVVIRKRINRAKVLEYFGELPPCLVGIEACPSAHHWGRELQGLGHTVRLIPPSYVKAYLKRGKNDANDAAAICEAVTRPSMRFVPIKTKEQQTALMLHRARQLLVRQRTMLSNALRGHLAELGIVSAKGRNGTAELLRIIADGRVSPAACGILKVLARQYGAIGTEIAFIDKSIMALHRGCEASRRLAEIPGIGPIGATALVAEIGDWKTFSSGRSVAAWIGLVPKQNTTGGKDRLGSITKQGNRYLRWLLVVGAMAVIRYARKHGTQARPWLGRLMERRATKVAAVALANKMARMAWAIMVRGERYKEPKLLLAA

SEQ ID NO: 390132 - protein, 423 aa, unidentified
MEIMYERVAGLDIHKATIVACVRLGAGRNVTRECRTFDTTTDGLRALLAWLEECRCSHVAMEATGVYWMPVWKILGEGDFALIVANAAHIKNVPGRKTDLNDAMWIADLLACGLIKPSFVPEEDVQELRSLLRTRKQLGREQTRHVQRIQKTLAEANVKLDSVLSDIMGASGRRIIEAMIAGVRDPRRLAALANTRIKATPKQLYDALHGRLTDHHRFLLTLHLRQWDNLDATIREIDQEVEARIARMDEEVKADEAPFRDLIGLLCTIPGVSTLSATTILSEIGRDMSRFPTAGHLVAWAGLCPGQNESAGKRKPARLRKGAPWLKTMLVQCAWAAKRKKDSYYKAQFFRLQARRGPQKAICAVAASILTAIYHILKDGTEHHDLGADYFNRRSTEGQTRRLVAQLTRLGFEVQLQRTAEAA

SEQ ID NO: 390133 - protein, 466 aa, unidentified
MARKSKKVTKKAQRQTPRSLKTIQPNSAGIDLGAKEHWVAGPARDNDKPNVKCFGTTTPELYRLADWLQEQAIETVAMESTGVYWIPLFEILDGRGFQVLLANARQISNVPGRKSDMLDCQWIQLLHACGLLRGSFRPSDDICRLRALIRERSTMVDERSDWIRRMQKYLDQMNIRVHRAVSDITGVTGMAIIRAIVAGERNANALAKLRDPRCRKSEQQIAEELTGNWRSEHLFNLRQALKMYDQLSAVIDDYDGEILSCIADLQLDDDDDTPVPPPSSKTKAQNIVKRGQESLREGFYRMSGFDLTTIDGISVNTAAVVISELGLDYTVFPDENHFVSYLRLAPNLSISGGKKVPKKFKATTCTRVSTALRMAALTLRNSKSALGGYYRRVAYRKGASVAVFAIARKLAQLIYRLVRHGQAYLDTGAQAYEARFNQRRLTYYTNTLKTMGFRVEPIPSFEPTPA

SEQ ID NO: 390134 - protein, 369 aa, unidentified
MEEVTDEPLYRDRVCGIDIGKAELYATIRVPSDKDPARRASETRRFAATKRGVLALADWLRCWQVPAAVMEATGDYWKGPFYRLEAEGFECVLADAKQVKHLPGRPKRDPSDSSWLAQCFERGAVRPCFVPDPEFRIIRLHTRYRRDLTDERTREKNRTEKLLESAAIKLSSVITDLHGVTGRDIMDHLIAGERNPKVLAQLARARARRKITELEHAVEGAEFFTAEHAALLKAMLERIDGLTAEIGKLSEVIEQLLAPYEEQLAQAESMPGWGRRSAQDAVAETGPDMTKFPTGGHLSSWAGKTPLDHQSGKRAGRARHKKGNKYLAAVTGETAVAAGKTATREGAATASWPAAAARPKPRSRSATPS

SEQ ID NO: 390135 - protein, 410 aa, unidentified
MPEAYAWYVGIDWGSAWHQVTLLDAERCVVNERTVAHRGEALAELVAWLLAQCGDPRQVAVAIEVPRGAVVETLLEHGFAVFAINPKQLDRFRDRFTVAGAKDDRRDALVLGTSLATDRAAFRRLRLDDPPVIRLRELSRLDDELQQEFGRLTNRLRDQVQRVYPQLLALSSAVDEPWIWELLELMLTPAAAALTRPAVAALLQRHRIRRVTADTVVATLSTPALWVAPGTREAVNEHLDSLLPRVRLVHEQRTRSGRRLEQVLESMTEERPGQRCEHRDVAILRSLPGVGRQVAATMLAEASQLLAERDYHGLRAQAGLAPVTRQSGKRRSVSMRYGCNPRLRQACYHWGRVSTQLDAASRGHYERLRQRGHSHGRAIRGVVDRLLAVLMAMLTHQATYDPRRRQAGVA

SEQ ID NO: 390136 - protein, 393 aa, unidentified
MFNIGIDIAKRKHSMAVLGEGGEIVIESFIFSNTVEGFRRMLDALAAHGVTNENAKACMESTGHYGRALRDHLISLGFDIREVNPILTHNWRKARSVRKVKNDTVDALALAQWNSATLLPGHLPPSKDTEEIKSLERSRTFQSRIIGDLKRKAIAILDEVFPEYQGFFSDSFGKASAAVLLRWPSAEAISKARIDVLSRCIHEASGGRLGRSKAEDLKLLAKNSCAAKPKTSAQSFHLTQLLAHIGFLKDQVVELDKELAVLLSQANTYITTIPGVGTVTGATILGEIGDISRFENPSQLVAFAGYDPSVFESGNFKGTKNHISKRGSRYLRWALFIAADRARMHDSVFKAFYEKKRAEGKCYKVAVCAVARKLCNTIFAILRDNTPYKAQTV

SEQ ID NO: 390137 - protein, 359 aa, unidentified
MKNTIVGVDLAKEVIQVCIYTNKKVHSNKKMSHKEFRAWLFKTTPTTIVFEACGTSNYWKQKAIEAGHKAQLISAKLVATVRQNQKTDKNDALAIIQASQLPDIQFIKGKSAEQQQLQSMLRLRELAIKQKTSSSNQIKALLLEFNIRVSPRNGGLKGVVQSTLEDGENGLSFLFREALGAAWKHYLNLLESIRIYDDCLESSISEHADCKRLLKLEGVGTVNAINLYIALACGELGAFTKGKDASACIGLTPLQYSSGGKTTLGSIGRYVKNSLLRSQLITGAMAAVSQAVKRIAVTKKDVWIQGLVERRGKKCAAVALANKTVRTAYAMLANGTEYKAELLPVVKKELLPDLEVECA

SEQ ID NO: 390138 - protein, 439 aa, unidentified
MKVMYERVAGIDVHKDMVKVAIRSPGDKPWTRKTEILEFRTFYGVLQHMAAQLRKRGVTHVVMEASGVYTEPVYYALAEQDFEQVAVVNPAHAKALRGHKTDAKDCARLAELFECGLLRGSYLPAPELKEVRDLTRYRMKTVQARTSEIQRLAKALESAGIKLGSVASDITGKSATAMIGALIDGERRGQVLADLAIGRMRTAGKLADLSQALAGRFTEHHALLCRLHRDRITGFSAAVDDLDQRIAGKAGPWQHEADLLKTIPGFGDVVAWAWLGEIGPVPHQWFPDHEKLASWVTLCPGNNISARKRKHGRTGDAGTYIKPMLIQAAWAAIRVRGRLQARYSRLVRRFGGDNNPGAKKKAITAIAHTLLKIAYQVLKSGTPYQEPGADFYTRRESPEHRQAFLERQLQRLHPGCTITITISAPEPPDRPALTGTAVA

SEQ ID NO: 390139 - protein, 340 aa, unidentified
MTIVTIGLDLAKSVVQADGVDETGATALTKRLHRKQMAPFFSKLPRRLIAMAACGTADYWARALAAMGHEVRLIPPSSVKAYVKRGKSDAFDAEAICEAVQRPAMRFAPVKTVEQQSILMAHRARSLRVRQRAMLANALRAHLAELGLVANPGIANLAKLAQQALSDENGLPSYARPTLEALVRQIMTLSEEITALDRKLLAWHAENEVSQRLAAIPGLGIVTATAIAATVTDPDQFRSGRQFAAWLGLTPQQHSTGGKTQLGGISKPGDRYRRRLLVVGATAVIRHTKDKPTPLANWIRKLLVKKPFRVVSVALANKLARIAWVVLTRKEAYRPDQLAA

SEQ ID NO: 390140 - protein, 483 aa, unidentified
MKPKQKEKPKKATCRPTQGNWQQLNRKQRREMTRKIQSEDLSLEVVHPDAAGIDIGNESHYVAVPPTRDSRPVRRFGCTTAEVKEMAVWLKQCAIRTIALQSTGVYWIAVYDILEEAGLEVYLVNARETKNLPGRKSDVQESQWLMKLHTYGLLRNSFRPSQEVRTMRTYWRQRDDLVRTAGRHIQRIQKAMTQMNIQLANVLSDVSGMTGQAIIKAILTGERDPHTLAALRDWRVKASEEEIARSLEGNWQEDQLFVLKQEQDSYEFCQKQIAQCDQLLQHYLQQQEDRSQGASLPEEKRRERLRKKKKGNAPQFDLRTELFRMTGVDLTQIDAIDVTTAMTILTEAGADMSKWKTESHFVSWLRLCPDNRISGDKIIGKGRLPTKNRASIALRMAASTLRLSNTYLGAQFRRLRTKLGAPVAIKAMAAKLARLVYRMLRYGMQFVDQGAEFYETQNRNLQINYLKSKAAKLGLQIMEAPAA

SEQ ID NO: 390141 - protein, 355 aa, unidentified
MSSAKYIGMDVHTESISIAVRNSAGKVVMESVIETKASVILQFLNGLSGELHVTFEEGTAAAWLYDLLKPHVTRLVVCNPRRNALLKVGNKSDRIDARKLSELLCGNQLQPVYHGEHGLRVLKELVRSYLAISKDVARVMTRVKALYRSWGIPCRGTQVYSPLYRVTWISKLREPGVRLRAAFYFQQLDALRSLRQEVRRELLAESKKHEVWKQLCQIPSIGPIRAAVALGILQTPHRFRTKRQLWSISGFAIETRSSADHRNVNGQLRKVKKRVSIRGLNQNHNHDLKNLFKGAAVIASTKPGPFREFYTALLAKGMRPEMARLTLARKIATIVLVMWKRGVSFDAQYLKPQTV

SEQ ID NO: 390142 - protein, 317 aa, unidentified
MNCTNNQKEITIGVDTGKFQLDIHIRPLDIYFTVENNDKGIKEAIKTIKPHKPTRIVIEATGRLEHPFIMACSQADLPFTVANPAHVKKFAGAIGRKAKTDKLDAQLIAHYGEAVKPPLSTLKPENMQFMSDLLSRRRQLMTMQTMEKNRLQIMPKEISSAIKPVLTAIKNQIEKIDNKLSKLIDKCDEYKAKNTIIQSMPGVGNVVAFNLLSDMPELGYLTNKEAASLIGVAPFNKESGSYEGQRNIRGGRHKIRTVMYMAMMSAMQCNPVFKATYQRLLVAGKPKKTAIIACVRKMVIILNSMVRDGVMWDPKMN

SEQ ID NO: 390143 - protein, 354 aa, unidentified
MNIKYVGMDVHKEAITMAVMNRDGKLVMESIVETKTSTILQFIQGLRGDLHVTLEEGTWSAWLYDLLKPYVTELVVCDPRKNALLKEGNKSDKIDARKLADLLRGGYLRSVYHGENGLRTLKELARSCLTISKDLTRVMNRVKALYRSWGILCGGQQVYAPRHRAEWLNKIGEAGVRRRAEFFYQQLDALQALRQAVRRDLLAESRKQSATKLLRQIPTIGPIRAALLLALIQTPHRFCTKRQLWTYSGLAIETRDSAQYRYVAAQLQRSKKPQQVRGLNQNHNHDRKAIFKSAATMASSREGAFHDFYQGLLTKGMEPAMARLTLARKIAAITLILWKRGAHFDAEQLKPQAA

SEQ ID NO: 390144 - protein, 350 aa, unidentified
MVTIGADLHKRTHTVVAVDEHGRKLAEHTVAATPAGHLALLRWARERFEARSWALEDCRHLSRRLERDLVTAGEPVVRVPPRLMAGVRRGGRERGKSDPIDALASARAALREPDLPVATLDGPERELRLLVDHREDLVGERTRILCRLRWHLHELMPGEEPKPRTLHRQRALERLASRLVGLPGPVARIAREQVERVRELTSDIDRLEREIGVLVAVQAPTLLALEGCGPLTAAKLVGETAGVGRFKSRAAFARHNGTAPIPVWSGDETHHRLNRGGNRHLNAAIHRIAVTQLRRPGRGRAYFEKRIAAGDTKREAIRALRRRISDEVFRRMRQDEALRTTVELPLERAA

SEQ ID NO: 390145 - protein, 335 aa, unidentified
MDRQYVGIDFHRRRSVIVRKSGAGDKLGSVRVANDPLAIASAVAEAGPNPEVVIEATYGWYWIVDWLQVQGATVHLANPSGLNWGARRVKNDERDASDLVDMLRLGRLPEAWIAPPATRELRELVRYRAKLVALRSGLKAQVHAVLAKEGVLPSVRDMFCGSGNAQLNALELGDAYTTRVESLRDLIERYDREVGMLERTIYQRVRDDRGYRAIQRIHGIGPTMAAILVAEIGDVSRFRSAEALCSWAGLTPKHRESDTKVHRGAVTKQGSRLVRWAVIEGTVRYHGGGKLAADWHRIAERRGKHKATVAVARKVLTLVYYGLRDGEIRCLAKAS

SEQ ID NO: 390146 - protein, 328 aa, unidentified
MYFIGNDVSKKTLDLACFDQQRNRWSRPCNLDNNPKGWDSLIQWAEKQTQALREDICIVMEATGVYHLKVAAYLSREGLNVIIVNPLLAAQYAKSQNQQNKSDKLDARSLQEYGAQLKKYHLFIPDSPEINQLKALLSRMRQLDKDLQRERNRLEKCDFQEGSSWARTSVERQIGNITSEQKLTQQQIDQLINQNHELKQNQKLLRSIKGIGKLTSQWLLPLLSTQRFANAREVAAFLGLVPCHKSSGTSLKTRGRLSGRGDADLRARLYMPAVCAITYDPAMKAFYQQLVAKGKPSKVALTAVMRKLVHVCYGVIKHQTPYIENYTA

SEQ ID NO: 390147 - protein, 427 aa, unidentified
MNYNQNQKLNQLDEGILIIGIDVSKKFHVARAQDFRGVEFRKGIKFDNTLEGFQQFCVWKDLLMKEETKTKVIVGMEPTGPYWLPFARWLQSQGYWTVTVNPAHVKKSKELDDNNQAKTDYRDARVIAQLVKDARFSEPNLLEGIYEELRNAKNIRKVMVNDLKRIKNMMANWLDRYFPEYKRGYANWEAESFLYLLKKYKLPETFAVQNPDEIYEDIKKSFPRGVGIGKIKSLIEASKESIGVKEGTRMASKELDYLLRRYKEIVSDIDNIEAVINGMCEELPEVQKITKIKGIGITTASGMAELGEIKTYQNPKQMIKMAGLALTENSSGQKKGKMSISKRGRKDLRKILYQAVVGMIRTNAAFHELYEYYRYRAKNQLTGKQAIIVLVTKLLRIIHTIVVKDEEYNEGKMMASIRHPEEFVTAD

SEQ ID NO: 390148 - protein, 359 aa, unidentified
MTSTKYIGMDVHKESISIAVMNVVGKIVMECVIETKANMILQCIDGLRGDLHVTFEEGTSAAWLYDLLKPHVTELIVCDPRKNASMREDNQNDKIDARRLAELLRIDHLSPVYHGEHGLRTLKELVRSYLTVTKDLVRVKTRVKAIYRSWAIPCNGKEVYAACHRAEWLEKINELGVRRRAEFYYQELEGLRVLRLGVRRELLAESKKQKAWKRLCQIPAIGPIRAAVLLGILQTPHRFRTKRPLWKYSGLAIETCSSADHRSINGQLQRSEKNSVRGLNRNCNHDLKNLFKGAAVIASSKPGPFQEFYAALLAKGMRPEMARLTLARKIATIVLIVWKKGVSFDAQHLKPQTAFICRQ

SEQ ID NO: 390149 - protein, 341 aa, unidentified
MEKATIIGIDLAKRVFQIHAASKDGRPVLRKKVSRAQLLGFLAKQPPAIVAMEACATAHEWGRAISSLGHDVRLVPPIYVKPFVRRQKNDAADAEAIAEAASRPTMRFVALKTEEQQARSMIFRTRDLLVRQRTQLVNALRGHLAEHGIVAAQGLAQVKVLATAMRYTGSLHPLVRELGQRYLEHIARLDVEIAELDKRLRRPSRDDETAKRLQSMPGIGPITTAAIEAFAPPMATFKRGRDFAAWLGLVPRQHTTGGKPRLGRTSKMGQRDIRRLLIIGAMTVVRWAVRKGAATGSWLARMLAKKPRLVVAIALANKMARSVWAMLSKGEEYRGSALAPA

SEQ ID NO: 390150 - protein, 343 aa, unidentified
MTRFVGLDVSQKLTSICVVDDAGRRLWRGQCHTDPEQIERAVRGHAGDDASIGIETGPMTPWLVHELRERGLNIVCLDARHASAALKMQMNKTDQNDAEGLAQIMRTGWYRSVHVKSLDAHRTRALLGARAQLVSMTTRLSNHIRGVLKTFGMLPGAMRGLPFDRRVEALLAERDDLAAIVRPMLTAWRQLREQIAVFDKAVRALAKKDPTCRLLMSVPGIGVVTVLAYVSTVEDPARFARSRSVGAHMGLTPRQYQSGEVDRSGRISRCGDALVRTLMYEAAVVILSRVKKPSGLKDWAQAIAKRSGIGKARVALARKLCVILHSIWRSGEPFRWSAQPAGV

SEQ ID NO: 390151 - protein, 367 aa, unidentified
MAKFLIVGADVHEEYVMTKWCVDQGKASQISFRMTEAGQNKMIAALHKTAKAAGVKDIVFGYEACCMGFGLYDRLTDASITCHVLAPTRIEKSSKQKRSKCDEKDAQQILEILKGHLLAGNSLPDVWVPDHQTRQDRTIVRRRLELTKKSTRVKAQIRMTLKKADVKRPKELGKGWTKAFRQWLQDICDLEAGVLQYGEVLALESYLRELRFLEEEIELQDHNVAALSRGERYRDACDALCEMKGVGTLTAMVFLTEIGDMSRFSNRRQIAAYLGLAPSSYETGENSDRKGHITRQGSERVRKLLCQAAWCRSSGDAAYARVLARNEKKKKVALVALMRRTAITMWHIARDVQKKNGCFAEFSRVRT

SEQ ID NO: 390152 - protein, 371 aa, unidentified
MEHIRFVGLDIHKERISIAVAESGRGGSVEYLGEIANDPDAINKLCDRLGRSGKPLAFCYEAGPCGYGVYRQLTSLGHRCDVVAPSLIPRKPGDRVKTNRRDATMLARLNRAGELTPVWVPDTDHEAMRDLIRLRSVVRQVVTRARQHLQGFLLRHGHKHERGTAWRMAYRRWLSTLAFEHPAQQIAFQDYVDAVMDAERRLQQVEEQILSLLPEWNQCPVVDALQAMRGIALINAVVLVAEVGDFTRFSNPRQLMAYFGLVPGEQSSGETVWRGGITKTGNTHARRALVEGAWAYRMRPRIGRHKVDRIEALPKVIRDIGWKAQVRLCTRYRRLSARGKNANVVNVAIAREMVGFIWSIACTVQSAPKAA

SEQ ID NO: 390153 - protein, 459 aa, unidentified
MNKVKQHKTSRFEKMPVVNLAAAGIDVGSRSHFVAIGQNTEDVKEFGVYTEDLHTLCKHLVASGITTVALESTGSYWQPLFVLLQQYNLDPILVNGKFTKNVKGRKTDVQDCQWIQKLHTMGMLEGSFIPDLFTEQVRQYYRHRQTLVANAASYINKMQKALRLINIRLDTALRDVMGRSGKDIIEAILKGERDAKVLASLAQPTVKTSKEEIVAALTGDWREEYIFELRQCYEIYQHYHKKIDECDEVIKQIVTAEVQRKQTEENLAKAEGVKIKKKKARKNEARINIQQLAVDLTGGVDISRIEGVGLGLVLCITSETGLDLKAFPTAKHFSSWLSVAPDIKKTGGKVINSRTRKGKGRLARALMHAANAIGNMKTGNYLVHFFKRIERRRGRPTAIIATANKLSKIIWNMLVKKQTYNPIMPKEYLDKIRKREVKNIQRKIKQLNIQEEEIVFATP

SEQ ID NO: 390154 - protein, 326 aa, unidentified
MKVFYLGVDVSKKKLDLCLRSNGKDILYDVIPNDLSSIKSWLTRTFEKFFLSEDSLVVCAEHTGQYTYPLVCATKSIGVYLCLEDAAKIKYCHGIPRGKNDKIDACRIAMYAERYNDCLQPYTASELIIQKLKNLSTERSMLVADRAKYQSQLKDQVDYMEHSIYIAKCNRVEGIINTFTDYIAQIDLEIKELINQAPVIAHQMDLLMSVDGVGERVALKMIMETDAFTSFTDPRKFCCHAGVVPFVYVSGSSQRSKNRVSNRADKSIKHLLHMAALSVSQVKNSPLKKYYDRKVEEGKNKMSVLNAVRAKLVTIMFAVSRADAFF

SEQ ID NO: 390155 - protein, 380 aa, unidentified
MSKIRFVGLDVHAETIAVAVAETGGEVRSLGTIPNKPESVRKLVGKLAPAATLKCCYEAGPTGYVLYWQLTQLGVACEVIAPSLVPTKAGDRVKTDRRDAEKLARGYRAGELTAVWVPDAGHEALRDLVRAREAAKKDQLRHRHRLGKFLLRHGKRPTDAGQAWTQKYVNWIRIHARFEEAALNATVAHYLEEIDHIAERIAKLEVAIDEAVKQAAPEIRAVIEALQALRGIAQTTAATVVSELGSLSRFQNPRQLMGYSGLVPREHSSGNKTQRGAITKSGNAHLRRVLVEAAWTYQHRPNVQGRVLRRQKALALSDEAKKIAWKAQQRLHKRFTVLAARGKNHNRIVTALARELLGFLWAIAVDAEAHCKPAKPAKAA

SEQ ID NO: 390156 - protein, 342 aa, unidentified
MDIKVIGIDLAKNVFQVCVCLMDNSVMSNKKVNRNKLLDKIRQFPEGSLIAMEACGTAHYWGRQFQALGYQVQLIPAQHVKPFVANQKNDANDALAICEAAFRPNIHMVPVKTVEQQDIKALRCVRSRLVQNRTAMVNQIRSLASESGVIFSVGRLQLQASLSRILADNEHELSHTLHHLLKFLYEDLCVLNEKINQIERDIKALCQIQPRYNALLSIPGFGPLVTASFMSELGSGHQFKNGRQLSAWCGLVPSQSSSGGKVRLGSITKNGSSELRVLLIHGARAVGRFASKRDDRLGRWFNALALRQGRHKAVVALANKIARIGWRILTSNDNFDVNKAFA

SEQ ID NO: 390157 - protein, 452 aa, unidentified
MAKLAKKKQTAKGLRLEVVNPNAAGIDISPKEMQVCVPADRDGDNNRTFDVYTEDLHCISEWLRACHIDTVAMESTGIYWLPIFRVLKESGIDVILVNASDVKNYSGRKTDASDAEWLMMLHSYGLLKSCFQPENIARTMRNLVRHRDNLIKSSSREVLHLQKAMEQMNLKLDNVFSDILGKSGQAIIKAILNGERDPKVLSALADSRCKTSKEEIEKSLQATWDEEHLFEMEQSDSLYQFYQQLIAECDAKINEIATRYTAIVDAPKAELLRSEKYNAKKNQIGFDVEMTAFELWGVNAMRIPGMSRGALLRLLGELGADFTTKFADVKHFVSWANLVPNNKISGGALLSSKVPKKKNPVGIIFRQAANTLKAAKNPLGDYFRHMRAKGGHLQAMVATGKKLASIFYLMIQRKVEYDETIYSGHRKFELQNKVAYLQRKLQRMNSELANCV

SEQ ID NO: 390158 - protein, 375 aa, unidentified
MSKANTLFIGLDVHKETTDVAWVSDKSAETVHYHGTIPTNLRSFDKLIKNQIAKTSKLCVIYEAGPCGFWLYRHLLRRGIECWVVAPALIPKAPGDRVKTDKRDAMTLARLARSGDLHSIYVPDERDEAIRDLIRCREDAMLDLRQARQRLKSFLLRHGHPCTGRQNWTEAYRRHLADINFPQSATKITFQHYIHIVTERYERLQRLELELQSLAESWRWYPLVQRLTVLRGVRFLSAMTLLAELGDLRRFASPRSLMNFVGLTPSEHSSGQRERRGGITKCGNSHARRILIESAWAYRFPARVSRELESRQQEHSIKLQTRSWEIQQRLCRRFHTLKARGKEYNKVVTAVARELTGYIWDLAQGFDADMPQQAY

SEQ ID NO: 390159 - protein, 317 aa, unidentified
MNNSVIGLDIAKNIFHMYTFVDNKPKKKKLKRAELLAFFANYPASLIGIEACGGAHHWARELIKLGHEVILLNARYVKSFVVGNKNDFNDAEGIFDAVTRPNKRTVMIKTIEQQDIQLVHKVRQGLVSKRTALVNQIRGLLSERGVIIPQGINQVRKELPLILEDAENDLTVMAREVFAEQYEKFAALDKEIKTQDQRISALCNSNALSRRFLDVPGVGPMTASIVASDIGNGKGYLSSRDYAASLGVVPGQHSSGGKQVYLGISKRGNRYIRTLLIHGARAVLKNCHNKKDNWRAILPHEILGLLSPTFIHIQSES

SEQ ID NO: 390160 - protein, 324 aa, unidentified
MIDGVLGIDVSKNTLDASMSSCNKVRARSFANSPDGWRHLLDWLITQRVRRVHACLESTGRYSLGIAGALNEAGHVVSIVNPAQIRDFARTKLGRNKTDGVDASHIREYCELFKPQPWAPPSEAHRRLGELQTIRAGIIAGLTEWKNRKNSCMIDAVAQSLADVTISHFTSQLSAVDEAITQTIDHDSVLRRKRDLLLSISGVGETLAGVVLAELPGPDVLHSSAEVVAYAGLNPRQHQSGTSIDRVTRISKIGNAVLRAALYMPAMSAMRYNPAIVALVARLKSRGRLKPKQIVVAAMRKLLVLCFGVLKTGKPFDPAIAMGR

SEQ ID NO: 390161 - protein, 341 aa, unidentified
MNTSKTFVGIDVAKRVFQLHWLDAETGKTVSVQIKRERFLEHFADRAPCLIGMEACGGAQHWARQRVAMGHEVKLMPAKVVRRFVGGNKSDVHDARAIWTAVQQPDVRAVAIKTEGQQAILALHRMRQQLVKFRTAQINGLRGLLAEYGEVMPRGKGGIKAGIAEALQRLADRLPAMVIDTLRDQWGRVGQLDAQIGEIERRLRAWQQEDRACRRIARIPGVGLLIATAAVAMMGDPRAFRSGREFAAWLGLVPRQTGTGGRVRLLGISKRGDTYLRTLLIHGARSALTHAKEPDPWIAALRQRRPLNVAVVALANKMARTIWALLAHERTYQKGFASRAA

SEQ ID NO: 390162 - protein, 427 aa, unidentified
MTDHVQSKAYNSWMAIDIAKDFNVVMVETVDGNTKRFRMANSWSDHDRLVEVIRSLPQPCRIGFEATGNYHRTLAFRLVAEGFDVCLISSLASARFREVMFNSWDKNDPKDAGILLELLKRGIIQTYIDPLQSGFHDIQELSKTYYHITLSRTRLQHSILTHYLPLYFPEMGKWWSSTRSSWWVNYLLHFPTPASVMQYSVEEFCAIASPVIGRKVNKAAKLLELYATAQHSIGLPIAEDSVACQTFRLQLRRYQELTAHRQQLEQQAESVLNGHPDYVVLKSVPGIGPIIALTILAEGGDLRRFAHHRQFLKYCGLDLAKNQSGAFRGQEKLSKRGNARLRLALYMATVNSIRQTENSFRNKFHRYTLASPNDADLKRKAITAVMAKMARVIHALIKSSTPYQGYFEALPSGSIPLCGAVGAYRTP

SEQ ID NO: 390163 - protein, 327 aa, unidentified
MQKSKIQRILYCGIDVSGDTLDICFQTSDGELISQKITNDASGYKQLWQLTGLNYQFIMESTGVYQLPLCFFLEDKKARYSVINALQIKRYIQMKLERNKSDKKDAFHICMYGVENKPECYEIPVPLYFECRALNNAIETITTEITSFKNKIHSLSKLEVDSKVIMSGYKKILRDLQAELKKFEVVLYKKLSAWQPDLVKQVGSVVGIGKRATAILIVTTQGFRHTANYKQLISYAGLSPKEYSSGSSIRGKVRICKQGGSLLRHTLYMCALNAKSTNAACKALFDRLVAKGKNKKLAIIAVANKLLKQVFGVVKNGTLFDRGYYGK

SEQ ID NO: 390164 - protein, 395 aa, unidentified
MFIVGIDIAKRSHEAIIIAEDGQVVRKAFSFRNNCTGYNLLLEQVRRLTLVKSQIVFAMESTAHYWLALYARLLKDGYTVMVLNPIQSHSLRELYIRKAKTDARDSLIIADLVRFGRCKASNVPQDKILALRELCRSRAYLVDMAADLKRKLIALLDRIFPEYESLFDSVFSKASIAVLRKYSTPQKVKNANLRKLTALLMESSNGHFGEWKAHQLKEAACSSFGIDDSGGVYSTLLGMFLEQILSLTAQADSLEKQISVFFQEFNNPLTSIPGVGTVLAATILSEIGDITRFSSADKLLAYAGLDPSVKQSGEFKSNQNRMSKRGSPYLRRAIWLASTVAVHRDPMFQTYYEKKISEGLHYMNVIGHVSRKMTAVIFAVLRDGQPYQPILQSAG

SEQ ID NO: 390165 - protein, 367 aa, unidentified
MGRGNAVGVDPHKHTLTASVIDERGGELGTRSFRVSGVGHRDMEAWAVSFGAVVRWGVEGAGGLGRHTAMYLVGRGHDVRDVCPTRTAERARRRRQGKTDALDSVRIARETQADPDIAVAFKRAGPEAALDANAEVMGLWHGARRSILKSRQHLLNESEALLVALPLGLRETLPDTKDVRTRLNALARRDRTQAWDPSTALRLRLLEDHAAAIGALDAKDKEATKELGKLIERVGSTLGGLCGLAEKSVAELLVEAGDPRRFASEGGFARFNGTAPLPASSGEGDGRPVRHRLNRGGNRRVNAVLHRMAVTQLRCEPRARKVFDDARQRGHTKKEAMRILKRHLSDVVYRRMVRDLKPDHEVSAEAA

SEQ ID NO: 390166 - protein, 320 aa, unidentified
MRTSQKTPDTIATIGIDIGKNVFHLVGLDKGGAIVVRQKLSRGQLARRLANIPRCLIGMEACSGAHHIGRELVALGHAVRLIPAQYVKRFLKGHKNDYRDAEAIAEAVQRPTMHFVTIKTPDQMDLLALHRVRSRLVSQRTGVINQIRGFLIERGITVRQGPMPLRKALADILSCGAVSPRIVCLISDLAEDWRRLDDRIATVSAEIEALAGQDESCRRLMSVPGVGPIISSAVVAAIGNGAGFKQGRDFGAWLGLVPKQESTGDRTILGKISKRGNKYLRTLFVQAAHVVLARRPSAAMQRLWPWIEQVHVRWNVGFRG

SEQ ID NO: 390167 - protein, 337 aa, unidentified
MKDFIIAGVDVSKLTLDIFLKPSGQRFTIANSQQGFDQWFKDFIVLLDDEIKVLVVMEHTGQYSRRFEVFLRAHGIDYCKVNALQIKRSMGMIRGKNDGVDAERISEFGWLRRHTLVGDEDLSEPVKKLRSLMSLRQNLVRSRSGMMSRLKEMLSSGDCIKGDDQWHILQGTVDHLSSQIKEVERGMKTLIGSHESLQKTCELLISIKGIGWLIACYMISSTDNFKLFKNARKFNCYAGIAPFTHQSGTSIKTRSRVSHLANKEAKTLLNLAAFSAIRYNPEMKAYYQRRVAEGKNKMSCINAIRSKLVARIFAVAKRQTPYQASNTYNPNNPSLKN

SEQ ID NO: 390168 - protein, 320 aa, unidentified
MAIDRERRVIGHLVVKIEAAKPAVRKVKVGLETGPTTTWLWTELKRLGLPVICIDARHAKAVLKMQINKSDRNDAAGIARIMQTGWFKEVRVKDLDSHSVRALLASRALLVKIKRDLENQVRGLLKNLGLVIGRAKFNVFAVRADGLIENRPELVNAIRPLLEARKAIEQQVDDLDRKVHKLARRDVQVRRFMTVPGVGPITALCFKATIDDPTRFKRSRSVGAYIGLTTRRHASGEMDWSGRISKCGDAMLRMYLFEAAGVLLTRVPKWSGLKAWGAKLTKRNGLRKAKVAVARKLAVILHRMWIDGTEFNWSTKKAAA

SEQ ID NO: 390169 - protein, 353 aa, unidentified
MKKVFIGIDVSKEKLDATIIIKKDEQHEVAGYEMFENNKSGIGKLTSWVKKVTGEPKDSCLYCCTETTGGYDKLLCERLYTKGHRIWRESALEIKRSIGLRRGKDDKADSKAIAEYAMRHEDKAEMFRPADKKIEELRQLYLYRESLVEERKVKITRAKEIKATCGENPSLKFMYKTSMEDAETIGKRIKECETRIKKLIASDAGLSRSYGHVTSINGISLVNGVAMLVFTENFTRFDSPKQMATYYGVAPFRSQSGSSIDHRANVSHFSNSKLKSQITQAALIASVTNAALNAYYERMIEKGKPRGVALNNVKNKLIHIAFSLVKNDCDYEKNHEWKRSQRNEKTEQACYQP

SEQ ID NO: 390170 - protein, 334 aa, unidentified
MSVELQVALDIGSARHRVAIGTSERSEPLEEFDLQHTPADLAQFFERIRRHQQAHSAQVCVAMEGFGGYARPLDTQVLAQGWRLYAINNLKFARFKEIFPAPAKTDAIDARRMLQLMQMRAQLPMAQAVLQEVAPVDGVHRQLKALTRRRKQLVSERMSISQRMQAELHGVAPGLLDITGQADNLWFLGFLTCREDLRKLKTVRRSTLLRLRGVGVSYAAKIALWQKSATFADSAAWVGPMIQADARRMLELREAIAQLEQKIEQLLLHSSLAKRLLSMPGFGPTCASELAAEIGNIERFKAEASFAVYLGVAPLDHSSGKRIGAKLPRQVHGE

SEQ ID NO: 390171 - protein, 427 aa, unidentified
MPYKVAGIDVHKRMLHVVVSDVQVDGEYDFTRRVFGSLPEALHSLAAWLVEQQVQEVVMESTAQYWKPVWGTLERHWKPICQTREGVLATSGTLHLAQAQSNRGRRGRKKDFRDAERLVKRLVAHELVLSFVPDVEQRLWRTVVRTKYQLTRNRVQLQNRLEALLEEAHIKLSSLVSDLFGASARRMLGAIADGETNREALAALADRGLRATQEQLQDALGVCQALNPVYRRLIRMVLDEVASIDKRIEQLNQEMANLLRPHEDQVKRLAEMPGLGVDSAQQVIAEVGATAATFPSEKHLSSWVGACPGDEESAEVNRSRRSPQGNRHMRRILNQAANAAVKHKGSIFEILYRRYVPRLGHNQTIGIIAHKLCRLVWKILHRGIRYEERGPEVTKASKQKRTRKMIHALRRLGYRIEPSPPQSAIPA

SEQ ID NO: 390172 - protein, 360 aa, unidentified
MKQETHEACAAFVGLDWADATHDGCLQAAGSAKREHCILEHTPEAIEAWVCALRQRFAGQPIALCRELNKGPIVFALRKYDFLVLFPVNPLTLARYRAAFTPSRAKDDPTAAARQLALLCTHRDTLQPLTPQSPTMRALEQLVAHRWRVVGDKVRITHRLTSTLKNSFPHVLPWFQDKDTLLFCDVLSRWPTLKAVQLARRSTLETFFREHHVRSADVMTQRIDAIKAATPLTTDEGIIAPHALLVQALIRQLRVTLHAIQAFDHTIAQRAQSHPDFPLFQTLPGAGPVFASRLLVAFGAQRERSVSAAELQRFAGIAPVTERSGKQSWVHWRFQCPTFLRHTCVEWAAESTRHAFWAQV

SEQ ID NO: 390173 - protein, 339 aa, unidentified
MQVTTVGLDLAKNIFQVHGITEDGTIAFNKSLRRAQLLQFFESLEPCLIGMEACGSSHHWARQFQKLGHEVRLMPAMYVKAYVKRGKSDAIDAEAICEAVTRPTMRFVAIKSEEQQGVLFLHRARDLVVRQRTQLSNILRGLLGEFGIVIAQGIGSAVKFAKAVADGDRPRIPEVAIDVLTNLCNQMVALHLRILWYDKRILLEGRRDPKVMLLRTIPGVGPVTASAIVATAGDGHQFRNGREFAAWLGLTPINRSSGGKERLGRISKMGDRYLRRLLVTGMTARLNQMKVNPDRVDPWAMSLRERKPPRVATVAMANKAARIIWAVLTRNERYQPHTA

SEQ ID NO: 390174 - protein, 352 aa, unidentified
MRILALDLGKYKTVACDYETETGRHSFATVATTPKALHDLIVDREPQRVVIEICSIAGWVSDLVRSLGIELQVASTNDERWQWRKVKRKNDRRDGLKLAQLSARNELDLVHVPQSEMRQWRALIAYRQHLVQRRTKIKNHVRELLLREGQLLPRHRSAWTQEGIANLEAMARPFAEVSMDELWRGELEVELAQFKAVQAQLTEVVAKLDALGAANHNVRLLQTASGVGPRLAEAVVTMFDDPRRFRRGAAVSAYVGMVPKQWDSGETERLGKITRHGNRLVRSLLVEVAWCALRHNPWARETYQRISGGKKSRKKIAIVAVGRKLLVRCWAMLRDQTAWRVSEPRAVATGSM

SEQ ID NO: 390175 - protein, 346 aa, unidentified
MEHYAGIDVSLEASSVCVVDATGRIVCEAKAASEPEALIGWLGGLELKLARIGLEAGPLSQWLYAGMKQAGLPVELLETRHVRAAFKTMPVKTDRKDARGIAQLMRLGWFRPVHCKSLSAQETRAVLTARRLLQSKLHDVEMSVRGVLRGFGLKVGPTRPRSFEGRVRELAAGHPTLELVAEALLSARAALVKELTGLERQVRTMARADERARLLMSTPGVGVIVALTYSAAIDDPSRFRSSKAAGAHFGLTPKKYQSGETDITGRISKIGDKEVRCALYEAAHVILTRSLKGSKLKTWALAVAKRAGMRKAKVALARRLAVVLHRMLADGVVFNPDLGGPTAKVA

SEQ ID NO: 390176 - protein, 413 aa, unidentified
MDVILERCAGLDVHKATVTACIRYPGPAGERTQVSHTFGTTTPDLLALRDWLAAHRVTHVAMESTGVYWKPVYYTLEDGIPEVLLVNATHVAKVPGRKTDVSDSVWIAQLLECGLLRGSFVPPPAIRELRDLTRYRKTLIQDRTREANRLHKVLEDAGLKLATVATDVLGASGRAMLTALVEGTTDPGLLADLARGRLRAKLPALRQALTGRFRGHHAFLLTQLLAHLDYLDEAIATLSHAIEEHLAPFAEAAVRLQTIPGVKQRTLEAIIAEIGVDMRRFPTAGHLASWAGLCPGNNESGGKRRRGRVRKGNRWLKAALVEASLAAIRTKGSSLGAVYRRICRHAGHNVAVVAVAHAILEIAWHLLAQGTTYRELGADYLHRRNTEQTARRHVRFLETLGYRVTLEPLSAAA

SEQ ID NO: 390177 - protein, 436 aa, unidentified
MRGCRCSMIMGFNKPIEHFNLQQKKVITTNTLYVGIDVSSKSNVIYLMLPNGDKHSNFSVANSHEGSTQLVKRILSALTSHSLDTVLIGLEATSVYGDNLVYFLREDATLAPFNRKIHILNPKQVKKFHDAYNDLPKNDYVDSFVIADCLRFGRINKEVYMGDYRYKTLQNLTRARFFAVQNLIKEKQRFMNVLFKKHSTMTQEKVFSDTFSTTALAVYDEFESAEVLANMDLHELTDFIIDKGKNRFPDPDAVAKAIQKAARSSYRLPKTVNDSVNQVLSISITSMKALESQIKEFDKAIKAQMELLPNVLISIPGIGPVYSAGIMAEIGDINRFNSQAALAKYAGLAWKQHQSGGFEAEVTRLIPSGNRFLKYYLCEAAFSLVRCDKEYSDFYHLKYKEVNRCQHKRALALTARKFVCLVFRLLKDNRLYCPAK

SEQ ID NO: 390178 - protein, 279 aa, unidentified
MRFYCGIDLHSTNNYLGIYDEEDRAVVSKRLPNDLGVVLESLEPYKAELAGIAVESTYNWYWLVDGLMDRGYRVLLTNPAGNEQYNGLKYTDDRHDSRWLARMLRLGIVATGYIYPKEERPIRDLLRKRMRLVQHRTAHIVSVLNTIARNTGSSLSWSKIETIMYETGEISRFAQVGDYCSYARCVGSVRISNGKKKGENNTKNGNRYLSWAYVEAANFASRLPAGAQIHSTQAGKGQSHIGGESAGAQASAGELLRDERSSGVRPGEIVRVSEPRELG

SEQ ID NO: 390179 - protein, 398 aa, unidentified
MTESSDYESVQVFIGVDVGKDTHHAVAVNRSGKRLFDKALPNDENKLRALVSDLKQHGQILLVVDQPATIGALPVAVARSEGVLVGYLPGLAMRRIADLHAGEAKTDARDAAIIAEAARTLPHALRTLKLADEQIAELSMLCGFDDDLAAQTTQASNRIRGLLTQIHPALERVIGPRLDHPAVLDLLQRYPSPDKLASLGEKKLATQLCKLAPRLGKRLATDITQALTQQTVVVPGTNAAVVVLPRLALQLITLRKQRDEVALEVEQRVLAHPLYPVLTSMPGVGVRTAARLLTEVACRAFASAAHLAAYAGLAPVTRRSGSSIRGEHPSRRGNKTLKRALFLSAFAALRDPLSRAYYTRKMRQGKRHNQALIALARRRCDVLFAMMRDGTFYTPAAS

SEQ ID NO: 390180 - protein, 342 aa, unidentified
MEHTTIAVDLAKSVFQVAVSHRPGHLDEERRLSRDRLLPFFAQRPPATIVLEACGSAHYWARQLQPFGHTVRLLPPHDVRPYVRRNKTDRTDAKGLLEANRNEEIHPVPVKTIEHHAIASLHRLRSTWLATRTARLNTLRGLLREFGIFIPVGAQHVVPHVRALLVEPTPVPMLLHTTLAAASDEIEMLETNMRAVERQLGALAAEMADVTLLQTVPGVGVITATALVALVADIRRFPSGRHFASFLGLTPKEDSSGSRRRLGAISKQGDVYVRMLLTHGARSVVWHAKTAARPTSLQQWAVQTEQRRGRNVAAVAVANKLARIVWAVWAQHRPFAADHRSG

SEQ ID NO: 390181 - protein, 415 aa, unidentified
MSNPLLVGVDVHRQTNTVCLMDLAGHVLGRRRTIDNNRPGAALLVDHLAQQMQAGDFDTIQIAAEATGWYWWHFFQTLSRDPTLQLWPLQLYPLNPRLTANFAKTYVDRDHTDQGDAFVIADRLRMGRDLPPPYQLDARYLAVRLLTRYRLHLVHTLAREKAYALSILYLKASEYGRLKPFGNLFGAASRAVLQEFASLEEIAAVPFDELVEWVDVRGKRRFADPQHNASTLQQVARDSYLLPEALRLPVHQVLSWSLQHVTFLEGQLKRLDGAIAEQLECIPHTLETIPGIGPVFAGGIVAEIGDIARFEYDQAKVAKFAGFKWKKHQSGDFTAEESRLTRTGNRYLRYYFCEAANAVRMHDREYGAYYERKYREVRQHQHKRAIVLTARKLVRLVVRLLTTNQPYQIRRPVSS

SEQ ID NO: 390182 - protein, 345 aa, unidentified
MTKVSMIGLDLAKNVFQVHGVEASGKVVVRRQLRRGPMENFFAELPGCVVGMEACGGAHHWARLLTELGHEVRMMPPAYVKPYVKRNKNDGRDAEGICEAMTRPTMRFVPVKTLESQAVAVLHRTRRLLVRQRTMSANAFRSALTEFGIVAAQGLKGLRSLMQVLEDPASTIPDKARMPLRVLARQWEALNTDICKLEAEIVRAAKSDEVARRLMAIPGLGPIGATAILAAVPDARVFKTARDFAAWLGLTPRQFGTGGKQRSGGISKQGDRTLLTVGATAHLRYERTRDTRDPWLQALLGRRPFKVAAVAYAAKMARIIWAMLVTGEHYRAPNKRRSVPIAAAA

SEQ ID NO: 390183 - protein, 385 aa, unidentified
MSDHSEAFVAFDTSKLRNAVAIADGGRGDEPRFLGEIDNTPAATAKLVRKLAGKYERLTFCYEAGPTGYGLHRQVKSLGHECIVAAPSLIPKKAGDRVKTNRRDAVGLAKLLRSGDLTAVWVPDRQHEAMRDLTRARETAMLDLRAKRQQISAFLLRQGLHYPEDKRTWSKSHLNWLASQKFDIAEHRIVFEELMEAMRQAQGRLDRLEAAIRAAVPDWSLGKLVIALMAMRGLDMISASTIVAEVGDLSRFRTPRELMAYVGIVPSENSTGDKVKRGPITKTGNRRVRRMLVECAWSYQFPPRLSKDKQVKVDAVPQAVREIAWKAQSRLNQRYRALLRRGKLKNVAITAVAREFVGFIWAVAQAVGAAPAANNRTAPAPAPAR

SEQ ID NO: 390184 - protein, 341 aa, unidentified
MTASSPSLFVGIDIAAKTLAAAWLRPGEAVSRPITLTQSPHGFATLHEQLVQTGCPPTEIHVVMEATGSYWIALATTLVHSGYRVSVINPAQAHHLAKALLKRAKTDAIDAQTLAHLAALLQPALWTPPPAVYYEVQQRLAQRDALLDVQRQLMNQLHALLFAPLVVASVKARMEELIDTLGQQITALDAEVREALAADAAWAASAARLQSIKGVGLITAAWLLVTTLNFTICSTPEAAVAYAGLAPNPYESGTSVHGRPRIGHTGNGRLRTALYLATLSAAQHNPVIKAFYKRMRAAGKPAKVARCAAARKLLHIAWAVVCREQDFDPEYAQRQMQPVAA

SEQ ID NO: 390185 - protein, 349 aa, unidentified
MLYTGLDLHKSFSYITTMNDKGQIVGQKKVPSNGKVVEFLKEFGESMEVAIEATPSWYWLYDCLEDEGFEVKLSHPLRTKAIAYAKVKTDKVDSATLAHLLRSDLLPLSYVPEKHIRLNRELLRYRASLVKIQTRIKNKIHTILAKNNLSHDYTDLFGKAGMAFLHSLSMPENYKIALEGYLSVLETVRHEIRGASKKVQQLAEDDQDSMLLMTIPGVGYYSALLIKSEIGDVKRFPSAKQLCSYAGLVPSTHASGNVCYHGHITKQGSRWLRWILIEAAIHAAKRTGPLRRFYYKVERKKGGKVAKVAAARKLLEWIYHMLRDGKTFQQIEKAAEFLGRGEPAKSSGQ

SEQ ID NO: 390186 - protein, 412 aa, unidentified
MLFVGDDWAEDHHDIEIVDETGRRVARQRLPEGLSGVSRLHALIAAAMPAEWAELETGEAAGRVKIGIETDRGPWVAALVAAGYEVFAINPMSTARYRERHCTSGAKSDAGDAHVLAEIVRLDRAHHRPVAVDSEAGEAMKLVARSHQTMIWERTRHVLRLRSALREYFPAALTALGDLDEPDTLALLTAAPDPDRAARLSTSRIAAALQRANRRNVDARAAEIQAAMRAPALRQPPAVQAAFTVIATGEVRLITALNREVDALGEVVAEHFGRHPDADIYASQPGLGVILGARVLAEFGDDPHRFTDAKARKNYAGTSPITRASGTKKKVIARHAKNDRLADALQQWAFGSLRGSPGARAYYDALRARRIGHQAALRQLANRHVGILHGCLKTRSLYNENTAWPDQNTAAA

SEQ ID NO: 390187 - protein, 340 aa, unidentified
MHATMIALDIAKTVFQVYGEDAARRPVLRKRLSRAALTGLFAKLPPTVVGIEACGTAHHWARTLTAMGHTVRLIPAAYVRPFVKRNKTDARDAEAICEAMQRPSMRQVPVKTVEQQAGRGLETARDLLVRQHTQLMNSVRGLLAEFGIVGAQGRRGFAVLCTRIEAGDPAIHPVLLPALQTILEQWHGTGRAITELEARLVARAKADATMRRLMTVPGIGPLSAHAIVAAIGDGRQFSAARDFAAWVGLTPRQHESGNRRHSGRISRQGDQGVRRLLTLGASAVMRQARAKPQRATAWQRGILARRPVKVAVVAQAAKTARIAWAMLRSGHSYRAAGAAA

SEQ ID NO: 390188 - protein, 457 aa, unidentified
MTGTNKPVQSRAMSPIHPRAAAIDVGAKMHVAAVGPDRASEPVRTFGTFTDDLNRLADWFQECGIETIAMESTGVYWIPVFEILEQRGFEVVLVNARDAKHVPGRKTDVSDAQWLQRLHEFGLLRASFFPKGEIAALRAYLRQRERLVELSATHIQHMQKALMQMNVQVHHVVSDIMGVTGLRILRAIVAGERDPGVLAANRDRRCRADVETIQRALTGNWRAEHLFALEQALALYDACQEKVTDCDRKIEATLKRIEAQSAKPVGKPPPARSTKRQPNALDFDVRTALHAVLGVDLTQIHGLGPYLALKLVGECGTDLSAWPSAKHFTSWLGLAPSNKISGGKVLSSSTRRTNSRASSLLRLAAVTVGRTDTALGAFFRRLSSRVGKAKAVTATARKIAVLFYNALRHGMDYAEPGASYYEERYRQRVLTNLQKRAKSLGYVLQQADAAPAANGVS

SEQ ID NO: 390189 - protein, 333 aa, unidentified
MRLVLVRYIMNEGSSYMSVVGIDVSKADFHACLLQDGTKARKSFPNGPRGYGQLRSWLRNRKCSQVHVCLEATGAYWLGVAQAMHEAGATVSVVNPSRTALFARSQLRRTKTDAADAEMIAQFCQTQQPSAWTPPAREILELRALLTYREHLVSEQIRFKQLGKDLHLDAQLTKLHAQQLSTLAEMTAHVGHQIRSLIKAHESLQHAVNALEQVKGIGPVTAASLVAKLPAQRLRDGKAAAAYAGLCPRERQSGTSVHGKPRLCKTGNASLRRDLYMAAVAAIRSNPILREFAQRLHERGKPSKVVIAAVMRKLVVLAFHIIRKTTQTAPIAV

SEQ ID NO: 390190 - protein, 477 aa, unidentified
MKKKGSGNLPAREAKPKRRRRNKGMCLEDRPVLEPNAAGIDVGAREMFVAVPPGRDENPVRVFPTFTEDLERLTDWLEQCGITTVALESTGVYWIPLFEILEQRGIRLCLVNARHMKNVPGRRTDWHECQWLQFLHSVGLLRAAFRPGQDICAVRTLLRHRNELLSAASQHVLHMHKALTQMNLQIHHVISDITGVTGLAIVDAILAGQRDGAELAKLRDSHIKADSETIRKSLEGNWRPEHLFTLSQSRDLYRIYQQQIVKCDLKIETMLSEFEPRIDPTKNPLPPDQKRNRAGRKRRRKNGHPHPEFDLRTETYKLFGVDVTQIPGLEENALPLFSEVGRDMSRWPTAADFVSWLALCPDNDISGGKVLWRGTRRVKNRAGHLFRMAAFSLHHSPTPLGNYLRRMKAKLGPKGATMATAHKIAVIFYTMVKKQVEYDPTIWNARDTQREKRFEAKLKRQAKQLGYELIPIEPKAA

SEQ ID NO: 390191 - protein, 368 aa, unidentified
MERYVGLDVSLKQTSICVVSQTGSVMREGVVDSDPEVIAAFVRSKAPGAVRIGLETGPTATWLWTELKRLGLPVICIDARHARAVLKMQINKSDRNDAAGIARIMQTGWFKEVRVKDIDSHSVRALLASRALLVKIKRDLENQVRGLLKNLGLVIGRAKFNVFAARAEELVEDRPELVAAVRPLLEARKAVEQQVCNLDRKVLKLARRDAQVRRFMTTPGVGPITALCFKATIDDPTRFKRSRSVGAYVGLTSRCHASGEVEWSGRISKSGDAMLRSYLFEAAGTESLGDAARQAQWPLQGQSRRRAQACDHSAPHVDRRNRVQLVEEGGCRLASITGSQSSYHTVGKDVPAGTMAMVSSTDFVRASE

SEQ ID NO: 390192 - protein, 388 aa, unidentified
MIYFGIDVSKYKHDCYILTEFGDVINEGFTFKNNAEGFGQLQKELEQCENNEIRIGFEATGNYGINLKLFLERIGFDYMEINPLLVKEYIRSNTLRRTTTDKLSAKAIANYLNDKAYRPNPNAFYPTFALKQLTRLRNNLASERSRHLVQLTNVLDCIFPEFKPLFGNKFSVTALYILAHYPSPETISNMNSRSYDTLRRISRGKFSMDKFVKLKSLAKNTVGVFDKCYGVELKTLIDLYSHIDSKITQLEAEITHTIVTINPPTLSVKGIGAVSAAVIVSEFGDFSRFSHPDKMLSFAGLEPGYFQSGTSEHNGRMVKRGSSSLRNVLMNCSRSIKQHNEVFAAYYLKKRNEGKPHYVALNHVAKKLVRLLFVLETKDVMFDPDKLR

SEQ ID NO: 390193 - protein, 392 aa, unidentified
MPQQHCRFEASRSLTALEQDSTIIAVIEMNQSKWLVAALVPGVKRHPVKKLDVQEEGLLKLLHRWRNEAGQAGREIKRIVVAYEAGRDGFWLARWLRERDVEAYVIHPTSIAVSREHRRAKTDRLDTELLMRAFLGWLRGEKRHCSMVAIPTIEEEDARRPNRERQNLVTEQTRIVNQVKAIFARFGIRTFRATLRRTEEKLKDLRTAEGTPLPDNTRAELCRHLARLRVVREQIRAMEQERVRKLVAAPAAEKGSPAMVQLIARVLGIGIETADMLVNEVLSRRWRDHKALARYAGLTGSPDESGKRRRERGLARAGSARVRCGMIQFAWRFLRFQKDSALAQWFAARTTDGRGSTRKTMIVALARKLLIALWRLVEKGEVRQGIVLRPAQ

SEQ ID NO: 390194 - protein, 396 aa, unidentified
MPCDVRHRGRPHIGAKSPFSEVRTFDTTTKGLLELSDWLSERGCTHAAMESTGVYWKPVWYVLESSFELVLANAMHIKNVPGRKTDVNDAMWIADLLAHGLIRGSFVPPTPVQELRDLTRTRKQLVREVAQHTQRIQKTLEDANIKLTGIISDVLGKSGRAMLEALIAGETDPEKLVALTSRRLKATRAELVEALRGRIREHHRFLLKLHLGQVDALRTAVREVEARVGETLQPFCDLAELLTTMPGVSDTVAHVILGEIGIDMSRFPSAAHLVSWAGLCPRSDESAGKRRSTRVRKGAPWLKTVLVQAAWAATRVKDSYLRAQFLRLKGRRGPMKAIIAVAASMLTAAYHMLRDGVAYQDLTASYFDTRDRTKLAKRLIRRLEDLGLTVEVRAAA

SEQ ID NO: 390195 - protein, 325 aa, unidentified
MQTQTHYTGIDISKSFFDVAFLEAGCYTYNKFSNNRAGFKSLLKILPTGSQVVMEASGPYYIQLAGFLHDEGIAVSVINPLVIRRFSQMRMSRAKTDKKDAKMIAEYGKMERPALWQKPKQHVITLQQTETLLARLHIERTALSNQLESFDSSGMLIKQLRKEINSELAHKDRLIKTLAAQMEQIAQAHYSDMLANLESIPGLGKKTAMMLAVLSGGFTRFDDYRKLSSYIGICPRIFESGTSIKGKARICKMGMSRIRATLYVCAWSASRCNKACRELYERLLAKGKAKKLALIAVANKLLKQAFAVATQKTKYNENYSNIICF

SEQ ID NO: 390196 - protein, 342 aa, unidentified
MYYIGLDVHKKTISYCVKDVSGQICQEGKIGATRCELDGWMRTLPQPWTVAMEATIFTGWIYDHLLPHADGVKVAHPLMLRAIAAAKKKNDRIDAGKIADCLRCDFLPECHMASTEIRDRRRTLRYRHLLVRQMVQMKNRISGLLMETGVSYNKQRLHKVGYFRELLSTNQEIDESIRPLLRLSRDTIVRLQKTEYALVSSLQRDPLLADRIKRLRTVPGVGPIAALTWALEIGDVARFRSIRHAISYCGLCGDEKRSADKMMRTPLSKQRNKHIQRVLVEAAKLAPRQDHDLALVYEKEKLKGNANRATLAVARKMVAWLVAVDRGARDFVPAEEHRHTAA

SEQ ID NO: 390197 - protein, 375 aa, unidentified
MHYVNNTELSSHEETRCQFNGGPGAIKFAEGRIRPVCGLGIDVHQDFYVVVEQMGGSNPKPPQRFQKEAFLHWAARLKQKSGAQVYAVYEACGFGFALQRKLSALSIKCYVVCPQKLDEQNRRVKTDGLDAKALCLKLDRFVQGNRDALAIVRVPSEEEEQARAIHRQREQLVKARKQLEAQGRSLMVNHGLEPVQNWWKPRTFAALAAPQWMKELLQNSQPILIALQEKIAALTVQLQSAASPDQPRGLGKMTSVIIDREIGNWNRFNNRRQIASYTGLCPGEYSSGNTRLQSCVTKHGNPRLRAALVELAWRLVRFQPDYKPVRKWRQILAKGALATGAARKKAIVAVARQLAVDLWRIKTGRLSAEELGLIN

SEQ ID NO: 390198 - protein, 323 aa, unidentified
MSTSSESPSRCYVGIDVSVEHLQVAVWPAERRQSVLYDHTGVAELVGFLQALKPTRIVVEATGTLEIPLVAALAAAELPVVVINPRQIRDFARALGVLAKTDRIDAWVLARFAESVQPPPRLLPSEQQQAMQELVSRQRQLVEIRGAESNRLRRTRTKAVRHNLQIHLSWLDKQIQQIDRQIRQLITESPLWRQKDQLLQSVPGVGPKLSSVLVAHLPELGRLNRREIASLVGLAPFNHDSGQWRGKRFTGGGRSKVRCTLYMSSLAAAYHNPVIRSLRQRLQHQGKPFKVILTACMRKLLTILNAMVKNGTPWNSALCRISS

SEQ ID NO: 390199 - protein, 410 aa, unidentified
MEVSVSRGCGLDVHQATVVACLLTGEPGKLPRKQVKTFSTMTSGLIELRDWLAAADCTAVAMEATGVYWKPVYNILEGHFELIVANARHIKAVPGRKTDVKDAEWIADLLRHGLLRSSDVPPPELRELRALLRYRVKLVNARSGERNRVTKLLESCNIKLSSVASDVFGLSGRLMLDALKRGQASPEEMAELAKGRMRSKLPLLKLALEGRMEDHHRHLLSIQLDRLDRLDRDLKQMDAKLESKLKPYERQMELLDGIPGINWVTAATVIAEIGIKMSQWPTVGHLTSWAGLCPGQNESAGKRGKSNIRPGNPYLRSALVEAAIAATCAKDSYFREKYYRLKARRGHKRAVIAVAHKILIAIYYVLSSETRYQELGADYLERLEPERLKRNLVRRLERLGYQVNLEPKRA

SEQ ID NO: 390200 - protein, 389 aa, unidentified
MTYFVGIDIAKFEHVASILDSSSGELIVNSLLFDNNIKGFNLLLSNLSMLNKEDVVIGFESTAHYHLPLFNFLNENNWKCVLVNPIQISRFRKISIRDTKNDNIDSRVIDNFLLLEHKHLLEEEFYNNELKELCLQRHFLIESSTRLKIKLTSYLDRVFPELQTTIPKGTLHTMGVRAILKKFPTAKLISDVRIDHLVNIAKKASKGRYKESMVIKIKEAAKSSIGFNSIGLALKIKQSIESLESIERQIDEVESIINSHHTIINSPLHQIKGINSIEIAYIISAIISINRFSSDKKLIAFAGLDPKVRQSGTWEAKSTRMSKRGNRLLRYALIWTANNTRKYPSKMKDYYNKKRSENKSHYNALGHCAAKLCRYIFFILNNPNVEFIN

SEQ ID NO: 390201 - protein, 394 aa, unidentified
MFLVGIDIGKLSHMFCILDASNNEVIVKPVSFKNDKLGFDFLIDQLKSYPKDHLLIGMEDTGHYHFTLLKFLLDSGFSVALINPVTTDLTRKIQLSSTKDDDLDTLTICDVLASNQRRKSYRISKIDSFDLYEQKRLTREHHDLKEQLNIYTNKLQKCIDIVFPEFNSLFRSKYGSIYMNVLKTFGSADSIAHADIRNIRKCFETNRRGRRISLTPEALKEAARNSIGFPSKAEVIELRHLIDIIELINVQISEVDKKIEEFSVQNNSPILTIPGISHFSGTSILAELGDLRNFSKVAQVIKFAGVSPSKYKSSQYEAQHAAITKKGSRYLRKTLYQVILPVIRYNPVFNAYYHHKLSQGKGHRCAQGHCVRKLLRIIYHLVTTDQSFDPKLLR

SEQ ID NO: 390202 - protein, 316 aa, unidentified
MAELSTPTNIGIDVSKDWLDISVLPTQQTWRIPNTTEDIQKAIPTLKALHPERIVLEATGGYENRLALQLYAAGLPVARVNPKRVRYFARSLGLQAKTDALDGKALALFAERLKPPLTRFPSEKEQSLSMLLTRREQLSTMLVAERNRLETAPAKIRPSLEEHIAWLKDKIAELDCEMDELIQNDPEFKEKCALLTEVPGVGQKTAAKLIADVPELGACDRKQIAALVGVAPYNRDSGHKSGQRFISGGRADVRAVLYMATLAAIRFNPVIRKIYQRLLQAGKKKKVAIVACMRKLLTILNAILRHRTHWNPTSTS

SEQ ID NO: 390203 - protein, 309 aa, unidentified
MAFLHRPPINCLGVDVAADSLVISDGRTVANRRTTIRALLKTAKPDFVICEPTGGHEFQLLEECLKAGIACHRADTLKLKSFIRSFGTLGKSDAIDAAGMAAYGRERWQSLPLWQRPDPDEQHLQMLVRRRTGLVAFKVAEQNRSKAPGAKTLAASFKAMLAFLGRQITMIDAAIAAIVARNQVLKRRAAICTAMNGIGFCTAAALIALMPELGFIDRRQAAALAGTAPHPNESGLFKGQRRIRGGRPEIRTVLFMPALRAAAAKGEFATFYKRLVTNGKKPILAIAAVMRKIIVTLNARLRDDCVLQS

SEQ ID NO: 390204 - protein, 462 aa, unidentified
MKIYLSGDVSKGYADWTILTEKKHAVLENFQLDDTYAGHCKLYSILEEYFRKYPDLEMYSAVESTGGYENNWYNTLKGYQKVFNIKVARLNPLGVNFSRKAGMKRNVTDAISALSIAEYMINHPENIEYDQDEYWKFLRRHWNFVEMQKKQRVQTINQLETILYSANPTLMRFKNDEFPNWLLELIILCPTAKKLAKAKPERLAKIPYLSLERAKELVVEAKQTIASAIDKNAEMLVKQIVLQIKDYDMNIKSQMHLIEQEFICPEIDILKSFKGIGTTSAIGLLLEIGTIERFPKVKGFSCFFGLHPKFKQSGDKIIGIRMSKQGSKNMRKILFNITKGAIVFNPLIKELYEKKVSEGMSKMAAIGVCMHKILRIIYGMLKNKQKFNPEIDKQNRERSKEKQQEKQQQENANIEKSRRYQEFDSKAPISRKQNKKRKEYDLSQCELNAHSTGSTHSHLIPC

SEQ ID NO: 390205 - protein, 387 aa, unidentified
MIPEALTCTAVLGLDVGKTAHWACCVTRLGEVVANRRVANAEKDLDELFSQMAAGTLVVVDQCRNIGALALARARAAGLAVAYLPGLAAHQAAKLFAGEAKTDERDAFVIAKTALGVPDALLPMAEPDERLEAARSLASQRDHLVTCATRDKNRLRSILLESCPAFEALADLSDAGWLSMLEKLGGPWGVADAGRASLGAATRGANRARINEALSAALASTRPSEYRIKAENPQVMTLARRIREANEEASRIDGAIAGLLAEDGTYACLLTVPGIGPRTASELVIAIRIEDFPDHDHLASYCGIAPKNRQSGTSISSVCASRQGNKRLKNLLIFSCNSLVRSNNRFGDYYRSCRGRGMCHGEALKAVARKRLKVIYAIMRDKVPYTA

SEQ ID NO: 390206 - protein, 367 aa, unidentified
MEKSSKVFVGMDVHKESIDITLAEVGGEVRRLGQIGGDRGSLLKMVRKQQSQGGERVFVYEAGPCGFWIYRELAALGERCMVVSPALVPKRAGDHVKTDRRDSERLASLARAGELEAIHVPDIRDEAIRDLVRGRDDAVIAQRRVRQQLKALLLRNDIRYVGKTSWSGAHRRWLSELKLPEPAQQIVFEEYVDAIAVATARIERLTRAIESEVTTWRFAPVVAALQAMRGIQFVHAVTLIAELGDLTRFGSARQLMGYLGLVPREDSSGEHRRQGSITKAGNSYARRVLIEAAWAYRHPARVTRIIATRQTGLPKAACDIAWRAQLRLSAKYRRMNARHLHHNKIVVALARELSGFVWAIGHSVRPQ

SEQ ID NO: 390207 - protein, 341 aa, unidentified
MHSRKQQVAVLDTTTGEVLEHELHDGDAVEHFYRALRPPVTIGIETTGYTQWFHGLMHRLGHTVLVGEAAKIRAMVVRKTKTDRRDARHLLDLLKHGRFPTVWMPDPDTRDLRALVAHRVRLVRMRTMVKNGLQAIALNQRLAVGSKLWSQRGLSQLRALDLAPHTRRRRDDSLELLTWITSRIDQLDDQIADVVAHDARARLLLTHPGVGPLTALTTVLVLGPLARFPDAKHVVSYIGLAPSIRASADKQHLGKITKQGNALLRWVLGQAAPLAARADDDLRCRYFAVLHRRGRPKARVALARKLLVRLYVMLRDHVDYDEFRRRGRAAAHAPHVAMPNR

SEQ ID NO: 390208 - protein, 407 aa, unidentified
MDLLKTVFGIDVSSRKSNVCIMVNGQKVNDYAISNDMVGFNQLLGDLKQVTKPQIIFEATGVYSRRLQAFLDMHELRYVMMNPLEAKRKTKDDLHQNKTDKLDALYLAKLQSEHPQRLAYVQSKEYQELMANNRIYEQASHDLITNKNRLHKAVQLTFPEIEHLLANPRGKNYWSIALRFPHPDIVLETKEADIIDFLKGLSGIGKKRANDITQSLIRLAKVACPAVKKNSAHIRGLKMAINNILSAEEECQTALQEMAKLAPKRDLEILTSIPGIGENTALRIISELGDIRRFNNPSQLNAFVGVDPQVYESGNLTAHLSISKRGTAIGRKVLYLAINQIQSAKKAGNPCHIADYYEKRKRSSETASHKKAAIASIHKLLRTIFALIKNDQLYSYDVAKHNQRLLS

SEQ ID NO: 390209 - protein, 351 aa, unidentified
MIIIGCDFHTRYQQIAMANDETGELLLERRLDHQSGEAHTFYRNLQGPVCVGIESTGPIHGFERLLAELGHELWIGDAAKIRASEVRKQKTDERDARLILDLLLAKRFPKIWVPTPDERDLRQLLWHRHKLVRLRTMLGNQLHALAMSQGLCRKKALFTKKGRMELLHLALAPWASWRREELLKLLEQLAAPIAELERAVMEEANRREDAVLLMTHPGIGPVISLAFVLAIGPITRFCRSKKIASYLGLNPTEHSSGGRRRLGAISKQGNTMVRWLLIEAVYPAVRKDPALRQDYLRLKFRRGHAVAKVAIARKLAVRMYWMLRSGAAYAQLVRMQGSSGATLMDASPSLG

SEQ ID NO: 390210 - protein, 451 aa, unidentified
MSRPQVIDDEEHERVHERVAAVDVAKDSGVVCTRLPHPSRPGARQSTVWTVRARMGAVGKLGRQLKDSGIELVTLESTSDYWRIWFFVLEACGLAVQLVNAAQARNLPGRPKTDKLDAMWLARLTELGLLRASFVPPAAIRALRDYTRARTRLVQERTRCYQRLEKLLEGALVKLSSVASKLTTESAKDMIKAMIAGERDPRVLAALARTRMKARHDELVEALDGMFDDHHGELARMLLDQIAFLDERATQLTARITAAVAAMPAAWGVDGDGTAGPDAGTGPDAAVLPAVQRLAEIPGISPDLARAIIAETGLDMSRFPTAAHLVSWAGLCPSARQSGPRTRAGKKGQGNTWLRGSLGQAAIGAARTDTFLGERYWRIARRRGKAKAQVAVARSILVIIWHLLADPAARFTDLGAGYYQARTDKDRKIKNHIRQIEALLGHPITITPKAA

SEQ ID NO: 390211 - protein, 426 aa, unidentified
MMTPDDIDVWVGLDVGKSAHHAHALDHDGNTLYDKPLKQDEKAIRTMLGKLSKHGRVLLVVDQPNTIGSLPLTVARNMGIAVAYLPGTAMRRTAQLLPGDAKTDRRDAHVIAWAALKLPETLRDAGPDDETLAALKLLAGHDEDLAHESTRHVNRLRSLLLQTHPAFERALKGERITRDATLALLERYGGPMGVKRAGIEDVKDWAKSNGLRAGRIIDDMFKAIGEQTVTVPGTLMAETIIPSIAHDIKTIRDRRREVDRQVEKLLEDHPLLTVLTSMPGIGVRTASNILLGIGGDIANFKSSAHLAAYAGISPATGQSGTSIKGERPSRRGNKRLKNALWQTALVASTKHPQTRTGQTPQRRHHLPRASALRRDLQHAQKRNPLPGTSPRSLNRATRERTPDATGRAKRAHDSQPESRHVNSPRS

SEQ ID NO: 390212 - protein, 418 aa, unidentified
MSVLNSLFVGIDVSKNSNQVYAMNFDVKKLLSFSSPNDTEGASKIENKLLECLVKNNYENIVIVLESTGMYSFHIATYLSSSEALLKYNVLVYCIDPKTSCNYRKSFSEMDKTDPKDAYILADMARAGKVNKLNPVKGPQKLAMQRLTRHRRHISEQIVREKLYVLNNIFLKFSAFDRKYDGIQPFSDPFSATAQEILLEYKSPEEIINTPIEDLTSFISTASKNRFADSKKVAEILTKCARMSYRLDKTAYEPINTAIASSLAILRCLDKEIKHIDKEIATLSKGYNSDEYTCLISIPGIGPVFAAGILSEIGSIKQFDNEEALAKYAGLTWRRHQSADVEHEDTPMTKTGNSYLRYYLCEAASMAVLHNPVYKEYYQKKFAEVKTHQHTRAIALTARKLVRLIYGLLSKNQLYKNQ

SEQ ID NO: 390213 - protein, 342 aa, unidentified
MEIVYVGLDLGSSAFQQVAIKTDGSIKVNRRFTTSETSLRTAFSDMHGEIHVHLEAGELAPWAASVIAPLVTRVVCSHPKDNAWIAKDADKCDRIDAYKLAELLRLNRFKEVRYAPDQPRRNFKQLVQHYDEMTAQQARLKTKLKARLRMQGVIVTGERPFSSKGRKEVLARVESRELRTAVTQLYAVLDQSVTAQEQARLLMLRAAQAFPEIKLLRTVPGIGPIGACRFSAYIHTPSRFSSKRKLWKYCRLSVSHRSSNGKPLRRPRLDRSGCGRLKDVSRKAFDVAIRSRQDNGFKRTYQRALETTHDKSHARLTVQRKIVSTLRAMWLTKTPYCDELNR

SEQ ID NO: 390214 - protein, 344 aa, unidentified
MGEVSTIGLDIAKSVFQVHGVDVAGAVVIRKRVSRAKVLEYFGELPPCLVGIEACPSAHHWGRELQALGHTVKLIPPSYVKAYLKRSKNDANDAAAICEAVTRPSMRFVPIKTKEQQTALMLHRTRQLLVRQRTMLSNALRGHLAELGIVSAKGRNGTGELLGIIADGADSRVSPAVRSILEVLARQHSAIGIEIASIDKGIMALHRGCEASRRLAEIPGIGPVGATALVAEIGDWKTFSSGRSLAAWIGLVPKQHTTGGKDRLGSITKQGNRYLRWLLVVGAMAVIRYARKHGTEKRPWLGRLMERRPTKVAAVALANKIARMAWAIMVRGERYKEPKLSLAA

SEQ ID NO: 390215 - protein, 360 aa, unidentified
MTSLAHTHPFVIAVDTHARTHTLVILVAGTGEPIATEQFPTTDAGLGRAIAWSARRTGGDLATLWVIEGIATYGARLASAVHRAGYNLLEATRMDARAHRGTGKSDPLDARRIAAAVLPLEPEQLRRPRSDNGTRAALRTLVTAREHMTTERTATVNALTALLRVADLGIDARKPLTPSQIGEVARWRTHSEDLATLTARAESVRLAKRVVALNEDLAVNHNQMTALIRESKAAELLDRTGIGPVTVAVVYAAWSHVGRVRSEAAFAALAGVNPIPASSGNTTRHRLNRGGDRRLNRALHMAVITRMTRDPDTRTYVERRRAEGRTTKEIRRSLKRYLARQLYRTLERLHAEPNSYPQAT

SEQ ID NO: 390216 - protein, 430 aa, unidentified
MRKKNQLVFKMEAITPFTLVVGVDIAKHMHWARFTDHRGLECYKTMSFDNSKIGFDAIVSKIFEICKHKSFDKVVVGMEPTGHYWKPLANFLMKQENIKVVLVNPFHTKRLKELDDNSPTKSDKKDSFTIARLVKDGRYFECYLPNDVYAELRVLSTARLGIIDRKKALENKITAVLDEYFPEFVSVFKCPYLGKVSMHMLKICPLPKMVLKLGFDKLLIECKKVVKGCVGKKRVSQFLEAAKNSIGVDYGVVATYYKIRYMIEDLELMNKQLDNVGLEIEKSLEKTGISKYCLSIKGIGILSLGACLGEIGEPLRFDNARQLWRLAGYNLIENSSGKNKSGTIISKRGRKNLRCILFQMSLVMITVNDEMKQLYNYFTNRDKNPLKKMQAMVVVSKKILTLIFILSKKKEYYDPSLVFGNVRKSQLEVA

SEQ ID NO: 390217 - protein, 331 aa, unidentified
MNYSHFVGLDVGKKTFDASLMSAAEKELSHKSFDNTPEGIQSLLDWIAGYHLSLSKLLFCAENMGSYVTELSVSSVSMGFSLALVCPLTIKKSIGLQRGKNDRIDAKRIANYAVLHYRKLELYKLPNKDLVRLRGWIIIRDNLVKQKVSNIKLLETFSQMAKLADVTESISFLEEQLKSIKEKILEVEEDMEQLIAASTSLYTNYLLLRSIKGIGIINAIVLLCVTDNFQRFDNPRKFACYCGVAPFEHTSGISIRGKTQTSPLANKEVKVYLTRAAITAISWDPQMKAYYKRKIAEGKHKASVINAVRAKIIARSFAVIRRQTPFVTLAV

SEQ ID NO: 390218 - protein, 387 aa, unidentified
MSATASGVAQTAIDVTLAAIFVSLELSRDRWMITSLSPGKGEKMSKHSVDSCDVTGLLSHFKTLRAKAQARTGKNVPIVVIYEAGLDGFWIHRVLEREGIESHVVDAASVLTSRRRRKAKTDRIDGEALLRTLLAYKRGEPRVCAMVRPPSPEDEDRRRLCRERKTLVAERVAHVNRVKGLLFAQGISDYEPCRRDRRERLEQLATGDGRPLAAHLKAQLSRELDRLELTLQRLKAVEAERDALLAPKGEAAPAPVAALAGLRGIGPEFAAVLWLECFVRPFSNRRQVAAYAGLAPTPWQSGSVRHEQGVSKSGNPRLRTTMIQLAWLWLRSQPMSALSFWFKDRVKRDGGRGKKTTIVALARKLLVALWQFVSSGVVIEGAVMKTA

SEQ ID NO: 390219 - protein, 449 aa, unidentified
MSDIPTSSTQPEFGALIGIDWGDKKHAWALQVGDSTKIEKGDIEHTPEAIQQWAVGLRQRFPTGRLAVALEQSRGPLVFALSKYEHLTLFPIHPTSAAEYRKIFRPSGAKSDGPDAVLHLDMLARHRDKLRPLNPDTPETRALQLLTEDRRQLVNERTRYSNRLTANLKSYYPQVLQWFDDLYAPVTLDFLDQWPTLEELQKAKPGVWSEFFQEHNCRDAKTQQRLAAIPMAVTATTDFAVVTAGRAGVCAAVRLLRNLNQAIQEYDRQIDQLAKGHPDFAIFQSLPGAGKVMVPRLIAAFGTQRDRYQRAADIQQYSGIAPVTEASGQQLWVHWRWGCPKFLRQTFHEWAAQSIAQCDWAAAYYRVQREDKNKSHHAAVRSLAYKWIRIAFRCWKDRQLYDDSEYELALKTRAKATPEPKQPSAFPLPLRWISCAGFQKLAEKNEENT

SEQ ID NO: 390220 - protein, 409 aa, unidentified
MRYYLGVDWADASHMVWAMDETGDKVLSRTIEHTPVALSEWGRQLDEWQAQGIEVWAAIERPHGMIVDFLLDHGVSVFPVNPKALDRARDRFRPSGSKSDPFDARVLADFLRTDHARLHVLRPSSSEAQELKWLTDDFARLTRQQTRLLNQLTATLKAYYPLAVTMWSDLTTQVARAFLHAYPTPEAASRLSSRRWEQFARAHRLSAARREALWAQVQALQIPMPATVVRAKARLAGVLVGQLDALVPALAAYQTEIERFFEHMPAAAWARTLPASKTGTTVPTLWARLGDAPGRWSSWHHLQACAGTVPVTERSGKYTGVRFRFACDKQLRTIIDRFAFLSLRTSEWAQGYYRRQRARGHGHRRALRALAAKWLKILFVLWSRQCPYDETHHLATMARQELRRTVVIA

SEQ ID NO: 390221 - protein, 367 aa, unidentified
MLYLGIDQHKRQLTVNLRGEDGTVILQRQVSTQWEKVRAFFADLAEKSGPEGGFLAILEVCGMNPWLLEMLREYGCRETVVIQPTERSKQKTDRRDAGVLSHLLWVHRQDFLEGKHPLGVRRVVPTTPQEADDRQLTALRARLTKKRTAVLNGIHKLLRKHNLEQHSPAKKFQTQKVRRWLAEIALPALDRLEMNLLLPQWELLDEQLQAVEARLAERAADDEQVKLLESMPGMGHYSAVAIASRIGNIERFKRPDSLANYFGLTPGCRNSGEATQRLGSITKRGSKLVRYLLGQAVVNILRFDATMRGWFKRIKKRRGAKIARVAVMRRMTTILWHMLKKKQKYRYDGTLKKHQEFVEYEGATEAA

SEQ ID NO: 390222 - protein, 419 aa, unidentified
MTTNYQVAAGLDVHKRFIQATILWINETKKQRQFPRTHEGLLGLKDWIIEHKCDVVACESTSDFWVCIYDILISHVLVIVGNAHDIKVMAHKKTDKIDAEKIALLALKGMIAPSRVMPRYHRDFRKLVRLRHFLVGKRTDIKNRIHSILDGELFQLSLIFSDMFGVSGQRIMEGIQRGSSVEQILQSIPPWVLAKKENELRALIEQNVSPNAMIQLGHCLRVVRQLDEEIEMLTDEALTYVLQKYPREYTILKSVPGIGNIAAITLIAEIGNFSDFISGNKLASWIGIVPKVYQSANHIVKCSITKRGSRIARWIMTEVAHAAIRQRKNVFREWYEEKKAVIGSGKAIIAVARKMTTIIWHLIVNDEEFINKYNEPEQPKSKKVHTIHIPVSKNYTVEQVLALVADAINFLNKSDPDPI

SEQ ID NO: 390223 - protein, 391 aa, unidentified
MIFVGIDVAKDKHDCFILNSEGTVLADVFTIANNRIGFETLLSRIQSCSQGESKIKVGLEATGHYSYNLLGFLLDSGLATYVINPLHTNLYRKSLSLRRTKTDRIDARTIAMMLMSDVDLKSYSNTAYHNEELKSLTRYRFDKVKERAKLKSSVARLVNILFPELEKLVSSLHIAVVYALLSNYPGASYIANANIEELAETLCTASKGRYTKSKTAEIQVAAGVSIGSKMPAKSMELKHTIALIRELDKEISEVESAIDKITSQMDSPIFTIPGIGRHMGAMILAEVGDFSNFASADKLLAYAGLSPSTYQSGQLQNCYAHMEKRGSRYLRYALFNAAKYVCLWCPTFSAYLEKKRSEGKHYNVAISHAAKKLVRLIFAMQRSGKAFLADY

SEQ ID NO: 390224 - protein, 276 aa, unidentified
MENIALIGIDLGKNSFHIHCQDRHGKAVYRIKYTRPKLIEFLATCPATTIAMEACGGSHFMARKLTELGHIPKLISPQFVRPFVKTNKNDFVAAEAICEAASRPSMRALHRVRESLVQDKVKTTNQMHAFLLEFGISVPRGGAVISRLSTILGDSDLPQYLSQLLLKLQQHYHYLVEQIKDLESQLKRKLDEDEVGKRLLSIPCVGTLTASTISTEIGDGKQYGSSRDFAAATGLVPRQYSTGGRTTLLGISKRGNKKIRTLLVQCARVFIQVLSH

SEQ ID NO: 390225 - protein, 354 aa, unidentified
MVAQFPTRSIPSAAVRRDRSAALGERLIAQPLFPLPFAPKTVLAAPVFIGVDVSKNWVDIADTQGRKTQVANEYSAIKAALAGPWSSCANMVCEATGGYERVLMRVARQAGLPLRRVHPNRARAFGQATARLAKTDALDAQLLAKFAAFTVNEPWAPQPEPRVQELADMVARLTQLTDLHHSESCRAKLAAGVAIKKSIHAVAKVIKAQIDAMQEAIEAFIAADRQLGGNARILRSCKGVGPKSAQAILAMLPEIGKLNRRKIAALVGVAPITKKSGSSINHASITGGRKALRDILFMAALTASKHNPTFKVFYQRLRANGKPHKLALVAVLRKMITTLNAMIGSRKMFSPALT

SEQ ID NO: 390226 - protein, 314 aa, unidentified
MSQEKYIGMDVHQATISVAVTDSRGKLIMESILETKAATILEFIRGLHGSLSVTFEEGTSAAWLHDLLKPHVTHLVVCDPRKNALLKDGSKSDRIDARKLAELLRGNQLTSVYHGEHGMRTIKELGRSYLTITKDLTRVMSRIKALYRSWAIPCSGTSVYAPRHRAEWLGKIPEPGVHLRAERFYQQLDLLQPVRQQARRDLLTESRKHHAVKLLRQIPSIGPIRAALLVAQLQTPHRFRTKRQLWAYSGFALETHDSGEYRYVRGKLRRNRERMTVRGLSDNHNPDVKNLFKGAAISASTHPGPPVRFLCCSS

SEQ ID NO: 390227 - protein, 333 aa, unidentified
MEHWIGIDVSSATLDFALLDEKGTHLESAQVDNERKTVMKLMGAWRKRYGVMPERSLICMEATGHYTLMLLNMVVAQQWRAWLAHPNDILQSMGIKRVKNDKVDALRIAQYARTFHEKARLFTAQNLKLDRLKHLITRRKHLVRSRARHRTHITDLNRYMDRQVRIEFDRMDERQIKLEDKLVAHVDDLILDEIKADPQTQRQYDLLRTIPGVGPQLAAYLVAFTDGFARFNTPRQLSCHAGVAPFERSSGSSVRGRTQVSHQADKSLKTLLHMSALVSVREPGELRQYYERKRAEGKKPILVVNAVRNKLVHRICAVIRNNKPYEVRTVAAN

SEQ ID NO: 390228 - protein, 310 aa, unidentified
MDAIVVGIDVSKNRLDVAVRPTGEVFAVVRDAEGLDALVARLKPLAPVAVAVEATGGYETVVAASLAAADLPVVVVNPAQVRSFAQALGKRAKSDPIDALVIAHFVEATRPEIRPLPDAETRLLGDLVSRRRQIVGMITAERQRQKILTGKRLQRSIARLLAALQKELSSLETDIDQAVRGSPAWREKEDLLASVPGIGKIIARTVMAELPEIGTLDRRQIAALVGLAPWTRQSGTWKGKSFIGAGRAAVRDALFLGAMVAARHNPELKLFRDRLVQAGKPKLVALVATARKLLTILNAVIRDRKPWQPA

SEQ ID NO: 390229 - protein, 436 aa, unidentified
MFVGHRFRTDPDELDTLWARLPKDAERIEVVMEPTRNAWVALAAWFRRHGATVVMVPPEQSADLRDYYNKHTKTDRLDSKVLARLPLLHPEGLHREDSLGPGDELKRAVKIRSGLVHRRTACMARLDALLEILGPAWIAALGSDMTLTALRFLARYANPVQVKRLGKARLAAFFRRSSRQAWADERADAVIEAAATTLRLWGADGGELDFDALAADIAAEARLALTLTDEINGFDKRIGALYDKADPAGIVRSVPGAGRVCAPQILGRLGDPTRFANLAAVRSFAGLVPAADSSGQADGHRGPTKAGDCCLREALFIAADHARKVDPTLAVHYQRLMLAGKHHDSAVCTLAAVLLTRIAACLRAGTHYLLRDTDGRVITEAQGRAIVAERYTVPPEVRAARRKVTPHRHLRRNERNERAKTGVATRSKASPVPQPA

SEQ ID NO: 390230 - protein, 351 aa, unidentified
MSEHIAFDSHKRYTWVDREDHSTGKSTGHRLEHAPGAVRKYLNGCEPGTAVAVEATGNWYWIIDEIEQAGLQPRLVHPRKAKLMMGQINKTDKLDAQGLNRLQRNGTLPTVWIPPGPLRDLRELTRTRLVLVAQRTRLKNRLSATLAKWGTPASEYSDPYGKRGRAELENHLQRLPEQTRWVSGQLLAQLDFVSGQVRQLEQRLEELVEITPEMQWLLTMPGVGVILAATIALEIGEVQRFPSAMHLASYAGTTPRVHASGGKVRYGSLRADVNRYLKWAFAEAANSVAVNHKSHPERHVSQLYQRLRQRKGHPKAIGAVARHLAEAAFHVLRQKQMYQDPSLGRGRTSEV

SEQ ID NO: 390231 - protein, 296 aa, unidentified
MRNAVGLDISKLTFDASAMVGNAEYSAKFDNDSKGLDQFSDRLKSLGCQNLHICMEATGNYYEEVADYFAQYYSVYVVNPLKISKYAESRFKRTKTGKQDAKLIAQYCRSAKESELVKRQKPTDEQYRLSRMIAAYAQIKSECAAMKNRHHAAKDEEAAKAYAQIIKAMNEQLEVLKEKIKEQTEKPNCKEGVKRLETIPAIGRMTAAVLFHHLTSSKFETSNKFAAFAGLSPQQKESGTSVRGKGKLTKFGNRKLRAVLFMPAMVAYRIRAFPGFIARLEEKKKPKKSHHRSIDA

SEQ ID NO: 390232 - protein, 316 aa, unidentified
MSAPASVGIDVSKARLDVHVRPAGTAFAVANDPAGIAELVARLTPLGCGGIVLEATGGPEVPALAALAAAGLPVSAVNPRQARDFARACGRLAKTDAVDAHTLALFADRLPPPVRPLPDEQTQALQALLARRRQLLEMRVAEQNRLASARGAAVRKDITAHIAWLTKRGDARDADLTAAIRASPVWRAKDDLLRGVPGVGPVVARTLLADLPELGALTGKQIAALVGLAPVARDSGTRRGQRHIAGGRAGVRSALYLAALSAGRYNPALRAVRDRLRAAGKAAKVALVAVARKLLVLLNAMIRDGRPWNPELVKSA

SEQ ID NO: 390233 - protein, 336 aa, unidentified
MNIKRIGLDLAKQVFQLHAVDHQERVVLRKTLHRARMLTFFTRLEPCLIGIEACGSSHYWARELTRLGHTVRIIPPQFVKPYLKGNKNDANDAEAICEAVSRPGMRYVAIKSEAQQSMQAEHRVRARLIHDRTALSNEIRGMLGEFGFGLPAGLSALRKALPEILSQQEKWDNRFIRLLSELTEELQALDERLNRYDRRLKQLAQEDERIRRLQEISGIGPVTASALVAAVGDAKQFKSGREMAAWLGLVPRQHSSGGKTKMGHISKRGDSYLRTLLIHGARAVLNACDHKEDRRSRWLQSVAERRNRNIATVAMANKNARIAWSVLSRGEEYRVM

SEQ ID NO: 390234 - protein, 414 aa, unidentified
MRIVYKKVAGLDVHKKLVVAATSVLEPDGRITQEKRNFETMTADLLGLSDWLMSHGITHVAMESTGEYWKPVFNILENNFEVLVVNAQHISKVPGRKTDQSDAEWISELMQFGLLKASFIPPVTQRELRELTRYRSTFIRERVNLVNRVQKVLESANIKLASVATDVMGISGRAMLEAIVQGNINPEAAAELAKGRLRQKREQLAKALEGRVKPYHQFVLSELLCQIDSLEETIARFDEQIEVYCRPFEEAVQHLDTIPGVSRQAAEVIISEIGTDMSRFETADHLAAWAGVAPGNNESAGKRYSGKTRKGNKPLGIILNQVAHAAVHAKNTYLSAQYHRLAGRIGKKKAIVAVEHSILIIAYHIIQRKEPYQDLGGDYFDKRRPEATAKRLIQRLEKLGYQVMLQQQPINSIM

SEQ ID NO: 390235 - protein, 369 aa, unidentified
MGKSNTRQTTPIEDLFSPPPQAEELEPESLLYDYGIGIDCHSRFIQVCVLVLHEKKLVRHEKEFGTPSYELINARGWIREVLSKYELDASDFHYTLESTGCYHWPVIHAFEGHPHVVNPLLAGHTRRKTDKLDARLLARQGITGMWPESYIAPWPVQELRMLMGHRTNAKRQSLRTRNRIGGILLRHGYTFHVTLRMNESKSLAIIEDMLDGRTDSRQLSPTARPISEVCTEMMRDLIVVWQGAEDTARRYLRRVRDQLHKTFFHFGQDEVDGKTALKLLKSVPGVGDIAAITYLLEVVDGRRFPSSKAVAAYGGFDPSLKVSAGKVTAHVRRKGNQLLHTALFAVGPDRNAGPVGAARPLGLLNFQKA

SEQ ID NO: 390236 - protein, 415 aa, unidentified
MQTIYQRVAGLDLHLKTIVACVRVIHDSGKVKEEVRTFGTMTDDVLKLLDWLTVAGATHVAMESTGVLWKPIWNLLEASDLQLLLVNARELKQVPGRKTDVRDCQWIAQLLACGLLKSSFVPAPPQRELRDLTRHRTQLLGERTRCANRIHKVLQDANIKLSSVASDILGVSGREMLAALLRGEDGPEAIAELARGKLRKKLPDLKRALAGRLTPHHQFMLEQLLDHLVQLERQISRFDERIAEALRPFVDEATFERLDAIPGVNRPTIECIVAEIGVNMNQFPSAEHLASWAGICPGNEESAGKRKRGRTTKGNVWLRRALAECGWAAGRTKHSYLGAQYRRLAARRGRKRAVLAVGHSILTVIYHLLKDPTIAYQDLGEDYFAKLDPIRLRRHLVKRLESLGYKVNLTLKEVA

SEQ ID NO: 390237 - protein, 342 aa, unidentified
MNIQTLGVDLGKNSFHVVGLDTQGTPVVRRKFTRAQLLRWIATTPPCLIGMEACGGAHHLGHRFAACGHTVRLMPAQYVKPYLKTNKSDFLDAEAIAEAVTRPTMRFVPLKTVEQQELQAEHRLRSLWVRQRTATVNQARALLLEQGLTLPKRIGNFRRQLPRILEDAENGLSVRLRALVDCLFQQVREFDARIDGATQELTARAQNEPACQRLLTVPGIGPLTATAIVAAVGNGQGFRRGRHFAAWLGLVPRQYSTGGKPKLLGISKRGNRYVRMLLVHGARSVLRTAPKRQDALGRWLQRLSTHAHPNVVTVALANKTARVAWAILTGESTWCAERVAAP

SEQ ID NO: 390238 - protein, 320 aa, unidentified
MASRESLFIGIDVSKQTLDVAFGADPHAPRETIPSTDEGVQLLVTRLQRLQPTLIVLEATGGLERMVFAQLLQAGLPTARVQPRRVRALAHAEGRQAKTDRLDARLLARFAERVRPPHHQATDEQRASLRDLLVRREQLIQMRTAEINRLTAAAPNLRPGIQQHIDWLDQEIRALEQERDNEAERTDEVRRKRELRDSVPGIGAITALNLLLRLPELGTINRTEAAAFVGVAPYANQSGAQHKPRHISGGRRDGRSVLYMATLAATRRRLVRRAFDQRLCQAGKPRKVAIVAAMRKLLTILGAILRQQKPWDPAVHTSAP

SEQ ID NO: 390239 - protein, 333 aa, unidentified
MQDLSTKQHFVGCDVSKDTLDLALYQPKTDYRKFEHVQISNDTEGFKQLLQWLKARKIKKNEVAIAFEHTGAYSIALAEWLHKKKITFSMLHPLDVKNACSRGRNKTDEVDAKFIADYAYTMREKLAPSGPEPKNIKHLRELRNERDLCVRCRASYLCQIKVQTEAQTIVRMHKMVDFMTVQIHQIEEEIKKIIAADETIATNYHLLISIPGIGMVNAVNTIVATGNFTRFQTSRQYAKFCSVSPMAVQSGTSVHSGNHVCKKGHNELKATLSEAARSAIIHDPQLRHYYQRKRSQGKSHGCVMNAVKFKLICRMFAVIKRQQPYVNTECYRG

SEQ ID NO: 390240 - protein, 403 aa, unidentified
MPDTDIRVFVGVDMAKREHFAHAVTVEGDELFARSVTNDEAVIEQMIDDAAEHGHTAVVVDMTASGAQLLLSIAARREVPVAYVTGLQMRRAAQLYAGSAKTDPRDAWVLADYARRPTDQLVWLDVSDELLTRLRVLNGRDVDLDGDATRARNRTRDALVAVSPALERVVGPRLHQGGVRGVIIKWPTPTTLRQAGKTRIRNTIKKRSPRLANKVTDEIWAALDAQTVTLPAEATWGDVISDLLSDLERISGQRDELETVIDEVFLSHPLGKVLVTLCGFGPRTGARTLAEIGDPNRFATGSRLASYAGLAPIDWRSGTSTNGSFHSRGGNHRLKNAMFLAAFVATRHNPDAKAYYQRKQDEGKKHNAAVICVARRRCDLILAMLKTATDYDVNRHTELQKTA

SEQ ID NO: 390241 - protein, 373 aa, unidentified
MKKRSSSKQSPKRVAKANHKQEPITIGMDLGDKNSCYCLLGSDGQVLREGQVATTKKAMMQVFSSIVRARIAIEVGTHSPWVSRLLQGLGHEVIVANPRQVKLISDSSRKDDRLDAQTLARLARVDPQLLRPIRHRSEKAQADLMIIRVRAALVEARTGLVNTARGLAKSLGERLPICDADQMGVEQAKSLPAELRQALEPLLQEVESLTEKIKESDRKVEQIARKDYPETELLRQVSGVGPLIALTFVLTLEDKSRFQKSRDVGCYVGLRPRRSDSGESQPQLRITKEGDSYLRKMLVQGAHYIVSHRGPDTDLKRWGLHLAERGGKRAKKKAVVAVARKLGILLHRLWVTGEVYEPLRNQKIKQERKKIAA

SEQ ID NO: 390242 - protein, 333 aa, unidentified
MNKITLIGMDTAKAVFHLVGVDAHGHYTWRKQQSRSRLLSMLAQIECCEVVLEACGASHHWARRIKALGHTVRLIAPQHVKPYRRGQKNDYRDAEAIISAALSPGMHFVGVKRVDQEAEQALHRVRSRLMSNRNAAANELRGLLGEYGVVFGCGFKPLREGARSFAETEEAHTLGLVELVNDVLEEIGVLQGRMDHYERLIEQRVQADEISRRLREELSGVGKLSASALRVKVANVHDFGGGRHFAAYLGLAPGHSGTGGTVRIGHIKRGHDRYLRQLLIHGARSALRHLGDKQDAQSRWLRGLLERRGFNIASVALAHKNARQAWAIMAREP

SEQ ID NO: 390243 - protein, 429 aa, unidentified
MNVQSMPFASNIFLGVEAMLKIVYPICCGIDIHKTFVVACIASTNSKGVTTYQTKRFSTYTKNLRELSDWLAANNCMDVCMESTGKYWHPVWNVLERTCRPVLAHPKYLKAIRGKKTDKKDAKWIADVFKHDLVSGSFIPPEIIRKLRDLMRYRVKLTCYTSGEKNRAQNCLTTSNIQLDHAFTDVFGKSATRILNHILENPGKNFDVAPYVHRGCKTPIEEIQLAIDGDISPEQAEKLKIIRSHMDSLELCKANLESAILFLAEPLLPQVILVSSVPGIKDFSAIAVIAEIGFDMSVFPTAKHLCSWAGLAPQCNESGGKKKSSRVSKAGAYIKPLLIQCSNAVVKSDKHPEIKNRFLSIKKRRGHKKAIVAIARMLLTAIFHILSKSEPYNPDLYRHSDASPVDPIEQAVKMLEKRGFIVSQPVVNS

SEQ ID NO: 390244 - protein, 346 aa, unidentified
MMIIGCDFHPSWQQVSWLDTETGETGEHKLVHAPGEAEKFYRQWSAPVLIGMEATGNSQWFVELVEDLGHEIWIGDAAQIRASYVRKQKTDKRDAAHILKLVVEGRFPKLWTANREQRDLRQLVQHRHKLVEIRSRVKNELQHLSLNKGMQKKCKLWSAAGQRLLRELPLKLWAACRRGDLLGLLAMLDQQIGKLDVAVEQAAEENPQARLLMTQPGVGPNTALAYVLTMGDVARFARGKQVASYLGLIPREESSGGRQRLGAITKQGNRMLRSLLVEAAQSAVRYDPQFRKQYLHRCHQKPKGVAKVAAARKLAVRLYWMLRTQVGYPEIVHIESSSRVALVGAS

SEQ ID NO: 390245 - protein, 337 aa, unidentified
MNVSLIAIDLAKSTFQVCGVNRQGKELFNRAISRKKLTALIAQYPGIPVAMEACGGSNYWARTFQQNDHEVLLIPPPHVKPFVKGNKNDRNDAFAISEAARRPKMRVVTPRSLEQTDMILLHRIRERRVRARTALMNQMRGLLSEYGIVLPAGAATLRKALPLLLEDAENGLTMAARRYIQDLLNEWRDLDERIQADKHSVHVMARESPAACRLMKVRGVGDMIATAALAKLGRGDQFKNGRQFSACLGLVPREHSSGGVQKLGGISKRGDDYLRRMLIQGAWSVIHYAEGRQDRLSRWAMEVKERRGKHKAVVAVANKLARIIWALVRHETTYCPA

SEQ ID NO: 390246 - protein, 404 aa, unidentified
MSKSVFVGLDWAYRSHAVCVIDAHGGVLKHLSVDHDAQGLAELLRSLAAFGKALPIAIERPSGLIVDALVEAGHQVFAIHPNAVKASRPRYRATNAKSDAGDAFMLADLLRTDGHRWHALQPQSPALRALRTLVRTRDDLVNTRVRLANQLTALLDTYWPGATCIFAAMDSPIALAFVEQWPTARKLTARQIAAFCKRHAYSGRRSPGALLERLEAAAPSACAPRLAQANAMAALALVGLLKPLIAQIKAFDGHIAQAMDWLPQAVSVMSLPRTGCICAAQILAELGDVPERFASAQQLCSEAGVVPVTYASGKSRAVTFRWACNHRLRRAITCWADNSRHASPWAASVYNAARKRGCDHPHAVRILARAWTLVLWRIWTDGTTYDPNVHARARLIESEMTQRG

SEQ ID NO: 390247 - protein, 444 aa, unidentified
MRAIGLDIHRDFCEVAIAEGGRVRGAGRVGTAPAEIEAFARGLGSDDTVTLEATGNALAIARILEPHARVVLANPKATKAAARLRAKTDRIDARTLAQLLASGFLPEVWTGDEATHALRRRVGRRVHLVRQRTKAKNQVHAVLLRNLAGRPPVSDVFGTRGRAWLERLVLPADERETLDACLRTVDFLDAEVAALDRALAPLVLGSSDMRRLLTLPGVSATTAATLAGVIGDIARFPTPARLVAYLGLDPRVSQSGNDAAHHGRISKQGASEARHVLVEAAWVATRTAGPLRVFAHRLAARRGWNVAIVAVARKLTVIAWHMLTRGEDYAFARPVLVRAKLREIELRSGAPRAKGHSIGVAPTAAERQLERELAAAAEAAYERLVKDWVPSRKQVREPQAGRASHDAERQPARQGSAPALRFGSASLPHQRDYAPDLGPRQDAT

SEQ ID NO: 390248 - protein, 342 aa, unidentified
MYYCGLDLHAKSSTFCMVTRRGRRVREGEVRSSRRGFREIVESCGGEPLRVVIEASTRTRWAGGVWERLGAEVIVVDPRKVRVIAETKHKTDRTDARILADLLRTGALPKPVWRATAETREIRDQVRLRWGLVRERANLMLRSRSLLASVGIELGKRALASEATWERVLKRRDVPAYLKRLLEILRASIGHLSEAIASVEQEYAPRLSDPVVRRLQEIPGVGPVVALTTVAGLGDPGRFRDSRAAAGYTGLVPSERSSGGRRRQGHITKQGPSELRRVWIQAAQAALRSRHHPLGGWARSLIYRRGRAVAVVALARRLFRWAFAIWRDQKHYDVKRALGVVR

SEQ ID NO: 390249 - protein, 368 aa, unidentified
MKQVTTYVGIDAHKKDLFIAMLIGQEKTPVTWQLANEPKAVRRLVRKLEREAPGPVSAFYEAGPCGYALQRQMTTSRVSCDVIAPALIPRKPGERVKTNRRDARKLVELGRAGLLTAVQPPTPADEAVRDLARARDDAREDLQRCRHRLGKLLLRRGLHYSGRNWTRGHRQWIDSLTWTHAAERAVVDDYLLAIDHTEARLIELDAHLAKMAETDPYREPVGWLRCFRGIDTLTAMLILAELHDFRRFASAPALMAYLGLVPGEDSSGEKHRRGRITRTGNALVRRLLVEVAWHYQHRPHLGVALARRRKDQPARVIGIADKAQQRLCRRFGKLTAEHKPAPKIAVAIARELAGFLWAALQPVAIPAR

SEQ ID NO: 390250 - protein, 447 aa, unidentified
MAIVDDRGQLVAKRRIGDNAAGLRSLLEMLAEHGDAAENLIPVAIETSRGLLVACLRATGRHVYAINPLAVSRYRERHTVARAKSDHADAVVLANILRTDAGHHRPLPSDTELVRAIAVLARSGQDAAWRRQQLTNQLRSVLREYFPAASEAFKDTKSGLASAEARVILAAAPTPALAAKLTKTRLRRLLIAAGRQRNIDVWVDRLHDLFAAEQLRQPPRIEAAFGEHARALIMQLDAACRAVEHLAQATEAAFTEHPDAEILTSFPGVGILTGARMLAEIGDDRSRFSDARGLRAYAGSAPVTRASGKSIAVMQRRVKNQRLAAVGYVWAFAALTASPPARALYDRRRAIGDGHAAALRNMFNRFLSQLHHCLATGQKFDPERAFQRTMIASQPKHGGFDTGNTCALSAIGCLTPCRRKGVNFRPPLTSATGWWSACFGHVHGRGR

SEQ ID NO: 390251 - protein, 346 aa, unidentified
MVESKIIAIDLAKDVFEVALANTAHRVVSRQRLSRAKLRALLESHPPALVLMEACGSAHDWGRRALAAGHQAKLLPAQYVRPYRRGNKTDRADADALLEAHRCEGIKPVPVRSIEQQQIQQLHRIREQWKRTRVQRINGLRGFLRELGHAIPVGAVTAQRYAREIIDGADFPPALRASFTVVLDEIKVLEANSRELEKQLAALTKHNPAVRLLSKISGVGLLTSTGLVAAAGSPHHFQSGRHFSAWLGLTAREFSSGSTRRLGKITKRGDTYLRTLLIHGGRAVLNRAKQMQRAGQKLNRIQQWAVQLEARVGYNKASVALANKLARICWATWKYERDFDPNFAVR

SEQ ID NO: 390252 - protein, 316 aa, unidentified
MAETWFVGVDVAKATLDVGFVRAEEETTSQVSNTSVGWAELVADCKERSVERIVLEATGGYERRVVAELMAAGLPVVVINPRRARDFAKATGRLAKTDPLDALGLARFAEAIRPPVRPLPDDNAAELQEKLARHRQLVQMRTAESNRLAHATSEAIRKSIHAVLKLLDQQIEALDKDIEQRIEESPAWRDKDRILQSVPGIGPNTSHALLCNLPELGQCTRQQIAFLVGVAPLNRDSGKMRGVRTISGGRGHVRQALYMATLVASRHNPLIRKHYQHLLQLGKKKKVALVACMRKLLCILNAMLRHRETWNPVFST

SEQ ID NO: 390253 - protein, 366 aa, unidentified
MKKSLIYVGLDVHKNSIVIAMATRSDGAVVVRTIPNDGAMLWKVLGELGATQRLRVCYEAGPTGYGLARRLNAWGVCCIVIAPSRIPREPGQRVKTDRRDARKLANLLRAGLLTEVKIPAAETEAMRDLERARDDAKNAERAVRHQLDKFLLRHGRSWSKTKWTRLHWSWIKQQAFPAEASRRVLADHMRAVEEATARIERLEKDIEELVETWSLAPLVRALQALRGIRLISAVIVAAELGDVAQFIAARKAMAFLGQVPSEDSSGERRRQGRITRTGNGHVRRILTEAAWNYRFQPRPSRAIRKRRESLPPEIVRIAEKAEQRLSRRFRHLVDKGKSSPKAVAAVARELTGFVWAIAREVRSQAA

SEQ ID NO: 390254 - protein, 417 aa, unidentified
MAEEIEWFVGIDWASQTHQVCLVDAHGECLGERAVAHGGPGIEELCDWLITRTGATPEVIGVAIEMTQGPIVEALLERGFCVYGINPKQLDRFRDRFTVAGAKDDRRDAHVLGDSLRTDRHAFRRLSNDEPVIVKLREWSRMADDLQQERNRLASRMREQLWRYYPQMLELADDLAADWFLDLWSRAPTPAMAVRLRETTIERFVKAHRLRRWQAPEVLSTLKQKPLSVAPGVVEAASDHIRTLTVRIRLVNQQLKAAHRKLDELCAQLIPSEEDEPGQQCEQRDVVILRSMPGLGRIILAVLLAEVWQPLRRRDYHALRSLSGVAPVTRRSGKTRVVVRRYACNKRLANALYHWARLATQHDALSRRRYAALRRRGHSHGRALRTVADRLLSVACTLLEQQTLFDPTYEVRDAASG

SEQ ID NO: 390255 - protein, 313 aa, unidentified
MSQNNLPILHVGLDVAKLSLQLHLAGRFHTLANDRKGHAQLLKHLRVYPNAHVVCEATGGYEQGVVRVLQTASIPVSIVEAGRVRYFARAQGQRAKTDPIDAAVLSEYGATFQPAATAPASSQQRQLADLAQRRRQLVQMLVIERNHAEHYIDPFRLSQSRQLVKTLEKQIGQCDEAITQLIAEDGQLAHKAQRLKAIPGVGPVVAATMLAEMPELGTLTTQTAAALAGVAPYNRDSGGQNGFRRIGGGRSAVRCALYMATLSAVRHDRILKEFYLRLLAAGKKPLVAMTACMRKLVILMNRLLKNNDFQLAH

SEQ ID NO: 390256 - protein, 416 aa, unidentified
MNTDWTQYAYFAALDWASDHHDVIVLDRLGAVQVEFRFAHTAAGWAEFTQRMHPFTGAPITLETSSGPAVDQLLQRGWTVYPVAPTAAARYRERKVPSGTKTDRHDTWALADALRTDGHAWRPLRPQDEATATLRALCRDEIALIEQRTALVNQLQAALREYYPAALAAFDDWTTPHAWALVLQFPTPAQLQAAGKRRWEKFLHTQRLWRPQTVAERLKIFATAQALPASAAVATAKSLLAVSLVKVLITLQAQLDEYRRRITEAFRQHPDHDVFGSLPGAKATLGPRLLSEIGSVRAEYPDADALMCQAGVSPVSYQSGQVEKCRLRRACNKVLRATVHLWANASRQTCAWAQAYYQHKRSEGHSHASALRCLGKRWLKILWRLWQKGQVYDEAKYLAQLNHRQSLTWTKLQPAL

SEQ ID NO: 390257 - protein, 391 aa, unidentified
MTILVGIDVAKDKHDCFIMNSEGEVLAKPFTIFNNKEGFDFLYEKIQSVSSSDNIKVGLEATGHYSYNIIGFLLNKGLATFILNPLHTNLYRKSLSLRKTKTDKIDSKTIAMMLLSDVSLKSYSDISYHNEDLKSLTRYRFSKVEERAKLKTSLSRLAQILFPELEKLVPTLHMTSIYQLLEEFPSASAIASVHLTRLTNLLSKASKGHYDRETAIKIRDAAKNSIGSNMPAKSLELKHTIKLIRALTIDIGEIEAEISKMMDMIASPITTIPGIGRNIGAMIISEIGDFSRFSSPDKILAYAGFSPSIYQSGKLDNCYAHMEKRGSRYLRYALFHAAKLVCHWDKTFADYLAKKRAEGKHYYVAISHAVKKLVRVIFHIEKTKQAFLKAS

SEQ ID NO: 390258 - protein, 360 aa, unidentified
MRTITIGVDLAKQVFSVCSVNAAGRVQERQDLRRDAFIQLLPGIPAGTTIAMEACSGAHHWARRCQEYGLEPRLMAAQFVAPFRKSRTAKNDRNDAEAIATAARQGNMRFVPIKTVDQQVRLSWHRAREGYKTEALATSNRLRGLLAEFGVVVAQSDGALRRRLADLDALSLPPLLLELLRDIATHWQQLRERIAQADRRIQAHAKADEACTRLCAIIGVGPITADAVIATIGSAQAFANGRQFAAWLGLVPMQHSSGGKSRLGRISCRGDGYLRTLLIQGARSSLQRAKVVTLEKATPEQLWIKELERRLPFGKVLVAIANKHARQLWAMLARGEEYDAEAWLKHPMVQRPARRTKRST

SEQ ID NO: 390259 - protein, 417 aa, unidentified
MDTIYSSVAGLDVHLKSIQCAVRCRQETGKLFQQVRSFGTMTRDLRALADYLQSLGVTHVAMEATGVLWKPVWNILDGHFTLLLINPRHIKKLPGRKSDVSDAEWIAQLLEHGLLRGSFVPPRAVRELRDLTRHRAQLAAEHTRVANRIHQVLEDCNIKLGAVASDVLGKSGRAMLRAMLLGEQDAEQLAELALGVLRKKLPQLRLALEGHCTEHHRFLLERLLSHLDYLEEQIARFSTQIAAGLKPLLPAAEQQRLDTIPGVNRTTIENVIAEIGPDMTVFADEHHLCSWTGICPGNEESAGKRLRSRTRKGNRWLRRALAEAAWAASHTKDTYLAAQYRRLAARRGKKRALLAVGHSILVIVYHVLTHHVEYHDLGGDYFDRLEPERLKRYLVRRLQHLGFDVALTAKQPDDRAA

SEQ ID NO: 390260 - protein, 397 aa, unidentified
MYIVGIDIAKRKHEAAVIDGEGAVIIKPFSFTNNCSGYNRLLAMLAKAKLPLDEVSFAMEATGHYWLALFTRLQKEGFRVQVINPVQTNSIRSFYIRQAKTDPRDALLIAEVIRFGHFSESTLHPENIYELRELCRGRHAIVSMQADVKRKVVALLDQVFPEYETAFTNMFGDTSMAILQACPTPKELSEMPLEELCHLIEVSSHKRFRMAKAQELQALARGSFGFAMAGDVFSTMIRLYAKHLDFLKQQVREMDRKIAEIMDTLDTPITTITGIGPTLGAYILSEIGDISRFSSAAKLAAYAGIDPTMRQSGEYNGVRNRMSKRGSPYLRHAIWLAASSAVLHDPALKLYFQKKRDEGKPYMASVGHACRKMVSIIYAVMRDNKAYTPCIPNEISA

SEQ ID NO: 390261 - protein, 343 aa, unidentified
MQTITTIGLDIAKSVFQVHGVDANGDVVVRRQLKRRYVLAFFQKLPPCLVGIEACASSHHWSRELQALGHTVRLMPPAYVKPYVKRQKNDAADAEAICEAVTRPNMRFVPTKTPEQQSCLTLHRTRHLFIRQQTAVINSIRAHLAEFGMVAPVGRNGVERLLEVVADVNDTRLPEIARGCVAALGTQLLALKAQILAFDRRIMAWHRSNETSKRLDAIPGVGPALATALVASIADPKAFRSGRDFSAWIGLVPKQNSSGGKDKLGSISKQGDRYLRSLFTAGALAVIRYAKLHGTKHRPWLTALLARRPTKVAAIALANKIARMVWAMMVRGERYKEPVALAA

SEQ ID NO: 390262 - protein, 412 aa, unidentified
MEVLYPHCAGLDVHKNTVVACVRHTVDGTIKREVRTFKTITKELLALSEWLAAEGCTHIAMEATGVYWKPVWHILSDGDFALVLANAAHVKNVPGRKTDVNDATWLADLLAHGLIRSSFVPDQQTQEMRDLLRTRKQLARVRSRHVQRLQKTLEDANIKLDSVISDVMGLSGRKMIEALIAGESDSEQLAQLAHRRIKATPEELCEALRGRVTRHHRFLLNVHLQQIDAIDAAINTIDQEIDAHVEPFRDTVLLLTTIPGVDELGACVILAEIGRDMSRFPTAGHLISWAGLCPRNDESAGKRRSTRMRKAAAWLKTTLVQCAWAATRKKASYLQAQFHRLRARRGAKKAIGAVAASILTAAYEMLKTGTLYEDLGCNHFDKSGKGKQIHRLVSRLRNLGYAVQITPLPAAP

SEQ ID NO: 390263 - protein, 347 aa, unidentified
MLHAGLDLSRRKVDVCLLSEQGEHLDQLATAPDADALRTLARRIDEVHREPVCAVVESMTGARLVHDTLEQEGWEVEIADAQKVKGLAPLACKTDRIDSMVLAVLSHRDLVPAIWLPDPRIREERELARFRLHLVKHKSALKNRIHSTLINFGRPCPVTDLFGAEGRRLLARLEVPEPWRGNITAALELIDDLEGQIAEINARLRDGHADHPYIPLLMSAPGVGWVLAFTIAAEIGEIERFASPAKLTGYTGLCPRVNQSGEKDRRGPLTKHGPTYLRWALLEATMHALKHPAYSERYQRNKRRLGKQRGAKVAQVDIARRLCHAIWHMLSRGQEFAPRGAAFRLAA

SEQ ID NO: 390264 - protein, 429 aa, unidentified
MDEAVKPTTNSEDKHMKIHKYLGLDVHQDDSIIAVAEGDRTGEVRVYGKVSSDLYATEKALRKIRGADGVLHVAYEAGPTGFVLYRRLQQLGIDCIVVAPSKTPQPKGGRLKTNRRDALQLARLHRAGELTGIHVPDTVDESVRDLTRARSDASRDLKRAKQRLKSFLLRQGYHYTGKANWSEAHQRYLRELVLPLPALKSVLEEYLLAIDRSMERLTRLEELLVAQVPQWRMYPAVQALMCLRGFELVAASILVAEINDVRRFAHPRGLMAYLGLVPSEASTGDTRRLGAITKAGNAQARWILVEAVQSAANPPKVSAPLALRQHGQPEAYRALGWKTQVRLHKRYWHLTRRGVMAAKVKVALARELVGFVWDLLRQVPIPAAPATATGPASGTTLAVPPASATPAPVSRSATRRHQPGALLHALVGN

SEQ ID NO: 390265 - protein, 356 aa, unidentified
MQSQFTKSDYTGQNIYTGIDVHLKSWNITIMMDSVYQRTFSQPPSPLALFKHLKANYPGATYFSAYESGFSGFWAHYQLLELGINSIVVNAADVPTTGKEKIQKDDSRDSRKIARCLKNGELIPIYVPSLTTLGNRTLVRHRQTVSKDLARVKCRIKSFLNFTGVVIPEKYKGNNWSKKFVQWLKDLELNSSCRLSLNGHLSTYHNLQQEKANIKQQIKLLAESPAYKQDVELLISIPGIGLITAMIILTELENMERFRSFDKLCSFIGLVPSTRSSGEKERVGEITPRGHRILRTAIMECSWKAVTGDPALGLCYNKLCKRMKAQKAIIRIAKKLMSRIRHVLKTKNRYELGIIA

SEQ ID NO: 390266 - protein, 347 aa, unidentified
MNVTTVGIDLAKLIFQVHGVDGHGKAVIRKQLKRAELLRFFANLPVCLIGMEACSSAHYWARKLIEQGHTVKLMAPQFVKPYVKTNKNDARDAEAICEAVARPNMRFVPIKNIEQQVLLGIHRARQGFVKARTAQANQIRGLLAEFGIVMPKGVRFIAQQMPGILEDAENGLPHRSRELFAQLLAHFRDLDRQMNELERQIKVWHRQSVQSQRLEKIPGLGPLSASAVVASIGDAKTFRNGRQFAAWLGLVPRQKSSGGKEQLLGISKRGDTYLRTLLIHGARSVLFSLKRHAKEPGGWLMRVAERRNPNIAAVALANKNARIIWALLAHGREYQPGYVSSSIAVAS

SEQ ID NO: 390267 - protein, 395 aa, unidentified
MILVGIDIGKYSHHFALVQKEDGEVLREPSEINNDLEGFDQLISSFRKYQKKDILIGMEDTGHYHFAILKYLLDKKYTVALINPITTDLTRKMNGSITKTDDLDSLTICDVLSSNKKDKKPYRITKINRFDMYEQRCLTRHHHNLKEELNVYSNRLQKCIDVVFPEYNSLFKSKYGIVYMNVLKKYSSADNIAKADIRSLRKCFETNRRGKRISLTAEKLKETAKKSIGISSSSEVIQIRHLIGQIELIHEQLNEIDKKIEEFSRQINSPILSIPGISHFSGTSILSELGDISNFANPRQVIKFSGTAPLTYESSQFKAQHTKITKKGSKYLRKTLYQIILPVIQHNKVFGDYYALKLSQGKSHRCAQGHCVRKLLRVIYHLLKTGQQFDPALLR

SEQ ID NO: 390268 - protein, 384 aa, unidentified
MSNIASACAEASADRSLETERHRFLYVGMDIHKDNHTAAATNCFGQNLLEIEVKNSKKDFDNFVAMAERLSKQNNLVPLFGLEDSCGYGSRLASYLCRKGYQVKTIPPVLVDKARKRETHPEKSDSLDALQVARVLIQRIDRLPNYSISEETEISKQIKELSLDREFLVKEQTRIKNQLHRLLHKSHNSGYKEKFKNPFSLKALKYWKSNPCPKKTDDIVGDPLILKSQIKRKVKRLLDIRNEVKEIEREISVLMKQTNQKIETLNGCGLALGSKLIAEIKNISRFRNSNSLAKYAGLCPREKSSGKTFRHIKTKSGNRKLNMVIHRIALSQISKSGNDKAKEYFQRKLSEGKTKAQSLCCLKRRLVDIIFMMLKRKQPYNYIA

SEQ ID NO: 390269 - protein, 412 aa, unidentified
MRVIRKRCLGLDLHKCQHTAYLRVHLGSDQEPIGIREQFGTMPEDLERLRDWVLEHQVTDVVMESTSVYWMHLYELLEGVTHPAVVNASHVKKVPGRKTDVTDAEWLAELHAHGLLRLSFVPPKEIRRLRALTRYRSKLVALRTGARNRTIKLVEMAGVKLSSVATDSFGKTGRLILDGLCREQADPAELAGQAKGKLRRKIPALEQALRHPLASHQRELLALHLQAHDMIDAQVAHVEHQLSELATPYQAAIAKLDAIPGINPLAAITLLAETGVDMSVYRNDRHLTALAGLAPGNAISSDKRRRIGVRKGNRHLKRICVQIAWAASRKKDSFLRARFLRLQARIGRAKAIVALARQILVVIFHVLSDDRPYTDLGPNFYATRHKEQAAENLVKRLTKLGFSVTLTTKTAD

SEQ ID NO: 390270 - protein, 321 aa, unidentified
MNKNTEIFGIDISKDVFDVYSHQKGHQSFKNDAQGFKSFLKVITKDALVVMEATGYYHYLFAQFLHKKKVQVSVVNPLSVKRFIQMKLAKVKTDKSDAKAICEYGRMNEVPLYTALTDVQAECLQLFRLLDNYLKKRTQTKNKKHGEEVLGIPSKYVYGSLKRDLKHLDKEIKGIEARLLELVKKDQQHQLTLLKSIPGMGMKTALFLIVVTDGFSKFETASQLCSYVGITPTIRESGSSVRGRSRISKVGNKKLRNLLFLCAFSACKHNKACKEIYERIVNKGKSKKLALIAVANKLLKQAFAIAKSGRPYDENFVSKLV

SEQ ID NO: 390271 - protein, 345 aa, unidentified
MPIVGGLDIHRKQITFDYLDTGTGQVQRGQISPADREHLRAWLARFNGTEDVAFAVEGCTGWRYVAEELAAAGVAAHLAEPADTAFARGRKRHAKTDKTDCRHLRLLLAEGRLPECWIPPGNVLECRAMLETYHDLRREHTAWVQRIHAVLFHQGAPALGGGTLRTGPGLAALRAAAAAHLSPAGQLQVATALDVLEALEDRMHELRHQLTGAARRLAGAKVLAARLYGVGPIAALAMTCWLGGEGRFSSSRKAVRFAGLDVTIWSSDRKGPPGRLSRQGPPVLRWALYEAGKTHARSSAPDYRYYAQVKDRCNGKRAALSEARKILRQACHILAELGDDALAPA

SEQ ID NO: 390272 - protein, 349 aa, unidentified
MIVGVDVHRREHCAALIDERGVVLGTLSFPNTAAGVRKLRAWLAARDAEGAVVGIENGAGYGQLLCSSLAAAGHEVLNVPAWRTKRDRGKHGPGKSDPGDAVAIARVVLCDRERLGPALEPELVRALAVVETLRRQTVARRTDAIQRLRALWTQFDPEAEVAVGNVLAARTLKRLRRLRLGSGVLGDVATSCFHCIVAEIARLDAVVNDLDKQLAELVAQNGNPLEDVCGAGLQVAATLMAQSGDVRRFRNRAAYARYGGVAPIPCGSGASAGRHRLHRGGNRQVNAALHRIAIVQAQWDPAAQAYLERKLAEGKTPREARRALKRHLANLVYRRLRRWAEDTLPATSS

SEQ ID NO: 390273 - protein, 344 aa, unidentified
MNSTTIAVDVAKSVFEVAVSEQPGEVRERQRLSRERFRRFLAERPPATVLMEACGSAHHWARQAQALGHRAVLVPPHVVRPYVLRNKTDRTDTKGLLEAFRNEDVRPVPVKSETQQALAALHRLRSMWLAARTVRINTVRGLLREFGLIMPIGAHHVVPHVATLLEDTDSVVPGLLRPALADAATDIREIEARLRAIERQLESVASENVVVRQLRTIPGIGLLTATALVATVGDVARFPSGRHFASYLGLTPREASTALRRRLGAISKRGDTYVRMLLIHGARSVLCHAKTKTAPPPDRLRAWALQVERLRGHNKAAVALANKLARIVWAVWRHGTDYMGTPAL

SEQ ID NO: 390274 - protein, 420 aa, unidentified
MRNAGIHANSLLEVRRMYNAVGIDVSKGKSTVAVLQPGGTVIRKPFDVSHTSQNLNELADYLSSLDGTTKIVMECTGRYHEPMVKALSEAGLFVSIVNPHLIKNFGNNSLRKLKSDPADARKIARYTLDNWTELRQYSGMDNTRTQLKTLNSQFSFFMKQKVAAKANLIALLDNTYPGVNKLFDSPTREDGSEKWVDYAYSFWHADCVRKIGLKAFTERYMSFCKKHHYIFQQDKPEKLFNASKELVAVFPKEKTYKLLIQQSIQQLNLASEHVERLRREMNELASTLPEYSTVMGIYGVGKTYGPQLIAEIGDVSRFTHREALTAFAGVDPGVDESGQHKSKSNRASKVGSARLRKTLFQIMTTLLQNAPEADPVYRFLDKKRSQGKPYYVYMTAGANKFLRIYYGKVKECLRNLEQTE

SEQ ID NO: 390275 - protein, 357 aa, unidentified
MKIVGCDLHARQQTIAMVDTETGEFVERALSHEGNALREFYGALEGPVVVGIEATGAMQWFLELLQELGIQCRVGHPAKIRAKETRKQKHDRRDARLILELLIEDRFPEIWMPSIEERDLRTLLRDRHQWVKMRARLQHTLQAIALNHALRRGHALWSQAGQNTLQALPLPPYTSQRRTELLSLYEQLQQRIQELDKEVEAQARQRLQARRLLTHPGVGAVTALATDVFLGDPSRFDTANQVASYIGMIPCEHTSGKRQRLGKLTKQGNSLLRYLWTEAGMHAVRKDPELQRFYRRKLIQKGMGKARIAAARKLGIRLWIMMRDQIDYEQFCRRGRLRQKGKAHAGMPDFNSGPAMQ

SEQ ID NO: 390276 - protein, 423 aa, unidentified
MMKLKYSICCGLDVHKKVIVATIVTTNKEGISEYNQKSFSTINSDIQKFHDWLIGNNCYHVCMESTGKYWIPIFHYLEKDIDVCLTHPKYVKAIKGKKTDKKDSKWIADLYKFDLVRCSFIPPKDFRQLREIARYRFKLVCMKSSEKNRIQNCMTVSNIGIASVLKDPFCKTATEIMSYLLEHTSDTMDEKAVRKLVRKGTKASSSEIIEALKGYSIETDQAKKLELARRHLEYLEDMITQTEVELYVRIKPYYEFVEFISTMPGMTQLSATIVLAETGVNMDIFDDAGRLCSWCGLSPANNESAGKKKSVRIAKAGEYLKPVMVQCALSAVRSRKQPYFAVKYNAIKKRRGHKKAIIAIARMMMVCIYHMLSEKKPFAPTDYEELMDSHKHEKRVVLNEENALAFLAAQGYDTSQLVKCNDN

SEQ ID NO: 390277 - protein, 474 aa, unidentified
MTEKARPDLQAIPMLLHETLYVGSDIGKFTHVAGFVSPTLLTRHQRFEACPALSFDNSREGFRTLVDRISTYAPLTQVYAVLEVTGHSHRALLQYLQELDIPVYVVHVQKRQKGLLKSDKRDALGLANHLYNQLEKGIQVGDPLQVVRRLAPPTPAAAQLRSMVQHRQELTAASTQRKNKLTAICDEVFPEFTRVFRDPNGPTALVFRQRFSTPAAIATASLSALHEARGKTRQLSDARLLELQRLATNSIGTTDAARLRGLVFEQQQLIEEYRLISKHLESLEAEITQVVEHSREGHILTSMPGIGPLQAAILIALIGNIANFDKPAQLKSYCGWAPVVSESGTTLDQVHLSPRGARLLKPTIYLAVWKAIQLDCEWARLYERLVPIKCRYDEKRRAYVGRGRVIGRIAGQMLSVIYTLLKKDQETLSKVPPGVPLPEPVLYDPEVHRKHRAGQYQSSSSAQKPRKLIELPPH

SEQ ID NO: 390278 - protein, 342 aa, unidentified
MYYIGLDVHKKTISYCVKDAGGQVHREGTIGATRRELDLWIQTLPQPRIMAMEATIFTGWIYDHLLPHAEQVKVAHPLMLRAIAAAKKKNDRIDAGKIADCLRCDFLPECHMASTEIRDRRRTLRYRHLLVRQMVQMKNRISGLLMETGVSHNKQQLHKVGYFRELLSSNEEVHENIRPLLRLSRETIVRCQKTEYAQVSSLERDPLLAERIKRLRTVPGVGPITALTWALEIGDVSRFRSIKQAISYCGLCGEEKSSADKVLRTPLSKQRNKYIQHVLVEAAKLAPRQNQELALIHAKEQQKGNRNRATLAVARKMVAYLLAVDRREREFVPAGGHSTAAA

SEQ ID NO: 390279 - protein, 386 aa, unidentified
MIIIGVDPHKRVHTASAVEPATNQRVATLEVEASLNGYRRLLRWAGGFSERRWAVENARGLGRHLAQWLVTRGEIVDDVPSTATARVRELSRGGRRKNDVIDAAAAASVAALHGDANLVVTEDLSTVLALLDERRNNVITQRTRLVNQLHALLRDLLPGGGSTDLTAAAASRLLTSVRPQGPVEAARKQLARDLVVEIREADRRLKTLTTQIAATVADTGSRLTKIDGVGPVIAGRLLGRTRQASRFATASAFANYAGVAPIEVASADRARHRLPRGGDRQLNLALHIIALTQVRMHGSSGRAYYDTKIVAGKSHNEAMRCLKRRLADHIWRLMIRDEQEQAAGPGGHSGATLQSSAAGSTPTTSSSDKSLPEPANTDPTAGRPAA

SEQ ID NO: 390280 - protein, 414 aa, unidentified
MKTFAELTHFAGFDWAKDHHDVVIVDRQGQVVARYTFAHSAEGWQKWQESVRAYPALGVALETSSGPAVERLLESGATVFPMNPKSAQTYRQRKAPSGTKTDQLDAWSFADGLRTDGQGWRALAPLDPLVQELRLLCRDEVQLIEQRTALVNQLQQALGEYYPTALHAFPDWTAAHAWEFVKTFPTPEALDKAGKRRWENFLHRHRLYRPQTADQRLEAFAKATEFAGSPAITRAKSRLALSLVGTLLTLEKHLQQYRLAIVELFARHPDHDLFGSLPGAGDKLAPRLLSEIGQDREIYDLQGLQCVAGTAPVSFQSGQIRLAKIRWHCNKHLRHAVHHWANCSRKYCAWAQAFYEAHRARGATHASALRRLGQRWLKILWTMWQEGQPYDGERHARNQQKHGSWLLKLNPTKA

SEQ ID NO: 390281 - protein, 389 aa, unidentified
MPTIADRHDAPTVIQTNLAAIFISLELSRSIWLITSLSPGSAEKMSKHSVRAGDVAALLARVSELKRKASERTGKSFPIVVIQEAGLDGFWLHRVLQSEGIESHVVDPASIATARRRRRAKTDRIDGEALLRALLAFKRGEPRVCAMVKAPTPEEEDRRRLSRERKVLVADRVKHVNRVKGLLFSQGVSGYEPLRRDRRQRLDNLTTGDGRSLPMHLKNQISRELDRLELLLDQIKRAEAERDALLAAQQAAAPAPTGRMLLEFRGIGAEFAASLWLEALFRHFDNRRQLASYAGLAPTPWQSGSVDREQGVSKAGNPRLRTTLIQLAWLWLRHQRQSALALWFKERVNRNGGRLKKTTIVALARKLLVALWKYVTAGVVIEGAVMKDA

SEQ ID NO: 390282 - protein, 414 aa, unidentified
MEIVYARCAGADVHKKTVVVCVVVPDERGGWRKETRTFSTMTADLLALSDWLQQCGCTHVAMESTGEYWKPVFNILEGNFEVLLVNAQHIKAVPGRKTDVGDAEWIADLLRHGLLRASFIPPLAQRELRDLTRFRSTFVRERATLANRVQKVLEDANLKLASVASDVMGVSGRAMLAALLEGQGDPEQLANLARGRLREKRPDLIKALTGRVKEHHRFVLTELLCQIDNLEEAVARFDEQIKTHCAPFEEAVTLLDTIPGVARATAEVIVAEIGTDMSRFPSADHLAAWAGVAPGNNESAGKRRSGKTRKGDRPLGVALNQAAHGAAHTKNTYLAAQYRRLAKRRGKKKAIMAVAHSILVIAYHLIQRKEPYRELGGDYFDKRRPEAAAKQFVKRLEQLGYSVVLQPQTAPVAA

SEQ ID NO: 390283 - protein, 338 aa, unidentified
MTTETLIATEQQFNHVLAFEVSKAKLHVHILPGGETSEVTNDRAIIRKLIKKEIKRNAKLGVGPLLVVCEATGTYSNDIIACTAEFGVACHRAHGSRVRAFAKFRGTHAKSDPIDVRLIADYATASRNLELHRPPRPAQAELRELVGRRTELRQALEAEQARVEHVASKLVVASLRGHIRVLEKLVAEIDRRIETLMREDEEFHRKGSLMRSVKSVGPVTAATVLAYLPEIGTVSRGTIAALAGLAPYDRDSGEGKGQRHISGGRAEARSGLYMAARNAMTWNEHLAALARRVEAKGKPFKVQVTAVMRKLLVILNAVVASGVPCRTETAGRVRIAAA

SEQ ID NO: 390284 - protein, 595 aa, unidentified
MLPQSPSASQAPRRFGVGIDTSRYGHYAAFLNEQLQPAAAELQFPESAAGYALLRGRLDSLTRRHGPAHFVVRLDAAGQYADNLRHFLHGLASPAAGAVGAAPFSLTLSCGDPQRNKNYRAALFGSKKSDPVEARAAARFALAERPSTDIPLSQELRILRQVAGRLQAVVRQRTRLLNQFHHLLALTFPELALLTKELAAGWVLELVHRYPTAPLLAAAPPTDLGHIAYLPDRHIAPLLEHARASVASLAGATVAELVREQVRQLRDSGARQKRLENLLVTAYRALPEANHLDSIPGFGAVTAAVLTACTVAIERFATPAKYVAFFGVLPVEVASGVERDGQARAPRRWAMSRRGNDLVRRYLWMAALSAAQCNPAVKALYARVVAKHPQHKAVAVGHAMRKLLHLAFAVWKTGRPFDRDHYPWQTPTHVESSDNGMSPAPETSDNTRSQEGQAAGHKPVRMPAQPVVTAARTDTLADAAAVGEGTYLDFAHLKRQLPLARVLDQLGLTARLRGSGPQRRCACPLHRGDARGRTFSVNLDANVWQCFAQECGRKGDVIDLWAAVQGLSLRAAALELVQTFGLEPAPCGGTEKRHG

SEQ ID NO: 390285 - protein, 359 aa, unidentified
MEKRSEFILKDAEIFVGLEDSKKTWKLCVRSGGVVVNETSMPADYENLSKYFKNKFPGCRIKVMYEAGFSGFDLHDQLLADDWECVVTPPHTVTQEKCSRQKNDRIDCRRLAKNLENGDYHSCCVPDKELREDRQISRTYGQVQKDIIRVCNRIRRTLEFHGLDRLFPPGRWSGAAYNQLKQKLEDMDISRSLKISFGVMFKELESLRQLKAELLLELRNLGKSGRYRKSVDLLKSAPGIGMLTAIRLALEWGDMSRFERKEAFAKFLGLTPSDYSTGETDRRGHITKQGNRWVRSWLVEAAWRAIKYDPVLLDKFRRVYSHNGSKKKAIVAVARMLAMRLRRVLLDGKPYENGLVSCS

SEQ ID NO: 390286 - protein, 456 aa, unidentified
MDQKTAPAEVYVGIDIHHSSHKVAIIPLALMEKGGRAWKQVKPLSITNCRLDFEKLDRSIKEHNQDPSQVSIAIDHTGGYYSAPIVNFLSLRGYRLWYLEAKALKKAKNRFLDQENKTDEIDAVSMARILYARDILNDDLRISAVSPELGSEAATMRALCLQRLALDKLITQATNRLRQFLVATFPEGESLYFTYLARIVTKYPTPQAILTGDLKEFRIPQKVADAIRKAATDTVGICSPVIAASIIDVAQHRLDLISKKSELTAKIENLVKGYPYGPILTSFPCLGEVGAATLIGVIRNIDRWPSKKCLRKALGVYPTVTRSGAGAAHSVMGREGSREARRVLWQMVFSNLRKQAKPNIFRDYYQMKVNKGMKGKPAIVATMGKVCEIIYHCLKEGEVYIYKSAQARSLEAGDACKSYGCQLTTLPTAIAPQPIFGSQDESKVFVIGSLARGTQA

SEQ ID NO: 390287 - protein, 393 aa, unidentified
MICVGIDVAKDKYDCFILSSEGEVLADVFTIPNNAEGFDTLLQTIRRCARPEDKIKVGLEATGHYSYNILGFLLNEGLDTYVINPLHTNLYRKSLSLRKTKTDRVDARTIAAMRMSDVDLKSYTDTAYHNEELKSLTSNRFDKVRERAKQKQSVSRLVTILFPELEKLVSTLHMASVYALLSEFPGGKQVSEAHLTHLKAVLYDASKGRYGSDMATTLRDAARCSVGSVMSAKSLELRHTIRLIHELDAEIEDIEAAIQSMMGEIQSPITTIPGMGVRMGAMILAEIGDFSRFDSPDKILAYAGMSPSTYQSGQLSLSGAYSHMEKRGSRYLRYALYNATKYVCLWNPTFAAYLAKKRAEGKHYNVALSHATKKLVRLIYALEKSKWPYSTAA

SEQ ID NO: 390288 - protein, 369 aa, unidentified
MKHSIIFVGLDVHKDSIDIALADDGRNGEIRFYGTIGGDLDSLDKAIRKFRRAGIELRFVYEAGPCGYEIYRHLIAQEFHCDVIAPSMTPKKSGDRIKTDRRDAISLARLYRAGELTPVYVPREDDEAMRDLVRGRGDAVNATRKARQRLSAFILRHGFRYSGRNAWSMAHLRWLADIKMPHPAQQITLQEYIHSIEEGSERVDRLTDQILKLIPTWRMAPVVAALQSLRGVAPIVATTMVVEIGDLRRFENPRQLMAYLGLVPSENSSGQTTKRGGITKTGNSHARRALIEAAQTYSFPAKVSRVLRKRQEGLPREIKEISWKAQVRLCGRFRKLMTKGKNRNQTVTAIARELSGFMWAIAKEVPMPA

SEQ ID NO: 390289 - protein, 386 aa, unidentified
MRKEPAVKKDTRFVGLDVHAESIAVAVAEGGGEVRSLGGIPNKPESVRKLIKRLGPAGSLRVCYEAGPTGYVLYWQLTGLGVHCDVVAPTLVPVKAGDRVKTDRRDAEKLARSYRSGDLTPVWVPDAAHEALRDLVRAREAAKKDQLRARHRLQKFLLRHGRRAPDGVKPWTETQMAWVKREVRFEASAHQAVLLDYLTEVDHARDRIQRLERSIDEAVEVAPERMRAVVHALQALRGIAKVSAVTIVAEVGELSRFARPRQLMGYSGAVSSEDSSGGRTRRGAITKTGNAHLRRIIVEAAWAYRHRPAVGRALRIRQEGLSEEVKAIAWKAQHRLHHRYRRLVAKGKAKQQVVTAVAREMLGFIWAIGVDVERQLPTLGRKRRAA

SEQ ID NO: 390290 - protein, 335 aa, unidentified
MKPNKTKINREVGENIPQKNYAGVDISKDYLDICLQHKTYRFTNNKTGHKNMFRLFEKQEQPVHVVYESTGYLSRRLIPVFMDANISQTCLNPVRVRNYARSEGLQAKTDRLDAQVLCQLGKDKQLEQDYPLTREILQLKEYESVLTFYVKRRAQLKNEQKATNQPFLKQQLDQALKQEEKRIEALQVQMEKLINTHQELKEKYETYLNVKGIGKRNAMALISLMPELGSINRKQASALLGVVPYSWESGTMKGTRKIHGGRKELRHLLYLATVSALRCNEILQAKYKHFLSVGKTRKCALIACCHSLIIYLNSLTKKIIPPDAASHAAGGIGGE

SEQ ID NO: 390291 - protein, 335 aa, unidentified
MSQEKYIGMDAHQATISVAVLDSGGELIMECILETKAGTIVEFIKGLHGTLSLTFEEGTCAAWLHDLLKPYVSRLVVCDPRKNALLKDGSKSDRIDARKLAELLRGNQLTPVYHGDHGVRTLKELGRSYLTLTQDLTRVMSRIKALYRSWAIPCSGTTVYAARHRSEWLSKIPQPGVRLRAERFYQQLDLLRPLHQEARCDFVMESHKHPAVKLLRQIPFIGPIRAALLVALLQTPHRFRTKRQLWAYSGFAVETHDSGEYRYVRGKLLRNRERISVRGLNDNYNHDLKNLFKSTAISASTRPGPLRDFYVALLAKGMRPTMYVSPWPGRSPPLL

SEQ ID NO: 390292 - protein, 418 aa, unidentified
MKNDDYAALVALDWGDQTHAFARQIGGADRLECGVIEATAEALHAWLEQLRETCGGRPVALAVEAGRNALLHALLEHPWLTVYPVHPATSARFRRAFTPSGAKDDGPDAVVLLTLLRRHRDQLEPLSLDTPATRELAALVAARRHAVDQRTGASNQLGSVLKSYFPQALTLAGDDLTKPLALAFLRRFPELAAVQRARPATLSAFYRDHNVRSAERIAERLALAARARALVQDRALIAPAVREVAWLVDLLEVHARHIAGLETRIAEVFAAHPRAALFAALPGAGPALAPRLLVAFGDQLARYPNAQSLQKYAGVAPVREKSGARSWTHWRWAAPKFVRQSFVEWAGQTVVHCDWAHAYYDQQRRAGKAHHAILRALAFKWIRILWRCWHDQTPYDEQYYLAALRRQRSTLAVALPKT

SEQ ID NO: 390293 - protein, 346 aa, unidentified
MKQISTIGLDLAKQVFQVHGVDAAGKTLFNKKLLRAEVEKFFKSLPSCDVAMEACSSAHHWARSIAALGHRTMLIPAQYVKPFVKRGKTDAADAQAICTAVVHGNMRLVPVKSIDQQAITVLFQTRSLFIRQRTKAFNALRSHLAEFGLIAARGTHNLNGLIDLLRREDCPIPTLARRAILSISDEITTLKTKITELDRELTLHASQDDDISRLTTIPGVGRVTAGMIKAYVPDPGSFKSARHFAAWLGLTPKAHSSGGKARVGRISKMGNANLRSLLVIGAMTIIREARKDDGQQGWVQRLLLRRPYKVVAVAMANKTARIIWALLNKGGTYRGLSGSSENQEIA

SEQ ID NO: 390294 - protein, 339 aa, unidentified
MYYTGIDLHKKTSFITTIDERGQVVKRANLKNVTNEILNYFDDLVDDTRVVIESMSSWYWLYDLLTEKGLKVTISNPVKTKAIASAKIKNDKVDSHMLAQLLRADLIPESHVSSMDTRKLKELLRHRSRLVRDTGRMKNRIHALLMKNNLQQPCSDLFGKKGLSFLYEDIDLPDYHCEQLKTYLSLYESIKTEVDHLTKRIYSMAKIDPVANLLTTIPGIGPLVAMIIVAEVEDIKRFPSYQNLSSYAGLVPSLDSSGSKEKTGHITKQGSPYLRTALVESAQVIARLKSCRLNIFFRKRIIRSGYAKAVTATAHKILQIVYYVWKNQTPYLEEYNGCG

SEQ ID NO: 390295 - protein, 323 aa, unidentified
MVDGSVAWNKKISRSKLLDTIRQFEPGTLVAMEACATSHFWGRTISSMGYCVRLIPAQHVKAFVRSQKNDANDALAICETALRPGIHFVAVKTTEQQDIKALRNTRQLMVEQRTALANQLRSLFAEYGVSLPAGILHLQQQLPEVIEDASNELTFTLRRLLYSLREDMQALNERVTGLDKEITALSSQQTAYRHLLTIPGVGPLIAAAFISEVDAGQFSSGRELSAWCGLVPRQHSSGGKQRLSSVTKNGNRSLRILIIHGARSVMRCVKKRDDCMGLWLQRLEARRGFLKTTVALANKLTRIIWRVLTDQVDFNMSKAFSMI

SEQ ID NO: 390296 - protein, 355 aa, unidentified
MERYIGMDVHAASCTLAVISQTGKRLKDFPVETNGQALVEAIRMIPGHKHLVFEEGLQSAWLYETLSPHVEELVVAGITESRGPKSDKRDAYGLAEKLRVGNLDKPVFKAPRQFTRLRELSRIHMTLVGDVVRVQSRIKSLYRSRGVLVTGVDVYSSRRREAWQKQLCSSAQTRATRLYAHLDFLLDQKKQAEADLLREAKQHPIVRILETAPGFGPIRAARLVPIVVTPHRFRTKRQFWSYCGLGIVTRSSSDWVQTADGGWIKTRVPQTRGLCRQHNRVLKSIFKGAATTLVTQRSKDPMHARYERLLDGGTKPTLAKLSLARMIAATVLRMWKDEEEYDPGRAGLSLKTREG

SEQ ID NO: 390297 - protein, 341 aa, unidentified
MGEYIGLDVSMKDTAISVRRDGKRVWRGKCASDPEAITRTIRKHAREPERVIFETGPLSVWFYHALRDQGLPVICVDARHAKAALDMAANKTDANDADGLAHLAEVGFYREVRVKGFDSMLTRTLVAARTRLVRIQTELSNQIRGLMKTFGLVVPAGKGSTFETNVRGRLDENQELAAIVRPLLEAWCSIRLRAAELTRRLIDDARQSEACQLLMSIPGVGVVTASAFATAVEDPANFRSSRSVGAWLGLTTRRYQSGQVDYNGHISRRGDHQVRSLLFEAACVILTRSTADSALREWGLKLRERIGFKRAAVAVARKLAVIMHAMLKSGELFDRKLVAPA

SEQ ID NO: 390298 - protein, 349 aa, unidentified
MLIIGCDYHPSFQQIALVNTESGELQERRLGHREEAEQFYRALATAGAKVRVGMEASGHAGWFERLLAELNFELWMGDAAKIAAKRVRKQKTDRLDAQHILTLMVKDDFPKIWVPSWENRDVRQLLWHRHRMVQTRTRIMNQLQAAALNEGLRYKKKLWRETGRQQLESLPLARWASRRRHDLLDVLDRINPTIAELTHAIEQEAKKCPAAQRLMTHPGVGALTALAFVLILGETERFDCGKQIASYLGLVPEEDSSGERRRLGHISKQGNSLLRFLLVEAAQATVRSDLRWRSRFFHLAQRRGRKIAKVAMARRLGVRLYWMWRRGWNYAQLESFGSHAGQPGNPHGV

SEQ ID NO: 390299 - protein, 343 aa, unidentified
MSISMIGLDTSKSVFQIHGVNESGKAELKRKLRRSDLIAFFEKQERCTVVMEACGAAHHWARILSGLGHTVKLIAAEAVKPFVRNGKKNDAADAAAICEAAARPDVKFVPVKTVGQQGILALHTARSLLVKQQTMLANAIRGLASEFGHVVPKGLHNLEPLVALVDADAAMPEQARQAIAELYERFGELANGIQSCEAEIVKHARTDPTARRLATIPGIGPITASLIAATVVDISRFKTARQFAAWLGLVPRQHSTAGKTRLGRITKAGNREIRKLLVLGATSMLGRAEGWHSAVGSWLRDILQRRPARLVTVALANKMARIAWSVMTRNEVYRPQGGVAAKA

SEQ ID NO: 390300 - protein, 316 aa, unidentified
MTTNSVVVGVDVAKDRLDVAVRPSGEVWSEANDETGITTLVGRLRPLRPALIVCEATGGFERAAIAALAAAGFPVVVANPRQVRDFARATGQLAKTDQLDAAILALFAERVRPTPRPLPDAAAQLLDAVLTRRRQLLEMLVAEKNRLGFAPKPLHRGIQAHIRWLERQLDDVAKELAGLIEASPVWRAKDDLLQSVPGVGPIVSSTLLGELPELGTLSHKQIAALVGVAPLARDSGTLRGKRQVWGGRASVRTALFMAAMCGRRWNPTLKVFYERLKAAGKPTKVALIACARKLLTILNAMMRDQSRWISPVQYSC

SEQ ID NO: 390301 - protein, 391 aa, unidentified
MSMYFIGIDISKYKHDCCIISAADQKVVSKVTIKNNKSGFDELLTIINSLSNPEDIRIGFESTAHYALNLELFLENSLLTFMEVNPVLISEYKKSKTLRRTKTDSVDCESIARWLMTVEYKPHSKGFYHAYSLKSLTRLRDRLIRQRSFYLVKITNVLDHTFPEFKPFFNERLSKTALYLLENYGSAEKMARMNSASYEKLRSLSRGKFSPQQFMQLKELAANTVGVNNSIFDVELNSLLSLYKSLVKEIDTIEKEINKLIEEVHPHYMSIPGIGPLSAAVIYSEYGDISNFSNPGQMLAFAGIEPGINESGTESHGGKMVKRGSSQLRYTLINCCLPLIRFDMTFATYYAKKRGEGKPHRVAITHVAKKLIRVIYALERQDIDFNTQKLH

SEQ ID NO: 390302 - protein, 417 aa, unidentified
MSELQIKVGGTAGFEVFCGIDVARETHHVVVLDRQGRRLIDRPLPNGEPQLVALFNELESRGRVLVVVDQLASIGALAIAVARSRGIAVGYLPGLAMRRIADLYPGETKTDARDAHVIADAARTLPHALRRVGPDEQTTVELSVLAGYDADLAAESTRLANRLHDALLHIHPALERLLGKHFRRPGVLRLLAAAGTPQAIAELGESGIRELIANGSPRMSKSLPTSIVAALAEQSVTIPATEQYGRVIRGVAQQLLTIMDQREVLGSELEALLTNHPLAEILTSMPGVGPRTAIELLRTVGDGSTFASAAHIASYAGLAPATRQSGRSIKGEHQARRGNRTLKGALYLSAFASLKHPPSRAYYDRKRTEGKSHTAALTCLARRRVDVLHAMIRDRQHYHPTSVTAHPVTPSAEPPAA

SEQ ID NO: 390303 - protein, 355 aa, unidentified
MNDAKYIGLDVHQATTTAAVRDATGNLVMEAVLETKTETILQFFRGLRGSLHVIFEEGTWSAWLHDLLKPHVARVVVSDPRKNALLKDGNKNDRIDARKLSELLYLNRFTPVYHGEHGLRTLKELARSYLTITKDLTRVMGRIKAIYRGWGIPCAGQQVYAPGHRAEWLAKLSEAGVHRRAEIYYQQFDGLAPIRQQARRELLVEGRKHAAVKLLRQIPSIGPIRAALLVALLQTPNRFRTKRQLWAYVGLALRTYTSGEYRFEHGQLKRSKKVLAIRGLNRNHNHDLKNIFKGAAIWAAGNTGPFQNFYEACLARGLKPHLARLTLARKIAAITLLVWKKGVCFDAKHLTQQAA

SEQ ID NO: 390304 - protein, 403 aa, unidentified
MYSFFVGIDIGKWNHQAAFLEVSGKETARSLAFQNTSEGFQLLLESLAPFDKGQTVIGLEATGHYWLALFSFLVDNGWTVKVINPMQSDALRNMNIRKAKTDRKDCVVIADVLRFGRYTETVLPDEDLLQLRELSRCRVAHVELLGDLKRRVLGILDRIFPEFASCFSTVFGAAPTELLQECTDPEELADYDVDKLIKLLEKESRGRHSREKAEELKAKASRSVGTRFGRDALKFELKMLLEQLDFIKGQIKEFDKFLKKLMKNHELIYTIPGISVTLGSAILGEIGDVKRFGTPQQLQAFAGMDPSVTQSGNFQGTQGRMSKRGSPYLRRAVYLAANAARRFDPVFKEFYDRMIARGKHPKQALAAVGTKLLRVIHAVMTSQKPYNPQKLLPPAARISQVTP

SEQ ID NO: 390305 - protein, 346 aa, unidentified
MMIIGCDFHPSWQHVCWVETETGETGELKLVHGAGEARRFYASLATPALVGLEATGNCHWLVDLLAELGHELWVGDAAQIRASYVRRQKTDKRDAAHIVKLLVEGRFPRIWMPSAEVRDLRQLLLHRAKLVMIRARVKNELQHLAMNKGMQRGCRLWSEAGQKLLRDLPLKVWASRRREDLLALMAMLDRQIEPLDQAAMASAQGDKMARLLMTQPGVGPITALAFVLTLGDIKRFPRGKQVASYLGLIPREHSSGGRQKLGAITKQGNRMMRMLLVEAAQSAVRYDPGFRKEYAHRCHQKPKAVAKVAAARKLAVRLYWMLRTNTPYPEVVRIESSPRVPLVGAS

SEQ ID NO: 390306 - protein, 415 aa, unidentified
MWNKVTKQSVLWRQHHNFTVGGLVMISVGIDVAKDKHDCFIINSEGEVLADVFTIPNNMDGFHRLLQRIRDCTSPQDKIKVGLEATGHYSYNILGFLLDNGLPTYVLNPLHTNLYRKSLSLRKTKTDRVDARTIAAMLLSDVGLKPYTGTAYHNEELKSLTRYRFDKVKERGKLKQSIARLVCILFPELEKLVPTLHMVSVYALLEEFPGAKQIAEAHLTRLKTLLHDASRGRYGRDMAVDIRETARKSIGSVMPAKSLELCHTIRLIRELDAEIDEIETAIQNIMNKLHSPITTIPGVGTRMGAMILAEVGDFSRFGSPDKLLAYAGLSPSTYQSGQLHNCYAHMEKRGSRYLRFAIFNAAKYVCHWDPVFAAYLAKKRAEGKHYNVAVSHAAKKLVRLIYALEKSGKPYCLTA

SEQ ID NO: 390307 - protein, 454 aa, unidentified
MANKRQRRATASLHILQPDAAGADIGAEEIFVAVPPDRDDEPVRRFPTFTCDLHRLADWLQQCKIRTIAMESTSVYWIPLHQILEERGLEVYLVNAQYVKNVPGRKTDVSDCQWIQYLHSVGLLRPSFRPPAAICAIRSHWRHRENLIQMGAQHVRHMQKALDQMNLQIHHVLSDITGVSGQRILDAILEGDRDPVQLAQLCHGGVKSSKDKIAKALEGDYRPEHLFALQQSLSGYRSYQKMIADVDKEIEDNLKGLPTADQAKAELPERTKKWPYQRQHYEPTFNLRKELYRIFGVDLTNVPGISAVTAHTILSEIGTDLSQFRHASAFSSWLGLCPEKQISGGKVLYVRTRAVKNRVAVALRLAAHSLHHADNYLGEFHRRMKRKLGPAQAITATAHKLARIVFHLLKTHESYDETVFQRHDEQAQKRAEARLRRQAVQLGFQIIPAAPEHA

SEQ ID NO: 390308 - protein, 415 aa, unidentified
MSDPFRFFVGIDLGSALHQVCVVDASGQTLGERGVAHSGADMAALFQWLATLTQGADPQSIAAAAEMPHGAMVEAFLERGYAVFAINPKQLDRFRDRFSVAGAKDDRRDAFVAAHALRTDRYAFRPLALGDPRLLRLRELGRAEESLQQDLRRAANQLWQLLQRYFPGLLALVPAADEAWLWDLLENAPLPEKAARLRPSTLHGILKKHRIRRVSAQQLAELLAQPTLPLAPGASAAIAEQVLLLLPRLRLLRKQHTQLGRNIETLLEQLAGDESFKQHRDVQILRSVPGVGRIFTATVLAEAAEPLAQRDYRVFRTVSGVAPVTQQSGKTKLVSIRRACHPRLRHAVYHSAARYAQDDPRGQQHYARLRARGCSHARAVRGVADRFLALIFALLTHNQLYDPCRRALLDPAPTC

SEQ ID NO: 390309 - protein, 320 aa, unidentified
MDAVLGIDIAKAKFQIALLQRDGKIRHKTCANTPAGFEQLAEWLRRHGVMRVHAGLEATGTYGDAVATWLADAGHVVSLINPAIIHAYARSQMARSKTDRLDAELIARFTATQQPPAWTPPAPELRQLQALVRRLDALHGMRTQEANRLAAGVLVADVRVSIETMLASLDAQIAHVEQLIGAHFDQHPGLRAQRDLLTTIPGIGDATAAVLIAELFDKRYTSARQAAAFAGLVPRLVESGTLRGRSRLSKIGPGRLRKALYFPAITALRWNPTIRALRLRLHAAGKHPMAIVGAAMRKLIHLAYGVLKTGRAYEPTCAHP

SEQ ID NO: 390310 - protein, 433 aa, unidentified
MACRYAGIDWATQKHDVVVEDAAGVEVLAGTFTHDERGLASLCRTLVRLGVALVAVERPDGLLVERLLDAGLRVLPLHPNKVAASRDRFRVAGGKSDRFDAFVLCELARTDSHRFRVLEPDCDRTKAIRAMTRAREDSVKTRTAVMNQLRAELDRFWPGPLSLFSHMDAEIFLAFLERYPSPADARGLGVARLHAFLTRERYSGGQDPTALMAKLRSAPQGRVGEIELAARRQIVLGYVTMIRTLNAQIKNLESEIRDHMRVHPDGRIFLSLFKSPASVITAAELLAEIGDCRQRYPDRDALAADAGQAAVAVQSGKWKTAGFRRACNKRLRVAFCRLADSSRHWHPWAQDLYAQARQRGHEHPRAIRAVGRAWCRIVWQLWRNHTTYDPARHRALQRHITVTIPGAPGPVTDRAATLRMAGPGLWRPDLTTT

SEQ ID NO: 390311 - protein, 324 aa, unidentified
MVAPALGIDVSKDRLDIEIAVCGKPRSKCFGNSPEGWGELMAWLKEQNIKQVHACLEATGRYSLGVALALCEDGHIVSIVNPAQIRDFARTKLGRNKTDGLDAGYIREYAAIFKPQPWTPPSPAMRRLGELQTLRAGIISGLTEWKNRCGSGLANDTVLALARATIAHFADQLATVDKTIAQTIDHDRDLSSKRDLLLTISGVGEVLAGLVLAELPGTDILRSSAQAVAYVGLNPRSHRSGSSIDRPTRISKIGNATLRSALYMPALSAMRHNPVAAALANRLKAQGPLKGKQIAVAAMRKLLVLCFGVLKSGKPFDPALAMPN

SEQ ID NO: 390312 - protein, 370 aa, unidentified
MKDHSEVFVALDVAKLKNAVAIAEGGRGGEVRFVGEIANTAAATRKLATKLAARYEHLTFCYEAGPTGYGLYRLIKSLGHDCLVVAPSLIPSRPGDRVKTNRRDAVGMAKLLRAGELTAVWVPDERHEAMRELTRTREAVRRDLRIKRQQISGFLLRLGLHYPGKKRWGPAHLNWLATRKLDYPERRIAFEELMFAMRQAKERSDRLEQAIRDSVPDWSLAPVVVALQAMRGVDLITAAGFLAEIGDLSRFESPRQLMAYLGLVPCEHSTGDRVRRGSITKAGNVRARRLLVESAWSYRHPARVSKEKQTKVEAAPRSVREIAWKAQTRLCGRFRTLSRKGKKSTIVATAVARELCAFIWAINREVADIT

SEQ ID NO: 390313 - protein, 344 aa, unidentified
MDHFAGLDVSVKETSVCIVDEIGKIVREVKVASEPDALLRVLRNPAHHFKRIGLEAGPLSQWLYGSLAEAGLPVICVETRHMRAMLKAQVNKTDRNDARGIAQMMRVGLYRPVHVKTLLSQKLRMLLTHRKLLQAKTIAIENDLRSTLRNFGLKVGMVGKVKFEGRIKELVENLPDLATLAEPLLIVRRVLHEQLSILHRRLLDIVRNDDVCRRLMTVPGVGPVVALTYRATVDVPARFRNSKAVGASFGLTPSRYQSGESDRPGAISRCGDEMMRVMLYEAAQVMLTRTSKWSWLKAWAVRIARRRGMKKAIVALARRLAVILHRIWVDGTEFKWTREAVPAA

SEQ ID NO: 390314 - protein, 342 aa, unidentified
MNEVKGVVAVLGIDLAKRVFALHGVDRDGKVVLKQVVSRSTLPRLIAQLPPCLIGMEACSGAHEWARQFAQHGHTVKLMAPVFVTAYRKAGKNDDNDADAICEAVGRPNMRFVPVKTRAQQALLSLHRVRQGFVEERTALINRLRGLLAEFGFVFAQRHGGLRAVPSALEGLPALAKRAVDDLLEHLRTLNERIAAYDLEFKHLAAQDDAAKRIMTIPGVGPITALALVATLGNARDFKNGRQLAAWLGLTPKQHSSGGKIRLGPVTKHGDGYLRTLLVQGARAAMQHASRAQPTRLSRWATNLVTRRGYHKANIALAAKNARIIWAILARGGEFQPHAAAA

SEQ ID NO: 390315 - protein, 425 aa, unidentified
MHTRQYTKQMEKRSMIGEHTLVVGLDIGSEFNAACFMDKEGNVLGRYPKVYNSRKGFEYFRTMVDKVKRRHKLTQVFIGMEPTGHYWRKIAFFAKEQGHEVRFVRTTAVKHQRELDESSSAKSDIRDAFTIGNIVREGKYIDTVIKDDVFRELRTLAHARERIMRYIIGSTHGLQAVLNDYFPELTDLFWSMKAKGLWALLETYPFPKDVCNAGLPAVTALLTKSTRKKNRAQEKARQIVQAAQESVGLKRIGKADRARLAMYLEEITRSDTRRRALECQMEELLEEIPFAEYILSLPGMGPVSCAIFLGELGNPEHFSNPRQIIKYAGYDPKENDSGSRTGRKIISKKGRWLLRKCLFFMVLRVVNRSPFFKEYYEHKKKGLDRPLNKTEALCAVILKLIRVLFAMMRDRRMFTEEMPGCREAA

SEQ ID NO: 390316 - protein, 368 aa, unidentified
MRFYDHPHRFYCGVDLHARTMHVCILDHNGQVVFDHNLACRPDAFLHAIAPFRDGLVVGVECMFAWYWLADLCAAEHIPFVLGHALYMKAIHGGKAKNDKIDAGKIARLLRGGNFPLAYTYPKGMRETRDLLRRRTYLVRKRADLLTHLQILNSQYNLAPFPKKLSFAANRAAMAVAERFTDPSVQHSAAADLALIDALDTRIGTLELYLTRTAKVDDVQTYHRLQTIPGVGKVLALILLYELHDVRRFAHVGQFLSYARLVRCQHESAGKKLGTGGKKIGNAHLRWAFGEAACLFLRGSERARKWKQKQQAQRGEAKALAILAARLGRAVYHMLRKREAFDEARFWDGRGLTGTSSLSRPEDCHAGH

SEQ ID NO: 390317 - protein, 337 aa, unidentified
MEVYAGLDLHSTNTYVAMIDEENKVLYKQRHRNDVPAILSALDPFKKDIQGVVVESTYNWYWLVDALMGAGYRVHLANVSAIKQYEGLKQVDDRRSSLWLANLLRLNILPTGYIYPKEERPSRDLLRKRLQLVRNRTSHVVSVKNILARNLGARMKSNDIKKLKASEVKTLFPDKEMRLAIMSSVGLIQYCQEEIDKIEKLITKKVQVRKEFAKLLTVPGVGEILGLTIMLEVGHIDRFPTVGDYSSYCRCIRSIRTSNGKVTGYGNSKNGNKYLAWAYVEAANSARRWHETIRSFYERKRASTNKVVAIKTVSHKLARASYYVMRDGVDYDQTRFA

SEQ ID NO: 390318 - protein, 390 aa, unidentified
MALFVGIDVAKDKFDACGIGEEGEKVFSLTATMDKKGFENLIFHLRESRSLLLGLESTACYHIALFSYLTAKGYRVVIINPLLISNFVKLQLRKTKTDKKDALTIAQFLMLRKEALETQTFSADLMELRDLARRRERLTDQVTKLKGNMKRVLSVTFPELEHLTGVFAKSILELLIRFPSADALRKVDVDAVAALVVPRSWGRKSRAWVETLMTTASSSIGVSSPAKELVLRQDAALLLYIQEQIKETTKALMGLCTERIKKDAEILTSIQGIGETTALNFLVEMGGDVTLYKNDKKLIAAAGLDPSTYQSGKYEGSSKISKRGNRHLRRVIWLMAKTVVFSNEVFRTYFYKRRREGLCYKMAIMATAHKLIRVMFAMLVHQKCFQQGGI

SEQ ID NO: 390319 - protein, 342 aa, unidentified
MDHFAGLDVSVKETSICIVDDTGRIVREVKVASEPEALLKVLGNPTYHFKRIGLEAGPLSQWLFSALAGAELPVICVETRHMQAVLKAQINKTDRNDARGIAQMIRVGLYRPVHVKTLRSQKLRMLLTHRKLLQSKAIAIENDLRGTLRNFGLKVGMVGKVRFEARIEELVENFPDLAVLVEPLLIVRRALREQIVILHRRLLAIVRDDEVCRRLMTTPGVGPVVALTYRATVDVPARFRKSKAVGAVFGLTCSKYQSGEIDWRGRISRCGDEMMRVMLYEAAQSMLRSKKWSWLKAWAMQIARRRGRKKAIVALARRLAVILHRIWVDGTEFRWTRETVAA

SEQ ID NO: 390320 - protein, 337 aa, unidentified
MKYSGIDLHSNNSVVTVTDEEDRVVAEKRLPNDLAKIVGFLQPWRDELKAVVVESTYNWYWLVDGLQEAGFVVKLANTGAIKKYDGLKHSGDEADARQLAHLLRLGILPTGTILPPEHRAIRDLARKRMQLVRSRTSHILAIENIVARQRAMKINSNQIKRLTADEIDQMLLPADVGLAIKSNLAVVATLSEQIEQLEKRLQEDMNERPEYGLLTSVPGIGRILATIILLETGPIERFSAVGNFASYARCVDSQHMSNGKKKGEGNTKNGNKYLAWAFVEAAYYAQRFCAEAKRFYERKKAKTNTAVATKALAHKLARACYHMLKENKPFDVTRCFA

SEQ ID NO: 390321 - protein, 339 aa, unidentified
MVIVGCDFHPGWQQVAVFDSGTGEIRELQLRNSEGEAERFYGSLPSPALVGFEACGNTHWFEDMLDRLGHEVWIGDAAEIRASYVRKQKTDKRDAAHILKLLMEGRFPRLWRPSKADRDLRQLLIHRDRLVGVRTRVKNGLHHLMLNKGVQLKRKLWSKAGQKILHELPLEGWAAQRRTDLLPLLRTLDPQIEELDVAVERAAYANERARLLMTQPGVGPITSLAFVITMGDVTRFPSGKQVSSYLGLIPSEHSSSKRRRLGAISKQGSPFLRMLLVESVQTVCRLDEGFRKQYNHRCHRMKKGIAKLAAARKLAVRLYWMLRTNTAYPEIAHIEGSPR

SEQ ID NO: 390322 - protein, 313 aa, unidentified
MSQNNPNILYVGLDVAKLSLQLHLAGRFHLLANDAKGHAQLLKRLRGYPNAHVVCEATGGYEQAVVRALQTAGVPVSIVEAGRVRYFARAQGQRAKTDPIDAAVLSEYGTTFKPAATAAASPQQQQLAELAQRRRQLIHLLVSERNHAEHYTDAFRLRQSRQLVKALEKQITQCDEAITTLIAQDSDLARKAERLKAIPGVGPVVAATMLAEMPELGKLTTQTAAALAGVAPYNRDSGGQTGVRRINGGRAAVRCALYMATLSAVRYDRILKEFYLRLRAAGKKPLVAMTACMRKLVILMNRLLKNYDFQLAS

SEQ ID NO: 390323 - protein, 426 aa, unidentified
MNETDHIRLEEFRQLKKEIRGSKEYLIVGIDVAKEKHHAFFGTATGKTLLKRLIFDNTIEGFRKLGVQVEAIQVAQSLSKVVFGLEPTANYHKPLGEYLIKCGRMVVLVSGVAVKRNRELLDGRWDKHDTKDAANIADLISQGKCLFYEYPEMWLRDLRGLLSLKRKLKKQEHSYRVRIRNQLLAQYFPELDRYSGRPEVEAIVRWCLDPSRIAGLENDQFRRLVAPGRKTLAQHHRLHTIQKLAVDSIGCEMGEGACLEAQVMVDGLRHIREAIKATEAKIEEICGSFPEYACLLTIPGFGPDVSSKVLGALGNPHRFQNQKQVLKTAGLDLSADRSGKGSQTAVPIISKQGKADLRYALYQAALVASTQNIDFMRYYTQQLQGREKEPGIKTKRWVKLSAKLLIIAWTIMKKQEPFDSRYLNQK

SEQ ID NO: 390324 - protein, 262 aa, unidentified
MFPVGIDVSKNTLDLCMLYDGIKGRIKTRNIQNNRHSVENILRWLRLQHCSPEDVHVVMEATGVYHERLATELHDAGFRGSLANPHRSREFARGMGIMTKTDKVDAYMLACYAFLKKPHRWEPPAPEIRYLGALLRRRDVLLGDALREENGLEKYLSTDTPADIISSCRRMAQLLREEVSNIERQIKAHIKASPALRRYYTLLTSIKSVGPQLGMHMLVVLRSHNFVSAEQAAAFLGVVPIEKRSGTSVRRRPRMSKIGPLS

SEQ ID NO: 390325 - protein, 414 aa, unidentified
MELLYTHCAGIDVHQNSLSVCALTPGSGATEEPAIELRSFGTFTGEIQLLCEWLKEAGVTHVAMESTGVYWKPVWNVLEPLFTIILANAQHIKNVPGRKTDKADCQWIARLLRHGLLKPSFIPEPRIRELRDLCRTRTSLTRQKTAVVNRLQKVLEDANIKLASVATDVMGVSGRSMLREMIAGNTDPILLADLARGPMRRKLDALRAALTGTVNPHHRFLLKRHLHQAEELEQDIRVLETEIVSKVNPFEGLLTLWMTIPGIDRIAAWSLLAEVGADMDQFPSARHLVSWAGLCPGNNESAGKRKSSRTRKANPWLRGLMTQIAWAAAHTKDTYLSQQYRRLLAKRGKKRALLAVANTVLTIVWHIGKHGNPYRELGADYFDRLKGNQAQRYHVRKLEKMGLKVTITPAHQAA

SEQ ID NO: 390326 - protein, 351 aa, unidentified
MKKLFIGIDFAKEKFDASIISACGLKETDVRQYGTFGNDKNGFRQFIKWVKINSVGTSETEWLFCGEDTGSCSIAMSKWLYGKGFSIWIENAYVIKHSSGLQRVKTDKADASMIAEYAWRHQDKFKQYEPLSEALSQLREVFLYRHKLVQQRTSMCVRKQSKTKSESSKAMSFINRKSDHLIAEIDAAVKECDDMIDKIIRSDEELRENYEIVTSIKGVARQNGACLLIYTNNFKRFDMDPRKIACYYGVAPFGRTSGTSVHSPARTSHFANKLIKSLLSQAAHIAKVFNPEIKSYYERLIKRGKKRSVALNNVKNKLLRIIVSLVKNKIKYDPNKYMLCKDRLNQRFVTI

SEQ ID NO: 390327 - protein, 351 aa, unidentified
MTTSSLAQEVIVGVDTHKDVHVAVAIDVNGRLKGQRMVATTERGCIELHRWALQFAPQVRYGVEGTGSYGAGLSRYLQAQGNPVTEIRGPSRKLRRDRGKSDTIDAEAAARAVLAGTSAISPKAGNDWVEQLRILRVARRSAIQARTQAINQMHAVVVGAPQELRDTLQQLPRPELIKRAARFHVANAEDAHATARWTLRLLAQRHQSLTNEVAAIDQAIAPLLQQHAAKLMELPGVGPEVAGALLVVAGDNPQRLRSEASFAALCGVTPLPASSGKTTRHRLNRGGDRQGNCALWRIAMTRMSFDQRTQGYARRRTAEGLSKREILRCLKRYIAREVFRVLPEASSLDMA

SEQ ID NO: 390328 - protein, 514 aa, unidentified
MFKRTVRKAKERAYVGKSLGVIQPRVAAVGPERFGIVAVDCGKGASVWMLADFYGRRLLPPQELLHSPGTLACAIAQLRELIARHNLGDQIVAIERTGRYHLPVQQAFRAAGFETRIVHPLASRQYRELSDPANKTDATDLDGIHRAAANGFGLIERPLEGSYLALCTLARHRRDLVLKRAAVLCQIREYLELTLPGYATCFDDLWDHRYALYLARQCDTPADFITRGLEGWKEVLRKEGQRFQERTLNRVLQWARTALPVGVGVDLYRQLWHDLDDDRLEKNRQIQRLEQQLAEHLALTPYVLLLSLPGINVVSAAELAGELGPIKHYANARAITGRAGLFPRRYQSHHVDRSGGLSPAGLRPLRYILLVIADNLIQCNPYYRGRALRGKDRQLDPRLIRVKTAGAFSRVLFQMVAGGKVFTHPACQQRDYVLHKLLAFHHAHGTPLDQALRNLEAARTQIPAQEYAAEAAPLSAELAKSRKLRRRGVKTLQDLLPVLLARLGVGGLQSESSE

SEQ ID NO: 390329 - protein, 337 aa, unidentified
MKLYCGIDLHSNNSVLTILDEKDQIVYQRRLKNDLERILTVMDLYGGAIEGIAIESTFNWYWLVDGLMEAGYRVHLVNTAAVKQYEGLKYGDDHSDARWLAHLLRLGILPEGYIYPKEDRAVRDLLRKRGQLVQLRTTNILSVQSLMARNIGSSMSGNQIKKLQAEEVSALLPNEDLALAANSNIHVMRTLDEQIRIVEKAIKEKAKLKPEFDKLQSVPGIGIVLALTIMLETGDISRFAQVGKYASYCRCVGSTRLSNGKQKGKGNHKNGNRYLSWAFVEAANFAIRYNDNIKRYYQRKQAKTNKVVALKTVAHKLARACYYIMRDQVEFDLQKGF

SEQ ID NO: 390330 - protein, 449 aa, unidentified
MSSHKGNAAGLPVIHDRAAGIDVGSRFHVVAVGTDLCDEPVRTFQAFTGDLQRMADWLVAMGIKTVAMESTGVYWVPVYEVLEGRGIEVILANAREARAVPGRKSDVNDAQWLQRLHACGLLRASFRPGRDIAALRVYLRLRERHLDYAAAHIQHMQKALTFMNLQLHHVVADVTGVTGMKIIRSIVDGQRDPHVLAQMRDVRCKASLETVRAALVGNYQPEHVFALGQAVALYDFYQSRVDECDAQIQAVLTMLTAEKASPSTPLPKARHRTVQPNAVSFDVRPVLYQLAGVDVTQIHGIGPYLALRMIAECGTDLSRWRSAKHFTSWLTLSPGCKISGGKVLSARTRKTTNRVAAHLRLAAVTVGRTNTAPSAFYRRLAARIGKAKAVTATARKIAVLFYNAMRFGIDYQDPGATHYEQKYRERVIKQLHRRAAEFGFTLQEVVNVS

SEQ ID NO: 390331 - protein, 408 aa, unidentified
MNKLFVGIDVGSRDNAVYIMLPDGSKHSSFGVQNNLGGAQTLSKRVISALSEQELAVTDIGIEATSVYGDNLICFLREDGALARFERNLFVLNAKQVNKFKESHTELPKNDPVDAFVVADALRFGRIGTPIYMDDYKYQALQKLTRARFYAVQNLTKEKQRFMNHLFMKCSGLAQDKVFSNNYGVAALAVFEEFDTPDDIADIDVELLAAFIAEKGKNRSPRPEEIAKAVQAAARGSYRLPKTVSDSVNQVLSISISSMRAMQAQIKALEKEIERQFENIPNTLTSIPGIGPVYSAGIIAEVGDINRFRKGQSSLAKYAGLMWTENKSGMFQGQHTRLIKSGNRFLKYYLCEAAWSVVGCVTEYRRFYDLKYKEVNKYQHKRALALTARKLVRLVFRLLKDNRLYIPA

SEQ ID NO: 390332 - protein, 394 aa, unidentified
MTYYVGIDNSSLDHKVCILNNEGNLYSQFTIENNLAGFNELGTELKNFDEVLIGFELPHGPLVDYLKAKNFTTYSLNPLKIKRFKETITVSGNKNDKIDAAAIAEYLRRNHNQCRPMIYNSSEVEKLKMLCIIHNRMTEEHSRYINKLHFAVRQYFYLHESLFSHFGCPVQLKMLIKYPTFDDLKQARDEELILFLKSNHYNNPKYITKLLGKIREHDQLISSDVVYAYLYEVNMLCAIMSSIERSLKDIEKEMAGILDNHHLGKIFRSIPGVGTILGSNLLALFGDNMNRFENANQAQCLFGTAPKNYQSGSYHKVTMRKACNKYARAILYRFAFETLIHSKWARVYYDTQKAKGKKHSVAIRALSNKWVKVIYRLWKDEIFYEKDKKLVTAA

SEQ ID NO: 390333 - protein, 262 aa, unidentified
MDHFAGLDVSVKETSICIVDETGKIVREVKVASTPEALLAVLKNPAYHFKRIGLEAGPLSQWLFSALAEADLPAVCVETRHMQAVLKAQINKTDRNDARGIAQMMRVGLYRPVHVKTLRSQKLRMLLTHRKLLQSKAIAIENDLRGTLRNFGLKVGMVGKVKFEARIKELVENLPDLAVLVEPLLIVRRVLREQIIILHHRLLAIVRDDEVCQRLMTIPGVGPVVALTYRATVDVPARFRKSKAVGAVFGLTCSKYQSGEID

SEQ ID NO: 390334 - protein, 347 aa, unidentified
MKRIAVDLAKSVYQVAESVRSGQVVQRKRLNREAFRRYIQEQAEPVEWVMEACGTAHYWGRVAQSLGHRVKLIHARYVRPYRRRNKTDRNDCDAMLEAARCKDIYPVPVKPHEQQLLQQLHGLRETWKKSRTQRINLLRGILREAGIEAPASTAAFIRAAHELVDRPELAPLRHQLHIVLAEINLYEQCMAECEQQLKRWHADDEVVRKLDEVSGIGLLTASALTAAVGKPERFASGRHLSAWLGMTPNEYSSGERRRLGRISCKGNIYVRTLFIHGSRAALLAAQRCQARTPEKLTELQRWAVETAARIGHNKAAVALANKLVRICWAVWCHERRFNGNWQSTKPA

SEQ ID NO: 390335 - protein, 429 aa, unidentified
MNYTQNEKIEQVTDSTMVVGVDIGSQIHYARAFDNRGRELTKRIFSFHNDLEGFNSFNLWAETLKTENKKTAVLIGCEPTGHYWFAFVKYVNDHQKRLVMVNPFSVKKIKELDDNSPKKTDSKDPKTIAKLVVDGRYSIPYMPEGIYAEIRDLVYSRDRIMKQHNISANRIQRWLAIHFPEYLGLYTRFDATSGLAVLEQAPLPKDVIALGVEGIRKIWHDKKMRGRGVTEDRAKTLVEAAHNSVGLDEGIGTKSELYMLLEEHRLWTSQLEAVNRVLEETIRKVQHVEKLLAIKGVGRITIAGFIAEVGDIRRFDSPKQIQKYAGLELVENSSGKHKGRSRISKRGRRKLRKILYQVMVPLLARNKEFRTIYDYYVTRVKNPLKRRQAMIAVSCKLIRVFYAILTKGVDYDRFKMISDIHHERGLIAA

SEQ ID NO: 390336 - protein, 365 aa, unidentified
MKKIAYVGIDYHLNSLSLAVVVKGKNEPVDMVRLKNDDKLIRKYMSKLSERFEIKTCYEASSNGYSFQRKMAAWGYPCEVIAPSLIPRKPGDHRKNDFRDARDLAQNYAHGTLSIVHPPSEEEEAVRSLVRCRFAFKEAAKRVKQQINSFLLAQDQHWNRSKWTSQHRKWLWEMRMPNAYLQQVLDEHLAHLDYLETRLAHLDDQIEQVATSPVYAPSVKKLAAMKGIKTLTAMLLIAEITDFRRFPNPRALMAFLGLIPSEDSSGDKRKDGAITRAGNKRCRSALIESVQHYARSPHMSAQMKSDLSQLDAHSAGVAVKCLKRLHKRFWSLTLKGKLRPVAITAIARELVGFIWAMMQPQPAIA

SEQ ID NO: 390337 - protein, 389 aa, unidentified
MTQVDDLSRSLAAFDQNSTLTIAVEMSAASWLVAGVIPGIDRLPVKKLEPDPDGLLRLVERWRAEAVKAGRTIARIVLAYEAGRDGFWLARWLRTRGVEAHVIHSTSVAVSREHRRAKTDRLDTGMLIRVFLGWLRGERGHCGMVAIPTLADEDAKRPSRERENLVAERTRISNRLKSALARLGIRGFKPMLRKAPQRLAALRTLEGVPIPPNTVAEMQRDMARLAVLREQIEEIERARLQALQQAANSGPHAMVRLLARIVGVGIETADMLVHEVLTRNLRDRRAVARYVGLTGTPDESGSKRREKGLAKSGNSRVRRGLIQLAWRFLRFQKNSALARWYRARTEGPKGARKTTMIVALARKLLIALWRMARTGVVPVGVELRRLASA

SEQ ID NO: 390338 - protein, 412 aa, unidentified
MQRRENYLYVGMDLHKQSHTAVLLNCWNEKLEVIVIENKPSEFKKLADKVNRKARQLELSPIYGLENAYGYGRSLAVWLIEKGYVVKDINPALAYDQRKSAPTFQKNDEYDAWCVGTVLINQLHSLPDAKPEDNHWTLSQLVNRRDLLVKDGIRFKNGLHEQVSIAYPSYHKFFSEIDGKTALYFWKTYPSPLYLQDKTAGELAEELREISRSFKQVKAELILDCIQKDGNTIRDYQDSRDFLTRSLARDLEHQMEEKGRLEKEIEKVLSSFDYKLTSMPGIGTAVASKLIVEIGDIRRFPNADKLARFAGIAPVKFSSAGKGKEQSSRQGNRQLHGLFYFLAVTMVSVPKTGIPNHPVFHSYFMRKIGEGKTKSQALVCIMRRLVNIIYGMMKNKTEYREQIVPNQPQEEQ

SEQ ID NO: 390339 - protein, 479 aa, unidentified
MNVKTSKAKKQVNIENETVNLLSKEELNKRIEVIKKELRSYTWRELETKGKFVKNDKLSFITDDMLIVGCDIGSEMHYIRAIDVRGRELSRGAFEFSNTAEGFENARAWVLELAAKNEKKQIVLGLEPTGHYWFALAAWMISNGISVVQVNPYAVKQSKEIEDNSQLKDDRKDPKLIANLVKDGNYGMPYLPEKIYADLRRLSMFRDQLTEDRIRNVNRLHRELKIYFPEYMDAFGKIDGAFTLEVLRVSAIPSDITELGAEGLRNIWHAAKLRGRGYSRAGEIVRYAEKSVGLTDGKDAGREAVKWFAEQILQLDEQLVEIESALHRKCREIPYAENILAIQGVGENILSGIVAEMGDISRFGDVKEIQKLSGMGLVACSSGKHKGQTKISHRGRKRLRYWLFHAAKSAVSHAEEFKELHVYYTTRDNNPLKKMQSLIVIACKILRVIYAILKTGTTYDPQKMLKDIKRPALQASMAA

SEQ ID NO: 390340 - protein, 353 aa, unidentified
MELTTNPTPTLYIGIDVHKRQWSVSIFTSSIHHKTFSQAPCPKSLYTYVSKYFKEYQVICAYEACKFGFWIHRALIDYGYQCLVVNPADIPTTNKETSEKTDPVDSRKIAKALKAGMLRGIHVPAITTEGHRQLFRYRKKVWADLVRVKNRIKDKLLFSGVEIPKGYDNPYWSKGFLAWLARVQFSSTHTRMTLDFLLEQYEMVYRHFLKVSIQARRLHKLACYRDDARRLREIPGIGPLTSVQLLIELEDINRFINFKHFNGYIGLKPRVHSSGEVDHKGRITYRSHYALRSALVECAWTAVQRDPAMLKRYEELRKNHTAKRSIVIIARKLASRIYRVLKTKEPYVTGIVK

SEQ ID NO: 390341 - protein, 393 aa, unidentified
MLDHPIDEPTAIHTQFGAIFVSLELSRATWLITSLSPGKGEKMSKHNVAGGDLAALLARFAELKRKATMRTGTSYPIIVIQEAGLDGFWIHRVLQGEGIESHVVDAASIAAPRRRRRVKTDKIDGEALLRALLAYKRGEPRVCAMVVAPSPEEEDRRRVCRERQTLIGERVTHVNRIKGLLFSQGASDYEPLRRDRRARLEALRTGDGRALPMHLKAQISRELDRLELLLAQTKAVEAERDALLAPVSQAADGEAEAPKPVAMLLAVKGIGAEFAAVIWSEGLCRQFSNRRQVAAYAGLAATPWRSGAIAHEQGVSRSGNPRLRTTMVQLAWLWLRHQPGSALARWFHEQGQRGRKGWRKGAIVALARKLLVALWKYVTHGVVIEGAMMKGAA

SEQ ID NO: 390342 - protein, 314 aa, unidentified
MSETVGIFVGIDVSKAWLDIAVHESNVAWRTGNDDPGIEQLVKRFKQMRPALIVLEATGGYEMRLVAELAHAKLPVVVTNPRKVRAFARSTGKLAKTDKLDAKMLAHFAAAIRPDVRPIPSEEEEQLTGLLVRRRQLVDMLTVEKNRLHTVRPALREDIKEHIAWLQVKLSKLDEEIDQFVRKTSMWKEKDAILRSTPGVGRVTSCTMLAMLPELGTLNRQEIAALVGVAPVNKDSGRKQGKRRVYGGRATVRSVLYMATLAAKRYNPQIKKFYDELLHRGKEKKVALTACMRKLLVILNAMIRTNQAWHFEPI

SEQ ID NO: 390343 - protein, 391 aa, unidentified
MFLLGIDIAKLNHVASYIDSSTNEVIFSNFKFKNDFKGFSALLNKIKSFDAKNLIIGLESTSHYGENLINFLFRHDFKVALINPLQTSHLRKANIRDAKNDNLDSLNIAKSLLFTKLNFVSEKNIECFSLKKLTRFRNNLIKQRSKAKIQLTSLLDLLFPELQYLFKSKIHSKAIYSLLKKYPSTEEIAALKDDEISNLLYASSKGHFKKEKSIELKSLAKTTVGIKDTSISLHLIQLIELIELYTKQIKDIEIKITDTVNKLDTTLLSVPGISIIACAIILGETNNFENFSSSKKLLAFAGLDPKIRQSGNFNASSCRMSKKGSPYLRYALIFTAWNIVRHSEKFNKYYFLKRSQGKSHYNALGHVAHKLVRILFTLIKKNISYQEEKLE

SEQ ID NO: 390344 - protein, 411 aa, unidentified
MDRVYDKCCGIDVHKKLIVACFKQGNRQEIREFGATTRELLEMADWLKKGGCEMIAMESTSSYWKPLYNILEVCELNVIVVNARHMKAVPGRKTDVKDAEWIADLLQHGLLTASYIPDRDQRELRELVRYRKSLVGERNRELNRLQKMLEGANIKLSGTITDINGKSARNILEHILSGKKIDSAEYDILYQQKVIAHNLKATKEQIIDDLNGVMSDLQKKMMRILLNHLDELNAHIRELDDDIDNFMKPEEKRAAEVIQDIPGIGNTGAQAIISVIGTDMERFPTDAHLSSWAGLCPGSNESAHKRKSGRTTKGNALLRDTLVVCAHAAVKNKTSYFSAQFARISAHRGKKRAYVAVAHSMLVAIYHILKDGVVFNDLGADYYNQFNRERKINAYLKKLKALGCEVSVVAA

SEQ ID NO: 390345 - protein, 408 aa, unidentified
MEVVVVVGAGLDVHKKKIVACCIDGRSSPPTVITCTFGTFRDEIERMRDWLIKRECTHVAMESTGVYWMPVYQVLEGVLEITLGNPRHMANVPGRKTDVSDAHWIAKLLRHGLIQPNFVPPRPIRDLRQASRYRRKLMQTRTACLLRVEKLLQCATIKLSSVASDVFGVSGRLMLAGLAGGVTDPRELSELAKGKLRGKRGALMRAFRGSFTREDASLLRVELKVIADLEAQIERLETLIEQKLDPFEEVIALLDTIPGVNRTLAIDLVAEVGTDMTAWKTDRQFAAWSGTCPGNRESAGIRKKAKTREGNPYVKTILIQAAVSASQTIGSHLAFRFNRLAARRGPRRAFVAIAREIAVAIYHMISKQVPYTPPRNADPELTRQQRSRHLIRELTKLGYEVNCKLLNT

SEQ ID NO: 390346 - protein, 317 aa, unidentified
MICGVDVSQKRLDVRVEEGGPGGSFDNTAEGIVQLATFCRRHQVHLVAMEASGGYEKLPFALLTAEGIAVAIVNPRSVRRFAQSMGHLEKTDAIDAGDIGDFARAKKSKPCSPGSAQQQQLRALVTRLRQLTDLQTAQRNQSRLVTDVTAQQLFKELLLLVKRQIRSLEKAIAELIEADPLWRQLNTSFRTIKGVAARTVSRLMAEMPEIGTLSNKKISKLAGLAPLACDSGKYKGKRVISGGRGPIRDTLYMVAGVVARCHPDFVAFRKRLLAAGKLKKVARVALAHKLLIRLNAKAREVRLQFQSASLAGPKAAS

SEQ ID NO: 390347 - protein, 404 aa, unidentified
MIFVGDDWAEAHHDVCVLDEHGERLVKRRVPEGLAGIGQLHALLAEHASEPGEVVIGIESDRGLWVAALLEAGYEVYAINPLAASRYRDRHAVSGAKSDPGDAQVLADLVRTDRHQHRPVAADSTLAEAVKVLARAHQSLVWARQRQINQLRSTLREFYPQALEAFSGELGERDALAILARAPSPAQGRLLSLSALRSTLRQAGRQRNLDQKAQQIQQALRSEQLAATPAITRAFAASVRATVAVSIELTRQIDELERELAEAFMHHPDAEIMRSLPGLGLVLGARVLAEFGDAPNRYKDAKRRRCYAGTAPITRASGTRHVVLARIARNRRLADACYLWAFAALTASAGARALYDRQRHRGATHHQALRALANRLVGILHGCLQHHTTYNETTAWAHTLTPTA

SEQ ID NO: 390348 - protein, 344 aa, unidentified
MDHFAGLDVSVKETSVCILDDAGRIVKEVKVSSEPQALLKVLGNPAYRFKRIGLEAGPLSQWLFSALAEASLPVICVETRHMQAVLKAQINKTDRNDARGIAQMMRVGVYRPVHVKTLRSQKLRMLLTHRKLLQSKAIAIENDLRGTLRNFGLKVGMAGTVRFEARIQELVETIPDLAVLVEPLLVVRRTLREQIVILHRYLLAIVRDDEVCQRLMTIPGVGPVVALTYRATVDVPARFRKSKSVGAVFGLTSSRYQSGEIDWSGRISRCGDEMMRTMLYEAAQSMLRSKKWSWLKAWAMQIARRRGMKKAIVALARRLAVIMHRIWIDGTEFRWIREPAAAAA

SEQ ID NO: 390349 - protein, 349 aa, unidentified
MNYVGIDYHKRYSVATAVDGAGAVVQSRRLDNRPEPFQAFFDSLDGPSQVVLEASRTWGVMYDLVEELDGVEAVTLAHPYKVRAIAEAQIDSHILAQLLRVNLIPAAYIPGRETRSYRDMIRQRMFLVRLRTKVKNRLTVHLDRLHIPLPAVSDLFGKRGINYLKGLQLPGIDGEILRESMELLDTLNTLIKGAEKELQGGIGKDRRVEVLKTIPGFGPVLAAVAALEIDTIDRFQSPAKLAAYMGLVPTTYASGGRTYHGRLLPMCNKWLRWALIEATWVAARCSPYCRTFYESRKRHKGAHTAAVALARRLCEIVWHVLKENRPYQERPFRAFQKQQKSSPAALGCV

SEQ ID NO: 390350 - protein, 405 aa, unidentified
MPTLYVGIDVSKDKFDACVKDEFCNIVMPAKEYEQNKDGINRFVNDLKDLPCKSKRMFMIGLESTGVYHRNLMNYLIEKGYYVREFNPIELKGLRKSRIRPTKTDKIDSEILSDAIKLYSITNTTKYLQDKDYIKMKEFGLIYHRITQEIAIIKSRMRRNLTQICPGYDKNFKNIMCKSSREIMKKSMKISDPLGITEKEIHTILKKNYTTTNFMVDKVVKIKKSMDDSICPDYLIEPLISDVKLLLEHYNVLIKQRKKVIKRISRLMKDLNPISLTIPGIGDITGCMILGCIGNINRFKDSNALTAYAGLDPRVYQSGKSGYKTGHISKRGNKYLRRYLDNATNVAIRHNPVIRDTYQRLRHKGKEHKTAKIACARKLLSIVYSVEKNQKKFYIPKYLQNRQAF

SEQ ID NO: 390351 - protein, 299 aa, unidentified
MRRSGTVAERYSVENTPEHIASFLDSLSVKRPVIGSEATAEYHLSLARACLKRHIPFRLLNPIITKQFTRATVRKRKTDRDDAEIIGRCLLQGAGREIRGEELLPGARILRTTADLRHMAQSLKQKRVRYEEHFPECLAVQEALLKAEQALAESAKVLMGEGAACASKKERELLTSIPGIGKDLSAIIALEVGDASRFPGGKQLVAYAGLDPKVRQSGKILNVNTKITKRGSPYLRRALYLAASIAQRHDPALKAYYLKKRNEGKRYKEATVANARKLTHRVLATLKRGTPYVLAPLST

SEQ ID NO: 390352 - protein, 391 aa, unidentified
MIYVGIDVAKDKHDCFITNSDGEVLFKSFTIPNNREGFESLFQKVQSVSDDLTKVKVGLEATGHYSYNLLGFFLDKGLTTFVINPLHTNLYRKSLSLRQTKTDKADARTIASMLMSDMNLKSYSDTSYHNEELKSLTRYRFDKVKERAKLKSSVSRLVCILFPELEKLVPTLHMASVYALLSEFPSAHAVASAHLTRLTNLLSESSKGRYGKDTAIIFRDAARNSIGSNIPAKSLELKHTIKLIRELTSEIDEIEFEIKAIMDEINSPILTIPGISYNMGAMIIAEIGDFHRFDSADKILAYAGMSPSTYQSGQLDNCYSHMEKRGSRYLRYALYNATKYVCHWDESFGAYLTKKRAEGKHYNVALSHATKKLVRTIYALEKSGQTYNHAA

SEQ ID NO: 390353 - protein, 476 aa, unidentified
MATKVKASTKLTPLPLFPQEHLYVGVDIGKFRHIAGFLSRTLLVRHERFEGCPAFAFEQSREGFRSFVDRLREYVPLEQVTVLLEHTGHYHQLLEQYLLDLDITVYRIHVQKRAEGMLKTDKRDALTLANRLYTQLELGAQVADKMQLVRRIVPPTSAAAQLQGMMRHRYELSHMSTQYRNKLTAICDQLFPELVQVFHDPNLPTALAFRAAFPTPHAIALASLNDLRTLRQGHFPSDAQLLELQRLADKTIGVTDLDRQRGLVLEQGLLIKELQLIQEHLENLQTTITDIVQNCREGQILLSIPPIGPVLAATAIATIGNIANFEKACELKSYFGWAPRKKQTGVTMDQTSLSKRGVRPMKQQLFIAAARAITLDCEWAKIYQRLLPRLCTYDEKVREYRGKKRVLARIAGQMTSMMYALLKTDQETMSQVPPGETPPAPMLYDREIHRKHQEGSYRSLKPNTQPRKILQLPSKS

SEQ ID NO: 390354 - protein, 370 aa, unidentified
MSVRRILAKTIDTDLEYEAIGIDLAKNCVSAALLTTDGEVVCIDRLDYSELEKSAQALSSTTFAMEPCTEMNYLVQKLEAWGHRCLVIGGKNVQNYVENHYSGQKTDLNDAQALAFLAQDKQLRTIKAKDIEQQKYASLTTLREQYIKQYRQTIVSLKGICQAWGLNISKGISGKAQLKDLIENHAAFPEELKESLVDMVTHAQTAQKALNKITKTLEVLAKNDKVCQLIQTIPGLGTICSCRLRATIGDIKRFKNPKDFPAYYGLAPRSIATGHNERKGKITHRGDRTMRSLMVQGAGCVIRLATCGKLKSKQLTKWILKKQKEKMPWGKLVCAVAAKLLRIVRAILISSKPYNPKIAGVAKCSLSKGS

SEQ ID NO: 390355 - protein, 345 aa, unidentified
MKKTIVGVDLAKKVIQVCVVQGNQIVSNDEISHQQFSSWLAMAKPAVIVFESCATSNYWKQVAKDHGHDARIISAKLVSQIRQNQKTDKNDALAIVQASQLVDIKFINGKTFQQQELQSIMRMRELVVKHKVALRCQLEALLLEFNIRISSRNGGLGGTVQGVLEDAENGFCMPFREALSATWELYLQTVEDISKKDKLLAQAIQLHPECEKLLALEGVSTINAINLYIAIGCEDAGTFKTGRDASACIGLTPLQHSSGGTTKLGSIGKSTKNIALRSYLVNGAMSVINHVDKREPRTKKEKWLKQLLERKSKKCAAVALANKTVRTAFALLTQGTEYKAEPLLA

SEQ ID NO: 390356 - protein, 389 aa, unidentified
MGEAIRATVAYLGIDVGKRSHSACGLGEDGEVVFRSDLENRPADIDRLLERAGAGALVVVDQKRNIGALVLARAFAHGNPCAYLPGYAERQARGMLPGVAKTDAIDAEVIARTARGMPGALRPLAEEPEGAASLRILSSQREFAAAARTRAKNRLRATLLEADPALERAVDPSRGWHVALLAEFGSAAGCSAAGWRRFSAAARRAGAPAAGARALWESMLASAGSGRALPAGEDVAVRMLAREIAALDADVAELEGLVADSLAGDEVYECLLTVPGIGPKTAAALVTSVDISMFRGHDELASYCGVAPADSRSGTSVRSTSPQRGGNKQLKNLLIYSCNSLIGTQNRFGRYYDECRARGMRHNKALKAVARKRLKVIYAVMRDAVPYAA

SEQ ID NO: 390357 - protein, 340 aa, unidentified
MKEFSKYVGLDVHKETIAVSVAEANGGEVRYLGDIANTPEAVEKLVKQQRKGGAHLSFCYEAGPCGYGIHRQLTDLGWDCQVVAPSLIPKKAGDRVKTDRRDSLMLARLHRSGELTPVWVPDGAQEALRDLTRAREDMKHLQRQAKQRLLAFLLRHGKRYDGKSNWTQAHYRWMEEVKFSHPVQQIVFQEYVDTVKAMTKHIAALDKQIGSSAAESVFWPVIEGLMALRGVNLLTATTIVAEIGDLRRFASAPQLMAYLGVVLSEHSSGGTKSRGGITKTGNGHVRRVLVEAAWTYRHSARKTTVLQRRAEQTSEAVQEIAWKAQTRLCGRSGYWKAEVS

SEQ ID NO: 390358 - protein, 339 aa, unidentified
MSKLTQPRQAMVFCGIDVSAATLAVAVQQENQRFEERVFDNTASGHQALIGWLRKDKAPARVSLEATGIYSLDLALALDQAEGIEVAVLNPKLMHRFAQTLRRSKTDSADAQVLAEYSCRMPFTPWSAPELSGLRLRTISRHIQSLVVEQTRQNNRLHNAEKSATTPRCVVNDLKRSMASLKLRIVRLRREALELVRSDEAMRKRFDLLILIPGIAAISALQLLGELAPLSPEMSVRQWVAHSGLDPSHQVSGTSVHKPSRISRAGNRHLRHALYMPALVAVRRDPHLKAFYETLLNRHKAKLQALIAVARKLLHAIYGILRTQTAYDGSKLFPLMETT

SEQ ID NO: 390359 - protein, 296 aa, unidentified
MTQHKIISIDLAKNIFFIFEINHKGKNLGRKKLQRSKLLNYVANQTPSTIAMEACSGAHYWAREFENLGHKVLLYPPQHVKNQRRTQKNDYNDAGAIAELALYQRHYPVPHNSIEQQDIQSLIRMRRLCVTERTRLINQVRGLIAEYGIILPKGKASFRQAIPETLEDANNQLSPILRELVSRQYERYLYIDEQIKWFEDKLNQTIKQFDNAKRLMSIPGFGPLTSQAVAVWLGSGQQFKTGRDASAAMGLVPRQDTTGGNVMLLGITKQGNTYIRSLLVHGLEPPYDEPNLNPTN

SEQ ID NO: 390360 - protein, 362 aa, unidentified
MRIIGCDLHARQQTLAMLDTTTGVVLEATLKHEGDNVREFYSSLPSPVRVGIEATGSMQWFLNLLEELGIECLVGHPAQIRAAEPRKQKNDRRDADLILKLLAENRFPAIWLPSKELQDLRSLLRHRHQWVRMRTRIQNALQSIALANGLRRGTALWSHDGQSRIASLSLAPHTAYRRSELQAMYEKFEVEIEKLNQRVEQQACQRPGARLLMTHPGVGPITALATEVFLGNPARFADSKALASYVGMIPREYSSGGRQRLGGLSKQGNPLLRFLWGEAGAHAARKDPELQRFYRRKLVQKGLGKASAAVARKLGIRLWIMLRDQIEYNEFCRRRQKQQKSSDACAGMPETPYGARSHRPVD

SEQ ID NO: 390361 - protein, 401 aa, unidentified
MWCLQAAGSEKRESGELEHTPEAVEAWVGQLCQRFGNRPIAVAVEQSRGALVFMLAKYEPLHLFPVPSTMAANMREALYPSGAKDDPRDADLLLDLLLQHRDKLRGLSPDTEATRRVQNLVEERRKLVDEKTAQINRLTSHLKIYFPQILDWFEHLDTELVCALLEHWPTLEELQKVPPPKLRTFFRKQHCRGQELIERRILAIRQAIPAIRDRAVIEAKSTVVKVIVQLIRSLVKGIADLDEKIEEAAAAHPDFFIFESLPGAGAVIAPRLLAAFGSQRERYGNAGEVQSYSGIAPVTERSGKKKWVHFRWACPKFLRQSFHEWAGHSIAYSVWARSYYQQQRSQGQDHHAAVRALAFKWIRIVFRCWKDGVAYDESKYLASLARRGSPLAALAATAKTL

SEQ ID NO: 390362 - protein, 373 aa, unidentified
MGKVNIEYAKGKIIFAGIDVHKRDWVVTVVCEGEEMYHAVIGSSPEGLIKILKRFEAKEVHTVYEAGPTGYWLHDALMEAGFDSMVTPPSLVPRIGGKVKTDRRDSRKLVTMLSGGFLRRVHVLTPEERAHRQLLRTRNQIEHHRRLIQNQIKSMLLFHGKRPPEEQKEHWSEAHVNWIENIEWEYSVLKTAMESMIKMYRELTEEYKHLTSEIEQLGMTDKYRERVGLLTQIPGIGTFTAMAILVEIQNIERFRRADQFASYLGLTPSQHSSGESIRMGHITRCGNSEVRTRLVESSWTLIRYDMQTKMTYERIKHQTGSGRKAITAIARRLSLRVRRVLLDRKPYHLAQGGHLAEGRDKRREVRRYTLKRV

SEQ ID NO: 390363 - protein, 423 aa, unidentified
MSKRRYNSIEFKRVDWQQVQEQITGPRVVFAVDVAKEKFVATLLDDEQQGLVTFKWVHPRESAEVIERMSALAQSRAVEAVMEPSGTYGDGLGWLLREAGIPLYRLSPKRVHDAAEVYDGVPSLHDAKAAYLIGRLHLQGVSQRWPAPSAQRRELMALLSRLSLLKERHQAGLNRLEAHLSRHWPESLSLMGLGSVSLHALIAQYGDAESVRTDPEGAEALLRRIGHAGLSVEKIRALLVSAEHSVGVPCLEAERVLLQWLAADINQTHRQLREVEHALEQRVEQTPELSEMGEVLGKVTAAVLSAALGSPQSYPDTGSYLKAMGLNLKERSSGKHQGQLKITQRGPSVARFYLYFAALRLIARDPTVRRWFALKTHRPGALKNKTVIELMRKLAKALWHVARGERFAPEKLFNLRAVAEAAA

SEQ ID NO: 390364 - protein, 372 aa, unidentified
MEERTKFHVGLDVHKDSISVAAAEPGRGAARLIGKVTHDVNKLLKVLTKVGTAEQLHIVYEAGPTGFGLQRALKARGYVCEIIAPSQTPRRPGDRVKTDGRDCIQLAECSRAGLLSAVWIPEPDDEAIRDLSRAREDAVNSRVRARHQLKGFLLRHDVRYTGKTSWCGAYYRWLATLNFGIGAAQTAFTEYWQAVKSADERVERLTKALQSSITGWRFEPVVGALQALRGVAAISAIGLVAEIGDLGRFAHPRKLMGYLGLVPSEHSSGERTSRGSITKTGNAHARRLLTEAAWNYRFKARIGKEAQVRQQELSETVRLMGWKAQLRLTQRFAALNARGLQANKACVAVARELAGFVWAIGTQAQREKLTTS

SEQ ID NO: 390365 - protein, 346 aa, unidentified
MMIIGCDFHPSWQQISWLDTETGDCGERKLVHASGDAKMFYQQLALPALIGMEATGNSQWFVELVEDLGHEIWIGDAAQIRASYVRKQKTDKRDAAHILKLVVQGRFPRLWTPDREQRDLRQLVLHRHKLVEIRSRVKNELQHLSLNKGMQRKGKLWSQAGQRMLRELPLKPWAACRREDLLGLLAMLNQQVGQLDAAVQHAAEENPQARLLMTQPGVGPNTALAYVLTIGDVSRFARGKQVASYLGLIPREHSSGGRQKLGVITKQGNRMLRSLLVEAAQIAVRFDPGMKKQYWHRCHQKPKGVAKVATARKLAVRLYWMLRTNVAYPEIVRIESSPRVPLVGAS

SEQ ID NO: 390366 - protein, 333 aa, unidentified
MLKQAIAGVDVSAAKFDVSALLASKKREVASFDNDPTGHKRFCSWLTRGKRKARVVVEATGIYSLDLSLALHRHPDIEVMVANPRALKNFAGASMQRSKTDPMDAASTLEYAVRMPFVPWVPPAETVLEIRVIARRISALTVERSREKNRRHAFEATNTTSKFVLNDIDVNIRHLTRRIDGLVNEALKIIGKTPKLKILLDLVVSVKGIAETSAVQILPELLVLPADMTARQWVAHAGLDPREYQSGTSVSRPPRISKVGNKNLRRALYMPALVAIRHEEAVKAYYQRLLDRGKKPLLAIVAVMRKLLHAIFGMFKSGLAFDGEKFSRTPKGA

SEQ ID NO: 390367 - protein, 430 aa, unidentified
MISAVLECCAGIDVGKKWIAVCVLTGPANGDAQAERRKFQTTNQCLERLAEWLVECGCTHVVMESTGEYWRPIYNVLEEATEMEIILANAQQVKGIRGHKTDPEDAHWLAHLLRHGLIRPSYIPPLEVRQLRDLTRRRKQLVRNGAQERNRILKNLESANIKLGNVLTDVLGLSGQLMIDKLLEGNATVEEIADLAQKSARKKIPQIRAALQGHRMNDLHRRLINLSLDHMAFLEEQIRLLDQAIMEHIRTHGMEKPYQLLQTIPGVREEGAASLLAEFGPDMAVFGSAKHLSSWAGVAPGNNESAGKKKRAPTLRGNPWVRSTLTEAAWSASRKKESEFKMDYERWKPRLGHKRAIVATAHSLAETVFEVLSTGKPYTKPGANPMPETKAASLIRHHTRRIKTLRKRLITIPQKPQAELTQGDFSEQRG

SEQ ID NO: 390368 - protein, 364 aa, unidentified
MNKCHLNTELSSHEGTRCQFNGGTGAIKLGIDVHQDFYVVVEQVGGSNPKAPQRFRKAAFLHWAAKLRSRATEVYAVYEACGFGFTLQRQLSALSIKCYVVCPQKLDEQNRRVKTDGLDAKALCLKLDRFVQGNRDALAGVRVPTEREEQLRAIHRQREQLVKVRKQLEAQGRSLMVNHGLEPVKSWWKLRTFAALQMPQWIRELLQNSQPILLALQQKIGALTLQLQSAADPMQARGLGLMTSVIIDREIGDWNRFNNRRQIASYTGLCPGEYSSGNTRLQSCVTKHGNPRLRAALVELAWRLVRFQPNYKPIFKWRRLLAKGAFATGAARKKAIVAVARQLAVDLWRVRTGRCKAQALGLVI

SEQ ID NO: 390369 - protein, 423 aa, unidentified
MNWKTIAVKRQSVKDKLIVGIDIAKKLHVAKALLPSGEFMPALKFHNDLAGFTKLIDYIRRYQNQAHCDGVTCAFESTGHYGMCLIHWVQGHGLTTVWVNPVHVKRTRDQFDNSPAGSDSKSAMVIADLASQGKFLTVVIPTGVYASLRETVVMRDHLMAERTAKLNQLQAALDRLFPEFTDVFKDIKGRAALYLLEHYPSPQEILGKSAAELTQELRQNGCPRMSQKKIDLLQVKARETVGVKEAWVLISAGLIDALAAVKNLNERIKVLEELLKNLVPQAEESEYLLSVRGIGVISTAVLLGETGGWRNYGHARAVLKLAGLNVYVVQSGQYEGAHRISKRGRGLLRKVLFLAALRLIRIEGEFKEFYTRLIGTGKVRKIKAVVAVACRLVRVLYALVRDRRHYSDRWSGPSSVTAVAQGA

SEQ ID NO: 390370 - protein, 359 aa, unidentified
MRMASLSMAQPGCGVIVGVDTHGDAHVAAAFTSDLGRPLGHLTIATTPAGYRRLLEWARDLGREPRFGVEGTGSYGAGLARFLMAAGCTVIEVNRPNRQTRYARGKSDPVDAEAAARAVLSGEATGLAKVDTDSIGMIRALRVARRSAMKMRTQSFQQMKALIVTAPAELREQVRSLSHDALVDTAACLRPGPVTSVGAAVKLALKCLAQRHQLLTAELATLDRDLDRLVAAAAPTLCALKGVGTDVAGAVLVAAGDNPERLRSEGAFANLCGAAPLPASSGKTTGRHRLNRGGDRHANCALWRVVIVRLATHQPTKNYMARRTQEGMSKPEIIRCLKRYVAREIYRELIPRAALAAAA

SEQ ID NO: 390371 - protein, 328 aa, unidentified
MIMVGCDVSKATLDAAWFDDAQQRWHQHAPFANNSRGWRSLLAWLEKSTGHSRRALTLVIEATGVYHVPLAQWACRQGLRVIVTNPGRAAENARSHNRLHKSDPLDARGLSQYGRELQNPHEYVPDTAEISRLKALLSRLRQLDSDLQRERNRLEKCPYIPESAPLAASLRRGIRERQREHKRIQDEIEALIRDHAELEHLHRLLCSIKGVGKITSQWLLPLLYRQQFASARQLAAFLGLTPIKQSSGTSLRKRGRLSGLGNPYLRSRLYMPAVSAITHNPDLKAFHDRLIRRGKTPKQALTAVMRKLVHVAYGVVKNNEPYRCPMAA

SEQ ID NO: 390372 - protein, 414 aa, unidentified
MELVYERCCALDVHKRQVTACVHVPDRKGKRSELRAEFQTMTADLLAMRDWLLGLGVSAIAMEATGVYWKPVYHLLEDDFELLLVNAQHVKNVPGRKTDVGDAQWLCQLLEHGLLRASFVPPKPQRELRDLTRYRKSLIWERAREANRLQKLLEDANIKLSDVASDVLGASGRAMLAALCEGSNDPVALAELARGKLRAKLPALEAALQGRFSSHHALLLSHLLSHIDYLDGSIDSLSAEIEGRLRPLERQRELLCTIPGVAERTAEVILAELGPDMSRFPDHRHAASWAAICPGNDESAGKRKTGKTRKGDRWLRTALIEAANSAAGRTKDTYLRAQYLRVKRRHGHKKAIVAVAHSILVGAYYILRDDVPYEELGGDYFVRREDQERLTRRLVRQLERLGQRVTLEPALEAR

SEQ ID NO: 390373 - protein, 344 aa, unidentified
MKVTTVGIDLAKNVVQLHGVNEFGKTVIKKQIRRDQMAEFFVNLPACLIGMEACGSAHHWARKLQSFGHTVKLMAPQFVKPYVKTNKNDAADAEAICEAVARPNMRFVPIKNIEQQAVLALHRVRQGFVKARTAQANQIRGLLSEFGLIVPQGIGYIASRVPELIEDASNELPGSFRLLIQRLLDHLKELDRQVDEIEAQIVKWHRQSDASSKLAQVPGIGPITASALVASLGDAKNFDGGRQVAAWLGLVPKQHSSGGKQNLLGISKRGDTYLRTLLIHGARSVIYRAQHRPESCGWINGVVIRRNKNVAAVALANKNARIVWALLAHDREFRSDYAAAKAAP

SEQ ID NO: 390374 - protein, 407 aa, unidentified
MSRYYIGVDWADAEHAIWVGDEAGAQVAALTVKHTAEGLSEFGRWLYERRAQGIELWAAIEKPEGRVVDFLLDHGVVVYPVNPKALDRARDRFRMSGAKSDPFDARVLAEFLRTDHPHLRPLVPNSEPAQELKLLTRDYQRQVRLQTRLLNQLTATLKEYYPRPLEVFEDLTAGLARDFLRAYPTPQAVAALTLTQWKKFARAHGRSEARTAALWTVLQQPQLPVPPHVVRAKARLVRVLVAQLGATVGAVEEYREAVEDFFATLPAAEWARTLPAGKSGTTVPTLWAELGDAPGRWQSFQHLQAHAGAVPVTVRSGKQQVVHFRFACNTHLRYAVHQLAFLSLRQGDWAQAYYAQYRKRGHGHHQALRALGAKWLKIIFVMWQRQVPYDENYHLATMARQQLRQVA

SEQ ID NO: 390375 - protein, 337 aa, unidentified
MLYVGIDYHKNYSYATKMDERGEILEQLRFMNDQESIEEFANTLPEDSKLVLEATGSWYYFFEQMENKVKDIILSNPIKTRAIAEARIKTDKIDSETLAHLLRTDLIPCSYIPKREIRDLREILRYRASLITLRTMIKNKIHAILSKNGIKIKYSDIFGKRAFKYLEELELRDCYKKALTGYLEIAKTLTKEIGTITEVIEQLVEENEDAKLLTTIPGIGYYSALLIVSEIGDINRFPSSKQLCSYAGLVPSVYSSGGKTYHGRITKQGSKWIRSILIELSIHFIKSSKHLKNLYGRLKIRKGSNLARVAVAREMLRIIYSMLKDKRPFKIDTLVVS

SEQ ID NO: 390376 - protein, 403 aa, unidentified
MVRYHVGVDVSKGRHYVSIRDLSQGNYCKAFCFTNDHDGFMELVEALDKLSSEKSDFLIGVEACSFALNLSYFLMATGFSLVEVNPFRAGQFRKAQGKKAKTDKIDARTIATILELGDHKPLSIPDPILDNLKELTRFRVDLVNERAAMLIHLQEALSVLFPEYGRVFRQLDSAGSLALLAAYPGPENVITAGEEAIGKTLALASPRRMSRGMARRIIEAAKGTVGVIQKQPSLGIKVSILAKRIANLRETIRDLDKQIVAMFNNLPNRPIGFPLGRPQTLAAIVAEVGDIHRFTTLKKFLSHIGWCPQTFQTGNFRLEHPRMSHAGNKYIRRIIWMLSVLAVTRVPCCRDYFRRRVREGKTKMHILVAIGRKLISILYMMLKRGVPYDPNWEENRHCALARP

SEQ ID NO: 390377 - protein, 414 aa, unidentified
MNSPPTQEPRFVGLDTHPRELTVAAVNSQQKVVLPPRRLRIDELVGWARKNLGPNDNVVLEATGNAWHLYDQLEPLVGSVTVVHPLLVKLITAARVKTDARDAVKLARLLAAGLAPAVWVPPQEVRELRGVIAHRRRLVKQRTQARNRLHSVLQRHNLLPPQGGLFSASTRAWWESLDLSPTERLRVRQDLTILQALEPLIEEAEAEVVRLSTVEPWASQVPFLLQLPGVAILTTMTLLSAIVDITRFASAKKLVGYSGLGASVHASGEEHRDGRITKQGRKDIRWISVEAAWRAVDTSQHWRERFERLRVRLGDKKAIIAIARKLLVLVWHVLSKHAADRHAEEERVARKLLSWSVDVHREGRQGHSIAAFVREQLTVLGLGESLESVTSGSRVYRLLPGQAPTDSEPARHTP

SEQ ID NO: 390378 - protein, 332 aa, unidentified
MSMNLQGRATQRLSRPNAGIDVSKEHLDACWQTQVERFGNDGKGWSELIAKLKATEVDLVVVEASGGYERGVLRALQEAAISVARVNPRQAREFAKSMGVLAKSDGLDARTLRDFADVLARHAQRAKFITPVMDEQRRMLEMLMTRRRQLVDMRVAEQQRLEHAGERAAKSIHSVLKTLDRQIGQIDKDVDGHLERHFKAQRELLESVKGVGAVTTLTLLSALPELGRLKRKPIAKLAGVAPLADDSGKRRGQRHIWGGRSEVRCALYMATLSARRYNPVIASFYERLVAAGKPKKVALVACMRKLLTILNAMLRDNAAWDEARHALTASNA

SEQ ID NO: 390379 - protein, 406 aa, unidentified
MQGPVITVDVSKGSCHYQPYVSNGHPMRKPKVLHDTVEGFQSLSDLIDTMKDRYECETIPVIFEATGVYHRCLQKYLDDHQIPYYIISPLMSASYRKTTPNSNKTDDLDCSHIAKAYYGECNLFPYDKPSKSFHNLRELNRYYECELNHLRMRKNTFRKYLDIVYPRLDKCFKGHSSLYDEIPMEVIKQYPHPSLLLKHKEETIVKKIEKKTSHNASFIQNIVHEMYECSMHCYSGADVTDVESMLLPELVDDLQSQEERCDEILKQLVSEAQKTPYFTSIVSIVGIGDNLAARIIAELGDMSRFSCRRAITAYAGLNPKIRQSGDMDGIHLAISKKGNKHLRCLMYLAVSCNYRLKKCDVLYEFNQKKRQQSFSPLKPKAATIATAHKLLLIIYALCTNGTVYHS

SEQ ID NO: 390380 - protein, 348 aa, unidentified
MLADQVDYVVGVDTHRDEHVLAVVVASTGAVVAQRSVPATSRGYARALAFADEHAAGRRVWAVEGAGHYGAGLARHLSGRGETALEAGRGSRNERRLQGKDDQLDAVRAARTVLSTETLALPRKGQRREALRLLMVARRSAVDVRREALVQLHSVIVTAPDELRAELRGLPQTRLIERCSRFRRSSSRTPTADATTLVLRTLARRVQAATEEAAELRTEILAHVRALAPRLLDEPGVGPIVAAQLIVSWSHKGRVRSEAAFARLAGVAPIPASSGQTTRYRLSRGGDRQLNRALHTVILHRRLHDPATRDYIARRVADGKTRRDATRLLKRYLARHLYRILNSEPTMT

SEQ ID NO: 390381 - protein, 367 aa, unidentified
MKKGSTAAKQRVRNISGQTLTIGLDLGDRNRWYCVLDEAGRIQLEQRVRTNAKALQEVFGAMPRNRIALEIGTHSPWVSRLLSELGHEVIVANARKVRLIGESRKKDDRLDAQTLARLARIDPELLYPVKHRSAQAQADLMMIRGRAGLVRARTGLVNTARGLAKSYGERLRGCNARHLNPEKAEGLSPELQAALEPLLNAIESLSERIVEYNERIEKLAQQDYPQVALLKQGKGVGTLIALTYLLTLEDPHRFQKSRDVGCYLGLQPGRRNSGRSEPQLHISKEGDPYLRTLLVQGAQHILGPFGIDCDLRRWGLRLAERGGKSGKKRAIVATARKLAVLLHHLWVSGEAYEPLHNRNRVAVAAAA

SEQ ID NO: 390382 - protein, 379 aa, unidentified
MKVITLYIGLDVHKDSITIAIAQAGPKGEIRLFGTITNDLQALEKALGRIRKAHPGAHLEVAYEAGPCGFGIARRLKQLKVPCLVAAPSLIPKQPGSPFKTDQRDARTIARLLRAGELTGVYVPEPTDEAIRDLCRARTDAVDDLRRCRFRLKAFLLRHGYRYQGKANWSQPHMRYLRELVFPHPAMKTILEEYLQGIDAAQARVERIEASMLQLLESWRLKPAVRALMAFRGFQLVAAMITVSELGDIHRFKHPRQLMTYLGLVPTESSSGPHQRQGPISRCGNGHQRWILTECAEHYALPPKVSKELSARQQGQPQAVRDLSWKAQNRLHLRFSRLLARRLQRNKAKVAVARELCGFLWVLLRGQECYRTSAGGATS

SEQ ID NO: 390383 - protein, 425 aa, unidentified
MAYRIAGVDVHKKMLAVAVADVEVTEEWRFDRRQFGTSPGELRALAAWFLEREVEEVVMESTAQYWRPVWDTLERDWQPSRRARAEAGPTAGALHLAQAQSNHGPRGRKQDFPDAERLVKRLVAQELILSFVPDVTQRLWRTVTRRKYQLTCNRVQLQNRLECLLEEMHIKVSSLVTDLLGPSARRMLRAVANGETDPATVAALGSSRLHATPDQLRDALGPCTDLHPVYRRLLAMTLDECDAIEAHLRHLDEELARLLREHQAAVERLAAVPGLGVDSAQQMIAEVGPTAATFATAKRLASWVGACPGHDESAGINHSHRSPHGNRQMRRLLNQAANAAVKTKGSLFELVYRRLVVRLGHAQAIGAIAHRLCRLVWKILHDGVRYEERGPSVTKARAQRRAAKMIRELRALGYRVEPSAASTPA

SEQ ID NO: 390384 - protein, 376 aa, unidentified
MTMIGAERPDTEVETILGVDTHLDFHVAVAVDHLGSYLGESSVPTNVEGYERLLRWAEGFGPVRCAGVEGTSSYGAGLTRHLRAMGIEVLEVERPKHRRRSSRSNLQKSDPSDAEAAARAVLAGEASGVPKSGDGTVEMIRVLRAARRSAIKARTQAANQLQGMRVTAPEQLRRRLRGLSTKELVYVAARFRLADDPRDVPTATKFALRSVARRYQALSREIDELEAHLDRLVGQVAPELVSLPGIGTDNAATLLVVAGDNPQRLRSEASFANLCGVAPIEASSGKVVRHRLNRGGNREANRALYMTCLARMRRDQRTKEYVVRRTQEGKSKREIIRCLKRYVAREVYRVLISCGARSSPTGPKEEAQIAAGSNAA

SEQ ID NO: 390385 - protein, 313 aa, unidentified
MPSAAPSPIVGCDVGKTSIAVFDSRAGHSFCVHNSPAALTAFARSLEPNCLVVCEATGGYEAELIAALLDAGRPVHRADPSKVKAFIRSFGTLGKTDAIDARALAQYGQERHARLPRWQPADAQRDRLHTLVMTRRDLVASRLAWANRLDPPTAAPAQPFIAPVIAMFEQQIQAIDREIAALIAAEVSLARAVATLRTICGIGPKTAAALVALMPELGRLDRRRIAALAGLAPHPRQSGGADAYRRVHGGRAEVKRVLFMAALSAARHNPVLRSFRQRLIAAGKKPIVAVVAVMRKLIVICNARLRETPPVAA

SEQ ID NO: 390386 - protein, 401 aa, unidentified
MKTVLSVDVAKNKSMIMLMNSDGEIFIDTKEINHNLEDFEKVKEEIKEINPQNLTVFMESTGTYHLPVERYFKENGFNTLVINSLTTKNNYDTIRKTKTDKKDCYRLAKLFFVNEVEYHDLSKKDLYANLKAMTRQYFYLLQNNVSCKNRYKRLINICFPELEKIFKSTRIYDDTALNFIKEFPHAEIVKEKRIDALYNNLYKTNRRNLNFYKKLATTIKTASINSYPGVDKEHEDVKNLSYMAKIVQNNNNIINELREKMIETAKQSSYYKIINSFYGIGDTLTAEILGELGDITRFDSPKEIIAFCGLDPTIKQSGKSINVKGAISKRGNKYARYILFNCSQMVVKLGASNYPEHPVYIYYQNKKAEGKHYYESLTACSTKILRMLYSMCKNNKQFLEN

SEQ ID NO: 390387 - protein, 366 aa, unidentified
MRKPSTTALGRRGKLQDRQLTIGLDLGDRSSFYCVLNGAGEVIVEEKVTTSPEAMKKTFGKMPRSRIALETGTHSPWISRLLSDLGHEVIVANARSVRLIGESRKKDDRLDARTLARLARIDPQLLAPVKHRSAQAQADLTVIRARAVLVRARTSLINAVRGLVKSNGERLRACSSRAMNAGVGSELRAELRVALKPLLDGIEALGMRIRQYDQQIEELNRGRYPEIALLTQVDGVGILTAITFILTLEDPHRFHKSRDAGCYVGLQPARRNSGQSQPQLHISKEGDAYLRTLLVQGAQHILGPFGVDSDLRRWGLRLSERGGKSGKKRAIVAVARKLAVLLHRLWVSGEAYEPLRRAHQTVVLAA

SEQ ID NO: 390388 - protein, 417 aa, unidentified
MPFRLAPRRWVVSVVAAPVSSSTVVVAVDVGKNCVALSVTDASRHRLFGPIEFAMTRPALERVVARVGEVLPTAGVVKVGVEAAGHYHLPMITGSAWPTGWEVLELNPAHVGEQRRVAGRRRVKTDAIDLEAITELVLAGRGIPVTAQEEVVSELTAWAAHRYRRVGTRTSTKNQLLGQLDRSFPGLTLALPDVLGTKVGRLVAAEFADPARLSALGAARFIRFAAHRELRVTRPVAERLVAAARDALPTRDAVIARRVLTADLELLADLDQQISQAEKEITELVPKSPFRTLTSVPGWGVIRAAAYGAAVGDPTRWPGPSQLYRASGLSPMQYESAGRRRDGGISREGSVELRRALIDLGIGLWHSDQPAKAYAAGLKARGKHGGIIACALAHRANRIAYALTRDRAAYDPARWVR

SEQ ID NO: 390389 - protein, 411 aa, unidentified
MEKVYDKCCGIDVHKKLIVACFRKGNQQEVRDFGATTRELLELCDWLKDGGCEMTAMESTGSYWKPLYNILEVCELNAMVVNAHHMKAVPGRKTDVKDAEWIADLLQHGLLQASYIPDRDQRELRELVRYRKSLVGERNRELNRLQKMLEGANIKISGTITDINGKSARNILEHILSGKMIDSAEYDILYEKKIIAHNLKASKEQIIDDLNGVLSDLQKKMMRLLLKHLDELDAIIGELDDDIDNFMKPDEKKAAEVIQDIPGIGNTSAQAIISVIGTDMSRFPTDSHISSWSGLCPGNNESAHKRKSGKTRKGNALLRETLVVCANAAVKNKSSYFYAQFTRISAHRGKKRALVAVAHSMLIAIYHILKDGVVFKDLGADYYNQFNKERKINAYLKKLKALGWEAPVVAA

SEQ ID NO: 390390 - protein, 375 aa, unidentified
MKEKVRFLGMDVHAETIAVAIAEADGEVRSLGTIANRAESIRKLVKKLGPAEHLNACYEAGPTGYVLYWQLAELGVACEVIAPTLAPMKAGDRVKTDRRDAERLARSYRSGDLTAVWVPDEGSESLRDLVRAREAAKQDQLRARHRLGKFLLRTGRRPAVGMKAWTSPYMAWVRQVQFTQMAREATMLDYLHEVDHMGERVKRLEQAITEAVKLATPAVQEVVKGLQALRGIAEISAVTIIAELGSITRFDTPRQLMGYSGAVPSEDSSGKRTRRGSITKTGNAHLRRIVVEAAWSYRYRPAIGPRLRKRQEGVSEPIKEVAWNAQVRLTKRYARLAAAGKDQRKIITAVGRELLGFIWAIGVKAETAVTQQMAA

SEQ ID NO: 390391 - protein, 389 aa, unidentified
MGVAEVRTATKTTKNGDKHMKTLNKYVGLDVHKDTTVIAVADGGRDGEVRLYGEISSDLGALEKVLRKLGGEGVVLHVVYEAGPTGFVLYRRLQQLGIECLVVAPTKTPQEKGLRQKTDRRDALLLARLHRAGELTAIHVPDAVDESIRDLTRARADAVHDLTRAKQRLKSFLLRQGYRYSGKANWSEAHQRYLRELVLPLPALKAVLEECLLAIDQATQRVVRLDELLAVQVPQWRMYPAVEALMCLRGFQLTAAAVLVAELGDVRRFSHPRHLMAFLGLIPREHSTGSTRRQGSITKAGNAHARWILIEVVQHAFLPPKVSAPLTLRQQGQPTVFRELSWKIQVRLHKRAWHLLQRGVMKAKVTVALARELAGFVWDLLRQVRVPQP

SEQ ID NO: 390392 - protein, 388 aa, unidentified
MNCTQNYKIDQVTEQTLVVGIDIAKRTHYACFVDDRGRVLRKSFPIFQSKEGFQQLYKAIQEAMQAFGKSEVIVAVEPTGHYWLNLAYFLEEHGIPLVMVNPAHVCRSKELDDNLPTKHDAKDALVIARLAKDGRFLVPRLLHEIEADLRVGSTLKEKLRKEQTAVKNAIIRWTDRYFPEFWTVFRDLGKTAISVLEWTPFPADMAGRTAEELIEVYRQSEGLKCPQKAKIQALINAAKDSIGVTEGTTMARFEIAALVRRYRQLEAEIGSFAHYRDPRQLVKLAGLTLKENSSGQRKGQKHISKRGRKRLRSVLFRAMIPLIRHNEAFRELHEYYTTRSVNPLTGKQSIVALCRKLLNVLFAICTKKQAFDAERMKQDVLSQVQRAA

SEQ ID NO: 390393 - protein, 332 aa, unidentified
MYLGIDVHKQYSQVAAMDESGEIVEEVRVQNANLDDLAQRYAGAKAAIEATSNYYHIHDTLSEHLDVTVAHPGKLTLIADTDKKTDRVDAKELARMLRLDSVPESYVPTDEIRQARALVRGRQKLVQTRTEFANKIHGLLSDHGITRDIKPLSVSGRESLRDISLPTPWDTMLTSYVQMIETLTDEIDRLESAIEERAGSLKETQLLMTIPGVSYYSALMIYAEIGEIDRFDRDKEVVSYAGLNPIIRESGDSRIEGGISKRGSRQLRWILVQSSRTAVHTCQDEYLSQFYDRLEGRKGSQKAIVATARKLLVSIYHMLDREEVYDPPGVSA

SEQ ID NO: 390394 - protein, 339 aa, unidentified
MNDVTTIGLDLAKNVFQVHGVDGAGNVVVCKQLRRSQVLPFFRKLGSCLVGMEACATAHHWARQLMGLGFEVRLMPPHYVKAYVKRGKNDASDAAAICEAVTRPTMRFVAVKSREQQSILMVHRTRELLVRQRTMVINAMRAHMAEFGIVAPAGVPQVKKLLAIIADGDDERLPPVARTCLEALVRQFLSLDMEINAAEARIHAWHRGDETSRRLEAIPGIGRITASALTASVSDPAVFRSGRELAAWIGLVPRQNSTGGKQRLGRICKQGDPYLRWLLVAGALSVIRHAKRRGTASPWLAEIIARKPTKVAAVALANKNARRVWAILARGEDYRPAGA

SEQ ID NO: 390395 - protein, 360 aa, unidentified
MEHELHYIGIDTAKEKLDVDVLRPDGRHRTKKFANTTKGHDELVSWLKGHKIDHAHICIEATGTYMEPVAECLYDAGYIVSVINPALGKAFAQSEGLRNKTDTVDARMLAEFCRQKRPAAWEAPHPLERALRALVVRHQALTDMHTQELNRTETAREVQRPSIDAHLLWLEAELKRLEKQIKDLTDDDPDMKHRRKLLESIPGIGEKTSAVLLAYIGLKDRFAHARQFAAFAGLTPRRYESGSSVRGASRMSKAGHVSLRRALYMPAMVATSKTEWGRAFRDRLAANGKKGKVILGAMMRKLAQVAYGVLKSGVPFDASRHNPVADVKIAEGMRKKQRLTALCLACLQSGKPDQEKTCRP

SEQ ID NO: 390396 - protein, 347 aa, unidentified
MLHAGLDLSRRRVDVHVLNEAGETLVVDAFPPDADGLAHLVRHVASFREEVHAVIESMNGARFVHDTLELHGWGVEIADALRVKGLAPLACKTDKIDAKVLAELSRRDLVPAIWLPTPSVRAERERARFRLHLVHHRVALKNRIHATLLAFGHPCPVSDLFGESGRALLNRLAIPEPWAGTVSASLRLIDELDGQIDATERELRRLGANHPYMSLLQTVPGVGWVLAYTIASEVGDIARFESPKKLVGYTGLCPRVYQSGGTDRRGRIAKNGPTYLRWALIEASIHACKSPLYKPAYDRTKARLGRDRGGKVARVELGRKLAEAMWHMLTKGERFAPARSQAAALVA

SEQ ID NO: 390397 - protein, 343 aa, unidentified
MQTVTTIGLDIAKSVFQIHGIDAAGNVIVRRKLKRRYVLPFFQKLPPCLVGIEACASSHHWSRELQSFGHTVRLMPPAYVKPYIKRQKNDAADAEAICEAVTRPNMRFVATKTREQQSCLMLHRTRHLFIRQQTSVINAIRAHLAEFGIVAPVGRNGVEQLLDVVADVSDKRLPEISRACLLALGAQLRALKAQILNFDRQIIASHRSNEASKRLDEIPGVGPALATALVASVADPKAFRSGRDFSAWVGLVPKQHSSGGKDKLGSISKQGDRYLRSLFTAGALSVIRYAKFHGTKHRPWLTALLARRPTKVAAIALANKMARMAWAMMVRGDRYKEPVALAA

SEQ ID NO: 390398 - protein, 393 aa, unidentified
MICVGIDVAKDKHDCFILSSEGKVLADVFTIPNNAEGFGTLLQTILRCTRPTDKIKVGLEATGHYSYNILGFLLDKGLPTYVINPLHTNLYRKSLSLRKTKTDRVDARTIAAMLMSDVDLKSYTDTAYHNEELKSLTRYRFDKVRERAKLKQSVSRLVTILFPELEKLVSSLHMASVYAVLGEFPGAKQIAGAHLTHLKTLLNDASKGHYGRDMATEFRNAARCSVGSVMPAKSLELQHTIRLIRELDTEINDIETAIQAIMEEMQSPITTIPGIGIRMGAMILAEIGDFSRFDSPDKILAYAGMSPSTYQSGQLSLSGAYSHMEKRGSRYLRYALYNATKYVCLWDPTVEAYLAKKRAEGKHYNVALSHAAKKLVRLIYAMEKSRRPYNRAA

SEQ ID NO: 390399 - protein, 328 aa, unidentified
MFYLGIDVSKAKLDCCLLKEERPEKRKSKVLANSVTGVAELLHWLARQGAQPGQTHVLLEGTGVYHETAATALHDSGVTVSILNPARVRDFGKGLGLRTKTDAVDSWLLARFGLLQKPAAWQPPPAHVRQLRALLARRQALSEDLQRERNRLEKAQATETPALIHQSLQECIAFLERQLAQLQKDIDQHIERHPDLKQDLALLQSIPAVGPQVGSHLLCVMRSNSFRSAEQLAAYLGLVPVEHQSGTSVLGRARLSKAGPPRLRALLYMSAIVGIRHNRHVKALYERLISKGKSKMAALGAAMRKIAHLCFGVLKKQTPYMQNLLSTT

SEQ ID NO: 390400 - protein, 350 aa, unidentified
MKKLNTISIDLAKSVFQVAIINHKGKILSNKKIARKKLMELIVNQPRSFIAMESCGSSNYWGRKFQLLGHEVKLISAQHVKPFVKSNKNDANDAIAIYEASHRPNMKFVSIKTLEQQDIQSIHRSRQRLIDTRTRLVSHARGILAEYGLIFKVGVTNLRNGLASLINDENESYSDETTEGLLLLVQDWYDELVSLDIAIEKKNLTIKAIARNSEQAKRLMQLEGIGVITATAMVASLGTQATEFKNGREMAAYLGLTPKQFSSGGKSKLSGISKRGDAYLRTLLVNGATSVIQALGTKTDPKSQWIHQLLCRMHKSKARVALANKMARICWVILAKGERYKPELASAIAI

SEQ ID NO: 390401 - protein, 336 aa, unidentified
MTIIRIGLDTSKHVFQIHGVDENEQPGVRRQIRRSEVAKVFAKLAPTRIGLEACGAAHHWARVLRGLGHEVMLLPPQYIKPYVKRGKNDKIDAEAICEAMSRPTMRFVPVKNTEQQAALTMLGVRDLLVKQRTMLINAIRGHAAEFGVTAAKGPKQVTELLQRLASGEGVPALAREMVGMLASQLGGLDLKLKAIEARLMAWHRQDQTSQCLATIPGIGPIGGVSFALKVPDPKAFRSGRHFAAWIGITPREDSTAGRQKLGRISRAGDEDLRRLLVIGATAVIRAAKPGRTAPWLLALLARKSKKLAAVALANKMARIVWAMMVSGETYRRPVQA

SEQ ID NO: 390402 - protein, 423 aa, unidentified
MKYALVRVLPEVPPGGVCAGIDWASADHAVCVVDLAGRVRDRFTAVHDRAGIAGLIARLRENQAGEVAIERGDGVLVDALLAAGLTVVVIGSRQVKNLRSRYGSSGAKDDRFDAFVLADALRTDRARLRPLVPDSPATLALRAAVRARRDLVAHRVSACNQLRAHLQVAFPGAVGLFSELDSPLSLAFLAAFPGQQAAARLDEQALAAWLATIPRRGNTAPAGVLAARLAAAPRGAAGADAAQAAVTAELAAATAGLAGRVRALEAEIAAQLAAHPDQHIFTSLPRAGTLRAARLLAETGDCRARYPDPWSLAGLAGVAPVTRRSGTYISHEFRWNVNRQLRDAICDFADGSRHASPWAATVYAAARDRGKDHPHAVRITARAWVLIIWRCWQDGTSYDPAKHRALQDILTRQAAAGTPQPHR

SEQ ID NO: 390403 - protein, 369 aa, unidentified
MIVIGTDTHKKTHTCGAVDALTARARGELTAPARGGSFGKLLVWARALDRERVWALEDCRHVSGVFERFLVARGERVVRVAPKHMAGARRAARERGKSDSIDAFSVARAALKEGIENLPGAHLDARALDIRLLSDHREDLVGARTEDQQRLRWHLHDLWPELEIPAGALDTAKWLGKVARRLARAERTTRVRVARELVREIAARTTRIRELESELATLVADYAPQLLAERGCGPLTAAKLIGEIAGATRFATDAKLARTGGAAPIPASSGQTTRHRLDRGGNRQLNCALHRLAVNKGNWDPATAAYLKRKQAEGKSRKEALRCLKRHLARRVWKLLLAAPAAAAPAAAPRISTSTTIAGTAPAPMPCLT

SEQ ID NO: 390404 - protein, 429 aa, unidentified
MNQVPVAGIDVGKRFSEMAILSPSNQVYARIRINHDAYSNFDRAFELLRKAEKEFAAKPVVVMESTGHYHKILFQALNKNGYEVCVINPIQSDSIKNIRVRKVKNDKVDARKIALLYRFEQLKTTNIPHEDVDCLRSLCRHYYKLSDQLTAYKNRLLGIVDQLFLSFTDVFKDISSCSALAILEKYPTPEDILKADRQELISLIQKTARKNIKWATRKYESLCSKASNFSPLSINSIANVAMLKANIAMIKTLMQSLDEAVEAIHELLDKDASKDMPVLSLTIELLCSIPGIGLLTAATIVAEIGDFSAFPKPDKLVAYFGIDPSVTQSGQFKGTENKMSKRGSRLLRRVVFTTALANVRKKRNGQEYNPILYEFYRKKCLSKPKKVALGAVMRKLVTIIFAVLRDRKPFVLRKPEEHAKMLVAKNSAA

SEQ ID NO: 390405 - protein, 380 aa, unidentified
MPEAVIGLDVGKSSHWACVATRDGEVLLSAPVANREGDLDSLFGRFPDALVVVDQSRNIGALALARARVAGMSAAYLPGLAAHGAARLFAGDAKTDERDAMVIAKTALGIPDALLPVGDPGPTIAAARALAAQRNFLTCENTRNKNRLRSILLESCPAFEALVDLSDGPQLRLMASLGGAWSVADAGPRRAAALTRGAARGKIEALVRSTASSTRPDAAAIAAEDRAVRLLARRISENSAEIEAITAEISALLEGDDTYRCLLTVPGIGPKTASELAISIDIEDFPSHDRLASYCGLAPRNRQSGTSISSVTASRQGNKRLKNLLIFSCNCLTRTEGRWGDYYTRCRERGMSHGKALKALARKRLKVIYAVMRDRVPYAA

SEQ ID NO: 390406 - protein, 347 aa, unidentified
MSEVTTIGLDLAKSVFQVHGVNASGKPVIRRQLRRRQVLAFFKKLPPCLVGMEACATSHYWAREIAAHGHEVRMMPARYVKPYVKRNKNDAADAEAICEAVARPTMRFVPIKAPEQQAVLMLHRTRALFVRQRTALINALRAHLAEFGIVAGVGRNGLEKLLEVIADEQDERVPPVARDSLLALRDQLVMARQQILDADRRILAWHRASEVSRRLAEIPGVGPLIATALVAAVPDPYAFRSGRDFSAWIGLVPREDSTGGKHRPGHISKAGDRYLRRLLVIGALSVIKRAKQTSSTRRAWLVALMGRRPTKIAAIALANKIARIAWAIMVRGTRYKEPQVEPTAQAA

SEQ ID NO: 390407 - protein, 461 aa, unidentified
MAKKAKKIRNGKRLELKIVNPDAAGIDVSSTEMQVCVPLDRDAENNRKFGVFTEDLDKISDWLVSCRITTVAMESTGVYWVPLYMNLEARGIEVYLVNAASVKNFAEEKTDEIDAESLMLMHAYGLLKSSFQVDNFAREIRNLSRHRDNLTRTAAKEVQHMQKSMELMNIKLSNVISDITGKSGQAIINAILSGERDAQELAALADWRCKTPKEIIAKSLVGNWNEDLLFALKQSYELYQFIQKQIIECEQEMEKLFQKYSSHLPAQSNEIIRSKKQIEKKTKVAFDVEDYGYKIFGVNLMRIPGINEGSLLKLIGELGHDFTEKFDTYKKFCRWENLAPNNKITGGRIISSKIPKRKNPVGQIFREIAVFMSGSKSLFGDYYRRMRSRKGPMGAIVATANKISKIVYTMVKNKTEYDESLININEPALLIRKLRNMQKNMKKLQEQIEFYQTKPILQIAN

SEQ ID NO: 390408 - protein, 359 aa, unidentified
MSSIAQQPMRRKVAIGVDTHKHIHVAVVLDELGGRLGELTVPADSGGYVQLERWAVGFGRILAFGIEGTGSYGAGVASHLQRQGHRVIEVNRPDRRERRMNGKSDVLDAENAARAVLSGRATAMPKAADGEIEMLRQIKIAKDTAVKARTQAMVTLKTLVVTAPPELREELDGLPKMALIERCAGLRPGPMITTLAATKHALRGLARRWQQLQVEIKEHERHLATLTERVAPAMVAAFGIGPDTAAEMLIVAGDNPERVRSEPAWAKLCGVCPVPASSGKTSRYRLNRGGHRQANSALYRTVIVRLRFHQPTIDYVARRTAEGKTKAEIIRCLKRYVAREIWAYLHPDRHAAPAPELAA

SEQ ID NO: 390409 - protein, 310 aa, unidentified
MKVVGIDISKHHFDLYLLPEGKAAHYSNDAEGIQQCCRFLAEVRPERIVLEATGGYELALTLALQTAALPVIVVNPRRVREYARSQGRLAKTDQIDARMIAEFGQSPRVPVRELPDAQGRQRMEWLARKRQLVEMHVAESNRLEHATDPLVVRGIRRMLTLAEQEIAKIDKQIAGAIAADPQLQRKAEICDSAPGIAAATAAVLVTELPELGRVNRREIASLVGLAPLNRDSGQFRGQRTTGGGRVRIRNALYMPMLTVIRCNPVIRRFYQRLLANGKSKMTALIAAMRKLLTILNALIKKDELWNPQLT

SEQ ID NO: 390410 - protein, 387 aa, unidentified
MVQVNDLSRSLTVFDPISTLVVVVEMGKASWLVRSVVPGVERQPLKKLEPDATALLRLIERWRSEAVRAGRPISRVALTYEAGRDGFWLARWLIARGIEAHVIHSASVAVSRERKRAKTDRLDTAMLMRVFLGWLRGERGHCGMVAIPTIEEEDARRPSRERESLVNERSRIINRMKSALARLGIRGFKPHLRRAPERLACLLTAEGTSLPANIIEELRRDMARLALVREQISAIEKTRVERLERAPDTGPHAMVRLLSRVIGIGIETADMLVREILSRKLRDRRAVARYAGLTGSPDESGLKSREKGLAKAGNARVRRGLIQLAWRFLMFQKDSALARWYRIRTEGPNGARKTTMIVALARKLLIALWRLVTTGEIPDGVELRPAA

SEQ ID NO: 390411 - protein, 389 aa, unidentified
MKIFVGIDIAKLNHFAAAISSDGEILLEPFKFTNDADGFQLLVSKLESFDKNSIIIGLESTAHYGDNLVRYLVAEFYQVCVLNPIKTCQMRKNNVRKTKTDKVDTFVIAKTLMMQDDLRFITFFDLDMMDLKALGRFRQKTIKQRTRLKIQLTTYVDQVFPEIQYFFKSGLHQNAVYALLKEAPSPKEIASMHMTHLANLLKVNSHGHFTKEQAKELRVLAQKSVGANDSAISIQITQTIQQIELLDSQLEKIEVEMTDIMKFNDSVIMTIPGIGYINGGMILGEIGDIHRFSNPNKLLAFAGLDPSVYQSGNFQVKTTRMSKRGSRVLRYALVNAAWNVVRNNATFKAYYDAKRAEGRSHYNALGHCAGKLVRVIWKMLTDEVEFNLE

SEQ ID NO: 390412 - protein, 365 aa, unidentified
MTSRQRSTSSSADPPARREVVLGVDTHGEVHVAAVISPLGKILGTESFPATAAGYRQLLVWARTRGTVRRAGVEGTGTFGAGLSRYLLAQQVQVYEVNRPDRSARRLLGKSDPIDAQAAARAVLSGRARARAKSGDGPVHSARMFKLAKDSAVKARTQAINRVKAVVVIADPALREQLSSLGNAELFRTCARLAPHDGGGDEDAVAQATHLTLRMLAERIEQLTAQINELNQRLTRLVERHAPQLLEPVGIGPDSAVTLLITMGDNPERLNTEASFAALCGVSPIEYSSGRRSTRRLNHGGDRQANAALHRIVFTRLRHDPRTQAYYERRTQEGKTRREIIRCLKRYAAREVFNLVRAVPGVPRS

SEQ ID NO: 390413 - protein, 347 aa, unidentified
MRKHNTIGVDLAKNVIQVCVVSVSNKELLNKELTRKKFTELLVKQKPALVSFEACATAHYWARVALRHGHQIKIIPAQAIVPFRQGHKTDSNDALAVAEAANRPNIKVAPCKGIEQQGMQSVQRSRELLVQERTALSNHLRGLLLEFGVVIPRGFAALTQRIPDILEDGENELPDIYRPTLARLYERFCRLREDIHFLDKQIACLVKQNEPCRHLTEMEGVGPISAILLFATLGTGEAFKNGREFSAYIGLTPKQYSSGGKTNIIGISRHVANRRLRAVLIQGARAYVHKMKEPQSPKDQWLWSLIQRAGYGRAAVALANKNVRTAWALLTRGTVYDKQYGNELQPA

SEQ ID NO: 390414 - protein, 322 aa, unidentified
MQQDEVMVGVDVSGTQLDVALWPSGENFSVSNDMQGVEQLLTRMVEVHPRAVVVEATGGLESLLVGELCAAQVPVALVNPRQVREFARSLGQLAKTDRLDARVLAQFGHSAHRSGRLKLTQLLPAADAELKALVRRRRQLIEMLGAETNRRQRASKVVKKSIVATIRSIKRTLAELEQQLRETVKNSPAQQKKAAILEQVPGVGPQLARTLIAEVAELGQLGRRQIAALIGVAPHAHESGQFKGRRMIWGGRAGVRRTLYMAMLTATRYNPLVAPFYRRLLEAGKSKKLAYIACARKLLVILNAMFRDHTTWNPKLDLQHSR

SEQ ID NO: 390415 - protein, 359 aa, unidentified
MDTEVLKYSVGIDISKDEMDVCFKSLLMGQETKIKGTRKFPNTKKGFDQIVSWIDKRRKDKTISLVVVVEATGVYHENVSHYLHGSGYRVSIVLPNQSNSYMKSLGIKSKTDPIDSKALAQMGAERKLHIWEPPNAELMELRSLTRHKNNLQKMKTELKNRLHAQQHSAQPGKLVVKQLKSQIRTMDNHLKRVDKSIKELVEAQSPFNDKIKMVTGSIKGVGLDTVVSIVAETNGFELFKSQGQLISYSGYDVVENQSGKRTGKTRISKKGNSHIRKSMHFPALNVVRYGVEPFASLYNRVFERTKIKMKGYVAVQRKLLCMVYTLWKTEQEFDPVKFKDQQKHTQDELLIEQCLTHIA

SEQ ID NO: 390416 - protein, 421 aa, unidentified
MASDVSWFNICTWGGKVMDLAPLYRCVAALDVHQAKLTVCILREEADGELRVELREFGGFKRDRREMARWVASFAPESVVMESTGIYWKSPYEALERAGLRALVVNARHVSQVPGRKTDLADAQWLAILARSGLLRGGFVPPANFRHLRLVSRQMQKLTGILASEKNRIHKVLTDGGIRLGVVVSDLHGKSGRAMVKALVAGESAQSLLGYADPRLKASEEDLLDALDGDLSAEHRLVLRQLLDHIGYLEQHIAALRQALVAGLAPQQGLLQALQTIPGLDETGAALLVVEIGDDMQAFGSPEKLASWAGVCPGNHESAGKRKSGRQRKGNPYVRRLLCEAAHAASRTRCALAEKFKGLLVRRGRKRAIFALAHKLLKTVFVLIDRGDYYRDAGVDYEAMSVERNAPRWIKMLRKYRYIPA

SEQ ID NO: 390417 - protein, 430 aa, unidentified
MGLIEPTPMPPERDEQATSYNWYVGIDWGSQQHQVCVLDRDRHVVGERVVDHDGSSLAQLATWLWALSAGHPQRVAVAIEVPRGAIVEGLIERGFHVFAMNPKQLARFRDRHTMSGAKDDRRDAFVLADAVRTDQPSFRRLQLDAPQLLLLRELSRAEETLLEEFRRSANRLRDQLHRFYPQMLHLCSGADEAWLWDLIDLAPTPAHAALLSQEQRQRVLKAHRLRRVKATEVLTCLQASALPVAPGAAEAAQAHCAFLLPCLRVLAEQLRSCAQQVEALLHTLAEAPDETGGPSDVAMVQSLPGVGRKITAWLCAEAAQPLTERDDQVWRTQGGVAPVPKHSGKRRQVVMRRGCNPRLRHALYHMARVAMQRDAYFGGVYEALRAKGQRHGQALRNIGDRLLRILIAMLHDRTCYDATRSRREPVVQMG

SEQ ID NO: 390418 - protein, 333 aa, unidentified
MTDLFKLQHFVGCDVSKNTLDFALYERGKYYRQFRHLQVPNNTEGFQAMRKWLRSFGVNLKNGVIAMEHTGSYSASLSEWCFKKKLPFVLLHPLDVKNASARGRNKTDKEDACFIADYVYTMREKLQTSTPEPAVIVKLRQLRNERNLAVKSRTSYINQIGSVTDKGTRDRMQKIVDGLTSQIKEIERAITITVDSDESIARNYQYLLSIPGIGMQNAVATIIATWNFTRFQTSRQYAKFCCISPLSKQSGTSVRNGDHVIKSGHNELKALLTDGARSAIQHDANLKTYYERKRAEGKSHGCVMNAVKFKLICRMFAVIKRQSPYVNTDRYRS

SEQ ID NO: 390419 - protein, 323 aa, unidentified
MQGKVSFQEDAMPVVYAGVDVSKEWLDIHLHPLGESRRFCNDKTGIRQLKRLLARHRLASIVMEATGKFHRPAHRSLWLDGFAVAVIDPLRARMFARACGYLAKTDRLDARFLALLAESLRPPADTPPSPHVEALQELVNARSAAKCDITALQNRSKTATTALLRGELNRLVRRLEQHVERLDKEIERRVGEDPQLYRKAEILTSIPGIGRVTALALMAGMDELGSCSGKQAAMLAGLAPIANDSGARTGRRSIRAGRPAPRRALYMARLVGQRYNPALARFADTLKAAGKPAKVILVAVMRKLLVLANCVLSHDRLWTPNPP

SEQ ID NO: 390420 - protein, 350 aa, unidentified
MTMVGGLDVHRAQITFDYVDDDGLVHWGQIRPATRKTLRGWLAEHCPDGDAEFALEGCTGWRYVSEELAGAGVGVHLGDPAEIAVLRGPKKRAKTDRADARLLRTLLLQGRFPELWIAPAHVLEIRTLGRLYCTLMDERRAWQQRIHAQLFHQGCPPVRALLSVTGRAALAGAELSAVGGQYVDTALGRIDELSTEIEPLRAQLVNFARHQTGCQALQRHYGIGWLCAAIIWAEIGDARRFSSSDQLVRFAGLDVTVYSSDGKRSPGHLSRQGSPELRWAAFEAAKCAARRGSPDYGYYRKLAAKRDGHNGKNPTLAVERKILRRCHHTLRELGDAAVALPVAEPQEVAA

SEQ ID NO: 390421 - protein, 466 aa, unidentified
MKKAGESSKTKRRGVPTALQAIRPMVAGIDVGSREHWVCGPARADGEPNVRVFGTTTIQLKEMVDWLAEQGTESVAMESTSVYWIPLFELLESRGIEAVLVNARQLHNVPGRKTDFQDCQWIQLLHSCGLLRGSFRPGNAIVAMRAIHRQWANLVEERTRCVQWMQKALDQMNVQVHRAVTDLTGTTGMAIVRAIVAGERDPVRLSTLRHHHCKKSVEDIARYLTGTWREEHLFNLKSALQFFDAVEALIATHESRLFEAMAVLQPDERKDAAVQPHPNPAKEKAIKNRGDQPARTALWRFAGIDLTRIDGIGIGAARIILTEVGLNLSVFPSEHHFVSWLRLCPRRPISGGKPLKTRRNALGANRISGALRMAASSLQRTKTALGAAYRRIARHKGAYVAIFATARRLAQLVYRMLRYGQDYVDAGEEVYDRQFEARRLAGLREAARSMGFSLTAQPATTPAKSG

SEQ ID NO: 390422 - protein, 395 aa, unidentified
MKHILSFDVAKGKSVYCFLDEKRNVIRDATLIEHKKDEFDELFNFISKYKNIVVIMESTSVYHLPVENYFRSKTIETIVMNPKLVKQYRDTLNKSKTDKLDCFKIARCYLGTIDNLYQKQDEYFMFNPLARQYWSLIEGQTRLKNRYRQLIEIVFPEFNLIFDDLYSDLALNFIHDFPHPILFVDRRIDYLMNYLKEKNGTTQAFRFKNKVLKMKELAKNSLCYVSVDSLQIQNLIQTIEMIQYHKQEIEKIKNQLVNNLKDTRLFKIINSIPGFGDFSTALFLAEVGDITRFEERKQFISFIGIDSITSQSGIASYHGPISKSGSKFARTILFNVVTTLIQICAHTDKENPIYLFFRKKQSEGKHHYKCIIACENKLCKTIYKMCTSDCTFMNK

SEQ ID NO: 390423 - protein, 381 aa, unidentified
MKRNKKLTPTSHQQTEATAEVIKLGIDIHKSKYVAIRQIDNQPPQSPQSFTPDEFLVWVQRQRLLAKRVVSCYEAGCFGFVLHRKLEEVGVENFVVRPRNWDEYGSSVKTDARDARELCGHLDRYLAGNDRALCVVRVPSLEQEQERSLSRQRETLAKERKRLQNVGTSSGLYHGVDVPSNWWKPKVFAKLCAEIPDFLKRILEPFQQILEVIDKQLRETTAREERKANRKIPVGLGALTASILDQEFVDYTRFNNRGQVSSFTGLCPGESSSGNKRQQGSINKHGNPRIRHMLLEAVWRMIQFQPDYKPIIHWKDRMANESFGAAKKKKMAVAIARQFSVDWWRIQTGRIQPEDVGLRIEYPSAYSTRALREGRISKVYA

SEQ ID NO: 390424 - protein, 365 aa, unidentified
MTITASESPATASGVILGIDTHLDVHVAVALDGLGRRLGELNVPTTVKGYQKLLHWAEDFGPVCCAGVEGTGSYGAGLARYLKAAGILVMEIERPKRRHLRRNGKSDPIDAEAAARAVLADDTAGEPKSGDGQVEMIRILRSARQSAVKARTQAANQLQALLVTAPEDLRHRLRELPTRNLVDTCARLRPGAAPNDVQTATKFALRSVARRYQQLSEEIAELDKQLDRLVADAAPELTALPGISTDHAATLLTVAGDNPQRLKSEASFASLCGVSPIEASSGKVVRHRLNRGGDRDANRCLHLICAVRMRHDGRTREYVARRTVEGKSKREIMRCLKRYIAREIYRLLAPMAAASGPSTPRSQAT

SEQ ID NO: 390425 - protein, 334 aa, unidentified
MLDERGELVLEQKVSTTPKAMEEVFGGMPRSRIALETGTHSPWVSRLLSELGHEVIVAHARNVRLIGESRRKDDRLDAKTLARLARIDPQLLCPVKHRSAKAQAHLTVIRARAGLVRARTALINVARGLTKSYGERLRGCSPRNLNKRAEGLSVELRTALGPLLEEIESLSERIREYNQRIEGIAQEHYPETALLKQVKGVGTLVALTYMLTLEDPHRFSKSRDAGCYAGLQPGRRNSGQSQPQMRISKEGDAYLRGLLVQSAHHILGPFGADSDLRRWGLKLAERGGKNGKKRAIVATARKLAVLLHRLLGEWRGLRTVPQFQPACVGGSRVG

SEQ ID NO: 390426 - protein, 373 aa, unidentified
MDQDTTFVGLDVHKASISVAVAEPDRGEVRALGTIPNTSDAVAKFVKRLGPASRLSFCYEAGPCGYGLHRHLTRLGATCIVAAPSLIPRKPGERVKTDRRDALNLARLLRRGDLPPVWVPDEVHEALRDLSRARTDAQVDLLRHRHQLGKFLLRQGLVSAQRLRRWGKTHRAWLQSLHLTHASHQIVLRDYLETVDRAEERLANLEAELALAATQSPLAHLIVALQAFRGIALTTAIILVAELGDLRRFPSPRTLMGYTGLVSTEDSSGDRHHRGRITKTGNAYVRHVLVEAAWQYTRAPGVWGALKKRQQGLPPAILAISWKAQQRLHRRFRRLTHRGKLRHVAVVAIARELAGFLWAAAQQISASAQAVPA

SEQ ID NO: 390427 - protein, 341 aa, unidentified
MTEVSTIGLDLAKNVFQAHAASASGAILFRKKLRRDQVLAFFAAQPRCLVAMEACASAHYWAREIAKLGHEVRLIAPTYVKPFVKRQKNNAADAEAICEAAQRPTMRFVAVKSEAKQASAVVFRTRDLLVGQRTQIINAIRGHLAEYGLIAPQGPSHVDQLIAQIEDPNSGIPDPARSCLAVLVETLRALQGKIAALDTEIAARAKRDDGARRLMSIPGIGPLIATAIEALAPPVETFRSGRDFAAWVGLTPLQRSTGAQERLGKISRMGERTLRRLLIIGASGVVRWARRKGVPAGSWLARMLARKPPMLVIVALANKMARIAWALIAKGGSYRAPAVAA

SEQ ID NO: 390428 - protein, 307 aa, unidentified
MFIGIDVANDRLDIHVRPGGDAFSVPRDDEGVASLAKRWAKDSPILIVLEATGGFETIVAAGLAAAGLPVAVVNPRQIRDFARATARLAKTDTLDAAVIAHFAEAVKPVARPLADPQTRLLGELMARRRQLIEMIVAEGNRRRQLTAKRALKSVDRVLAILKAQLTAIDHDIDTSIRGTPAWRETENLLTSVPSVGPKIARTLIAELPELGTLDRHQAASLVGVAPFNRDSGTLRGRRTIAGGRPVVRAALYMAVLVAIRRNLPLAQTYHRLKSAGKPAKVAIVACMRKLIIILNAILRDKKPWQPA

SEQ ID NO: 390429 - protein, 373 aa, unidentified
MNQNTLKNYTVEATPVASAKQIKDQKTPKAKRIAVGADVHLRGYQATRKVDNAAIGAVANLRSETELLLYVEKQCEQAEEVVVVYEAGPLGYGLYRKLEARGVKCLVCAPDSTQQKRKRRKNNQIDARTLTSNLFNYLNGNEAALQLVRVPTVEQEQARIASRQHDQLVEERKRLGAQGNALLLSQGFGSWKNWWRPKAFSRLEQLLPAWLFEMLQSWVDLLRALDEKIQRAKAALSKGWSGPRPKGAGANSLVQLQSEVLDWELYANRRKVACLAGMVPSEWSTGDDQRRGSITKVGVPAIRRIITEMVWRIVQFQPQYPPVQKWQEVLRGTNGTLKKKAVVAIGRQLMVDLWRMETGRVTAEELNLVMIGA

SEQ ID NO: 390430 - protein, 428 aa, unidentified
MNYKQNEKINQVKESTLVVGIDIGSTTQYARAFDWRGIELGKVFTFSNSREGFEAFKAWMQRLQDKYRKSDVIVGIEPTGHYWFDLGAYLEDEGILLVMVNPYAVKQTKELDDNSQSKNDRKDPKVIAKLVTEGRYSAPYTPDGVYADLRIMVTNRKRLIREMTQIKNRFARWFAIYFPEYTDVFGDYEAQSSMLLLKKVCTPEAIVELGAEKINQIWRDAKLRAVGMKRATTLCETAKRSIGLKKGSSAAQYEMKLLLEDYEYKKAQLDAVIEEIEKLCRKIPESEQMLAIKGIGVITVAGFLAEVGDVRRFESPRQIQKLAGLSLRENSSGKHKGQTTISKRGRSKLRAVLFNAAIPLIATNPEFKSLHEYYTTRANNPLKKKQSVIAISCKLIRVFYAMLTKGVDYDPKKMISDIKRPTVYLQAA

SEQ ID NO: 390431 - protein, 440 aa, unidentified
MNSNQAEALKATKFDAASLQSATHQSIVNVAFDVSSNTLDWAMELSSRMVNGQCVNSGIEIRETLNAIAQQAADDGHQQVRVICESTGVYHRRLLEIAGELGMLTNLVHGEAVAKFRAIQFADHGKTDKRDPKAALTVAKVGKLIKHRKLPGRYAQLRELHRIVLRCENRTRATKCELHADLRSLFPDLRLDKSVLYGPTGKTLINEFGANPYAIVAAGKEEFGVTMKQGSKYIKKATIEKIWSAASDVAEGDHDPNDAIIADIRSSGVRQLYAVICESKRNQDELEKRMQKLYTELQATDSRLPSPCKGVVTLRMLSRLVAEIGPPDDFTTINQLMRYAGLNLCERQSGQWKGRTMISRRGRSELRYVLNLMSIPLVSEGRLFSEYYHGKKDAGKMPGQKALTCVMRKLLKMFFGWYKSGRPFDSDRVFARANSPAAAS

SEQ ID NO: 390432 - protein, 416 aa, unidentified
MNAAGIDVSSRKSTVAVLRPFGEVVKLPFDVRHSAEDLAALAAQLKSIDGETRVVMEHTGRYYESIAKVLHEAGLYVSAVNPLLIKEYGNNSLRKVKTDKADAMKIAKYALDNWTELRDYTPMDTIRYELKTLNRQFQLASKQKTATANNLIALQEQSFPGIRKLFDSPVRSDGTQKWVDFTHDFWHVDCVRSDSQNAFAERYRKWCKRNRYQFSMEKATEVYAVAKSAVVLVQKTSVTKTLVQEAANQLTAILRSVETYRSEMNKLASQLPEYPVVMEMYGVGESLGPQLMAEIGDVRRFERKQSLVAFAGIDPAPSESGDYCSRSNRTTKRGSPYLRKTLFNIMKVHLQRAPADEPVFQFLDKKRAEGKLYYVYMTAAGNKFLRRYYGKVMAYFSTLEGLPPVDMDSTGLHHAE

SEQ ID NO: 390433 - protein, 403 aa, unidentified
MLLFVRCAALPGLPCWLAGRGLIGACRYSLIEACPARPASRVPVPTKEGHVMLVTIGADSHKATHTVVAVDEVGRVLGEKQVRATSEGHLVLVQWAARFDQVVFALEDCRHLTRRLEADLLKAGHRVVRVPTRLMAQARRSAREPGKSDPIDAQAVAQAALRYPDLPRAELDGPAREVKLLSDHRRDLVGQRTRIAAQVRWHLHELDPGLDIPSRGMRRRSVVGQLQSRLAGASGVVARITRELLARCQELNTQINGLDAELRVLVRAQAPALLAIPGCGVLSAAVIIGETAGVHRFGSRARFARFTGTAPVPVWSGASAGKVRLNRGGNRDMNCALHTIAITQARQGVGPGSSYIAKQTERGKDTTAALRLLRRRLSDTVFTALRTDQHVIARPATTLAEAA

SEQ ID NO: 390434 - protein, 354 aa, unidentified
MSNKSNLTVATMGIDIGKNAFHVVGLDRRGAIVLRQRWSRGQVEARLANMPPCLIGMEACVGAHHLSRRLQSQGHDARLMAAKYVRPYSKGQKNDFRDAEAIAEAVQRPTIKFVATKTADQLDLQALHRVRERLVSQRTGIINQIRAFLLERGVAVRQGLRFLRAELPIILATRTDVLSPRMLRVIEELAGDWRRLDERIEGLSKEIEALARQDLACERLMTVPGIGPIISSAMVAAIGNGAVFAKGRDFGAWLGLVPKQISTGDRTILGAISRRGNRYLRALFVQAAWVVLVRIKDWDRYGLKAWIDAAKKRLHHNVLAIALANKLARIAWAVLNKERAFECVKTRATASQPA

SEQ ID NO: 390435 - protein, 429 aa, unidentified
MEEVEDVELVMERIAALDLGKAGLEACVRVPSPNRPGRRMQELRSYGTTTAQLLEMVAWLRHWGVQRVVMESTSTYWKGVYYLLEAEEFECWLVNAREVKNVPGRAKTDRADAIWLAKVAERGMCRPSLVHPAEIRRLRDLTRYRRALVQDRTREQQRIEKLLEDAQIKISSVLSELHGVTGRAMMEALIAGQRDPRALAQLAKGRARKKTAQLEEALRGFFTDHHAAILRMMLDNTDRISAQIAALDARIQEAIGPFSAQAARLAEIPGVDAVAAAELIAEVGVDMTRFPSDAHLVSWAKFCPQTHQSAGKSKSKGRGRGNPWLAGTLGRIAFANSRADTFLGARYRRLARRRGKQKAIVATGNSVLSVVYHLLCDPDARFCDLGPGYYESRINKHRRAHDLATQLQALTGQCIVIRDGKAIITDTAA

SEQ ID NO: 390436 - protein, 388 aa, unidentified
MATGSVEREVRTFKTTTKDLLALSDWLAEHGCTHVAMEATGVYWKPVWHILSDGDFVLVLANAAHVKNVPGRKTDVNDATWLADLLAHGLIRGSFVPDEQTQEMRNLLRTRKQLVRECSRHIQRLQKTLEDANIKLDSVISDIMGLSGRAMIEALIAGESDPQRLAQLAHRRIKAPPEALCEALRGRVTRHHRFLLRLHLKQIDAVNVAIDDIDQEVDAQIEPFRTAIQLLITIPGVSELSACVILAEIGHDMNRFPTAAHLISWAGLCPRNDESAGKRRTTRMRKGAPWLKTTLVQCARAAARKKASYFQAQYHRLRARRGDKKAIGAVAASILTTAYHMLKYGTLYEDLGPDYFDKRGKGKHVHRLINRLQNLGFAVQITPVEAAA

SEQ ID NO: 390437 - protein, 319 aa, unidentified
MNETPVFVGIDVAKATLEMAVRPSGAQWASANDEAGIQTLLGQLRALAPTLVVLEATGGYEHAVAATLATAGVPIVIANPRQIRAFARATGQLAKTDAIDAQILALFAERVRPTPRPLPDDATQALEALLTRRRQLLEMLVAEKNRLGVARVGVRRDISQHIRWLERRVADLDRELHAGVRASPVWRAQDDLLQSVPGVGPVLSYTLLAALPELGTLGRKQIAALVGVAPLARDSGTHRGRRTSWGGRAPVRTVLYMATLTATQWNPVLRHCYQRLRAAGKPHKVALIACMRRLLLILNAIVRTQTPWRATPTAARTTA

SEQ ID NO: 390438 - protein, 401 aa, unidentified
MTSQPAAPPKFNEVYASKKIMPMRTVCGLDVHKDSIFVCILNENGILFQDKIGVLTPDLERLVDVLHEHGATEVCMESTSIYWMPVWRILEPYFSLKLVNPYFIKQLPGKKSDVKDAEWIAVCLLKDLIRGSYVPEDRIQQLRQYDRRIFDLNKDIVYKLTKLDAALQRCNIRISNYVSATDGKSYQKVVEKISEGVTDPKILTGLIHGRILNRVGKDIITASLTGVITQTDIDVIRQMREEVKLAQKHRDECQAKMEELCSKWFPEQMKNLQTVPGVSLRSATSVIAELGTDMSSFEDAAHLVSWSGLKPRNDESAGKIKSRKITHGNKFLRKTLIECSWAAAKTRGCFYNTFSYRQTVVRRKNKMKVQVAIARKMLAAIWFILHDNVPYRDYTPDIAAE

SEQ ID NO: 390439 - protein, 334 aa, unidentified
MDEQGLIVDEFVFENNFEGISYLVGKVKPGPAKAVVESTGNLWLRIYEALESEGVEVKLANPFKTKAIASARIKTDKLSARILAHLLRADLVAECYVSSRETRKVNALLRQRASLTRIQTMVKNQVHSLLDKYGLKSDWSDIFGLHGMEWLRSLQLDPVDRCILDTHLRHIECLRRETKLLDSEIAAKASESQDAKLLMSFTGIDYHSAMLTTSEIGDIGRFPSPKHLVSWMGLCPSLHQSGNSTYMGKMKKDSNRRVGSIMIQAAKTAAIHDPRMKTLYDRVSARSGDNKATVRVANKMATITWHILTKKEPYHQAKDRLYASKLKKMARVAA

SEQ ID NO: 390440 - protein, 344 aa, unidentified
MEYYAGLDVSLRSCALCIIDEKGAVCLERELPCEVEAIADALARFPSPVTRIGFEAGTMSQHLYFGLRGRSLDVVCMEARHVNAALSAMRNKTDRNDARGIAQVLRTGWFSPVHMKSRKSHGIRALLSTRRALLSKTIDLANEVRGLLKIFGIRLPSSVSHGRFDEVARGMVEIDEILAHAILPLLDARRALYDQFLELDRRVKRAASRDEVCVRMMTVPGVGPIAALTFKAAVDDPARFRRSRTVAAHFGLTPRRYQSGETDNPGRISKAGDRDVRSTLYAAANALLMRTMAGSRIKSWGMRLMRTKGRRRAVVAVARKLAVILHRLWSDGTQFRPTVEEPAA

SEQ ID NO: 390441 - protein, 402 aa, unidentified
MEIFCGIDWSEHHHDVAVVDSTGVLLARRRISDDLAGFTALTGLLTEHAGAAFTAVDVAIETDRGLLVAALRAAGHRVFAINPKAVDRYRDRHAVSGAKSDPGDALVLAHLLRTDRDQHRPLPDDSDLGQAVSVLARAHQDLVWARQQDTNRLRSLLREFFPAALTAFPDLSTKTALTVLAAAATPSSAARLTRANLVDLLHAAGRGTRPADATRLAAVFAVEQLHQPPTVEQAMGEAVRAIVRTVTATNASIKQMEAALAASFSQHPDAEILDSLPGLGLVLGARVLSEFGDDPTRFAHAASRRAYAGTAPITRASGRHRAVLARHIRNKRLADACYLWAFAALTRSPGARTYYDRRRAAGDRHSAALRRLGNKLLGQLHHCLSDRAPYDETLAWTEPITA

SEQ ID NO: 390442 - protein, 344 aa, unidentified
MNNTLVGVDLAKWLFEIVVSHHPGTVAWRRRLSRDKLLRFFAQLPTATVVMEACGSAHYWARQIQKLGHRVVLLPPQHVRPYVLRDKTDRADAKGLLEAYRNDAIRPVPIKTPQQQLLGSLHRLRAGWMSDRTARINTLRGLLREQGIFIPQGARKVAPQVWAVLEDADSGVPEALRPFFAEVLQEIRELERRIESCECQLQQLAGQLPAVQRLLTIPGIGLLTATALVAFVGDVQRFPSARHFASYLGLVPRERSSGSIRRLGRISKRGDVYLRMLLIHGARSALRAATTQAQPDRLRDWALKVRERHGTRKAAVALANKLARVVWRIWRDDDKVFKSAPHAA

SEQ ID NO: 390443 - protein, 359 aa, unidentified
MSTQSKPFSFKGQKIFVGLDVHLKSWSVTVLSEQAVLKKFTQDPSPAALNKFLTNTYPDAEYYSVYEAGFCGFWIHWELHNLGINNIVVNPADVPTMAGERLRKTDAVDSGKLARSLRSGELKGIYVPDSITTEIRSLIRLRDSLTKDQTRHKNRIKAHLRYFGIDIPEEFCRPGRTWTNRFVLWLKSLELETAYGKKTLDLLIAQYEDLRDQQLKMMKELRILSRTERFDEPLRFLMSVPGIGQLAGLTILSEVDDISRFKDAAHFASFVGLVPMCYSSGEHEGTGNITVRRHAKLRWLIVEAAWIASRKDPVLSAAYVEYCRSMKPSKAIIKIARRLVNRIYFVMKHQQPYVNCYVS

SEQ ID NO: 390444 - protein, 347 aa, unidentified
MTDITRIGIDTSKSVFQLHGVDASEQVVLRKQLSRREMIRFLEKLPPTDIALEACGASHPWARLLGSFGHEVKLIAPQLAKPYVKRGKNDAADAEALCEAMSRPTMRFVPAKTADQQAALMLVGMRARLIKRRTQLANAIRGFAAEFGVTTATGMCRIEPLLETIAADETIPALARELFALHAGEYGALKCEIERVEEKLMAWHRSDECSQRLAKIPGVGPIGASFLMMKTPDPRLFKSGRDFAAWMGLRPKDHSTAGKTRLGGITRAGDELLRSTLIVGATAVIGHVRRTQGRNASPWLLGLLERKKPKLVAVALANKIARIAWKMMVSGEQYRRSTMRTVQGVAA

SEQ ID NO: 390445 - protein, 349 aa, unidentified
MGTAYDGRQVVGMDLHRRRSVLVRMTEDGRRLGTARITNSPAELRKAIAAAGTNPRVVLEATYGWYWAADVLQAAGAEVHLAHPLGVKAFTYRRVKNDEKDAADLADLLRMGRLPEAWIAPAEIRELRELTRYRLKLVQRRSGCKDQVHAVLAKLGIPVTCSDLFGVWGSTWLDGLALPQPYKGKVASLRTLIAGLGTEITLLDAVIADLLAHHDGYHALQALPGIGPVLAAVIVAEIGDIHRFASPARLCCWAGLTPRHRESDTKIARGHITKQGSPVLRWAVVEAIQRQPAASPIRGVKDRIIARRGKEARNIAKTAAARHLLTAVFYAMRDGHARCLARPPATQAA

SEQ ID NO: 390446 - protein, 432 aa, unidentified
MKHNPSSKQNQRISRISETTLVIGADIAKHQHVARAFNYRGIEFGRRCLFQNDENGLLNLLAWTEAIKQEHGFTDVLLGVEPTGHYWFPLFHFLKQRGIEVVLVNPHHVRKSKELDDNLPTKNDIKDAKVVAKLVLDGRYTQPKLPEGVYADLRVLMNQRDRLCGDLHRVKGRIHNWLDRFFPEYRQVFKDWEGKASLVTLKQFPLPQDIVAAGEAAIVATWKQHDVKRAVGAKRAELLCRKARKSIGLTEGASAARHELAMYLEQYDMLCSQIEQLMELVAQLVEQIPGAAHMMSIPCIGLITVAGFLAEVGDLSSYDHSRQIVRHAGLSLRENSSGLHKGKTTISKRGRYRLRALLFRAALTMVARNPEFRALHLYFTTRQDNPLKKKQSIIAICNKLIRVLFELGRKQKNYDAGKVLGPHRAAQLQATA

SEQ ID NO: 390447 - protein, 339 aa, unidentified
MIAVGVDTHKERHYAVALDHLGQILAEFVFPATTAGYAELQQWTGVLAGGRELVFGIEGAGSWGAGLYEYLLHAGHSVLEVERPRRRDRRAGKSDRIDAIAAAKRVLADENVSTPRRRGILTAIRALLVARRSAVAERTRVLNQLQALTATAPIALRERIGHGTGKQLERRILSLRARPNVDVDEQVAFAVMRDLAARSRALGQDAKRYQDQLADLVRSLDDTLLDEPGIGPISAAKLLACDPTRFKGEAAFARCNGTAPIPASSGQTVRYRLNPGGDRQANNAIHTIAIIRAKHQPETRAYLERRIQEGKTKREALRSLKRHISRELYHRLTAIPLTS

SEQ ID NO: 390448 - protein, 341 aa, unidentified
MLEVSTIGLDLAKNVFQMHGADGSGAVAFRKKLRRDQVLKFLAAQPACTVAMEACAGGHYWAREIAKLGHDARLIAPGYVKPFVKRQKNDAADAEAICEAAQRPTMRFVAAKSEEQQAAAMVFRVRDLMVRQRTQTINAIRGHLAEFGLVAAQGLFHAAKLVAAIEDKGTAIPEAARPILSLLVAQLRALDERLAVLDREIARRAKEDAEARRLMTIPGIGPITATALAALAPSATTFKRGRDFAAWLGLTPLQRSSGGKQKLGETSRMGERTLRRLLIIGASAAVRWAMRKGSTGDPWLSRMLERKPPMLVIVALANKTARIAWALMAKGGTYRAPAVAG

SEQ ID NO: 390449 - protein, 344 aa, unidentified
MDHFAGLDVSVKETSICIVDDTGRIMKEVKVASEPQALLKVLGNPAYRFKRIGLEAGPLSQWLFSGLAEAGLPVVCVETRHMQAVLKAQINKTDRNDARGIAQMIRVGLYRPVHVKTLRSQKLRMLLTHRKLLQSKAIAIENDLRGTLRNFGLKVGMVGKVRFEARIQELVENQPDLAVLVEPLLIVRRVLREQIVILHRRLLAIVREDEVCRRLMTTPGVGPVVALTYRATVDVPARFRKSKSVGAVFGLTCSRYQSGEIDWSGKISRCGDEMMRTMLYEAAQSMMHSKKWSWLKAWAMQIARRRGMKKAIVALARRLAVIMHRIWVDGTEFRWTREQATAAA

SEQ ID NO: 390450 - protein, 437 aa, unidentified
MSDKKSVEIRVSVDVGYRRHSVAIGLPSGEVLEEFEIAHRPEGFAEFFSRIETHQKVRDCEVAVAMEGFNGCARPLDAMVRRRGYRLYNINNLKLARFKEIFPGAAKSDRIDARKGLELFQLSDHLPLAKEVLQEVKGTPRENEVLKRLTRRRRRLVDEQIRVISNLQTDLQAVCPGLLEITKHAGNHWFLNFLVSAPTLPQLARLRPATLLKVPAVGRKYASLIEDWQKRAHFSEEVEWVSEMIQEDAQRCLDLDEKIKALRAKIKEVAKDSTIVKVLLSIPGFGTICTAELAGEIGTLERFSKEGSLALYIGMSTLDNSSGKYQGSKQPKHVNTRAKAAMMVALDRHRKVVPQSQRYYEKKRSEGKKHNQAIRALGRHLCRIIYKLLKEEREYEIRLEKGNTKGKVSPRSLIKTQIRKAKISTKGTNNKIYQQST

SEQ ID NO: 390451 - protein, 340 aa, unidentified
MNATTYGLDIAKRVFQLYWVDTQTGEIANRKFGRDDLITFLAQRPAGRIALEACGSAHWWARKIRALGHEVVLLHAQFIRPFVQTNKTDAADARAIWTAVQQPGMRTVAAKTEDQQVMLSLHRMRSLLVKFRTMQINQLRGLLYEFGVTFRAGRVAGLDEIRERMAELEDTLPRSIVLNLLEQLRRINLFEEGINQLEKRIGAWQKQEAACRAISEVPGIGRLTATALVATIGDAKAFKSGREFAAFLGLVPRQNGTGGKIRLGSISRRGDPYLRTLLIHGARSVLCHTKVPTAWQKAIQARRPANVAAIALANKMARTAWAILAHQTPYEAHHVSHRPA

SEQ ID NO: 390452 - protein, 401 aa, unidentified
MNAVGIDVSKGKSMVCVMRPFGEVVLEPFEVLHTAQNLNDLAGKLKALDGETRVVLEATGNYHKAVAFVLHDAGLFVSVVNPVLIHDYDNNSLRRVKTDRKDSVKIANYTLDKWTRLRQYLPEDDTRLALKNCYRQYQQAVAIRTMLKNNLISSLDLTFPDVNKLFSSPAKNNGCEKWVDFIGDFWHSECVSSLSPDAFSKKYLKWCQKHGYNFTRSKSDEIFACAVNAASLPKSPTSKLLIQQQVAQLKAVSQSVAAFQQEMLRLSQQLPEFDTVMEMYGVGPSLGPQLMAEIGDVRRFSSKKSLIAFAGIEPQPNDSGKVVGNDKGISKVGSAVLRRTLFLIMTVILQTQPQDEPVFQFMNKKRSEGKPYKVYMMASANKFLRIYYARVKPVMDSECSQ

SEQ ID NO: 390453 - protein, 338 aa, unidentified
MNYYAGIDVSLEASSVCVIDANGKIVREGKVASEPEALMAWFGSLGVSLTRIGLEAGPLSQWLYAAMRQAGLAVELLETRHVRNAFKIMPVKTDRKDARGIAELMRLGWFRPVHCKSLEAQETRAILTARKLVQKELLEVESSLRGILRGFGLKVGKATPVQFEGRIKELVVGHPSLEGIAHALLSVRAVLRREFNALEKRLRAIARTDTRARLLMTTPGVGMIVALTYACAIDDPARFKSSKIVGAHSGPTPTRYQSGETDRTGRISKIGDSSVRAVLYEAAHVIITKAVRGCTALKSWAMRIAKRAGMNKAKVALARKLAVIMHRMLVDGTTFQPA

SEQ ID NO: 390454 - protein, 334 aa, unidentified
MENIALIGIDLGKNSFHIHCQDHRGKAVYRKKFTRPKLIEFLATCPATTIAMEACGGSHFMARKLEELGHFPKLISPQFVRPFVKSNKNDFVDAEAICEAASRPSMRFVQPRTESQQAMRALHRVRESLVQDKVKTTNQMHAFLLEFGISVPRGAAVISRLSTLLEDSSLPLYLSQLLLKLQQHYHYLVEQIKDLESQLKRKLDEDEVGQRLLSIPCVGTLTASTISTEIGDGKQYASSRDFAAATGLVPRQYSTGGRTTLLGISKRGNKKIRTLLVQCAGVFIQKLEHQSGKLADWVRELLCRKSNFVVTCALANKLARIAWALTARQQTYEA

SEQ ID NO: 390455 - protein, 394 aa, unidentified
MEVIHPRSGGLDVHKETVVACVRLALGGKVTHEVRTFDTTTAGLLLLLAWLTEMGCTHVAMEATGVYWKPVWNILSDGDFELVLANAAHIKNVPGRKTDVSDAAWIADLLAHGLIRSSFVPEREIQELRELMRTRKQLGRQQSSHIKRLQKTLESANVKLDSVITDIVGKSGRAMIQALIAGETDPVKLAALADRRIKASAQQLREALRGQVTDHHRFLLHLHMQHIEFADAAIQDIDRNVTALITRMDREVEAGQASFQSLILLLTTIPGIDVLAARIILSEIGLDMTRFPTAGHLLSWAGLCPRNDESAGKRRSTRLRKGDPWLKTLLVQCAWAARRKKGSYFNAQFLRLRGRRGPKKAACAVAASLLTTIYHMLKDGTQFQDLGAEHFDRS

SEQ ID NO: 390456 - protein, 415 aa, unidentified
MNRCSDTEFAAFVGIDWANAKHDICLQAAGCEEREFTVLAHRPESIAQWALQLRERFAGRPIAVCLELSKGPLVYALQKYDFLVLFPVNPSTLAKYRETFCVSGAKDDPTDAQLALELLMGHRDKLSALKPQSPAMRALQQLVQQRRELINHKTAITNRLSAALKQYFPQVLEWFQDKDTLVFCDFLTRWPMLKHAQRARKARLIAFFHEHNVRYPKVIEQRVHAIVTATELTADSGVIVPNRLLVEVLVEQLRVLLRSIERFDQEIAQLAPTLPDYALFSALPGAGPAFAPRLLAAFGEDRERYADAGQIQKYAGIAPVTERSGKKCWVHWPLQCPKFLRQTFVEWAALSIPHCYWAAAYYQQQRAKGCRHQAALRSLAFKWIRILYRCWMQRTPYDETTYLNALKRRGSPLVN

SEQ ID NO: 390457 - protein, 339 aa, unidentified
MKYTPVGVGIAKHVIQIHFINEHTDEVVDKQLRRQDFLTFFGNREPCLIGMEACGGSQHWARELTTLGHKVRLLQARFVKAFVMGNKNDVMDARAIWMAVQQPSKEIAVKTEEQQSVLVLHRTRMQLVKFRTAQINALHGTLLEFGETIHKGRAAMEREFPEALERMKERLPPYLIMVLENQYNRLNELDSLIEDIEKQLTSVARQNETCKRLLDIPGVGPLIATAAVATMGEASAFKSGREFAAYVGLVPKQTGSGGKVRLLGISKRGDTYLRTLFIHGARAVALVAKEPGPWITELKKRRPASVAIVAMANKLARTVWAITAHDRKYDRNHVSIRPY

SEQ ID NO: 390458 - protein, 310 aa, unidentified
MPISPSRREGVVGIDVAKASVVIYDQITDTYCTVANTLDDLLLALTPLAHRDLAVCEATGGHEDNLLAALHSLGIPLHRADGGRLSAYARSLRRAKTDRIDAKMLARYGLERGPALQRHAPADQNESNLVALVRRRIDLVELRKIERTRAKAPRAGLIADFIARAIDFLDAEIQQLDACIRDILENAPRLARRRAMLETIPGVGTQTATTLIATMPELGTLTRRQAASLAAVAPHPRDSGTSNAPRRTTGGRRQLRPVLFIAALAATRGQNALATFYRRLITNGKPKKLALVAVMRKIITFANARLAQLT

SEQ ID NO: 390459 - protein, 344 aa, unidentified
MVYVGLDVSGKSLVAYAVNERKQRVFAGEHPASRAGLRTLLRQVGVGPKLVVFEAGNQLKWIAETLKKLDGVQVHVVHPNEVKWITESRGKTDRVDAKKLAELARAGILPRAVHVVEGPVRELRELVSARQQLQRKRVALINTIRGYVYQEGHRLPEKFFAGAAWREQVARLPVSAPLRLILETFMTSIAALEAAEQQLTQRLVAIEEPRCSLLESVPAIGPVASRVLVSALDEARRFDDQKAVANYGALAPTIYQSGAVRQLGRINRDGRGEVRRVLLQCAHTVVRMKSQGAKPLQQFFTRVMRRRGKKIAVVALARKLLTTAYGVLKSGQPYDPRKLEPATA

SEQ ID NO: 390460 - protein, 349 aa, unidentified
MRYLGMDVHAKSTVWCLVGADGEVAREGQVPTTPAALTGLVQELGKEEELLAGQEVGTLTYLVHDAVTEAGTTLLSFNAHQLRMIAASRKKTDRRDAYWIAKALQSGMYPHPVYVPTGEVRDLRALLSQRRVLHADYQSWRYRARAYLRAAGCPAPAGIAALRATLARASRPTEGCLGDGIALCHRQEATLRAELQRVDTALASRVASIDAVQRLMTIPGVGVLVATAIYAWVGDVRRFPTAKKLAAYAGLVPTVRQSGSAVHVGGITKQGAPALRAGLVQASHVLLARCRRAEAAPLQAIGLRIRGSRGRRKIAVVALARHLLRIAYYILRDGTTYDAVRLRTMTDAA

SEQ ID NO: 390461 - protein, 336 aa, unidentified
MRYIGVDLHTTQITVCYLKATGEFEMKKYQLCEIEKFISSLQQDDEIAVEATCNTRWFYEQVNKAVKRVVLVNPRQFEVVKNSVKKTDKNDAINLARFLRADLLPEVRAKAEAAEKVQSLVNTRTKLVRLKTSLINKIYALYVANGRKLKKTTLASEKGLDKVLLEQWTAIERIELEIILEQIRSLKVSIGKLDKAVKEEASQLEGYQSLVSMAGIGSLSAGVLLAVIGQVKDFGTADKLASYFGIVPRVSNSADSVNHGRITKRGNKTGRTTLVQCSLSAIKKSEYLKKYYEQVKARRGHGKAKIALARKYLGIIYNTLTNGWVFADFNNFELAE

SEQ ID NO: 390462 - protein, 415 aa, unidentified
MALKIVYKICCGIDVHKTFVVACIASTDSNGVTIYEHHRFSTYTKGLKDLLQWLLKHNCKDVCMESTGKYWIPVYNVLENDCSIVLAHPKYVKAIRGKKTDKKDAKWIADLFKHDLVAGSFMPPADIRQLRDLMRYRFKLTCFMSSEKNRLQNCLTVSNIQLGNVVSDTFGKSAQAILDKLLENPADTSFDLEPLVYKSLKKKLPELRDAIDGYITPEQAAKLKVIKAHYENLESRKAELEELILALAAPYQQELAILQTAPGIRSDFTAIGIISEIGTNMEAFPSAKHLCSWAGLTPTNNESAGKKKSVRVSKAGCYIKPLLVQCANAVITSKKHPEIRNRYLRLKKRRGHKKAIIAIARMLLTALYHMLKNGENYNAELYRKSDLPPVDREITVEQAIIIARKQGYKIKSATA

SEQ ID NO: 390463 - protein, 488 aa, unidentified
MAAGKKKDTDVTGSAAGGPAAVAAVAAGDGGDGAEVSEDQVRVIERAAAIDVAKGSGLVCTRVPGSRPDRRRQKVWPVTAIYREVIALMDHLRCEGIQRLVLESTSDYWRLWYYLAEAAGLEVWLVNARDVKHLPGRGKSDRADCVWLCKLNERGMLRRSFVPPQAVRDLRALTRTRARLAQDQARHQARVEKILEDALLKISVVISDLFGASGRRFLDALVAGERSPAALAALGDPRLKATRRELEEALTGKFRDIHAFEIKTHLRILDVINEETARLDQAIGEQLALVPRTAPACTACGVADGGHAPGCAAAGTPLLSLAERIDEITGVGECNARVFIAELGTDPSQFPTPGHAAAWARLTARTLQSGQSARPGRTGKGNPYLRGALGQCAMAAAHTDTRLGAMYRRIARKRGKQKAIVAVARVICEITWILICDPGARFEELGPDYYTPRSPARRTRDKIREIERLNPGKKVILAPIDAGADTAA

SEQ ID NO: 390464 - protein, 347 aa, unidentified
MNANAKVAGLDIAKEVFVAVGLDRNGKAVFKHKMKRGEVLATFRKLQPMAIGIEACAGSHYWARELAALGHDVKLIAAQHTRAFVTGNKNDTNDAAAIAEARSRSSTKYVPINTPAQQDLQMLHRARSALMSERIAMINRIRAFAAEYGRVFASGVAKFKVGLLAWLADPDNGLSGLALATFRELKEQLDDKEQRILTYERKLNQAAKSEVAQKLMEVPGVGPLTATAVMASVADPHHFRSGRDFAANLGLVPREHSSGGKQRLYGITGKGDSYLRTLLIHGARSALRCAGNKTDSQLRWASNLAHRRNFNVAAVGLANKMARVIWAILAHGRGYVPVWSNSMTRPA

SEQ ID NO: 390465 - protein, 341 aa, unidentified
MEYFAAIDVSLEQSSVCVVDGTGKIVREGKAASEPEVLAAWFTASGLAFTRIGLEAGPLSQWLHAGLTAAGLPAILIETRHVKAALKAMTVKTDRNDARGMAQLMRMGWFRPVHVKTLPAQEVRALLTARKLLQGKLQDIELGIRGLLRGFGLKVGQVSKGKYEARIRELAMGHPMLEPVTAAMLQARTSLRTEYAKLHRMLLRIVRDDTVCRRFMTVPGVAAVVAVTYKTAVDDPTRFGKSKELGPYFGLTPSKYQSGEVDWTGRISKVGDAMVRTALYEAANVILNRVTRFSTLKAWALRVVQLRGVKRAKVALARKLAVVLHRMWVDGTDFRWRKAAA

SEQ ID NO: 390466 - protein, 411 aa, unidentified
MPYTIAGIDVHKAMLVVVAAHVQEQGEIAFEGRRFGASTAELKHVAAWLQARGVQEVVMESTAQYWRPVWAALRCHFHLFLAQAHSNKAPRGRKTDWEDAQRLVRRYIADELYLSFVPEAEQQGWRTLTRGKLQLTRERGRILAQVEALLEETSIKLSTVVSDLWGASGQRILRAIADGENQAEKLAALADARLKVTPEKLREALAGTPEPVHCFMLKNHLQRLDLLDQQIDQTIQQIATQLSAHQQAIQRLAKVPGIRLDAAQQIVAEVGVAAAAFPSPGHLSSWAGACPGRQESAGISRSDASPKGNPFLRRLLCQAAQAAVRTKGCHFQNVFQKLLPRLGYAKAIWAIAHKLCCIIWILLHEKREYIEVGSLLSEQGKKRRLQRLTNELRRYGFSVTPPTPIPVAPAQ

SEQ ID NO: 390467 - protein, 428 aa, unidentified
MNPGVKEMSFEEQFKLFVGFDWASDHHDVVAMDPAGRIILELTFEDTAQGWADLRKRLIELAGADLSRVAVTVETRNGPAVERLLEMGVRVYPLNPKAAQRYRERKAPVGGKSDRLDAWSFGDALRTDGHGWRWLVSDDPLTQELRILCRDETHLIQQRTALVCQLKQALHDYYPAALEAFDDWISAGAWEFVQAFPTPRSLVIAGKRRWEKFLHAHKLYRPGTYAKRLEIFARADQFAGPPAVVSAKRRLAVALVGQLKTLQKQLDEYREAIEELFDKHPDNDIFGSLPGAGKKLAPRLLSELGDNRQRFENPQALQCYGGSAPVTEQSGKRRWVRFRSGCNKYPRAALSLWANLSREESTRAQIYCQHKRDHGMSHACALRCLAQRWLKILWKMWQTRTKYNESFHTMNQVNHGSWIMKPGQGDAC

SEQ ID NO: 390468 - protein, 314 aa, unidentified
MAIPVQTTFIGVDVSKEYLDICSDPEGPVARISNKPRDINHWLKSLPAGPIAIALEATSTYHLELAVRAHKAGHTVYLLDGYRLSRYRDSIAQRAKTDAADARLIHRYLVHEHSALRPWNPPSKAYSRLQTLLRRRAVLVKARTALRQSFAALPELRRAGKALVKQISALDRRIVQQLVKTLSEAGWDDHYRRCQAIEGFGEIVSAAVVTAFHRGNFKNSDAFIAFLGLDVRVRDSGKARGKRKLSKKGDPEMRRLLYLAAMGAIKYDTWQALYQRYLDRGYAKTQALVIIARKLARLAFALMKNQEEYRPRVV

SEQ ID NO: 390469 - protein, 338 aa, unidentified
MNISLVGLDIAKSVFHLSAVNKAGKQMKQKMLKRPQVLNFFNQLEPCIIAMEACGSAHHWAREFQKLGHTVRLIAPQYVKPFVKGNKNDYNDAHGIAEAAQRPSMRFVPIKSLEQHDIQMVHRLRERLVKNRTALVNQIRGLLAEYGIVINKGIPAVRKALPLILEDAENGLTVMARESFFSLYEELKELDEKHQACEKKVIEINRSHEACQRLDEIIGIGPVTATAIYAAIGNGHDFENGRHFSAWTGLVPKQHSSGGKANLMGISKRGNAYLRTLFIHGARAVLRYADGKDDSFSRWASALAERRGKNKACVAVANKLARMAWVVLAKGERYRPAT

SEQ ID NO: 390470 - protein, 402 aa, unidentified
MNAVGIDVSKGKSMVAIMRPFGEIVSAPFEIKHTASDIHSLVELINSVEGESRIVMEHTGRYYEVLAHQLSEANLFVSAINPKLIKDFDNDSLRKVKSDKADAVKIARYALDKWQNLKQYSVMDELRNQLKTMNRQFGFYIKHKTAMKNNLIGILDQTYPGVNTYFDSPARSDGSQKWVDFASTYWHVDCVRKMSLNAFIDHYQNWCKRKKYNFSQSKAEEIYGKAKELVPVLPKDAITKLIIKQAVDQLNSVSTTVESLRTLMNETASKLPEYPVVMAMKGVGTSLGPQLMAEIGDVSRFTHKSAITAFAGVDPGVNESGTYEQKSVPTSKRGSADLRKTLFQVMDVLIKTHPQDDPVYQFLDKKRTQGKPYYVYMTAGANKFLRIYYGRVKEYLSSLPES

SEQ ID NO: 390471 - protein, 347 aa, unidentified
MNFYHSTHRHYCGIDLHARSLYVCIIDQQGEVLLHKEIKAQPKPLLALLEPFRDDLVMGVECMHCWYWISDLCEEHGIHFILGHALYMKAIHGGKTKNDRIDSFKIAMLMKGGNFPLAYVYPKAMRATRDLLRRRTRIVQHGAMLKAHVVNTTSQYNLPPNKANLKDIGAREQVRATFADRDVQHNINLDLAIIECYHRELSKLEEHLERQAKQHDPASLSVLRTIPGVGRILALTILYEIGDIQRFETVQKFASYARLIKCKAESAGKVYGTQGNKIGNAHLKWAFSEAAVLYLRGNDKAQRYLQKLQKRMNKAKALSALAHKLGRAAYFMLKHQRVFDEQRFLKG

SEQ ID NO: 390472 - protein, 334 aa, unidentified
MKKRYFMGIDVAKATFDFCLLSSTESCLWRGQFSNDAHGIARFLAQLPALSRKPAQIHFALEATGVYGKALVAALHQAGLAVSVLNPAQVKYFAFSVLRRTKNDTVDAEIIARFCRERKPLATRPLRPIEEQLKVLVHERESRVGEQTRERNRAKKDPFQIALPTLISRQRRQRLKQLDKEIAQLDAAIDSLIASDESLSNQSQLLCSIPGIAAVTAAKLLSELAGKEFQSARQLAAYAGLTPAEFRSGYFLYGKTHLSKIGNAFLRKALYLPAAVARRWCKPLKPWIAILESRKLHHLAIRGAIMRKLLHIAFGVLKHQKPFNPLLVFIPKTL

SEQ ID NO: 390473 - protein, 405 aa, unidentified
MPYILALDVSMGHSYSVLYKDDTCLFEDEIEHTQRGFHALLEEIQHLPERPLIVFEATGIYSRPVEKFFQDHHFSYCLLNPLEAKKQMEENTLRSWKTDKSDAHRLAQTHLKNQRQPKEVQSNFYLEMRDLARFYQEIEKKITRLRMDLHNCLQLTFPELEQFFSNRLTPYALTLIRLFPHPDFVLASTRTKIKNKLINETRKKISANRAEQKADQIIHYAQCAYPAVEKDSIHCQKTIYYAELLQDLLEQKEALATQMIKKAEGSPCFLLYQTFPGIGALTAALLLGELGDITRFKTHKQLNAFVGIDIRRYQSGKYTGQDRINKRGNPKARKIIFFTIRNMIRQQRAAPNHIVDYYYKLKKQPIPKKDKVATVACMNKLLKCMHAMVRAHTEYDYAYAVSVDH

SEQ ID NO: 390474 - protein, 350 aa, unidentified
MIIIGCDYHPAFQQIAFVDIETGELQERRLQHREEAEKFYRELAAQGIKVRVGMEASGHARWFERLLSELQFELWIGDAAEIHTKRVRKQKTDRQDAQLILQLMLEDRFPEIWVPSWENRDLRQLLWHRHRLVQARTRMMNQLQAVALNEGLRCKKKLFREAGREQLEAFRLAPWASRRRHDLLELLDRLTPTIAQLTQAIEQEVEKCPAARRLRTHPGVGPLTALAFVLIIGKAERFQCGKQVASYLGLVPLEKSSGNQRRLGHITKQGSSLLRFLLVEAAQVTARSLPEWRSKYYHLTMRRGRKIAKVAMARKLAVRLYWMMRKQWDYGQLTKFGSHAGKLGTGDGVQ

SEQ ID NO: 390475 - protein, 444 aa, unidentified
MSPINTTLEPAYAAFVGIDWADRQHAWVLQSPGAPRVSGVLKQSAEDIELWAADLARKFYGRPVAIAVEQSRGALTYALCKYDHLVLYPVHPSTSHDFRKAMCPSGSKDDPKDAELLLDLLTRHRDHLRPLKPDSPATRKLLSLVEIRRGLVDQRTAAIQRITDKLKIYYRQVLGWFDRLDTPIVAAFLEQWPTVEQARKASENKLRKFFVAHHSRNAQKIEQRIVEIRNAKPAITDPAIVEPSVLLVQIELQVIAALREGIARLDAEIQTVFTAHPDSFIFSSFPGAGPALAPRLLAAFGTDRTRYTSASELQCQSGIAPVTEASGRKQIVHFRWKCPKFLRQTFHEYAAISVQFCDWARQFYDYQRNVLKNAHHAAVRALAYKWIRILYRCWKDCVPYDDSIYTNARRPPRATPSDSQPSGKPLKILLKTVDGFQRFAGIEA

SEQ ID NO: 390476 - protein, 368 aa, unidentified
MEKDIRHVGLDVDSQTLVVGVAEPSGEVRSLGSIPYTSEAVRRLVKKLGPASRLRICYEAGPHGYGLYWELTALGVHCDVVAPTLVPVKSGDRVKTNRRDAEKLARCYRSGDLTPVWVPDAEHEALRDLVRAREAAKKDQLRARHRLGKFLLRRGLRAAAGVKNWTLKHLLWVRTLHFEHAAQEATFLDYLHEVEHAAERVARLEKAIDQAVEGLPQEMKAMVAGLQALRGIKQVSAVTIVAEVGPLSRFERPKQLMGYSGMVSSEDSTGNRVRRFGITKTGNAHLRRVAGEAAWAYQYRPAMSAALKKRQEGLSEEVKEIAWKAQHRLCTRYRRLLAKGKVKQQVITAVGRELLGFIWAIGVQVEKE

SEQ ID NO: 390477 - protein, 355 aa, unidentified
MEYIAFDSHKHYSWVEREEAATGAVRHCRLEHAPGAIRSYLAGCEPGTAVAVEATGNWYWIVAEIEQAGLQPRLVHPRKAKLMMGMINKTDQLDAHGLNRLQRNGTLPVVWIPPGELRDLRELTRTRLVLTRQRTRLKNRITATLSKYGLPTVEASDSYGKKARPELQQRIAQLPPQARWVSEQLLLQLDVVIGQVQQLEQRLAELVRVSPAMQWLQSLPGIGVILAATIALEIGDIARFPSAEQLASYSGTTPRVHASGGKVRYGRLRPDVNRYLQWAFVEAANSIAVHHPRYEKGLEPRRHVDRLYARLRQRKGHGKAIGAVARHLAEAAFHVLGGQQTYRDPAVAAGCAREV

SEQ ID NO: 390478 - protein, 332 aa, unidentified
MNLVSTLGIDLAKNTFSVHGVDSQGVVVVRRTVSRNKLAELVTQLPPCLIGMEACSGAHEWARRFSGFGHTVKLMAPKFVAPYRKSGKNDGNDAEAICEAVTRPNMRFVPVKSVQQQADLGIHRVRQGFIEERTSTLNRIRGLLAEFGYVLPNGPEHIRRSVPAIIDALPARVGRCVRDLLEHVERLADKVLEYEHEIRLAVRDNELARRAQTRQGIGPITASALVATVGNGRDFKNGRQFAAWLGLVPRQYSTGGKTRLGHITKRGDAYLRTLFVMGARSVLQRAARETDPLSRWAFAVQGRRGYHRACVAVAAKNARVAWALLNKETQAP

SEQ ID NO: 390479 - protein, 317 aa, unidentified
MTEANTIAAGIDTGKHKLDVAIHGDKGRWEFDNDPAGISDLVRFLRRRKTSRVGIEATGGYEREVVVAMRKAGLAVVVLQPIQVRGYAQAVLCRAKSDRIDCGLIAACVAYRELIRQPPDPRLVPLADLLTFVEQTEEDIARCKVRREHARSPDQRRYIEVDIKRFTRRRARLLTKLQVMIAAHDDLALRHHLLLSIDGIGERTALAMMIRLPELGHITRGQAASLAGLAPFVQDSGTQRGERHIAGGRDRLRRSVYAAALPAAFFHNHQLMAFYKRLVAAGKPPKLALIACARKLVIYANTVLARGTPWATQCRPA

SEQ ID NO: 390480 - protein, 354 aa, unidentified
MSQKFNSAIAVIGIDIGKNSFHVVGHDERGAIVLRQKWSRGQVEARFANLPPCLVGMEACVGAHHLSRKLNGLGHDARLMPAKYVRPYSKGQKNDFRDAEAIAEAVQRPTMKFVATKTADQLDLQALHRVRERLVSQRTGIINQIRAFLLERGVAVRQGLRFLRAELPRILATPPDVLSPRMVRIIEDLAGDWRRLDERVEGLSNEIGTIAHQDAGCERLMSVPGIGPIISSAMVAAIGAGDVFTKGRDFAAWLGLVPKQISTGDRTILGKISKRGNRYLRVLFVQAAWVVLIKPKVWERHGLKPWIEAARKRLHRNVLAIALANKLARIAWSVLARGRAFEVRKMDEAATQSA

SEQ ID NO: 390481 - protein, 330 aa, unidentified
MKKQKFIIGVDVSRNTLDIYCAEINGHIQIQNATVGFKEFLKWCKTFKINLTQSVIVMEYTGGYEYKLIQFCENKKILFIRIPGLAVKRSLGIIRGKNDKVDSKRIAQYASEKHASLKASKPLDKRIIRIKELLSFRKRCVRENAGYQATIKERKHIYPDLGEDMIIKELEQKMKFNEKIISKVEAEIMKTIEDNDDFKTNYDLITSIKGIGKVNGWMTIAYTENFTSFLNGRSYAVYVGVIPFDHSSGISIKGRKRVSNLANKELKSELSQAAKSAMQHDKEIRDYAERKLKEKDWGKVVNNVKFKLILRVFAVVKRGSKYVDNYQVAA

SEQ ID NO: 390482 - protein, 334 aa, unidentified
MAAQITGGVDTHLDVHVVAALDELGALVGVESFPTTPAGYRALLGWLGSHGEVVLVGVEGTGSYGAGLARHLQREGVAVVEVDRPNRQRRRRQGKSDPHDAVTAARAAQAGDALGAAKLRDGNVEAIRVLRVVRCGAKRDRTRAINQMRSLVSTAPDDLRQQLRGLTITKLVRRAAAFRPGGRSDVTSATRLALRTLARRVLELDTEVAALDKVLEPLVAATAPELVAQVGVGTDTAGALLVAAGENTTRLRNERSFARLCGAAPLDASSGKQHRHRLSRAGDRQANSALWRIVISRLSHDPNTRRYLQRRLTDGKTKTEAIRCLIGRVSACRS

SEQ ID NO: 390483 - protein, 357 aa, unidentified
MKRNSRGNVSIEWKERPAITVGLDLGDRFSHYCMLNQDGEVVEEGRIQTTEAAFREHFEDVPRMRIAMECGTHSPWISRLVDKLGHQTIVANARKLRAITENESKNDRHDAEMLAHLAYSNPRLLSPIRHRSVERQRDLNLIHARDALVRARTMLINSVRGLVKSSGRRLPHCDAKCFQARVLPAVPTELSAATEPLLEQITALTVRIRAIDKQVEQLAVRYPEIRLLRTAPGVGPIVAAAYVLTLDRFDAITTSRGAGAFLGLRPRQSQSGSRDPERSITKMGNMYLRRLLVQSAHHILSRFGRDSTLRRWGLKLAASGGKRAKSRAIVAVARKLAVILHTMWRTGDCFRPFPAEA

SEQ ID NO: 390484 - protein, 387 aa, unidentified
MAKRTTICAGIDTGKRKLDVALNDSTERLQLDNSPDGYKALLDWLRRHRVKRIGIEASGGYEQPVVVELRRKRFVVVVFQPAQVRAYAKFHGRHAKNDKIDAVLIAACTAAVKKIHAAPDARLLPFAEHLTMIEQIGEDLAKLKNRLESCRDERIRKVWKEDIAQLAKRARGEFKALVKAIREHRDLAARLDLIYSVSGSGLPTAVAILIRMPEIGQLSREQAAALAGLAPYDDDSGDRVGVRHIDGGRKRLRHALYAAALPASFRWNRQLIALYQRLTAAGKGHKRALVACARKLLIFVNTVVARGTPWQDEPPAAMAASATADYDGFLVRPQNRFFVPTCRSDDVARRRRQGWPSPRFLLPAAVARPRLDSGEHGVIFTGDRVPL

SEQ ID NO: 390485 - protein, 340 aa, unidentified
MSEITTIGLDLAKNVFRVHGVDETGTVVVVKRLRRGQVIGFFASLPQCLIGMEACATAHHWARELAALGHAVRLMPPQYVKAYVKRNKNDAADAAAICEAVKRPSMRFVPVKTIEQQSALLMHRARDLLIRQRTMLVNALRGHMAEFGLVEAQGLHKVAALITIVMDESDRRIPDMARQALKMITDQISDLQTRISALETQVLAWHKNNPVSQRLATIPGVGPIIATAIAATVADAGVFRSGREFAAWLGLVPRQNSTGGKARLGGISKRGNSYLRRLLVNSAHTVLLCSKAAKADPWIISLRGRKPRLVVAVALANKTARVAWAIMSRQDTYRRIAAAA

SEQ ID NO: 390486 - protein, 364 aa, unidentified
MTLWGIDLHTNNITVCFFDPAKEQKRTTRTYPLAGKGFKRFLACLRKDDYIAIETTGNSFWFYEQVKPYVKECFVLNTHKIKLDGNKTDKIDSSKILDYLCYYLLIVGLEEMPNVFVPSREVQELRGMFSTYRLSKKINTQLRNRIHSILKQNGIVVKRGIMESKIGRRKILEIELPGCWDKQVTVLMNQLEAVITECDTLKDMIIINGYKLFKKEIDLLITIKGFSPFTAVAFMTDVVDIERFESAKKICAYLRTAPKVKSSNKTTHMKSINKASRSLTCSLLTQSINHIKIASPYFNSFYARLRAGKSAGKSRMALIRKVIVSAYYMLKRNQEFIWKEEKNVERKRVEIQRTFRRYAIRKLA

SEQ ID NO: 390487 - protein, 345 aa, unidentified
MGKSIINLSSVTTVGLDLAKHVFQVHGVDALGRVVVAKPIRRNKLLEFFASLPRCLVGLEASGSAHHWARELIKLGHDARMMPPAYVKPYIRRQKNDASDAAAICEAVTRPSMRFVGVRSLENQAALMRHKAREMLVSQRTQLLNGLRGHLTEVGVIAAQGPRHARELAELIEACDETVPFEVCEALAPLVVQLRNLDEAIARLDRTIVKMAQKDETARRLMSIPGFGPITASAMAATVQDTSSFAGPREFAAFLGLTPKQNSSGGKQKLGRISKMGNRNLRKLLVVGAHAVLFHRKSHTDPLRMWAKKLIEKKPFKLVAVALANKMARIAFAIMRGVTTYREMA

SEQ ID NO: 390488 - protein, 279 aa, unidentified
MTSTKYIGMEVHKESISIAVMKAAGKMVMECVIETKANMILQFFDGLRGDLQVTFEEGTSAAWLYDLRKPHVTKLLVCDPRKNASLKEGNKSDKIDARRLAELLRLNHLNPVYHGEHGLRSLKELVRSYLTITKDLGRVMTRVKAIYRSWAIPCSGKQVYAPRHRVEWLGKISEAGVRRRAEFYYQQLDALRTVRQQVRRDLLAEGKKQQAWKRLCQIPSIGPIRAAVLLGILQTPHRFRSKRQLWSYSGLGIETHSSADHRSVDGSCNEPRNRSPFAD

SEQ ID NO: 390489 - protein, 350 aa, unidentified
MEYIAFDAHKHYTLASVARPDGQLVREERIEHERGALRQFLERCERGSPVAVETIGNWYWIVDEIEAAGCLPRLVHARKAKLMMGEINKTDKLDVRGLNRLQRTGTLPTVWIPPGELRDQRDLPRTRMVLVRQRTQLKNRLHATLAKYALHDLEVSDFFGERGRTLLRERFALLPTHTAYASRQLLAQIEALGRQVRAFEKRIQATFKPTPAIQRLLTLPGVGLTLGVVIALEVGDVARFASAEKLAGYAGTTPRVHASGGKTRFGPSRPDVNRYLKWAFVEAANAICLTRGRAPHRHVSRLYERIARRKGHAKAIGAVAQHLAEASYWVLSKQEAYREPKGVGGFVHGG

SEQ ID NO: 390490 - protein, 411 aa, unidentified
MEQIYERVAGCDVHRDQVTVCVRTPGPRGGVHKDKARFKTTTAGLIEMADWCGERAVELVAMEATGVYWKPVYYALEDRFRVWLCNAYHVKNVPGRKTDMSDADWLADVAAHGMVRPSFVPPVPIRELRELTRYRKKQIDTRASELARLEKVLQDAGIKLTSVASKVLTQSGRAMIQALIEGEGDPGALAELAKGKLRPKIPELTAALSGHFGAHHALVADRVLAHLDFLDDTIAQLNRQIAERVAEGYQPVLDLLLPIPGLQQTSVEVIIAETGADMSCFPTPGQLASWAGLCPGNYESAGKRRKVGTTAGNQWLRRTLIESARAAARTKGSYFGAQYHQIARRRGPNKAAVAVAHSLLDVIWHALSTGEVFTDPGADYFTTRQDPEHRTRRLINQLERLGYTVELTQAA

SEQ ID NO: 390491 - protein, 387 aa, unidentified
MSHVDDLSRSLTAFDQDSTLIAVIEMSLTSFLLAGIVPGVGRAPLKKLGADEAGVVRQLHRWRDEATKAGRKIKRIVVAFEAGRDGFWLARWLRSRGIEAYVIHAASVAVPREHKRAKTDRLDTEMLKRAFLGWLRGEPEHCQMAAIPTLAEEDARRPNRERDCLVRERTRIVNRVKGALARLGVRGFNPKLRKAAERLDSLITPEGEKLPPNTLAELRRELARLTLLREQIKTIELTRLQRLQQQTPLTGPHAMIRLLARIIGVGIETADMLVHEILARKLRDQRALARYAGLTGSPDESGSRRREKGLARAGNSRVRRGMIQLAWRFLRFQGDSALAKWYQARTRTAPNTRKTMIVALARKLLIALWRFATRGVIADGVVLHPAT

SEQ ID NO: 390492 - protein, 347 aa, unidentified
MNLYNNMHPYYCGIDLHARILYVCIIDQDGNTCVHKEISADPNKLQQLLEPYIGNIVVGVECMHCWYWVADFCDDIGVDFILGHALYMKAIHGGKAKNDRIDSFKIANLIRGGNFPLAYVYPKDMRATRDLLRRRMKIVRHGADLKAHVVNTTSQYNLPPNKVNLKNTTAREQLKTTFPDSVVQKNIDLDMVILDCYAEQLSKIEWFIETQARQHKPIHLHLLKSISGIGRILSLTIIYEIGHIERFDSVQNFASYARLVKCKAESAGKSYGTQGNKIGNAHLKWAFSEAAVLYLRGNDKAKNYLIKLQKRMSKAKALSALAHKLGRCVYFMLKNETVFNEERFLKG

SEQ ID NO: 390493 - protein, 363 aa, unidentified
MSESTTVTVGLDVHARSIRLAAVRADELLEERTLPYDEEAVEEALRRWPVVRCCYEAGPTGFGLQRHLVERGIDCQVVAPGLVPQRPGDRVKTDSRDARKLARLLAGGLLQAIRVPSRELEAARDLVRAREDARLDRMRDRHRLSKFCLRHGLLLPGNSWSVVRRRWLSEQRFEFAAEQLTFDTYVHALDLVDARIVQLERAIRATAEQEPWRELVARLRCLRGVDTLTALALVSEIGDFNRFETAEQLMAFVGLVPSERSSGEKRRQGSITKVGNSHVRRLLVESAWHARRRPKVGYELARRQRGQDALVVERAWRCQQRLYQRWQRMAGRGKPHQKIVVACARELAGFVWAIATEQPLRST

SEQ ID NO: 390494 - protein, 320 aa, unidentified
MEEVNFTQVVRRGCGIDIHRDIAVATIGGEGITTETRSYKTFSSSLTELKEWLIENGVTHVAMESTGVYWKPVYKVLEGPELTVWIVNARHIKYVPGHKTDKKDSAWICKLLLAGLLKPSYIPPKEQRELRDLTRYRNKLIQHNASEKNRIIRVLEDCNVKLDSVLSSTSGVTASKLIDKLVQTGAVTMEDIDEVYHRRIQASKEEIYLACEGFIDEHQKYLLQLIRKDIDQTQKLIDELSERIKKILAPYDNVVERLREIPGLSTKVVEDLIAEIGLDMDVFPTEKNLASWAGMSPGNNESAGKKKALAPTTETSKSSQ

SEQ ID NO: 390495 - protein, 340 aa, unidentified
MKRTMMGVDLAKNVCEVYVEDESGQVVKRHRLSRKKMLPWFANRPPAVVGMEACGGAHYWARELMKLGHEVRLIAPQYVKPWVQTNKSDAADARAICRAVQEPGMRFVGIATEAQQDVQTFHRVRRRLMGNRTALVNQIRGILLEYGVAVPQGVRALCQALPLLLAEERWSPLLRQFLTEQQAELRVCETQIEAVTASIKQASALHPVCHRLEQVRGSGPLGASALWVKLSGGSYQNGRHVAAALGLVPKHTGTGGKVRLGGISKRGDRYLRQVLIHGARSVIAHVGEKADPLSAWLRRLVARRGMNKAVVALANKNARVAFALVSGGQTYDLMQVCRAV

SEQ ID NO: 390496 - protein, 399 aa, unidentified
MTPDDIDVWVGLDVGKSAHHAHALDHDGNTLYDKPLKQDEKAIRTMLGKLSKHGRVLLVVDQPNTIGSLPLTVARNMGIAVAYLPGTAMRRTAQLLPGDAKTDRRDAHVIAWAALKLPETLRDAGPDDETLAALKLLAGHDEDLAHESTRHVNRLRSLLLQTHPAFERALKGERITRDATLALLERYGGPMGVKRAGIEDVKDWAKSNGLRAGRIIDDMFKAIGEQTVTVPGTLMAETIIPSIAHDIKTIRDRRREVGRQVEKLLEDHPLLTVLTSMPGIGVRTASNILLGIGGDIANFKSSAHLAAYAGISPVTGQSGTSIKGERPSRRGNKRLKNALWQTAFVASTKHPPSVAYYKRKREQGKHHNAAVICLARRRCDVIYSMLKNGTLYQEPALVA

SEQ ID NO: 390497 - protein, 376 aa, unidentified
MDQSSTLYVGLDVHKDSVDVAVADAARDTEVRHLACVGGGVEPVTKALRRLVSAGHRLHIVYEAGPCGFTLQRHLSALGWHCDVVAPSSIPRPSGERIKTDRRDAMKLARLARVGELVPVRVPDSGDEAMRDLMRAREDAVREQRNSRHRLKALLLRNGIAYSGRATWSAAHLRWLASFKMPHPAQQIAFQEYLHALTEAGARIHRLEQALRDALAHWSLAPVVAALQALRGVQLIAAITLVAEIQDFWRFASPRQLMGYLGLVPCEASSGARRRQGAITKAGNAPARRILVEIAHHYRHAARVSRTIAQRHDQLPKAITDIAWGAQLRLCSRFRRLAARRLPTNKIVVAIARELCGFVWAIARQASPQPCALAIA

SEQ ID NO: 390498 - protein, 376 aa, unidentified
MKQFNDIYVGLDVHKDTIAVAIVRGLRSKPTYFGEIPNTPAAITKLLHQLSPDGEVLNFCYEAGPCGYEVYHQLTKLGQSCSVVAPSLIPRMPGVRIKTDRRDAMSLAKLHADGSLTAVWVPGKEQEGIRDLSRAREDFKQTETKARQRLGAFLLRNGKIFTGKSKWTVAHWRWMETLTFETPMQHIVMQEYVEALKEASRRLLGIEKQILLAVRGWSLEPVLNSLLAMRGVNTITAVTLLAELGDITRFDNPKQLMSYLGLVPSEYSSGGKRQQGSITKTGNGHVRRVLVEAAWNYRFPARKSRTIEMRAEKTSDRVQAIAWEGQKRLCGRYQKLLSLGKLKQKVCTAVAREMVGFVWAIACEASGRVHGSRATA

SEQ ID NO: 390499 - protein, 405 aa, unidentified
MEILVDRACGMDVHKATVVACIMGTGITKEIRTFSTMTNDLLRLKEWLIDNRITHVAMESTGVYWKPVFNILEGSFDVILANARHVKNVPGRKTDAEDSAWLCKLLRSGLIRGSFIPPKEVRELRDLTRYKRKLIQTISSEKQRVEKVLEDANIKLSSIASDTFGASGKRIIEELMKGELKPEAMADLSKGRLRSRKAEMKEALVGNMEDHHKFMIQAHLTHITMMEELLAIVEQKIQETIEIHFKEAYELLKTIPPVKDNASVIIAEMGVNMDLFPTEMHLSSWSGMSPGNNESAGKKKPGVTTHGNKHLKTILTEFGWVASRMKGTYLSSKYHSLVGRRGKKKTLVAVGHKILIMCYHILKYKVPYKELGPRYLDERRKDRIAKSYIKRLTNLGYAVTVKEAA

SEQ ID NO: 390500 - protein, 344 aa, unidentified
MNYYAGIDVSLESSSVCIVDATGEIVKEARVESHPDALVKFFKAFGLPLTVIGLEAGPLSQWLYAGLTKAGFVTTLMETRHVNAALSATTVKTDRRDARGISQLLRMGWFRPVHAKSTGSQEVRALLVARKQIQHKLKDIELSLRGILRGFGLKVGKVTEKTFEARIRELVTGHPMLEQIAEAMLAARAALLEQFNKLHKAVLKIVRHDEVCRRLMTTPSVGAIVAITYKSALDDPGRIKKSRNAGPLFGLTPKRYQSGETDITGGISRVGDEMVRTALYEAANVLLSRVTRFSALKRWGMEVAKRRGLKRAKVAVARKLAVILHRMWIDGSTFRWTKTEAAYA

SEQ ID NO: 390501 - protein, 318 aa, unidentified
MNSHCKTESTNPVRYVPLDVSKRRLDYGLEPHRPAAVANTCEGIAALIKRLEGYPQARVICESTGGYERPLLAALAQANIAVSRVHPGRVRAFARAEGLRAKTDRIDVELLRRYAVAMQPRVTVVPSSEVEVLRDLMDYRRQLDEQRVAFANRRETAGPTLLGLLEPQVAYLEQRLKEVDARIREHIHSHPTLRAKSERLQQLQGCGPVLAGTLLAYLPELGVLEDKQISGLVGVAPHPHDSGETMRPRHAHGGRVAVRNVLYMAAVSASQHNPILATFYQRLLTEGKPAKVALNAVMRKMIVVLNRLLKDPNFTLGG

SEQ ID NO: 390502 - protein, 351 aa, unidentified
MPHKLNSGIAVIGIDIGKNSFHVVGHDKRGAILLRQKWSRGQVEARLANLPPCLIGMEACVGAHHLSRKLQMLGHDARLMSAKYVRPYSKGQKNDFRDAEAITEAVQRPTMKFVATKTTEQLDLQALHRVRERLVSQRTGIINQIRAFLLERGVAVRQGLRFLRAELPRILAAPCDALSPRILRVIEDLAGDWRRLDERIEGLSNEIEALARQDKGCERLMTVPGIGPIISSAMVAAIGTGDAFSKGRDFGAWLGLVPKQISTGDRTILGSISKRGNRYLRALFVQAAWVVLVKVGPKHWARYGLKSWIEAAKKRLHHNVLAVALANKLARIAWSVLAHGRTFETSKIQAA

SEQ ID NO: 390503 - protein, 302 aa, unidentified
MKLIRVGVDLAKSVFQVHGVDRSERTTWRRRLRREDWIDMLRERLEPGGEVGMEACGGAHHWARELQKLGYRVKLIAPQFVKPYVKSNKHDAADAEAICEAMGRPGMRFVPVKTAEQQDIQAIHRVRASLVEQRSAKANQIRGLVAEYGLVAPRELLHLRRALRRWLEDEGNGLTMRFRRLLRGLQDELISLDERIAELDREIEEIAKSEPAAKRLMQLRGVGPIIATAMLATVGDARQFRNGRQMSVLIGLTPKQHSSGGKERMLGISKRGDAYLRKPAHSRRTSRHPHRPGRRTTRSVGG

SEQ ID NO: 390504 - protein, 342 aa, unidentified
MYYIGLDVHKKTISYCVKDASGQVHQEGKVGATRRELDSWIKTLPQPRTMAMEATIFTGWIYDHLLPHAQQVKVAHPLMLRAIAAAKKKNDRIDAGKIADCLRCDFLPECHIASTQIRDRRRTLRYRHLLVRQMVQMKNRISGLLMETGVSYNKQRLHKVGYFRELLATNEDVHESIRPLLKVSRDTVVRLQKTEYALVSSLQRDRLLADRVKRLRTVPGVGPITALAWALEIGDVARFRSIRQAISYCGLCGEEKSSADKVMRTPLSKQRNKHIQRVLVEAAKLAPRQDHDLALVYETEKQKGNANRATLAVARKRVAYLLAVDREERDFVPAENYQRAAA

SEQ ID NO: 390505 - protein, 419 aa, unidentified
MTRKDDSRIIRIVHPICCGLDVHKESVSACVIFPDSNGDEQFQVKVFGTFTDDLIRLREWLLEHDCLVVAMESTGIYWRPVHNILEESFQVVLANARDMRNVSGRKTDIGDSRWIAGLLRHGLLRASFIPPQTVRQWRDPTRLRKKYVQTVSDYRKRTHKLFESANIKIDSVVSDLFGVTGRNMMKLLIQDRELTLTDIQSCVRGKLKGKEAELFRSIQGFFTGHHRFILKMLLRTIASLESQIEALDHQIRDVMKDNEALLDRMKKAPGISDVSACDILAEIGPTLESFPTDTALVSWSGLCPGNNESAGKRKSGRSPVRKHHLKTIMIEVAWAAVKKKGSYFKDKYYRLKARRGAKKAIVAIAHRILLGIYHVIKDGAEFRDLGEDYLTLRNKAKKVIHLQKQALALGFNLVPQAAQ

SEQ ID NO: 390506 - protein, 415 aa, unidentified
MEKQRNKVCGADIHKKFLVATIISRDGIKMTKRFGMTLEDLLEFKSWVVENQCEQVAVESTGVYWIPIHAVLEDAVDLIVANAYKIKHIPGRKSDLIDSEWIAELCLNGMIEPSRIFPKEDRELRRLTRAREGYVTDMTREKNRIHHALESCGIKLSSVLADVFGKSGRYLLNSLLDGVELEEMIKGIPVKSIRKKADQIREAVRGSLETTQIILIRGGLEQIESIQRRIDELEGEIKNRIASRREDLKIAMSIPGIGFTSAVTILAEIGDFKDFAKAEQLAAWAGLVPAVYQSADKLVTGSITKHGSKHIRWILVEVAQAIARTNKSELKRFFRRVQAKKGYNVAAVALARKVLCILYHLLMNREMYQEDEVIKTKSIGIDPSSLPTKMGFEEMIQVLVKAGYEIRKTSSGTGG

SEQ ID NO: 390507 - protein, 325 aa, unidentified
MDVLGIDVAKATLVVVLLVAERQQRAEFANTPAGHAKLLNWLAKRCAARVHACLEATGTYGDDLAQALYDAGHTVSVVNPARIAAYATVQAARHKTDQADAALIARYCQREQPSAWQPPAPEFRELRALVRHLDTLQQQRQAEQNRLEAGGHPAAVTQAIQAHLTFLTEQIRSVEQQIEAHFDQHPDLKRQRELLDSIKGIAVRTATRLLAELGDWQRFANARAVVAYVGLNPRQYRSGSSVQRRTRLSKAGNAAVRAALYFPAIVAKQHNPLVQGLCARLTARGLCPKAVIGAAMRKLLQIAYGVLKSGRPFDPMYTSSAAAQG

SEQ ID NO: 390508 - protein, 316 aa, unidentified
MKPSDADTFIGLDVSKQYLDLAVLPSEETWRTLNRPDELPALAGRLAALRPRRIVLEATGGLELPALIALAAEGLPVVAVNPRQVRNFARALGVLAKTDRLDSRVLAHFAQAVRPPLKPIPDQEALLLKELVSRRRQLVDMLVAEKNHRHSALPALHKTFDEHIRYLEEELKKLDREMKQRILESSAWREKERLLLTVPGVGPVIARTLIADLPELGLLSRKEIAALVGVAPLACDSGQFRGKRRIWGGRASVRQKLYMAALVGTRCNPIIRSFYQRLLAHGKPKKLALVACMRKLLTILNAMVRYQQPWQQPLPA

SEQ ID NO: 390509 - protein, 348 aa, unidentified
MTLVGCDLHSRKQQVAVLDTTTGEVREQELAHDGDAVEQFYRGLSRPVTIGIETTGYTQWFHTLMHRLGHTVLVGEAAQIRAMVVRKTKTDRRDARHLLDLLQHDRFPAVWIPDPGTRDLRALVAHRVRLVRMRTMVKNGLQAIALNQRLALRSALWTQRGLAQLQALPLPAHTTRRRDDNLELLAWLTARIKQLDDQITTVARDHPRVQLLLTHPGVGPLTALTTVLVLGPLARFPDSKHVVSCVGLAPAVNASADKQRLGKITKQGNALLRWVLGQAAPLAARQDDDLRRRYFSVMHRRGRPKAKVALARKLLVRLYIMLRDQIDYDEFRRRGQVAHPPRASAAGM

SEQ ID NO: 390510 - protein, 419 aa, unidentified
MTQPSSSNPLDPSSFQYVVGIDIGSQSCSFCALKPDKQIAIKPTDYANTAAGFAVLGEKLDQLGVPADQILVGLEATSRYGEPLYHMLLSRGYHLCLLHPAQTHHFAQHRSLRAKTDHLDAITIARLLLSGEARQGYVPTELVAAYRELVRLHTQLSDEAARYQNEIHALVVVQFPEFTQVFVDPCRPTALAVLKRYPSPQAIVKAGVETLAKRLHRLSPSHYGRATAEQLVSLARHSVSSGLAVSARSSSLRILCDQLEHTQANLATVEQEIEHLISRDPKAKELQGVQEFGVKTVAVVRAELGDVDRFSRVDQAVAYAGLDLEVKESGKWKGQTKLSEPGSGLLRRILYLAALRSVRLDGSAFGAYYHRLVGRGMKKGMALVAVMRKMLIVAVHLIKTEEAYDPAKVSVPPASYPRG

SEQ ID NO: 390511 - protein, 370 aa, unidentified
MAKRSMFVGMDVHKESIDISLAEEGRDGEVRHYGGIAGDLEALAKVVRALRAPTRRLRFVYEAGPCGFGIHRYLTAQGEECVVVNPSSMPKRSGDRIKTDRRDGDALARLHRAGELTAIYIPTADDEALRDLVRAREDAVGLSTQAKHRLKAFLLRQGRRYPGRAGWTQVYRRWLADLSFPLAPQHIALQEYRDTIDETERRVVRLTDQLRTHTPSWRWAPVVDALQALRGVSFVTAVGLVAEVGDIRRFDHPRQLMAFLGLVPSEYSSGPSVRRGGITKAGNPHARRLLAEAAWAYQGIPRIGRQMLYRQEALPKPICDIAWKAQLRLTSRFRKLVARGKAKPKVATAVARELTGFIWAIAREVPPPAA

SEQ ID NO: 390512 - protein, 401 aa, unidentified
MLQEPLNRATVKGDKAMKDFITHVGLDTDSHGIDVAIAEGFGSENWEVRSWGRIAADLEAIDKLIKQLKRKGYRRLRFSYEAGPTGYGIYRHLQKCDDVECIVAAPSMIPSKPGDKIKTNRRDAMKLARLDRAGDLTAVHVPDEEDEAMRDLSRSRTTGVDGVTRIKLQIKSMLLRHGIKYNGVGENWSYRYRTWLRSVKFGHQAQNQVLQEWLVALEEAEARVKRFTDQIEELLPQWKMNEVVLALQALRGVAMITAVEMVAEVGDLTRFKNPREIMSYLGLVPREHSTGEKRRQGSITKTGNGNVRRALVESAWAYSRGPCLTRALQKRQQGLPKEVKEISWRAQVRLTSRYRKLVSRGKSTRNAVVAVARELCAFMWAIAMAVEESKNSAGREKQAIA

SEQ ID NO: 390513 - protein, 539 aa, unidentified
MHMTIKSRESGEPAIKGGAIIDHEAPRERRFVVYYCSALYTYGSRAGAGPFSRERRDKMAADKRNRKQRKELARQLQSANPGLEVVHPRAAGIDVGNGSHYVAVRPDQDREPVRRFECFTADLHRLADWLKACEVETIAMQSTGVYWIPLYEILEERGFEVYLVNARHTKNLPGRKSDVQESQWLLKLHTYGLLNNSFQPSAEIRVARTFWRQRGEHVRGASTCVQRMQKVLTQMNIQLANVISDLSGLTGQTIVRAIIAGERDSKKLAELSHPHIRATREEIARSLEGSWRPELLFLLKQEMEMYDTYQRRIAECDHELEAHLKSFADNVPPKPAEEEPPAEQPEGKNVRTSAKTKLTQRGKKAPGNRPQFDLRSELYRISGVDLTRIDSINVLVAQTVISEVGLDMSRWNTEAHFASWLGLCPDNRISGDKVLSKGTRHVVNRAATALRIAATTLLRSRTYLGAQYRRLRTKLGAPKAITAMAHKLARIVYRMLKYGQEYIDKGMQYYEERSRRQQLEHLKKKAAILGLQIVEAQPA

SEQ ID NO: 390514 - protein, 424 aa, unidentified
MSWLTLDVLLLARLLLKLAVGPVLERKGDITMFYVGLDIAAEKHDCCIMTEERQVLKQFVFRNDAEGFDFLKKTLTKLAPTEEIKIGLENTGVYGSNLVQFLRRNGYKTYTFNPLLINKSIQATTLRKTKTDKADAKFLAQYLTWDNSQPDHDVSYHISELKSLSRLRFSLVQQRSKCKTQAKGVLAQVFPELTQVFSDVFGTTARTILSLCPSAQRIAAYPVPQLADLLRTTSRGQLGLEKAELLHALAVHSVGNSSIALELQLQIYLEQITQLSFHICRCEAALRTILAQMDSPITTIPGIGTVLGATILGEIGDIFRFSSPAKLLSFAGLEPSITCSGKSVSAPGRMVKHGSHYLRWAFGQAARCIILRDQTFATYASKKRAEGKHFNVVCSHVAKKLVRLVFALLKNHSSFIPNYSSLAA

SEQ ID NO: 390515 - protein, 354 aa, unidentified
MPIVSEKYRRVVGIDTHAATNTLAVIDASNGAELGSATFPTTRAGLARASAWAGRRTGDDPALFVVEGIGSYGAGIARALADRGQPVVEPSQMSKADYRGHGKTDALDAVRIARSVLGVDLSLLRLPRADGGHRTALRVLVVARDQMTTERTRLVNALTALLRMLDLGVDVRRPLTAGQTATVARWRQRSTDPVAVATGRAEAIRLASRIVALDSELVDNRKHLDTLVDQHAPQLRQLLGVGTVVAATILVAWSHPGRVRSESAFASLAGTCPIPASSGNTDRHRLNRGGDRQLNKAITTIALVRMRCDPATRAYVSRRTAEGRTKKEIMRALKRYISRQLFRALAPKQAPSSP

SEQ ID NO: 390516 - protein, 429 aa, unidentified
MTSASSTTASTWVAIDVAKLVHQVLIDGGAGRRRTMRIANTAAEIERLVTHLRSLPQPCVIAFEPTGDYHRAVMHRLGRAGFTLCQVSSLAVARTRDAMYNSWDKNDPKDAQVILHLLKTGTTQRFVDPLVSGHHDLQEMANTYQQVSLRKVRLQHAIVTHHLPLYFPEAERYLHSSRAEWFTSVLHLTPCPAAVRQYSKAAFIAAARAEVVGHKTDKTRWLADFYETAGHSIALPVSPDSAAISMFRVVLEEYQQLCRRRKALEADIVARLAGHRDFDRLQTVPGIGPILAMLILAEAGDLRRFGHVRQFLKYCGFDLCTEQSGQFRGTTHLSKRGNARLRYACWMAGAVAVRMQQNSFRRKFEDYMRSDPHNKDRRRKAYTAVAAKMARVVYAVVTSGNDYRRFPEAARPGGRIPSPRAVEASLTTS

SEQ ID NO: 390517 - protein, 341 aa, unidentified
MESTTIAVDLAKSVFQVAVSPQPGQVHRERRLTRDRFLPFFAQQPPATVLLEACSSAHHWARELQRFGHEVRLLPAHDVHRYVRRNKTDRGDAKALLEAARNDEIRPVPVKSVEQQTLASLHRLRTTWLATRTSRLNTVRGLLREFGIVIPVGAQHVVPMVHALSDDARVPPLLQSVLVATATEIRALDAQLDAVDQQIAQLARAHPTAVLLQSVPGIGALTATALVAAVGDIQRFPSGRHFASFLGLTAKEASSGEQRHLGAISKRGDGYLRMLLIHGGRSLLWSAKQRRRPDALRAWGLRLEQRRGHNVAAVAVANKLARIVWAVWRHGTPYHGGAAPD

SEQ ID NO: 390518 - protein, 351 aa, unidentified
MIIIGCDFHTRYQPIAMADDETGELLLERRLDHESGEAQAFYRSLQGPVRVGIEATGPIHWFERLLAELGHELWIGDSAKIRASEVRKQKTDERDARLILDLLLAKRFPKIWVPTPTERDLRQLLWHRHKLVCLRTMLGNQLHFLAMSQGLCRKRKLFTKKGRADLAGLALGPWTRRRREELLKLLDQLDPAIAELDRAVLEEAQRRDDAVLLMTHPGIGPVTSLAFVLAIGPVSRFPRSKKIASYLGLNPSEESSGGRQRLGAISKQGNTMVRWLLIEAVYPAVRKDLALRQDYQRLKFRRGHAVAKVAIARKLAVRMYWMLRSGAAYAQLVRRQGSPGATLVNASSSLG

SEQ ID NO: 390519 - protein, 365 aa, unidentified
MKIIHWIGIDDHADKWTIAHFKGQEQKPANEFELRPDETGYRKLIAFAKGLDGEVRIVYEAGPCGYEMYRQLTKARLQCQVAAPSLTPRKPGQRVKTNRRDAANLARYLRSNELTFVVVPDSRLESLRDLVRARGAVQKDLVSIRHQIVKFLLRYGHRYREGKAWTARFWAWLGTLKLEAEYGSIVLEEMKATHTERVGRLARYDQEIEAAAQRPEYAPYVAALSVLRGIATLSAMTLLSELGDLRRFASAPQLMGAVGLVPAEHSTGDKTTRLSITKTGNAHVRHIAVEAAWHYQRRIANGPAITRRRKGQAQALLDIAHKCDLRLNRKFFRMTSRGKRSTVAAVAVGRELIGFIWAIGQLVHP

SEQ ID NO: 390520 - protein, 318 aa, unidentified
MTAQALAIAAGIDVGQRFFDIGLAPSGKTFRVPNAPAGINAIVARLAQDGVRRVVLEAIGPYAQRLVLALAAAGFEVGIVNPRRIKAFRDAEGRRAKTDGLDARLIARFALAMTDAIRPLPSADQLALKALSTRRRQLTEMIAMEKTRLKQTDEPLLLASHRAAIAGLTEQCRQIEAELARRIAGDARLATKFGILTSIPGIGERIATILMTDLSEIGSIDRRAIASLAGLAPHVSQSGNAPPRAMIAGGRPCVRAALYMAALVACRHHPQMKQAYQALRLQGKPAKVALIAVARKLLITANALVKANKHYDAATMPH

SEQ ID NO: 390521 - protein, 407 aa, unidentified
MEVVYRCCCGIDVHKKVIVACLNKGGKQELRELGTMTGEIKELANWLTEAGCEMIAMESTGVYWKPLYNLFEIMGLDAIVVNASHMKALPGRKTDVKDAEWIADLLRHGLLQASFIPDREQRERREIGRYRKSLIEERAREINRLQKVLEGANIKLASVVTNINGISSRKLLDTIIAEETPDADDVAQLLHPKMRKNLDQIMLSIEGITTPLQRKLIARIVDHIDDMTRRIEDMDDLIKDYMKEYEDAITALEKIPGVGRRSAEIILAEIGTDMSRFPSAAHLCSWAGVAPGNNKSAGKQKHGRTTKGNSTLKTTLTQCAQSVKKCKDSFFSAQYQRIVARRGKNRATVAVAHSMLTAIYHMLKNGVAFQDLGADYYDNFNRDHKINSYLKRLRTLGWSPDLTAVPA

SEQ ID NO: 390522 - protein, 394 aa, unidentified
MLYLGIDIAKNNHVASLINENGKTFFKAFSFSNTSDGGEALLSKLNSFSHNVSDFVIGMEATGHYWLALYSFLYDNGFTIHVINPIQTDGWRKGTEIRKRKTDSIDSLLIADLIRYGSFVETSLSHEDIFSLRNLTRFRSYLVQSIADLKRKVISVLDQVFPEYQSIFSNVFGKTSKELLLQFSSPIDFEDISTDSLAELINKLSRKKLGDIKAELIKSKAENSFGITFSKDSFTFQLKALIQQMNFIESQVQDTENEINRLMSLIDSPVTTIPGIGNIIGATILGEIGDIDKFDSPRKLVAYAGIDAVVSSSGEFQATHTVMSKRGSPYLRKALFQAALVASFNDPVLNAYYLKKRGEGKHHLTCVGAVSRKLCNIIYAVLKNQSPYEVRLNE

SEQ ID NO: 390523 - protein, 435 aa, unidentified
MTNRLQVGIDFSQKKADFCLLFPNGRPLEPHASFSNSCSGYSSAKQLLLDALDTYAFDGVDISGEATGFLWLPFFLQLAADPDLSLRDMDLFLLNPRWVKWFKKCFAEDHKCDEKDAFYIAERTRSHRPDVAWSPPDCLPLRFYTRLRFHIVQNLAREKCYFSAFLFLKASSYRCLKPFSDIFGVTSRLVLTQQPTLDELADLPVEDLAAHLYELSGHHLPKPLDNARKLRRVAQESFPLQESLALPVQRILDLSLDHIRFLEAQIKQVDRWIAAELEAYPVISQLATIPGVGPVFSSGIGAEIGGVQRFLQGQKWDKKRKRYRPRNLRDAEDAVAKIAGLWWPRADSGDFAAQDRRLAKSGNHYLRYYLIQAADKMRQHCAEYAEFYARKYKESSKHHHKRALVMTARKSVGLVVGLLHRDEPYRSREERANQT

SEQ ID NO: 390524 - protein, 404 aa, unidentified
MKGPIVSIDVSKGKSDYQAFKNLNVKYTGSRSIKHTKEGFDEIVNLVREMEKKLETEVCVVYEATGVYHRVLKKVLEDNNIKQFIINPLLSAKTRKNDSLRSPKTDKLDPKSIAKTYYSHSLHNSHKPETIYHELRELSRYYEDILVHIRKDKVSFRAQLDVVFPGYDTLFDDLYSPVSLTIIEKYPHPEMLQKKKINTVSKVIQSKTCHRQAASDTMADKAIEYSKTIYSGCDKDDIEVLILQRFIKKLKEDMAEAERTIGEMIKLAQELPDFSIIKSIPGIGDNLAARIIAELGDMTRFKKKNELVAFAGLDPRISESGQDDGDHMHITKKGNKRLRCLLYLAVTCSIRLKRDDNSIKDFYIKKKQQSNPMCSKAAKTACASKLVRIIYSMCKTGELYQYNK

SEQ ID NO: 390525 - protein, 336 aa, unidentified
MSVYVGIDVHRKRSQVAVVTEDGTVQVNKNVVNGSEPFLRLIGDLPSGTPVAFEAAFGWTWLADLLEDYGFEAHMVHPLRCKAIASARLKNDKVDAAILAQLLRADLLPEAWIAPAKVRQLRALLRHRISLVRLGTRLRNRIHAVAADHGYDRSASYWTGPGRGWLAELDLPAASREIITDCLAVIDGLAPVIDRIDGELHQHARTDPRVKALRTLPGVGEFTALVMVAEIGDISRFGSARKLASWAGLTPTVRGSDLKVRHGNISKQGSAWLRWVLNQAAQTAKRSPEFAPAYSSIAKRRGKKIATIAIARKLLTRAWHLLSEMQAADAGTPPRP

SEQ ID NO: 390526 - protein, 325 aa, unidentified
MEVKKLCCGIDVSHTKLDVSYQNNLGEFFHLQMGNNINGFKKILEHTGTGYHFVMEATGVYYIRLAFYLHQQDCQLSVVNALSIKRYIQMHLERNKSDKKDAAWICRYAIEQCPPYWEMPDSAYFESKQLYNTIREYTEQIKRFNNQLHSLRLLPVPSKDTIKTLEKMTAHLQKEIKLLELKLESMLEQWQPAQLKSVGSVKGIGKRATAMLIVFTQGFKNTHSHRQLISFAGLSPTEYSSGSSIQGKSRIYKGGGKNLRDVLYMCSMNAIKTNTACKALYERLRGNGKTGKQALIAVCNKLLKQVFAVVKNNTLYQPNYCSTKP

SEQ ID NO: 390527 - protein, 343 aa, unidentified
MQITTIGLDLAKHWFQIHGVDAKGDVIVRRRLWRSGVIAYFRSLEPCLVGMEACATAHYWARELTALGHTVKLMPPAYVKAYVKRNKNDAADAAAICEAVTRPSMRFVPVKNAEQQSVLMLHRARSLLVRQRTMLVNALRAHMAEFGIVAPQGFRHVGILTKTIARQQEGLPELARSILQTIIDQLNGTMARIREIEGRLAIWHRQSRVSRLLATVPGIGIMGASAIAATVADPSLFRSGREFAAWLGMTPRQNSSGGKERLGRTSKRGDKYIRSLLTAGAVAVLRHARNRPTRDGEWVRALLARKPTKRAAVALANKTARIVWAVMMRGDGYRVKEVFEQPA

SEQ ID NO: 390528 - protein, 342 aa, unidentified
MFMEIDHVVSQCVGIDVSKGKLVATMCMFSQAEQAVYSKATEFDNDKTGFNQLVKWSRKEAMKELPLRYVMEATGVYHEHLANHLVRIGCTAVVMMPTKAREFAFWEGMISKNDTIDSRVLALVGCVKRTMRPWKPVSPLYRELRTMTRFSQDAKKLRTELKNHLEALEHSHEAERSVIKHYESLVASLDKRIERNLENMKRKVASDEELSKKVANIMTAPSLGFLSAVTVIAETDGFALIQNRKQLTSYAGLDVRDSQSGPVKGVSRISKRGNSRIRAILYMPAVQCRLHNRHLKEAYDRIVAKHPDKKMIAVTAMERRLLLLIYALWKSDRPYSEDYDKE

SEQ ID NO: 390529 - protein, 371 aa, unidentified
MEESSKTLYVGLDVHKDAIAVAYAPEDRGTEVLSLGSIGTRQSDIDKLIRKLQSKGATLVFVYEAGPCGYWLYRYLTGKGLSCHVVAPSLIPRKPGDRVKTDRRDAITLARLMRSGDLSAIYVPEREDEALRDLSRSREDAMQDLKRSKRRLKSFLLRQDIRYAGRANWNAAHLRWLAAVVCPTAAQQIVFQEYVRAVTEQQERLVRLEHELHEAVKSWRLYPVVEAIQALRGVELTSAVIVMTELGDLTRFDSPRQLMSYLGLTPSEYSSGARRRQGGITKAGNSHARRALVEGAWAYRYPAKVSRHLQLRLEKLPPEVQAIGWKAQIRLCKRYRQLSARGKHVNQVVVAIAREMAAFAWAIARIVPLAA

SEQ ID NO: 390530 - protein, 387 aa, unidentified
MAQVNDLSRSLTAFDLISTLVVVVEMSKASWLVSGAVPGVERQPLKKLEPDATALLRLIERWRNEALRAGRPISRIALAYEAGRDGFWLARWLIARGIEAHVIHSASVAVSRERKRAKTDRLDAAMLMRVFLGWLRGERGHCGMVAIPTMEEEDARRPSRERESLINERSRITNRMKSALARLGVRGFKPHLRKAPERLAGLRTAEGTGLPANIIEEFRRDMARLALVREQINSIEKTRAERLKRAPDTGPHAMVRLLARVIGIGIETADMLVREILSRKLRDRRAVARYAGLTGSPDESGLKRREKGLAKAGNARVRRGLIQLAWRFLMFQKNSALAQWYRLQTTDHRGTTRKTMIVALARKLLVALWQLVTTGEVPEGVVLRPAV

SEQ ID NO: 390531 - protein, 372 aa, unidentified
MSTQDLTFVGLDVHKNSIHVAVLLPGRDAPLEWTEAHTIEAIRRMARKLLREAPGAVECCYEAGPTGYVLQRRLRELGVGCTVIAPSLTPIRPGSRTKTDRRDARKLAELHRARLLTEVHPPSESDEALRDLFRCREDVRQDLTRARHRMSKFLLRRHCVYRQTKHHWGTRHMAWLRALRFEDRPSQAVFENYLYAIDQLTERLHQVDAALKEAAQEEPYAKPVAWLRCFRGIDTVTAVGIVAELHDFRRFRSPRQLAAYIGLVPSEHSSGESQRRGPITKTGNSHVRRLLIEAAWHHRYKPRITGPLTKRRDGQPTRILKLADRSQERLYARYLRMSARGKLHNKTVVAMARELVGYIWAALHPNAELAEV

SEQ ID NO: 390532 - protein, 345 aa, unidentified
MKTTTVGLDLAKNVFQVHSVDEAGEVIVRRALRRRQVMPFFAGLEPCLIGMEACGTSHYWARELSALGHSVKLMPPAYVKPYVKRGKTDAGDAEAICEAVTRPTMRFVAIKSPEQQSLLALHRVRDLLIRQRTQLVNMIRGQLAEFGIVLAKGIQHMLRLVERLLDGEALELPMLAAKIMITVAAQVRELQGRIGALEKELKLWSRDNQVVKRLQTIPGIGIITASALAATVTDPHQFTSGRQFAAWLGLTPRANSSGGKERLGRISKMGDRYLRRLLINGMTAQLQSVRRHPDRHPWTIELLHRKPAKLVAVAMANKTARIVWAVMTRDEIYRVPQPSTQEAVA

SEQ ID NO: 390533 - protein, 377 aa, unidentified
MSIVMGVDQHRAQITAEWIDVASGEISRARVRPADRAGVRRFLARFAGQRLEVALEATTGWRFLVEELRAAGAVVHLAEPAETAARRGNKKRAKTDRADARHHRELLLAGRLPESWIPPDHILDLRARVRLRHTLIEQHSEWQQRIQAVLYHHGCPRRRGLMQGDGRDWLGALALPETARQQITVSLELIDALELQIAPLDQQLRRYARRQTGCKALIEVHYGIGELCAVTILSELGDVGRFHNSRDAVRYGGMDITVYQSDRHRSPGHLSRQGPPALRWALYEAAHAARRPGSPDRDYYLQAAERLGGNRACLALARKLLKRCYHTLRELGDDALTPPANDRRESVSSRAARRASSGGSPRSERPETRERADALAA

SEQ ID NO: 390534 - protein, 423 aa, unidentified
MMKLKYSICCGLDVHKNVIVATIVTTNKDGISEYLQKSFSTINSDIQRFHNWLIENNCYHVCMESTGKYWIPIFNYLENDIDVCLTHPKYVKAIKGKKTDKKDSKWIADLYKFDLVRCSFIPPKDFRQLRELSRYRFKLVCMKSSEKNRIQNCMTISNVGIASVLSDPFGKTATEIISYLLEHTADSMDEKAVRKLIKKGAKSKSDEIIEAIKGYTIETDQAKKLELARGHLEYLDVMITQTEVELYVRIKPYYEFVEFVSTMPGMTELSSTIVLAETGVDMDIFDDAKHLCSWCGLSPANNESAGKKKSVRIAKAGDYLKPMMVQCALAAIKSKKQPYFAIKYGRIKKRRGHKKAIIAIARMMMVCIYHMVSEKKPFTPTDYEELMDPQNHVESVVLNENNVFAYLESLGYDSSKLVKRNDN

SEQ ID NO: 390535 - protein, 470 aa, unidentified
MIRHRSDSVLLGPLASVRKPVSQPVIAAVRFMQVELPLHVRLIPQEIESAMRNAGIHADSLLEVRRMYNAVGIDVSKGKSTIAVLQPGGTVIRKPFDVSHTSQSLIELARYLGSLEGSTKIVMECTGRYHEPMLKALYEAGLFVSVVNPHLIKNFGNNSLRKVKSDPADARRIARYTLDNWAELRQYSGMDNTRTQLKTLNSQFSFFMKQKVAAKANLIALLDNTYPGVNKLFDSPTREDGSEKRVDYAYSFWHVDCVRRIGLKTFTERYKAFCKKHHYIFQQDKPEKLFNASKELVAVFPKEKTYKLLIQQSIQQLNLASGHVERLRQEMNALASTLPEYSTVMGIYGVGKTYGPQLIAEIGDVSRFTHREALTAFAGVDPGVDESGQHKSKSNRASKVGSARLRKTLFQIMTTLLQNAPEDDPVYRFLDKKRAQGKPYYVYMTAGANKFLRIYYGKVKECLRNLEQAE

SEQ ID NO: 390536 - protein, 432 aa, unidentified
MSNNHLQVGIDFGQATTHFCLLRPDGQPLELHQAFANSHTGYVAARQFLLKALATQAFDGLDISGEATGFYWLPFFLQLATDPELEPYTPQLFLLNPRWVHWFKKCFAQDDKSDQKDPYYIAERLRTRRPAVAWSPQLATLPLRFYTRLRFHLIESLVREKNYLSAFLFLQASAYRQLRPFTNVFAVTSRWTIGQLSSLDELAALPVETLAAQLNERSRHRLPDPVSNAQRLQQVAAESLPLPAALTEPVQRILDLSLEQIAYLEGQIETVDRWIATEVETRPAIAKLMTIPGVGPVFAAGLGAEIGDIQHFLQGMKWDAHRKAFRPKNLRNAEDAVAKTAGLWWPRTNSGDFEAEDRRMAKTGNRYLRYYFIQAADKMRQHIPEYAAFYQRKYREVTKHQHKRAVVLTARKSVGLIVGLLHRNEAYRPPEA

SEQ ID NO: 390537 - protein, 357 aa, unidentified
MKIVAGKSKKSVVGKDVYVGIDVHKESWQVTVRTGGEEIFNGRIPGQYQSLKKLFERYQGCRMKVAYEAGPFGFWLSDKLVADGIEALVVPPSLIPTESGNRVKTDKRDSRKLARLLESNMLKRVYVLTPEEREHRDLLRTRRQLVDHRNDVARQIKSKLLFYGITSPFTASTRWSLKYIEWLKVLRCDTEYLRESFNLLIDLYEYLTRQIVRINKKVALLCRDKKYRDRITLLCTAPGIGRLTAIEILVELQDITRFESAEELAAYIGLTPSEYSTGERTRQGRITRCGNKRVITYLVESTWMLITKDPAIRLKYLKLKSLRGGKRATIAIARKLLIRIRRMLLDNVPYRMTATAA

SEQ ID NO: 390538 - protein, 433 aa, unidentified
MKVKYEDRLKQKLIAITTDTLVVGVDIAKNYQWARFVDFRGIEHGRALKFKNSKGGFETILARIREICKKENFAKAVVGMEPTGHYWKAFANWLEKQEGITVVLVNPYATKQAKELDDNSQTKSDKKDALTIAKLVKDGRYFELYLPHDVYAELRGLSTARTGLNKRKSALKNTITAVMDEFFPEYAEVFKCPLSGKASRHILKNCPFPKFILALGEGGVTDEIRKAVRKTVGRKKAVQLVKAAKDSIGVDYGEEPARLKLRLMLEELELLEKQTEELEGQMSAALQETDYAEFLLSIKGIGIVTLATCLGELGDPTRFDDPRQMSRMAGYNLVEDSSGKNKSGTKISKRGRKNLRGVLYQMALTMVATNDEMKQLYHYLKTREKAPLRKMQALIVVSKKILTLIHTLAKKKESYDPEKVFGHVRREQLKAAA

SEQ ID NO: 390539 - protein, 456 aa, unidentified
MARSHRPRKHQGQRIDDLAVIHPRAAGIDVGSREHWVAVPPQFSSVSVRPFLSLTSGLHELAEWLKECGITTVAMESTGVYWVPLYEVLQARGLDVQLVNARHVRNVPGRKSDVLDCQWLLKLHTFGLLRGSFRPAAQIVALRSYLRQRDRLVDGAAQQVQHMHKALTLMNVQLHTIISDITGETGMAIIRAIVAGERDPEQLARHRNWRCRASAATIAESLRGNFQPEHLLALIQAVTLYDTYQRLITDCDTLAQNVLAELTSMQSKRPPPLGPSPKRRHRRDPAVDYRSPAYVLTGVDLTAIPGISAYTAISLLGEVGTDMSQWPDAKHFASWLRLCPRANITGGRVTDTRTMPGINRAAELLRTAAVCAGKTSTAIGAFYRRRALRRDSAHAVADTAHKLARIIYTMLKTGNPFQQVDEATYQEQQRQHVINRLQRQAHRLGLQLVANTGAVS

SEQ ID NO: 390540 - protein, 347 aa, unidentified
MKVLIGVDPHKASVAVAVVDEATGELLEGATFPQKRAGLRALERWAKRFPERRWAVENAGGLGRHLAGRLAATGESVVDVPPKLSARVRVLSTGNARKNDGVDALATALAASRNELLAAVDPEVGSEVLRLLSERREDLVAECTRALNRLHGLLRDLLPGGVSGTLSAPRAARILRGIRPQEGASASLRRRLASEVLRDVRTLDRKIADLNGRIETEVEASGTTLTEIFGIGPILAAKIIGTVGNVARFPTKAHFASYAGTAPVEASSGEVVRHRLSLAGNRKLNHALHMIATCQARSDARGGGYYRKKMAEGKSRKEALRCLKRRISDAVFKSLVADSQAPSRSAA

SEQ ID NO: 390541 - protein, 450 aa, unidentified
MTNGNGVSRGDRNRNARLARLRELVPLENAIVGIDLADKKQMVVVTDHDSKVLARRTFRCRAWDLGIALDWAAERATARGFAGVTVSCEPTGHRWRVIGQLAADRSMPFVCVQPMQTSWARRSEDLTFDKTDDKDAILIARLTAQLRCYVPEPVEETWGRLRHLGARRERLIGEAVSQVQQMRDLLECVWPAALEAANYPFRSRTWAAAMGVLLDRDGGDFTRIRRLGLARFETAVRREITKRGGQKPCLRIVRKLFTALSDSTGVIAHRRGALERVQLLLEDWAENQRKLADTEARMVAVLEELELTELVTSISGLSAVGAAAILAETGDPTRFLTARAMVKHAGLAPREKLSGTYTGRTKLTGQGRPGLRVAAWRAVWGALQTNTVYAARYRYLTTRETNQLTATQAQTVIAAAILRQLHAVITTGTAWDPLIATHGTRHKTDTLIAA

SEQ ID NO: 390542 - protein, 400 aa, unidentified
MRVVFGIDVSKVSSEVAILVNGEKVHNYTISNDAIGFARLLGDLKTVHKPEIIFEATGVYSRRLQAFLDEHDYAYTRLNPLEAKKQLDSLRVRKTDKIDAEKLAQSQCVLNRKPPYVQEEVYQNLRDLSRFYQNLTEDIVRAKNRLHKALQVTFPELENILSTPTGEQYWNLIITFPCKDFVLDLSKDELSESIRQSTSKRISDKRVAYLAEKLIALAKQSYCAVKKNSPMLEEVRYYTKELLRLSEQRQAVLDEMVELAQPLPEYDILLSIPGIAETTATSIIGELGDIRRFQSANQINAFIGIDLRHYESGNFLAKEHITKRGNPYARKILFKCIHNIASASHTNPCHIADFYEKRKRQSQTASTKSHTIASIHRLIRTMYYLIMHNKLYDYASTQNR

SEQ ID NO: 390543 - protein, 339 aa, unidentified
MNHSVIGLDIAKHVFHLYTIQADGKTYKKMLKRQEVLVFFANYPSSLIGIEACGSSHYWARELIKLGHEIKLLNARHVKAFVKGNKNDFNDAEAIFDAVSRPNVRTIAVKTVEQQDIQLIHRFRQETIKKRTALVNQLRGLLSERGIVIGQGVSQVRKRLPELLEDAENALTVLSRAAFAEQYERLLELDKDVKRYDQKMNQLCQANALSQRLAEVPGIGPLTATIVAADLGENRHYVNSRHYAASLGIVPRQNSSGGKSTLLGISKRGNRYIRTLLIHGARAVLRTCQNKNDTLSLWLQNLMQRRGFNVAAVALANKNARILWALAYKEERYQAVVSA

SEQ ID NO: 390544 - protein, 439 aa, unidentified
MKRRRDRVCGADVHKDLIVATITGDDVLPIRENFGTTKAELKRFRNWLVANKCEQVAFEATGVYWMPIYDALSKNIDTIVANPLQIKTIPNDKSDSKDSNRIATLCLNGQIKRSRVFTEDDRDLRMMTRARSGYVKTRTQFRNRIHKYLSSSGVKLSSCMDDIFCKSGRYILDCLAEEKPIEEILKGIPSGKIRKKKDQIRSALENALNDTNRMLLRDALEILDNLESKMEKLSLEVLKKVQQKSKDLAIVMSIPGIGFISASVILAEIGDYHDFKTPEQLAKWCGLNPGENESAGKKKKCGITKRGSKHIRVVLVQAAQTISNMKKTGLSRFFQRLIKKKEHNVAIIAVARKLICLIYHLLINRELYQEDERRTRRPSQDKSCQAPSFQEEHLTDKVAAIVDAFYHLNARGRKNALMREIADFSEIKVGQKRPSKGGG

SEQ ID NO: 390545 - protein, 376 aa, unidentified
MHALYIGLDVHKASITMGLAFAGTGPATLYGSCTSDVDRFVAVLGRLLKTHGLRREQVKLCYEAGPCGFVLARHLLRLGYAVEVVAPSLIPTKPGERVKTDRRDARKLARLLRSGDLTAVHIPDVADEILRDLCRARTDAMDDHMRSRQRLSALLLRNGFRYQGKSAWTEAHMRYLRELVLQDPTQKLVLEEYLQGIDRAGERVQRLEEQMRLRLEGWTRRPLVEALQGLRGFQLVASMVVASEIGDFLRFGHPRALMAYLGLVPSEHSSSNRRRQGAITKCGNSHVRWILVEAAHHYRLPPKVSKELSKRQEGLSRDVRELGWRAQHRLNKRFLKLTFRGVHYNKIIVAIARELAAFIWELARLVEREQEARRVA

SEQ ID NO: 390546 - protein, 413 aa, unidentified
MVNTARKGGLMDFYVGIDVSKFKHTVAIIDQNGEIRKKSFDISNSREGFDSLLNELGLLGEKEQIKIGMEATGHYMNCLVRCLISNGYQFQIYNPSLISMFRDSESVNLAKTDNLDAMLIAKYVATHPFTSSPQLSYLIGEIRKISRAKYFLFGDKTACYNHLLRYLDEVFPEFVSFFKKNEDGTRKNMGRNLFESPTIRWLLSEYTTPQKMARMRSETGETLRRMSKGSISFNRFNQLRELAKNSIGYSTEVDEQIIRNLVTQVRIIDEEIEMLNELLEPLMEQLNSPILTIPGIGINLAAMIISEIGDISRFSNPEKLIKFAGLDVKVYQSGTINHKGHIRKRGSPILRYALALSVQKLRIHSPVFSEYYYSKLRQGKATNVAIIATTRKLIRVIWKMMTTNQVFENIKRD

SEQ ID NO: 390547 - protein, 402 aa, unidentified
MISIGIDVSKLKSTFCILNEYGEVLQAPYEISHTEKDLKELSERIKGYGGKSDVRVIMEATGAYSRPVLYYLLDEDIFVSEINPLAMKKYRADINFRGVKNDSIDAMAIASYGIDKWHRLKEYERADEEYAAMKALSRQYLSYMKSHVALAQNLDHLIDQVMPGIKKEFNGYDPVTGKDRLTDFLEEFRHYDCITSLGPKKFEERFNKWAQKKGYRPRQNKPGKIYSLAKEGIPTLAYDPIGKLLVRQAVEAVRGMNQVLNEILSQLRSLAEKRPEYSAVRAMSGVGDVLAPLLIAEVGDPRRYYSGSALIACVGIDVPPYESGQFKASERKITRKGSKQLRKIGYLLVKNLRKIKPTKDTAVYDYYLKKKSEGKKDKQAIVAAMNKFFRIYFARAMEAYRS

SEQ ID NO: 390548 - protein, 413 aa, unidentified
MDVLHARCCGLDVHKSSISACILLREAGRVQKHQRRFGAMTQDLRELAEWLRQFGVTQVAMESSGVYWKPVWNILERQFAVVLANAQHIKNVPGRKTDQKDAEWIAQLLQYGLLRPSYIPCEIIRDLRDLTRMRASLSQEASRISSRIQKVLEDANIKLASVATNALGKSGRAMLEDIISGEDDPEHLASLALGHLRVKIPQLRLALEGNIRSHHRFLLRRLLDQMQFVEHEIALLEERLEDIGSTKAELLQAVARWDTIPGIDRVAAWALLAEVGDNMAQFPTGEHLASWAALCPGNHESAGKRLRGATRQGSPWLRRMACQCAWAAARTKNTYLSSQFRRLAARRGKKRAIIAVAHTLIVIGYHLQKNQSNYDDLGGNYFDRIHSDGLKRYLVKRLQQLGHKVTLEPIEAA

SEQ ID NO: 390549 - protein, 339 aa, unidentified
MQIYSVGIDLGKTTFHLVALGTAGKVLARKKFTQKHLLAYTANMQTSLIGLEACSGAHFLGRALRKQGHDVRLIPAQFVKPFVKSNKNDFIDAEAISEAVERKNMRFVPIKTDDQLDLQAIHRVRDRLISRRTAVINQLRAFLLERGLVFAQTPAKLKAAMADILENPEADLTTRMRNLIEGLWSEWKLVEQQIEELNDELERISAADAGCTRIRRIPGIGPVVATAIVAAIGNGAAFRKGREFAAWLGIVPRQYSTGGKAKLFGISKRGNAYLRRILIHGARAAVLHIKRDRAPIGAWLDALDARAPKNVVVVAMANKLARIAWAVLSSGNEYRPAAA

SEQ ID NO: 390550 - protein, 348 aa, unidentified
MTLVGCDLHSRKQQVAVLDTTTGEILEQELVHEGDAVERFYRALRPPVTIGIETTGYTQWFHAVMHRLGHTVLVGEAAKIRAMVVRKTKTDRRDAQHLLDLLRHDRFPTVWIPDPGTRDLRALVAHRVRLVRMRAAVKNGLQAIALSHRLALRSKLWTERGRAALKGLVLPRHTTRRRDDNLDLLMWLTARIDDLDAQIAAAAAADPRAALLLTHPGVGPLTALATVLVLGPIKRFPDSKHLVSYIGLAPAIYASADKQHLGKITKQGNALLRWVLAQAAPLAARADEDLRRRYFSVLNRRGRPKAKVALARKLLVRLYVMLRDHIDYDEFRRRGQLRRTSRVPVAAM

SEQ ID NO: 390551 - protein, 313 aa, unidentified
MSQNNSVILYVGLDVAKNSLQLDLAGHSHSLANDAKGQAHLLKLVRAHPTAHIVCEASGGYEQPVVRALHAAQVPVSVVEAGRVRHFARAKGLRAKTDPIDAAVLSDYGRRFEPAVTPAPTAQQARLAERSTRRLQLLQSLTAETHRADHYLDQLIVRQSRQVCRLLEKQIAACDAAITDLIAADAQLSAKAQRLDAITGVGAVTAATVLAELPELGRISHEAAAALAGVAPYNRDSGQQQGVRHIAGGRAGVRCALYMATLSAVRYDRILKAFYLRLRAAGKKPKVALVAWMRKLVVLMNRLLKNPDFQLAN

SEQ ID NO: 390552 - protein, 337 aa, unidentified
MLQHTFDHATFIGIDAHVGEHTALAVNRFEEERGKLTFPNTHEGIAKFLSWIPTLDADRSKIHIGIEGGGTERHALVRSLVSAYEHIYEINPLFTKQRRDYGTDGNKSDERDAKLIAEVLTKKIMELPTIAAHQLTPERLVFRKTIWFYEEITDRGAAITHQLNQVQRELVLAQDKLERHALTMIYREKEKERSRIRTTRKKVVTELSHLLPERGKNLTSIPGISTVLAARIIAHTDGIERFRNLDKFIRYAGIAPLERSSGKTRRFIKANRGNRKLNCALYMAALSQRRCDPAGCAYFEKKVAEGKTKKHALRCLMKRVACVVYGMLKNGEHYRRS

SEQ ID NO: 390553 - protein, 375 aa, unidentified
MNQFIKYVGLDTHKDTIAVAIADIAGGKPRYYGEIANTPTALTKLMKDVSPNGEIVSYCYEAGPCGYGIYRQISGSGHDCSVVAPSLIPTKPGDRVKTDRRDSENLARLHRAGELTPVWVPDQEQEAIRDLTRAREDMKHLERQARQRLCAFLLRHGQRYESGKSKWTQAYWRWLERIKFSHRVQQTVFQEYIDSVKQQQQRVADLEQAMHEAMADWTLAPVVTGLMALRGCRLITGMTVVAELGDITRFDSPRQLMSYLGLVPSESSSGPKTRRGGITKTGNGHVRRVLIEAAWCYRFPARKTAALQRRAEQAPDEVQAIAWKAQKRLCGRYQALSKRGLLPQKTCAAIARELTGFIWAIACEVMPKNATKANT

SEQ ID NO: 390554 - protein, 346 aa, unidentified
MLIIGCDYHPSWQQICWMDTLTGETEERKLDHASGEAEKFYCGLTGPVLIGMESTGNCEWFVEMATTAGHEVWIGDAAKIRASEVRQQKTDRRDAALILKLLLEGRFPRIWTPSGEEKDLRQLLIHRHKLVRIRAQVKNELQHLAMNQGVTKKNKLWSKAGEKVLRELPLKPWASRRREDLFKVREMLNGQVALLDQAVVEVAEKNEKARLLMTQPGVGPITSMAFVLTMGDVSRFPRGKQVASYLGLIPREYSSGGHQRLGSISKQGNGFMRMLLVEAAQVAVRCDPQMRQEYLQRCHKKAKGVAKVAAARKLAIRLYWMLRTNRGYPEVVRVESSSRVPLVSAS

SEQ ID NO: 390555 - protein, 347 aa, unidentified
MRFYNHQHPFYCGIDLHARILYICILDQNGNTVIHEKISNDASAFLKILKPYLGNVIVGVECMHCWYWVSDLCEQHNIDFIVGHALYMKAIHGGKAKSDRIDSYKIAKLMRGGNFPLGYRYPKELRATRDLLRRRMHLMRYTAQLKAHVTNSKSQYNLDITNGDLRIAKNRDVLRNAFSIPALQHSIDMDLNLIGFNTAELARIERLIYKDVRKHQLKDLHLIKSVIGVGDLLGSLILLEIGDLARFPTVKHFASYARLVKCHAESAGKIYGTQGNKIGNAHLKWAFSEVAIIYLGNSERAAAYLTKLQRRMTKAKALTVLAHKLGRAVYYLLKNQQPFDEHRFLSV

SEQ ID NO: 390556 - protein, 333 aa, unidentified
MEHWIGIDVSSATLDFALLDGKGTHLESVQIENDRKAVMKLMGQWSKRHGVEVGKSLICLEATGHYTLMMLNLIVGQQWHAWLAHPNDIQQSMGIKRVKNDKVDALRIAQYARTFHEKARLFTAQNLKLDRLKHLITRRNHLVRSRARHRTHITDLNRYMDRQLRTEFDRIDKRQIKLEDQLVAHVDALILAEIRTDPQTERQYDLLRTIPGVGPQLAAYLVACTDGFARFNTPRHSRAMPVSHPFERSSGSSVRGRTQVSHQADKSLKTLLHMSALVSVREPGELRQYFERKRAEGKKPILVVNAVRNKLVHRVCAVIRNNRPYERRPITTT

SEQ ID NO: 390557 - protein, 500 aa, unidentified
MKTDEPLERACPRVSVVLGHVDDIGEIAQATIPFERVSTTTYPNRRGIPNVMMEEGMARRKRAVLELAHPNAAGIDIGSASHFVAVPTDRDDEPVREFKSFTEDLGALADWLRRCDVDTVAMESTGVYWIPLFELLESRGFTVYLVNARHVKNVSGRKSDVLDCQWLQQLMSYGLLSGAFRPKDEICALRAVSRQRDMLLSYQARHVQHMQKALAQMNVQLANVISDIVGDTGQKIVRAIIAGERDGRVLAKMKNVRIRASEADIEKSLRGNWRPEHLFALGQAMTLFDAYGEQLAACDQQLEVMLAALQQDDVGEPGKAKRRSRARNAPKFDVRAYLFGMCGVDLTRINGIDTTTALKVISEVGPDMSRFKSAKHFASWLGLCPGTKISGGKVLSGASKRTANRAAQALRLAAAALRSSQSSLGAYFRRLCARLDRAKAITATAHKLARLIYTMLTKGTEYTDQGQDYYEERYRQRVMHHLAKRAEKLGLQLTPIPQAA

SEQ ID NO: 390558 - protein, 355 aa, unidentified
MEHHTEAFVGIDTSKLRNAVAIADSGRGGEVRYLGEFPATEAAIQKLVAKLATKYRHLTFCYEAGPTGYGLYRLLKSLSHECLVVAPSLIPKKAGDRVKTNRRDAVSLAKLLRAGELTAVWVPDERHEAMRDLSRARQAVKKDLQGKRQQISSLMLRLGRIYPGKTTWGPAHMRWLISQKLEHREQRIAFEELLEGIRQESERMERLEGAIREVVPEWSLAEVVAALQAMRGIDLIAAVGVLAEIGDLSRFQNPRELMGYLGLVPTENSTGDKVKRGGITKAGNGRARRILVEAAWSYRYPPRVSRDKQPKVEAAPRRAREIAWKAQTRLCGRFRSLERKGKRRSRETRTRLFRL

SEQ ID NO: 390559 - protein, 407 aa, unidentified
MIFAGVDWAEAHHDVHLEDEQGRRLGGGRLPEGVEGIARFHELAARHADDPAEVVIGIETDRGLFVAALVAAGYQVLAVNPMSTSRYRDRHSVSGAKSDPGDARVLAGMVRTDRHNHRAVAPDSDLAAAVKVLARAHQSMIWSRRRQANQLRSALREFYPAALAAFDDLTSGDALAVLRAAPAPAAGAALSKAQIAAALRRGGRQRGVTARAAAIQAALRAPQLAPAPLVAAAMGATVAASAAVIAEMTAQVSQLEAALAADSGQHPDAEVVRSLPGLGTILGARVLGEFGDAPDRYATAKSRRNYAGTSPVTRASGTKRVVLARHVRNQHLADAIYLWAFSALTASPGARACYDQHRNAGDTHHQALRALGNRLVSILHGCLASRTAYSETTAWAHRLENQLTRAA

SEQ ID NO: 390560 - protein, 350 aa, unidentified
MRTVAEEYDRVVGVDTHAATHTMTLLIGATGAVVEQRTFPTSAAGLRRALTWIRNRTQDQACLVVVEGTGSYGAGLAEHFTQGGIVVAEAPTIPAARPRGKDDAMDSARIARAVLGLRIDQLCWPRAGGTRTAIRVLVSARDQMGTERTKIINALTALVRSVDLGVDARKALTSAQITTIAGWRARDEDPAVAACRREAIRLASRIHALGRDLAANMAELRQFTAAQVPELLDLPGVGPVVAGTILLAWSHPGRVRSEAAFAALAGTSPIPASSGNTIRYRLNRGGDRQLNRVLTTIVLVRMRHDQTTRNYLARRRAEGRTTKEIMRILKRYIARQVFRLLAAAHPTPTA

SEQ ID NO: 390561 - protein, 444 aa, unidentified
MTRRCFGLDVHREFAQVAIWQDGSVRQAGQIPATPEGLRRFADSLGPSDEVALEATCNTHAIAKLLAGRVARVVISNPQKTRAIAEAKVKTDKVDAAVLAELLACDYLPSVWLADDATHALRRQVARRAHIVRQRTRLKNQVQAILHRNLIARCPAADLFGHKGRRWLAAQDLPADERLAVAALLRQLDFHGHELRVIDAELGRVALASVEVKRLMTIPGVDATVALSIVAAVGDFARFRTPEKLVSYLGLNPRVTQSGGQPAAHGRITKQGRAHARGMLVEAAWAASKTPGPLRAFYQRVRARRGMQVAVVATARKLAVLCWHLVTKGQDYAFARPSLTAQKLRRLELKAGLPSKRGQKGKAAGYSLKEVRARENALNEQAERAYAQMVADWQAKAPATKTVGVAAANGARLSRPSDRATAARQASAPEPALRSGVDHAHSAA

SEQ ID NO: 390562 - protein, 346 aa, unidentified
MEHYAGIDVSLELSSVCVVDAQGKIVKEAKVASEPEAVVAFFEALGFAVKRIGLEAGPLSQWLHAGLKEAGFETVLLETRHVKAALSAMTVKTDRKDARGLAQLLRMGWFQQVHAKSMASQEVRALLVGRKQLLGRLIDVELSIRGILRGFGLKVGSVTRKGFEARIRELVTGQATLERIAEAMLSARAALKAEYEKLHKAVLAIVREDPVCRRLMTVPSVGPLVAITYKSAMDDPSRIAKSKAAGALFGLTPKKYQSGEKDVTGGITRTGDEMVRTALYEAANVLLSRITRFSKLKRWGMDVAKRRGSKRAKVALARKIAVILHRMWIDGTTYRWAEAKPFAAQA

SEQ ID NO: 390563 - protein, 349 aa, unidentified
MRHFQPPANTRFYGGVDLHARSLFLAILDHDGQERFARNLPAAPEPFLRAVQPFREGLVVGCECMHCWYWLADTCREHAIAFVLGHAWAMKAVHGSKTKCDRHDAQAIARLLRGGNFPLAYAYPKERRGLRDLLRARLRLVRQRAELYGHVHTARRQANLPPVSSDVKYKSKRAGLTTDITDPFVRRRVETHLALLEPLDVTIRRLEAEIEDAAREIFPTELAVLQSTPGVGPVLSLTILLEIDTIDRFETRQQFCSYARLCGAVQESAGQRTGAGNRKAGNAWLKWAFSEAAVLSAQKDERIGRLLERLTARLGKAKAMSALAHKLGRAFYHMLHTKEVFDVNRFVRP

SEQ ID NO: 390564 - protein, 379 aa, unidentified
MATTKQALLNDTSVTLMLYMALELSGAKWKVAVADGKRAASQHPLVAGDVGGLLLLIDKAKKRCGLQGKVRVMSCYEAGRDGFWLHRWLLEQGIDNVVVDSSSIEVNRRKRRAKNDALDAAKLYEMLVRYVAGEKRVWRVVRVPSVQQEDERRLHRELERLKRERNAHVNRIRSLAVLHNVRLQRVGGRDWSERLEQLKGQLPAGMVAEIERQSARAKLVGEQIAALEKSRQEQLRAMIEQQQDGPLLALLKLRAIGVQTAWVLVRELFSWRRFSNRRELAGCVGLNPSPYDSGASQREQGISKAGNRRVRALLVEIAWYWLRYQPHSALSAWFNRRFGGAGKRMRRVGIVALARRLLIALWRYVEQGVIPEGAQLKRP

SEQ ID NO: 390565 - protein, 403 aa, unidentified
MGLGKAPGAPAYAGVDTHKDTNTLALLDALGRPLGTAESPAGAEGYAALAEALGGPGVEVGIEGCCSFGEGLAAHLRASGVAVYEVERPARRPRRGGKSDPIDARAAAENLAAGRCAEPKSLEGAAGDARWLLVAREQLVRRATALSNCVDSMLVTAPQGVRDRYAPLAGAARMRALAASEGGGACALALRALAAEWAASEARAAELEAGLEALLLESHPALMGARGVGTVTAARLVVAAGANPGRTGGEAAFSMLCGTSPIPASSGRTERHRLNRGGDRQANRAVHEIAIARLACDPRTRAYVDRRVSEGKTRREAVRCVCRYIAREVYRLITGPQEPLPDGRELAARRKALGATQAEVAAVLGVGAPKVSRAERRAEFDASVLRPYAELLDRLSPEAENGH

SEQ ID NO: 390566 - protein, 418 aa, unidentified
MLWTGGEEIVSIVAVINRTMDLPMRKPRPRNRSQRKPNDLSRSLAVLDMDRTLIAVIEMSASTWLVAGIVPGVERQPLKKLEPDEHALLALLQRWRGEAERSGRTITSIAVAYEAGRDGFWLARWLLSRGIEAHVIHASSVAVSREHRRAKTDRLDTQMLKRAFLGWLRGERDHCKMAAIPTLAQEDARRPGRERESLAGEASRIVNRLKSALARLGVRKFNPKLKKASERLTDLRTPEGEPIPPNTLDEMKRDMERRQLICAQIRKIEQERLKHLVQAPDTGPHAMVRLLARVIGVGIETADTLVQEALSRHLRDRRAVARYGGLTGAPDSSGSINREKGLSRSGNARVRRCMIQLAWRFLRFQKDSALAQWFFHRTGNARGMRKTMIVALARKLLIALWRLVHEGVIPEGIVMRPA

SEQ ID NO: 390567 - protein, 359 aa, unidentified
MTMYLGIDLHKKSSVWVMMDEKRNVVWNTSVASHPFDISAGIVKIPVPLTDVKVAIEPVCGWRWVTKQMEEVGLEVHVAHPMKVRMIAESKQKTDFNDARTLADLLRAGMLPESHRVSDDIYELRVVLRERHFLVTERTAVKNRLHGIATTQGLHLVSGGNPLQKRGKRWIEEGSNETMKELLEVISELDTHIDLLAKKISGLTKEISEAKLLMTMPGIGPITALTVVAEVGDFSRFSNPKKLASFAGIVPKQRSSGEKVRLGSITHLGSKYLRTTMVEAAMRIRADYSPELFRFVSDLTPGCGAKKARVALARKMLTIMWTMIRNKTPYDPATIEEARLSRLSSAIRKESYLDATPGA

SEQ ID NO: 390568 - protein, 362 aa, unidentified
MTTLGCQSNQHQEAQDMLYAGLDLSRQRLDVHVLDEDGRTIEVTAVRPDADALRTLAAHVLRQGQEVSAAIESMTGARFVHDTLERYGWDVAIADAAKVKGIAPLAAKTDKIDAWVLAELARRDLVPEIWLPTPEVRAERERARFRLHLVHHRTALKNRIHATLMTFGHPVAVADLFGVAGRELLARLALPEPWMTTLSTSLRMVDRLGAEIDACEGDLRRLGADHPSIPLLLTIPGVGWVLAYTIASEIGDIGRFSSPKKLTGYTGLCPLVRQSGNRDVRGPLAKNGPKYLRWALIEAATHAARDAHYRERYERTKQRLGRQRGAKVARVDIARKLAEAIWHILTKNEPFAPAGPAMLLVA

SEQ ID NO: 390569 - protein, 412 aa, unidentified
MTAIDQFAAHVGLDWADKKHDVCVQFKNGERTFHVINHTPEALDTWLNELHQKVKGRIAIALELKKGPVVYALQKYPFITVFPVHALSLARYRQTFWPSGAKDDPQDAELALDLMLRYPQKIKAIESDNADIRLLLQLVEQRRLLVEDKRRFVNRLINTLKQYYPQPLEWFSHRDSSLFCELIIRWPSLQQLKRARSDTVRHFMNARGGPAVAYTEQRVTSIANAIPLTTDKSVIEANALMATALASQIKLVGELIRTYDERIESLFDTLPDAELFKSLPGMGPCMGPRMLAALGDNRDRFNSAEEIQNYAGIAPVTERSGQKSWVHWRWQCAKFVRQTFVEWAAKTVNSSYWAKLYYQGMREKGKSHQSAIRALAFKWIRIIYRCWKTRTRYDEAKYLLALEARKSPLLML

SEQ ID NO: 390570 - protein, 355 aa, unidentified
MTMLAEAVDAVIGIDTHRDTHEVEIADATGRPIAVMQVSNDSAGFARLLAAIAKVAPGPRVAVCIEGSRSYGIGLARTLAAAGLLVIECEQPSRKQRRGKGKSDPIDAHLAVLAALRLDTRKLAVPRADGDREALRILLVARQEITTAATGQASRLRALLLAGDDTDRRAARRTLSKTALAALAGRELPAGAGREQAVRQAEITRLALALRQARCQLKDNCAQLLAIVEDIAPGLTSRYGVGPVSAAQAIVSFSHPGRCRSEAAFAALGGTSPIPASSGQTIRHRLNSGGDRALNRAIHAIALTRMRSCPRTRAYAARRTAEGKTTREIRRCLKRYIARELYRQLTRAMKPPINP

SEQ ID NO: 390571 - protein, 356 aa, unidentified
MDRPWTTLRTSAWMCTRKPDERVIPNTPQELKSLIRTRRSSGPLVACYEAGPTGYETYRLMTDLGVPCDVIAPTLIPRRAGRRVKTDRLDARNLARLHRAGELTSIRVPTLAEDALRDLVRVREDLKDDRRDTMRRVKSFLLRQGRRYPGQARGWTTKYDKWVHAQHFEEPAAEAAFRHYVATLDARGVELRAIDAEIEAACERPPMDAAIGRLRCFRGIDSVSAVTIAAEVCDFHRFATATQFMAFTGLIPTEHSSGGTERRGSITKTGNAHLRRVLVEAAWSYRHRPGIGIEHRRRSEGQPPDVRAYAWAAQLRLCARFRSLALRRQHNVAVVAVARELGGFVWGMMTDRLAVA

SEQ ID NO: 390572 - protein, 369 aa, unidentified
MPHDAAGFDELDRLLTCHRARLRVAIERAEGLLVEHLHLLGVEIFCVSPKISARARERYRMAAAKSDAFDAFVLADTLRHEHRHWRALTPPSPVLAELRAISRDRDRIVIAQQATENRLRAVLEAYHPAPLHLFSTLDRDITLDFITDYPTPEQAGRVGTARMDGFCRRHGYSGRTQPEVLVERLRPHLLSAGEGTAAGKAFSANLFTEQLRMLNTHLRAYDKRLDELLERHPDTPIFTSFPGVGPVVAATLISEMGDDRHRFPAPGALLAEAGLSPVTRASGRTRQVRFRYASNRRMRHMIDWWMFTAIREDDWTRQAYDHARARGQGKYRALRGLGSRWTRILWRCWTDHTRYDPAIHHRNPEPTTA

SEQ ID NO: 390573 - protein, 305 aa, unidentified
MIIAPGYIGIDISKTHLDIYDGAPHRIGNTPEAIASFLAGLEAPRLVLFEATGSYDRDLQAELVKADIAFARVNPLQARNFARSIGQLAKTDSIDARMLAAMAQALQPVPAAPADPERQDLGELHRRRAHLVAIRQQERTRLHTASPAIATDIADHIVWLGERIAQFDRQIASRIEASANLSAAARLLRSIPGIGPVAATALLALLPELGQRSGKTIAALAGLAPINRDSGAWRGKRSIAGGRTEVRSALYMAAVTASRANPRLAGTYQAMIDRNKPPKLALIAIARKLLVIANAILKTQTPFTP

SEQ ID NO: 390574 - protein, 336 aa, unidentified
MFPLEASSVCLVDAAGKIIRETKVASDPDALIEHFVSLEFAVRWVGLEAGPLSQWLHEGLTKAGFDVVLLETRHVKAALSAMIIKTDRKDARGIAQLLRMGWYRAVHSKSPGSQDVRALLTGRKLRQAKLRDVELSIRGILRGYGLKVGEVSRGRFEARILELVDGHPVLKTVIGAILQARHALWTEFTKMHREMLKIVLQDQVCQRLMTTPGVGALVAITYRSAIDDPSRFTKSQTVGAYFGLTPKKYQSGETDLDGGISRVGDTMVRTALYEAAHIKLTRATRFSALKRWAVDVAKRRGMKRAKVALARKLATILRRMWVNESEFRWGKEASAA

SEQ ID NO: 390575 - protein, 426 aa, unidentified
MNCTQNYKIDQVTEQTLVVGIDIAKRTHYACFVDNRGRVLRKSFPIFQSKEGFQQLYKAIQGAMQAFGKSEVIVAVEPTGHYWLNLAYFLEEHGIPLVMVNPAHVCRSKELDDNLPTKHDAKDALVIARLAKDGRFLVPRLLHEIEADLRVGSTLKEKLRKEQTAVKNAIVRWTDRYFPEFWTVFRDLGKTALSVLEWTPLPADMAGRTVEELLEVYRQSEGMKCPQKAKIQALINTAKDSIGVTEGTAMARFEIAALVRRYRQLEAEIAALDAELKALVQTTMEYQWLKTVDGLGDATIIDLLAEIGSFAHYRDPRQLVKLAGLTLKENSSGQRKGQKHISKRGRKRLRSVLFRAMIPLIRHNEAFRELHEYYTTRSVNPLTGKQSIVALCRKLLNVLFAICTKKQAFDAERMKQDVLSQVQRAS

SEQ ID NO: 390576 - protein, 313 aa, unidentified
MNIVGVDVAKDSLVCVVIDRSEKVKETYTIENTSEKIGEFVDLLSLSYKHLVIASEATAEYHRKLAGVCLERGITFRLLNPITTKQFTRSTVRKKKTDLTDAHVIARLAQRGEGTILKQSSMDLTKPTTRTATKLVQVKQQLYLMEKRLKALDFDDDLIEKLDGCVSNLDLTVKAFRGKARKESDAKTLKLLESIPGIGKTLSCDIQAEIETVGKFRDADALIAFAGLDPKVKQSGGSLHHNTKLTKRGSPYLRRALFMAASIGQRSDSELGTYYDKKRGEGKYYREATVANARKIVCRVFAVLKRQTPYVIK

SEQ ID NO: 390577 - protein, 371 aa, unidentified
MKVVKQGNAKNGVRWVGIDMGKSSYVIRLIDENGKITGWAGKTNSEGRKELYKRLRATDKIAIEACSLAFIMNKEFKELTGTEFYILNPVKLFQIYMTDKKTDKEDALKLAKEIRDKPEEDLPRVYAPTEKMEEMRSLISEYREITKIRTKEVNRLHSVYEHAGITDLKRSDLKTKTNREKNLELLSGYKQGEASRLMQIIDLLELQKTDLENKIKVEEDTNKQIQIVEQIPGIGKTTAYCFAGVIGDPNRFENMTQVSSYLGFIPKIDCSSKTNHYGHITKKGNAYLRGLLVQAAWVIVRSKNGGALKEKYNYLIKHGLSKKKAIVAIARKLAELMYTLLKNNGRYEPRRFVPQVSFTSSLAEEALAVAG

SEQ ID NO: 390578 - protein, 349 aa, unidentified
MITLGIDAHKRTHTVVAVDDLGRQLGTKTTNTTTTADHLALIRWADRFGPDRSWAVEDCRNLSRRLERDMLAAGERIVRVPAKLMAHSRDSARTYGKSDPIDALAVARAALREPDLPTAHLDDEARELRLLVDHREDLVAERTRHINRLRWHLHEIDPSWDPNPRAFSTFKHLDIAAGRLAGLDTVVARIARELVERIRNLTVDINQLRTELEERTETAAPTLSQIHGISALAAAKLIGEVAGIERFHSRHAFARHNGTAPTPVWSANHTRHRLSRAGNRQLNAAIHRAALTQARSHPDAIAFLEHRANQGSTRKEAIRSLKRRLSDVIYRAMVTDATLKQKDRHALAA

SEQ ID NO: 390579 - protein, 437 aa, unidentified
MVARHYAVMRKPDGRVRPNTRVEAIRSDAMRGRGLPVPVAPESCSGCQKQPRWWEATVMKSYAAQRQFVGVDLARRRSVITRMDAGGEVVDCVQIDNSERDLVAEVAKAGSGAPVAVEATFGWYWAVDVLQAAGFEVHLAHPKGNASMHNRRVKTDARDATELARLLRMGDLAESWIAPPVVRARRELVRHRHKLVKTRASLKASVHAVLGKCGIVLPLDDIFGPVGLAALAAVELAEPYASRVASQCRLIEAVTTEVTLVEAAIAAAFADDPGYRALLTIKGIGPVFASVFVAEIGDVHRFATPQALACWAGLTPKHYESDNKARRGHVSKQGSRLLRWAATEACQRIREPYLADKRALITARRGRSAANISKVAAGRRLLHVVYYTLRDGHARCLDGPARAAATGDVTTVTRPTRVTANGMTHQPPRGAVVVDPM

SEQ ID NO: 390580 - protein, 404 aa, unidentified
MKRSEVARYDAFLGIDVGKSSNCAALLDRSCDGPLMLRKVAQDEGEVRALISEAAELGELLVTVDQYGAFGRLVVAVARDMGVDVAHITPHKFRQVAETYGEGKSDAKDAFVIADVSRSQPRNIDPVPERAEVLAEVKVVTSARDDCVRERTRLYNRLHDLIAQSCPALEALFSKEKLHNDLEIRLVAKYGGPSGFRRAGRSRASKWAGSLKWHKTNGPDKVAEVFEAMSSQKVALPAGEAIERQARKVAARIIELVAEEAELNAELERLSESIPEVAILRSIPGVGPVYGATIAAEVADVSRFGDAAHLASYAGVAPVRETSGTSVDKKKRRKGGNRRLKNAVVRSAQCAVQTDERAAAYYEKKRAEGKGHKQALRALARRRVDVIYALLSNGTFYEAQRSAR

SEQ ID NO: 390581 - protein, 411 aa, unidentified
MKALYERCCGIDVHKRIVVACLKCGKKQEIREFGTTTEELRSLTEWLSDSKCQMIAMESTGSYWKPLYNIFELSSLAAIVVNARDMRNVPGRKTDIKDAEWIADLLQHGLLRASYIPNREQRELRELSRYRKSLIEERARELNRLQKMLEGGNIKLASVVSDINGRSARNLLTHMLKRDTSLTKEEVSSLVRGRLRHKVESIMKALDGFLTPLQKQLMLKVVDHIDDMTKRIGEMDDLMNQYLTEYHEAIQKLDEIPGIGRQSAETILAETGLDMSRFPTAKHFSSWAGLAPGNNESAGKRRYGRTTKGNITLKTTLIQCAKAAVKKTDSFLSAQYQRLVVRRGANRATVAVAHTMLISIYHMLKNNVPFTDLGADYYNQFNAQSKIQHYLKKLKQLGWELDSATIPTAAV

SEQ ID NO: 390582 - protein, 464 aa, unidentified
MTKKRTGTRKRSAQSKLDLKTVEIVHPDAAGIDVGGSEHWVAISPDRDAEPVRRFGSFTADLRDMARWLVEKGVKSVAMQSTGVYWMPVFEVLEQHGLEVFLVNARHTKNVPGRKSDVQECQWLLKLHAFGLLNNSFQPTDEIRIARTLWRQRGNLVADASGTIQRMQKALIQMNVQLSSVLSDLSGVSGMSIIGAILEGERDPWKLAALVQPEVKAAPQAIAKSLEGNWRKELLFVLRQEVELYRTYQEKIHDCDLQLREHLKSFGSVVNLAAQPIGPKPKGKSGSKNAPQFDLRTELYRITGIDWSQVNGIDVLTAQTVIAECGADLSAFPSEKQFTSWLGLVPTNEQSGGKILKRRTRKVVNRAATAFRNAATTLLRSQSYLGAQYRRLRTRLGAPKAITAAARKLACLFYRLIKNGQQYVDKGTEYYETKYREQQVRILAKKAQRLGFQLVTPTPLAPAL

SEQ ID NO: 390583 - protein, 358 aa, unidentified
MAVTGGTRRIVGGVDTHKDLHVAAVVDEQDRVIGTRSFATTRQGYRQMLAWMRSFGELQRIGIESTGSYGAGLLRFMQQAKVVVLEVTTPDKQDRRRRGKNDDLDAQNAAHAAFAGQRTVTPRSRDGMIESLRILMACRKTAVSARRVALQMIHNTIVCAPDGLRDQLRSLTRMQLVRTLASWRPDLTAYRDLDSAYRIGLKSLARRYLELHDEIADLDVMVAAIVDELAANLVARNSIGHIGAAQLLLTAGDNPERLRSEASFASLCGVSPVPASSGKTVRHRLNRGGDRAANSALHIIAIGRLRTDQRTKDYVARRIAEGHSKLDAIRALKRYLAREVFTLITQRRKEINATRIAA

SEQ ID NO: 390584 - protein, 321 aa, unidentified
MNKDKEIYGIDISKSVFDIYSTKDGHQQFSNEEKGFRSLVKKLSKNALVVMEATGYYHYRLAQFLHKKGVAVSVVNPLSVKRFIQMKLAKVKTDKSDAKAICEYGMMNALPKYTALTEVQAECLQLFRLLDNYLKHRTSTKNKLKGEEALGIPSRFVYRSLRRDLKHLNSEVTALESRLLELVKQDQQHQLTLLKSIPGMGVKTALFLIVVTDGFTKFENAKQLCSYVGITPTIRESGSSIRGRSRISKVGNKKLRNLLFLCAFSACKYNKGCKAIYDRLVAKGKSKKLALIAVANKLLKQAFAIAKSGLPYDENYVSKLV

SEQ ID NO: 390585 - protein, 338 aa, unidentified
MLHHGIDLHKHSVVIGTVDDSGKLIASKRLRTRRADIVRYLNSADGPHSAVVETTTGWYWLADLFHQHDIDLKLAHAFRVKAISAAKVKTDAVDAGTLAQLLWAGLIPEAHMLDPELRPYRDLLRLRQRIVNRRSGEMCAIGSILEKYNQPSVDRLPPLPAVEASLHTEQIELLASQIKEIEKSLNEVMLPRTPVQRLLYIPGFGTTVSFTVFLETGTASRFASDRNYTSYARLVPGAKNSGGKTRHRPSKQGNRYLKNAFLNAAVRAIQYEPVVKAWYNKKLRKKPKAVAQILVAKELARIAFRILVDDVDYNGTFKGVPIENPKSPRWPRRASPFA

SEQ ID NO: 390586 - protein, 353 aa, unidentified
MGIVVALDVHRKQITYKALDRDTGELRRGRIAPAARVDVRAWLAQFAGCEAEFALEGTTGWRFVVEEIERAGHTAHLADPAETAAKRGRKRRAKTDNADCDLQLRLLLAGELPESWIPPVHILELRTRVRMRKTLIDQRTAWQQRIQAQLFHQGIPAGLRLRTQAGRDALAQAELSPGGRELVTLGLRMIDALDLELAPLDRELHGFARRQHGCRTLIAGLYGVGPVSATAILAELGDARRFSSSDDAVRHSGLDVTVYQSDSKRSPGRLSHEGPELLRWALFEAAVSAARAGSPDHGYYLQVAERLDHTRACLSVARKLCRRAYHILRELGDEALAPIDCDPHAEEAIAAAA

SEQ ID NO: 390587 - protein, 348 aa, unidentified
MLHAGLDLSRRKIDVCLVSAGGEVVEEFASPPDADGVRGLARRVGRHELAVRAVIESMTGARFVHDRLEALGWDVLIADAAKVKGLAPLACKTDKIDARVLAVLSHRDLVPEIWLPDPRVRRERELARFRMHLVKHRSMLKHRIHATLISFGHPCPVSDLFGVAGRELLDHLDVPEPWRGTVDASLRLIDDLDRQIETINRDLRTSGADHPYVPLLLTVPGIGWVLAFTIAAEIGDITRFASPKKLCGYTGLCPRVYQSGDRDSRGPLTKQGPKYLRWAMLEATMHALRHPAYRERYQRNKRRLGRQRGAKVAQIDIARKLTEAIWHMLTHNEPFAPAPGGSAFRLAA

SEQ ID NO: 390588 - protein, 342 aa, unidentified
MAIVYVGLDLGSSNFQQVALNHDGVSRVNREFTTSEANLVKAFSDLKGEIHVHLEAGELAPWAASIIAPLVRRVVCSHPQSNAWIAKDADKCDRIDAYKLAELLRLNRFKEVHYAPDQPRRNFKQLVQHYDELTAQQARLKTKLKARLRMQGVIVTGERLFSIKGRKEVLARVESRDLRTAITQLYDVLDQSMTAQEQARLLMLRAAQAFPEIKLLRTVPGVGPIGACRFSAYIHTPQRFSTTRKLWRYCRLSVSHRSSNGKPLRRPRLDRSGCGRLKDVSRKAFDLAIRSRHDNGFKRAYLLALETTHNQTHARLTVQRKIVSTLRAMWLAMTPYCDQLSR

SEQ ID NO: 390589 - protein, 407 aa, unidentified
MKHVIALDVSKGKSTIAIYDGYRQCEFEGELYHTRIDFEQLHLRIKEITALDGQAPEIVFEATGVYSKSVEKFLRDHGHTYCRMNPLEANLQMASMRRHKTDISDAHELAKTHFNLERETTYVQNDYYEQMRATTRYYDEIEEELILLRNRMHAILHISFPELERLITPSSALFLNFVQLYPHPALLLAHSKTIIKNRLKNNTRKRLSLERAEKKAIVLLEAAKNSYPAIEPTDIRCNQVRDYAQRIADLMEKKDQLVKQMVVMSEGRKEYTVLRSFPGIGDTTACRLIGELGDIRRFKNAKQLNAYVGIDIMRYQSGNTQYRDRINKRGNKKLRKILFFMMCTMIMTKGKPNHLVDYYYKLKTQPQRKPHKVAIVACINKFLKVTFQLLTQGILYDYESALPAQKS

SEQ ID NO: 390590 - protein, 390 aa, unidentified
MRFVGIDIGAERHSVAIVDDGGRVVGKSVSFEEGAAGYRRLGELLGSPADCLIAMEATGHYWKNLFASLAAEGFQIVLLNPLRTRRFAEEELQRTKTDKVDAVSIARFAAQKRPTATTLHGPAIEELKQLVRLREQSVQHLGDRVRHLHKAIDLTFPEFTRHVRGLDTELATAILLRYPTAKALRTISVRKLAGLCYDGRRGIGDDLARALIEAAKISVGHFSSEPYQLQVRYACEDIVSLRTRVRGLETDIELRLNTHEVGKLLTTIPGVSTLTAARIIAETGDPARFRSAAAFASYIGAVPRLHQSGKKRYSGKPAIPLGNARLRRALWMPVLVGIRLNPWLRTYYLRLRPRANVPRLPSLPLCTNCSLRSTVSPNIERHLFCNFQLR

SEQ ID NO: 390591 - protein, 333 aa, unidentified
MHYIGMDVHAKVTMICMLDEAGKVLKEQVVKGPLTEVVGAARRWPRPFKVCYEATCGYGWLHDQLKGLAGQVVVAHPGKVRMIFSAKRKTDRIDARKLATLLFLDQVPVVHVPPAQRRQWRALIEYRHRLVSRRTAVKNMLRALLRSQGLKAPRSLWSGKGRAWLVEQAMAEWDSLRREMLLEELDQLSRRIASLEGALDRQGAAEPGVSLLRTIPGVGPRTAEAVVAYIDDPDRFGRNKSIGCYFGLVPCEDTSVKRRLGHITHEGPPTVRRLVVEACWQATRRDAGLKAYFERISAGKKDRKKIALVATAHHLLRVMLAMLRTGEVWRGAA

SEQ ID NO: 390592 - protein, 355 aa, unidentified
MDNKKYIGMDVHKESISIAVMNGAGKIGMECVIETKASMILQFIDGLRGDLQVTFEEGTSAAWLYDLLKPHVTKLVVCDPRKNASMREGQQSDKIDARRLAELLRLNHLSPVYHGEHGLRTLKELVRSYLTITKDLIRVMTRVKAIYRSWAIPCTGKQVYAPRHRAEWLAKIGEPGVRRRAEFYYQQLDALRTVRQQVRRELLAEAKKHPAWKWLCQIPSIGPIRAAVLLGILQTPHRFRTNRQLWAYSGFGIETHSSADHRSVDGQLQRVKKQSSIRGLNRNCNHDLKNLFKGAAIVASSKPGPFQEFYTALLAKGIRPEMARLTLARKIATIVLIVWKRGACFDAQHLKPQTA

SEQ ID NO: 390593 - protein, 424 aa, unidentified
MPTARMEEVIMEVLYPNCAALDVHKDTVVACSRRMVGSQVEREVRTFPTTTSGLLALSEWLSSRGATHIAMEATGVYWRPVWNILSDGEFQLILANAKHVRNVPGRKTDVNDATWLADLLAHGLIRASFVPDTATQEQRGLLRSRKQLSRERTSHVQRLQRTLEEANIKLDSAISDVIGTSGRAMIEAMIAGETDPAKLASLAHPRIKAAPAKLAEALRGRVTKHHRFLLRLHLKQIDALDNAIADIDKEVEANLDPFRPFIPILISIPGIADLSARVILAEIGTDMSRFATARHLISWSGLCPKNDESAGKRRSTRMRKGAPWLKTTLIQCAWAATRRKASYLHAQFHRLRARRGAKKAIGAVAASILTAAYHMLKTGTLYQDLGPDHFHRRSKPSHVQRLVQKLSNFGYEVTVKPLAEAPRG

SEQ ID NO: 390594 - protein, 392 aa, unidentified
MSQVTMIGCDLHDRKMLLKIAVGTAPSIEKAFSNDLLGRGLMIDFVHELAESQGSERIVFVYEASGQGYGLYDLLRDHQIEAYVLSPAHLPKTPKSRRNKTDARDAQMLLEQARGYILAGNPLPIVWTPPQALRDDRELVRGRLEAAEFCTQIKLKTLSLLKRYQVRLPSWFNDNRSWTRRFVTWLRATADEMADVVRPVLQALIDRFETLRQEITDLDRHLRHLSKTDRYRAACTKLRELPGVGLLTAMTFLTEMGDMSRFSNRRQVAAYLGLCPSTFESGEQDNRKGHITHQGPGRVRKVLCQATWAAIRTDEGTRQTWQRIKGTKPGRAKKAVVAMMRRLAIVMWHRACEVPMAPELINPDWPGTSARAQQKGDVPFDSPSPRPLAQAG

SEQ ID NO: 390595 - protein, 320 aa, unidentified
MSTHTPRFVGIDVSKDHLDAHVRPDTAGRFDNTPAGIAALLAWVEPRAPGLIVLEATGGYERPVLAALSLKGLPVCVVNPKRVRDFARALGQGAKTDALDARVLAEFADRVRPSVRPLADAGTQDLQALVARRNQLIEMRTMESNRLAGVTSRAIRRSIEAILRALNKEIGKADQELTAAIEESPVWKAKDELLQSIPGIGPVTSRTLLADLPELGTLTREQVAALVGVAPVNRDSGRWNGKRFIAGGRAAVRRVLYLGAHAARQGNAVLAAFAARLEKAGKAPKVIRIAIARKLLIIANAVLRDQKPWQNRAENDIAAA

SEQ ID NO: 390596 - protein, 424 aa, unidentified
MSKKKSGLAGLQALFARVCGLDVHKKLVVACVRILNPKDGTVQSTLRKFGTMTADLLELRQWLAEQKVTNVAMESTGVYWQPVFNLLEGHFQVWVVNAQHIKKVPGRKTDMKDAEWIAQLLQCGLLRPSFVPDRQQRELRDLTRQQTKLVQQRNAVDNRIQKVLETANIKLGSVASDVLGVSGRKMIEALMAGEKDVTILAELAQRKLREKIPQLQRALEGELTEHHRFLLRQLLGQYDFLEKEIASVSERLGAVAPPSFRAAVEQLDAVAGVGERGARALLAETGTDMSRFPSHKHFASWAGRCPGNHESAGKRRSGKTPAANRHLDAVLTEMAHAAVRTKNSYFKAQYHRLAGRRGKKRAIGAVKHSLLVTVYFMLRDNRPYKDLGVDYFDKLNPQQRIRYHVRRLQELGQEVELSPIADAA

SEQ ID NO: 390597 - protein, 349 aa, unidentified
MQQFIGCDAHKRFSVFVAVDEQGRATRPVRVEHSQRHYADFLKQLPKESEIAIESTGHWYWLVDEMERAGHHVHLANPMEAKKRMGGTNKTDALDAKGLAILLRNGTLPESWIPPGALRDQRELLRTRMALRDLRSSLKHRIHAAVDRYGLHTDSITDLFGIKGREYLASRLAEFPPETARMVQIQLDALDELAAHIETIERRIHAEITPSAGVQLLRSVPGVGEILAPVIWLEIGDVTRFPRAENLASYAGLVPRVFSSGGHTRLGGISRFVNQYLKWAFVEAANCAVRIQAYRHSHIGCLYQRLFAKRGHGRAVVAVARHLAEASYWILRKQEPYRAPHKLISSRNG

SEQ ID NO: 390598 - protein, 427 aa, unidentified
MSLPNDLSRSPVPFEQESTLVAASGEETALLPRSNAMECPMSLPNDLSRSLVPFEQESTLVAVVELSQASWLIAGVVPGVERQPLKKMAPDEDALLRLLHRWRDEAIRNGHPITRITVALEAGRDGFWLARWLTKHGIEAHVIHSSSVAVSREHRRAKTDRLDTAMLNRVFLGWLRGERGHCTMVAVPSLEEEDAKRPSRERENLVGERTRVINRLKAALARLGIRGFNPKLRKAPQRLDSLRTPEGFPIPPNTLDEMRRDLARLAILREQIKAIEQARLERLQQAPQTGPNAMVRMLASIPGVGIETADMLVQEVLSRNLRDRRAVGRFVGLTGAPDESGAKRREKGLAKTGNARVRRGMIQLAWRFVRFHKDSALAIWFRSRTEGPSAARKTKMIVALARKLIIALWRMVNTGEVPHGVVLRQPA

SEQ ID NO: 390599 - protein, 352 aa, unidentified
MLRRRRPLVSEFYEGRQFVGMDLHRRRSVLVRMSETGEHLETVRILNDRDSLAEVMSRAGESPEVVLEATYGWYWAVDALAELGATVHLAHPLGVKAFSYRRVKNDQRDAADLADLLRMGRLPHAWIAPPETRELRELVRHRAKLVAMRSQCKAHVHAVLAKGGVWVPMTDLFGVEGNLLLDKVTMPAPYKERIASLRRFIEGFDAEIDLFTDLTQRRLSHDAGYTAIQQIPGIGPVLGAVFVAEIGDVRRFAGPAQLTCWAGLTPSHHESDTTVHRGRITKQGSRLVRWAAIESVKILPDTSRIGAIREQVAHRRGNRNIGAVAAARRQLELVFYGLRDHHIRALQRPRAA

SEQ ID NO: 390600 - protein, 388 aa, unidentified
MQVAADRTDASTAIQTDLPAIFASLELSRSTWLITSLSPGAGEKMSKHSIRAGDVAGLLVRLAQLKEKARGRTGRDFPIIAIQEAGLDGFWIHRVLQSEGIESHVVDAASILTSRRRRRAKTDGIDGETLVRTLLAYKRGEPRVCAMVKAPTPEEEDRRRICRERKTLVGERVEHVNRIKGLLFAQGVSDYEPLKRNRRARLEELKTGDGRPLPAHLKAQISRELDRLELVLPQLKAVEAERDALLKPVSEGCPTPAAMLAQLKGMGPEFTAILWSEGLFRSFSNRRQLAAYAGLAPTPWQSGSVAHEQGVSKAGNPRLRTTMIQLAWLWLRHQPTSALSVWFQERVQSNCGKMRKTTIVALARKLLVALWKYSTSGVVIEGAVMKTI

SEQ ID NO: 390601 - protein, 343 aa, unidentified
MQVVRIGLDLAKYVFEVHGVDEHGNVVVRKTLRRGSVSTFFANLPQCLVGMEASNGAHYWARVLTDLGHKVRLISPQFVAPYVKSNKNDRNDAEAICEAVGRPTMRFVPPKSPEQLAIQALHRIRQRLVRSRTRLVNQIRGILSEHGLVIARDIWRLRRALAEITGNSTDDLNTLVRVLVMETQAELIELDRRIAFCDRRIRELYRTSELCQRLGEIEGIGPVTATALVAAVGDRSCFKNGRQFAAWLGLVSKQRSSGGRNRLFGISKRGDRYLRTLMIHGARAALGKAGGKQDPRSRWLASLRQRRHPNIAAVALANKNARVAWAMLAGNVSYEPARSVQAA

SEQ ID NO: 390602 - protein, 346 aa, unidentified
MNYIGMDCHISTLEFAVVNETGRLVKASRIATSVNGFIQFVKTVPAPRTIYIEEGTLAAWALETCVCFGEKLVITDAKKNHWIGSSGQKGDSIDALKLAQLARGNYIKEIHHPIGQRRRFRELMIAYHDTVRSTTRVKNKIKSKFRHNGVQCTGTTIYSEAYREEWKGKLPHEATLLLILDGLWRQLEQSERTENELLAAARAQAKQYPEIKRFEAVPGIGFISAATISAMLETPYRFADKKKVWMYAGLGIMTRSSGGKLYTEKLTTDYNRLLKYTIKQAAEAAIQAKDNPFRRKYLDMTLLRGIAPHRARLTIARDMLAIMWAMWRKGEKYSPEIREQAVYKQD

SEQ ID NO: 390603 - protein, 355 aa, unidentified
MIIIGVDYHPEFQQIALLDNETGEFQEKRLAHPAEAEQFYRALAATGQTVRVGMEASGHARWFERLLAELRFELWVGDAAAIQAKRPRKQKTDRQDAQHILKLMLKDDFPRIWVPSGENRDLRQLLWHRHRLVQARTRVMNQLQAVAINEGLRCKKRLWRAGGRQRLEAFRLAPWASRRRRDLLELLDRLNPTIAELSQAIEQEAEKSPDARRLMTHPGVGALTALAFMLIIGNAERFECGKQVASYLGLVPLEKSSGNRRRLGHITKQGSSLLRFLLVEAAQVTARTLPEWRSQYFRLLMRRGRKTAKVAMARRLAIRLYWMWREGHDYEQQRSSVRTQDSPNQAMVCTRTPSK

SEQ ID NO: 390604 - protein, 461 aa, unidentified
MPKQNAKKSQRDKGVKDVENLPPLNQNAAGIDVGNAEHHVAVPAGRDAEPVQKFGSFTADLHRMARWLKACGVKTVAMQATGVYWVALYQILEDYGLQVNVVNAHHTKTLPGRKTDVLECQWLQKLHTFGLLNNSFQPAAEIWVLRTYMRQREKLVVGASTCIQHMQKALTEMNIQLANVISDISGMTGMAILRAMVSGERNPQALARLKNERIQASRQEIAQSLEGNWRPELLFVLEQSLALYDTYQQKIAECDHRIEAHLNCMESKADAEQQPAPQARIARSHRKQTSWVDLRVRLYRIAGVDLTQIDGINVQTAQTVISEVGVDMTRWRSEKQFASWLGLCPDNRVSGGKVLKRGTRHVINRAATALRMAAWSLFRSHSALGANFRRLRRKLGAPKAITAMAHKLARLVYGMLKFGQSYVDKGMEHYEAKYRQQQIKWLAKWAAALHLQLTPFPEVVE

SEQ ID NO: 390605 - protein, 409 aa, unidentified
MDITCVGIDVSDGHSTISAYAWGDVMVMKPHDIPHTIAALRKLADEIKCLPGEVRVVMEHTGRFWLPVAQSLRSAGLYISAVNPKLIRDFGNNKLRNVKTDKADSKKIARYGLRFWNDLLPYAPTEATRQKLLEFSRQLDNSNKLLTAQKNNLQAIVSVTFPGVRKLLKSNAREDGHIKWVDFVCEFYHCDVVKKLSEEAFAQKYRAWCKRKGYYFTKASCSKIYTLACECVPSLPCDRDTKLLIDTVAAQLTAISAAVEALREKVYVLASALPEFDCVMSIFGCGKTTGPQLMAEIGDPTRFKDRIVDGKRVKGKKQLGQFAGVASGNNQSGNYEQKSVKTSKKGSSHLRKTLFQVVSTYLKQKPDDPIYHFLDRKRAEGKPYYAYMTAAENKFLHVYYARCKEALAA

SEQ ID NO: 390606 - protein, 345 aa, unidentified
MHIASIGIDLGKATFHLVALGEHNKVLLRKKFSRPQLLAYTANLPASLIGLEACAGAHFMGAALRGQGHQVRLIPAQFVKPYRKSNKNDFIDAEAIAEAVTKQNMRFAQLKTQEQLEWQAMHRVRDRLVRRRTALIDEIRGFLLERGITFAAQPIHLRKNLPAVIEDAEQNLSPRLRWLLDRMWQEWKQTETEIQAITDEIERISEEDARCRQLRQIPGIGPLVSTATVAAIGNGSAFRRGRDFAAWVGVVPRQYSTGGKQKLYGISKRGNVYLRRLLIHGARAVLFRVKYDTAGFGQWVHRLAQRAPRNKVVVAIANKLARIAWAVLSSGKDYRHQPLLQLAAA

SEQ ID NO: 390607 - protein, 341 aa, unidentified
MTIGIDLGDVWSHYCTLNQDGEVVDRGRFRTTPKAIERWFMDVPPARVAMEAGTHSIWISEQLQELGHEVIVANVRELRAISHSDRKSDQVDAEKLARYARLDPEILRPIAHRTVEQQEALTLIRARNLVVRLRTAAVNGVRGLTKSSGHRMPASTTSTFAKRSLVVMPPGLAQALRPVVEQIAEMTLKIKQYDRQIQQLGQTQYPETQALLKVHGVGHLTALTFVLTLGSKERFKQSRDVGCYLGLRPRRSQSGDRDPQLGITKAGNTYLRSLLIECANHILRPHGRDSSLRQWGLHLASRGGKQARNKAVVAVARKLAILLHHLWTTQAAYMPFYERAA

SEQ ID NO: 390608 - protein, 363 aa, unidentified
MKYHQMTTEYSCGVDLHSRQMYICICDRDGNVAKHINVKGNNLKTLYRHLEPYLGDITVACESTFNWYFLADFCDYYDIHFVIGHALYMKHIHGGKAKNDRIDSKKIAYLLRSNLLPIGYAYPAHLRSARDLMRRRGYLVKRRAELLGHVSILGHQYNMVVKESEKKAKNRSELLERFHFENNTYHNAKADLDMINAFDETIKDLEREIHKFTLKEARVSYNILKTIPGCGETLALSVLYEIDDIGRFPTVKDFSSYARLIKCRAESAGKSYGFSGAKIGNPHLKWTFGEMAIYAVIHDQYIKAYFTEYLSQKYSLGKAYACLAHKLGRCVYYMLTKGTVFTHQKFFTGKNEKKYRDSTKSEA

SEQ ID NO: 390609 - protein, 342 aa, unidentified
MKIIGCDFHPSFQQIAMVDMPTGEYTERKLTPEEARQFYAKLKGPVLVGMEACGNTLWFERLLAALGIELWLGDAGKIRAMEVRKQKTDRRDAQLLLQLLLENRFPRVWVPSVEQRDVRQLLLHRHKLVAMRRQVKNELQHLALNQGVQQKRKLWSAAGRQRLEELPLEGWTKQRRQDSLELLDELNRRVAKLDVAAQQEADRDAVAKLLQTHPGVGPITALAFSLRLGEIKRFARSRQVVSYWGLNPAEHSSGGRQHLGGISKPGNPMLRSLLVEAGQSAARSVPELKRAYQRLKHRKHSGVGKVMVARKLAVRLFWIWKTQQPYTAARTQGSPSHHVVAV

SEQ ID NO: 390610 - protein, 386 aa, unidentified
MVFVGIDIAKHTHYACVTDDAQKILSAPFPFENDQKGFAKLLSSFASYAKTDVIIGLEATSVYGENLISYLANLGYEIALINPIETSSVRKKNIRNAKTDKIDAKVICKYLATEEYRFLQSKELQTLQLRGLCRFRQALKKSNSRLKTQLVSYLDVSFPEYPSAFSTVHGKGAYAVLSEFPSASAVSKANITKLTNLLCKSSHGKFNRSKAEELKALAKRSVAATDCDMGFQIKQTITQIQLISAQMNDTEKQIVTVFESLNSVIATIPGIGAINGSMILSEIGDIRRFSNPNQLIAFAGLDPIIRQSGNFRAKTTRMSKRGSGVLRYALINAAWNVSLNNVTFKEYYSEKFSQKGRHYAALGHVAGKLTRVIFAMLKNEMVFNLP

SEQ ID NO: 390611 - protein, 360 aa, unidentified
MAKARTLVGLDVHATRVVAAVLDVETGELAFFSMTADIARVAGFCAGLPGPVRAAYEAGPTGYGLARELARREVQCVVAAPSKIPRGSGERVKTDRRDAELLARLLLAGKLHPVRVPGREEEALRDLIRAREAVRVDLMRCRHRLSKLLLRHGIRFEDGDAWTTRHRQWLSTITLAQPAAQATLLDSRGAVDALVHRREQLEREIIALLPGSPWSVQVGRLRCMRGLDTLSAVGLCAEVGDFASFRKPAQLMSYVGLVPSETSSGQQRRLGSITKTGSTHARRLLVEAAWHYRKRPRIGTTLTERQAGQPPEAIAIAWSAQRRLHRTWTRLEQRNKRRTLIAVAAARELAGFCWAICQIE

SEQ ID NO: 390612 - protein, 337 aa, unidentified
MQKYSIFIGIDLSKRWFDVALYFKGQPGKMPHQRFIQSTEGYARFINWIKTELVRAGVEGHWLCCMEHTGVYSLSLCHYLDQQAIAYVLENALRIKRSSGLRRGKSDKTDAMAIAEYAYRYQAQLSQVRPLPKEGLLKLQALLSLRTRLVKYRKGLALASHELNGFVQPHISLSIASYTQQVLQPIDTTIKEVMKQIRQLVKQEPDLENKYQLLLSVIGIGPVIAAHLLVYTNGFTAFNKGRAFACYIGVAPFQQQSGTSLKGPDRISHIANHKLKALLSNAAVVAVRYDPQLKAFFNRQTQNGKEPGWIYNAIKNKIVHRVFAVIRRQTPYVKLDF

SEQ ID NO: 390613 - protein, 351 aa, unidentified
MVIVGTDVHKRTHTFVAVNEAGAKLGEKLVPATSTGHQKALQWARTEFGQDLLWGIEDCRNLSARLERDLLSAGQRVVRVAPKLMAQTRACARTRGKSDPIDALAVAHAVLRYPDLPVAAHDEVSRELKLLVDRREDLVAQRTSTINRLLGRIHELDPARTPKRGALDRAKTRNELGNWLDTLHGLLAELARDELDDITRLTDTINALAARIGQHVHDVAPELLALQGCGELTAAKLVGETAGVKRFKNEAAFARHSGTAPIPVWSGNTAGRVRLTRSGNRQLNAALYRIALTQIRITDSPGQLYYRKRLAHGDSSTEALRCLKRRLTRTVYHRLHTDEQARLNDPHPAAA

SEQ ID NO: 390614 - protein, 462 aa, unidentified
MPERNDRESGESNRRQLQGLPVIRRNVAGVDLGSERHWVCAPTQDGNGREIASFRATTRELLRLAEWLKARQVESVAMESTGVYWIAPHEVLEAQGLQVFLVDTRQLARVPGRDKKTDPSDCEWIQRLHSCGLLRGSFRPEEAVCMLRTLVRDKANLVAESGDWLRRMQKSLDQMNVRVHRAVSDIDGVTGMAILRAIAAGERDAQKLAQLRDRRCNKTQQEIAEQLTGHWREDHLFSLQQALKMYDAVQERIAAYEQEILRQLEEMEEPGQRGETPPPLNNANKAKAIKRRGQEAKRQALYRMSGVDITQIDALGVETVEVVLSEYGPDLSRFPTEKEFVAHVTLAPRVPRSGGKPLKKKKRNSASTRVAAALRMAALSLRHSQTALGAYYRKLAQRLGGDVAVFATARKLATLIYRLLRWGQPYVDEGAAAYEHRYLQQRIKSLTAKAKELGYELTAVNA

SEQ ID NO: 390615 - protein, 323 aa, unidentified
MQGKVSFEEDAMPVVYAGVDVSKEWLDVHLHPLGESRRFSNDKTGIRQLKRLLARHQPKSIVMEATGKFHRPAHRSLWLDGFAVAVVDPLRARMFARACGYLAKTDRLDARFLALLAESLRPPADTPPSPHVEALRELVNARSAAKCDITALQNRSKTATTALLRGELNRLVRRLEQHVERLDKEIERRVGEDPQLYRKAEILTSIPGIGRVTALALMAGMGELGTCSGKQAAMLAGLAPIANDSGARTGRRSIRAGRPAPRRALYMAALSACRYNPALARFADTLKAAGKPAKVILVAVMRKLLVLANCLLSQDRLWTPTPP

SEQ ID NO: 390616 - protein, 337 aa, unidentified
MKYSGIDLHSNNSVVTVTDDTDRVVAERRLPNDLAKIVGFLLPWRDELAGVVVESTYNWYWLVDGLQEAGFEVKLANTGAMKKYDGLKHSGDESDARQLAHLLRLGILPTGTILPPKHRATRDLARKRMQLVRSRTSHILAIENILARQRGATINSNAIKRLTAADVNQMGLPEDVALAVQSNLAVVTTLGAQIELLEKRLQERLGERPEYALLTSVPGIGRILAAIILLETGPIERFRAVGNYASYARCVDSQHLSNGKKKGEGNVKNGNKYLVWAFVEAANFALRFNAEAKRFYERKKARTNNVVATKALAHKLARACFHILKERTPFDVRRCFA

SEQ ID NO: 390617 - protein, 352 aa, unidentified
MLIIGCDFHPSFQQVAIFDNRTGEMQEKRLQHRDEAERFYRELAGPPVRVGMEACGHYPWFERLLEELGIELWLGDAAEVRASVVRKQKTDRRDAEHLMHLLIEDRFPKIWVPSLEVRDVRQLLVHRHKQVQTRTRTKNQLQAMALSHGVQKKWKLWTKAGRAELEQLPLLPNAAERRQRLLEALDALEADIVELNRRVEEEVRKRPEAVRLMTHSGVGPVTALAMVLTLGPAERFASSKEVGSYLGLIPSEESSGGKQRLGRISKQGSSFLRFLLVEAGQTAARYDPQLKRFYRRLAVRKNRGVAKVAVARKLATRLYLMLREQWTYAQLSQAVMQVSPSHSVAGKQKPSS

SEQ ID NO: 390618 - protein, 449 aa, unidentified
MAAVMIGVDPHKASHTAVVIGAAEEPLGELRVRACAAQAERLLAWAAAWPERTWAVEGAGGTGHLLAQQLLAAGERVLDVQPKLGARVRLLDAGDTNKNDPNDARSAAVAALRSAGVREVRPDDHAVVLKTWSKRYRDLGRTRTQVVCRLHAVLCDLVPGGLGRPIYASHAARILEQITPPDAVAAARCELAADFLEDLRRIDAQLRETRKKLATAVQAAGTCLTGLFGVGPVIAAAVIGDVRDVSRFPGRDHFAAYNGTAPIEVSSGPHKIYRLSRRGNRRLNHAIHMAAITQIHHRHRRGRAYYDKKLAEGKTPKEALRALKRQISNAIFACLQADARRAAARAQGPGGQQGNDSVASAAGLHPRHRLFGQATPGPGHHPTTAAGGPAPGPAHARGRAGHAPVVATLPPAPPQVQVERPQRSEDERPGGAARRRPHSAARKDRAKDP

SEQ ID NO: 390619 - protein, 340 aa, unidentified
MEYYAGIDVSLKESSVCIVDAKGKIVREVKVASEPETLVRYFDELELPVCRIGLEAGLLSHWLHAGLVAAGRDVVLLETRHVKAALSAMTVKTGRKDARGIAQLLRMGWYRPVHAKSMASQDTRALLVGRKLLQGKLLDVELSIRGILRGYGLKVGEVSRGRFEARIQELIVGHSTPKTVIGAMLAARAILWSEFTRLHREMLKIARADKICHRLMSTPGVGALVALTYRSAVDDPTRFGKSSTVGAYFGLTPKKYQSGETDRDGGVSKVGDAMVRTALFEAAHIMLTGATRFSSLKRWALDVAKRRVMKRAKVALARKLGVVLHRMWMDATDFRWGAMD

SEQ ID NO: 390620 - protein, 372 aa, unidentified
MNYNTVYVGMDVHKESFTLCSMTIEDEKASHYQKTEADYKKVLKYLEFLRTIYGDNAKFICGYEAGCLGYTLYHQLMSQHVECVILAPTTMLEQRSRKRIKTDKRDAEIIAKCLAQHNYSPVHIPTATDEQTKEFLRMRDDHKLALKKIKQQILAFCLRHNYRYDGNGHWTAAHLRWLKSLQPEALYKEILDEYLLTYTTLSDKLERLDKRIEELASKDEYKEAVKKLCCFIGVKTHTALSVLVEVGDFNRFASTKNFASYLGLVPGENTSSDDRNLLGITKAGNRHVRLLLTEAAQSYARGQIGYKSKDLKSRQSGNSAQVIGYADKANERLRRRYYKMVLGQSKKHNVAKVAIARELACFMWGIMTDHIA

SEQ ID NO: 390621 - protein, 451 aa, unidentified
MEGSFAGVDWASEKHDVVVQNAAGEELLAASFAHDEAGLRSLCRQLVRLKVELVAIERPDGVLVERLLDAGLRVLALHPNQVTAARPRFRVSGGKSDGFDAFVLCELARTDHRRFRVLEPDSDQTKALRALCRGREDLVRTRTALSNQLRAELERFWPGAVKIFRSLDSPIALAFLEKYPSPIEARALGEQRLAAFLRHQHYSGGKTPAELLRKLRSAPEGRAGEVEIHTRRQLVLALVALLRPLVAQVKQLERQIAQALAEHPDGELFRPLFRDPKSVITAAELVSEIGDCRARYPSGDALAGDAGQAAVAIESGKRKVACYRWACNKRLRDAVCTLADSTRHWHPWAADHYARAIARGHDHPRAIRGLGRAWCRVLWRCWQDRTPYDPARHRALQQHCTVTVPTPSGPRPDTAATQRMLGAAVTPQGRAEGTSAKRSTASRHPLPRPGG

SEQ ID NO: 390622 - protein, 336 aa, unidentified
MDDSPHPAAAAAAARPRPQVFVGIDLAKGSFQAASEADDPAGRFNRSFAHDADGIAALLAQLEPLDVALVVMEGTGGLERRLAADLAGAGHPVAVVNPRQARDFARALGKLAKTDRIDAQTLAKLARILKPHARALPSAEQLRLKDLAGRRRQLIRMRTAELNRAQQASSTDVQKSIKHVTAMLDKQVAKIEKQIARMIDANSDWKDKSDILDSAPGVAPGTAHALLAELPEIGTLSKRQVAALAGLAPHAFESGQSTGRASIWGGRAAVRTILFMPAMTAARVDPVIRAFYQSRVARGTPKMAALTACMRKLLTMLNAMVRDGVKWNQKPVETGA

SEQ ID NO: 390623 - protein, 354 aa, unidentified
MKRSTKYVALDVHQATTVAAVREESGRVIARTVLPTEGPALLEFVRGMRGTIHVAFEEGTQAQWLHELLAPRVERVVVCDRRGEPRQGNKGDLLDADQLSERLRRGGLRAVYHGDGQRTTLKDLTRTYQNLVEDSTRVMLRLKALFRARGIAAPGRGVYHPAHRARWLGALRDQGARFRAEALYAELAVLRELRPKAKAAMVAEARRDPAWGLLQTIPFFGPVRVALLLAAMQTPWRFRTKRNLWAYAGLAVVTRTSAEYALVAGRPVRRRRAPLTRGLNRNHNRVLKDVFKGAATAATGRPGPLQDYYQGLLARGMRDELARVTLTRKLAAITLRLWKAGERYDPTQLTTQAR

SEQ ID NO: 390624 - protein, 333 aa, unidentified
MNKITLIGIDTAKQVFHGVGVDAHGHYVWRKQLSRGRLLSRLAQLAPCEVVLEACGASHHWARSIQALGHTVRLIAPQHVKPFRRGQKNDYRDAEAIISAALSPGMHFVGIKRVEQQAEQALHRVRSRLMRDRNAAANELRGLLGEYGVVFGSGFKRLREGARCFAETEEAHTLGLVELVNDVLEEIRVLQQRMDHYEHLIEQRVQADDISRRLREELSGVGKLSASALRVKVADVRDYPSGRHFAAYLGLAPGHSGTGGKVRIGHIKHGHDRYLRQLLIHSARSALCHLGDKQDVQSRWLRGLLERRGFNIASVALAHKNARQAWAIMAREQ

SEQ ID NO: 390625 - protein, 320 aa, unidentified
MSATTPTSCYAGVDVCKGRLDIFLRPMQEHLSVPNEEAGIRALVSRLEQARPALVVLESSGGFERLVAAALAASELPIVVVNPRQVRDFARATGKLAKTDRLDAEVLARFGQAVGPEPKPLPDKEIRAFGEVLARRRQIVGMLTAERNRLGTATSEPVKKRIEAHVRWLERELKRIEGDLDEAIKGSRAWRENEALLRSVPGVGPVLARTLLAELPELGTLDRKRLAALVGVAPLNRDSGTLRGHRAVWGGRARVRAALYMGALVATRFNPTIGEFYERLLAAGKPKKVALVACMRKLLTILNALLKHRTPWRPLHDLAP

SEQ ID NO: 390626 - protein, 366 aa, unidentified
MDAIYIGVDFHARQQTTCYLKTETGELVISELKHQDKEQVRAFYQQFPSPVIVGLEASGYSPWFEALLEQLGCEVWLGHATEIRRRARWRQKNDRRDAELIWDLMVHDEFPRLHRPAATSREVLRMLRYRQKLIKLRTMAKNSLQAIALQAGLAKGKQLFTAAGQEEFKSAALSPVLQWQREHWFALLRPLNQQLLETMVWFKAQSKDDLRIQRLRTHPGIGLLTALCLLHTLQPVERFRNPRKVAAYAGFDPVERSSAERQHFLGISKAGSRLLRYLLVEAVQTAVRYDEDLKRFYKRVAERRGRPKAKVAAARKLLIRAYIMMRDEIDYAEFRRRAVAVRLARGGQGPSNVPAVLIGQPASPGA

SEQ ID NO: 390627 - protein, 352 aa, unidentified
MKVHNAERPISVVGIDLAKRSFHLYGVDAHGQQVLSKKLSRIRLSAFVANLPPCLVAMEACGSAHHWARQFRSYGHEVRLIAPQFVKPFVKSNKNDAADAEAICEAAQRPNMRFVAIKTLEQQDIQAIHRMRSLAVDRRTAQINQIRGLLLEYGIEVAKGRPAIQRRLPEILEDGDNGLSVRFRTELHGLAEELRHLNERVAHYDAQIDAIAQSDPQARELMTIPGIGTKGATALLAAVGEDARVFNNGRALAAWIGLVPRQHSTGGRDRLLGISKRGDVYLRNLLIHGARAVLRWAERKEDRHSRWATALKARRHTNVATVAMANKIARVAYAVMTTGKPYDPAIGAMANG

SEQ ID NO: 390628 - protein, 376 aa, unidentified
MKKISTVAVKQSKNISGQKLTIGLDLGDRSSWYCVLDEAGEVLLEQKLATTAKAMREVFSGMPHSRMALETGMHSPWVSRLLSDLGHEVIVAHARNVRLIGESRKKDDRLDARTLARLARIDPQLLSPVKHRSAKAQADLTVIRARAGLVRSRTALINTARGLSKSYGERLRGCNPRNMNPEKAEQLSPELQAALEPLLAAIEALSERIHEYNQQIEKIARESYPQVARLEQVKGVGTLIALTYLLTLEDPHRFRKSRDVGCYVGLQPGRRNSGKSEPRRNSGKSEPQMHISKEGDPYLRTLLVQGAHHILGPFGADSDLRRWGLKLAERGGKNGKKRAVIATARKLAVLLHRLWVSAEAYEPLRNSHQRAMPAAA

SEQ ID NO: 390629 - protein, 426 aa, unidentified
MRFIGLDVHKDFCEVAVVEGDACWSGPRVRSTPEDLEVFAQSLGPKDQVVLEATGGALAIARILEPHVGRVLMANPMAVRAIATAKAKTDRLDARTLAKLLAAGFVPGVWISDERTRLLRRLVSRHAHLVRQRTRAKNEVHAVLQRTLAGRPPVSDLFGKRGRAWLGAQVLPADERQTVEASLRHIDFLDGELRLVDRTMAIQVLCWPEVRWIMTIPGMGAVAAAGVMAAMGDVRRFPTSRHLVGYLGLDARVRQSGSGPARHGRISKQGSAEARHLLVEAAWAAMRTPGPLRAFGERIRARRGANIATVAVARKLAVLCWHLLTREEDYAFGQPSLVREKIRRLELAAGAPNRNGYRNPVRVFATPAQRRLEREVGDQAEKAYRRFVKDFRSSGKKGAGATTGARISAARKGQAARQEQAPDPAL

SEQ ID NO: 390630 - protein, 311 aa, unidentified
MSAAEKELSHKSFDNTPEGIQSLLDWIAGYHLSLSKLLFCAENMGSYVTELSVSSVSMGFSLALVCPLTIKKSIGLQRGKNDRIDAKRIANYAVLHYRKLELYKLPNKDLVRLRGWIIIRDNLVKQKVSSIKLLETFSQMAKLADVTESISFLEEQLKSIKEKILEVEEDMEQLIAASTSLYTNYLLLRSIKGIGIINAIVLLCVTDNFQRFDNPRKFACYCGVAPFEHTSGISIRGKTQTSSLANKEVKVYLTRAAITAVSWDPQMKAYYKRKIAEGKHKASVINAVRAKIIARSFAVIRRQTPFVTLAV

SEQ ID NO: 390631 - protein, 353 aa, unidentified
MYYCGIDYHKKYSVVSIIDSTGQTVDERRIGHQAPNLFRELFSGLDQPVKVVFENSLNWSWLYEILEQIENVESITLANPYKVKLISEAQIKTDKIDAGKLALLLRLDVIPACHVPSRRMRERKEILRQRIFWVRERTKIRSRIHKIIGRQHNLNMPQVTDLFGRKGRAALNKVFLPSPDDMLLKQNLMMHDTINALVKEAEAQIKSDGNDDPAVTFLQSIPGVGLIIGNVMACEIDGIERFRTNRHFLAYCGLVPSTHSSGGKTHHGRMLTGCNKWLKWAFIEAAWVAVGCSPYFGTLYRHHRGRGKKANTAICITAHRMAEIAYRLLNEKRNYKEQIYSGRSGIGLRASAA

SEQ ID NO: 390632 - protein, 355 aa, unidentified
MLSTRYIGMDIHKETISIAVISAGGKSVMECVVETKASTILQFIHGRRGDLHVTFEEGTWAAWLYDLLKPHVTEVLVCDPRKNALLKRGSKSDKIDARKLAELLRLKHLKPVYHGEHGVRILKELARSYLTITQDLTRVRNRLKALYRSWAIPCSGTQVYTLRHRSEWLGKITEAGVRRRAEHFYQQFDALRPLRQEVRRDPLTEGQKHKAWKLLRHIPGIGAIRATLLIALIQTPHRFRTKRQLWNYSGLGLETHDSAQYCVVEGQVQRSKKPLMLRGLNQNHNHDLKAIFKGVALEASSGAGPFHDFYEALLTKGRKPSMARLTLARKIAAIALIVWKKEVSFDAKHLKQQAA

SEQ ID NO: 390633 - protein, 382 aa, unidentified
MKESSTLYVGLDVHKDSIDIATADAGREGEVRHVCSIGGDLVGLDKALRRLISRGHRLHVVYEAGPCGFVIWRHLSTQGIDCEVVAPSSIPKRSGDRVKTDRRDAMMLARLSRSGDLTAVRVPDAADEAVRDLARSREDAVRECRNARHRLKALLLRSGIAYAGKSAWTAAHLRWLSTLKMEHAAQQIALQEYLHAVTEATTRIGRLEQAMRDTLPEWGLAPVVQALQAMRGVQLVAAMTLVAELQDFLRFDNPRQLMAYVGLVPGEHSSGPKRRQGSITKAGNSAARRMLVEVAWHYQHSPRVSPIIAARHDQLPKAVTDIAWKAQLRLNAKFKRLVARRVLKNKAVVAVARELTGFVWAIGREVQSSGWQSIKVEQAGAD

SEQ ID NO: 390634 - protein, 358 aa, unidentified
MFTMLSGQVDFVVGVDTHRDTNVAAIVEAATGGVVEHLHCSTDAMGYKRALAFAVLHAPGRRVWAIEGTGSFGSGLTTFLLENGEWVVEIDRPARPARRDGAKTDELDAVRAAREALSREHLAAPRARGDREALRVLLTARHGAVVGRTKAIGQLKALIVNAPQALREQLRHGTTDQQLDRCARLRTLPSHSVEHRATVSAIRATARRALFLEAEAAQHETDLEQLVMNACPDLLDLPGVGVITGAQFIICWSHLGRIRSEAAFAALAGVAPIPASSGNIVRHRLNRSGDRQLNRALHTVALSRLQHHPTTKAYAARRTAEGKSSRDIKRCLKRAIAREIYRHLQAHAQATQQVKMVA

SEQ ID NO: 390635 - protein, 374 aa, unidentified
MENTITYVAMDTHKKQHKIALHYPCQEEIVEFTISNTVRDIKKIVNKIKKQAPGEVEFCYEAGVCGFTLKRRIEQFDCRCCVIAPSLVPRKPGERVKTDRRDAKKLLMMHRAGLLTEVHAPNEHQEAARELTRLRKTARDNLKRIRHQLLKLLTRHGYVYTEGRHWTQKHITWLRTVEFAESTLTDVFENYFNEMIYCIGRLENLDKEVGLLASSQEYKEIVGLLCCYHGIDTLSAITIITEIFEFGRFESPRHLMSYLGLTPSEDSSGDKQKKGAITKAGNKRIRRLLNEASWHYRHRYVPSTALKKRRKGQPKWAIEIADAAGRRLSTRHRYLVNKGKMPCKANIAVARELAGFIWFTVTQYQARKNTNDAA

SEQ ID NO: 390636 - protein, 346 aa, unidentified
MEQISRVGMDTSKRFFQLHGVNAAEEIVLRKKLRRKEMVEFFQALAPTVIGIEACGSSHHWARLLRSFGHEVKLIAPQLVKPYVKRGKNDGADAEALCEAMSRPTMRFVPVKTAEQQAALMLIGLRERLIGNCTQLSNAIRGYAAEFGFTAAKGMAHLDPLLERIQADESLPLAARELFAVQSKEYAQLRGQINEVEAKLKAWHKSDECSQRLIKIPGVGPIGAVLLKMKTPAPEQFRTGRQFAAWIGLTPQDHSTAGKVRHGGITRAGDEALRAVLVAGATAVIQQAVRYGGRASPWLDALLKRKPPKLAAVALANKMARVAWKLMVTGNSYSTKSAPAALASPV

SEQ ID NO: 390637 - protein, 316 aa, unidentified
MYLGIDVSKKTIDCCLIKEDSKRQKQFKNEQGGFEKLKQWLDDNHATSELKCCCEATGTYYKQLALYLKNYYKISVENPRKIKGYAISELQRAKTDKQDAKLIAMYCQEKSHRLREWQPPEKDQQELEELTKYLDYLTRQRATEKNKLHESPDYITAHIKTTIDNLTAQIKAVKQQIKQFYKQHPEYGQNRKRLMTITGIGETAASVLLSTYKKHEFKTSKQFVAFIGLDPKQHESGTSIKGKSRISKIGKADTRKALFMPALVAYRSNAFPILINRLKSKNKPLKVILVALMRKLAVIAFTLLKIGQDFQVERYK

SEQ ID NO: 390638 - protein, 317 aa, unidentified
MTIKLERDAYVGIDVAKDKLDVAVLGQKATSEAGNTKRGITALVKKMLQLQPHLIVVEATGGYEEALVLSLFEAGMPVALVSPQRVRQYAKARGLLAKTDKLDAQNLAEYGKNIQPRLFVAKSEAGRRLSAIIGRRRQLGDMQKAEKNRFRTAYAEMRGSIQTVIDCLGAEIERLDTEIRNFMKTHENFGEQEKILRSTKSVGPVTAATLLADLPELGKLDRKQIAALVGVAPMNHDSGKKRGYRKTKGGRPEVRSVLYMSALSAIRYNPVIKAQYDQLVKRGKEKKVAITACMRKMLTILNAMMRDQLPFYAIPVS

SEQ ID NO: 390639 - protein, 475 aa, unidentified
MANLGGRAQKGYEMPGADEIASSGKRREQLAGLPIIRRNVAGIDLGSEQHWVCAPTQDGSGREVASFGATTAELIRMAEWLKARQVESVAMESTGVYWIAPHEVLEAQGLQLLLVDTRQLARVPGRDKKSDPTDCEWIQRLHSCGLLRGSFRPEEAVCMLRTLVRDKASLVAERSDWVRRMQKSLDQMNVRVHRAVSDIDGVTGMAILRAIAGGERDAQKLAKLRNRGCSKTEQEIAEQLSGHWRADHVFSLQQGLKMYDAVQERIAAYEQEILRKLGEMERNEPHEPTAAPLQNANKARTIKNRGQEAKRQALYRMSGVDMTQIDAIGVETVEVVVSEYGSDLSRFPTEKQFVSHATLAPHVPKSGGKPVRKKKRNSASTRVAAALRMAALSLRHSQTALGAYYRRIAQRRGGDIAVFATARKLASLVYRLLRWGQPYVDEGAAAYENRYRQHRIGRLAATAKELGYQLTPVTA

SEQ ID NO: 390640 - protein, 365 aa, unidentified
MNAIHYIGFDVHKKTISFCVKTADGQIVEEGSLQAERTVLRRWAAGRKQVWHGAMEATLFSAWIYDTLKPYAQQLSMGHPAKMKAITAGKNKSDQVDARTIADLLRCNLLPASYVLPPQLRDLRRLLRYRNLVVQQSVRMQNKMAGLLMESGTAFNKQKLHQKKYFADLMKSLEEVPESVKDLLRMSRGSMEMFQSTQKQLVKRLLSEPALEQRVERLMSIRAVGPITALTWALEIADPQRFASIADAVSYCGLSAAFRSSAGKQQRGPISKQRNAWLQPVLIEAAKLAPLWNPQLAAVHARALERGHANRATLQVARKLVAYLLAVDKSGQPFQVHTPPPPAGTTAKKKPARKGKKAVALAPAA

SEQ ID NO: 390641 - protein, 332 aa, unidentified
MTEYIGIDVSKQSLELWDGIHEEEVPNEKGLKTLKKLLKKRDGGEWNETVRFIYEPTGPYSNYLRAFAAEHEVQVYEVNPKKSANFAKVLGNRSKTDVVDTKMLYSFHLLLKESEFSITKMDERAEQLGAYLGSYEMIQKTRTMLSNHLQSLEYKSEVTRKLKESLEKELKHLGAMEDELENEMKAVAEDHEETREALHNLLSMNGTLVISAMNLLYLFRKYPGANRNEITALAGLDPGGRQSGSSLNGGRKISRAGDPMLRKVLSLACMNSIQHNQCIQAFYKHLVSDNHKKPKVALVACMRKLLLIAHHLYVTKSPYRTLEHDANPCLSS

SEQ ID NO: 390642 - protein, 419 aa, unidentified
MSFKILKNNCCGLDVHKTWIYACIGITDSFKRTEYKQARFSSFTKGLNELCDWLAKYNCKDVCMESTGKYWIPVFNILEQHSFWVTLSHPKYTKPMKGNKTDRKDAKWICDLYMCGMVKPSFIPPADIRELRDLVRYRFKLTCMITGEKNRAQNCLTVSNLKLDDVFSDVFGKSSRSITEHILQHPGEKFDIAPFVDSRCKTPITEIQAAVDGAISKEQVVKLRQCLDHIDELNKHISEVEQEILRLSDKYEAALNLIRTVPGFNKNPLTAIQVLSEIGGDMSVFPTAKHLVSWAGCCPRNDQSNQKIKSTRISRAGSYFKPVLVQIANALIKSKKHPEFTTRYRRIKARRGHKKAIIAICRMILTAIWHILSDLKPYTPEGFLESRPVKEGKVLSTSQALNLLKQRGYIIKGEPLAVS

SEQ ID NO: 390643 - protein, 361 aa, unidentified
MVLGVDTHLDFHVAVAVDRLGRRLGELAVPTTVGGYGELVGWAEGLGLVACAGVEGTGSYGAGLARHLRAVGIAVVEVERPKRRHLRRRNGKSDSRDAESAARAVLAGEAAGVPKSGDGRVEMTRTLRSARRSAVKARVQAANLLQAMLVTAPDELRRRLRSLPTKELIAVAARFRPGEEPEDVEAVTKFALRSVARRHEALSEEIAELDAQLERLVAEAAPELIALPAVGTHHAATLLVLAGDNPDRLKSEASFASLCGVSPVEASSGKVVRHRLNRGGNRDANRALHMICVVRMGSDRRTRSYVTRRLAEGKSKWEIMRCLKRYIAREVYRVLLSSAAPAPPPIGSASGAVGGQTSRRP

SEQ ID NO: 390644 - protein, 310 aa, unidentified
MGVCIGVDVAKAHLDWAIGPKGKVERIPNSLAGVRRLVKKLHQLEFDLVALEATGQYERLLYEKLGDAGIPVVRLNPVRVRRFGQGMGVLAKNDAIDARMLALFGEKAEPEIREQKTDRERLLGDLAARRRQLIGIITSEKNRLEHATPCVIAEVRGLIRILENRVVKLDAKIDCVIAQDRKQKADFDRLQSVPGIGPKIARTLLIDLPELGKLDRRRISSLVGLAPYARDSGKRSGSRTIHGGRAAPRTALYLAAMVGSRFNPELKAMYERLRAAGKPPKLAFIAVARKLLTILNAIVRDQTEWKTMRA

SEQ ID NO: 390645 - protein, 533 aa, unidentified
MATIQRRGSSVRRKTMASVGKPRGVLHPRVQLVGAEHFGIVCFDCAKVRSKFLLADFFGRVLIPPTIVEHQRPDLDAAVALVREAFQTHQLHDGVVAIERTGRYHRVVQRAFAGAGFETRIIHPFVTKQYRQPVDPGNKTDDTDLAAIHRATVTGCALLETTRDEAWTTLQLVIRHRRDLVVKGAALNCQIRDHLEAALPGFAACFDKFWESPVPWHLLRHFPVERIRATSVTALAQSLRAAGIRFQQRTVQTVFDWALQAAPGDIAANQHHRIALVLHEDRLRKTLEIQALEREIAELLAQTPYILLLSFPGVNVVSAADFAGEMGPIEHYANAKCITGRAGLRPSRHQSDQVDKANGPLVRNCNRSLRAAIMRIAENLIVCNHHFQHLARQWAGQRKDPRHTRVKVGLRFCRIAFQMVAGRQVFRHPAIQGRHFIIDKLNAFHRDHGTGMADVLRDLQAAIRQVPKREHAAEAKPLQDELRRIQDGRRRGPQLLGDILPIVLARLGVGAVQSKASGESTPAAPGSRAENAY

SEQ ID NO: 390646 - protein, 340 aa, unidentified
MKTYYHFIAVDWAQGNMAIARMTAKSDRIKVVDVKADINELRIFLKSLKGTVALAIEEGTTAQWLYMELRDCVDKLLICDPYRNALLSEGSKTDKIDARKLVQLFKAGLLKEVFHSCDEYLELRKLTSGYDDVVRAGVRMKNQRSAIFRSEHKDHKKDIQPEGSSGLFVLSGLDASIAAYEEEKKRYETKFQALKKKHKAIALLTDIPGIGIINAVRVVARVVDAKRFSDRNHWLSYCGLIKLERQSGGKTYGKKTPRYSRDMKSVYKTAALAAITGTNEFSEYYNYLVREKNYADYNARHSVARRIATIVLGILKSGKKYQPFRERKKNVDKELNKTTP

SEQ ID NO: 390647 - protein, 410 aa, unidentified
MRLCVGDDWAQDHHDIEVMDEAGQVLAARRLPEGVAGIGQLHELIGRFVPADGDAEVQVGIETDRGPWVTALLAAGYVVFAVNPLQASRYRGRRGVSGAKSDGGDAHMLADAVRTDAHQLRPAAGDSPAAEAVKVLARTHKTLIWQRSAVVLRLRAQLREYFPAAVAAFEDLDARDALELLGKAPDPARAARLTRAQVSAALKRAGRRKIAERADAIVAALRSPQLGQPAALTAAYAATVRSLTAVIATLNEQVASLQGQVEAHFGQHPDAEIYRSQPGLGAITGARVLGEFGDDPHRYATAKNRKNYAGTSPITRASGKKKIVQARFVRNDRLIDALMLQAFGALRVSPGARAFYDAQRARGCAHNEALRNLASRLVGILHGCLKTRTRYDEAIAWGHRENIPQSDAAA

SEQ ID NO: 390648 - protein, 398 aa, unidentified
MLNQTCGDDHAYFNDRSEAPTAIRTNLCAVFVSLELSRSSWVITSLSPGNGEKLSKHAVSGGDVTGLLARLSWLRETALSRTERHFPIIVIQEARLDGLWLHRVLQAEGIESHVVDAASIATSRRRRRAKTDRIDGEAMVRTLLAYKRGEPRVCAMVKAPSRKEEDRRRITRERKVLTGERVSHVSRIKGLLFAQGISGYEPLRRDRRARLEELRTGDGRALPAHLKAQICRELDRLELLLEQVKAVEAERAALLAEAQDTATPTSAAMLLDVKGIGPEFAAMLWSEGLFRHFDNRRQVAAYAGLAPTPWQSGSVDREQGVSQSGNPRLRTTMVQLAWLWLRHQPQSALALWFRGRVQQNGGRMRKTMIVALARKLLVALWKYVTAGIVIEGAVMKAV

SEQ ID NO: 390649 - protein, 320 aa, unidentified
MQTSSVVLNIGADIGKDKIVVACAEESFVPHKIANRRAELAAWLKGVPAGSRIGMESTSSYHELLAGLAHQLGFVVYVLNPKDTRHYAKAMGLRGKTDRVDAKLIARLIAREHEKLHPWIMPTPEQRQIDRMIKRRAKVSGIRAALGQSLSGLKGFAAELKALKHRLDQLIARIDAKIKALIEADAERKQDYARLCRITGVGPVVGGSLVSTLERVPLKNGDAFVAFTGLDPRPDESGHHVGRRRLSKRGPAELRRLLYLAAMAAAKTKIWKPLYEHHRAKGLSRTAVLVILARRIARIAWSIYTHKTEFDPQRLVAGLT

SEQ ID NO: 390650 - protein, 344 aa, unidentified
MDHFAGLDVSVKETSICIVDDTGRIVREVKVGSEPEALLKVLGNPAYRFKRIGLEAGPLSQWLFSALAEAELPVVCVETRHMHAVLKAQINKTDRNDARGIAQMMRVGLYRPVHVKTLRSQKLRMLLTHRKLLQSKAIAIENDLRGTLRNFGLKVGIVGKVKFEARIKELVENLPDLAVLVEPLLIVRRVLREQIVILHRRLLAIVRDDEVCRRLMTVPGVGPVVSLTYRATVDVPARFHKSKAVGAVFGLTCSKYQSGEVDWSGRISRCGDEMMRAMLYEAAQSMLRSKKWSWLKAWAMQIARRRGMKKAIVALARRLAVIMHRIWVDGTEFRGTREQAAAAA

SEQ ID NO: 390651 - protein, 408 aa, unidentified
MKTLHRRCAGLDVHSDSVVACARLTVRTKATHEVRRFSTATRDLLELADWLAAQGITHVAMEATGIYWKPIWHILEGRFELVLANAAHIRNVPGRKSDVNDAVWISDLLAHGLIRASFVPPAQIQDVRDLTRTRTQLAREVAQHIQRIQKTLENANIKLTSVISNIIGTSGRRILKAMIAGETNPIKLAELGSTRLKCPRAELTAALDGRVTAHHRFLIAHHLSLIGELERHIAAFDARIEKLLRPLRDAVAQLITIPGVSQVSAQVILAEIGADMTPFPTSGHLLSWAGLVPRLDESAGKRRSTRVRKGAPWLKPVLVQCAWGAARTKGTYYQAQFFRLKARRGPKKAAIAVAASLLTAAYHMLKNGTFHQDLGADFLVKRDKACIVTKLASRIKDLGYDVSFTPAA

SEQ ID NO: 390652 - protein, 417 aa, unidentified
MKKHAFFELRVSVDIGCRNHNVAIGLSSGEVLDEFSIPHVPDGFRQFFARVEKQALRFGCPVSVAMEGYNGYARPLDTLVRAHDYRLFNINNLKLARFKEIFPAAAKTDALDARKGLELFQLRDHLPMAGDVLQEVRATPRENDILKRLSRRRRRLVDERTRLLNNLQADLQAVCPGLLEITGRADNLWFLRLLTSTDDLRKLARLRRSSLLKIAGIGVTYASVICAWQKRAQFSDEVEWVGEMIQEDAARVLELHDRIHSLEARMETVARDSSIAKTLSTIPGFGPVCTAELAGEIGTIERFGTEESLALYVGMANLDNSSGKQRGSKPPRQVNTRAKAAMMVAVDRHRKQVPLSQRYYEKKRTEGKKTQPVHPGTGTASLPGHLQDAEGQQGVQTPPVKHIFMLKIPEGCSGLTS

SEQ ID NO: 390653 - protein, 311 aa, unidentified
MSEVFVGVDVSKDRLDVHVLPQKDAFAVARTPAGIADLVERLAPLSPHLVTLEATGGLESVVVAALAGANLPVVAVNPRQIRDFARATGKLAKTDALDAEAIARFAQAVRPQPRLLLDEDAKALAELVTRRRQVVEMAVAERNRRRLVAAKPVLKSIDRVLAALEKQLTDLDRDIGTRVRETPAWREKEDLLKSVPGVGDQTARVLIASLPELGTLDRRQIAALVGVAPINRDSGKMRGQRAIAGGRADVRSALYMAALTAVRCNPVLKATYARLRAAGKRPKVALVAAMRKLLVILNAMLKTRKAWAQGA

SEQ ID NO: 390654 - protein, 310 aa, unidentified
MGEHVGIDVSKEHLDWVVGIEGSADRVPNTSAGVRRLVASLRKIELDSIIVESTGGYERRLTEALTKAQLPVILVNPWRVRRFGEGLGVLAKTDPLDARILALFGERARPERRPLPDPRQREMADLVRRRRQLISIIVAEKNRLDTASKAIRRDIQAVVQLLERRVCKLDEKIDAAIDGDDEKAEIRTRLQTVPSVGPGVARTLIVDLPELGHLGRRQICSLVGLAPFAKDSGKKAGVRRIKAGRAAPRSALYLAAMNGARFNPVLKAMYERMLEQGKPKKVALIALARKLLTILNAMVRDGKDWQQMSA

SEQ ID NO: 390655 - protein, 352 aa, unidentified
MAEKLSSTISEIGIDIGKNSFHVVGLNERGTIVLRQKWSRSQVEARFANMPPCLIGMEACVGAHHLSRRLRALGHDARLMPAKYVRAYSKGQKNDFRDAEAIAEAVQRPTMSFVATKTADQLDLQALHRVRERLVRQRTGIINQIRAFLLERGIAVRQGLRFLRAELPGILATRCEVLSARMVHLIEGLAGDWRRLDERIEGMSAEIDALARQDAGCERLMSVPGIGPITSSAMVAAVGTGDAFDKGRDFAAWLGLVPKQISTGDRTILGKISKRGNRYLRVLFVQAAWVVLIRPKSWERYGLKPWIEAAKRRLHRNVLAIALANKLARIAWSVLARGRSFEARSIATAQPI

SEQ ID NO: 390656 - protein, 345 aa, unidentified
MKITTIGIDLAKNVFQVHGVDEHGKAVFNKPLKREQMAAFFVNLPACLIGMEACGSAHHWVRKLQGMGHTVRLMAPQFVKPYVKTNKSDAADAEAICEAVVRPNMRFVPIKNTEQQGVLALHRVRQGFVKARTAQANQIRGLLAEFGLIVPQGIGHLAERVPELTEDACNELPGAFRLLMHRLLEHLKELDHQVRELEAQIVAWHRQSDLSRKLEQIPGIGPITACALVASLGDAKNFKDGRQVAAWLGLVPRQHSSGGKQNLLGISKRGDTYLRTLLIHGARSVIYHAQNKGQGSAECAWVNGVAKRRNKNVAAVALANKNARIAWALLAHDRCYEPGYARASA

SEQ ID NO: 390657 - protein, 390 aa, unidentified
MKFIGIDVAKNKHDIIIIDDYGEIIKEHFTISNDKVGFKKLHTEIRSCMKSLNEIHIGMEETGIYHENLRDFLISKGFTVYTINPLLTSYSRKASSPRMTKTDKIDATAICRYIMNNFRILHSYTPSLYYIDELKQITRNYDSKKTVLSKSKTELKRLLHISFPEFTKHFNPYSKWALEVLYDYPVPTKFNGVHTMTLANRLRIKGDRYHKAIILKQIAKDSIGKCQFSQLFLIRSVISDITHYRTQLETLKKMITEKTKLFPKILSVPGVGPINGATIIGETGNIHRFSTKHQYYAYFGLDPIVYESGKYKLKKSKISKRGSKTLRSAAFSASRVACIGTGVDNKFRTKYHKLMKSGKHHNSAICAVSKNVVHSIYKILKDNQFYNDSK

SEQ ID NO: 390658 - protein, 355 aa, unidentified
MNDEKYIGLDVHQATIVVAVLDSTGKLVMEFILETEAATILQFFAGLRGTLSVTFEEGTWSVWLYDLLKPHVDKLVVCNPRKNALLKDGNKSDRIDARKLAELLRGNQLKPVYHGETGVRMLRELARSYLTIVKDLSRVMNRLKAVYRSWAIPCAGRDVYYRRHRAQWLAKIREAGVRRRAERLYEQLDMLQHLRQQARRELLAESRKHAITAKLRQIPYLGPIRSALAVALIQTPHRFRSKRQLWAYSGLALETRISAEYRLVEGQVRRSKKLLSIRGLNKDHNHDLKGLFKGAATMASVRPGPFQDFYQAALAKGIKPTMARLTLARKMAAITLTLWKKGENFDAEKLKSQAA

SEQ ID NO: 390659 - protein, 384 aa, unidentified
MNEHSHQDVSLYVGLDVHKDSIDIAIVAAGHDGEVRHIGTVAGGLQPVTMALRRRVSPASVCTSVYEAGPCGFVRQRHLAALGYRCDVVAPSSIPKRSGDRVKTDRRDALMLARQVRAGELAAVRVPGAADEALRDLVHAREDSRCASSATHVFASRRCSCATASSTPAAPPGPPRTSAGWPRSRCRIRCSRSPSRNICTPWLTPPLAPLALELSLRDALPGWSLAPAVAALQALRGVRLIAAITLVAEIQEFHRFTSFTNPRQLMSYLGLVPSEDSSGSRRRQHHHQGRQQRSPSPAGRGRPPLSPPRAHQRRHRTPPGRSASRRHRHRLEGRSCVCVRASSAWPHAACPHNKSVVAVARELAGFVWAIAREVTPAPAAMRRD

SEQ ID NO: 390660 - protein, 338 aa, unidentified
MKLYGGIDLHSNNSVIALLDEEDRAIYRQRLGNDLGLILSKLAPHQASLEGLVVESTYNWYWLVDGLMEAGYRVPLANTAAIVQYEGLKFSNDDSDACWLAKLLRLGLLPEGYIYPKEERAVRDLLRKRSQLVRQRTANLLSVQNLLARNLGHAPGANAIKRLSPEAVDPLLPDRHLALAVQSNLAVMQALDAQITALEPVVRAEIRPRPEFQPLRTVSGIGEILGLTIVLETGAISRFDTVGDYASYCRCVGSARLSNGKRKGRGNTKNGNRYLAWAFVEAANFAVRYNAQIKRYYQRKCARSNGIVAIKTVAHKLARACYYILRDRVPFDVNKAFA

SEQ ID NO: 390661 - protein, 432 aa, unidentified
MTTTKSLMEEQVMEQATPFAALIGIDWSDAKHDICLVDTATGCQELSVVSHTPEALNEWARSLRTRFGGAPVAVCLEQSRGPLIYALLKYDFLILYPVNPQTLSKFREAFTPSRAKNDPTDAEYLVELLAHHRDRLKAWLPDDERTRTLQLMVEHRRRLVGDQTRISNRLTALLKGYFPQVLQWFPELTTVLVCDFLLRWSSLDELRGVRRTTLEKFFRDHNSRRKDTLETRLDAIKAATPLTTDVAVINSSIVMVRALASQMKTTLAAVKEFDSKIDELCQAHDDFDLFASLPGAGKVYTSRLLTAMGSNRERWKTADELLRFSGVAPVVERSGKSSWTRWRYFCPKFIRQSYVEYAGESIKHSEWAKAFYVRQKAKGKSHQAAVRALAYKWIRIIWKCWQTREKYDEARYVECLRKKGSPLVAAVVDGTT

SEQ ID NO: 390662 - protein, 348 aa, unidentified
MQFYTNLHPFYCGIDLHARMLYVCILDERGDILVHKKIKDSPEQLLTLLSPYLGNIVVGAECMHCWYWLSDFCEQHNIDFILGHALYMKAIHGGKTKNDKIDAYKIAKLMRGGNFPLAYVYPKEKRAIRDLLRRRTHAMRHSAELKAFVKNALAQYNLPLPEKSDLSYTTGRDAMRGYFPDPLVQRSVDMNLRLIEIYDHEVSSIECHVEKITKNDNGRDYYLLRSLPGVGRVLALTILYEIGNIQRFESVQKFASYSRLVKCKAESAGKTYGTQGNKIGNAHLKWAFSEAAVLFLKGNPPAQAYLAKLQKRMSKAKALSALAHKLGRCMYFMLKNKTVFDSERFLAG

SEQ ID NO: 390663 - protein, 331 aa, unidentified
MQGWARKEHSNVSSEGRYVGIDVAKDQLDVAVEPGEEHWSVANEQEGIGTLVSRLEELGPALVVLEATGGLELPVTAALAAAELPVVVVNPRQVRDFARATGQLAKTDRLDAHAIARFGEAVKPSPRPLPNAEARALAAKVARRRQVVAMITAEKNRLHTAPLPVRQEILEHIAWLQKSLSKLDTDLGDTLHQSPLWRERDDILRSVIGVGRVLSLTLLVELPELGTVGRRQISSLVGVAPLNRDSGTFRGRRTVWGGRARVRAALYMGTLAATRHNPVIKTFYQRLCAAGKAKKVAITACMRKLLTILNSMLKHRTQWGPPHMQSTALLV

SEQ ID NO: 390664 - protein, 345 aa, unidentified
MKHFIGLDVSVKETAVCIVDESGKICREVKVHSHPGDLLAVMKDPSWNIERIGLEAGPLSQWLFEGLARAGLPVICIETRHVKAFLKAQPNKTDRNDARGIAQMMRVNLYRPVHVKTLTSQKRRALLTARKLLQGKAIAIENDIRGLLRNFGLKVGVVGTVKFEERIRELVEGMPDLEELMGALLSARNKLRAEFARLHKKVLASAEEDATCKRLMTIPGVGAVTALAYTATIDIPQRFRSSKAVGPILGLTPKLNESGESKRVGRISLCGDGMMRTLLYEAAQTLLTRVTKWSWLKAWAMNVAKRRGRRKAIVALARRLAVIMHRMWLDGVGFRWTREATAPII

SEQ ID NO: 390665 - protein, 350 aa, unidentified
MMIIGCDLHTRYQQIAMLDTETGEEVERRLEHESGEARTFYSSLQGPVRVGIEATGHTYWFEAMLAKLGHELWMGDAAKIRASVIRKQKTDARDAQHLLNLLRQDRFPQIWRPSPAERDLRQLVWHRQKLVWMRGAVKNQLHALAMGEGVCRKKKLFTAKGRKELEGLALGPWASYRRQELLRMFDELAAATAQLDLAVEQAAKNQPLAVRLMTHPGVGPVTSLAFVLIIGPVERFEHSKQVVSYLGLNPQEHSSGGKQRLGAISKQGNPMMRSLLVEAGHTAARFDPALKRMYQRLKFRRGASVAKVAVARKLAVRMYWMLRSTADYAQLVRMQGSPWATLVENSPSLG

SEQ ID NO: 390666 - protein, 351 aa, unidentified
MPMLADLVDAVIGVDTHTDTHTAAVVSRLGSHLATIEVSADAAGYAQLTGWAAKHAPGPRIAWAIEGCGSHGAGLARALAAAGHQVIEADRPKKAHRRGGKSDELDAIRAARQALAAPDPAQPRTGDTREALRILLATREHATKTRTATVNTFKALILTAPEDLRAQFRGRPTAAQVRAALALQPRPGQPVSERHLRQALHQLARQITGLDTALKTSLTNLRSLVRGWMPALLAEPGIGPVSAAQLLVTWSHPGRFRTEAAFAALTATAPIPASSGRTARHRINPYGDRNANRALHTIAVSRLRYHQPTIAYATRRTAEGKNTREIRRCIKRYLARNLYRLMEHQPTLDKP

SEQ ID NO: 390667 - protein, 369 aa, unidentified
MKDDIRVCREMTNPVPNEFALFPKSTLGIDLGDRFCHCCALDYRGEVVERFRFETTKAGLAKAFENRPPCRVVLEVGTHSPWVSRALGALGHEVIVANAREVQSITKSDRKNDANDAEQLARLGRADPKLLHPIAHRQEDTQRDRALLTVRDKLVQVRASLTVQARGIAKALGERLPKSTTPAMAKRVREEGFADLFPGMSSLLEVVELLSEQIRELDSEIEKVSKERYPETELVRQVKGVGPITSLAYVLTIEDPARFARSRSVGVYVGMRPRQRDSGDRNPHLSISKAGDPYLRNLLVECAQYILSRGPDSDLRRFGERIVERGGPGARQRAVVAIARKLAVLLHSLWRTAEVYDPLRQAQVTEATA

SEQ ID NO: 390668 - protein, 353 aa, unidentified
MKCDKYIGFDLHQATTVVAVLDAEGKVVLETIIATEAAAIIRFLKSLSGPLRITFEETTQARWMYDVVRGYVSEAIVCDPRRNKLLGEGSKGDKPDARKLAELLRAGLLRPVYHGHEATRQLKELVRGYETLAADTQRMMVRIKSIYRAHGIRTPGSAVYQQKQREQWLQRLTEPGTRQRVSWLYEELDHLRQLRKQAKMAMVAEGRKHQAFNLLRRIPQLGPIRCAMLVATVDTPYRFRTKHQLWAYSGLAIVTYMSSEYEIKSGRVVRSRKPLATRGLNRNCNRRLKELFISAAVAGSRSEPYRSYVECLQQKGMRTEMARLTLARKIAAVALTVWKKGEAFDPKKLNSTT

SEQ ID NO: 390669 - protein, 442 aa, unidentified
MNPIPNDPNPASTLVAAPALPRPEPAFAAFIAIDWADEKHAVALQAAGHTQIERTTLEQKPEALTQWIAGLRQRFAGAKIALILEQKRGALLWALQPHEHLVLYPINPQMSAKFRQAFHPSGAKDDPLDADLQLDILLHHRARLTAWQPDEATTRQLSLLVEGRRRFVADQVRATNRLRDALKSYFPQALALVGEDLSSRMACAFLKKWPRLASVQAVKPAVLRQFYYAHHSRSAELLAERLQIQAQAQPLTTDEAILAAQSLLVHSLAQELATLHPVLARYDQQIARLFATQADFAIWESFPGAGPALGPRLAVAWGTQRDRFADRQAMSAYSGIAPVKEASGKALWIHMRWACPKFLRQTFHEMAKCSLARCAWALCYYRMQIERGKGHHAAIRALAFKWQRIMWRCWQDRTRYDDAKYVASLKRSASDLYARLSAAPAK

SEQ ID NO: 390670 - protein, 329 aa, unidentified
MSALVCGLDVHKESTYATILNSDGKVVNQTRMNNEKVLSYLSHFKVSKVAMESSNQVASLYRQLTQEGYSVIVSHPKKTRYIAEAKIKSDRVDSKAIAELARLDALPLAYMPDKETAILREKVRRRAFLVRERVKLRVKIKSILTYEGLKWPSDHGLFTQKGVGWLHGLDLDSVECYLRVLKPLDEEIKLLSKELRGIAEDDEEVKLLMSIPGIGYYSAVLMKSEIGDINRFPFSERLCSYAGLVPSTYASGNTVRHGGITKEGSRWLRWVMVEAAQAHVRMYDTAMTQSYHRIAERRGKKVAVVAVARRLLMCCYSVLKNKRPYHDQI

SEQ ID NO: 390671 - protein, 346 aa, unidentified
MKYYCGLDVSLNTTAICLVNRDGDIIRESEVPTEPEAISQWLKATGLPLERVGLEAGGLTPWLCHELLAANWPAICIETRHAKAAMKAQQVKTDRNDARGLAHIMRTGWFKEVHVKSHVSQKLRVLLGNRRCLLDKRLDIDSHIRGTLKVFGHKTGKVTPGKYEQRIRELVQDDQELQAYVFPMLEVRRHLIQQCNVLEKMILDCVKKDEICGLFMTIPGVGPLTALAFKTFVDRPERFRHSKAVGPAVGLTPGKYASGEVDYDGHITKCGDAFLRSHLFEAAKTMLSRTCKPNSLKSWGLRLAKRSSKKKATVAVARRLAVIMHAMWRDGTVFEMNEEAAAAMAA

SEQ ID NO: 390672 - protein, 312 aa, unidentified
MEAKFVGIDVSKATLDVDCLPVITPLQFSNDASGIAGLVKWLVGSGVERIVLEATGGYEVAAASALAAAGLPVVVVNPKRVRDFAKAQGILAKTDRLDARVLALFAQQIAPPVRALPDAAQRDLAELLDRRHQLVVMRTQEQARMATVLPVARSDVKQHIAWLDKRIRKHEGVLLKRLRANDIWDAKVTLLDTVPGIGPVNLFTLVGRLPELGTLNRQQIAALVGVAPFNDDSGKRRGQRYIRGGRADVRCALYMATLAAKLWNPVIAQMYDRLIAKGKPFKVAMTACMRKLLTILNAILKTEKPWEDRLAT

SEQ ID NO: 390673 - protein, 319 aa, unidentified
MNATQQGGVRVGIDVSKRTLDVCLLPEGESFVLPNDQQGVDELLSRLEDSPPELVVLEATGRYERLAATSIAAAAIPVAVVNPRQARDFAKAIGRLAKTDRIDAFVLARFARAVDPSPSVIPDQEASAFQAILARRRQILSMLVAENNRLQIAPKALKKRIRAHIQWLRKELSRTDGDLDEAIEASTTFKENEALLKSVPGVGPILARTLLGEVPELGEITHKRLCALVGVAPFNRDSGQRRGKREVWGGRAPVRAALYMGALVATRHNPILKEFYERLLAAGKPKKVALVACMRKLLSILNAMMRDRVPWHLAHLRTP

SEQ ID NO: 390674 - protein, 485 aa, unidentified
MAKRKQSTFERLTSGKLNRKQRKELARRLCADDPGLEIINRHVAGIDVGNESHYVAVPPGSDPEPVREFGSWTADLVRMAEWLKSCGVETVVMQSTGVYWIAVYDILEAAGFQVCLTNARDTKNLPGRKSDVQESQWLMKLHTYGLLRNSFRPPEEIRSVRTIWRLRDRHVREAGREIQHMQKALTTMNVQLANVISDVSGWSGQAIIRAILQGERDPYKLAGMKDYRIRASEEEIARSLEGNWQEDVLFELQQAVDRYDFCHRQIAECDRRLERYLAALPSRSLPQPEESPTGVPGSAQDRGKRKNKSGGKPRKNEPKFDLQTELERVCGVNLATIDGVDVMTIQTFVSELGVDMTPWRSEDHLVSWLKLAPHRQISGGKVIKQPRSKTKNRVADALRMAASTLIHSDSYLGSRFRYLRGRLGPGKATKAMAAHLARLIYRMLTHGKVWVDHGAQEHQRRREEREKLSLQRKAAALGFRLEPAA

SEQ ID NO: 390675 - protein, 429 aa, unidentified
MNYTQNEKIEQVTDSTIVVGVDIGSQIHYARAFDNRGRELTKRVFSFHNDLEGFNSFNLWAETLKSENKKTAVLIGCEPTGHYWFAFAKYVKDHQKRLVMVNPFSVKKIKELDDNSPKKTDSKDPKTIAKLVVDGRYSIPYVPEGIYAEIKDLVYSRDRIMKQHNISANRIQRWLAIHFPEYLGLYTRFDAASGLAVLEKAPTPKDVIALGVNGIRKIWHDKKMRGKGVTEDRAKTLVEAAHNSVGLDGGIGTKSELYMLLEEHRLWTSQLEAVNKVLEEMILKVPHVEKLLAIKGVGSITIAGFIAEVGDIRRFDSPKQIQKYAGMELVENSSGKHKGRTRISKRGRRKLRKILYQVMVPLLARNREFREIYDYYVTRVKNPLKRRQAMVAVSCKLIRVFYAVLTKGMEYDRFKMMSDIHRKSDTIAA

SEQ ID NO: 390676 - protein, 350 aa, unidentified
MKKVVKQIVGIDVAQDELVCCFGKVYEDFKLELITRHTFENKQMGFVRLVEWLEPSVNKEVQLRFVMEATGVYHQSLAYFLHDKDHNVSIILPNKISNFKRTLDIKTITDKTMADAITQFGLERNLDDWQPPKGIYRILQQLTRERSQLIEEKVVIKNQLHAENAEAKPNKKSIERCIKRLALIEKQVKEIVQEIKDLVATDVEVQRIMLLVCSITGIGTLTAATVLGETNGFELIRNKRQLTSYAGLDVKEKQSGTSIKGKPCISKKGNKHLRKAMHLPALSAIKNDERFKSIFARIVGKHGIKMKAAVAVQRKLLEMIYTIYKTGVAYDKEYFKKQNEMMEIVENEKV

SEQ ID NO: 390677 - protein, 372 aa, unidentified
MQQDSAIFVGLDASKLKIAVALAEEGRQGEVRFLGDIEHTPEAVRRLVTKLAGKYRRLLFCYEAGPTGYGLQRQICALGHDCAVIAPSLIPKRPGERVKTNRRDAITLARLHRAGELTAIWVPDPGHEAVRDLVRAREAAMEDLREKRQHLQSFLLRHGRVFTGRKPWTRAHARWLAELAFEHPAQHLVLHEYRQAIEDAQARLERLTRQVTEVLSSWSMAPVVEAYQALRGVALLTAVTFVAEIGDVRRFATPRQLMAYLGLVPCEHSTGDRVRRGSITKAGNTRARRVLIEGAWTYRFPARLSRLLQERQAGLPKIVRAIAWKAQVRLCGRYRKLMAAGKRQTVVTTAIAREMAAFLWAIGREIEPRPAV

SEQ ID NO: 390678 - protein, 485 aa, unidentified
MQRRLVGIDLGIASAHTVRVRDEAGREVCRRRCEPTVESLTAIESAALAGAATGTRLEVVIEPTGPAWLPIAVFFTARGHLVFRVSSAKAADLRRFLSRHAKSNGIDADTLARLPLIDPDGLRPLELPGAAAAALDRRVRACDRLTMAASEHKVRIKDLVRQVMPCTPLTGDLGKADLAVLERYADPRALLRLGRARLTALIVKASHNHQGAARAEQWLAAAQAAVDLYGDHPAVAFTDLAAEIATEVRLLRAIATELAAHAAERETCYRWVDPMQLARSLPGLAEVGGPAMTAVIGDAARFPTAAHFKSYLGLAPRASETGDTDRKGQPMSKAGSRLARATLIRAADWARKQDPQLARVYHQQMVERGAEHLKASCVVAARLAERLWTVMRRRMPYVICDIDGTPVTPQQAKQIIAQQWTVTEEIRRRRRSNKRRAGKAPHQVLTGHDRKDARSVRTRRPSPPESSATPSRTVKQPAVLTTDPR

SEQ ID NO: 390679 - protein, 429 aa, unidentified
MTRISVGVDVSKNRSTVCIMDQDGKVIMRPFLVWHSTEELDFLADTLKRLNGEVRVIMESTSIYQYPIALHLKERGLFISIVNAYEMKQFANIDFRGGKTDKKDSRTIASYGISYWDKLVEWQIPKDTYFNLDLLNRTYMNAKKHRQIILQELQHYIDCAMPGMDKELHSLNLSTKKDFMLDFVEKFWHRDEIVNMTEAEFTEVFTAWAKKKGYRPVEGKAAKIYAIAKSCIPYYPANPTVKTILQCIVDKLSGVNRTLVTIVTQMIEEAKKLPEYQIVREMPGVGDPLAARFFGSAGDIRRFKNSKALVAYAGIDSPPDESGDFSSTHRHITKKGSKVFRDTGYEIMMALRAQKRTWEKVRKNPDVYDYMLRKEAEGKPPKVAKIAALNKFLRIIYARIKELYDNMALAERAKTKTRSKTRAKTKVTA

SEQ ID NO: 390680 - protein, 330 aa, unidentified
MNSQILFAGVDVSSETLDIHYNLENGKELTLQVPNSPVGHKEVVQKLGTRCYVMEATGPYYLRFAFVLKASGADVRLENPLVIKRYIQMHMERNKSDKKDASWIFRYALEQKAPVWNPPTEQSLKCNAILASIDLYSRQHTQLSNQIHAFSQLPADTNEIIKGLQKTIDHIDKEMAKLELRLQQILQSWKAEQLKCLTTIPGLGKRATALLIIYTDGFTKINNHRQLIALAGLAPREYSSGSSIRGKRGICKMGNDHLRNVLYMCSMSAIKCNKACKDLYERLKAKGKRGKVALIAVCNKLLKQAFAIATKLQMYQSEYVSKKPEKLLGF

SEQ ID NO: 390681 - protein, 356 aa, unidentified
MQHTILDFINQQFFVGIDVHLKQWKVTVRSAGIELNTFSMHPAPLELITYLHKHYPGGMYHLAYEAGFCGFWIQRTFTDAGIHCIVIHPADVPSSGKEKAVKTDAIDSRKLARQLEQGNLKAIYIPSVASEQLRSLMRLRFKLVQQQTRLKNRIKGFLRVSGVEIPAQYLTNARWSGAFIAWIKSVPVATQAGKFTLENLILQLEQTRGHLATALRELHREAAAPAIAPALDAITSAPGIGFVSAMTLFTEIIDIQRFHEFEQLCSFVGLVPSLYSSGDTSYTRGMTFRHNQYLRPLLIEAAWIAVRKDPAMTLAFQQLCRSMPKNLAIIRIAKKILRRIFHLWKNQDRYVYALAA

SEQ ID NO: 390682 - protein, 310 aa, unidentified
MDGTIAGIDVSRDRLDVHLLPAGTAFSVARDADGIADLARRLAADQARLIGVEATGGFETVVAAGLAACGLPVVVLNPAQVRAFAQALGRRAKTDPIDALVIARFLEATRPEPRPLPDAQARLLADLVARRRQIIQMIVAERQRGRRADTARLKRSTERLVTALERELSEMDRELDDTVRGSPLWQAKEELLRSVPGVGAATARTLLAEMPELGTLDRRQVAALAGLAPWTRQSGRWRGRSFIAGGRAGVRSALFMAAMVAMRHNPVLKAFYERLLAAGKPKLVSIVAVARKLLTILNAMIRDNNPWQKA

SEQ ID NO: 390683 - protein, 363 aa, unidentified
MVFIVGVDAHKRSHTLVVVDATGRRCGEKTVDATDSGQQQALCWVRRKCADADITWAIEDVRSVTMRFEQFLLAAGQKCVRVPTTLMARTRHTTSRVPGKSDPIDALAAARAYLREPNLPVSRHDPVSREIKLLVDRRKVLVDQRTAAWTRILWRVHELDPERNPGALSAARHRDPLRRWLMTQAGVTAELALAELDDVERFSQEANRLERRIVRQVREIAPTLMEVPGVGGLCAARIIGEAALVDRFPNEAAFARFAGVAPAPRWSGASAGQMRRARIGNREVNAALHRVALTQIRLTDSAGRAYYDKKIAEGHSTSMALRCLKRRISRVVFLRLHADQRQRLPKVGAPETWGSHQPAEMQE

SEQ ID NO: 390684 - protein, 416 aa, unidentified
MNAVGIDVSSRKSTVAVLRPLGEVVCLPFDVSHDADGLASLAEKLKALDGETRVVMEHTGRYYEAVAKALHEAGFFVCAVNPLLIKEYGANSLRRVKTDKADAVKIARYALDNWADLRDFTPMDAIRYDLKTLNRQFQLASKQRTASANNLIALLEQSFPGIRKCFDSPVRSDGTQKWVDFAHSFWHVDCVRKQPFPAFCERYRKWCKRHAYFFKLSNAEEVYTLAKRAVVLTPKSKVVKVLVQEAANQLSSISRSVEVYRAEMDRLAAMLPEYPVVMAMYGVGKSYGPQLMAEIGDVRRFERKQALVAFAGIDPMPNQSGDKNVRSNKSSKRGSPYLRKTLFNVIRTYLQCAPQDEPVFQFLNRKRAEGKPFYVYMLAAANKFLRRYYAKLRDYFASLDTLQPVDPIPTILKATL

SEQ ID NO: 390685 - protein, 352 aa, unidentified
MEKNNKLDFGGQHIYVGMDVHKKSWSVSIHTEQFEHKTFTQPPEVEKLTYYLERTFPGATYHTVYEAGFSGFWLHDKLREKGIDCMVVNPADVPTKDKERAGKTDRVDCRKLARGLRNGEIKGIYVPPRVKVEDRTLVRTRQSMVRKQTRCKNQITSILFFYGIVIPEEGRWSRRFINWIESIRMERASGDFALKAHLEELKHLRQIIANLNKAILSLSRAEEYMADVLLLKSVPGISTLTAMILLTELADLSRFASLDKLASYAGLVPDIRSSGETEYSAGITFRRNAALRALLIESSWIAVRKDPALIMVFNKLSVRMKKTKAIVHIARKLLNRIRFVLKNRQEYVPAVV

SEQ ID NO: 390686 - protein, 428 aa, unidentified
MNETDRIRLAEFRQFKKEIRGSAEYLLVGIDVAKEKHYAFFGTATGKTLFKRLVFENNLEGFEKLLVQAEAMKVQHGLRRVVFGLEPTGNYHKPLGEHLIRCGHQVVLVSGVAAHENRKTLDGRWDSNDTRDAANVADLVSQGKCLFYEFPVGALQDLRNLLSLKRRLKRQEHGYRVRIRNHLVAKYFPELDGYFGQSEKTSLAIVRWCLDPSVIAGWGYQKFVETVSSGPRRLSQEKRLWAIWQRAVASVGCKVGPAVEVEAQVMVEGLRQIRESIQRIEEEIHEACSQFPEYEFLLSIPGFGPDVSSKVLGALGDPFRFQNGRQVLKMAGLDLSAERSGKTSERAIPVISKKGKADLRYALYQAALIASIKNRDFIVYYTNKLRGREKEPGIRTKMRVKLSAKLLIIAWTLMKKREPFNPDYLAIE

SEQ ID NO: 390687 - protein, 351 aa, unidentified
MTQISIIGLDIAKSVFQFEAQDAQGAVVRTERLSRDKLLPAIKTIPATVVAMEACATAHYWARQIRDLGHEVRLLPPAYVKPFVQRNKTDARDAHAIAVAATRPDMPRVPVKSVAQQCARGLHTARDLLVGQRTQLINALRGHLAEFGLVGARGDAGAKAVIGFVEAGHPDIPRTLLAALRVLVRHWHEKVEAIAEIEAQIKAEAKADAVAQRLMTIPFVGPMIAHATRAAIGEGQQFDSARDYAAWLGLTPRTSASGQTRRTGRISKAGDQRLRRLYVLGATAALAKAKRHPDDMDPWLAELLKRRPARVAAVALAAKLARTVWAILTTGEAYDATRRRGQAGRLRPAAA

SEQ ID NO: 390688 - protein, 318 aa, unidentified
MSSAAPAFVGIDVAKAELVITIRPSGEHWTIANDVAGIHTLVQRVRGHAPTLIVLEATGGYERAAVAALAAAQLPVVVANPRQVRDFARATGQLAKTDRIDADILALFAERVRPAPRALPDDAAQALDALLTRRRQVLEMLIAERNRLEHAVPTVRRGITQHIRWLERQLADVDRDLDDTIQASPVWRAKENLLRSTPGVGPVLSRTLIGELPELGTLPRKQIAALVGVAPLARDRGTLKHKRLVWGGRAPVRAALFMAALVGTRCNPVLRAFYRRLLEAGKPKKVALTACMRKLLTILNARMRTNTAWRHIDLSPTT

SEQ ID NO: 390689 - protein, 342 aa, unidentified
MAIAVVGLDLAKHVFQVHAVDETGRAVLRRQLRRAGVEAFFKTLPPCLVGIEACASAHYWARRITALGHEVRLIAPAKVKPYVQHGRKNDANDAAAIVEALMRPHMVFVPIKNEEQQAVLMLHRTRDLLVRQRTMLVNAIRAHLAEFGIVAAQGRRKVKDLITGLDNTEIPELARLALWQIADQIDECDKHIDALERRILAWHKSDEASCNLATIPGIGAITASAMAATVPNPSAFRNGRQLAAWLGLVPRQNSSGGKDRLSGITKTGNAYIRRLLVIGATSVIRFARSKAPGTAEWLKKLLERKSARLASVALANKMARIAWSVLTRGEVYRDIYPVPKPT

SEQ ID NO: 390690 - protein, 313 aa, unidentified
MHYIGIDMSKDTFHAAFDDVEVKIFANTIQGISKFIKILTERGCTKNNTVIGTEATGVYHLLLCERLSSEGWNVKVINPLITNRMFKSNLRHAKTDKNDAVAIRTTLQTGAGYTYADTPEILALKSLVQEREALCRMRAETRQRIHAHKIRETASGLELHDSFSGSIKIFTYEMKQIEKKMEEYARDTQKLLRSIPGIGKVTAAALVAYIGDIKRFSSPEKLVAYIGLDCRVHESGTSIHGKGYLTKRGNRYLRYVLFNAAFIAQRRNLDLRKYMVKKLAEGKHHFSVLCAIERKLVHIIYAVWTRGTPFEAR

SEQ ID NO: 390691 - protein, 307 aa, unidentified
MTAVGIDVGKANLDVAVDDRPGVTRYANSRAGLGKLVKWLLRLESPRIVLEATGGYDEPVLEACCDAGLWVARVNPRQARNFAKATGELAKTDAIDARLLALMARLLADRLRPHVPPLPWQRELRDWLRRRSQVVIAVQAHKQQAAMAPAAVRALTSRTIAALQRELAAVERAIRALIEQHATPALRSSKGLGPVFQASMLALLPELGELDRRQIAKLVGVAPMNRDSGQGQGKRRIHGGRAPVRVALYMATLSAVRWDPTMKAHYQQLRARGKLGKVALVACMRKLLGIVNARRREELRSEGLIMA

SEQ ID NO: 390692 - protein, 421 aa, unidentified
MPNIEIGVDSMVKENFIYVGIDLHKETHTAVMIDCYNQKLGEITFPNRPADFPKLVTKVKKCNTDAKEVVYGLENAYGYGRPLAVWLIDKGYFVKDVNTAISHRQAKHRGAMYRKSDSDDAEAIALATLNMLDKLPDACPNDAYWSLGQLVHRRDNIMKQRTRLVNQLHEQLCIAYPSYKSFFNDISRPTALYFWEHYPSRKYLRGKSVEDLRKELVPVSHNRCSTKNCEKILDAAASDKVKNNAYQDARDMVTLSIVSDLQHYDSQLAEVDKMLEQMYKMLGCTLTTIPGVNVITAVKILAEIGDIKRFSNANKLAQFAGIAPLHLSSSGKGKDVATKQGNRRLQATIYFLAIQMVQVSSKGTPRNSVVRAYYEKRKAEGKTSQQALICISRRLISIIYGMLKHGTEYRMPVVENAGEKL

SEQ ID NO: 390693 - protein, 379 aa, unidentified
MNGPIYEQSVIVGVDAHKYSHTAAAMDAWGQEKGRLNFTNDSLPDCLSWLKTLGRREDVIVAVEDANSYGCHLVAALAGQKFAVRSVPAVLTERDRRHSTQRDKSDFRDAKRVAKVILSKYEETLPVIASLATSAELAIATELNLLLNERRDVVKECTAIKNQLHSLLHQYYGDHYADEFSKAFNKQAMIFYQANLAQAISVNSLSASKAGKALIAESILRRIQRLKLLQEQSAVILKQITKIGETSKPVVALHENIHGCGLLTAGAIMAELVTIRRFGGRDKLAKYAGIAPTLKSSGSHHRLYTNPFGNRLLNKALHTIALSQIAIKGDDRGKIYYRKKLKEGKTKLWALRCLKRRLINLVFRILKQTEVGSAETAIS

SEQ ID NO: 390694 - protein, 313 aa, unidentified
MSTHNFVVGIDVSKTHLDVALGSTGPLFQVPYTQEGLHTLASRLQGATLVVLEATGGLETRLLHFLTQAGFPVARVNPRRVREFANATGTLAKTDRIDARILAWYGEALCPPVTPVPDENRQRLEALITRRRQLVEMRVAEENRLAAAPEVIRPSIQQHLEWLEEQISALDEEIRQLLQNDPDWAEKVEILQSVPGIGMVTAATLVAELPVLGQASPKEIAALAGVAPMNRDSGRRTGKRHITGGRSSARRVLYMATVAAIRCNSVIRAFYLRLLAAGKEKKVALVACMRKLLTILNALLRKRQRWNPAAATY

SEQ ID NO: 390695 - protein, 406 aa, unidentified
MAVMIGVDPHKASHTAVAIDRAEQVLGELRVRSSGDQCQRLMSWAARWPERTWAIEGAGGLGYLLAQQLVAAGGTVLDVQPKLGSRVRLLATGNVNKNDPNDARSVAVAALRYKDLAQVAREDQAAVMKLWSKRRRDLSSLRTQVVCRLHALLCDLVPGGMPGKEVSAAQAARALEAVAPAGAVGQARYELALDFLADLRRIDTQMKETKKRLETAVKASGTTLTEVFGVGPYVAATVIGYVGDVARFADRDRSASYNGTAPIEVSSGGHKVFRLSRRGNRKLNHALHMAAVTQVAHRHSDGRAYYERKLKEGKTPKEALRCLKRRISDAIFAHLVADAKRKAGAAKMGPGGQRGNGSVSSAAGSNPQHRHFGQATPEPVPTIGLGATSRRPRARLTERKKSQKAS

SEQ ID NO: 390696 - protein, 352 aa, unidentified
MKKIVKQVAGIDVAQKELVVCLGRMYDDWSVHLYAHKRFCNTQKGFAALLEWVKKMTEQQSAIRFVMEATGVYHESLAYYLEEQGFELSIVLPNKISNYFRTLDVKTLTDKTASEAIAQFGLERKLDCWHRPKGIYKKLRQLTRERDQVVQERTVAKNQLHAEQAEAEPHKKSIVRIGQRIALLDKQDQEIQKELAVLIRENNEMQALVLIICSLPGVGLLTAAIVLGETNGFEFMRNKRQLSSYAGFDVKEKQSGTSVKGKPRISKRGNKYLRKAMHLPALAAIRHDERFKAVFSRLVSKHGIKMKAAVAVQRKLLEMIFTLATAKVKYDKNYLLQKVQTKNKGDENNKAA

SEQ ID NO: 390697 - protein, 367 aa, unidentified
MSKAETGRLCVGVDLHKTQFTICALNEDGEYLLEKQYPTKEEGYSEFAREMHRFEEQGCSIELAVETTGNARFFKNRMESEFFAVKVVNTNRFKVITMSTKKTDANDAATLAYYLMKDMLPEAHLCSQTSEEIRRLLKTRSVLVQSMVKIKNQIHGMMLGYGIETKAAQLQSKRKRQELINDLEDHNFSAYTAPSLKVMLKILDDLSAEIKGIEKLLEEMVASNEDVALLMTVPGIGINTATVIAAYTAELERFEGNYKKFASYVGIIPSVHNSNETTHYGRITKHGPQELRTAFVQAALGMIRLTNVSSEWRIIKDYQRRKGDKGSGRAIIALARKITRIVFVMLSKREGFKPELMRCEEAIQQTA

SEQ ID NO: 390698 - protein, 410 aa, unidentified
MEVILSCCAGLDVHKDSVEACVRRTSAGGKVEHEVRHWGTTTRELVEMSDWLSSLRVTHVAMESTGVYWKPIFNILEEHFEILLANAHHLKNVPGRKTDIRDCQWIAQLLQHGLLKGSFIPPRPQRELRDLTRQRTQLVDEASRISNRIQKVLEDANVKLGSVASNVVGASGRLMLEAIVSGQDDPAQLADLAKRRLRAKIPQLEQALYGKLTEHHRWMLGLLLDQLKSTEQFIARLDERIAELTRPQQPVLEKLDAIPGVDRRVAEVLLAEIGPDVTPFPTDAHLASWAGICPGNNESAGKKRSGKTTKGSRWLRQALVQAAWAASHKKNSYFQAHARNLMHRRGRKRGLVAVAHSLLTVIYHMLKDGTVYRDLGPQFLDRLRATHLIRFHVRRLQHLGMEVSVTPAEA

SEQ ID NO: 390699 - protein, 353 aa, unidentified
MVVIGIDPHKRSHTAVTVDEAGRKLGQLTVNADDEGFLRLWAWAGRYGAARDCSVRWAVEDGRGVAGRLVRALIGQGAAVVWVPPKLMAQCRASARTRGKSDPIDALAIARAAIREPGLPAVQLDETAAELRLLSDRREHLVASRTELINQLRWRLHDLNPALDTGAPRLTGPQTLTKLASALAVLPASVSRDIAADLVADITRLGEQIRHLEHRLHLLVTPLAPTLLAIVGISTITAAKIIGEVAGITRFRSSAAFAMHTGTAPIPVWSSGKPQYRLNRSGNRQLNTALHRIAITQLAHHQPARDYRDRWRTHHPHATAKAAIRALKRQLSNVVYRALTTDHQQQQQLSQTA

SEQ ID NO: 390700 - protein, 415 aa, unidentified
MAMKKNFILFDQVVERGAGMDVHKETIVVTIQGKGIKTETKSFRTFTSSLKKLREWLKQHGITHLAMESTGVYWKPVFNVLGDDFMIILVNARHVKNVPGHKTDKQDSKWLAKLLLSGLLKGSFIPGKEIRDLRDLVRTKTQLTGEISSAKNRFIKFMESANIKLSSVLTDVFCVTGQKIIAEILDGDYKPERLLHHVHGRVKASRQDIIEALTGNLDEHYRFMMKTMLEHIANIENVIAKIDAQIMQKTEDHKEILELLETIPGVGRDGAICIVAEIGTNMEAFASHKHLASWAGMCPGNNESAGKNKSGRITYGNAFLRTFLVQMAWAAARTKNTYLSSKYKSLVGRRGKKRAVIAVGHKILIAAYFIMKNKVGYNELGEEYLNNFRRDKLINYYKNQLQKLDPNVNFDKEVA

SEQ ID NO: 390701 - protein, 338 aa, unidentified
MELYAGIDLHSNNSVLIVLDEQDRTVYAKRLPNDLGAIVSALRACAGAVRGVAVESTYNWYWLVDGLQAEGFTVHLVNTAAVKQYDGLKHSGDFSDARHLAHLLRLGILPVGYIYPREERALRDLLRKRRQLVRQRSAQILSIENLMARNLGTRASANEIKRWDAKNIDGMDLLDEQKQALKANLAVMKCIDGQVDELERSILIKVKLREDYAALKTVSGIGEILAVTIALETGDIGRFAGPGNFASYARMVDSRRESNGKKKGEGNVKCGNKYLAWAFIEASHFAVRYDATIKRWYQKKCASSISVVAIKAVAHKLARACYHVIKDGTPFDAAKAFG

SEQ ID NO: 390702 - protein, 339 aa, unidentified
MLIIGCDFHPGFQQVAIFDKETGEVSERRLLHRAEAQKFYGSLRGQAVRVGMEACGHYPWFERLLEQLGMELWIGDAARIRAMEVRKQKTDRRDAAQLLQLLMEKRFPRIWVPSLEERDVRQLLVHRHQQVQARTRIKNRLQALMLGQGVQKKRKLWTAAGRAELEKLELLPYAAVRRERLLAALDQMEVEIAELNRQVEEEVKRRPAAMRLRTHPGVGPVTALAMVLTLGPAERFGSAKQVGSYFGLIPSEHSSGGRQQLGRISKQGNSFLRFLLVEAGQTAARYDVELGRFYRRLAVRKHRALAKVAVARKLAMRLYLMLREDWDYAQLCKAVCRQA

SEQ ID NO: 390703 - protein, 341 aa, unidentified
MEQATTIGLDIAKHVFQVHGADAAGHVLFRKRITRGKLLGFLAAQAPCVVAMEACAGAHYWAREIGKLGHHVRLIAPAYVKPFIRRQKNDAADAEAICEAAQRPSMRFVPVKTEEQQANGIVFRARDLLVRQRTQCVNALRGHLMEYGHVFPKGITHVETLVAVVEDPRSSLPDSVRVILKLLVDTFTALEAQITALDAEINQRSKSDPTARRLMTIPGVGPIASTAITALVPAAEGFPAGRDFAAWLGLTPLQKSTGGKQKLGAVSKRGERTIRRLLIIGASAVVQQASRRGAPKGSWLAQMLARKPKMLVTVALANKMARIVWALLVKGGTYRTPTAAA

SEQ ID NO: 390704 - protein, 346 aa, unidentified
MEYIALDVHKKYSWARVENPQGERLYECRLAHAHGTIKNFVHRWSEGSPVAVETVGNWYWVVDEIEAGGGKPQLVNARLAKLMMGSVNKSDKLDAKGMNRLQRTGTLPTVWIPGASVRDARELPRTRMVLSRQRTQLKNRVHATLGKYGFTVEGASDAFGKKGRKIVEELLPKLPPHTEQALRRILDQLDHVADNLKEIEAQMMEAFAPCPQTQWLKTLPGVGDILAVVIWTEIGTIERFGRGEQLASYCGLVAREHSSGGKFRYGPVRRDVNVYLKWAFVEAANSSVLNRERCQYNHISQLYQRIKARRGHGKAKVAVARHLSEASFWMLKKGEPYREPLSSTQR

SEQ ID NO: 390705 - protein, 366 aa, unidentified
MREQQNNKRDRATIGVDLGDRWHRFCVLGGSGRVVEEGSVANNRVALSELSSRYPGALVVMEAGCHSPWVSRHLEQGGCEVIVSNPRKTRAIYQHERKSDRRDALMLARIARMEPALLYPVRHGSEEAQQDLLRIKLRDSLVRARVGLINSLRFMLKSLGYTIANPSTERFHKVVQSALPESVAQMIAPSVQAIEELSLRIKLLDREIRTLARTKYPETIWLEQIPGVGPITALYFVLKIGDTARFERVRDVGAFIGLCPRRDQSGENDPQLRISKRGDAYLRRLLVSSAQYILGLFAPPSALRQYGLALAAGATARAKKRAVVAVARKLAVLLLTLWKNKSPYQAFPQQREKMRTHDLERLRCIA

SEQ ID NO: 390706 - protein, 421 aa, unidentified
MRSIGLDVHRDFCEVAIAEAGAVRSAGRIATRPEVLELFAASLGADDRVVLEVCGNAWEIARIIEPHVARVVVVSPSDTGIRHARAKTDRLDARTLAKLLAAGSLDSVWMPDERTRVMRRRLARRDQLVTARTRAKNEIHAILIRRLKGRPEVSDLFGKAGRAWLAELELPVEERETLDSGLRQIDFLDGEIALVDRLVAHDALNWPEARRLMTVPGVNVIAATTFLAAVGNIERFPDRRKLVAYLGLDPKVRQSGDAPAGYGHISKQGAAPVRRALVEASWSAVRQPGPLHAFYQRIRARRGHQVAITAAARKLACLFWVLLWRQQDYAFGQPSLTAKKIRRLEITAGAPRWQDRKGVWIAHRLLREAELDLARQAEHAYTQTVRDRQAAGAIKAGASATPGRASQKPSKGKAARQTTSP

SEQ ID NO: 390707 - protein, 450 aa, unidentified
MSNGNGVSRGDRNRNARLDRLRALVPVTNAIVGIDLADKKQMVVVCDHDSKVLARRTYRCRAWDLGTALDWAHERAAAKGFAGMTVSCEPTGHRWRVLAQLAADRSMPFVCVQPAVSSWSRRAEDLTHDKTDEKDAVLIARLTAQLRCYEPEPVDETWGRLRHLGARREQLITEISGQIQQMRDLLECVWPAALECAQQPFRSRTWIAALTVIVDRDGGEFDRTRRLGLARFERAVLREISKRGGQKPCRRITRGVFAALSDLAGVIAHRAGALERVQLLVEDWQHAHDRLTDTETRMIGVLDELELTVLVTSITGISAVGAAAILAQTGDPRRFTTARALVKHAGLAPREKLSGTFTGRTKLTGQGRPGLRLAAWRAVWGAQRANPVYGARYRHLTTREHNRLKPTQAQTVIAAAILRHLHAVITTGQAWDPSIATHGTRSAIRTTAAA

SEQ ID NO: 390708 - protein, 416 aa, unidentified
MAEHEQETISWFAGVDWGSERHQVCLLDARGTTVGEREFPHSGEGLAELGDWLLSMASAASTVAVAIEVPHGPVVDALIDRGFVVYAINPKQLDRLRDRFSVAGAKDDRRDAYVQADGLRTDRRLFRRLQVADPRLIELRAWSRLAEELQAERVRLSNRVRHQLWRYYPQMQKLTNDLAAPWFLELWTIASTPAKAGRLRKSTVERLLKQYRIRRIDAETVLRILREPAIKVAEGVAEAASIHMRSLVARLRIVNRELREAERKLDELCTAVSEIEQTSGESLQRRDVAILRSMPGIGRINLATLLSEASGPLSRRDYEGLRTLSGAAPVTKRSGKSLIVVRRYAAHVRLRDTVYHWARVATQRDPKCRARYTALRKRGHSHGRALRSVADRLLALACVLLQRQTLFDPHFGRPAT

SEQ ID NO: 390709 - protein, 340 aa, unidentified
MKLYTAFDLHANNSYAAIIDQEGHKVAGKKLNNDPLEVLSFLKPHRKSIIGIVVESTFNWYWLVDSLMDKGYKVHLANTTAIQKYNGLKHSGDKEDAFWLAELLRLDILPEGHIYPKEERPIRDLLRKRSHLVRLRTSLILSLQNIIDRNCGTRINVKAIKKRKEDMVAPFFEGNDDLSLTGKVSKEAIDFFTTKILTVENFVEDKLELKKPYQYLLSVPGIGKILGLTIMLETGPVERFEKVGNYVSYCRKVSTRWTSNDKTKGKGNKKNGNKYLAWAFSEAAEFARRYDEKARAYYNRKMQKTNFMVAHNALAHKLARAAYHIMKDQVPFMPDKLFTS

SEQ ID NO: 390710 - protein, 452 aa, unidentified
MAKRAQKQCEQLPILHPHAAGIDVGASELFVAVSADRDPQPVRSFPTFPRDLNALADWLQQCGIRSVAMESTSVYWIPAYQILESRGIEVCLVNAQHVKNVPGRKTDVSDCQWLQYLHSVGLLRASSRPPGFICAMRSLWRHRSSLIQMAAEHVLHMQKALDQMNLQIHRVLSNITGLSGLRILDAILAGERDPVTLARLCHGGVKSSEDTVAKSLEGDYRPEHLFALRQSLAAFHYYQQLVVEVDREIQVQLGGLGTEATAEPTVPKRTKASAYQRPRYEPKTFDLRSELYRVFGVDLTNVPGISSITAHTLLCEIGTDVSRFRNASAFASWLGLCPENKISGGKVLYTKSRRVRSRVATALRMAATSLHHAKDYLGEFFRRITRKLGKPQAITATAHKLARILYHLLSTKEAYNETVFHRCDEEVLRRAQFRLRRQAAQFGFQVIPLQNG

SEQ ID NO: 390711 - protein, 427 aa, unidentified
MSYRIAGVDVHKRMLAVVVADVAVAGRYQFTRRRVGTSPRELRELAAWLVAEEVEEVVMESTAQYWRPVWEVLERWWHPRRPARVDPPPRGRALHLAQAQSNRGRRGRKRDFPDAERLVKRLVADELTLSFVPDADQRLWRTVTHRKAQLTSNRVQVHNRLEALLEEAHLKLSSLVSDLLGLSARRMLRAVANGETDPAAVAGLAHRRLRATPDQLSDALGACATLHPVYRRLLAMTLDELCALDEQIAQLDRELAQLLAPHQLAVERLAEVPGLGVNSAQQVIAEVGPRAATFPSAGELSSWVGACPGNEESAGVNYSHRTPNGNRQMRRILHQAANAAVKTQGSIFQLLYRRFVPRLGHAQAIGVVAHRLCRLIWKILHQGVRYEERGPEVSRVRQHRRAAQMIRDLRRLGYRVEPVLAQPGSPA

SEQ ID NO: 390712 - protein, 343 aa, unidentified
MDQITRVFIDTSKSVFQLHGVDGAERVVVRRKLRRGEMIGFFTGLAPTVIGLEACGASHHWARVLAGLGHEVKLVAPQHVKPYVKRSKNDARDAEAGCEAMSRPTMGFVPVKTADEQAALMLMGVRDQLVRGRTRLTNAIRGHAAEFGLVAATGLDKIEPLLARIAADESLPGLARELFATQARELEQLGERLGQIEARLVAWHRASPASRRLAQIPGVGPIGAALLVMKTPDPRGFASARHFAAWIGLTPKDHSTAGKQRLGVITRAGDEALRATLVAGAMAVIQQALRRPDRASPWLVELLRRKAAKEAAVALANKIARIAWKLMVTGEDYAPGRKPAQPA

SEQ ID NO: 390713 - protein, 339 aa, unidentified
MQVTTVGIDLAKHVFQVHGITEDGEVVFNRAIRRAQLMQFFTNLEPCLIGMEACGSSHYWARELSKLGHDVRLIPANYVKPYVKRGKSDANDAEAICEAVTRPTMRFVAPKSEEQQAVLFLHRARDLIVRQRTQLSNMLRSLLAEFGVIIPQGTGAAVKYAKGVLEGGNPALPQIAIDVLRQLSHQLVAMHLRFRWYEMRMRLHSKLDKRVMLLRTIPGVGPVTASAIVATVGDAKQFKNGRQFAAWLGLTPLNLSSGGKERLGRITKMGDRYIRRLLVTGMTARLRQMQVNPDRVDPWAIGLLERKPARLATVAMANKTARIVWAVLTKNEYYRPHTA

SEQ ID NO: 390714 - protein, 325 aa, unidentified
MGTSPHQQGWDTKMEKLSYGGIDVSKDRLDVVVLPEERFFSVSNDAAGWAELVARIRPLAVSAIGIEPSGGYERGIIRALLAAGLSVRRINPNKLRQFARARGVLAKNDRLDARLIAEYVAIMPTRAVQRDAAVERLAEIVTMRRQLCDEHVAAENQAAHLEDAMLRRLSKRRQTRLEADVRLLDKRLAEMVAANVALAQRYELLTSMPGVGPVLAFTLIALLPELGKMSRKQIAALVGLAPYDFDSGKLRGHRSIYGGRMPVRNVLYMAALSGCRYNPALKAFHKRLAAADKKSKVVIVAVMRKMITTLNAMLRDNVEWQPKSA

SEQ ID NO: 390715 - protein, 358 aa, unidentified
METTNLRQKVDFSDKNIFVGIDVHQKSWNVSIFLDRTFIRSFTQQPSIDAIAQLLKRDYPGANYLCGYESGYSGFWIQRKLNQHSIPCQVLHAADIPQTAKQKLMKRDPVDSKKIGEALSSQNASPIYVPDEKSERDRSLIRYRERLLKDLTRCKNRIRSILNQFGIDLPNKFSKGWSNIFIHWLKETDQVQDSARITLNHMIEQVILIRSMLLKVNRDIRVLQNSEKYKQQMQWLVSIPGIGPLTAITLLTELIDIRRFSSFRQLNSFVGLYPMEHSTGDDEHKGSIMIRHNKHLRKILVEDSWIAIRHDPALTLTFNQLTLRITSKRAIVKIARKLLSRIRYVLINETIYTNGIMK

SEQ ID NO: 390716 - protein, 331 aa, unidentified
MFQVYSVNRETGEVLNKQIKRAKFLEYFVNKPACLIGMEACGGSQHWARALQAMGHEVRMMAGKAVKAFVSGNKNDAADARAIWLAVQQPGVRAVAVKSETQQAVLALHRMRQQLVKFRTMQSNGLRGLLGEYGEVMPVGRAALNRGMKDALARLAERLPTLLIDTLREQWDMLARLDQQILQIEQRLLAWMRQDRASKAIAEIPGVGLLTATAAVATMGDANAFRSGREFAAWLGLVPAQTGTGGKVRLLGISKRGDTYLRTLLTHGARSVLMHTKEPGKWLQDIGKRRPPNVVVVALANKMARTIWALLAHDRKYDREHVPWARNPPGE

SEQ ID NO: 390717 - protein, 361 aa, unidentified
MSGTMTYVGFDVHARSTHAAAIDVMTGELTRMRFGPGVDAPVEWLQTLSWPVRACYEAGPTGYGLYRAAIAVGVGMQVIAPGLTPRGKSDRVKTDRKDAELLARCLIAGSLHPVKVPAPAVEAGRELTRAHDACRRDLMNARHRVSKMLLRHGRVYPEPSTWTQAHRRWLSAQQFPEPMSAFTFADLIATVDGLTARKKMLAEQIGVLATDPAWWPTVARLRAFRGVDTLTALAVHLELGADWARFEKPTRVGSWLGLTPSRSQSGESDRHGQITKTGSTLARRLLVESAWHYAREPRIGATLQNRQAGQPDHILQISNRAQQRLYHLYTTMKARGKHHNVTTVAVARELSCFLWAAATAP

SEQ ID NO: 390718 - protein, 420 aa, unidentified
MSRPAAPTNLLPDRPPGDVTAGLDWATTDHAVVIVDHTGTAIEQFVVGADGAGLRELVLRLHRAQVEEIAIERSDGLVIDTLVAAGLTVVVIAPNQLNNLRGRYRTTGNKDDRFDAYVLADTLRTDRARLRPLIPDTPATVLLRSTVRARKDLITHRVGLANQLRAHLQTFHPGPVGLFSDLDGLTSLRFLTQFPAQDDADWLTPSRMGTWLRHNNYTGRKDPADLHAHLRATPRGATGPAGAAAAGVTRAFVAALLAIGEQIRALDHQIAALLNQHVDAHIFRSLPRAQTLRAARLIAEIGDCRARFPTAESLASLAGCTPSTRQSGKVRITSFRWAANRQLRDAVCDFAADSRHANPWAAHVYRQAIDRGHRHPHAVRILARAWLLVIWRCWQDHEPYDPARHRAYRTVLENQAALPA

SEQ ID NO: 390719 - protein, 400 aa, unidentified
MHYLGIDWATDKHDLCLLANDGRILSQFVVTHDLAGFATLQDHLKTLPDVRINIERSDGLLVDWLVQQGYNLYITPPHILAHRRPTRVKDDKGDAYLLAYLLRLDDRDCRPYSIQSHTVVHLRQLVRAYDHALKEQRRLSNQLVYSLRQYYPTALNLFTRIYTLIALAFLERHPTPQAAQALSREELEQFLRGQRYAYPQRIDTIYRQLQTPMPLASVQDGHVEYVKLLIPLLRMVFHHKNALIRQIQTLFRSHPEANWWLRFPGMTGPLTPARMLAWIGDDRSRFPTAEALQAIAGTAPVTRRSGKSKAVEFRTACSHTLRAAVDDLARQSMRHSGWARAYFQQQLDKGHSVPRAYRALGNRWLKIIWTLWQSGEVYDELKHVANRSRKGAALPLAQAV

SEQ ID NO: 390720 - protein, 408 aa, unidentified
MNAVGIDVSKGKSMVAALRPMGEVALLPQEFLHTGVGLEQMAYAILALGEDTRVVMEATGRYHEPVAAALHEYGIYVCVLNPLYIKQSGGGSIRKVKTDKADAMKIAKYGLDNWVDLREYTPMDTVRQQLKLCSRQYNLYMKTVVSLQNNLISLTDKTFPGVNVLFSSPERADGHQKWVDFVMTFWHCDCICRVSEKAFIERYQKWCKRKGYHFSEEKALDIYTGSCGHFTTLPKNDNTKLLITTAAQQLLAGKTTLAALRAEMTRLASQIPEYETVRAMYGVGETTAAQLMAEIGDVRRFPRRSSIVGFAGVDPAVDQSGKHETQSTSTTKRGSPHLRKTLYQIVCTYLRKAPTDEPVYQFLYKKRAEGKPYFVYMTAAQNKFLRIYYARVKECLEAFDAQQGTSQG

SEQ ID NO: 390721 - protein, 339 aa, unidentified
MHIKTIGLDLAKSVFQAHGIDEAGDAVLVKKLHRKQMIPFFSKLPPCLTGVEACATAHHWARTLSAMGHDVRIMPPSYVKGYVKRGKSDAIDAEAICEAVGRPTMRFVPMKTVEQQSILMAHRTRALIVRQRTMAANALRAHLAEFGLVANPGIANLVKVADKAFADATLPPYAHRALEILIRRMAELTDEICALDQELKAWHASNEASRRLAAIPGIGVITATALAATVTDPDQFSSGRQFAAWLGLTPKQHSTGGKTRLGGISKQGDRYLRRLLVVGATAVMRHAKRNPTPMTDWVNNLLEKKPFRLVSVALANKLARIAWVVLTRGETYRPYGLAA

SEQ ID NO: 390722 - protein, 347 aa, unidentified
MLHAGLDLSRRKVDVCLLSDQGEHLDQLVVPPDAGSLRTLARRIEDVHAQPVCAVIESMTGARIVHDTLEAEGWAVEIADAQKVKGLAPLACKTDKIDSMVLAVLSHRDLVPAIWLPDPSVREERELARFRLHLVKHRSMLKHRIHSTLINFGRPCPVTDLFGVEGRKLLERLDVPEPWRGNVLGAVKLIDDLSEQIDETNHRLRTGHADHPYIPLLRSAPGIGWVLAFTIAAEIGEIERFASPDKLTGYTGLCPRVVQSGDSDRRGPLSKHGPRYLRWALLEATMHALRHPAYAERYQRNKRRLGKQRGAKVAQIDIARRLCHAIWHMLSRSEEFAPRGAAFRLAA

SEQ ID NO: 390723 - protein, 427 aa, unidentified
MKKADLLSTLFIGIDVSSKENVVCFLEFTSQKPVLSFAVTNNQPGAIELSNRIADFMRQRTDLKSVTVALESTSYYGIHIANYLSSSVSLIPFNISVYCINPMLVHGYKKTFVGMSKNDYVDAFAIADFARVGKITSSPWRGSQFLALQRLTRHRLHLAKALTSEKTYMLSNIFLKFSELPLLEKDAQPFSNNYGSTATSVLTDFLSTDEIADMPLQGLVDFIVEKGKNRFTDPLKTAELLQKAARDSYRLDKCLYEPLTIALASSFNVIKAYSKELKIINSAIEQTIKGLDPNSYTVLLSVPGIGPVYAAGIIAELGSIDCFKSQDALAKYAGLTWRESQSGKFRADETSMTKAGNIYLRYYLLEATTHLIWHDAEYNSYYQKKFNEVRLHQHKRALVLTARKFVRLIFGLLAKNQLYSQSREPLT

SEQ ID NO: 390724 - protein, 345 aa, unidentified
MEQITRIGMDTSKHIFQLHGVTAAEEPALRKKLRRKGMVTFFQQLAPTVIAIEACGASHHWARLLQSFGHSVKLIAPQLVKPYVKRGKNDAADAEALCEAASRPTMRFVPVKTAEQQAALMLVGVRDRLIRNRTQLANAIRGYAAEFGLTAAKGSAHLKPLLARLQGDESLPALARELFAAQAKEYAQLREQIDEIDTKLMAWHRADECSRRLAKIPGVGPIGAVLLSMKTPEPELFRSGRQFAAWIGLTPRDHSTAGKIRLGVITRAGDEGLRSVLVVGATAVIQHVRRGGRSSPWLIELLKRKPPKLAAVALANKMARIAWKLMVTGDNYAAKSAPATLVGTA

SEQ ID NO: 390725 - protein, 373 aa, unidentified
MPRYSTAFGMDVHLRSTTVCALDAETGEAVTRRFRGNPWGEVAEWMSGFPGPSLAAYESGYLGFAPQRELSGLGVDCVVAAVSKVPRSAADLSSKNDRNDAARMAKAILSHDVTPVWVPSPEIEGLRDLAAAHDAATARLAAAKQRLLAFLARRGYVYGGTTPAGNPRKYWTHGFLRWLDGIHPADDGGIRALAAPRNEVEAADETREALLAEYRAAVAAGPLSAEVEALQSIKGCGFALAAAFASEVGDFSRFRSGRQVTAYFGLAPKQRSSADSVRLGGISGAGNALVRKLAVEGSWCYAQAGHQPKLMPKGSGVPLEIRMHGRKGSERLLRRREEMIARGMPQAKANAATAAELVRWLWALGTMCREGAE

SEQ ID NO: 390726 - protein, 354 aa, unidentified
MIIIGCDFHTRYQQIAMAREETGEVLLERRLDHESGEAQAFYRSLRSSQEPVRVGIEATGPIHWFERLLAELGHELRIGDSAKIRASEVRKQKTDERDARLILDLMLANRFPKIWVPTPAERDLRQLLWHRHKLVCLRTMLGNQLHFLAMSQGLCRKKKLFTKKGRVELTGLALGPWTRRRREELLKLLDQLDPAITELDRAVLEEAQRRCDAVLLMTHPGIGPVTSLAFVLAIGPVTRFSRSRKIASYLGLNPSEDSSGQRRRTGAISKQGNTMVRWLLIEAVYPAVRQDLALRQDYQRLKFRRGHAVAKVAIARKLAVPKYWMLRSGAAYAQLVRRQGSPGATLMEATPSLG

SEQ ID NO: 390727 - protein, 344 aa, unidentified
MGEVSTIGVDIAKSVFQVHGVDDAGEVVIRKRVGRTKMLEFFAGLPECLIGIEACPAAHHWARELQSLGHTVKLMPPSYVKAYLKRSKNDANDAAAICEAVTRPSMRFVAIKTREQQAALMLHRARQLLVRQRTMLSNAIRGHLSELGIVSAKGRNGTGELLEIIADGADSRIPTAARGVLKVLAAQYCALGTEIGSISKSILAWHRSCEPSRRLEEIPGIGPIVATALVAEIGDWKAFSSGRGLAAWIGLVPKQHTTGGKDKLGSITKQGNRYLRWLLVAGAMAVIRYAQKRGTKKHPWLGRLMARRPTKVAAVALANKIARMAWAIMVRSERYKEPALLLAA

SEQ ID NO: 390728 - protein, 403 aa, unidentified
MNNVAGIDVSKGKSMVSVLRPFGEVVAKPFSIGHTGSELKELADYLKSLDGETRVVMEHTGRYYEPVARFLHDEGVFVSAVNPKLIKDYGNNTLRKVKTDKADSRKIARYGIDNWAELRQHTPMDTIRMQLKTLNRQQSLYSKTKTMMKNNLIALLDQTYPGVNALFDSPVREDGSQKWVDFATTFWHVDCVRNMSLTAFAERYRKWCKRHGYNFSQSKAVEVHAGAQDLIAMLPRDALTKTMVRQAIDALNAISASLERLKAEMQALAAQLPEYPVVMTMHGVGDSLGPQLMAELGDVTRFTHRNAITAFAGVDPGADQSGTHEAKSTRVSKSGPPELRRALFLVMDCLLKTQPQDDPVYRFMDKKRAEGKPYLVYMTAGANKFLRIYYGRVKEYLASLEEN

SEQ ID NO: 390729 - protein, 410 aa, unidentified
MEVLYPHCAGLDVHKETVVACVRHMVDGKVTREVRTFKTMTRDLLALSEWMSQEGCTHVVMEATGIYWKPVWHILSDGEFKLTLANAAHVKAVPGRKTDVNDATWLADLMAHGLIQGSFVPPVQTQEQRALLRTRKQLVRERGSHVQRLQKTLEDANIKLESVISDVTGVTGRAIIAALIEGETDPDKLAALAHRRIRSAPETLREALLGRVTKHHRFLLRLHLQQIDVLDATLAEIDQEVDAYVEPFRTKVQLLTSIPGISDLSARVILAEIGEDMSRFPTHSQLISWAGLCPRNDESAGKRRSTRLRKGAPWLKTTLVQCAWAASRKKDSYLQAQFHRLRARRGAKKAICAVAASMLTAAYHMLKNGVFYEDLGADHFQRTSSPKQADRLVNRLRGMGYAVQLTQIPA

SEQ ID NO: 390730 - protein, 361 aa, unidentified
MSKYSTGMYLGMDVSEKTIELFALSADNKTEEKGKLANNPAKVKAFLDGFNDTSKLTVALETGTHSPWLSKMLEEHGCKVLVGHARKLRAIWGDDHKCDERDAEMLARIARVDPKLLHPIKHVSQEARAEQAVIKARDVLVKTSTMLINHLRGTLRSFGISTSGITADTMDKKIMPLIPKDLRPALRGVVEQLKSIRKKIKDYDKKMAELCKSHPETKNLQQINGVGPVTALTFALIIADPGRFGNSRRVGGYIGLAPKRDQSGATDKPLGITKAGNGLLRKSLIQSANYILGSFGKDCELKRYGMRISAKGGKIAKRKAKVAVARKLAVTMWRLWMNKAEYDPFYKENQRQKKKAAKAAA

SEQ ID NO: 390731 - protein, 416 aa, unidentified
MKNAFTVAAGIDVHRDTVVVSVRKKKLDGVDDDVETRTFETFRDTLVEMSRWLKAERVEVVGLESTGVYWMPVVRVLQEEVPSLVVWLVNPLDVKRRAGRKTDRKDSQWISELVLYATVAPSYLPSREQNELRKLTRQRTKLVADQTRYHNRILKELEASGVKLASVVSDCLGKTGRAIIDALLAKKLSLDQIADLALGTLRKKIPLIRRAIEGSFSPSTELVLQQLLGLSDIVDQKVVDLDQQIAVLMKANAPEQALANTIPGLRDTSSAAILAECGTDMSLFPSSKHLSAWAGLSPGSNESAGKPKPAPARQGNKYLRTIVVQCAWSAVRMKQGFWPTVFRRLCSRLGPKKAIVAIARKMLVALFHVLADNVPYREPTQTPPSEQQRTRLARRLEAKLNALGYAVTLSPAADVS

SEQ ID NO: 390732 - protein, 364 aa, unidentified
MKRKVYVGMDVHKETIQIAYLTSNSKEILKEQQIKHNEVQIKKFIKKLKTEWNEIHCCYEAGVTGYPLYRYLKSLGVNCILVAPGKIPRQSTDKIKTDKRDAIKLARLMRSGELESIHVPSEEDEAVRDYLRSRDSLRLDLGRNRQRLMKFLLRKDIKYSTTKYWTVSHYKWLNNLHFNNEILQETFNDYYSRVRVQEENLNSMDKKIQEIAESEPYREKVGILRCFRGVDYLTAMFLLCEVNDFKRFKTAGSFMSFLGLVPGEYSSGSKRKQTGITKTGSPRLRRILTEAAWQHRFPGTGSKIITARRSGQPALVVALAEKASLRLHKKFRNLQLRGKTPQVMITAVSRELSGFLWAAMNLVA

SEQ ID NO: 390733 - protein, 311 aa, unidentified
MGGVNVAIEVGKHKLDVALGSDGELFSEPNQPRAITRLAKRFAQVGCERVLIEGGSYQNVLVGALRAAGLPVVIINPRRVREFAKSIGQLAKTDHIDARVLARYGERIQPPVRELPDEQNQALRGLWVRREQLIEMLVMEENRLEHAPKALHRSLRAHIDYLRKQIKQSDSDLDRAVRDSALWDKYELLSSVPGVGRVLSVALLSDLPELGRLNRSEIAALAGVAPFNCDSGTLRGQRKIQGGRKRLRRVLYSATVASVRCNPVLRPFYQRLRAAGKPAKVALVAAMHKLLLILNAMLKTKTVWRPSCPNA

SEQ ID NO: 390734 - protein, 416 aa, unidentified
MSLALPPAEFFVGVDWAAQVHAVCVINIEGKVLLQFTVEHSSDGIALLVHRLAKFGEPIDIPIGIERPDGRLVDLLLEAGHPVVPVSPNAIKTWREGEVLSGAKSDAADAAVIAEYLRLRRHRLTVAAPYSSETKAVRTVVRTRDDLVQMRVAAVNQLAALLDAYWPGAKAIFADLESKIALEFLSRYPTPSAASHLGEKRLVGFCAARGYSGRRPAAELLTRLRAAPAGTTDPYLSVALHDAVLALVGVVKAVNTAVKNLDQSVAARLGEHPDGRIFTSLPRSGQINAAQMLAEWGDCRQAYETPDSIAALAGCTPVTKASGKHKAVHFRWACNKRFRKAITTFADNSRHASPWAAKIYNEARTAGKDHPHAVRILARAWIRVIWRCWHNNTPYDPTRHGAVQALSGQTSVDLAA

SEQ ID NO: 390735 - protein, 343 aa, unidentified
MNQVITIGLDLAKNVFQVHGVDVEGNVVIRKQLRRRQVMPFFRKLSPCLVGVEACATCHHWARELSSLGHEVRIMPAHYVKPYVKRNKNDAADAEAICEAVTRPTMRFVAVKGPEQQSLMMVHRTRALLVRQRTMVVNAIRAHLAEFGIVAPVGLRGIAALGEVITDSGDERLPSVARACLVSLARALASIEREAGLCERRIHAWHRSNAESRNLETIPGIGPIIASALVASVADPSVFKSGREMAAWIGLVPKQNSTGGRDRMGRISKQGDPYLRWLLVAGAMSVIRHGRKTGFKDNPWLADLITRKPAMVVAVALANKNARTAWALLARGEAYRRPQAATA

SEQ ID NO: 390736 - protein, 336 aa, unidentified
MVIRMQEGEAMEAERFIGIDVAKHWVDVAELPCPAGSRPSVRVANDADGWAALVERFTADPPTLIVLEASGGYEIGLVTSLDLAGLTPVVANPLSTRRFAQSQGRRAKTDRIDALMLADYGARLRPTPRPVPEATARKLQELLTRHRQLTKMVVEEKNRGHQASPLLRPSVEAHIAWLEQQRTEVDRLMASVVASDPDWQARVAVLDSVPGIGLLTATILAVGVPELGDCSGKAAAALLGVAPYAVESGLHRGQRHIGGGRRQVRHALYEAVMTTIRWEPTFRAHYAQLRAAGKPHKLAMIACMRRLLGILTAMLRDGLTWKQTKVGQGHFLVSSS

SEQ ID NO: 390737 - protein, 441 aa, unidentified
MDDCCPECSVSTQAKLVFPSHLSRATQKGTNGMQVLYARCCGLDIHKKTVVACMLLTNPDGTIRRVVRTFGTMTADLLALGDWLRLHEVTHVAMESTGVLWRPVFNLLEEGRTLLLVNAQHIKAVPGRKTDVKDSEWLADLLRHGLLRPSFIPPAPIRVLRDLTRYRKTLVELRTQEINRVHKVLETANIKLGVVASNVVGVSGRRMLEAIQQGESDPRVLAELAKGRLRKKRSALRLALDGRVQAHHRLLLGELLDHLDYLDRAIHRVEVQIAALVAKEEKAVELLLTLPATGPVTAAAIIAEIGTDMSRFPSAAHLASWAGVCPGNKRSAGKQLSGASTKGNKQLKTILCEIAATIARTPGTYLHALYQRIARRRGKPRAMMAVAHSLLVSIYYMLRDQVAYQELGPDYFDQLQAQHLERHYVRRLEALGFQVTLTSAS

SEQ ID NO: 390738 - protein, 390 aa, unidentified
MKRLGWIKQTDAQAAATPPCKSRITAQVKMPGAVAGKRPNAPRDTKPVGERGSLPAGPLNPNSRLGRIASPLAQGRDQMDAITVGIDVAKDRLDVCIRPSGESFVVDRTGAGIEALAKRLHGLRPRIIAIEATGGFETVVAAGLASAGLPIVVVNPAQVRAFARALGKRAKTDPIDATVIAHFVEATKAEPRALPDEMTRLLADLVARRRQIVEMMAAEGQRERRMTDKRLKKSIARLRKAMEKELAELDGEIDDHVRGSPVWAEKEDLLASVPGVGPVIARTLIAELPELGTLDRRQIAALVGLAPWTRQSGQWRGKSFIGGGRKSVRSALFLAAMVAAHHNPILKPFRDKLVAAGKPKLVALIAVARKLLTILNAILRDKRPWQPKIA

SEQ ID NO: 390739 - protein, 353 aa, unidentified
MKERNTIGMDMGDRKHSICILDHEGKVLSRNTVANTAAALRKCFKNTNPALFAIEAGTHSAWVSQVLKDMGHEVLVGNPRKLRAIWSSNEKSDVRDAEMLARIARADPQLLYPIIHRGREAQLDLENIKARDLLVKTRKILINHIRGVVKGFGERISKCSTKCFHRRAVEELPEELLKILTPLLECLEETSLKIDAYDKQIKKISEEKYPETAGLRAVAGVGPITALAFILTLEDPKRFKKSRDVGPFLGLVPKRDQSGDTDKQLSITKAGDATLRRLLVNCAQYILGVFSPECELQKFGLKIAERGGKNAKRRAVVAVARKLAVLLHRLWVDSATYDPFYQQTRQSVGKKAA

SEQ ID NO: 390740 - protein, 459 aa, unidentified
MRTGAELWRNRKGKRELARRLQSENPGLEVVHPHAAGIDVGNGAHYVAVRPDRDLQPVRRFECFTADLHRLANWLQGCGVRSVALQSTGVYWIPLYDILEEHGFEVYLVNARHTKNLPGRKSDVQESQWLLKLHTYGLLNNSFQPPSKIRVLRTYWRQRLQHVTGAATCVQRMQKALTQMNIQLANVISDLSGVTGQMIVRAIIGGERDPQKLAELSHPRIQASRGEIAKSLEGNWRQELIFVLQQEIEMYDTYQRRVAECDQELQKHLTAFADTVRLQEELPPKKKKKQNKNNPNFHLAEELQRITGVDLTRIDGVDVMVAQTLVSEVGLDMSRWKTEAHFASWLGLCPDNRISGDKVLARGTRHVLNRAATALRLGASTLLRSQTYLGAQYRRLRSKLGAPKAITAMAHRLARLVYRMLKYGQQYVDKGAEYYERRHRQQQIEFIRKKAAQLGLKSH

SEQ ID NO: 390741 - protein, 339 aa, unidentified
MPLTPVGIDIAKSVFQVHYVDPETGEIVNKPVKRAKFLEYFANRAPCLIGMEACGGAQHWARALTRMGHQVRLIPAEFAKAFNIRNKNDAADARAIWLAVQQPGRPVAVKTETQQAVLALHRMRQQLVKFRTMQINSLRGLLTEYGEVMGKSRAALDKAIPGVLARVAERLPAVLIDTLREQWNGLTKLDEQISQIERRLRQWMKDDKAAKAIAEIPGVGVLTSTAAVATIGDAKAFKSGREFAAWIGIVPKQTGSGGKVNLHGISKRGDTYLRTLLIHGARSVLSHAKEPGPWVEQISKRRPANVVIVALANKMARMIWAILAHDRSYQKGYVSVKPA

SEQ ID NO: 390742 - protein, 358 aa, unidentified
MKYVGIDVHKKMCQAAILEEDGKLLDEIRFANDPEGIEEFAGKLTTFQDEVKAVVESTGNLWIQIHDRLEEHGFEVALSNPAKTRLIAEAKIKTDKVDARTLAGLLRADMLPTCYVPGEELRSRRELLRHRLNLVKMRTEVKNRIHGLLDKHGLRMPGTTPFSKENIAWLRGLSLGFMDDAILRSDLAVLEAVDGQVTLIEEKIAALAAEDRRVRLLMTMTGVGYFTAMLVMAEVGDVGRFRGDKEFASWMGLVPSVHQSGERTRMGGVSGPGNKRLRWALVECAQAAVRYDPRLGGMYERLSRRRGSGCAVVAVAHEMARIMYFMLSRDEPYRGENRGLTERKLKNMSKRALDGLRN

SEQ ID NO: 390743 - protein, 391 aa, unidentified
MAPALFTHAVEYPRLRACIRKDGRCMSRVGNRWIVYLPHTGLTMRHDMTSNPLNESSSESTPRLFAGIDVGSEGLVLVVRKNGKPFDPQKYANTRADHARMAKKLGKLPGVIVCMEATGIYHFDLAVALHDAGIKVMVVNPKVSHNFAKVLLKNSKTDDVDADTLAVYAERMDFVPWTRPANEKIALRCFSRRIGALTSQKAAAKNHLHALSATGETPKAVVRDATLAISQLEKRIDSLTAEALALVGKHPELARVLQLLSGIKGIANTSAIALMGELLLLPPGLSHREWVKFAGLDPKAFDSGKSVHKKTRISKAGNSHIRAALYMPAMSAAQHDRHVKAYFQHLIAMGKLPLQGYCAVMRKLLHAIHGMLKHDKPFDNSRFYAIPVLIG

SEQ ID NO: 390744 - protein, 450 aa, unidentified
MGNGSGVSRGDRNRNARLARLRALVPVTNAIVGIDLADAKQMVVVTDHDSKVLARKTFRCRAWNLGAALDWAAERAAAKGWAGVTVACEPTGHRWRVLGQLAADRAMPFVCVQPMLTSWARRSEDLTSDKTDEKDAVLIARLTAQLRCYVPEPIDETWGRLRHLGARREQLIIEMVSQVQQIRALLECVWPAALDTAKQPFRSRTWAAAMTVICQRDGGDLARTRRLGAARFEQAVRREITRRGGCKPSLRILRHLFTALADPTGVIAHRPGALERVAFLLQDWHTATDKLTDTETRMTRVLDELKLTDLATSIPGLSAVGAAAILAETGDPNRFATARALVKHAGLAPREKLSGTFVGRTKLTGQGRPALRLAAWRAVWGAQRSNAVYAARYQHLTTRETNKLTATQAQTVIAAAILRQLHAVITTGRAWNADIATYGSHHRRQVALAA

SEQ ID NO: 390745 - protein, 400 aa, unidentified
MDETQRFRWFLGIDVSKETFDGCCIDTKGERLLGLSTSMNRKGFEELIKQLCGLSVSQESVLVGMESTACYHVNLYSFLISLGYTVIVINPLLISNFVKLQLRKTKTDKKDASVIAQFLLLNRDSLFQTLISSDFSELRDLSRQRESLVDQMSSIKSDIKRLLSMTFPELEHISGVFTKSMLRLLCHYPSAISIRQVKRSQIAKLLIPGSYGKQTTGSVERIIKAAQGSIGTTSPAKEIILKQKASLLMQLEQHLQELTDILKELCQAKIQQDTEILTSMKGIGEKSAMNFLIEMGGDIKQFERHQKLIAMAGLDPALYQSGKIDRKGKISKRGNRHLRRIIWLMTTKVIQFNERFKQYYLKRIEDGLPYKMAVLATAHKLIRVMFAMLTNKTSFNPKMN

SEQ ID NO: 390746 - protein, 399 aa, unidentified
MISVGIDVSKEKSMVCILKPYGEVVLSPIEIMHTEEAVTKLADRILELGSEVRVVLEATGAYHLPLLSVFMEKNIFVSIINPLVMKKYASTSIRKGKTDKIDSVRIANYGLDNWFHLRKHQPTEDVYEELKFLGRQYSHYIRMKIESKLSLNGILDRTMPGIKKLLSGKRSDYPTKDKLSDFVEHYWHYDNITKLSEEEFIKSYQEWAKKKKYHASESKARKIYAMASSGIPTLSSSTPSTKMLVLESVRVLGEINKTLQNILTQLQATASTLKEYETVRAMSGVGDVLAPRLIAEIGDVKRFHSASALVAYAGLDSPPYESGNFVGTRRKISKRGSSLLRKTGYEVMKCLKTIQPEKDAAVYLYMMKKEAEGKAKKVAKIAALNKFLRIYYARVMELQ

SEQ ID NO: 390747 - protein, 312 aa, unidentified
MNDKKPSVYAGLDIAKASLELHLLGKSYDLPNTPAGHAQLLKRLAAVPGAHIICEATGGYERAVVAALHAAQMLVSVINPARVRQFARASGKLAKTDPIDAAVLTAFGVAFSPMVTAARTTVEIQLAALTTRRAQLLQLRIAEEGCAETCTDPALCKLFTGWLVQIHKQLAKVEALTEKLLAEQTLLTAQVQRLDDIMGVGRLTSVAVLAALPELGTLNRGQAAALAGLAPYNRDSGTWAGQRHISGGRADVRCALYMAALSASRSNKILKPFYDRLIAAGKPAKVALTAVMRKMIVLMNHLLKNPDFTLAK

SEQ ID NO: 390748 - protein, 325 aa, unidentified
MTASHFADNSFIGIDVGGSGLDVAWHRGDGAHYANRPDAVAMLVERLQKQPVTRIAVEPTGGYEKMLVKALRQARLPLEIVHTSRFKAYRDLVGVKAKSDTSDARLLAAYAAAPDDVRGRRADHVELPEDAIREALSEFASRRDQLKRMIHAETCRLGTVRIAELRHAIGVHLKALQAEDKQLHSRMLELVRQRFDLKRDRRLLETIKGIGAKSALALLASVPELGRIDNKAAAALIGVAPFVHTSGTMVAPARIHGGRAAVRRILYMAALAASKHNPVLRPFYERLIAKGKPAKLALIAVLRRLVVFANAVLRSGQPWKGAIAH

SEQ ID NO: 390749 - protein, 410 aa, unidentified
MELQIQRGCGLDVHQATVVACLLTVLADGKVKKQIRAFGTTTRELLALSQWLQGEGCTHVAMESTGVYWKPVYAVLEGTFELIVANAQHIKNVPGRKTDVKDAEWIADLLLHGLLRPSFVPPKPIRELRDLTRYRRKLVESRSAERNRLLKVLETANIKLASVASDPFGVSGMQMLTALAEGKATPSEMAGLAKGRLREKIPQLEPALEGRMEEHHRYLLKLQLRRMRDLDQDLAELEERIQQRLQPYQEHLQLLEEIPGVDWTLAAVIIAELGVDMKVFPTASQLASWAGVSPGNNESAGKRRNARVTKGNFYLKTALVEAAQAATRAKGTYLRDKYYRLKARRGSKRAVVAIGHKILVAVYHMLSDQVSYNDLGDLYLDRLNKEHLTRNLVRRLERIGWRVTLEKAAA

SEQ ID NO: 390750 - protein, 353 aa, unidentified
MGRCQCKRVLAATPHIRVRMSNAARCWEKAMPSSIGVDVSKKKFDVALITAQGKYRCKVFDNDGSGFKAFLDWIKVHVPEASAQVCMEATGVYHEALANFLFDNQVTVFVVNPLRVKRFVESEGLRNKTDEGDAKALARFATRNDLQVWEAPSKSVRELQALVVRLEALQTMRQAELNRLDIAHSRVQASIETVVAALDKEIEVVRLLISKTIDDDPDLKQRSDLLDTIPGLGDATIASLLAYIGRPERFKSVKALIAYAGLSPAIRQSGTSLDKRKGLHAAGHRELRKALFYPAMTAGRFNPIVAAFWQRLKAQSKPGKVIVVACMHKLLAIAYGVLKSRRPFDASLVSTGA

SEQ ID NO: 390751 - protein, 332 aa, unidentified
MAYDFVIGVDVGKYFHHACVLDPQGRQVLSKRINQHEGSLRKLFGKFLTDNASVLVIVDQPNNIGRLTVAVAQDMGADVRYLPGLAMRQLSRIHVGNSKTDVRDAYVIAHAGLNLPDSLRSVDRVEEVFIQLKVLNGIDEDLARAYTRLINQMRSALVGTYPAFEHVLRGQMIHRKRILHLLAKYGDPTKIRRIGKTRLAAFARSHKARNPETVIDAMLAAIHGQTVSIAGAEYAELGVAMSAKDALAKLEHRKEIEAQVLKLIQDIPQTEILLSMPDIGPRSAAQILMTVGDMSDFPDAAHLASYAGLSPRTNQSGTSNMSNSPNRAGNKN

SEQ ID NO: 390752 - protein, 355 aa, unidentified
MSQEKYIGMDVHAATISVAVKNAEGKLLMECVLQTKAATILEFIQGLRGTLALSFEEGTLATWLHDLLKPHVSRLVVCDPRKNALMRDGNQNDRVDAHNLAELLRTNQVHAVYHGKHGTRALKELGRSYLTLTKDSTRVMNRIKSVYRSWAIPCAGTSVYSRRHRAQWLAKLVEPGVRIRAEHLYEQLDSLQPVRQAARRELLRESRKHAAVKLLRQIPAIGPIRSALLVALLQTPHRFRTKRQLWAYSGFAVQTYDSGEYRFVRGKLHRNRERITVRGLNHNHNHDLKNLLKGAAISAIERPGPLQDFYAALVEKGMRPSMARLTLARKIAAITLTMWKKGVSFDPKQLQRQAA

SEQ ID NO: 390753 - protein, 405 aa, unidentified
MLMAAVMIGVDPHKGSHTAVVIGVAEQPLAELRVRASHAQADELVAWASVWPERSWAVEGARGLGRLLAQQLVAAGERVLDVQPKLASRVRLLQAGDTNKNDPNDALSVAVAALRSTARREVTADDYPAVLKVWSKRHRDLGRTRNQVACRLHAVLCDLVPGGVSKEISAAQAARMLERLTPSGAVAVARAELAAEFLADLRHVDAQLRQTSKKLAAAVKTSGTSLTEIFGVGPVIAGTVIGDVTDVSRFPGRDHFAAYNGTAPVEVSSGNRKVHRLSLRGNRRINHAIHMAAITQIRHRHSKGRAYYDKKLAEGKTHKEALRSLKRQISDAIFARLQADARQAARRRVTGPGGQPGNDSASSAAGSHPARRLLGQATPGPATTIRPRTKTRTASPSKRTSGKTA

SEQ ID NO: 390754 - protein, 468 aa, unidentified
MKRKSRRAKCQKVSPFDGELKLIEPDAAAIDVGSRSHWVAVNPQRDSNAVREFGTFTTDLSRLADWLAQCEVKSVVMEATGVYWVALYELLESRGFKVYVVDAHTVRHLPGRSKSDVKDCQWLRRLHSYGLLRGSFRPPAQIRQLRNYLRSRTKIVEAAAQQQLRMQKALTLMNIQLHHVISDISGLTGLSIVRAIVGGERDPKPLARLRDPRIRASKETIQKSLEGHWQEELLFDLKIALDSYDHFQGQIAAYDEQIRRELKEVQSKVDVLNEPLPAARPKACRKRPGMSQQEQLDLREELYRISGVDLTRIDGISLQTAQKVFFEIGTDVSAWPNEEAFSCWLGLSPNHRISGGKVLKRSSRKVVNPLSIALRLAARTLRNSHSALGANFRRLIAKIGMPKAITAMARKLAVLIYRMLKYGTQYVDKGMAHYEAKYRETKLQYLRSQAAKLGMVLIPNQEALTAAP

SEQ ID NO: 390755 - protein, 334 aa, unidentified
MPLKLLAIDLGKRSFHIYGIDSEGVIVSRKISRPKLIETVTELAPEAIAMEACASAHYWGRLFLAAGYRILLINPRFVKPFVKGSKNDAADAEGIYEAATRPTMRFVPVKSAGQQDLQSLHRTRDRIVGARTALINHMRGLLGEYGVILPQGARRFLMQARDALAGAELSDLARELFIHTLDELGGLDLRLDELDRQLAAICRANEDCRRLSKLPGVGPVVATALIAAVDDGRHFRSGRELAAWIGLVPRQYTTGGKPRLGGIGRRANHYLRRQMIHGARSVMFRLAKHDDRRSQWLKGLAARRGFNRTVVALANKTARVAWALLTRKEAYAAA

SEQ ID NO: 390756 - protein, 348 aa, unidentified
MKKISWVGVDIAKYVFQVHSTDARGKAIWRARLSRDEWLSVLCEHVPTDSVIAMEACASAHHWARELRHRGYTVKLIAAQFVKPYVKSNKNDAVDAAAICEALSRPDMRFVAIKSIEQQDNQAMHRIRSELVAQRTAKANQIRGLVGEYGITAPGGIAKLRQALPEWLEGEGKLSASFCVLLQGLYDDLKRLDERVASLDKCIAERVAQDPAAQRLMQLRGVGPLIASALTGALGDGKAFGRGRDFAASLGLTPRQHSSGGKERLLGISKRGDPYLRKLLVHGARAVIRYVDRHDDALSCWIKSMLARKHTNVVTVALANKTARIAWAIVHGEVDSDPSRMAAKALKI

SEQ ID NO: 390757 - protein, 459 aa, unidentified
MARKKKIKMEIINYNAAGIDVGSKSHFVAVGQSLEDVKEFGVYAEDLVKLCEWLLSYGITSVAMESTGDYWQNLYVELQKHGIEVVLCNGKFTKNAKGKKTDVKDSRWIQKLHSLGLLTSSFLPDENTEILRTYCRQRTNWLELAASASRKMQKYLKFLNFRLDVVVNDVCGLTGLKIIEDICNGNLDPYSLAEHRHYNCRKPKEEIAKALHGNNRVDYLFGLKQEYDSYKFFQRKIKECDKEIEKLIKNEIQKHPVKQKLKTTAKPHKRINKNAIDIKNFNQIAYQYFGGVDLMAIEGVSHATVMSIMSEIGIDGFKKFKTAKEFCSWLRLAPNNKISGGKILSNKIPKGSNRLKIALRHSANAIGNLKDTHMSDFFKRIAYRKGRQAAVSATARKLATVIWTMVVKQVPYDPPTAYLFLDQKRKLGLVKRIKKQMAKFDIKTEDINLGNSLSPNYNF

SEQ ID NO: 390758 - protein, 376 aa, unidentified
MNKSTPNSSVKKTTKGAAKGRADAVDWTRVATIGIDVGDRFSSYCAIDSSGTIVAEGRITTTVGAIELELGQISRKTVAIEAGMHSPWMSRLLNRLGHEVIVANPRKLRLIYENQHKNDRVDAQYLARIARLDPKLLGAIEHRSELGQSHLALLRARDVLVRARVRLIHHVRAAIKSIGSPVPSGHTDAFHKRMRSAIPELLRGSLDPLVETVEQLTARIHEFDRKIERLAEDRYPETEVLTQVAGVGPLTALAFMLTVDDHRRFRTSRSVGAWIGLTPGQCQSGESNPQRHITKQGDHYLRRLLVGSAQYILGPFGTDSDLRRHGLAIAARGGKNAKKRAAVAVARKLAVLLHHLWRTLDVYEPLHTTKTRRKAA

SEQ ID NO: 390759 - protein, 337 aa, unidentified
MADVHILASDLAKQSFQVCATDPGGAVLFNRTVSRAKLEQLLGTQQPCIVAMEACATSHFWGRCAQGHGHDVRLIPPIYVKPFVKRQKNDAADAAVIAEAARRPNIHYVAVKSAEHQARAVSFRTHQCFVRQRTQLIKALRAPLAEFGLVFPQGPAHLKAVTGTLAEAGDTVPASVTDIARLFLEQIELLTQKIDDLTRGLRESSRVSEDMRRLCGVPGVGPVTAGAILAFAPDLRTFSSGRNFAAWLGLVPRQRSTGGKTRLGGVCKMGQSDARKLLIVGAMSRIRWIMRKGVFPNTWLGRVVGRKPRMVAAVALANKMARIIWAMMTREQNYRMA

SEQ ID NO: 390760 - protein, 421 aa, unidentified
MRAFGLDVHRDFCEVAIAEGGKVRSAGRVATRVEALELFAGSLAATDVVALEATTGVDKIVALLQERGIRVVVANTRKLRAISEAKAKTDRLDARTLARLLEAGLLDRVWTPDERTRALRRLTNRRERVVRARTRAKNEAHGVLARNLCERPPVTDAFGVGGRRWLAALELPADERLTLDGCLRQVDFLDSEIAALDAEIAKQALAWPEVLRLMSVPGVNVQTAATFMAAIGDIRRFSSPSKLVSYLGLDPHVRQSGNTAARHGRISKAGASEVRHMLGEAAWKVTLTPGPLHAFFERVRARRGPQIAATATARKLAVLFWHLLSRGEDYAFARPAMTRNKIRRLELLAGAPSQKGRHGIAGGKSKAVFDAERELSRQAETAYRRLVNDWRSSGPTKTGAGVTPGHASSRHPKGQAARQTP

SEQ ID NO: 390761 - protein, 347 aa, unidentified
MNSVGIDLHRNRSQIAVIDSNGELSLSRRIVNDRATFLELLGGLVGESQIAVEATYGWEWLAELLEDAGYEIHLAHPLRTRAIAAARVKTDAVDARTLAHLLRADLLPEAYVAPRELRDLRELLRHRIALTGMRSALKNRVHAILAKHGITRQHSDLFGKGGRAFLDELALREAPRRRLDSLLALIDDFDREIEATSKEIEQRAKADDRVDVLTQIRGVGRYTAMLIIAEIGAIERFPDARHLCAWAGLTPTVRSSDGKARLGRISRQGSPALRWALVEAAQKCTTGGGPLRQSFERIAKRRGRKIAKVAVARQILTLSYYGLRDGEIRCLARRSRASAKEKLAAAT

SEQ ID NO: 390762 - protein, 339 aa, unidentified
MTRYMGVDLHRNSFTVCTIAENGRRYFREYGIHCLKSFAEGLRATDHVAVETSTTTRLFHDAVSPRVEHVAVVNSSEFDVIRKSVKKTDRNDAEALAVFLSKGLLPEVRMKDQLHAELASLTQTRDTLVKQRTALKNKINNIMAARGLEIRREQLSSEKGLRGVETLPLGPVVMVEVRALAAQIRSLNQTIKDLEKTIQQEGEKLPGHKNLKSIKGIGGVSATILLSIIGDVNDFADVGKLASYFGIVPRVRNSNETEHSGRITKRGTKLGRTTLVQCSLVAMRYSDYLQRFYCRIAARRGKGKAIIALAKKFLGIIYDTLKNDWLFVDFPNFEIANTG

SEQ ID NO: 390763 - protein, 315 aa, unidentified
MEGEGPSVGIDVSKSVLDVSAYPSGKTWQVEYSAPGITALAEELAALGPAVVVVEATGGLEISLTAALGVAGLPVAVVNPRQVRDFARATGRLAKTDKLDAQLLAQFGAMVQPPARPLPDAQQRELQAMVTRRQQLIGMITAEKNRLRRTTPRVRQQIEVHVQWLREQLREVDRDLENFLRSSPLWQEDAKVLRSVPGVGPIVTATLIARLPELGSLNCKQVAALVGVAPFNRDSGTLRGKRAVWGGRGALRTALYMATLVATRHNPVLRAFYQRLCDAGKPKKVALIACMRKLLIILNSMIKNHRTWNPVGQNS

SEQ ID NO: 390764 - protein, 478 aa, unidentified
MVLPNQDPKRPKKTRKPAKPSKSPKRSLPVPVPASTAPLTVVNPDAAGIDVHSNMHMVCVPADRDPNPVRQFGANTADLHEIVAWLKKCRIKTVALESTGVFWIPLFELLESEGFEVKLVEPGQLSRCGARPKTDVLDAQWIQRLHSYNLLLGSFRPPDSVLALRAYWRQRQMQVRYAAYHVQHMQKALEQMNVKLTEVVSDITGLTGMSIIGAILGGQRDPNKLAQLRHERCHRSQEEIALALQGTWRPEHLFELRQAFDLYQFHHRQITECDQQVQAELAKFANRAGQKTYKAKPRKRGRKSNDVRFAAEGPLFKAFGVDLTLIEGIDVGTALVILGEIGVDVSRFPTERHFASWLRLCPPQNQSNQTNRRRSLRKATSRVTIALRMCARSLGKTMTPLGLFYRRIRSRIGGLGAVKATAHKLACLIYRMLRYGQDYVTQSMDEYQAKVEANLLKSLQRKAAALGYQLSPLPTPTP

SEQ ID NO: 390765 - protein, 348 aa, unidentified
MHRDTTMTIGCDLGDRFSELCFVDEVGKVVKQCRCTTSSKGFDRVFKKMASSTVVIEAGTHSPWVSRLLDRYGHRTVVANPRNIQLITKNHRKSDKKDAELLARLARADETLLSPICHRGESAQQDLAIIRSRAALVQTRASLVNHVRGTVKANGFRLQKCTTPAFTKRAWPMLSEKLQAIVHPVFKVIDSVSEQIKALDKQIEVELPERHSDITRLTQVTGVGPITAAAFVLTIDNPHRFAKSRQVGAYLGLAPRRTQSGRGDPELRISKTGDRQLRVLLVSAAQYILGPFGPDCDLRRWGQGLSERGKKNAKKRAVVAVARRLAVLLHRLWVSGEVYEPNRHESEK

SEQ ID NO: 390766 - protein, 406 aa, unidentified
MELVPIHKRVIGLDIHQAQITACAITEEAGGETRIEQRQFGAFKRDRRALAAWAATLDPDEVVMESTGIYWKSPYAALEAEGIRATVVNARHVKQVPGRKTDVGDAQWLATLARAGLLRGSFVPPAKLRELRLIARQRQKLVGLLSSEKNRMHKVLTDAGIRLGVVVSDIHGQSARAMIKGLLAGQPPEEVLKLASRRLKASREELHDALQGELTASHGFVLDELLRHIEELEAGIARFDAHLLGELASEMNALALLQTLPGVDAIGAAMLLVEIGSDMSAFGSPDRLASWVGVCPGNNESAGKRKSGRVRKGNLYVRRLLCEFAHAASRTKSAFQSKFQSLIIRRGYKRAIVALAHKMLRTIFFMLKRGEHYRDSATNYEQLSVQRNASRWIKALTRFGFIPAAA

SEQ ID NO: 390767 - protein, 409 aa, unidentified
MEVLYARCAGLDVHKDTVVACARWIESGKAQYAVQTFGTVTSELLRLADWLMEHGCTHVAMEATGVYWRPVWAVLEGAEAFELVLANAAHVKNVPGRKTDVNDATWLADLLAHGLIKASFVPPAHVQQTRELSRTRKQLVQEVTSHTLRIQKVLETCNIKLSSLLSDVRGKSGRAILDAIVRGENDPKKLAALADHRVRAKREDLEESLKGRVTEHHRFLLKLHLTQADQLEEAVRDVEARLGDALKPFREKLERVAELPGLDVRSASAIVSEIGFDMKRFETPDKLVSWSTLCPRMDETAGKRRNTRIRKGGTWLKPVLVQAAWNAVRTKRSYLRAKFLRLKARRGAKKAIVAIAASMLRAIWHILAYDVRYQDLGPDYQAVDKEKIARRLRVRLEALGYNVQLSAAA

SEQ ID NO: 390768 - protein, 472 aa, unidentified
MKIGYPRASRRPGDVAATWYRESGIECDAGAFGTPHCCRRARRAESSNEGSYGRRCNSRGRPARAQQLERCGGLDVHQATIAACVRLGGRTGRAEQHVQTFGTTVGDLLVRRDWLAAHGVTQVAMESTGVYWKPVFYALESDFTCLLVNAAHIKQVPGRKTDVKDCVWIAQLLEHGRLRGSFVPPAPIRDLRDLTRYRKALINDRTRVANRLHKALAEAGIKLASVASDILGVSGRAMLTALVQGTTDPAVLADLARGCLRRKLPALRQALTSRFRPHHAFVLGQLLAHLDYIDEAIATLSAEIERVMAPFAEPLRRLDTIPGINQRTAEVILAEVGTDMSAFPSARHLASWAALCPGQHESAGKHRSGKTRKGNRWRRTALVEAAAGASRAKNSALQARFRRVLRHRGPKKAVVAVAHALLRMVYHVLAEGTLYREAGADYYDRHRSQRLTRRALQTLERQGYRVTLEPAA

SEQ ID NO: 390769 - protein, 333 aa, unidentified
MKILKQSIGIDVSKNDFKVCLGVIDERLETKNVYEYVYANDKKGIKQFIKDITTKTEKLTPAFFVMEATGVYHQELAYALAVKQFSVIILLPNKAKSFSRSINIRAKSDVIDAKLLCQMGLERKLSTWQAPETIFATLKILTREREALVLQRSKLKNQLHAYQTAFVKADKTISRIKGHILYLTRQIRDTQTDMMALVKQSHPVADKIKKITKVKGLSFLSVVTILAETDGFNIILNQKQLIGYSGLDVRVDQSGEKVTKGRITKKGNAHLRKALYMPALSACRTNATMKLFYTQLNQRQKAKKQGIIAVQRKLLLLTYSLWKTGQEYLEKCA

SEQ ID NO: 390770 - protein, 316 aa, unidentified
MTHIPVFVGIDVSKDRLDVALRPMSDHWAVANTDSDIATLVARLGCHAPTLIVLEATGGLELPLTGELAAAGLPVVVVNPRQVRDFAKATGRLAKTDILDAAVLAQFAEAVRPALRPLPDVQTQALSALLTRRRQIIEMCTAEKNRLGSALPPVHRGIRTHIAWLDRRLAEIDEDLAHTIRESPLWREKDDLLQSTPGVGPVLARTLLASLPELGTLTHKQIAALVGVAPLNRDSGTFRGTRHVWGGRANVREVLYMGTLTASRFNPVIRTFCQRLCTAGKAKKVALTACMRKLLTILNAMLKHQTPWTLNIAHSS

SEQ ID NO: 390771 - protein, 373 aa, unidentified
MKKVRFLGLDVHAETIAVAIAEPDGEVRSLGIIPNREEPIRKLVKKLGPAEHLQACYEAGPTGYVLYWQLTALGVKCEVVAPTLVPVKAGDRVKTDRRDATKLARSYRAGDLTAVWVPNEEHEALRDLVRAREVAKQDQLRARNRLSKFLLRHGRRAPTGVKAWTQKFQEWIKEQVHFEQPAQEYTLLDYLHEVEHVADRIRRLEQAIVEAVKLAPPQMQEVIQSLQALRGIAQISAVTLVAELGEISRFEGARQLMGYSGAVPSEDSSGKRIQRGPITKTGNAHLRRIAIEAAWAYRHRPAIGLTLRKRQEGLSEEVKEIAWKAQHRLHKRYRTLSAAGKEKQKVITAVGRELLGFIWAIGVQVERKHKQVA

SEQ ID NO: 390772 - protein, 428 aa, unidentified
MKNRNTQKLEAITPGTLIVGVDIAKETQWAQFVNYRGLELRKFLKFKNHKNGFDNILASIEEICKNRRLDNIIVGMEPTGHYWKPLANYLLKNKVNVVMVNPYHTKRAKELDDNSQTKSDKKDALTIARLVRDGRYYEVYMPQDIFAELRVLSNSRISLMKRSNALKNIITAVMDEYFPEIVTVFKYPLKGKAAMQILKSCPFPSLILELGIDGVLVEIKKAVRKTVGRKKASQLVQTAKSSIGVGYGLVSAKLKLGLMIEELELLTKQLKQLEEAMEKALTDTGHDELILSIPGIGVVTAASFLGEIGDPMRFDHPRQICKMAGYNLIENSSGKNKSRTVISKRGRKNLRSVLYQMAITMVAVNHEMKELYRYLKTRPHNSLKKKQALVVISKKIITVIYNLIKKQTEYQAELVLGEFRKNQIKQAA

SEQ ID NO: 390773 - protein, 434 aa, unidentified
MEQKRHPYLSVGIDIGADFSLMAIALPTQEIIGKPYKILHSSNRSVEGAVERIQSIGQAYELPVRIYMESTGIYHLPLYHRLKNAGLDVYVLNPLVTHANQNINIRNIHNDKLDARRIALLGLRPDLKTSIVPADDVAAVKALLREYHAMKKETSMYICRLKNQLRQIFPQYLLHLPLFSKVNGKASLEVLSHYPSPSAVLSAGADALAKLIQEASGKGRTMAEKKAEAILSAARESLSFGHGNSGITFLIGHYVEMIRILDEKTAAILKQIKRSVQEQPDSLLARQTRLLESIPGAGFLTAVTIVCEIGDFRAFRRPKQLYSYFGLDPVVRQSGNSAGANLRISKRGSPYARRCFYILALQSVSLRKNGEPKNPVLRAYYLEKCKSKAKMTALGAIMHKLCNIVFAVLRDERPFVLRSPQEHRQNYLSLPKAA

SEQ ID NO: 390774 - protein, 347 aa, unidentified
MRYYVGLDVSLKTTFICILDEKGKRSQEGEVNSTPEAIGDFLQKTGFKIEQIGLESGSLTHYLKKGLLKMEYRVTIMESRKMAAILATIINKTDKNDARGIAEALRVGHFQECVHRSDDAVEVRTLLHLRQTAIEERTHIITSLRGHLKVYGIKFSKKAGKTFRKIVEEAIKNLRPRVQKSIQSLLNILDTLNREIKELTKAVESVASEDEDVKLLQTVDGVGLITALAFKTEIDDPKRFEDSKDAAAYIGLTPKQYSSGEMHRQGGISKKGSKRTRYLLVEAASALLTRCKTWSKLKAWGMKLQKKKGNRKAVVAVARKLAVMMHKMLMTKKPFERSPEKKEKVAA

SEQ ID NO: 390775 - protein, 390 aa, unidentified
MHVAAHQPEAPSAIRSDLGAIFVSLELSRSTWLITSLSPCAGEKMSKHGVAAGDIGALLACFSEFRQKAFARTGKSFPIIVIQEAGLDGFWIHRVLQSEGIESHIVDPASIATSRRRRRAKTDRIDGEALLRALLAYKRGEPRVCAMVKAPTPEEEDRRRLSRERKTLIGERVEHVNRIKGLLFCQGVSGYEPLRRNRRQRLDELKTGDGRALPDHLKAQIRRELDRLELLLEQIKAVEAEQNTLFAAAKAEAPTPAPVTMLLEIKGIGPEFAGTLWMEAFFRSFANRKQIAAYAGLAPTPWQSGAVDREQGVSKSGNPRLRTTLIQLAWLWLRHQPQSALALWFKERVTRNGGRFKKTTIVALARKLLVALWKYVTAGIVIEGAVMKAA

SEQ ID NO: 390776 - protein, 342 aa, unidentified
MHVTTVGLDLAKHVFQVHGIDDAGQVLIRRQLRRGELIGFFRRLPPCLIGMEACSTAHFWARELAALGHEVRLMPAAYVKPYVKRSKSDALDAEGICEAVTRPTMRFVAIKNPEQQAALMLHRTRDLLVRQRTMLVNALRGHLAEYGIIAPQGLPSVPKLIELAEKARGTALPDLAWRCIRLIVAQIEDVHGRIGQVEQEILAWHRTSELSQRLETIPGIGLITASALAATIPDPSSFRSGRHLAAWIGLVPRQSGTGGKVRLGHISKQGDRYLRRLLVLGASTLMRHARGRTSVTAGWINALLARRPASVVKTAIANKLARIAWAVLQDEQGYRAPAAAAA

SEQ ID NO: 390777 - protein, 352 aa, unidentified
MTNSTHETPAVTVGIDVSDHLTSFCVLDRQGEILEEGKVRTSPEGFARRFSAIEPCRMVMEVGTHSRWASQLLADLGHEVIVANPWKVRLIANSIKKTDRSDAETLARLGRVDPKLLSPVIHRGAEAQADLAIIHARESLVASRRLLINHIRGTVKSFGARVPTCDANAFHKKAPDSIPLELRPALEPLITVIAQLTREIRQADARIEELCSDRYPETRVLQQVQGVGSLISLAYILTIDNPFRFKTSRTVGPYLGLVPRQRESGQRAPQLKISKAGDKYLRKLLVNGAHYILGYRGPDTDLRRWGLAHAGGGKAAKKRAVVGVARRLAVLLHRLWVTGEVYIPLKCEKVAA

SEQ ID NO: 390778 - protein, 464 aa, unidentified
MKTLSVINPNAAGIDVGSEKLFVSIAGEDPEVFGTVTDEVYRMREFLKQKGVTGVAMEATGVYWLYAYGVLEAAGLKVIVVNGRYVRNLPGRKTDMSDCQWLATLHSHGLLRGGFVPPAEIRRLQDYQRLRADHISEAASQVQKMQQALERMNIKFHDVISDLTGVSGMKVIKAILAGERQPVRLLELCDKQIQKKKSERVLESLHGVWAPEHLFALGQALSVWEFYQKLLAECDRQIEAVLKDLAGSPPASPPSSPESGEANGSAPKPPGKNAPQIDDLHALLLRICGGRDATSLPGVADYLWLQLVAETGTDMSAWTTEKHFTAWCGLAPGTRQSGKRKGSVKRQRNRAGRLFCAGARSLVQSVDKGLGGFVRRISRRKGGLVATKALARKLAGLYYRVLRYGLEYAERGLREYELKYQESQRRLLAKLAAKHGFKLVSEQALALYAAIHPAAPQNPSPSHA

SEQ ID NO: 390779 - protein, 390 aa, unidentified
MFYLGIDIGKFNHAAALMDQQGKVIASLSSFPNTRRGFTQLRQLIKSNLPQQEQLRIGMEATGPYWTPLSAWLKTHGWTPVILNPIKTASLRNYGIRGAKTDNIDSVLIANTLRIEGEQPQACSPKLSEELRQFTRLRADMTKDRTRLALRLTSLMDRLFPELLSSFSKTLSPSCLALLSVAPTPSKVLALGEEKLSALLHKASGGKVKTTQARDIMDKAAESVGVPSQAMEESVALLLAQISLINSQLKVVDHRITELYEQAGVYFTSIGGVGTLSAATILAEYGSVTRFTRAEQMVAFAGIDPKLRNSGQHQGQVHISKRGPRYLRRALYLACQVVVRNDDYFHSIYQRHRDKGKSYKEAMIAVMNRFIHVLYAMWRDNRPYYPLTQA

SEQ ID NO: 390780 - protein, 411 aa, unidentified
MDGPLIALDVSKGSSHVQGFKSLNEPFGKTLRVRHSREGLGEVVRLAEKLGRETGEIPSAILESTGVYSECVVRFLQERRLRVYVISPLVSAKERKSEVRPTKTDGIDPFTIARVYYNGERKKNGKPKYRLSPEPIRGSWRDSLRECSAAYESESANLTSLKNQMHRYADLIWPGLCDGIGVCDPFGSVPMAVIRRLGHPEIAAKRSVKQLAKTIAAFSAASPEKSREKAEMLKEYARNAVSGASPSSPSVEELKYKAGEVLAKAKRLREIEKSMRAILASTHEYDNVLEMPCMQGVLGLRIVAEIGDWRRFPSDKELVAYAGLDPMVSESGRDDGQHKPITKKGNKRLRHLLYLAVKVTSANDPAGPIAECLRKKKGNGLSDKAAAVAASNKLLRIMLSMLRSGAAFRHQ

SEQ ID NO: 390781 - protein, 409 aa, unidentified
MMKQNIIFGIDVSSKSSTVCVVIDRIKQGETFKITNDSFGYQDLLDRLNQYLITPLAVFEATGVYSLSLQAFLEDYHIKYLKLNPLKAKKLMDNNLRHNKTDKVDAYRLALIQFNAPQKLRAPQPKEYHELQNASRYYEELTQALIINKNQLHRNLQSAFPQIESILSTSSGRVYWTIVSLFPHAQYVLNHNENQVFQSLLAISGIGRQRAHYLTTRLYALARQAYPYDNESSITIRAIQRNIANLLSLSAERDNVINYMEKLAMQANARSLNIYESIPGIAKTTAVRLVAELGDLRRFDTSAQIDAFVGIDPGRYQSGEKDSHLGITKHGNHLARKILYRTITQMETVKATQPCHITDYYDKKKRSSNSRGYKKIAIASVHKLIRTMFALIKHDQLYDYNVATHNQRL

SEQ ID NO: 390782 - protein, 340 aa, unidentified
MTSITHEKVFAGIDVGAAELVLVLRTGEKSSPSQSFPNTPAHHRRLLQKLAACPDCTVCLEATGVYSMDVTIALHDAGIPIMVINPQRSHNFAKVLGKHSKTDNVDADTLAQFAQRMPFQPWVRPTEAAMTLRIFSRRIHALTDQKTVSKNQAHALSFIASTPKVVLQDLALAVTQLEKRLATLTAATLELIHATPELLAPFTLLLGVKGIADTSAIALLGELILLPAGLTHTQWVKFAGLDPKHFRSGTSVDKKARISKAGNHYIRAALYMPALSAKAHDPYVKAYFNHLIDMGKTPMQGVCAVMRKLLHALHGMLTNNQPFDNTRFYAVPVEIIHSST

SEQ ID NO: 390783 - protein, 343 aa, unidentified
MDGDIKVLGIDLAKNVFQLHGVDENECCIYKKRLNKAKLIETLSNFLPCIIGIEACGSAHYWARKLNSMGHTVKIMAPQFVKPYVKNNKNDMNDAEAICEAVTRTTMKFVPMKTVEQQDILLVHRARELAVKQRTALSNQIRGLLAEYGVTINQGFSQLRKLPEILDKNKDNLSVKALNFFKAQFERFKQMDTDLKKYDQEVKKNSIDDARCAELEKIPGIGPLTATALVGSMGDASVFKNGREAAAWLGLTPKQHSSGHKIRLGGITKRGDSYLRKLLIHGARTVIKTCEKRSDRLGKWAADKKLRCGYNKASVALANKNVRIIWSILTTGECFNAEHQPAK

SEQ ID NO: 390784 - protein, 382 aa, unidentified
MQASTVVTPTAGHCGTIFVAIELSQKTWLVTLHSPDRDRISRHKLEGGDHAGLLALIAQVRARASKKLGAVPEVTSCYEAGYDGFWLHRLLEAAGIANYVFDAASIAVEQRSRRAKTDRIDGELLLRTLMAHLRGEPRVVRIVRVPDVAEEDARRASRERDRLIIEQTAHTNRIQALLRLQGMAVGNPRRKDWLDWLGRQRDWQGQPLSPQLLAEVTREHTRLMVVREQLAALEQAQAARALPVPAAMAERQDHLQRLKALGPAFAATLVNELFYKNFRNRREVASYCGLTPSPWKSGGIDREQGISKAGNHRARHKAIELAWLWLRHQPDSALSRWFRARTANAGKRARRIAIVALARKLIVALWRYLTTGLVPEQATMKV

SEQ ID NO: 390785 - protein, 370 aa, unidentified
MKEYSEAFVAFDTAKKKHAVAIADVGREGEIRYLGEIDSSPLTIERMIRKLAGRYEKLHFCYEAGPTGYGLYRQVRALGHNCSVVAPSLIPKKSGERVKTNRRDAVSLARLFRAGELTSVWVPDAIHEAIRDLVRARETASQDLRRKRQQLLSFLLRHGRIFSGRQHWSRTHLHWLAQQKFDHPAQQIVFQDGVDAIDDAATRLRRLDEQVATIVPSWSMAPVVDAYQAMRGVSFIVAVTFVAEIGDLRRFDNPRQLMAFLGLVPSERSTGERVRRAGLTLAGNRRARRVLIEGAWSYRYPARVSQTLQARLEGLPKAVREIAWKAQIRLCGRYRRLTAAGKKLPVVIAAIAREMAAFLWAIAGHVAPAA

SEQ ID NO: 390786 - protein, 331 aa, unidentified
MSNTSNTSNTSFSPVVFAGLDVGKTSLQLALSLEEGKFLERSFPNSLPGRAELVSLCSQHRVQLVVMEATGGLELDAAVDLVHDQIPVSIITPGQSRAFAKALNQQAKTDAIDARLLATFARRLRPPTTAIPSETQRDMRELAARRRQLIQQLVQEKNRLQQARDRRVKTSVEKGIEFLQQQLADIDEHLGKLITANPELQLIIERLESVPGIGTNTATQLAVACPELGTLNRQQIASLAGLAPYNHDSGTSSGQRSIRGGRASVRTTLYMATLTAIRCNPTIRAFRDRLVAAGKPAKVVIVACMRKLLTILNAMLRAQTPWRAQATPTTP

SEQ ID NO: 390787 - protein, 417 aa, unidentified
MSENFAWFAGIDWAAESHQVCLVDASGTESGTKSFPHSGSGLAALCGWLLEISGAPPSTIAVSIEKPHGAVVDTLLERGFAVFALNPKQLDRFRDRFTVAGSKDDRRDAHVLGDSLRTDRHCFRRLLPEAPGIIELREWSRMAGELSQERTRLANRMREQLRRYYPQFLDITDDVAAAWALDLWTMAPTPARAHHLKRAAVARLLKANRVRRIDADGVRNILRTTPLTVAPGTVEAATAHIRITVQRLQLINRQIREANAKIDALCKTVAEPGDETAGQIEEQRDVEILRSLPGVGRIVLATLLAEASRPLRNRDYHALRALCGVAPVTRQSGKTRYVVRRLACHVRLRDATFHWARVAIQHDDRSRQRYNALRAKGHSNGRALRTVADKLLAVACAMLKNQTHFDRNHCTANPTAP

SEQ ID NO: 390788 - protein, 408 aa, unidentified
MRVVGLDIHRVFAEAVMLDDGRVTRLGRVGMTRDHLAAFAQTLTHDDDVVIEATGNASAVAEVLRPHVGRVVIANPRQVRLIAEARIKTDVIDATVLARLHASGFLPEVWIPDEHTLGLRRQVTRRTQIVRQRARLKTIVQSILHAHLIPQCPHADLFGPRGRAWLLRQPLPADESDAVERHLREYDRLTDDLRVVERELARDALTNPKVKRLMTIPGVDMVVAVGLMAAIGPAERFPGPDRLVAYLGLNPTVHQSGEGRPRHGRISKQGRTHARTMLVEAAWQAVRGPGPLRAFYQRVARRRGNHIAAVAVARKLAVIIWHLLRREEDYAWVRPALHAKKLRDLELRSGEPARRGQRGAAYAYNLSRTRVEEKRRAEQAETAYRRLTEGWSRRGRRVPTGPAKEERP

SEQ ID NO: 390789 - protein, 346 aa, unidentified
MKRYKYFIGIDVSKLTLDFAIMNVEKLIYHKKIANDDTAIASMLVELKEINGFKLSNSVFGMEHTGIYSNKILSMLERKKANIVYENPTHIKNSLGNLRGKNDKLDSIRIATYLKKLKDDLRLWQGKRKIIQELASLVALRDRLARTKRALKTPLKEDLLFISTKFAIQNEKFSSRTIDALEADIHILDETINLLCLSDPKIKRMMDIITSIPCVGHFTALQMIITSNEFETISSPKQFAAYAGLAPYPKQSGTGLQAKSHVSNIANKKMKTLLHTCAMLSNRFVPEIQAYFKRKTEIEGKPKMLVFNAIRSKLVLRVFSCIKQDRLYAKDYHYKSEKLDLMTKKT

SEQ ID NO: 390790 - protein, 437 aa, unidentified
MEEVTDEPLYRDRVCGIDIGKAGMAATIRVPSDKDPARRAAETRSFGTTRREVLALADWLRCWQVPAVVMEASGDYWKGPFYRLEAEGFECVLADAKQVKNLPGRPKHDPGDSRWLAACLERGAVTSCFVATPEFRIIRLHTRYRRDLTEERTREKQRAEKLLESAAIKLSSVVTDLHGVTGRDIMDHLIAGERSPKVLAQLARARARRKISELEEALEGAEFFTAEHAALLAAMLARIDRVNAEIARLSEVIETLLEPYEEQLQQAESMPGWGRRAAQDALAETGTDMTRFRTGAHLASWAGRTPLDNSSGKRKGKAKSKKGNRYLGGLLGETAIAAGKTQTREGARYRRLARRRGKAKALVAVGNTQLKVYHALLSSPGTRYEDLGPDYYERRAEVSRQVRHHVGKLGALGFDVTLCRIPEPGPEPGGTGNSQTA

SEQ ID NO: 390791 - protein, 314 aa, unidentified
MNTLVCVGIDVSQSQLDVAVRPGACFSVTNDEPGWTTVVAQLRRLAPVRIVLEATGGLDVPLAGALAADGLPVVVVNPRQVRDFARATGQLANTDALDAQILAHFAEVIRPQIRPLPNAQTQALAALATRRRQLIEMLTAEKNRLRTASPSIRKSLRAHMAWLQRARTHTATELAQAIQDSPVWREKDDLLRSVPGVGPVLTTPVLANLPELGTLTNKQMAALVGVAPLNRDSGTLHGKRMVWGGRAQVRATVYMAAIVATRYNPAIKTFYQRLCGVGKAKKVALVACMRKLLTMLNAMLKHRTRWRTDLPQHA

SEQ ID NO: 390792 - protein, 334 aa, unidentified
MLYVGLDVHSRQSSLCILNAGGGTVKQIQLKGPRSAVVDRLRQLQEPFSICYEASCGYGHLYEQLRPIAHHVAVAHPGKLRLIYGSKRKNDRVDAQKLAKLLLLDMVPPVHVPSIDVRAWRSLIVLRQRVLQQMVRAKNQIRGVLRENDLAGAKWLWSRKQLAWLESLDLHSAAKLRLELAVEEFKALDAKMKRIEKELAKYADAHPAVKLLMTLPGVGIRTAETFVAWVDDISRFRNNRQLGSYFGLVPCQDASANTNRLGHITGDGPPVMRKLICEATWTAIKKDPAFKQFFERVMGGKPDRRKIAVVATMHRMIRVMGAMLRSGEAYDATR

SEQ ID NO: 390793 - protein, 342 aa, unidentified
MKEISAVGIDLAKSVFSVHAVDRNGRVVLHRTVRRERLAELVASLPPCLIGMEACGGAHEWGRQFQSFGHRIGIMMARFVAPYRKSSKNDGNDAEAICEAVSRPNMRFVPVKSAEQQAILVLHRARQGFIAERTATINRIRGLLAEFGIVLPQRAEQVRRSAAVAAEQLPALARETIADLRAHLTYLDQHIGQYERRLVVLASGHEPATRIQAIIGVGPLTASAITASISSGHEFNSGRQFAAWLGLVPRQYSTGGKARLGRITRRGDNYLRGLLVQGARSALQAALRVVPLRRTRLAAWIVATYERIGYHKTLGAIANKHARLIWVLLTRDEPLRAHTASH

SEQ ID NO: 390794 - protein, 377 aa, unidentified
MKRIKFVGLDVHAETIAVAVAEQDGEMRSLGVIPNREESIRKLVKKLGPVEQLRFCYEAGPTGYVVYWQLTALGAKCEVVAPTLVPVKSGERVKTDRRDALKLARNYRAGELPAVWVPDTAHEALRDLVRAREAAKKDQLRAKHRLGKFLLRHGRRPPTGVKPWTLNYLAWVKKEVHFEQPAQEATLLDYLHEVEHAEARIDRLDLAIEEAVKSTPPKMRAVIEALQALRGIAQVAAVTIVAELGEISRFPGARQLMGYGGIVASEHSSGESTRRGGITKTGNAHLRRVVVEAAWASRHRPNVGGALRKRQELVSEEVREIAWKAQHRLHTRYRKLTARGKDKGKVVTAIGRELLGFIWAIGIKVEAAQKEAERRAA

SEQ ID NO: 390795 - protein, 412 aa, unidentified
MEVLYRVCCGLDVHKDTVVACLSRLTAAGERVKQVRTFGTTRAGLRRLAAWLRAAGCTHLALESTGVYWKPVYNLLEGQFTVLVVNAAHIKAVPGRKTDVKDCEWLADLLQHGLLRASFIPDRAQRELRDLTRTRTTLTDERSAVVCRVQAVLEDAGLKLAGVATDILGVSGRAILAALVAGTTDPAALAALARGKLRKKQAALEEALAGELREHHRTLLALHLAHIDFLDGQIAQLSEQIAARLQEHTAALARLDTIPGVGQTTAEVLAAEIGLDMRRFPSAAALASWAGMCPGNYESAGKRKGGKTRKGSPWLRRALTEAARAAARRKDCYLAAQYRRLVQRCGKQKAAVAVGHTILVTAYYLLLRQDTYRDQVPADRDERRRERAQRRAVAQLQALGFEVALTAKHPAA

SEQ ID NO: 390796 - protein, 465 aa, unidentified
MTPHKDFFLHPRPPTPPPPQPPALAGPLQVFNPHAAGIDIGEAEHWVAVPPGRDPQPVRRFGTFTADLDALADWLIDCGVTTAAMESTGVYWIPLFELLEARGVQVLLIDPRQAKRAPGRPKTDRLDCQWLQRLHAYGLLAGAFRPDDQVCVLRSYLRHRQMLLTSAAHHIQHMHKALQQMNLKLTQVVSDITGATGMAILKAIIAGERDPVTLAKLRNPHCQHDADEIAKALQGTWRAEHLFALRQAVELYAFSHQQITQCDQQINAHLETFGDKSAGQPLPPKARRHKKTNEPRFDARTPLYRMAGVDLTTIEGIEEGTALVILSEIGTDMHRWPSVKHFCSWLGLCPQHQISGGKVLSRRVRPGAHRVTVALRLAARSLHHSQSALGAFFRRMKARLGTPKAITATAHKLARLVYSLLKHGSAYVQQGLENYEAQYHERKVKTMAKQAKALGYTLVPLVAQG

SEQ ID NO: 390797 - protein, 348 aa, unidentified
MSQSKQYVGLDVSLKETSICVIDDVGKIVWRGRTESTPEAIASAVKQHAPYAVRIGLESGQLSSWLFHGLKVAGLPVICIDARHAKAALSLKVNKTDANDAFGLAQIMRVGWYREVTVKGLDCQAVRALLVARAQIVSQITTTKNCVRGILKTFGRVLPKGLRSQFSGRVRAAIDGDPILGAIIEPTLRVLEAMRAQLLVYNKAVIQRARGNDTARQLMSAPGVGTVVALAYMTGVEDPARFKRSSSVAAYFGMTPRRYQSGEVDHAGRISKCGDGMVRGLLFESAKVLLSRSARPSALKTWGEALGKRIGPKKATMAVARKLAVILHRMWTTGTTFQWNAEAASPAA

SEQ ID NO: 390798 - protein, 372 aa, unidentified
MSKSSTLFVGMDVHKETIDIALATNRLNGKVRHYGRIPNRIDTIDKLTAKLKREAGTLQFVYEAGPCGFGLYRHLTRKKHQCAVVAPSLIPKKPGDRVKTDRRDAMRLAQLYRAGDLAPIYVPNVDDEAIRDLSRAREDAMLDLKAARQRLKSFLLRHGIRYEGRANWNEAHLRWLTELIMPTPAQQIVFQEYVNTITERTRRTERLERLLKAQVEDWHFAPVVGALQALRGVRFINAVTLVAELGDLTRFDNPRQLMCFLGLVPSQYSSGEHTRLGPITKSGNRHARRNLIEAAWAYRYQAKVSREIQLRQEHLPVTIREIAWKAQLRLCARYRKLVARGKNKNIVVVAIARELVAFMWDIAHHVHLKPLP

SEQ ID NO: 390799 - protein, 346 aa, unidentified
MKNTIVGVDLAKKVIQVCKTTNRTVRSNEEMTPDEFILFLANSKSMTVVFEACGTSSYWKQQALLYGHDAKLISAKLVASVRQSQKTDKNDALAIVQTALLPDVNFISGKSIEQQQLQSTMRLRELCSKQKTALSNQLIALLAEFNINSSNRNGGLRGAIESTLEDADNGFSHEFRKALDEAWKLYLKVAESLVTYDKCLEASIETHPECKKLLKLEGVGPINAINLYIALGCAELGCFTKGKDASACIGLTPLQYSSGGKSKLGSIGKHVKNTVIRSQLITGAAASVRHVIKREAKTCKEKWIQDLVDRRGIKCTAVALANKTVRTALAMLTQGTEYKANMILTC

SEQ ID NO: 390800 - protein, 367 aa, unidentified
MSHIIYCGVDFHARQQTICCLKTETGEFTSHELKHDHKEELRKFYSELGGPVVVGLEASGYTPWFEQLLEELGHEVWLGDATEIRRRARRRQKNDRRDAELILELMYHAEFPRIHRPLPQSREILRRLRYRHKLVKLRTIVKNSLQALSIKAGLSLQARLFTRQGTQQLEALTLSPVMRHQRQQWLELLQELNQRITETEGWLKQQALSDPRIQLLRTHPGLGLLSSLGIVHTLIPVSRFPNTRKVAAYGGFDPMERSSADKKRYLGISKAGSRLLRFLLIEATQTAVKTDPELKRFYHRLVQRRGKPKAKVAVARKLLIRSFIMLRDEINYAEFQQRAIAARLAREFARPNVPVPLIGQPASPAKG

SEQ ID NO: 390801 - protein, 485 aa, unidentified
MSKRSIFTRQNQTLIDLFKDAGHPDKVLCIPIDYAKQTHVALCCNGSGKVLKKSVPVKNNLEGIEFLLEVVDNICRKHHIERKHVFFGGEDCGTFSLNFIYGLRANGFPVIGVNAKDAKKQRENMQASTDDLDLLGIAKQLLNRRGSTAGGEPGAERALRVLTRHRKAQVRLRTATSNRMHQIVDQLFPGFLDEKLSGMPPFSEASLYLMQDRLSPVLLLKRQDKVLLRQLKATGLQHAEKALGQLKAYARQVLAHPPELAGLLQTSLASEIKLYRCLGANIDQIEREVAQQLAKTPGAMLTTIRGIGITLAAGVAAEIGAPESQPSTRRLSSYAGIIPRVKQTGGPEKEARIGTVSRRSNHILKDFIVQCGNHLGQHGPVDLKEDHRCRGANKQHADFGMARRFLRMGMCLMRNNDSYVSPELRHGATVEELRSYYLHMWPKLLDKWVKSGAVHTAFHEDNPLGQWRKRIEEIYEIELPLPKKK

SEQ ID NO: 390802 - protein, 388 aa, unidentified
MQFAADRVEASTAIRTDLCAIFISLELSRSSWVITSLSPGSGEKMSKHTVRGGDVAGLLKLFAQLREKAKGRTGKVFPLIVIQEAGLDGFWIDRVLQNEGIESHVVDPASIATSRRRRRAKTDGIDGEALIRALLAYKRGEPRVCSMVRVPTPEDEDQRRLCRERKVLTIERVQHVNRIKGLLFSQGVSGYEPLRRDRRGRLDALQTGDGRPLPQHLKAQICRELDRIELLLAQIKAVEAERDALLAAEQTIAPVPPAMLLGVKGIGPEFAAVLWSEGLSRPFENRRQVAAYAGVAPTPWQSGSVNREQGISQSGNPRLRTTMIQLAWLWLRHQPDSALALWFHDRVKRNGGRLRKTTIVAVARKLLVALWKYVTAGIVIEGAVMKTA

SEQ ID NO: 390803 - protein, 349 aa, unidentified
MLADEAEFVIGVDTHARSHTLALLDKQQQTRAVVEVSACRSGYRRALRLARLFAPGRRVWALEGTGCYGAGLARFLVGRGERVLEVERPARRERGSRTRLKSDRLDAERAARLLLAGRAGARPRLGEATAALRSLLACREGAIRARTAALNQLRAALLSAPCQLREQLQDQPRAQLLASCARLRPAACSDRERAASALTLQLLARRVQALTREAETLERELTRRVQDAAPALLDQRGVGPISAAVLLCAWSQPGRLRNEAAFARLAGAAPIPASSGKRIRHRLDRGGDRKLNRALHTIALTRRRCDPTTIAYIQRRQREGKTEREAVRCLKRYIARNLYRLLEATATTT

SEQ ID NO: 390804 - protein, 319 aa, unidentified
MYKKFIPEVFVGVDISKSRLDVCILPTNQCLSFSNNTEGCARLAELIGQEKSPLVVIEATGGYEIPVSAELVSKGLPTAVVNPKRVRDFARALGRLAKTDSIDAYVLARFAQDLKPEVRLMPGESEQFIRELVTRRQQLVALRTAEKNRLDKAVSKQVRKSIQTMVDTIDAQIREIDKKTDDEIKGNPILHEKSILIQSVPGVGSHTSRMILAALPELGTLGPKQISSLVGVAPFNRDSGTLRGKRMISGGRKNVRNLLYMAALVATRFNHVIRAFYQRLRDSGKKPKVALVACMRKLIIILNAMVKNKRPFSYSSVDF

SEQ ID NO: 390805 - protein, 416 aa, unidentified
MNAVGIDVSSRKSTVAVLRPLGEVVCLPFDVSHDADGLASLAEKLKALDGETRVVMEHTGRYYEAVAKALHEAGFFVCAVNPLLIKEYGANSLRRVKTDKADAIKIARYALDNWADLRDFTPMDAIRYDLKPLNRQFQLASKQRTASANNLIALLEQSFPGIRKCFDSPVRSDGTQKWVDFAHSFWHVDCVRKQPFAAFCERYRKWCKLHAYFFKLRNAEKVYALAKSAVVLTPKAKVVKVLVQEAANQLISISRSVEVYRAEMDRLAAMLPEYPVVMAMYGVGKSYGPQLMAEIGDVRRFERKQALVAFAGIDPMPNQSGDKNVRSNKSSKRGSPYLRKTLFNVIRTYLQCAPQDEPVFQFLNRKRAEGKPFYVYMLAAANKFLRRYYAKLRDYFASLDTLQPAAPIPTILKAAL

SEQ ID NO: 390806 - protein, 377 aa, unidentified
MNKVTGLEVTRIAVDLAKNVLQIHAEDHRGRIVWAKPLARERFLGWCASHLPPGCEVVMEACGGAHHWGRQLTALGFKPVLLAGHLVVPFRRQGRSGKNDANDAAAIYEAAARPRIHPVPLKSVEQQAILTVHRLREQYKGERTALINTIRGLAAEFGVVFPQSPEALQLRLHDALEDAGNELPALVRVALQRAQLHWLEIEIQMAWCDEQIQLHARRDARAKAISRIPGIGPITASAMVSTVGEFTQFKSAEQFASWLGLVPCQDSSGGKVRLGRITKRGDTYLRTLLIQGAKSAVMSADKRDDPISQWALRLKERSGWQKAAVALANKHARIVWAMLARGRAFDATHVSVMPGSPAHAPSAVEQAAQPHAELSAA

SEQ ID NO: 390807 - protein, 363 aa, unidentified
MDKYIGFDIDDKKTVACVVQKGKKDKYVTLRTDIEQMKKFLGSESKAGEKLHLTFEISGQAGYRYDRLRGHTEDITVSNPSKMTWIYRTAAKTDRIDARKQAVLLSIGEVPRVHIPSNRVRQWRVTILHRRNIVNKITSVKNRIRALLKANGFVKASERGSWWKVANRAWMRGLAEEVQTEGEDLWRMNLLDMLEELCLLEGQLKRTTGYLDGYLSKQAGGRLLMSIPGIGPRTAEAVLAYTDDIRRFGRSKQYCAYFGLTPRLDESGSSRRLGHISKQGPSVVRWLLVEAAWRTIKKSAALRSFYERVMCGQKSRKKIAIVAVARKLLGIMRAMQFTGELFNERLVCNECGIRRIAKVKNSA

SEQ ID NO: 390808 - protein, 369 aa, unidentified
MKKVSTAAQQQSRNFSQADLTIGLDLGDRSSWYCVLDKVGSIVMEQKVSTTPKAVKAVFGAMPRSRIALETGMHSPWVSRLLSALGHEVIVAHARNVRLIGESRKKDDRLDAQTLARLARIDPHLLCPVKHRSAKAQADLTLIRARAGLVRARTALVNTARGLAKSYGERLRGCNVRNMNPEKAEGLSPELQSALQPLLVALESLSEQIREYNEQIEKLAQDSYPQVELLKQIKGVGTLIGLTFLLTLEDPHRFRKSRDVGCYLGLQPGRRNSGQSERQMHISKEGDPYLRTLLVQGAQHILGPFGPDCDLRRWGLKLAERGGRNGKKRAIIATARKLAVLLHHLWVSGEVYEPWHNSSRSRIAMPVAA

SEQ ID NO: 390809 - protein, 337 aa, unidentified
MKLYCAADLHSNNHFLTIIDEHDKRMLEKRLPNDLAVTLQTLEPYRADISGVAVESTFNWYWLVDGLMEAGYPVMLVNTAKARQYEGLKHTDDRYDAFWLAHQMRLGILPTGYIYPKEQRALRDLLRERRRLVRQRTTNVLSTQSTLWRHTAVRLPSKVILGVSQKPWPELSDANVELGVRAHRATIKVLTTQLEVIERTVLKNLQPRPEYKMLLTVPGIGPVIAWTIVLEAGDLRRFVNVGHFASYCRCVDSQRISNERKKGENNVKNGNPYLAWAFFEAAHFAIQFLPAAKRFYEKKATQRNPILAMKALAHKLARACYYIMRDKVPFDAARLFA

SEQ ID NO: 390810 - protein, 423 aa, unidentified
MEVMHERVAGLDVHKATIVGCVRLGTGRKVTRECRTFDTTTDGLRALLAWLEQCRCSQVAMEATGVYWMPVWKILGEGDFALIVANAAHIKNVPGRKTDLNDAMWIADLLACGLIKPSFVPEEDVQELRSLLRTRKQLGREQTRHVQRIQKTLAEANIKLDSVLSDIMGASGRRIIEAMIAGLRDPRRLAALASSRIKATPKQVYDALHGRLTDHHRFLLTLHLRQWDSLDATIREIDKEVEARIAGMDKEVKAGEAPFRDLIGLVCTIPGVSTLSGTTILSEIGRDMSRFPTAGHLVAWAGLCPGQNESAGKRKPARLRKGAPWLKTMLVQCAWAAKRKKDSYYKAQFFRLQARRGPQKAICAVAASILTAIYHILKNGTEHRDLGADHFNRRSTEVQTKRLVAQLSRLGFEVQLQRTAEAA

SEQ ID NO: 390811 - protein, 343 aa, unidentified
MEYYAGIDVSLESSSLCVVDATGRIVREAKVASEPETLTAWFNSLGFALSRIGLEAGPMSQWLYAAMKQAGLTVELLETRHVRNAFKIMPVKTDRKDARGIAQLMRLGWFRPVHCKSLPAQEIRSLLGARKLLQGKLHDIELSLRGTLRGFGLKVGKTTPKTFEGRVRSLVTNHPTLTLIAEALLRARAVLLGEFLNLDQKVHTLARHDPPARLLTTAPGVGSMVALTYAAAIDDPARFKSSKTVGALFGLTPKRYQSGETDVTGRISKIGDAAVRTALYEAANIILERPVKGGWLKAWALGVAKRAGMRKAKVALARKLAVVLHRMLVDGTPFRMDRVATTA

SEQ ID NO: 390812 - protein, 389 aa, unidentified
MIYVGIDIAKLDHYASAIDSDGVVLIEPFKFRNDADGFHTLSSKLESLPTGDKVIIGLESTAHYGNNLVRYLVCRSYDVCVLNPIQTATLRKNNIRKTKTDKVDTFIICKALAMQQSYRFVSFDDLDLMDLKSLGRFRQKAIKQRTRLKIQLKASLDQTFPELQYFFKSGLHQKGVYALLREAPTAKDVASMHLTHLAHLLDVASHGHFKKDQAKELRVLARNSVGYPDSAIAIQIVHAVEQIELLDSQIAHVEAEMTDIMKVRDSVIMTIPGIGYINGGMILGEIGDVHRFSSPKQLLAFAGLDPTVYQSGQFQAKKTKMSKRGSKVLRYALVNAAHNVVKNNVTFAAYYDAKMAQGRTHYNALGHCAGKLVRVIFKMLTDNVEFNLD

SEQ ID NO: 390813 - protein, 366 aa, unidentified
MKKISTVQTFKSDIFKEQKLTIGVDLGDRWSLYCVLDEAGKIILEQKVPTTPEAMRQTFGKIPRSLIALETGTHSPWVSRLLTELEHEVIVAHAQKVQLITKSNRKDDRHDARTLARLARIDPELLGPVRHRSVQAQIHLTVIRARAELVSARTALVNAARGLVKSYGERLPKCGTQQVSRELAAKLSTELRDVLEPLLKEVESLNERIKEYDERMEKIAKEAYPEVCLLKQVKGVGTQIALTYVLTIEDPHRFLKSREVGCFLGLKPGRRDSGESKPQKGISKAGDRYLRTMMVQGAHYILGPFGEDSDLRRWGLKLAERGGKNAKKRAVVAVARKLAVLLHRLWVSGEVYEPLRNSQKAMRAVA

SEQ ID NO: 390814 - protein, 392 aa, unidentified
MSQRHCHFDASRSLTALEQDCTIIAVIEMSQSKWLVAALVPGVERHPLKKLDADEEGLLKLLHRWHSEADQVGRKIKRIVVAYEAGRDGFWLARWLRARDVEAYVIHPTSIAVSREHRRAKTDRLDTELLMRAFLGWLRGEKRHCSMVAIPTIEEEDARRPNRERQNLVTEQTRIVNQTKAIFARFGIRTFRPTLRKAEEKLKGLRTAEGTSLPENTRAELCRHLARLRVVREQIRAVERERLRKLAAAPAVEKGSHAMVFLIARVLGIGIETADMLVSEVLSRRWRDRKAIARYAGLTGSPDESGKRRRERGLARAGSARIRCGMIQFAWRFLRFQKDSALAQWFAARTADRRASTRKTMIVALARKLLIALWHLATRGEVPQGVILRPAS

SEQ ID NO: 390815 - protein, 371 aa, unidentified
MADCREAFVGIDVAKLRNAIAVADAGREGEVRFFGEVDASEESMRRVIRRVATKFDRVYFCYEAGPTGYGLYRLIRSLGHECTVVAPSLIPRKPGDRVKTNRRDALALARLLRAGELTGVWVPDEGHEAMRDLVRARAAAVETLRVHRQHVSAFMLKHGRIYPRKKGWTMRYLRWLQEQPFDHPAHQIALQEMVEAVRVSKERVDRLEGVIEEFVPAWSLAPIVRALQTLRGVDLIVAVTFATEVGDVQRFESPRQLMGYLGLVPGERSTGETVRRGGITKAGNGRVRHMLVESAWTYRHPPRVGAKKLYRLEQAPPKVREIAWKAQTRLTARYRMLSGRGKRTTVVCTAIARELAGFMWAVAREVQAIRS

SEQ ID NO: 390816 - protein, 339 aa, unidentified
MELKRISIDTSKHIFTIHGVDRQEHPVLRREIRRSQFESFFAKLEPTEVALEACAGSHHWGRLLSRLGHRVKLIPPQYVKPFVKRSKNDRNDAEAIGEAASRPAMRTVPLKTTLEQAATIIVKHREMLVAQRTQAINALRGHAAEFGIIAAKGCPNVTALLSVLASDEAIPVSARAMFEAIGQHVADLDTKIEELDRRLLDQHKVNPVSRLLAAIPGVGPITAITMALTVNPGNFESGRHLAAWLGLTPREHSTAGKHRPGKISKAGNERLRQLLVVGAMSVIRVAKPGRQSASGWLLQLLERKPRKLAAVALATKMARIIWAMMARGEAYRRQPVTTA

SEQ ID NO: 390817 - protein, 339 aa, unidentified
MHVTTIGMDLAKNVFQVHGVAEDGEVVFNRSLRRAQVLPFFGRLDPCLVGMEACGTSHHWARVLSRLGHEVRLIPPAYVKPYVKRGKSDAVDAEAICEAVTRPTMRFVEMKSTEQQAVLFLHRARDLIVRQRTQLVNMMRGMLAEFGIVIGQGIGRAIAFARAVVAGELPDIPDVARDVIANLGNQLVALDMRVRWYELRMGLEAKRDARIELLRSIPGVGLITASAIVATVGSARQFRNGREFAAWLGLTPLNRSSGGKERLGRITKMGDRYLRRLLITGMTARVRQVKSHPARSDPWTDAILVRKPARLATVAMANKTARTIWAMLTRNERFQPRVA

SEQ ID NO: 390818 - protein, 411 aa, unidentified
MEVIHASCAGLDVHQKTVVACRMYTGPDKTLQIEKKTFRTMTRDLLSLGDWLIEADITHVAMESTGDYWKSVYNILEGIVETWVVNASHVKNVPGRKTDVKDATWLCDLMRHGLLRPSFVPNQEQREWRDLTRMRITLVRERASTCNRMHKALESCNIKIGAVASDLLGVSSRIILRELVDKPDATPKDLAGLALGRLREKRDLLAEALEGRMNDHHRFMIAQLLDHVTELDRRIDTFEKRIEELSGPFKEAVDLIDSIPGISRTAAYAIVSEIGNNMDRFATPAHLASWLGLCPGNNQSGGKRMSGRIRKGNQYARANLVQIAHVVCRMKETQFYSLYRRIASRRGNKRALIAVSHAVVTIIHCLLTTRQMYTEPGPDYFGVRNPDRELSDLKRRAERMGLELIPAAKAA

SEQ ID NO: 390819 - protein, 345 aa, unidentified
MKPTTIGLDIAKRSFQIHGVDDAGAVVVQRPLTRGRLVVFFAKLEPCLIGTEACATAHHWARELQALGHEVRLIPPAYVKPYVRRSKSDAADAAAICEAVSRPHMRFVPIKTQDQQAAQSLTRVRDQLVSQRTGSINALRAHLAEFGIVAARGLGSARMLRAVVREDTDRGLPKTLRDSLTVLVEMLEVLDAKIAELERQIREWHKSNAVSRRLTTIPGIGVLTASAFTAAVPDPGYFRSGREFAAWLGLTPRQHSTGGKVRLGGISKRGNPRLRGLLIICASSVIEGLKRRKDGFAKAPWRDRLRATKSPMVVTVALANKLARTLWAIMSGQTCYRAELGFVGA

SEQ ID NO: 390820 - protein, 309 aa, unidentified
MGIDVAKATLDIAVRPTAETWRAPNDAPGIDALVMRLGAWAPTLIVLEATGGSQGPLVAALVAAALPVVVVTPRHIRACAQAVGILAKTDRSAARVMAHCAEAVTPAPRPLPDAETQELRALRGRRRQLVAMVSAERARLDTAPPSVQDAIQAHIAWLTTPITGLDDPLTHASQTHPAWQAKDDVWQSIPGVGPVLARTRLGQVPAWGPLGAQPLAALSGVAPCNRDSGTRRGRRTVYGGRAEVRAVLSMGALVATRHNPVIKAFYERLLAAGKAKKVALTACMHKLLTIMNAMVRDLKRWQPREVPIA

SEQ ID NO: 390821 - protein, 364 aa, unidentified
MNEILKQCVGIDISKDTFTVCVCRRDLSGKEYLSETVDFKNLKTGFNQLVKWSRKITDPSIETLFVMEATGIYYENLAYHLHRLNLPVSVLLPNKVKHFAKSLNVKTKTDQVDARIIARLGAERKLLLWKPPQEIFKLLKDLTREYAELIRERTAFKNRLHAMSSGYKPHPAIIRSNKAIIKKLTENAEKIKEEIEKLIYSEEWLGSKVNKVLTAKGVGLMTVATILAEMQGFEFVSNIRQLCSYAGYDVVQRESGTSVKGKTRISKKGNGRIRAALHFPALQSARHSPRMKSIYDKINQNKPSKMVGATAIQRKMLVLIYTLWKKDEEYVEDYENKAGRGLSNLPAQDELPTSSQKLSFVCEI

SEQ ID NO: 390822 - protein, 337 aa, unidentified
MTIVFVGIDLAKNVFALHGVDDAGKVRLVRPAVRRDQLVETIAKLPPCTIGMEACSGAHHWARQFMAFGHTVRLMAPKFVVPYRMSGKRGKNDAADAAAICEAVQRPNMRFVPVKSELAQARLAVHTVRQGLVAGRTATINRLRGVLSEFGQVMPLKAKTVRLEAATRAEGLSQWAQTACMDLLAEIRRLDEQIEAYDRHIRLMAQADDRSKRLMDMPGIGPTTASALLAAIGNGHDFNNGRQVAAWLGLVPGQYSSGGKNRLGRITKAGDSYLRTLLILGARAVLAAANGKQDRISRWAQALAERRGYWKAVVAIAAKNARMAWAMLAKGEAFKPA

SEQ ID NO: 390823 - protein, 349 aa, unidentified
MLADQVDYVVGVDTHRDQHVLAVVAAPTGAVVALRSVAANGRGYAQALRFADEYAGGKRVWAVEGAGHYGAGFARCLSGHGETVLEAGRAPRGERRLRGKDDGLDATRAARATLASGELALPRAGQRREALRLLVLARRGAVDVRRQALVQLRSVIVTAPDELRRELHGLPQKRLLERCSRLRRSSSRTPDELAITLVLRTLARRVQTATAEAAELETEILGHVRALAPRLLDERGVGPIVAAQLIIAWSHHGRLRSEAAFARLAGTAPIPASSGQTTRHRLSRGGDRQLNRALHTVILHRRLHDPTTKHYIARRVAEGKTTRDAVRLLKRYLARHLYRVLQNQTPMTT

SEQ ID NO: 390824 - protein, 357 aa, unidentified
MGKSIIDTSSVTRVGLDLAKRVFRIHAVDATGFVVIARSVNRRTLLKFFDTLPRCVVAMEACSCAHHWGRQLLELGFAVRLIPPAHVKPYVRRSKNDAADAAAICEAAGRPGQRFVPVRSVENQAALMRHRARELMVGQRTAALNALRGHLSEIGVVAAQGVPNAYALKKLADGGVDENGEIVVPDCVRFALAPLVRQIDALDEAIEAIDRTLEASAKTDETARRLMTIPGIGPVTAMALLATIQDFAAFSSGREFAAFLGLTPREHSTGGKPRLGRITKMGDRYLRKLLVQGACSALGHRKGHNDALRRWASGMLERKTVKYKFKLTAVALANKLARIVYALATKGGHYDDRPVAA

SEQ ID NO: 390825 - protein, 348 aa, unidentified
MYDSKDIVLAVDYHDENLVIRQFNCHSGEERLLKYRTTSRNIRKVICDSANEVAEVGGRVFWIMESTTGWARVKEAVGPLATMLVANVLQMPLPPKAYRRKTDKIDTGRILREFLNGSLPMAFQPSDELRQIRRLVATRESLVSRRTALRNWINRYLAHETWRSRAGLWSAKGMRSLKRFAASAEGPDKVVLSVKLKELEHLVELQTIVETEMLAIYKQWPQAQWIDEIPGIAEISAVSILARVGPIERFDSPEELISFAGLAPGIQQSDGSKREGRIGGGGTDKHLRHYLIEATFWARRVPRYFKTYERMLDKRGPKIARVVVARMMLRSIHKMQRAQVRFNRLRVA

SEQ ID NO: 390826 - protein, 341 aa, unidentified
MKEYIGLDVSMKETAVSIRRDGQRVWRGKCVSDPAIIAQLVRKRARLVDRIVFETGPLSVWFYHALHAEGLPAVCIDARHAKSALDMAPNKTDANDADGLAHLAEIGFFREVRVKSFDSMLGRTLVAARNRLVRITVDLSNHIRGFMKTFGLVIPAGKGSTFEGHVRRLLSDQPKLSAILLPMMDAWCATRLQAARLARQIAAEARQNDGCRILMSIPGVGAITATSFVTAIESPDNFRKSRSVGAWVGLTTRRYQSGEIDYKGHISRRGDHHLRGLLYEAASVILTRSSAESDLRNWGLKLRERIGFKRAAVALARKLAVTMHAMLRDGTLFERGLKPTA

SEQ ID NO: 390827 - protein, 312 aa, unidentified
MITQPEVFIGIDVSKKTLDVCSYPDKQKAQFSNDAAGHQQLVEAMRKVQPTLIVMEATGGLEFEATALLVTSALPVAVINPRNARDFAKAVGLLAKTDQVDAWALARFASAVRPEQREIKSEALRGLQEVLTRRRQLVDMVTAENNRKGQASANMAKEIEEHISWLKQRIKSADLDLGKAVKASPAWKAKADVLTSVPGIGSVATFTLLAELPELGTLNRREICALVGVCPFNRDSGTLRGKRSIWGGRTSVRAVLYMAALVATRHNPVIKQFYQKLLDAGKLKKVALVACMRKLLVILNSMVRNNTPWASN

SEQ ID NO: 390828 - protein, 379 aa, unidentified
MSKIRFVGLDVHADTIAVAVAEPNGEVRSLGIIPNRLESIRKLVAKLGPAKQWKACYEAGPCGYVLYWQLTALGVSCEVVAPSLVPVKPGDRVKTDRRDATKLARSYRAGDLTPVWVPDADHEALRDLVRAREDARQDQHRARHRLSKFLLRHDRRPPENVKKHWTLKYMTWIQEHVHFDQPALETTLLDYVHEVEHMAERIQQLEKAITEAIQKAPPEMRAVIEALQSLRGVAQLTAVTVVAELGSLSRFSNPRQLMGYSGLVSSEHSSGNRIQRGPITKTGNAHLRRVIIESAWAYQHRPWMGGFLLKRQRDLNLTPEVKEIAWKAQWRLHTRYKKLAAANKKKPQIVTAVGRELLGFIWAIAVHTEAQYSSQRKAA

SEQ ID NO: 390829 - protein, 330 aa, unidentified
MRKDGRVSGPYAGVPMHVGIDVSKAEVVVAVEPSGEVWTSPTTAAGLRALVQRLRKLQPTLIALEPTGGYEVPVVDALLGADLPTALVHPGRVRDYAKSQGQRAKTDALDARVLAQYAAQWKDAHRLVLVPAQRVLMRLMLRRQQLERMLGAERLRLDQDALYPDSVVRADLREHVAYLEAKLHDVDRELTAMIQANPTWAATAALLRTVPGVGKITATILIACVPELGTLSRHKIAALIGLAPLARESGRWKGQRHIVGGRALVRRVLYMAALTASRFNPSLCAFYQRLITKGKTHKQALTACMRKLLVLLNSMMKSKQPWQAPAPATA

SEQ ID NO: 390830 - protein, 370 aa, unidentified
MLDTTTFIGLDVHARSIKAVSLDVMTGEVRAATFGYDAGAVAEWVRSVDPRARCVYESGVTGFDLQKRLSGLGVDCVVGAVSKMIKPSADRRRKNDRNDAEFLARMLSVGNVVEVWVPDDECEAARDLTRALEDARDDLSRSKQRLSKFLLRHGLAFDERTPTGRRKGNWTRAHWSWIESIRFAERADNDVLAYYVDAVRRAAEEKARLEGLVEAEARKPRWRKRVDSLRCLKGVDTASAADLVFEAGEFSRFRNARSFAAWVGLTPSEHSSGESDRRGAITKAGNKHLRKTLVEAAWHYLTCSGRPKDLAKGQAPDRGARRHAAKGVRRLAERREALLARGVHGNKANVATARELACWVWAVGLMAEEA

SEQ ID NO: 390831 - protein, 406 aa, unidentified
MRLFAGDDWAEDHHDIEVMDEAGKVLAKRRLPEGVAGMTQLHELIGRFLPGDEQDAEVVIGIETDRGPWVAALVAAGYTVYPVNPRQASRYRERHRVSGAKSDQGDSHMLADMVRTDSHQLRPAAGDSPEAEAIKVVARTHKTLIWERTRAVQRLRHQLREYFPAALDAFEDLDAPDTLELLGKAPDPARAAKLSGAQVAAALRRARRHIADKTDAILSALRGEHLGQPAALTAAYAATARSLIAVITTLNEQVKVLQGQVEGHFGQHLAAEMYRSQPGMGAILGARVPGEFGDDPARYADARARKNCAATSPITRASGKKKVVAARFIHNDRLIDALMAWAFSSLGASPGARAFYDELRAKGIEHNDALRRLANRLAGILHGCLKTRTLYDEATAWSHRESSLAA

SEQ ID NO: 390832 - protein, 392 aa, unidentified
MTEESPRVVIGMDPHKRSVTIEVMDGDETVLGGGRFGTDAAGYRSMLDSVRTWPDRVWAIEGCNGIGRHIAHRLIADDEQVLDVPPRLSARARVFATGQGRKTDATDAHSVALVGTRMTGLRPVVPDAQLEVLRLLVDRRRSLGEEHTRKVAQLHALLLELIPGGAKVFLSAAQARKLLAPLRPRDVVGKTRKRVAMELVADLEKIYARTKTADKELTELVKATGTRLLDLHGIGPSGAARLLVEVGDITRFPDRGHFASWTGTAPIDASSGDHVRHRLSRGGNRQINRVLHIMAVVQLRNPTEGRAYFDRKKASGKTSMEAMRCLKRRLSDLVYKTMLEDLVAAQKTGPGGQPGNDSDSSVTGSQPSTGSSDKSLPGPAKAKPKRTLPAAS

SEQ ID NO: 390833 - protein, 403 aa, unidentified
MNNVVGIDVSKGKSMVSVLRPFGEVVAKPFSIGHTGSELKELADYLKSLDGETRVVMEHTGRYYEPVARFLHDEGVFVSAVNPKLIKDYGNNTLRKVKTDKADSRKIARYGIDNWAELRQHTPMDTIRMQLKTLNRQQSLYTKTKTMMKNNLIALLDQTYPGVNALFDSPVREDGSQKWVDFATTFWHVDCVRNMSLTAFAERYRKWCKRHGYNFSQSKAVEVHAGAQDLIAMLPRDALTKTMVRQAIDALNAISASMERLKAEMQALAAQLPEYPVVMAMHGVGDSLGPQLMAELGDVTRFTHRNAITAFAGVDPGADQSGTHEAKSTRVSKSGAPELRRALFLVMDCLLKTQPQDDPVYRFMDKKRAEGKPYLVYMTAGANKFLRIYYGRVKEYLASLEGN

SEQ ID NO: 390834 - protein, 437 aa, unidentified
MRRVIGIDIHRTFGEVVIWENGLTRHECRVDMTRTALEGFGRQLFKTDEVVIEATGNCMAVSRVLSPHVARVVIANPLQVKAIAHAHVKTDKVDAATLASLYAAGYLPEIWTPDAATERLRRLVARRYQIVRHRTRIKNEVHAILHAHLIPKCPHADLFNKRGRDWLTRQSVPEDERAAIARHIRELDRLGDDLAQLDRDIAQDALKDEEIQRLLTITGVNLAVAAGLMAAIGSIERFKSPQRLVSYFGLNPRVRQSGLGPAHHGRISKAGRSHARAMLVEAAWAAAKAPGPLRAFFIRIRARRGHQIAAVAVARKLATLCWHMLTKGEDYRWARPSLIAHKRRAMELAAGLPQKKGNRRGSSYAYNVKELRHQEAKIAQHAEKSYEHFVAAWRTHPPGKGRGCAAASNRQELNRLPGDASSRHATLRPEVDRTVKE

SEQ ID NO: 390835 - protein, 384 aa, unidentified
MKKTQRTLRKEDSTKLVTLYMACELSHNTWKLAFSNGEKIRTVTMDAREMDQLQRAIEGSKSRFKIEGEVEIRSCYEAGRDGFWLHRYLLSCGIENMVVDSSSIEVNRRKRRAKTDRIDARKLLNMLMRYHGGERKLWSVVNVPSVDAEDGRHLHRELEALNKERTIHRNRIKSLLIQQGIAVKNPSSRKFVLDLGSFRTGDGRELPVDLQSRIIREHGRLRMVEEQIYTLKRERERRLVEEGDHPSIRKVSQLMTLRGIGVNSSWKFVKEFFGWRDFKDRRELGSLSGLTPTPYDSGGYQREQGISKAGNKRIRTLSVEMAWVWIRFQPQSKLSQWFIERFAGGGSRMRRIGIVAVARKLLIDLWRYLEHGVIPEGAVLKSEA

SEQ ID NO: 390836 - protein, 324 aa, unidentified
MIDGILGIDVSKNTLDASTSSCNKVRARSFANSSEGWRHLLDWLITQKIQRVHACLESTGRYSLGIACALYEAGHVVSIVNPAQIRDFARTKLGRNKTDGVDASHIREYCELFKPQPWAPPSEAHRRLGELQTIRAGIIAGLTEWKNRKNSGMVDAGAQALADVTISHFTSQLGAVDEAIAQTIDNDSGLRWKRDLLLSISGVGDTLAGVVLAELPGPDVLRSSAEVVAYAGLNPRRHQSGTSIDRVTRISKIGNAVLRAALYMPALSAMRYNPVIVALVTRLKSRGRLKPKQIVVAAMRKLLVLCFGVLKTGKPFDSAIAMGC

SEQ ID NO: 390837 - protein, 340 aa, unidentified
MINNFLGIDVSKDRFDVFLSFISKKGKRETRKRSFKNDDHGFQGLLSFLQKHNVEQVKACMEATGCYSEALAEFLHNTGHFVSVVNPYCIKSYARSKLTRQKNDQTDAEIIADCCQRQEPTRWTPPSPELKKLKHLYRCSVALKDELILVNNHLEKKERLPKEVANAWEDLAMNIAQKIETIKNSVRELLKQHKELLENFQLLLTIPGIGEESAVAILAEVPDIEVFRNARQLAAYAGVIPRNITSGSSVYAKPRLSKSGSQPLRKALFFPAIVAKNHNPIIMSFCQRLKEKGKHNMAIVGSAMRKLLHIVFGILRSKKAFDPDHIKNYRARRLTEGLVL

SEQ ID NO: 390838 - protein, 343 aa, unidentified
MKVTTIGFDLAKNVFQVHGVDERGYIVVRKQLRRDQVAIFFANLPACLIGMEACGSAHHWARKLQGFGHRVRLISPQFVKPYVKSNKNDAADAEAICEAVARPNMRFVPIKTMEQQAVLSVHRVRQGFVKARTAQANQIRGLLTEFGLVLPQGISNVMRGVPQLIDVATDLPASMRQLIARLLENMKVLDRQVKEFEAQIKAWHQGSELSRKLEKIPGIGPLAASALVASIADARSFKNGRQVAAWLGLVPKQDSSGGKPKLLGMSKRGDTYLRTLLIHGARSAIVAAQRRGKPNVWLSGLLARRHPNVAAVALANKNARTIWALLAHEREFRPDYVPRLATA

SEQ ID NO: 390839 - protein, 342 aa, unidentified
MDHYAGIDVSLECSSVCVVDASGKIAREGKVASEPEALIAYFGLLRLSVVRIGLEAGPLSQWLYAAMKEAGLAVELLETRHVRTALETMPVKSDRNDARGIAQLIRLGWFRPVHCKSIGAQETRAVLTARKLVQSKLLDVENSVRGILRGFGLKVGKTTNRSFAGRVEDLVVSHASLQMIAAALLSVHAVLLRELKAFDKQVRSMARVDVKAKLLMSAPAVGPIVALTYASAIDDPGRFTSSRRVGAHFGLTPKKYQSGETDYTGRISKIGDATVRTALYEAAHIMLIKPIKDCAPLKSWAMRIARRSGMKKAKVALARKLAVILHRMLANATPFNAAMAAA

SEQ ID NO: 390840 - protein, 335 aa, unidentified
MTFTHFIGIDVSKKKLDLCLFNGKEVLLELECPNSIVAIKKVLKEIIKESKINATNLLICAEFTGMYIYPLVESSKALTINLWLETGSQIKLSSGVQRGKNDKVDAKRIALYAHRFNDKAKIYQAADEVIERLKYLNSEREMLVVDKAKYQGQLNDQGDYMLKAAFKEKEKRLKELIKGLNKAIKSIERQTKELVEKDLHIKQQFEQMISIDGVGKQVALETLIVTQGFKAFTEPRQFCCHAGVAPFAYTSGSSQRSKWKVSNRANKRLKQLFHMAALSAIKMKGELRDYFLRKVAEGKNKMTVINAVRAKLIHRIFAVIRDNRKYEKIYTNPLA

SEQ ID NO: 390841 - protein, 356 aa, unidentified
MSEGSCVGLDVHARSVVAGVIDVGSGEVRSLRVPPGAEATVAWLKTLPAPVRVVYEAGPTGYRLARFCAEAGISCVVAAPSKIRPAADRVKTDRRDAERLARLLRLGEITPVRVPGPAEEAARDLVRAREDARGDLMRARHRLSKLLLRHGAVYDATAWTRAHDAWVRKQRFQGGPLAIVFDECYSRMIDAKTRRDTLDKAIAELAASEPYVDVVERLVCLRGVSTLTAFALTVELGDWNRFRPESLAPFLGLTPSESSSGERRRQGGITKTGNTHARRLLIEAAWHQRSAPRLSVTLERRRTGKSLAVRAQADSSARRLHRRWNALEARGKPRLIVVVAVARELAGHCWALATME

SEQ ID NO: 390842 - protein, 445 aa, unidentified
MPRGESAPDLCPAFRAPVQGSAEVTVARRLELGKDMTDQRQWYVGVDWASESHHVFLTDADGRKIAERVFKHGGEGLAEMAAWLVAASGAEASQIQVAIEVPHGPVVETLVERAFKVHAINPKQMDRFRDRYTLAGAKDDSRDAQVMASALRTDPRCFRLLAAADPVVIELREWSRIAEDLSAERNRLTNRMREQLWRYFPAMLELDGDLGAEWLLDLWEVVPTPAKALRIRDKTIATLLKRNRIRRFDATHVLDVMRKPPVRVAAGTTEAASAHISALVARIRLVNRQLVQAHRQIDALTARLIPPEPEPGQRKQHDVEILASLPGVGRIVLATLLAEAFDALQRRDYAALRSLTGVAPVTKRSGKSCIVVRRQACHDRLANAMYHWARVAVQHDPRSRAKYAALRSRGHSHGRALRSVADRLLNVACAMLKTGTTFNPSPAAP

SEQ ID NO: 390843 - protein, 338 aa, unidentified
MQTITTMGLDIAKSVFQVHGVDAEGNVVLRRQIKRRYVLAFFQKLPPCLVGIEACASAHHWSRELGALGHTVRLMPPAYVKPYVKRHKNDATDAEAICEAVTRPNMRFVATKTPEQQSCLTLHRTRHLFIRQQTSVINAIRAHLAEFGIVAPVGRNGVEQLLGVVADGSDKRLPEVARACVAALGTQLRVLKAQILEFDRRIMAWHRSNEVSKRLDEIPGIGPALATALVASVADPKAFRSGRHFSAWIGLVPKQNSSGGKDRLGSISKRGDRYLRSLFTAGALAVIRYAKIHGTRHRPWLTALLARRPTKVAAIALANKIARMAWAMMATGNDLTTA

SEQ ID NO: 390844 - protein, 357 aa, unidentified
MSQTTASTVPMTIGLDVGDRNTHWCVLEGREVIQRGAFQTSRKGLDRALAPFAGAQVVLEAGSQSPWMSRQLRAAGFVVHVVDPRRVQLISKDPRKTDRRDAEVLARLEAGMPELLGQIHHRSEQAQADLAMVRTRDQMVRMRTSLVQFVRSQAKAFGYRLPSCSAAGFHNRIHELVPDVLVPAVQPVLQKIAEFSKAIRDLDRQIEDVARQRYPEIAMLQEVQGVGPVTATAYVLTIEDPSRFPESRRVGSWVGLCPRNHASGDQDPELRISRSGDAYLRRLLVQCAQYVLGPFGKDSDLRRFGLRLAARGGRAAKKRAAVAVARKLAVLLHRLWSTAMLYDPLFDANRKAARAAV

SEQ ID NO: 390845 - protein, 351 aa, unidentified
MPHKSTVHAVTAIGIDMGKNTLHMVGLDSRGAIVLREKVSRGRIASRLANLQPCLIGIEAGMATHYVARELAALGHDVKQVPPTYAKPFRQGHKNDFRDAHAVAEAVQRPTTRFVPAKTNEQLDLQALHRVRSRLVSERTAVINQIRGFLLERGIIVRQGLRFLRQQLPDILAKRTDVLSPRMVRIVADLAGDWRQLDERIETVTNEIETLAKSDDNCRRVMTVPGIGPIISSAMVAAIGSGAAFARGRDYSAWLGLVPKQMSTGDRTILGRISKRGNGYLRTLFMQAARVILLRPANWPKHGFGAWLIRAAQRLHPNVLAAALANKLARIAWTVLAQERSYEARVTKAAA

SEQ ID NO: 390846 - protein, 436 aa, unidentified
MRGCRCSMIMGFTKPIEHFNLQRKKVITMNTLYVGIDVSSKSNVVYLMLPNGDKHSNFSVANSHEGSTLLVKKIYSALTSHSLDTVLIGLEATSVYGDNLVYFLREDATQAPFNRKIHVLNPKQVKKFHDTYNDLPKNDYVDSFVIADCLRFGRINKEVYMGDYRYKALQNLTRARFFAVQNLVKEKQRFMNVLFKKYSTMTQEKVFSDAFSTTALAVYDEFESAEALANMDLHELTDFIIEKGKNRFPDPDAVAKAIQKAARSSYRLPKTVNDSVNQVLSISITSMKALESQIKEFDKAIIALMELLPNVLISIPGIGPVYSAGIMAEIGDINRFDNQASLAKYAGLAWKQHQSGGFEAEVTRLIPSGNRFLKYYLCEAAFSLVRCDKEYSDFYHLKYKEVNRCQHKRALALTARKFVRLVFRLLKDNRLYCPAK

SEQ ID NO: 390847 - protein, 386 aa, unidentified
MAQTPGPSFPTPDYERTLVLAIELSNVSWVLAAQIPGLPRVKAKRSVEPAPETLMAAIDGYRERARAAGGDVERVIAIYEAGWSGFCLARWLGMRGIETHVVQPASVPVDRRARRAKSDGIDAELLLRTLLAWLRGEPRVCSMVPVPSEADEDARRCVRERMELVTERVALVNRIGAVLATLGVGDYNPLLRNRRERLDALRTALGTPLPAHARAKIGRLLDRLDLVCAQITALERERDAVLEQEAPDRAGAMIQQLSGLRGIGVQSATILVREAFVRVFANAKALGSYAGLAAPPYSSGGTEREQGIGKAGNRRLRTVMVELAWLWQRYQPGSAPVNWFRARVSGAGARSRKVMVVALARKLLIALWRFATQGVLPEGAVMKPAS

SEQ ID NO: 390848 - protein, 411 aa, unidentified
MILIGIDWKDKGYTVRIIDEEGNDIAGDFEIEREEEGFSELIQKIREYSDDDSKVLIGIEKERDPLVEYLINLGFKVFLVCPNMIKSLRKRHSMSGQYTDELDSYVIADAVRTDRKRLTEIEPRNEKIREIEFLMRHRDKAVDDKRRLTSRLTAYIKEYFPAFLNFFDNIACPTALALLKAYPTYQDIKDLSKEEIRTFLGGHSYYSKNGLQRIHKAIERGQVKIDSIVIKERSRSALFIIEKIEILNREIKAYESNLEEVTEDDADAEIFSSIPGAGSTITPGLMVVFGKKRSRYESSGEINSLSGMVPLTKQSGKWETHLFRFGCNHYYRNILTHLAFCSITKSEWARDYYKRKRAEGKSHYHALRCLGRLWVKVAFALWKKRQKYDEDKHLAAVKRHSMRNRPIRKSA

SEQ ID NO: 390849 - protein, 427 aa, unidentified
MSKFNPEQHRIETASAIEAISNAGIVESHAAYVGLDVHKETIAVAVAEPGRGEPIYRGEIANKPKTVEKLLTKLSEAYAGGLLLFCYEAGPCGYVLYRQILACGHDCQVVAPSKIPKAPGERIKTDRRDALKLARLLRGGDLTTVWVPDQEQERMRDLSRARDDMKSQERKARQQLNAFLLRHGHHWPRGKTHWTQAHENWLAGLKMEHPWQQVVLQEYIDAERATGERVAQLTDHLMRALPEWSLAPAVDSLIALRGVDKLAAIVLLAELGDISRFDSPKQLMGFLGLVPSEHSTGTRRRQGAITLTGNGHARRMLVESAWSYRFPARQTKHLKGKARNASEEAKKIAWKAQTQARGSANRTELPMRQETCPVAVAGCARRFQAALRQTPIRRGTSPTERLARAVEPKSSLGKLAQKPINYRNHSL

SEQ ID NO: 390850 - protein, 345 aa, unidentified
MKYFFIGIDVSKEKLDATMIHYESESDSEQQLAYTTVENNPKGFRSLVSWSKKNAGRGVKTDTMLFCCETTGGYDRALCDWLYGNGLNIWRESALQIKRSMGLRKGKDDKADSEMIAHYALRFRSQATLYKPLDGNMRSLRDLFLYRQSLVAERQAKMVSSKEKQHISSKSKVDNFIYRDAQKCIDIMTKSIKECERRMLEIIKEDEEMYRNYLHLISCKGVGLVTSVMLIIYTDNFKSWSPKKMASYCGIAPFYESSGSSVFHRANTSGYSNRRLKGILTQAARSAITHNPTLRQYYLRMKAQGKPYGVILNNVNNKLVHILFSLVLHDCDFELDHEAKRALRA

SEQ ID NO: 390851 - protein, 383 aa, unidentified
MRIVCGLDVHKDSIYLCILSSTGEIFEQVFGVLTTQLEEMRDLMIKYNVQEVGMESTSVYWIPVWRVLEPHFKLKLINPYFIKQLPGRKSDVKDAQWIAECMMKELVRGSFVPPERIQQLRIYDRRIYDLDDEIIRKLAKLDAVIQRCNIRLSNYVSNTDSVSYKSVIDKICEGVTSPEELVKEVHGRIINRHGKETIIASLKGSITEVDIDIMAQLKAEIDLAELHKQKCLKKMQEICEKEYSEQLKNLQTIPGVKMRAATSLIAEIGTDMSHFETANHLSSWAGLRPRNDQSNKTIKSRRITHGNRYLRRTIIQCAWGASRAKNYFFSRFSYYQTQVRKKNRMKVIVAISRKMLVCAWHILKENIAYKDFDNKILTSDTKG

SEQ ID NO: 390852 - protein, 330 aa, unidentified
MKNYVDVIGIDVSKLTIDAYIHKKEIHRLFTNNRKGFKELLIWVNKHLGSILYFYCFENTGNYSLNLSIYLDERSIDYVEENPLLIKRSAGIVREKTDKLDSAMIARYAWLHREELSLSSVRDNKHQELGRLMALRDQLVRNRTGMMSSLKELKSLLSSPSTDVCCKSILRSISYITKQILMLEKRMKEIIKSDTRLDRNFKLLSSVRGIGLILSCQLLYHTSNFNRFNSWRQFSNYCGTAPFAYSSGTSVKRANKCHHIGDRKMKTLLSLASVSAIQYDSELRLYYKRKIEEGKPKLVALNNVRNKILARAFAVIKRGTPYVELHQYAA

SEQ ID NO: 390853 - protein, 394 aa, unidentified
MGKLYVGIDVSKDTSSAHGIDEEGNSRFSMLFDMDGTGFGRLISTIKDNCESISDVVVAMESTACYHINLYSFLVAQGVEAVVVNPLLIANFARMSLRKTKTDRKDAETIARFLLAHRASISKLDISQKMQDLRDIARERESLCHQLSAVRVEIRRLLQTTFPELERLCDPFRKSVLNMLKRYPSARLVRKARAASVAKTLRYTPSSRKLTASPEDIVEAAASSVASVSQAKELILQGKIETFKHLEKRKEKLSAVLTEYCESSMVEDLEILTSIRGISNGTATTFLAEVGTIGSFRSWKSLVAYAGLDPTVHQSGKFEGKSRISKRGNRHLRRVVWIMTGSVITHNSVFKEYFLKKKSEGQAPKKAIFATSHKLLRLIHAMLTQRTHYQERCI

SEQ ID NO: 390854 - protein, 428 aa, unidentified
MNNEDIIRREQFCQIISEIRGSDDYLVVGIDVAKDKHHAFMGSATGKSLLRKLVFENNLEGFRKLLERSEAIGIQNALSKVVFGMEPTANYHKPLGAHLIGCGCHVVLVTGKAVKYNRELLDGRWDKNDDKDAANVADLVSRGKCLYYDYPSSSINELRQLLSLRRRLKKEEHSLRMRIRNNLLALYFPELDRFYKVCESETLAIVRWCLDPGRIAGMEFDEFFSMVTSTTRGIAQKLRLQKIHRLAVESIGCPMGPAAEFEATLLVEKLKEVRRQLKEISDLMADFCMQFAEYRFVLTIPGFGPYISARVLASIANPWRFDKSSQVLKLAGYDLSAQRSGKRSADAVPVISKRGNGELRYALYQAAHVASSRNRDFIRYFTRMLCGRERERGIKTKMKVKLAAKMLKIAWTIMKKKEVFDPNHLVIE

SEQ ID NO: 390855 - protein, 342 aa, unidentified
MRTIQKANSVNLNTATFIGIDAHPTEHTALAINRFEEEKGRLRFENTKEGIAEFLSWLPKLDTYPDNVVIGVEGSGGNGHALVSYLLPLYEHVYEVNPLYTKQRRTLGTKGRKSDPVDAKLVAEVLTRKLSELPKLTGSVLSSHLVSLKKIVWFYEEKTRHATRLKNQLHRLKREHGLCVNPDEKRILFLTIREKETELKSVQRVQKKLVREMAIQLKGHGANLTTMPGISTIIATKLLARINGIERFGTVSQFLQYAGIAPKEKSSGKTTRHVQNNKGNRHLNSVFYLVALTQTQWNPKAKVYYQKKIAEGKTKKHALRCVMKRVACILYGMLKSGEAYRV

SEQ ID NO: 390856 - protein, 344 aa, unidentified
MLKSTIFGIDLAKNIIQVCEISKHGELVSNKAVSRQKLKELLAKAKPAVVAIEGCGSSHYWGRYAQSFNHDVRIISPKKVKGFLQGHKTDANDALAIANASLQIGMKSSKPKTEQQQTIQTLETSRFHLSRSITSLSNHLRAMLYEYGIVSARGVKALTTVVQDTLSDANSIPECLRSTVNQLWLTYLGLREELAQLIKTKNALIRQLQPCKKLMDLEGVAEVCAGMLYSSIGDGKQFKNGREASAFVGLTPKQHSSGGKVFMTGIDRAGGIRELRSALYQGALSYICNLPDEPKTAKQAWLIKLVQRAGIKRSCIALANKTVRTAWAMLRYENKYEQQPLLAI

SEQ ID NO: 390857 - protein, 428 aa, unidentified
MLGVGIDWAEEFHLVALGRPGEGVFDVARVEHTPMAVGSLVARIATLEPDPAEVRVVIETRHGLLVEALVDAGFTVLPVNPDLVARRRGPAKKKDDAEDARIACLLALDRFTDLRVLVPHGELAGELRAIARDDVRAARDERRLLNRLRADLSATFPAALLIAGDDLGAPVILKLLQRWPTATDMAAATIEDLSTFARCAKHGWPDRFAARVRDALAAEHFQARDYLVRAKADTVRLGCAQLLLLREQRRTWERRMGELLLGDRRRGRAKQPGHERGPAVPGGEIYLSFPGLGDRLAARIAGEIGDAIGQFDTPNALQCYAGKAPVTRRSGKSELVVATRLACNRYLADAVQQWAFTSLRTSRWAREFYDTQRSRGKKHHAALRALGNRWLEVLWHCLINNTPYDEAIHIANRNRALGRTNQPSQRAA

SEQ ID NO: 390858 - protein, 354 aa, unidentified
MSSVYVGIDLHKRVSQVAVLDERTGELMQRRVCNQDRAEWEEIFRGLGAGTPVALEATGNWMWLADLLEELDCQVHLAHPARVRLIAESRNKNDKVDAEALLMLLRGGWLPEAYLAPGEVRQRRLLLRLRQGLVHMRTELKNRLHALLARHNLQSEHTDLFGKAGRAYLEALALPEASAKCREVWLELLDVLEGLIGRVENWLYAHLEEDPRARILQTMPGVGKLTAYLLLAEIGPIDRFCRPEKLVSYAGLCPSTRASMDRVRHGRTSPAGRSCLKWALVESAHVAARCDPYFASLHARLRHAKGNGKSIVAVARQMTKIIWRMLKENRAYISKKKQRRIRVGSVAPVADSRS

SEQ ID NO: 390859 - protein, 362 aa, unidentified
MSITMIGLDTAKSVFQIHGVNETGKVELRRKLRRSDLIAFFEKQERCTVVMEACGAAHHWARILSGLGHTVKLIAAEAVKPFVKKGKKNDAADAAAICEAASRPDATFVPVKSVAQQGILALHTTRSLLVKQQTMLANAIRGLATEFGLVVPRGLHNLEPLVELVNTDEAMPKQARQAIAELHDRFGELTKSIKAFEVAIVAHARSDATARRLATIPGIGPITASLIAATVVDISLFKTARQFAAWLGLVPRQNSTGGKTRLGRISKAGNREIRKLLVLGATSMVGRADGWNSAVGAWLRDILQRRPVRLVTVALANKMARIAWARLAKAPASRLRLVGRPGEGVMTRKEVYRPQGGIAVAA

SEQ ID NO: 390860 - protein, 340 aa, unidentified
MGLYAGMDLHSQNTFVGILEKGSMRRVYQKRIPNDMPHLLYEIEPFREELEGIVVESTFNWYWLVDGLMDAGYRCVHLANPSAMKQYEGLKHVDDKHDAFWLAQMLSLGILPQGYIYPKEERPIRDLLRKRSYLVRQRTSNILSLQSMIERQTGQRVSSNVLKKITEEKIKELFKEDHLVLSAMANMLTMRALDQQIRIIEKTVKNSIKLRKEFECLLTVTGIGDILALTIMLEVGDIRRFEKVGNFSSYCRCVSSTRISNGKSKGKGNSKNGNRYLAWAFIEAATISRRYNERLNRFYQRKAAKKNGIVATKALSNKLARACYYVMRDQVPFKEEMLAP

SEQ ID NO: 390861 - protein, 319 aa, unidentified
MGRNNIEFEQVIERGCGLDVHRDTVVATVMGKGIETETRTFGTTTSSLKELGEWFASLHVTDGAMESTGIYWKPVLHVLREYPLNLIVVNARHIKNVPGRKTDKADSQWICKLLISGLLKGSFIPPENIQELRDLHRYKKKPVGAIASEKNRIIRVLEDANVKLSSVVSDTSGVTATYLINGLIEGRRDLENLIAECYHRKLQASREQIKEAINGRLTPHHAFILKSMQKHIASVEAQISEIDVEIEKYIKDFEKEIELLQTIPGVGKDGAIGIVAEIGVDMDVFPSEHHLASHSGMCPGNNESAGKKKVQEHDKGTNT

SEQ ID NO: 390862 - protein, 370 aa, unidentified
MAKRSMFVGMDVHKETIDLSVAEDGRQGEVRHYGVIPGDLEAVAKVLRALRAPDRILHFVYEAGPCGFGIHRYLTAQDEDCVVVNPSSMPKRSGDRIKTDRRDGDALARLHRAGELTAICIPTPDDEALRDLVRAREDAVGLSTQAKHRLKAFLLRQGRRYPGRAGWTLPYRRWLADLSFPLAPQHIALQEYRDTIDETERRVARLTDQLRQLTPGWRWAPVVDALQALRGVSFVTAVGLVAEVGDIRRFAHPRQLMAYLGLVPSEYSSGPSVRRGGITKAGNPHARRLLAEAAWAYQGIPRLGRQALYRQEALPKSICDIAWKAQLRLTSRFRRLVARGKAKPKVATAIARELTGFIWAIAREVPPPPA

SEQ ID NO: 390863 - protein, 334 aa, unidentified
MPSSTQPTLLALDIGAKQHAFAWEHESHRDTGVVPNEPKALRSFLTTLIRRTGVLHVLVEATGVYYLDVAMLAVELGAQVCVVNPKAAHNFAKAMQQRSKTDRLDAAMLLDFLKRMPFTSWTPPRKALLELRHYGRYLTQLTGETTAARNRLHALCSTQASPAYLRADLKRFITSMEKRITRIRTQALTLIKADAALYERFQALTTIVGVADISAVALLSELSTMPPSLSSRACVCHAGLDPRVYESGTSVYKAPRISKHGNKYLRRALFHPALTAGVHDPRAKAFKERLIGRGKRKMQANVAIMRKMLTAAWAIVNDPQPYDASKLYADVEKA

SEQ ID NO: 390864 - protein, 395 aa, unidentified
MVFVGIDVSKDYSSAQGLDREGKKLFYLDFPTNGEGFSRFLDRVKRQVEDLSEVMVAMESTGCYHINLFAFLCSEGIVCMVINPLLIANFARLSLRKTKTDKKDALTIAQFLLAHHRTLSQVSYSQSSQDLKDLARERESLAVMIAGLKNDVRRLLQMTFPELEHRCKLFTETMLRFLMKFPSARAIHSAKAKEIAKALIHVEGKRKRVWISAQEIIAMAKSSVAAESVAKEWILSDKIETLLYLEGKKKRITEVLVKACRSTRVEDLDIITSVDGISTITGSTFLAELGDIKTFSSSKHVIAFAGLDPSIRQSGQYEGISRISKRGNRHLRRVVFLMTLCAVRSQNVFREYFLKRKEEGLPPKKAILATAHKLLRVLFAMLTSKSHFRKEVVEV

SEQ ID NO: 390865 - protein, 443 aa, unidentified
MARKQSRQRFELVHPHCAGIDIGSREHWVAVDRDHEQPVRSFSTFTDDLVKLADWLEALKIEVVAMEATGVYWIPLFELLDARGFKVYLVNSRATRQISGRKSDVLDCQWIWQLMSHGLLRGAFRPDDAICSMRALIRQRASKVRNQAQTLNRMQKALSQMNIQLANVISDISGVTGMKILRAIIAGERDPSVLADLIDRRIKASKETVARSLHGNWRLEHLHALEQEVQCYDFFEQQIGACDKAITDALSQLPEREEAPQPSRKILRSPHRCAADQAALHQSLWRVMGVDLTAIPTIGVDTALVIAGEIGPDLSRFPTMEHFCSWLGVAPPTRISGGRPLSGKSQKTLNNAAQALKQAASNARNDKSFIGASHRARLARMDTSCAIKATAHQLARLIYAMLTKGQPYVEQGIEAFEERSKEKQYRALLRKARKLGLDLVKAS

SEQ ID NO: 390866 - protein, 348 aa, unidentified
MGMLADEVDHVIGVDTHRDTLTAAVTDPTGAVKAQTTLATDAFGYRRMLAFARKEAPGKRAWAIEGTGSFGAGLCSFLLEKGEWVVEIDRPARPRSRTGAKSDELDAARAAREALSRAHLAQPRRRGDREALRVLLATRESAVVGRTKAICLLKALLVSAPGQLRNQFRNVTTEEQLIRCSRLRTTPTQSEEHRCTVISLRATARRALALEAEAADLEADIQRIVAKMAPLLLQEPGVGPISAARILCSWSHPGRLRSEAAFAAIAGAAPIPASSGQTVRHRLNRGGDRQLNRALHTVVLCRLARHEETRVYAAKRAAEGKTPREIRRCLTRHLARRLFKLLESSVAA

SEQ ID NO: 390867 - protein, 403 aa, unidentified
MEIIKNKVCGADIHKKFLVATILSRDGTQLSQRFGMMLDDILKFKEWVIANNCEQVAIESTGVYWVPIYTALEDKIEVIVANPYQIKHTPGRKTDKVDSEWIAELCLKGMIEPSRIFPKEDRELRTLTRARENLVNNRTQMKNRIHQILEYSCIKISSVLTDIFGKSGRFLLEGLLEGKTLDEILIGTKSKTIRKKEKQLREAIKNSLDPAQILVIRYYLEQMEEIQKKIDNLDTEIMSRIKSKKEDLEIAMSIPGVAFTSASSILAEIGNYRDFENGSKLAAWCGLVPSIYESANKRITGSITKQGSKHVRRMLVQVAHSISRIKNSKLKSFFLRIKAKKGTKIAIVALARKVLCILHHLLVNREMYEETVELKPKSLKFDRTSSPIQITEQDMIDTLTKAG

SEQ ID NO: 390868 - protein, 340 aa, unidentified
MSLVLQSFLPYPDSCLGTSPHQQGWDTKMAELSFGGIDVSKDRLDVLLLPEGLCFSVCNDAPGWVELIVRLRPLAVSAIGLEPSGGYERGIIRALLAAGLSVRRINPNKLRQFARARGVLAKNDRLDARLIAEYVAIMPTRVVRRDDAVEHLAEIITMRRQLCDEHAAAMNQAAHLEDPMLQRLSKRRLARLEADILLLDKRLAELITADPRLAHRYRLLISMPGVGPILAYTLLAMLPELGQIDRKQIAALVGLAPYDFDSGKLKGHRCIYGGRMPVRNVLYMAALSASRYNPALKTFSKRLAAASKKSKVIIVAVMRKMIVTLNAMLRDNTEWRPSSL

SEQ ID NO: 390869 - protein, 355 aa, unidentified
MTALYDYHIGVDYHKSYSHLVVQDSAGKTLRSGRVKNDRRSLGSFLERYRENSHAVVEATRNWMVMYDWLDDICDDVVLAHPLKVKAIADAKIKTDKIDATVLAHLLRADLVPEAHAPSEKARELRVALRERMFYVRLRTMVKNRIVTVFDRYPEQTAQLRKLGDLFGRTGRQQLAALNVSEIDRIQIDRGLDFIGDIDGRIKQAEATIRAMTKANANVKLLKTIPGIGEFFARLIDAEIDDISRFRNPKKLAAYAGLVPSTYSSGGKTYHGKIIKQGNKWLRWAFVEAVAPAVATDPQLRAQYEHLKFRGTNKARVAIARKLLTITFQILRDQRPYERRGGSEEGTSSTISRLS

SEQ ID NO: 390870 - protein, 428 aa, unidentified
MDEVDRNRLEEFRQLRQEVRHSEEYLIVGIDIAKDRHHAFFGTATGKTLLKRLVFSNDYEGFRKLLDQAEALRVRHGLKKVVYGMEPTANYHKPLGEFLIHLGRCVVLVSGVSVKKNRETLDGRWDKHDVKDSANVADLISQGKCLYYEYPTAQLRGLRGLLSLKRRLKKQEHGYRVRIRNHLIAQYFPEMDRDYERLGAEGLSVVRWCLPPSRITELDVEPFMERVTSRRITMEKRRRLEAIWEKAGETIGCDGVPGVEHEAKVMVEGLRQIREMIKGTEEKIQELCEQFLEYQYLLTIPGFGPDVSAKVLGAIGEPDRFHNGKQVLKLSGYDLSADRSGRDSDQAIPQISKRGKADLRYALYQAAFIASTKNPDFMCYYTRKLRGREKEKGIHTKMMVKLSAKMLVIAWTLMKKKEAFDPTYLNAE

SEQ ID NO: 390871 - protein, 426 aa, unidentified
MSVRDYSKQVARRQRIGDTTLVVGVDIGCASNAVGFMSKEGKVLGSYSYMPNSREGFEQFVKMTEGLKAKHGLTDVLIGLEPTGHYWRKFAYFAKGKGCEVRFVRTTALKHHRELDESSSAKSDKQDALTITNITREGKYIDTVIEDGRMRPLRTLVKVREKIQKRNVSAKNSLHAALDDYFPELKEIFWSMHSRGLWALLQRCPFPVDVVTLEVSVLKEIIARASRRRAEASRKATAVYEAAKKSIGLKQVGSADRYRLRMCLDEVRRTEFMIKDLEREIKRMLQEIPDAQYLLSIPGIGPISAAVFLGELGDPSYFQSARQIVKYAGYDPQESDSGYRVSRRFISKKGRWLLRKHLFLMSMRVVVLSRYFQQYYQRKLQTKNRFGQLPRKKEILCAVAIKLIKVIFALLRDQRNFEDTVTCSVQ

SEQ ID NO: 390872 - protein, 355 aa, unidentified
MSCEKYIGMDVHQATISVAVMDSMGKVIMESILETKASTILEFLGGLRGTLSVTFEEGTWAAWLYDLLKPHVAHVLVCNPRKNAALKQGNKSDKIDARELANRLRLNDLKPVYHGETGVRMLRELARSYLTIVKDLSRVMNRVKALYRSWAIPCAGRDVYYTRHRSQWLEKIPEAGPRRRAERLYQQLDMLQYLRQQARRELLAESRKHSITAKLRQIPSLGPIRSALAVALIQTPHRFRSKRQLWKYSGLALETRISGEYVYVHGERRRSKKQISIRGLNKDHNHDLKGLFKAAATRASVIPGPFREFYQRSLAKGIKPTMVRLTLARKIAAITLTLWKKGENFDLEKLKSQAA

SEQ ID NO: 390873 - protein, 344 aa, unidentified
MITIGIDPHKSSHTAVALDAGGRVLDELRTPASKTTLERLLRWAERWPERVWAIEGAAGLGHFLAQRLVASEERVLDVPATLAARARLLARGHGRKTDGIDAASVARVAQGQPGLRRVRPEDHSAVLRLLSDRRDELTGERRRVVNRLHRILRDLRPGGAPIELSADAAARLLGRIRPETAVELERKMMARGLVSDLRRIDRALVENRTRCATAVSASNTTLTGVFGISDVLAAKILGHVGDVGRFGSSDRFASYSGTAPIEVSSGDVIRHRLSRNGNRALNNALHITARVQVMHPGPGRDHYQRKLSEHKSSREALRSLKRQLAKVVYRRLVDDQAHRTALIR

SEQ ID NO: 390874 - protein, 354 aa, unidentified
MKILAVDIGKVKSVACDYEAPSGVHLFETVRTDPGVFADLLLRRRPDRMVIEVGSCAGWITDLTARMGIELQVANPSHEGWRWRSVKKKTDRVDALKLAELSSVGLLPLVSVPSKEVREWRSLIHYRQSLVARRTMIKNTIRAILDRQAIGMPSGKSAWSNAGRSRLATLAGVGPDPEAFWAQLDPTEWWRGQLAEELRQLSEVECAIGSVEKRLDAYAATKRQVQRVRSAPGIGPRLSEAVVAIIGDPHRFKNGRQVAAYAGLVPRVFQSGSMDRTGGITGAGNRYLRSILVEVSWLGLRTNPWMKQVFDQVCRGCRSRRKIAIVAVARRLLICCWAMMRDDADWKPKALAAA

SEQ ID NO: 390875 - protein, 323 aa, unidentified
MNKDIKYFGIDISHLVFDVTDSQGNYYQFKNSISGFKKFVKLLSINSHCVMEATGYDHYQLAYYLLECGMKVSVENPLAVKRFIQMKLSKIKTDKSDSKLICEYGKQVELKLWKGTSKHQTECLQITRLLAVYTKQSTMLKNKLHGEAVLGNPSKIVVSSLKRSLKQVQKEIKTLEDKLLILVKEVHQDLLTRMKTIPGIGSKTSLMLVVLTDGFKRFKSGSELCSYAGLTPVIRKSGSSVNGRSRISKIGNQKLRNLLFMCSFNACRYNKACREIYERIVAKGKSKKLTLIAVCNKLLKQAFAIAKSGLFYDDSHRSNLVKN

SEQ ID NO: 390876 - protein, 369 aa, unidentified
MDHYAGIDVSLEYSSICVVDATGQIVREDKIASEPEVLIAWFGSLGYALTRIGLEAGPLSQWLYAAMKKAGLAVELLETRHVRDAFKAMPVKSDRNDARGIAQLMRLGWFRPVHCKSIGAQEIRAELTARKLVESKLRDTANSLRGILRGFGLKVGATTERSFPGRVRELVKGHPVLEAIAESLLSVHEVLLREFNGFQKRVQSAACSNVKAKLLMTTPGVGPVISLTYAAAVDDPARFKSSKKAGSHFGLTPKKYQSGETDRSGRISKIGDASVRAALYQAAHVILTKPVKGCPELKSWGMRLAKRAGQEKAKVALARKLAVIMHRMLADGTPFNPTAKAERMAATAAKAARKVLALPANGATVAEAV

SEQ ID NO: 390877 - protein, 320 aa, unidentified
MSVLSVTVGIDVAKAHVDVCVLGVASGVQRFANDADGHSALAAALLPLGAGLVVMEATGGYEAALACALQASGLPVAVLNPRQARDFARSMGRLAKTDAVDARMLAEMAAVLVHREDLARFVRPVADECQQWLAALVTRRRQLLAMLGSERQRLQITPRKLHPSIEAIIAVIKAQLDDLEAQMVGHVREHFGELDGLLQSTNGIGPVASATLIAQLPELGRLNRREIAALVGVAPMSNDSGNRKGRRRVQGGRFEIRRVLYMATLTAARYNPVIRAFYERLKAAGKLPKVALVACMRKLLTMLNAMVRTGKPWDASLHRA

SEQ ID NO: 390878 - protein, 368 aa, unidentified
MGKSSKLYVGMDVHKDSIDVATGDDAGGEVRHVGAIGGEMEAVARLARKLESTGKVLVFVYEAGPCGFGIHRMLRGRGHECWVVSPGMTPRSNADRVKTDRRDCLKLARLARAGELTPIHVPDEADEAMRDLVRAREDVVVMQRQARQRLGALLLRNDVRYNGKTAWSPAHRRWIAELKLPHAAQHIAFEEYAQAVDEAGKRIERLEAAIGDELGRWRWRPAVAALEAFRGIRTIHAVRLAAELGDLTRFASPRPLMGFLGLVPSENSTGNRRRQGAITKTGNSSARRALVEAAWAYRYGARVSVGIARRQSGLPKPVTDLAWKAQLRLCSRYRRLAARGLNRNKIIVAVARELSGFVWALGQQVKPL

SEQ ID NO: 390879 - protein, 355 aa, unidentified
MERYIGMDVHAASCTLAVISQTGKRLKDFPVETNGQALVEAIRMIPGRKRLVFEEGLQSAWLYETLSPHVDEIVVAGLTESRGPKSDKHDAYGLAEKLRVGNLEKHVFKAPRQFTRLRELSRIHMTLVGDVVRAQARIKSLYRSRGILVSGVNVYGIRLREGWQKQLCSSAQTRATRLYDHLDFLLEQKKQAEGDLLREAKKHPIVRILETAPGFGAIRAARLVPIVITPHRFRTKRQFWSYCGLGIVTRSSSDWVQTADGGWIKARVPQTRGLSRQYNHVLKSIFKGAATTVITQRNKDPIHARYQRLLDGGTKPTLAKLSLARMIAATVLRMWKNEEEYDPERADPSIETREG

SEQ ID NO: 390880 - protein, 400 aa, unidentified
MISVGIDVSKGKSTVCILKPYGEIVSKPFNITHTQKDLSELSSMLFRLNDEVKIVMEATGIYHLPVLTYLQEKGFFVSVINPYLMKSYRNESLRKAKTDKIDSRIIANYGIDHWFKMKEFQISGVIYEELKLLGQQYRHYMKLHLLSLAELTHLLDLTMPGIKNLLASWNETNRKDKRSDFVERFWHYDVITSMSEQEFTEEYILWAKEKKYVPSQEKAKVIYTLAQESIPTLPSETSSVKMLVTEAVRVLKEVDATLGLILSRMQEIAKTLPEYSVVREMGGVGNTLAPKLIAEIGDVRRFRNGKALVAFAGIDPPPYESGQFVGCNRKISKRGSASLRKVGYETMRSLKMRSRPEDPVYRYVVKKESEGKSKKSAKIAGLNKFLRIYYARVTELYKNI

SEQ ID NO: 390881 - protein, 331 aa, unidentified
MDEVKRFVGIDVAKAALDVFVGSAGTAFTVTNDEVGIRDLVSQLVPADFVILEATGGLETPVASALAAAGIAVAIVNPRQVRDFARATGRLAKTDRLDAKVLARFGEAVRPEARPLADEQAQALEALVTRRRQLVEMLTAEKNRRARAPKVLHRSIDEHIRWLEKRLSMFDDELGELIRNTPLWRERDELLRSVPGVGKVLSSTLLAQLPELGMLNRKQIAALAGLAPFNRDSGSMRGSRCIWGGRAQVRRVLYMATVAGVRSNPTIRAFYLRLRTNGKHAKPALIACMRKFLVILNAMLHDKTQWQPPALTPPSSPLSPLLGAVSEYGCC

SEQ ID NO: 390882 - protein, 351 aa, unidentified
MDVHARSTYAASLDVITGELCRQRFDTGAVEPVIGWLAGLPGPVRACYEAGPTGFGLYRAAVAAGIDCQVIAPSKTPRPSGDRHKSDRRDTDLLLRQLMAGALTAVAVPSATCEAARDLARAREQVRLDLMRCRHRLSKLLLRHGRVWDRSAWTKVHREWLGSQTFAHHNTELAFIDNLAACDGLSARRDTLDERLSRVATDPEFWPVVRRLRAFRGIDTLSALILLLEVADFARFPRAVQLGSWLGLVPSREQSGESDVHGSITKTGSKYARRILVEAAWHYARPPRVGKTLYERQEGLPDHVLQIARRAQSRLYRIHKRMRERKKPGNVITVACARELSCFLWAAAIAP

SEQ ID NO: 390883 - protein, 332 aa, unidentified
MENFYFIGVDVLKKKLNFCVMFEGKIVHEEETSNHQGAIMSLLHHLEEDYGIASGQMLVCAEHTGQYTFPLACACKAVECRLWLENAAEIKYSSGVQRGKSDKVDAKRIAIYASRFQDKVRYYERPTEDIERLKQLESERTLYVTDFAKYKGQMKDQKEYMPKSLYERKMKRLQALMDDLEEAIQSITDEMDEVIASCPVLFRQRELLMSIDGVGRVVATNMIIATEAFTRFDDPRKFNCYAGVAPFSYSSGSSQHSKARVSHRADKVMKRLLHLAAVAVTHRIGGELKKYYERKVAEGKNKMSVINALRAKIVARMFAVIKRNERYKPILS

SEQ ID NO: 390884 - protein, 336 aa, unidentified
MKPETIHIGIDVSKEHLDVYDPVSGRSGRLPNTLQGFRAIRDMARRLKAIVCCEPTGGLELDLVLFLQRANVPVACCDAFRVRHYALATGQFSKNDPTDVRMISLFAKGTDVKVMPPKSRRLLELRSRWKLHKTLVGLHVLLAQKASSEHDAAVARMLRAESARLQEKARKVLEMCEKLVKGDDRMADLFERFRQIDGVGSKTALAVLAEMPEIGQVDDAAAAKLAGLAPMERQSGRTEHARHIRGGRKTLRDALYMAAVPAVRHNHILRARYLEYLKRSPSAKSRKWALVPIMRKLIQLMNRLARDPGFHLEKKPSPSKEAQAFERLRVQSKLGA

SEQ ID NO: 390885 - protein, 410 aa, unidentified
MLKIIYPICCGIDVHKKFVVACIASTDDRGITTYKSSRFSTFTSGLRKLSGWLCSNSCTDVCMESTGKYWIPVYNILEDTCQITLAHPKYIKAIRGKKTDKKDARWIADLFKHDLVAGSFMPPLRIRWLRDFMRYRFKLTNFASSEKNRIQNCLTVSNIQLASVVSDTFGRSSMKIIDYLLENPYDKDFDFIPLLHGSMTGKADDIRLAIDGMITEEQRQKMNIILSHYSEVQKCKADLESLILSLSEPYARELSLVSTVPGIKNPFSVIAIISEIGADMSVFPTAKHLCSWAGLTPQNDESAGKKYSVRISRAGVYIKPLLVQCANAVVRSEKHPEIRGRYLSIRKRRGHKRAIIAIARMLLTAIYHILLKDEPYNPELYKKADILPKTRNITVDQAILLAKRYGYSVA

SEQ ID NO: 390886 - protein, 412 aa, unidentified
MLFVGDDWAEDHHDIEIVDEQGRRLARRRLPEGLGGVTRLHALIAGVMPSEWADLPASDAAGQVKIGIETDRGPWVASLVAAGYEVFAINPMSTARYRDRHSTSRAKSDPGDAHVLAEIVRLDRSHHRPVAGDSDDGEAMKLVARGHQTLIWERTRHVLRLRSALREYFPAALDAFDDLDAPDALAVLAAAPDPDRAARMSTARISTALRKANRRDAEARARQIQAILRAPALRQPPAVQQAFAAIVAGQVRLIVALNAEIDALGEVVVEHFGRHPDADLYTSQPGLGFILGARVLAEFGDDPKRYADARARKNYAGTSPITRASGTKKTVLARHVHNDRLVDAVHQWAVSALRGSPGARAYYDAMRARNIGHHAALRQLGNRLVGILHGCLKTRTVYSETRAWAHHNAATA

SEQ ID NO: 390887 - protein, 331 aa, unidentified
MVAGTIGSLHKAGSTKMTQTNMTTAGIDTSKLKLDIAVHGRTERWKVANALPGWRALAANLAKADVTRVGIEATGGYERGVVEHLRAAGLIVLVLQPVQVKAFGRVHLRRAKNDALDAELIAACAAAIDRLRMVPDARLTELAGHLTFLEQTEEDIARFKTRLEHIDEPGLRRIVNSDIARLKARKAAQIRDIAKRLRAHDDLAERLDLVLSIPGIGERTALALLIRMPELGQVSREEAAALAGLAPFDDDSGQRKGQRRIAGGRGRLRRSLFAAALPAAYRWNRALIALYARLKARGKAHNAALVACARKLLIYANTVVQRGTPWTEKAA

SEQ ID NO: 390888 - protein, 326 aa, unidentified
MDILGIDLAKLTFDATLLTTTGEQHYQAFPNTPEGFSQLQAWLQAHGVTQLHACMEATNIYWEALATWLHALGYIVSVVNPARIRGYAQATMQRNKTDKLDSAVIASFCATHHPTAWQPLTEAHRRLRALVRHREDLLQTQLQQQNRLRDTSDTLVRTSLQVVLDTIASQLEAVERTIKEHMAAHAELQANLGLLTTIVGIGVVTAAKVLGEFADLSEYESAKAAAADAGLTPSHFESGTSVKRRPKLSKIGKAGIRAALYWPAITAMRRCPGCKAYAQRLAARGKPKKVIIGAVMRKLVHIIYGVLKHRTPYDPAKAFGHAGATT

SEQ ID NO: 390889 - protein, 330 aa, unidentified
MPEPIVIGIDVAKASLAVAVHPSAEAWSCAVTAEALDALAERLKALQPVRVVLEASGGYEMPVVAVCTAAGLPVCVVNPRQVRAFAQAIGRTAKTDPLDALVLARFGARVEPPVRTIPDATTQALAALVARRRQLLEMLGAEQRRLLQAATGPVRRDLRNHIRWLERRVSDVDREIGGTIEESPVWRVQEDLLRSVPGIGPVIARTLLAELPELGQLTRREIAALVGVAPFNRDSGRWRGYRTISGGRASVRASLYMGAFVAKRYNPPLAAFFDRLRSKGKPLKVALVAVMHKLLTILNAMMKHQTRWNPKAASTSASLVRRTRAAAVAQ

SEQ ID NO: 390890 - protein, 338 aa, unidentified
MSIVFVGIDLAKNVFALHGVNATGAVQLRQPKVARGKLNEVVATLPACTIGIEACSGAHHWARLFAAHGHSVKLMAPKLVTPYRMSGKRGKNDAADAAAICEAVQRPNMRFVPVKTEEQQSRLMVHRARQGYVAARTACINRVRGLMSEFGIVLPQKAEVVRREAGKHLEELPGYANLVIGDLLSEVHHLDERIQQYDGHVRAMARDCTAAQQLMQLCGVGQTTATAIVAMVGNGAEFTSGRQFAAWLGLVPGQYSSGGKARLGRITKAGDAYLRSLLVLGARAVLNAAAAKADSLSRWALAVRERRGYWKAVVAIAAKNARMAWAVLTKGESFKLPA

SEQ ID NO: 390891 - protein, 310 aa, unidentified
MFAGIDVSKDHLDVHLRPTGEAFRAGRDEPGLAALVARLVAAGPALVVLEATGGYEAPVAAALAAAGVPVAVVNPRQARQFAEATGRLAKTDRLDAHALAHFAEAVRPEARPLADADTAALAALVERRRQLVGMRVAEQNRLEQAPPPIARRIKAHVAYLDRQIDRADRDLAAAVQASPVWRAKDDLLRSAPGVGPVLSRVLLTELPEFGDLSGRRIAALVGVAPVARDSGKKLGARRIAGGRAGVRAALYMGCLSAVRFNPLARAVYQRLRAAGKPGKVALVAAMRKLLVALNAMARDNRPWDPALAGA

SEQ ID NO: 390892 - protein, 461 aa, unidentified
MTFSPCRSHGLGGGVTGSGGIDRPLIRGMTTGFFGGREALRNVDVAIGAVPRPGEYDRRLHVIDTSDIGAFLGLDVGKGEHHATAVTPTGKKAFDKRLPNSEPKLREVFGKLKAKHGTVLVVVDQPASIGALPIAVARDMGCAVAYLPGLTMRRIADLYPGEAKTDARDAFVIADAARSMPHTLRSIELEEETVAELEMVVGFDDDLAGEATRISNRLRGLLTQIHPHLERVVGPRIQHPAVLKLLDQFGSPAQIRKAGRRRLIDLIRPKAPRMAERLIDDIFTALDEQTVVVPGTDAAALIVPSLANSLQAVLDQRKLLAVRIEELLENHPLSKVLTSMPGIGVRTGARILIDVGDGTAFPSAAHLAAYAGLAPATRSSGSSIRGEQPSRRGNKQLKRAFFLSAFAALADPVSRAYYDKKIAQGKHHTQALLCLARRRADVLFAMLRDGTFYDPQPSPTG

SEQ ID NO: 390893 - protein, 455 aa, unidentified
MRVFIGIDIGKEYNYASFLNNEGIEIDKRFKFKNNHLGFLSFKDNIDKLTYDCNFNYDDVLIGFESTGHYWINTDWFIAEKLNIKTVMVRNDAVRHTRALNSQGKGKNDSLDSRTIAECLKNGYYFDVQGRKEDYIVLRRLTRERTELEKEIARYKNRYRAWLDVNNQIFLENFSNVFSTGAFSLLKVYPSPLDIIQDSYLEVREKLKEVGYKRTNNTFKIYYEEAKTYKNIINGITYADRLEINEYIETLEMYMKKKESLDEKIEALMNYLEGKVYNSLSQIKGMPKAQVASLLAEIGNVSNFKSARHLISYAGLNVQGEGSGKNKGYSWISKTGNRKIRKELYVITFNLVRHNDYFRGLYCYYKSYKRPNEKSSKEMLIALACKILRVIYGMLKYNIEFDLNEMLKNYDFRNINKEKFIDEFLGSSEKKQKIIPQEIEDIFLNNRKSNEKSDD

SEQ ID NO: 390894 - protein, 413 aa, unidentified
MVNTARKEGLMDFYVGIDVSKFKHTVAIIDEEGEIRKKSFDISNSREGFDSLLNELGLLGEKEQIKIGMEATGHYMNCLVRCLISNGYQVQIYNPSLISMFRDSESVNLAKTDNLDAMLIAKYVATHPFTSSPQLSYLIGEIRKISRAKYFLYGDKTCCYNRLLRYLDEVFPEFADFFNKKEDGSKLSRGRNLFDSPTIRWLLREYPSPQKMAKMRIETGETLKRMSKGSISFNRFNQLRELAKNSIGCSSKADEQIIINLINQVRIIEEEIDKLNEMLEPLMHELKSPILTIPGIGMNLSAMIIGEIGDISRFDNHEKLIKYAGLDVKIYQSGTINYKGKIRKRGSPILRYALALSVQKLRIHSLVFSEYYYSKLRQGKATNVAIIATTRKLIRVIWKMMTSNQIFDSLRKK

SEQ ID NO: 390895 - protein, 334 aa, unidentified
MMNFQALGIDISKNKFDCALIRDIGSSKIKTKALPNRLEGFNQLTEWLYKNIGEDLSLLKIFMEATGVYHEALAEHLHEKGIAVYLFNPADSAHYAKYDSLHKTDKADSQSLARAGIDRLMHHKVRQWQPAAPHIKRLNALLARLDALQSDLQREDNRMEKAGFSSVPEAVSQSINTMQTNLKQQISTITQEIEQHIDRHPDLKKDRALLRSIPGVGEVVSLRMTALYHSKDFTSASQMAAYLGLVPRKRESGKYKGKAMLSKRGNPVIRAKLYMAAVVAKTWNPDINAHYRRLKARNKTEMQTIGAAMRRLVQICFGVLKHQCEYQAKVTIAA

SEQ ID NO: 390896 - protein, 309 aa, unidentified
MEHFIGIDVAKDRLDVHTRPGGEVFAVARDSNGLAMLVERLQRLAPALVALEATGGYETVVASALGAAQLPLAVVNPRQIRDFARATGKLAKTDRIDAAAIAHFAEAVRPPARPLADAEARALGELVARRRQVIEMIIAERHRRRMASQRRVIRAIERHLALLQAELSELEGDIDDAIRKSPAWQADADLLASVPGVGKVTLRTLIAELPELGHLNRRKIAALVGVAPINCDSGTLRGRRTIAGGRPAVRTALYMAALVASRANPVIAAYYAKLRAAGKTGKQALVACMRRLVVILNAILRDRKPWQPA

SEQ ID NO: 390897 - protein, 338 aa, unidentified
MTIVMGLDQHRAQITAEWVDTETGEITRSRITPAHRQGVRQFCEKFRGQELEVALEATTGWRFVADELAQVGAVVHLAEPAETAARRGNKKRAKSDRGDARHIRELLTIGRLPESWIPPDHLLDLRAQVRLRHTLSHQRGEWQQRIQAVLYHHGCPQRGELLTLGGRTWLAAQPLPPAAREQITVALAVIDALDIQRAPLDARLRAFARHQAGCKALLGQFGVGELTAVTILAELGDARRFSSSRDAVRFAGLDITVHQSDQRRASGHLSRQGPPALRWALFEASMCAARRCSPDYEYYAQAAERLGSNRARLSVARKILKRSYHLLRELGDEAIAPA

SEQ ID NO: 390898 - protein, 344 aa, unidentified
MDHFSGLDVSVKETSVCIVDDTGKIVREVKVASEPEALLAVLKNPAYHFKRIGLEAGPLSQWLFGALAEAELPVVCVETRHMQAVLKAQINKTDRNDARGIAQMIRVGLYRPVHVKTLRSQKLRMLLTHRKLLQSKAIAIENDLRGTLRNFGLKVGMVGTVKFEARIKELVENFPDLAVLVEPLLVVRRVLREQFVILHRRLLAIVRDDEVCRRLITTPGVGPVVALTYRATVDVPARFRKSKAVGAAFGLTCSKYQSGEIDRSGRISRCGDEMMRVMLYEAAQSMLRSKKWCWLKAWAMQIARRRGIKKAIVALARRLAVIMHRIWVDGTEFRWTREQAVSAR

SEQ ID NO: 390899 - protein, 313 aa, unidentified
MAFLHHPPACCLGVDVAKDSLTVSNGRQAAATIDNSRSAIRAMLKKARPDLVVCEPTGGYELLLLEECLKAGIACHRADTLKLKSFIRSFGTLGKSDAIDAAQMAAYARERWAKLSLWQAQDADERQLQVLVRRRADLVAFRVAERNRSRAPGAKALAASFKAMLAAIEQQIDKLDAAIAALVARSQSLRQRIAVCTAMNGIGLTCAATLIAQMPELGSLQRRQAAALAGTAPHPNESGTATGRRRQRGGRPQIRTALFMPALRAAAGRGEFASFYKRLVDNGKRPIVAIAAVMRKIIVTLNARLRDAQSAQS

SEQ ID NO: 390900 - protein, 326 aa, unidentified
MMHPAEAFKPAPTDALITIGIDVSKDHLDAARHPSGDSLRVPNTRKGHTELLRWLGNSGGIARVVFEPTGPYHRMLEERLASVGLQIVKVNPRQARRFAEAAGRLAKTDRIDALMLARYGALLEPVTRPVRSDVQNRLAELVAGRRNLMRDRTATLNRLKTLTIELLKRHARHRLRQIEAQVASLDAAIDAIVLGDPVLSRRRDVLVSIPGLGLITAHTLLADMPELGAMEEGQAASLAGLAPITRQSGTWRGRSSIQGGRASLRQALYMPAIVAMRFNPDLKRVYDRLIAQRKHTKIAITAIMRKIVVLANALLRDNRLWAPKTS

SEQ ID NO: 390901 - protein, 332 aa, unidentified
MNLVSTLGIDLAKSIFSLHGVNSNGEVVLRRTLSRAKLTELVAQLPPCLIGMEACSGAHEWARRFAASGHTVKLMAAKFVMPYRKSGKNDGNDAEAICEAVARPNIRFVPVKSLEQQSDLTLHRVRQGFVEERTATLNRLRGLLAEFGHVLPLRAVEVHRRVPQLLGKLPTRVAACARDLLEHAARLAAKTLEYEHEIRVHVRSNALACRAQTRLGIGPITASALVATVGNGRDFKNGRQFAASLGLVPRQYSTGGKTRLGHITKRGDPYLRTLLVMGARAVLQRAASLTDPLSQWALAVRERRGYHRACIAIAAKNARVAWALLAKEPAPA

SEQ ID NO: 390902 - protein, 350 aa, unidentified
MKNHITIGVDLGDRHHIAVVLDPNGNQLEATKLINTKVALKRFFQPYDGATVAIEAGTHSPWISRLLESLGCTVYVGNPRKLRVIWDCTDKSDLRDARMLAMIARLEPKLLWPIRHRDINAHNDLEVIKAREMLVQSRSKLINHVRSAIKGIGQRLPKCSAASFANKASGQIPSALQPPLIPLLETIAQITDKIRALDKRINVLALERYPHTHWLQQVQGVGPVTALTFVLTIEDPARFAKSRMLGPYLGLTPRRDQSGQTEKQLPITKAGNALLRKLLVYCAHYIIGPFGADSDLRRHGLAIAARGGKNARKRAAVAVARKLAVLLHQLWVSEQNYVPLHSRINLGKAA

SEQ ID NO: 390903 - protein, 355 aa, unidentified
MNSEKYIGLDVHQATISAAVLDSAGKLVMESILETKASTILEFFAGLRGTLVVTFEEGTWAAWLYDLLKPHVNKLVVCNPRKNALLKHGNKNDRIDARKLAELLRLDNLKPVYHGETSVRMLRELARSYLTIVKDLTRVMTRLKAVYRSWAIPCAGRDVYYTRHRSEWLRKIPHAGPRRRAERLYQQLDMLQHLRQEARRELLAESRKHAITAKLQQIPSLGPIRSALAVALIQTPHRFRTKRQLWAYSGLALETRTSGEHRYVQGQLRRSKKQISIRGLNKDHNHDLKGLFKAAATRASVQPGPFQDFYQRSLVKGIKPTMVRLTLARKIAAITLTLWKKGENFEAEKLKSQAA

SEQ ID NO: 390904 - protein, 384 aa, unidentified
MDQHNRAFVGIDTSKLRNAVAVAEEGRGGEVRYLGEIDTAEAATRKLVAKLAAKYRQLTFCYEAGPTGYGLYRLIRKLGHDCIVAAPSLIPKKPGDRVKTNRRDAVGLAKLSRAGELTAVWVPDERHEAMRDLSRAREAARKDLKGKRQQVSSFMLRLGRHYPGKKTWGPAHMNWLMLQKLEHREQRIALEELLGAVRQESERVERLEQAIRDAVPEWSLAELVTALQAMRGIDLVAAVTVLAEIGDLSRFQNPRELMGYLGLVPSESSTGDTVNRGGITKAGNSRARRILVEAAWSYRHPPRVSREKQIKVAAAPRAVREIAWKAQMRLCGRFRSLTRKGKRPTVVATAIARELSAFIWAINREVVESHATANRRPGHGPLEL

SEQ ID NO: 390905 - protein, 402 aa, unidentified
MNAVGIDVSKSKSVVAIMRPFGEIVSTPFEIKHTASDIHSLIELINSVEGESRIVMEHTGRYYEVLAHQLLEANLFVSAINPKLIKDFDNDSLRKVKSDKADAVKIARYALDKWQNLKQYNVMNELRNQLKTMNRQFGFYMKHKTAMKNNLIGILDQTYPGVNTYFDSPARSDGSQKWVDFASTYWHVDCVRKMSLNAFIDHYQNWCKRKKYNFSQSKAEEIYGKAKELVPVLPKDAITKLIIKQAVDQLNSASTTVESLRTLMNETASKLPEYPVVMAMKGVGTSLGPQLMAEIGDVSRFTHKSAITAFAGVDPGVNESGTYEQKSVPTSKRGSADLRKTLFQVMDVLIKTHPEDDPVYQFLDKKRAQGKPYYVYMTAGANKFLRIYYGRVKEYLASLPES

SEQ ID NO: 390906 - protein, 445 aa, unidentified
MVRPNAAGIDVGSREHYVAVPPHLEGETVRKFGCYTSELLRLAAWLRECGVDTVALESTGVYWIPLYELLEDQGFEVVLVDARQLRSVSGRKTDVLDCQWIQQLHSYGLLKPAFRPKREITVLRGYWRQRRNLVELCAEQIQHMQRALEQMNVQLHKVVTDITGVTGLTIIRAIVSGERDPKALAKLRQDGCKLAEEEFVDALTGTYRSEHLFVLKQSLATFDFVQQQVMECDRQIEQAMTSLPTSARGEIRVPAPRRRSGYRRKNQPHFNIYEELVRIGGVDLTDIEGIQVSTAMTTMTELGSDVSKFPNDKHFTSWLGLATNNRITGGKIRSRRTRHVRNRLADAFRLAAQSVGRSDTALGAFYRRKAAQIGAPKAITATARKIAQRVYWLLKYGRQYVHQGEEQYKQQQQERELRVLVRRAAKRGLALVAIDTGEIMTNTPA

SEQ ID NO: 390907 - protein, 308 aa, unidentified
MRIVCGLDVHKDSIYLCILSSTGEIIEKVFGVLTCQLQEMRDLMLTHHVEEAGMESTSVYWIPVWRVLEPHFKLKLINPYFIRQLPGHKSDVKDARWIAECMMKELVRGSFVPPERIQQLRQYDRRIYDLDDEIVRKLAKLDAVVQRCNIRLGNYVSNTDSKSYKSVIDRICEGVTDPKVLVEEIHGRIINRHGKDTIISSLTGCVTECDMDILRQLKAEIDMAGQHKQECMDKMQAVCEREYSAALQNLQTIPGIKMRAATSLIAEIGTDMGHFQTANHLTSWSGLRPRNDQSNKTIKSRRITHGNR

SEQ ID NO: 390908 - protein, 341 aa, unidentified
MREVTIIGVDLAKRSFQLHGAAADGSVVFRKKLSRSQFLAFLTQHPTCIVAMEACATSHYWGRQIAKLGHEVKLIPPIYVKPFVKRQKNDAADAEAIAEAASRPTMRFVAVKSEIQQAQSMVFRTRDLLVRQRTQTINALRGHLAEYGVIAPQGAAYVDRLAEVIDDLNARLPEPVRELGRMYLQQIADYEAKIEALERDIRARAKQDEEVRRLMTVPGIGPICAMAIQAFAPPIEAFKNGRDFAAWLGMVPRQNSTGGKQKLGTTSKMGQRDIRRLLIIGATSAVNAAARKGTRSIWLARMLACKPRILVATALANKMARMVWALMTKKENYRDPAEAAA

SEQ ID NO: 390909 - protein, 327 aa, unidentified
MAIVQESEMKSKDEKLVFVGIDVSKATLDVALRPEEQTWSVSNDAKGIAKLAKALSKRLPALIVLEATGGYEMSAVVALVEAGLTVAVVNPRQTRDFAKAIGKLAKTDRVDAQMLAHFADAVRPKPRALPDEETRALQALVIRRRQLLEMQVSERNRLHLAHESQKASLESHIEWLEQELNHINTQIRDVLQHCAIWREKDDLLRSVPGVGPVLSCTLLSELPELGLLNRKQIAALVGVAPFNNDSGQKKGSRSVWGGRASVRCALYMGALSASQHNPIISDFYQRLINAGKPSKVALTACMRKLLTILNSMVQHGTHWQPNLAYHA

SEQ ID NO: 390910 - protein, 415 aa, unidentified
MRRVLFVGGDWAEDHHDVEVMDEAGRRLSAGRLPEGIAGMARFHAMIAAGLGPDADLDAEAGVLIGIETDRGPWVQALIAAGYRVYAVNPLQAARYRERFSVSGAKSDPADAHLLADMVRTDHHQLRGVAGDSELAEAVKVVTRAHKTLIWERTRHTLRLRSALREFFPAALVAFGDLTASDTLELLGQAPDPASAARLTTTQITAALKRARRHHRDRRAAEIQAALRTEQLGQPPAVTTAYGVAVRAQVAILGVLNEQIGLAQEQVEDHFGRHPDAEIYTSQPGLGQILGARVLAEFGDDPTRYGDTRARKNYAGTSPITRQSGKKKVVLARHVHNDRLLDALGGQAFAALTRSPGARAYYDTQRDRGLGHRAALRQLANRLVGILHGCLKTGTRYNETTAWSHHTKQDRQAAA

SEQ ID NO: 390911 - protein, 405 aa, unidentified
MRRVFVGHDWAEAHHDVHVEDGQGRRLAKARLSEGVEGVAGFHELVAPFIEEPDDVTVATETDRGLFVAALVATGYRVVAVNPMSTSRYRERHSTSGAKSDPGDAFVLAELARTDSHNHRRVAGDSELGEAVKVLARGHQNLIWSRRRQLNQLRSTLREFYPAALEAFDDLGSADMLAVLAVAPTPTLGRSLSLSKIASALRRGGRQRRIDERAAEIQAALRTDQLEAPPMVADAMSSSVSALVAITVEISAQISRLDHELAERFEQHPDAKIIRSLPGLGTILGARVLAEFGDDPNRYVDAKSRKNYAGTSPITRASGTHRVVLARYARNKRLNDACYLWAFAALTTSPGARACYDQRRASGDTHNRALRALGNRLVGILHGCLTHRTIYDEHTAWGHRATHAA

SEQ ID NO: 390912 - protein, 312 aa, unidentified
MNDKKSPVYAGLDIAKASLQLHFQGKSYDLANTPAGHAQLIQRLALVPGVQIICEATGGYERAVVAALHAAQVALSVINPARVRQFARASGHLAKTDPIDAAVLTAFGQAFAPETTPARSATELELAALVARRTQLLELRVAESQRADTCTLPSLQKLFRRWLAQLEKQLEKIEALLAALLNAQTGLAQRVQRLDEITGVGAITAMTVLAQLPELGQLNRGQVAALAGLAPYNRDSGQWAGQRRISGGRAAVRRGLYMAALSASRSNAILKAFYQRLTNVGKPAKVALTAVMRKLVILMNHLLKNPQFSLAK

SEQ ID NO: 390913 - protein, 260 aa, unidentified
MPDKPVAGIDISKDWLDLCVADAPGVERIANTREAVAAWLERVGPGLIAFEPTGGYERFLIAALRERGIRFLRVHPNDVIAFRKSRGIKAKTDAIDARLILAFLCDRLARRELRISLIGDERLRALAARRRQLVAALQAESCRLGTALLPAVRTSLETVITVLRQSRDALERELADAIAAHPQTAKLAKLLQTICGIGPVVAMTLIADLPELGLLSAKQIAALVGLAPHTKRSGTIRYRETTGHGREGGDAPSSMPLVPP

SEQ ID NO: 390914 - protein, 345 aa, unidentified
MTEAYDGRRVVGMDLHRRRSVLVRMSMDGRKLETVRIENSPAALRAVLARCGQRPLVVLEATYGWYWAAGVLAEAGAEVHLAHPLGVRAFSYRRVKNDERDASDLADLLRMGRLPEAWIAPAEVRALREVIRYRHKLVQQRTSCKDQVHAVLAKLGVPVTHSDVFGRGGGLWLDQLVLPEPYAAKVASLRALIGVLDGEIARLGQRAAGMLAAGPGYAAVRELDGIGPVLAAVIIAEIGDVTRFRKPGQLCSWAGLTPRHYESDTKVIRGHVSKQGSRMLRWALVEAIQHQPAGTRPQQAKEAILARRGKEARNIAKTAAARVLLTQVFYALRDGHVRRASHPAA

SEQ ID NO: 390915 - protein, 355 aa, unidentified
MMIIGCDFHPRFQQIAFVDQETGECGERRLSHPEEAERFYRSLAGRQVRLGAEATGNFRWFRLLMQELGHEFLLGDATAIRAACPRKQKTDKRDARHILKLLVEDRFPDVWQPPEENENLRELLMHRCRMVRMRTRIKNQLDSMAKNEGLLSKRVWCPMRRNQIEALPLAGWDVERRKDLIALLEEMNRRIEPLDKAVIKAAEQSPEACVLMTHPGVGPVVSLAYVLTIGNWERFPRGKQVGSYLPPQRRRPVAGDPGLGLIPAEESSSDKRRLGHISKQGNTTLRWLLVEAAATAQRYDPSWHRQYVRLSLTKHHGVAKVAIAHKLAVRLYWMWRSGEEYSKVMERGSHVGQSE

SEQ ID NO: 390916 - protein, 315 aa, unidentified
MRSTVAQSVGVDISKDTLDVAIHPGGESFRITNNPEGHRALIKRLKGFDIARIVFEATGAYHRLFQQAMVEVGLPWVKVNPCQARRFAQATGKLAKTDRCDALMLARMGAVLELETRAPASKTVEALRELVNARDALIKDRVAALNRQAIAVSPLIKRQLAQRLRQIDGQIEAIDRRLKTLRNADSDLCQRFDILTSIPGIGEVTANVLVVETPELGHLEHAQAASLVGLAPVPRDSGQTHGKRSIRGGRPRARQALYMPALNAIRLNPEFKAKYEAMVKAGKPAKVAIVAIMRKLLILANALIRDRRKWAPANP

SEQ ID NO: 390917 - protein, 431 aa, unidentified
MRLPIGFVETGEKERINIYEKRRTAFIGVDMHKDIHVAVVIDCWTNILGEITFPNRPSKFDKFMQDVKKIYKDLTPCFGLEDTRGFGRNFAAYLLGHKYTVKHINPAYTDSMRSSAPMSKKNDSFDAFCVAKVLRDMVDTLPDEEHNDLHWTIRQLVKRRNSLVKGIVIAKNQLNSNLTTVYPSYKKYFCDVDNKTALLFWEKYPHPQYLKGIKPETLLEELRAVHKGMKQEQAEMILTLSEQNSPKEKEFQTERDLIIKSLVREIWFKKQENEDIDNELKRLVDLTGYKLQTMPGINLITAANIISEIGNIERFPNSDKLAQFCGVCPVNFSSAGKGKDQRSRQGNRVLNAIFHFLAIQLVQISPSGKPRHPVFREYFERKVKEGKTKPQALVCVSRRAVRIIYGMMKSKTEYKPFEKVQEVAGAKEKQG

SEQ ID NO: 390918 - protein, 361 aa, unidentified
MTQAKTWVGLDVHVSGTIAVVLDGDSGELRRRRLSGRGEEIAAFVAGLPGPGRATYEAGPTGFALARRLAFAGVDCLVCAPGLIPRGPSDRIKTDQRDAERLVRLLVAGELHRVAVPTVEEEALRDLVRTREDLRGDLMRARHRLAKLLLRHDVRFDGPERNWTHAHLRWLTTVRFDRPGSQRAFADYLGGVEALLVRRGQLEADIAELLPGSPWAQTARRLMCLRGIDTLTAAGLCAEIGDFARFHHPEQVMSYLGVTPSEHSSGSHRRLGPITKSGSQHARRLLVEAAWHYRRAPGVSTNLRRRQADADPRIVALSWKAQRRLHHVWSRMEQRGKRRTIIAVACARELAGFCWAVATTD

SEQ ID NO: 390919 - protein, 341 aa, unidentified
MKEYSRIGVDLAKGFFQVHAIEREGSPAVTRKLSRAKFLSFFAGIAPCRIGMEACGSAHHWARELRSMGHEALLIAPVYVKAYLKRGKNDANDAAAICEAMSRPDMRFVPIKSADQQAVLMLHKTRELMVKQRTMSVNALRGHLSEFGLVAAKGIHRIKDLLALVEADERLPEAAREATMTLAAEICGLDARIDALEAKIAEASASNPVSRLLDEIPAFGALIASAMVAFNPDPSAFRSGSDFSASLGLTPSQHSSGGKEKLGGITKKGNRYLRKMLVVGCTSVLRVAHKHKGALAEWIVAMRARKPERVVAVALANKLARIAWAMMSTGESFRKELYFKA

SEQ ID NO: 390920 - protein, 344 aa, unidentified
MNSTTIAVDVAKAVFEVAVSEYPGQVRERHRLSRGRFSRFLAEHPPATLVMEACGSAHHWAREAQSRGHRVILVPPHAARPYVLRNKTDRTDAKGLLEAFRNDALRPVPVKSETQQALAALHRLRSTWVATRTARLNTVRGILREFGVVIPTGAHHVVPHVRALLEDADAGVPGLLRVPLSEAIREIGELEERILAIERQLARTAEPALLIGRLRTIPGIGILTATALVAAVGDVQRFPSGRHFASYLGLTPREHSTGQRRHLGAISKQGDTYLRMLFIHGARSVLHHAKSKTAPATDRLRTWALQVERLRGHNKAAVALANKLARIAWAVWRSGNDFTAAAAV

SEQ ID NO: 390921 - protein, 430 aa, unidentified
MDYSTQNKKIEAVTEKTLVIGIDVGSETHFARAFDHRGIEFSKKPFKFSNDEAGFAEFKTWILEHMKAHDKDKVIPGMEPTGHYWFNLGKFLQDNDMKPVLVNPHHVKKSKELDDNTQNKNDRKDPKVIAGLVREGRYMIPYLPDGVYADLRTASNMRFQVQSELTRILNRISRWFSIYFPEYKTVYGNLDAASGILVLKKAPLPEDILTLGVDGINKIWRDAKMRAVGKKRAQTLVDAAEHSIGSKEGAISARMEIRMLIEDYESRKVRLQEIMILIEELVAKIPMAEKLMEIKGVGLKTVSGFLAEVGDISRFKNPKELQKLAGLALVENSSGKHKGETTISRRGRKRLRYLLFEVAMSLVAKNYEFAELHHYYTTRKQNPLKKMQSLMVVAEKLIRVFYVILTKGVDYDPKKMTEDIKRPHDSSQVA

SEQ ID NO: 390922 - protein, 386 aa, unidentified
MRPFEVRHTSSDLKRLTAKLKQLGGDIRVVMEHTGNYWRPVALTLKKAGFFVSVVNAMLIHDFSDNSIRKLKTDRADALKIANYALTFWDELPPFNDEEEIRLLLKTQSRMCERITTTVTALRNGLIDLTDQTFAGINQAFDRAAKSAEGHEKWVDFFQHYWHRDCVCKFSLEAFTESYRRWCRQKNYKFRTDTAHKVYALAKECVATLPKCESTKVLITQACKSLNAVCEAKLVSQHEMQRLASLLPEYDIVMGMEGAGPITGPALMAEIGDVRRFKNKKALVAFAGVDAPPFQSGTFESKSRHVSKRGSPHLRRTLFIISSVILQLSHEDNPVFCFMDKKRSEGKHFYVYMVAGAAKFLRIYYATVTGHFKASEHIDSLPQIAG

SEQ ID NO: 390923 - protein, 326 aa, unidentified
MFKHYIGVDLHQAFFHACAVTSGGERVWEDRFPRTAEGLAAFLARGDHETAVAVEASTPTWHFADAIGPRVGELRIVDPVKTKLKAGYAAKTDRLDARRLADALRRDSIVGIYYPPPAIRELRELCRGRHALVQTRTRVIQRLRAILLRHGLVEAQRLVQRDGCLDTVVLPPRALASVAALRRVLALVREEARHADEAVRQAASTDPIVRRLQAIPGVGPVLGLMVRAEIGDLARFPTPGHLASYAGVVPRVDASAGRVHYGRITRRGSPWLRWALVEAAMQGPRRRDPIGRWARRLAIRKGAMKARIAVARALCDDVFHHWNARG

SEQ ID NO: 390924 - protein, 342 aa, unidentified
MDEYDGRQFVGIDLHRRRSVIVRQSESGEQLSAVRIVNDPVMLELQLEEAGTDPEVVLEATYGWYWAVDVLQARGARVHLAHPLGVKGFRYRRVKNDVRDAADLADLLRMGRLPEAWIAPPQTRELRELVRYRAKLVAIRSGFKAQIHAVLAKAGVLIAVSDVFGVTGRQRLGKVPLRPAYAQRIRSLLELIDILDSHEARFAAMIAERLNTDRGYQAIQHVPGIGPTLAAVFVAEIGDVHRFTDPAHLCSWAGLTPRHRESDTVVHRGHITKQGSKAVRWAAIEAIQHQPDTTKIALDRNRIEARRGRNIAKVAAARKLLTLVYYGLRDGHIRALDRAGAA

SEQ ID NO: 390925 - protein, 354 aa, unidentified
MGLRNLILNSAFCKETPVTIVFVGIDLAKNVFALHGVDDAGKARLVRPAVRRDQLLETVAKLPPCTIGMEACSGAHHWARQFMAFGHTVRLMAPKFVVPYRMSGKRGKNDAADAAAICEAVQRPNMRFVPVKSELAQARLAVHTVRQGLVAGRTATINRLRGVLSEFGQVMPLKAKTVRLEAAARAEGLSQWAQTACMDLLAEIRRLDEQIDTYDQRIRLMAQADDRSKRLMGVPGIGATTASALLASIGNGHDFDNGRQVAAWLGLVPGQYSSGGKNRLGRITKAGDSYLRTLLILGARAVLAAASGKHDRISRWAQALAERRGYWKAVVAIAAKNARMAWAMLAKGEAFKPA

SEQ ID NO: 390926 - protein, 340 aa, unidentified
MNRYLGVDLHRNCFTVCTLGEDGASELRKWSIHALGDFAQEVQATDAVAVEATGNTRHFCQALEARGCRLVVVNPHQFQVISRSVKKTDARDAKTLAEFLAKDMLPEVRMKEQLPTEIASVLQTRDKLVKLRTILKNKINNLLASRGILIRKESLSTEKGLEQALQANVGELAQVELGVLVEQIRHLNQSIAKLEAAIKKQGPKLPGYENLKSIKGIGDIGGSILLSTIGDIHDFADEGKLSAYFGIVPRVANSNETERHGRITKRGNKLGRTALVQCALIAMRYSPYLAKYYARIKAARGTGKAIIALARKFLGIIYKTLKNGWVFEDFPRFVLAPTAG

SEQ ID NO: 390927 - protein, 421 aa, unidentified
MSYRVAAIDIHKKVLMVVVATASDEVKDTAGEGLEFECRRFGAGSQERQHVVAWLKERGVTEVVMESTAQYWKPVWLDLEPHIAKLHLAQAHSNRAPKGRKDDFRDAKRLARRLLAGELMLSFVPEAEQRIWRMLSRSKEQLVKDRVRLQNQVEALLEEMRIKLSAVISDLLGASGRRILKALSEGESDAVKLASLGDQRLKCSQEELVDALQGSPSPTHIRILKLFLERVQVVDQQIETLDQLLAKELKKHEEAVIRVAETPGFGVDSGQRIIAEVGADAAAFPSAGEFASWVGYCPGSNVSAEQNHSSRCPKGNQYVRKLLTQAAQAAVKKKGCHFQKVFYRFLPKLGYNGAICVVAHRLARVLWKILHHGVRYVERGIETNPKAKQRRVQKLTRALRQLGYAVTITPVNPEALNPNPA

SEQ ID NO: 390928 - protein, 416 aa, unidentified
MNAAGIDVSSRKSTVAVLRPFGEVVKLPFDVRHSAEDLTALAAQLKSIDGETRVVMEHTGRYYESVAKVLHEAGLYVSAVNPLLIKEYGNNSLRKVKTDKADAMKIAKYALDNWTELRDYTPMDTIRYDLKTLNRQFQLASKQKTATANNLIALQEQSFPGIRKLFDSPVRSDGTQKWVDFTHDFWHVDRVRSGSQNAFAERYRKWCKRNRYLFSMEKAAEIYALAKSAVVLVQKTSVTKTLVQEAANQLTAISRSVETYRSEMNKLASQLPEYPVVMEMYGVGESLGPQLMAEIGDVRRFERKQSLVAFAGIDPAPSESGDYCSRSNKTTKRGSPYLRKTLFNIMKVHLQRAPADEPVFQFLDKKRAEGKPYYVYMTAAGNKFLRRYYGKVMAYFSTLENLPPVDMDPTGLHHAE

SEQ ID NO: 390929 - protein, 346 aa, unidentified
MNQIIRIGMDTSKHIFQLHGVDAAERPVLRRKLRRNQVLAFFAKLPPTVIGMEACGAAHYWARELRKLGHEVKLMAPQHVKAYVKRNKNDGRDAEGLCEAMSRPTMQFVPVKTEEQQAALMLAGVRQQLIARRTQLSNAIRGYAAEFGLTAAKGLDKIEPLLARIAQDESLPALAREMFAIEGREYAQLQVKLKAIEARLMAWHRANACSRRLAQIPGVGPIGATTLVMKTPDPGAFPSGRHFAAWLGLTPKDHSTAGKTRLGKITRAGDEVLRSLLVAGATAVIQQVRNGRGRPSPWLLALLKRKPPKLAAVALANKIARIAWKLMTTGESYDSARMPGASAFAA

SEQ ID NO: 390930 - protein, 443 aa, unidentified
MSRKRRTHLRGKRGQAFADKIRGIPLEQILCVSLDIHKYFHVVMIHNGLGEIVSPTFEIDIFQTGFHQLCQAMDEAVARTNAKVVLVGMEPTSHYFENLARHLHHRPQPVTLINSYAVGKNRDQQMMHREKDDPIDAAAIGDLLKRGEGTAFRPVRGIYLEMQYLDRMRLSKVKMRSALKNQIIGHLDRIFPGLVIKGKAAKERYTPLFATDFWSCQTLQHLIRVCPDPRTLAAMSPKALIAAFHEQGFAMGPKMAAKIITYAQKVLLPDAELIAIRCELLSHDLALLKEVEWHIATMEDRLHLLLQQTPYSVWTKLKGLSQTQVGSLAAAAGDPAHYTYAAQVFRRSGLVSGRNDSGTRQRRGKGKRVVKTGDVYLRRALMNATVSLIRHQPLFQVYFNQLNRSKPLGVARVATARRAMGILWAMQRDQHSQTLILKRGAKM

SEQ ID NO: 390931 - protein, 344 aa, unidentified
MTYYAALDVSLRSVQICVIDDQGEIQAETRLDSEVTDIIAYLDSLDLELASVGLEAGTLCQYLTYGLQSAGYEVVCMEARQVKAALSAMRNKTDKNDARGIAQLLRTGWYSRVHIKSMASHRIRALLSSRKAVLCKCIDLENEVRGLFKVFGIKLPPKLGHGAFDAAVRDVITTDATLSFALLPLLDARLVLYHCFRELDNRTRKLAQQDPVCQRLMSAPGVGFITALTYKAGVDDPTRFKRSRTVAAHFGLTPRRRQSGEIDIDGHISRCGDQNVRCTLYTAANALMTRSSRWSSLKAWGMQLAKTRGHRRAVIAVARKLAVILHRMWLDDTQFNWGTEGARS

SEQ ID NO: 390932 - protein, 314 aa, unidentified
MAFLHHPPTHCLGFDVAKTTIAVSSGLAKTARTIANSRRAIRSFLKANRPDFLVCEPTGGHELLLLDEAAKAGIACHRADTNKLKGFIRSFGTHGKSDAIDAALLAAYGRERWQILPLWRAPDAQEARLRSLVRRRQELVIMRVAEQNRAKAPGNGELAASFRAIIALLNRQIHALDAAIQALIDNTDAIRQRIDVCTSMNGIGRASAAALLATLPELGSMTRRQAASLAGVAPHPNDSGLKKGYRKMRGGRPEVRTILFMPAIRAAAGRGEFAGFYKRLIARGKKPIAAVAAVMRKIVVTLNARLRSAAIPQS

SEQ ID NO: 390933 - protein, 356 aa, unidentified
MNQAFSAAIIVGVDTHKLTHAAVALTGLGARLGGMTIPASAKGYRDLETWAKSLGPIQAFGIEGTGSYGAGLSRFLCEQGHTVLEVGRPNRQLRHQKGKTDHLDAESAARAVLGGQATALPKSGTSTVEMIRHLKVARDTAVKSRTQAMLTLKAIIVSIPAALREQLDRVTGKMALLRHLSALRPGPLISTTASAKTSLRALARRWLALDEEIKAHDVHLEKLTQQCAPTLVEAHGIKANTAAEMLLLVGDNPERIHSEAALAKLCGVCPVPASSGKTSRHRLNRGGHRQANAALYRVVVVRMRTHQPTIDYARRRTAEGKSKPEIIRCLKRFVVREVFGHLCRMPKTVHSAQIAA

SEQ ID NO: 390934 - protein, 310 aa, unidentified
MKVVGIDIAKHHFDLHLLPEGTTARYNNDAPGIQQCRLFLAEVRPERIVLEATGGYEVPLTMELQTVRMPVIVVNPRRIRDYARAMGRLAKTDRIDAQVIAEFATHVSLTPRELPDAKARQLKALLARREQLVDLRVAEGNRLEHATDAVITKTIRQLLRVIDKQIAVVDRHIAERVAADEQLQRRAQIIDSIPGLGETTAAVLVTQLPELGRLNRRQIAALVGVAPINRDSGQFRGKRMTGGGRVRVRCALYMPLLAAIRHNPVIRAFYQRLLDNGKAKMVALVAAMRKLLTTLNTMMQNNQLWNPELT

SEQ ID NO: 390935 - protein, 332 aa, unidentified
MQNITLIGIDLGKHSFHIHCQDKSGKALLRKKFTRTKLMQFLATCPPSVVVMEACAGAHFMARCISDFGHETKLISPQFVRPFVKSNKNDFVDAEAICEAASRPSMRFVQPRTETQQAMRALHRVRESLIRDKVKTTNQIHGFLLEFGISLPIGDAVIKRLSLVLAEHEIPEYLSRLLVRLHTHYFYLVEQIAELESELSQSINADDTAQRIMTIPGVGPITASLLSSQLGDGKQFSCSRDFAASTGLVPRQYSTGGKSTLLGISKRGDKNLRRLLVQCARSFIMRLERKHGKLAEWVREQLNKKHSNVVTCALANKLARIACSLGTTEQGS

SEQ ID NO: 390936 - protein, 342 aa, unidentified
MYYIGLDVHKKTISFCVKDGAGHVHREGKIGSTRHELDAWIGTLPQPRTIAMEATIFTGWIYDHLLPHASAVKVAHPLMLRAIAAAKKKNDKIDASKIADCLRCDFLPECHMASTEIRNRRRVLRYRHLLVRQMVQTKNRVSGLLLETGVEHNKSRLHKVGYFSRLLATNTDIDDSIRPLLRLSRETIERCQKSEYALVSSLQRDPVLKERIRRLRTVPGVGPITALNWALEMGDISRFRSVKQAVSYCGLCGDERSSADKTMRMPLSKQRNKHIQHVLVEAAKLAPRQSAELALIHQKAMERGNRNRATLAVARRMVAWLLAVDRENREFIPAEQRETRAA

SEQ ID NO: 390937 - protein, 350 aa, unidentified
MLIIGCDYHPGFQQIAYVETETGELQERRLQHPEEAEKFYGELWERGIKVRVGMEASGHAGWCERLLEELSFELWMGDAAKMRAKRVRKQRTDRRDAQHILKLMLKDDFPKIWTPNWENRDLRQLLWHRHRMVQTRTRIMNQLQAVAINEGVGYKKRLWRDAGRKQLESLSLAPWASRRREDLLQVLDSINPTIAKLTQAIEAAAEKCPTVGCLMTHPGVGALTGIAFVLIMGKADRFDCGKQIAAYLGLVPEEESSGERRRLGHISKQGNSLLGFLLVEAAQVTVRSDGKWRNQFFHLAQRRGRKIAKVAMARRLAVRLYWMWRRGWDYEQLQSFGSHAGQPGYPHGVQ

SEQ ID NO: 390938 - protein, 319 aa, unidentified
METPQVSFKQVVSRGCGLDVHKKVVVATIDGEELKKQTREFGTVTSSLKELRDWLLENGITHVAMESTGVFWKPVYNILEPAGITVWVVNAAHVKYVPGHKTDKKDSAWLCKLLLAGLLKPSYIPAKEQRELRDLTRYRTKLAQSNASNKNRIIRILEDANIKLSSVLSSTSGAVGTKLIDKICDGEEITMQDIDEVYHKKLAATKEEIFEACQGFITEHHVYMLQIIRQEIANTQRTIESMDQRIKEVLSPYENALEMLKKVPGISSKSVEELVAEIGLDMSVFPTEKHLASWAGMSPGNNESAGKKKAEEQPVEISK

SEQ ID NO: 390939 - protein, 343 aa, unidentified
MQTVTTIGFDIAKSVFQVHGVDAAGQVVVRRQLKRRQVIAFFQKLPPCLVGIEACASSHYWSRELHALGHSVRLMPPAYVRPYVKRQKNDMADAEAICEAVSRANMRFVPTKTPEQQSGLMLHRTRHLFMRQQTSVINALRAHLAEFGIVAPVGRRGVEELLRVVADSSDKRVPEVVRACLAALGSQLLSLKKQILDFDRMIMAWHRSNQTSKRLNCIPGVGPLLATALVASVADPKTFRSGRNFSAWIGLVPKQHSSGGREKLGSISKRGDRYLRSLFVIGALAVIRYAKIHGAKRRPWLAALLARRPTKVAAIALANKLARMAWAMMATGARYNYPASLKV

SEQ ID NO: 390940 - protein, 318 aa, unidentified
MTQIICGVDISSASLQASIGRSGAAAKFANNPEGIAQLIAFCHAHQVDLAAMEATGGYERQAFALLSEHGLPVAVLNPRAVRQFAQSMGRLEKTDPIDAGMIAFFAEVKRARPTCLSSPGQRELRALVTRLRQLTEARTAQLNQQRLIAGTRLQSGFDELLGLIKRQIDALAADIANLIATDPLWQQLDRAFRSIKGVADRTVARLMAEMPEIGTLSNKAISKLAGLAPLAQDSGRYQGKRAVRGGRRAVREILFIVASVVGRYEQDFIAFRQRLLAAGKPPKVVRIALAHKLLVRLNAKAREVRNSLANSNQLIPQS

SEQ ID NO: 390941 - protein, 404 aa, unidentified
MIIVGLDWSRCKHDFVLMNLQGEILERGTIAHNTNTLEKLAARIEQHVESANQVRVGMELNDGSPLARLVAKGYTLFGIQPKSAQRARDIYRPSGSKDDKIDAFVLTEFVRINADRLRPWSPPSDITLKLRELLRWREELVHQRTAAYQRVRALLAEWSPQLSELCNNLERIWQLDLLHQFPTESRLCQAHGNRIRSFLRNHRMRSQKQQQIENIRQSVPMPVPVGRDYIVEKQTVFLVEQIQMLTAEIKQIEEDLQQITMQHPDVNVFKSLPVQGTATIASLLAIFGDSRKRTTSPDELAALCGVAPVTVASGKAKKVRQRRACDHTFRQALVHFAFNTAFCQECWAGPFYQRKRSEGATHHAALRCLAKRWLKILYRMWKDQAAYNEQLHQANQKRNQNHAA

SEQ ID NO: 390942 - protein, 375 aa, unidentified
MSDLSEAFVGLDTSKLRNSVAIAEGGRDGEVRFFGEIENTPAAIGKLVKKLAAKYDRVTFCYEAGPTGYGIYRQITAVGHECIVAAPSLIPKKPGDRVKTNRRDAVGLAKLLRAGELTAVWVPDRRHEAMRELTRARDSAMMDLRRKRQQISAFLLRHGMHYPAEKKTWTKAHVDWLARQKFELAEHRIVFEEMMLAVRETQDRLRRLEDAIRVAVPEWSLAKAVTAMMAMRGMDLVAAATFLAEMGDLSRFQSPRELMAYLGLVPSEQSTGDSIKRGPITKTGNRRARRMLVECSWSYRHPPRVGRDKLEKVAAASPAVREIAWKAQNRLHNRYRLLIRKGKLKTVANTAVAREFTGFLWAVHREITSAGVVSR

SEQ ID NO: 390943 - protein, 371 aa, unidentified
MMFYLGIDQHARQITISLRDENGDVLLACQVSTQPDKIKAFFHKLTRERLGNGDTFVAVLEVCGFNDWLIRMLRDYHCHKVILIQPEERKKCKTDRRDAAALSELLWVNRDRLLRDKPVRGLRQVDIARSTDQENRRLTTLRKEAGQARTRLVNKIRHILRRHNLQWQMPTKKFPSKSGIAWLRQVALPTIDRLEMNHLLADLEQIQERRKELEQVIAKRCGVSEEAVLLSSMPGVSYFTAVSLACRVGRVKRFPRADSLANYWGLTPGCRNSGEKMQRLGGITKAGSSMARWLLAQVTIKVLRRDARLREWFKRLKRRRGASIARVAVMRKLATIIWHMLSKRRSYAQCRALAEAGTNERGQPNGAEAGG

SEQ ID NO: 390944 - protein, 345 aa, unidentified
MKNTIIGVDLAKDVIQVCIYTNKRVHSNKEMTHNDFLLWLFNTKPTTIIFEACGTSNYWKQKALEAGHEARLISAKLVATVRQNQKTDKNDALAIVQAAQLPEIRFIKGKNAEQQQLQSVQRIRDLAMKQKSALNSQLKALLLEFNIRVSSKQGGLKGVIESVLEDADNGFSSEFRQVLESAWKQYIQTLESIRVYDECLESSVKEHTDCQRLLKLEGVGTLNAISLYIMLGCADPGIFKKGKDASACIGLTPLQYSSGGKTKLGTIGKHVKNGPLRSQLISGAMSFIQQVEKREAVTKKEAWVKGLIERKGKKCAAVALANKTVRTAFAMLTQGTEYKAELLVA

SEQ ID NO: 390945 - protein, 379 aa, unidentified
MLLGSEWFVSAPYTEGFDMSSAFESFVGVDLHKCTVTLTAVDVAGEIQRLKISTKSTGKIEAWLRALPGPVHLAVEACPFVEWFIDRFRPCVDRIDIADATELASRRGKRRKTDWNDSLDIAARLARGECPLGFIADEELMQLRKLGRHWRHLSRLLSRSKHSLKSMLNAANIRGPKFDGAAAQRWLLANRDLLKPVQQQAFADFIDVVMLTERHRERLRREIIFATRSARFAPIVSLLTSVPGIGEIWAAIITAEIGPFERFPNADTLEFWAGLTADMKESAGRTQSGNITKAGSVTLRWALCQAAMTLCMSDARQEAIRQRLVKRIGKPKANVAMGRRLLRTLYAMVRDGKTFERGPARDRTAAANRIRLGSKKRVA

SEQ ID NO: 390946 - protein, 382 aa, unidentified
MSIIPGDVQLAFLSRKLRQFGPPQSIRVGIERPSGLLVDFLVEEGFLVCPIHPNQLKATRPRYHASPAKCDAEDAFIAADLLRTNGHRFPTLRAPSDRTKALRAAVRTRDDLVRTRVQICNQLRALLERFWPGPLKLFSDLDSAISLSFLAAYPTPRSAALLGERRMERFLRKHSYAGRRSPAQLLERLRSAAPGRTGEMEQATCGELVHSLVAVLRTLHGQIRGIEKTITDQLAAHEDGTLLQSFPWIGTVNAAQIFAELGDDRQRFRSEEHLAAEAGVAPVTKESGKKRAVSFRYACNKRLRKALTTWADNSRHGSAWAADVYRRARARGCTHPHAVRILARAWVRVLWRCWTNRTPYDPSRHGGASALAHSEAASLQVA

SEQ ID NO: 390947 - protein, 325 aa, unidentified
MNNEKFCCGIDVSQNTLDVAYQNNLGEIFHIKVGNNNKGFETILEHTGIGYHFVMEATGVYYVRLAFFLHGKKCTISVVNPLKIKRYIQMQLEKNKSDKKDAQWICRYAIDQKPEFWEMPDSTYFESKQMYNTIRRYSEQIKRFNNQLHSLRTLPVQNKETIKSLEKMKLLFEKEIKILEEKLEALLMKWKPEQVKNISSIKAIGKRATAMLIIYTQGFRYTENYRQLISFAGLSPKEYGSGTSIKGRPKISRKGGKPIRDVLYMCAMSAIKTNTACKALYERLKAKGKSGKLALIAVCNKLLKQVFAVVKNNTLYQPNYCSART

SEQ ID NO: 390948 - protein, 316 aa, unidentified
MEANLGLDIAKAKFDAALLIGEKFKTKVFSNDPAGFAALSAWLAGQPVTVVQVCLEATGIYGLAVATYLHDQGHHVSIVNPAQIKAFGMTLLTRNKTDRADARLIARFGALHRPAAWQPPPAEIRVLQALVRRLAALQDMLQQEQNRLAGADPVVAATITRHLEFLHAEIMAVRQQIRDHINRHPDLRHKRELLDSIPGIGEATVAQLLAFIDAHNFASARQVAAYVGLSPRQRQSGSSVHGKAHISKTGSSNLRKALFMPALVAWRHNPTVSAFCARLAAAGKPKMVIAVAAMRKLLHIAYGVLKSGKPFDPTLA

SEQ ID NO: 390949 - protein, 319 aa, unidentified
MSQEKYIGMDVHQATISVAVMDAQGKVIIECLLETKASTIIEFIQGLQGTLSVTFEEGTCAAWLHDLLQPHVSRLVVCDPRKNALLKEGNKSDRIDARKLAELLRTNQLKPVYHEEQGVRTLKELGRSYLTITKDVTRVMNRIKALYRSWAIPCSGSSVYAPRHRAEWLAKLVEPGVRVRAQRFYQQLDLLQPVRLEARCELLQESHKHPAVKLLRQIPSIGPIRAALLVALLQSPNRFRSKRQLWAYSGFAVQTHDSGEYRYVRGKLQRNRERITVRGLNDNHNNDLKNLFKGAGSKSTRMWEVGRSTSPATTPARCG

SEQ ID NO: 390950 - protein, 352 aa, unidentified
MKIIGCDFHPSYQQIAMMDTETGELWEGRLEHEQGEARRFYQALQGQTVRVGMEAVGNSHWFQQLLAELGHELWIGDAAQIRRLVVRQQKTDRRDAKHILDLLLDGRFPRLWVPSPQMRDVRQLLRHRQKLVEIRTQVKNQLQHLALNQGVRRKSRLWSVQGRAVLEQLPLPPWTARRRGDLLAMLDRLQEQVGELDRAVRAEAEQRPEVRLLMTHPGVGPVVGLAYVLTIGPITRFPRGKQVASYLGLIPSEHTSGGHQKFGPISKQGNTMMRTLLVEAAQTAARFDEQLRRQYGRLKARKHSALAKVMVARKLAVRMYWMLRENKPYAQLYAQRPVARMQGSPSHSVVAS

SEQ ID NO: 390951 - protein, 350 aa, unidentified
MVIIGCDYHPSFQQIALVNTEGGELDERRLVHPEQAQQFYQELKQRNVAARVGMEASGHARWFERLLRELGFELWIGDAAKIRSKRVRKQKTDRQDAQLLLQLLMENRFPRIWVPDAENRDLRQLLWHRHRLVRMRTQVMNQLQVVALNEGLRRKKALWRPAGRKELESFTLAPWASRRRQDLLELLDQLTPKIQALTQALEAEVEKRPVTRLLMTHPGVGPLTALAFELVIGTPQRFHCGKQIASYVGLVPTEESSGERRRLGHISKQGNVLLRFLLVEAAQVTVRSQAQWRGKFFHLAMRRGRKIAKVAMARKLAVHMYWMWRQGCDYGQLEKFGSYAGEPGNLDDGQ

SEQ ID NO: 390952 - protein, 354 aa, unidentified
MNTTQNSTKSKIVKVIGVDLAKDHCDVIGYDENGIICLRLDGCSYAKLREILANLPQAVVLMEACKGSMFHARSIADLGHEVRLVKGTDVKALRNVKHKNDLRDAAYIANLYFVPGIKYVYIKSQQQQSLQFLQNEYKSLQELRIQVGNQIHAGLEEFGCPVRKSSKFIKTRMVAHLEKHAELIPEDVMASFKRRREIWLNLLQQEEEAKRRLEQVAATDANAKRLMTVPCVGPQTAVGLLVHVGVDFGRFKNSRQFAASLGLVPKQNSTGGNNTLNHITKCGPKSLRSNLVQCAQLVLMYAEKWKGNFGDWVRKMRDSGKKHGVIVCTIAAKLARIIYRLMKDKVDYTPILSC

SEQ ID NO: 390953 - protein, 430 aa, unidentified
MNTIRPVAGVDVAKAFSEFCLLAPDNSVLATLHIRHDVREDIEKAVNLLQKSEKDFGCSPIVIMESTGHYHKILFHALAQREIDVIIVNPIQSDSIKNLDVRKVKNDKWDAKRLALLYRIKGESLRTAVLASVNVAALKDLVRQYYDIQDDLTAHKLRLTGLVDRVLLGFEKDFFEITSMTGLAVLKAYPSAKAILRARPATIINLIAKTSRKGQKRAEAKYAFLRQIAQTMLDLGDSAEHLTLIIRAEISLIESLQAVLATIMQSMQSIVEQDRQTEHKSLAKAIDLLISIPGIGFQTAVTMLAEFGDVTAFQSAQSLTAYCGLDPSVKQSGSFKGTRNKISKRGPRLLRRALFHVASANVRNSRNDKDVNPHMQAFYKSKCQSKPKMVALVAVMHKMLFIIFAVLRDQKPFEFRDPIEHAARLAAKVA

SEQ ID NO: 390954 - protein, 370 aa, unidentified
MSQSRTLFIGMDVHKDSIAVAYVAQDHGAEGASLGTMGTRQCDIDQLIRKMQSKAKHLIFVYEAGPCGYWLSRYLRKKDSDCWVVAPSLIPKKAGDRIKTDRRDALQLARLARSGDLPAVSVPKVEDEAIRDLTRAREETLSDLKDAKFRLKAFVLRHDIRSTGPAHWGPAHLRWLSEVVCPTPAPHIVFHAYVRAVTAHTERLQRLDPELHEHVPAWRLHAVVEALQALRGVQCTVAVTMVAARGDLTRCDTPRARMKCLGLIPSAYASGERRQQGSLTQAGKTHARRALVDGAWAYRSPAQVSRHWPLRREKQPKMIQDISWQAHVRLCKRYRPLVARGTQAHIVTVAIARELAGCMWAIATPLPVAA

SEQ ID NO: 390955 - protein, 361 aa, unidentified
MSESMTLVGLDVHKAQTVAALLDPATGELSVQRLRGEPERVVPVFLEELDRPVRAVYEAGPTGFVLARVAEQRGLDIAVVAPGSIPRASGDRVKTDRRDAQRLVRLLAAGELRFSFVPSETDERFRDVVRCVEDARKDLMRSRHRLSKFLLRRGVRSPCKSWTQAHEQWLAKVSFDDELSRAVFLDYLCAECSLVQRRRALIEMLEGAVPESSHAQAVARLRCFRGIDTLTAAGLCAEIGSFDRFEKPSLLSGFLGVVPSEYTSDSKRFQGQITKAGPSHARRLLVEAAQHYRRRPAVGKGLQERQAGQDARVLQIAWRAQRRLHERWTHLGRRRGKPSGTVAIAIARELAAFCWEAATLS

SEQ ID NO: 390956 - protein, 343 aa, unidentified
MQSISTIGLDIAKSVFQVHGVDAAGQVVLRRQLRRRYVLAFFQKLPPCLVGIEACASSHHWSRELQALGHTVRLMPPAYVKPYVKRQKNDVTDAEAICEAVTRPNMRFVPTKTVEQQSCLMLHRARHLFIRQQTAVINSIRAYLAEFGVVAPVGRRGVEQLLEVVADTADCRLPEVARACLAALGSQLRALKAQILEFDRRIMVWHRSNATSKRLDTIPGVGPALATALVASIAEPGAFRSGRDFSAWVGLVPKQNSSGGKDKLGSISKQGDRYLRSLFTAGALAVIRYAKIHGTGHRPWLTGLLARRPTKIAAIALANKLARMAWAIMARNESYKEPAALAA

SEQ ID NO: 390957 - protein, 479 aa, unidentified
MSKQKQLEKTEKAKPTKGKRGRRRRKGMCLEDRPIQEPNAAGIDIGAREIFVAVPGDRDEDPVRVFSTFTESLQEMAQWLVQCGITTVAMESTGVYWIPPYDILEQHGLQVCLVNARNMRNVPGRRTDWHECQWLQYLHSVGLLRAAFRPEGEVCAVRSLMRHRNDLASMAHQHVQHMHKALTQMNLQIQHVISDITGLTGLAIVDAILEGERDAAVLAKLRDWRVKASEETVRQSLVGNWRPEHLFTLKQSRQMYRNYQEQIAACDKEIEQLVVQFEPRVDPAEQPLPPDRKQKQRRGKSKLVNPKTGFDVRAESYKLFGVDLTQVPGLAWLVLVLFSEVGRDMSRWKTAAHFVSWLALCPDNDISGGQVLWRGTRRRHNRAGQLFRLAAHGLHHDQTPMGDYLRRMKSKLGPKGATTATAQKIAIIFYTMVKNQAEYDATLWAQRDAQREKRFKEKLQRQAQRLGYKLVPLEEKPAA

SEQ ID NO: 390958 - protein, 364 aa, unidentified
MNDCITWVGIDDSVKKLNIAVFYGGEENPRFEAVFPNDSTGLGRLVKKLKTFPGEVRCVYEAGINGYHLHRFLTKHRIFCDIAAPSLTPRQAGKRVKTDKLDAKKLARFYRAGMLTSIVIPETEQESLRDMIRAREDALEDLQRARHRLLRYLTRRGLRFSEGENWSLGHLKWIKGIVFERPLDQMVLDEYRLTLNEETERLKKFEKMIEELGSQEPYKKRVSYLMALKGIKVLTAMTIISEALDLRRFTDAPAFMAAIGVVPSENSSGEKEVKGSITKTGNRHLRRVLIESAWNYQRSAVVGKTIRKRREGLPADILEIAQRCDRRLNYKFRHLINAGKDRRKAAVAVARELAGFIWAIGQVA

SEQ ID NO: 390959 - protein, 371 aa, unidentified
MNSIVYVGMDVHKDSFSLCAYTFEADRIQFEQKVAGDYRLVLKYLGQLKLRFPGYDEIVCGYEAGCLGYSLYHELTNQGVNCIIMAPTTMARTSSNKVKTDRKDAASIARSLAFGLYSQVYVPTDEDNEIKEFIRMRDDKKKMLKSTKQQILSFLLRHGLRFDGTKSNWTIAHLKWMKSLNLGGVLQETFSEYLISYEYLVDKIERLDRRIEELAAQDTYVDKVGKLSCLIGVKTHTALSVVVEVGDFKRFESADKFAAFLGLIPGEISSGETQRGIGITKTGNRHLRRLLVESAQSYSRGAIGHKSKVLKKRQEGQPTELIAYADRANERLRRKFYRMTLNNGKNRNVAVTSVARELACFIWGMMTDNIA

SEQ ID NO: 390960 - protein, 345 aa, unidentified
MDHVGIDVHKRESQLCMLNPEGEVTEVRISTTRERFRAVLGDQPRAKVLIESSTESEWVARCLEGLGHEVIVADPGFAPMYGMRRRRVKTDARDARALAEACRSGVYRLAHRRSEQQRRVTAGLVVREALVRSRTSFISVVRALLRKEGLRAASGSAEHFPERVSRLEMPGRLRSEVAPLLAAMVKVNEQLAWCDAAVEEATKNDPMVALLRTAPRIGPVTAAAFRAVVDNVERFRGPHQLAAYLGLVPREKSSGETQHRGRITRAGDSRTRSLLVQASQRIRYSKVPETLGLRMWAKRIEVRRGKAVATVALARKLAGILFAMLRDGTPFDPGKQAGVPAALAA

SEQ ID NO: 390961 - protein, 406 aa, unidentified
MELSPIYPSAIGLDVHQRQITACAITTDADGQVLVEHREFGAFKRDRRALAKWCAARSPDVVVMESTGIYWKSPYAALERMGLRALVVNARHVKNVPGRKTDIADAQWLAVLARAGLLRGSFIPPEQLRHLRLVARQRHKLSRMLTAEKNRLHKVLADGGVRLSAVVSDLHGQSARAMVRALIDGQSPAQVLTLASRRLKAPREDILAALDGELSDDHRFVLDQLLEHIEQLESRIRAFDARLLAGLEDYDEFLRLLQTLPGVDRIGAAMLLVEIGTEMEAFGSPERLASWVGICPGNNESAGKRKSGRIRQGNPHIRRLLCEFAHAARRTRCGLQAKYQSLAARRGNKRAIVALAHKILRIIYFMIERRDYYRDSDVDYEAMMVERNAPRWIRMLNQYGYLSPSA

SEQ ID NO: 390962 - protein, 371 aa, unidentified
MNTIVYVGMDVHKESYTLCCYCYDTDLVEYRQTIPADYRLVLKYMERVRDRYEGDITFVCGYEAGCVGYSLYHQLTDHAVDCKILAPTTMAITNTNRVKTDRKDAANIARCLAFHTYSEVYVPDEQDNQVKEYIRMRDDQKLALKKVKQQILAFVLRQGKRFEGGKTYWTIRHMKWLYGLELAPLDKETLSEYLITYEYLVEKLERLDRRIEELASEERYREKVKKLGCFMGLQTHTALSMIVEIGDFERFAKAQKFAGFLGLVPSEDSSADDINRYGITKAGNRHLRRLMVEAAQCYTRGVVGHKSVALKKRQEGCSPEVIAYADKANERLRRRFYRLTLHNGVNRNKAATAIARELSCFIWGMMTDNVA

SEQ ID NO: 390963 - protein, 343 aa, unidentified
MDHFAGLDVSVKETSVCIVDDTGRIAREVKVASEPDSLLQVLTNPAYHFKRIGLEAGRLSQWLFSTLAEAGLPVICVETRHMRAALKAQVNKTDRNDARGIAQMMRAGLYRPVHVKTLRSQKLRMLLTHRKLLQSKAIAIENDLRATLRNFGLKVGMVGTVKFETRIKELVDNLPELAVLVEPLLIVRRVLREQIGILHRRLLAVVRDDDVCRRLMTVPGVGPVVALTYRATVDDPARFRNSKAVGAVFGLTPSRYQSGESDRTGGISRCGDEMMRAMLYEAAQILLVRSAKWSWLKAWAMKIARHRGLKKAIVALARRLAVIMHRIGVDGTEFRWTREVAAT

SEQ ID NO: 390964 - protein, 343 aa, unidentified
MKLHVIGIDLGKTVFHLVGLDSTGKAVIRKKCSRKQLLAFTANLEVQLIGMESCSGSHFLGRALREQGHEVRLMPAQYVKPYVQTNKSDYLDAEAIAEAVQRPRMRFVPIKTEEQLDLQALHRVRERWVMRRTAVVNQIRSLLLERGLTLPKGRRYVDEQLPRILEDAELRLSGSFRVLLAQLKIELEQLTARIEEMDRVIQKRAKENEDCQRLTEIPGVGPVTATALIAAVGNASAFQKGRNLAAWMGIVPREYSTGGKQKLLGISKRGNKYLRTLFIQGARSVVQQRHKQSPGLSHWLEQLLGRTHQNVVIVALANKLVRMAWAVLCKNERYRAPILAVTD

SEQ ID NO: 390965 - protein, 429 aa, unidentified
MNITSILCVGIDVSLDANQVCAMNFDQHKFFNKSFENSFEGTQQLIKETAQIITLHGFDAVTFALEATSLYFFHIANSLSNAEELKLFHVEVYCLNAKVAKKYKDSFLGMPKNDPLDAYSLCDFVRVGRTKKLHQWRGANHIALQRLTRHRYHIALQLAREKNYVLNNIYLKSSQLRKKQGKMDSDNPFSDLFGATSSAVLTDFASMDDIVSMPMEDLVDYIDLKGKHRFTDPKKVATLLRQCAMNSYRLDKVSYDAINISIASSLRMIKMLEREIKDLDKQNENFAKGLHSNAYTLLLSLPGIGPVFAAGILAEIGSIDCFPNQNKLAKYIGFIWDDHSSGKLVSEDNKLMVTGNAFLRYYITQAANKFKDKDSQYHEFYTRKYNEALTHKHKRALVLTSRKFVKLIYAMLRREQLYSATGEVLYITE

SEQ ID NO: 390966 - protein, 343 aa, unidentified
MYYIGLDVHKRTISYCVKDAAGHVHQEGKIGSTRRELDAWIKTLPQPRTIAMEATIFTGWIYDQLLPHAETVKVAHPLMLRAIAAAKKKNDKIDAGKIADCLRCDFLPECHMVSTEIRDRRRTLRYRNLVLKQMVQMKNRISGLLMETGVSYNKQRLHKLGYFTELISSNDEVSESIRPLLKLSRETIVRSQKLDYALVSSLERDPLLAERLKRLRTIPGVGPITALTWALEIGDVSRFQSIKQAISYCGLCSAERSSADKLVRMPISKQRNKHIQQTLVEAAKLAPRYSHELALVYERERQRGNKNRATLAVARKMVAYMLAVERRKQDFVPAEQLGGTAAA

SEQ ID NO: 390967 - protein, 371 aa, unidentified
MEESSKTLYVGLDVHKESIAVAYAREERGTEVVSLGAIGTRQCDIDKLIRKLQAKGAPLVFVYEAGPCGYWLYRYLTRKGLSCHVVAPSLIPRKPGDRVKTDRRDAVMLARLMRSGDLTAIYVPTVEDEAIRDLSRGREDAMRDLKATKYRLKAFLLRQDIRYEGRANWNAAHLRWLSEVVCPTPAQQIVFQEYVRAVTEQHARVQRLETELHEHVKTWRLYPVVEAIQALRGVELTGAVILIAELGDLTRFDTPRQLMSYLGLTPSEYSSGERRRQGGITKAGNTHARRALVEGAWAYRYPAKVSRHLQLRLEKLPAEVQAIGWKAQVRLCKRYRQLIARGKHANQVVVAIAREMAAFAWAIARTVPLAP

SEQ ID NO: 390968 - protein, 346 aa, unidentified
MKINRVGVDLAKNVFQLHGADYKGKTVWKRRLSRGKWLKVLFDTVEPGTEIGMEACAGAHHWARQLMQRGYPVKVIPPQFVKPFIKSNKNDANDAQAICEAMGRPNMYPVKVKTVEQQDLQAMHRIRNEIKSHRIAKANQIRGLVTEYGLVAPLQLHALRRAIPEWLEDADNGLTFLFRQLLQGLWGDLYALDQRMTELDKQIAVVAQEDPTARRLQQLRGVGPLIATALVATMGDARQYPKGRDMAAAIGLTPKQHSSGGKDRLLGISKRGDAYLRCLLVHGARSAVRTAKDKEDRLSRWIISLQARRHPNVVAVALANKMARMAWVMMTSGVDYEPDLAAASVN

SEQ ID NO: 390969 - protein, 350 aa, unidentified
MMIIGCDYHPRYQQIAMLDTATGELVERRLEHENGEARAFYASLPQPVLVGMEATGYGQWFERILAEFGHELWIGHASEIRAGVVRKQKTDARDAAHLLRLLVEKRFPRIWIPSPAERDTRQLLRHRYKLVCFRVSVKNQLHGLAMSQGVCRKKKLFTAKGREELEKLSLGPWASRRRRELLAMLDQLDPVIEELDRAVQQEAESRADAVRLMTHPGVGAVTALAFVLTLGPMARFQRSKQVVSYLGLNPKERSSGDKQHTYSISKQGNTMMRWLLVEAAQTSVRFDPELQRVYRRIKFNKGASVAKVAVARKLAVKLYWLLRATASCAQRAPMQGSSRGTLVPNLGSSF

SEQ ID NO: 390970 - protein, 400 aa, unidentified
MRTVFGIDVSKASSEVAILVNGEKIHGYTMLNDAIGFNRLLNDLKTVHNPEIIFEATGVYSRRLRAFLEEYGYAYTQLNPLEAKKQLDSLRVRKTDKIDAEKLAHSQFILNRKPTYAQEEVYQHLRDLSRFYQNLTEDIVRAKNRLHKVLQVTFPELENLLSTPTGEQYWNLVMAFPCKEFVLNLSQNELCKIIRQSTSKRISEKRIAYLTDKLIKLAKQSFCAVKKISPMLEEVRYYAQELLRLSERRQVVLNDMVALAQPLPEYDILRSIPGIAETTATSIIGELGDIRRFQSTNQINAFIGIDLRHYESGNFLAKEHITKRGNPYARKILFKCIHNIASASHTNPCHIADFYEKRKRQSTIASTKPHTIASIHRLIRTMYYLITHNKLYDYSLTQNR

SEQ ID NO: 390971 - protein, 338 aa, unidentified
MKITTIGLDIAKSVFHFVGVNKAGKLVRKKMIKRNDLIRFFTQIEPCLIVMEACGGANYWAREFQKVGHEVKLIAPQYVVPYRPGNKNDYNDALAIAEAAQRPNMRFVQPKPVEQQDVQMLHRMRERLIKQSTALVNQVRGMLAEYGIVIAKSKASFRSRLPDILENADNELTVKGRGVFYQLYEEFTDIERRLKSCDTQVLQETKNNPVCKRLETVPGIGPVTATAFYAAVGEGKGFNNGRHFSAWCGLVPKQHSSGGKDNLLGISKRGNAYLRTLFIHGARAVLRHSNGKTDRFSRWAIALADRRGFNRACVAVANKLARIAWVIAAREEEYRMAK

SEQ ID NO: 390972 - protein, 364 aa, unidentified
MKRKVYVGMDVHKETIQIAILPSNTKALVKEQQIKHEEGQIKKFIQKLKSEGTEIHCCYEAGVTGYPLYRYLKTLGVNCIIAAPGKIPRQSSDKIKTDKRDAIKLARLLRSGELESIHVPSEEDEAVRDYLRSRDSLRLDLGRNRQRLMKFLLRKGITYSTTKYWTASHYKWLNNLHFENEILQATFNDYYSRVRVQEENLKAMDQKIQEIAKSEPYREKVGILRCFRGVDYLTAMFLLSEVNDFKRFKTAGSFMSFLGLVPGEYSSGPKRKQTGITKTGSPRLRRILVEAAWQHRFPGTGSKVVVARRVGQSALVVSLAEKASLRLHKKFKSMQLRGKTPQVMITAVSRELSGFLWAAMNLVA

SEQ ID NO: 390973 - protein, 346 aa, unidentified
MKKIFIGIDFSKEKFDATLIQAEGLKECAPSVHEVFDNKTSGFRHLVKWVKTHAEDFTADLWLFCGENTGGYSIGLCNYLYASGYDMWLECAYNIKHSAGIQRVKNDRADSRAIAEYAMRNYDKAILYKPQSSSMNALREVFLYRHSLVKQRVALQIRRQEKRLTQDKSEIKTFMSFTSKHLVAELNKAIAKCDQKIKEIIASDDELREVFDIVTSMPGIGVQNATCLMVYTDNFQKFDYDSRKIGCYYGIAPFGRLSGSSINGKPRVSPFANRMIKSLLSQAALAAIKSDIDIYNYYQRLTQRGKHPLLIHNNIKNKMLHRLVAMVRNRQKYNPDYIYRNTKEVV

SEQ ID NO: 390974 - protein, 338 aa, unidentified
MNKFSGIDLHSNNSVVVVSDEADRIVYQRRLPNDPVQIRAALAPHREDLVGVVIEATFNWYWLVDELMEDGYCVHLANPAAIRQYDGLKYSGDFADAAYLAQLLRLGLLPEGYIYPAQGRQVRDLSRKRMQLVQCRTAQILAIENLFSRQTGGQMQGERVKRLDEAQVSGFGFAPDVTLAMQANLAVMQTLQEEIGIIEKRLMERVKLHPDYALLNSVPGIGPILATTIMLETGTISRFAEVGNFSSYCRCVDSRRESNSRKKGEGNTKNGNKYLAWAFVEAANFAIRSCPEARRFYERKKRARNRIVAIKALAHKLARACYYMLREHKPFEVTRCFG

SEQ ID NO: 390975 - protein, 344 aa, unidentified
MQITTIGIDLAKTVFQVHGVDGSGKTVLRKQIKRDQMAPFFANLPTCLVGMEACGSAHHWARKISGFGHTVRLMAPQFVKPYVKSNKNDAADAEAICEAVARQNMRFVPVKSVEQQSVLSLHRVRQGFVKARTAQANQIRSLLGEFGIVMPQGITNVRKRAPELIENASNELPAAFRNLVDRLLGHLKELDCQVDELEAQIKAWHRSSELSLKLEKIPGIGPLGASALVASIADARSFDNGRQVSAWLGLVPRQHSSGGKPTLLGMSKRGDAYLRTLLVHGARSAILAAQRKTSINPWLANLLHRRNPNIAAVALANKNARTVWALLAHDREFRPDYAPQLAAA

SEQ ID NO: 390976 - protein, 345 aa, unidentified
MPIVGGLDIHRKQITFDYLDTVTGEVKRGQIAPADREHLRAWLARFAGWDDVAFAVEGCAGWRYVAEELAAAGIAAHLAEPADTAARRGRKRHAKTDKTDARHLRMLLAEGRLPECWIPPAHILEYRALLETYHDLRREHTAWVQRIHAVFFHQGGPPLSEDALRTEQGLAKLRAAAAAHLSPAGQLQVATALDMLAAVEARMHAQRKQLTQTARHLTGARVLADRLYGVGPLTGLALTCWLAGEGRFSSSRKAVRFTGLDITVHSSDRKGPPGRLSRQGPPVLRWAVYEAGKTHARTSAPDHGYYAAVADRKNTKRAALSEARKIVRQACHILTELGDDALTAA

SEQ ID NO: 390977 - protein, 366 aa, unidentified
MLHKLNSAATLIQRTTTEAPRDHMYYIGLDVHKRTISYCVKDAAGHVHQEGKIGSTRRELDAWIKILPQPRMIAMEATIFTGWIYDHLLPNAEKVKVAHPLMLRAIAAAKKKNDRIDAAKIADCLRCDFLPECHMASTEIRDRRRTLRYRNLLVKQMVQMKNRVSGLLLETGVSYNKSRLHKVGYFADLMSTNEDVSQSIRPLLKLSRETIVRSQKLDYALVSSLERDPLLAERLKRLRTVPGVGPITALTWALEIGDFTRFRSIKQAISYCGLCGDERSSADKVLRMPLSKQRNKHIQHVLVEAAKLAPRECHELAVVRDRELQRGNANRATLAVARKMVCYLLAVERRKQDFVPAEEFKPVAAA

SEQ ID NO: 390978 - protein, 349 aa, unidentified
MLHAGLDLSRKKLDVCLLSDYGAHLDQLAVPPDVDSLRTLARRIAEVHKEPVCAVIESMTGARIVHDTLEACGWSVQIADAQKVKGLAPLACKTDKIDSMVLAVLSHRDLVPAIWLPDPRVRQERELARFRLHLVKHKSALKCRVHSTLINFGRACPVTDLFGAEGRRLLKRLEVPEPWRSNVTASVALIDDLEHQISDINRRLKEGHADHPYIPLLMSVPGIGWVLAFTIAGEIGNIERFSSPEKLTGYTGLCPRVNQSGEKDRRGPLTKHGPTYLRWALLEATMHALKHPAYSERYQRNKKRLGKQRGAKVAQIDIARRLSHAIWHMLTSNRPFAPRGAALSAPVRN

SEQ ID NO: 390979 - protein, 328 aa, unidentified
MKNYQEVIGIDVSKNKLDAYAYNRSSHREFSNDVKGYKALLQWANGKEQKVFFCFENTGHYSLKLALYLSSKKQVYVQENPVVIKRSSGVIREKNDVVDAMMIARYGWLHREELSPSELKDNELLEVSRLLALRDQLVRSRTGLKNTLSELKKLLSSSSTDTCCKTLVSSITHLTSQINKIEKQLKSLIKTSEALSQNYKLITSLKGVGLVVGAQLLYHTNNFERFNSWRQFSSYCGTAPFGHSSGSSIHKKRKCHPMGDRQMKSLLSMAACTAIQYDSELRQYYKKKREEGKLKMIALNNVRNKLLSRVFAVVKRGTPYVELQRFAA

SEQ ID NO: 390980 - protein, 337 aa, unidentified
MKTNKNVSPTIFWAGFDISKADFHSANWGHEEFPDMEVLVFKRQRKAMKQVLAKLTESAPAGMQLGIVMEATGKYAEEVATWLLKLDPKLRIAIVNPAQTSAFIKSLGFRNKTDGLDAKALARYGKERNPVAWEPLSPELAILRDLTRTRSDLVMARTAMKNRLNDHKRASQTAAKAMEKIIIALETQVEALEAAIEDHLNAYPGLAEPVRIFRTINGIGIVTSTVILAEIGDLHRFSRSRKLSAFAGLSPKLKTSGTSVHGKPRMCKQGGARIRAALYMSASNAIQHNPDMKATYDRLRGRGMEPRAALGAIMRKLLVLMRAVLIAGEAWKPRLVA

SEQ ID NO: 390981 - protein, 357 aa, unidentified
MASIALERTDVVVGVDTHKDEHVAVVLDGLGGYLGELFVPVTRDGYARLVEWAASFGKVNAFGVEGCGSYGSGLYRSLRRAGHSVTEVNRPARKGERRLAGKSDVIDAEHAAREVLAGRAKTTPKSSNGSIESIRLVRIARGTAVKAQTTAMIALKAALVTASDELRAELEPLSDHKLLLACAALVAGSDLADPEAAMRYTLGVLATRWFGIHDEVKTHTSHLKRLTADAAPALVDAFGIGPEIAGELLVAAGDNTDRIRSEAAFAKLCGVSPVPASSGKTSGRYRLNRGGNRQANAALYRAVRMRWHEPTIAYVKKRTADGLSKKDIIRCLKRYLVREVYGLLPPPAATARDELAA

SEQ ID NO: 390982 - protein, 412 aa, unidentified
MQTIVERPAALDVHKAQVTACARVPDGRGGREQHVAEFPTTVRGLLALRDWLGGHAVTQVVMEATGVYWKAPWAILEDEFECMLVNARHVKQVPGRKTDVSDAAWLCQLAEAGLLKANFVPPKPIRELRNLTRYRKTQIQERAREVNRLHKALEDAGIKLDTVAADIMGKSGRDMLDALVAGETDPNVLADLARRQMRKKIPALREALTGHFDAHHRLWVGAILRHIDFLDEQIEQLTAMIEQQIRPFAPAVELVCTMTGIQRRGAQCIIGEIGADMTQFATARHLASWAGRCPGNDKSAGKRRSGKTRNGSKWLDFALEEAAMAAIRVKGHYLEAQYRRLKPRRGHKRALGAVKHTMICAIWHMLSTGETYRDLGGDYFTNRDPERQTRRLVAQLERLGHHVTLTEEAAAA

SEQ ID NO: 390983 - protein, 433 aa, unidentified
MRIIGLDIHRAFAEAVAWEDGRLRRLGRVDMPRDLLAAFAAKLSPNDVGVIEATGNATSAAAVVAPHVKKVGIGNPKQVRIIAYAKIKTTIDADVLAQLYASGFLPEVWIADEPTQALRRQVTRRNQIVRQRSRLKTVIQSILHSHLIPSCPHADLCGAKGRTWLIEQVVPQDERLAIDRHLREFDRLGEDLQVIERDLARSALEDEGVKRLMTIPGVDITVALAMKAAIGDVSRFDDPQKLVTYLGLNPSVRQSGQVRPTMGGSPSRAVVMRAACSSRRPGRPLVLPDRCEPSPCGVRARRGQHVAAVATARKLSVVIWHLLMKGESYAWARPSLHAKKLARCGTQGREQGCARPKGSRARLQHKEPPGRRAPLGGAGRGRLCTPRRRLEPTRSEEGRHGCRKRGATIEAARQGSHLGPCSSPRGRPCATGE

SEQ ID NO: 390984 - protein, 441 aa, unidentified
MNRVIPTSAAATQRKESQQMKTWNEVTHFAGFDWAKDHHDVLVLDGAGKIVAEFRFDHTGSGWMLCQEKLAQFPQVAIAVEAGHSAAIERLVMLDYRVYPVHPRSSKSYRTRKLPSGTKTDRADCWALADALRLEGESWRVLTAPEPLVQQLRLLCRDEVALIEQRTALINQLQQALYEYYPAALEAFEDWCAPSAWAFVERFPTPKDLVKAGKRKWQNFLHAQKLFHPEWNKKRMEIFARADQFCGPEAMIAAKSALAVATAIMLQTLEAQLTRYRALITECFKQHPDHTLFASLPGAGPKLAPRLLGELIPLKALADTPQALQCLAGMAPVSYQSGKVSVVYLRYQCNRFLRATIHLWVDLSRHYCDWARIYYEAHRKKGQGHACALRCLGMRWLKIIAAMMRNQTPYDAAIHTRNQLQHGSWVMQLQPVKAVKNNGSA

SEQ ID NO: 390985 - protein, 347 aa, unidentified
MLHAGLDLSRRKVDVCLLSDEGDHLDQLVVPPDVDSLKTLARRIEEVHAEPVCAVIESMTGARIVHDTLEAEGWAVEIADAQKVKGLAPLACKTDKIDSMVLAVLSHRDLVPAIWLPDPTVREERELARFRLHLVKHRSMLKHRIHSTLINFGRPCPVTDLFGVEGRKLLERLDVPEPWRGNVLASVKLIDDLERQTTEAERRLKQGHADHPYIPLLRSVPGIGWVLAFTIAAEIGEIERFESPQKLAGYTGLCPRVVQSGDSDRRGPLSKHGPRYLRWALLEATMHALRHRAYSERYQRNKRRLGKQRGAKVAQIDIARRLCHAIWHMLSRNEKFAPRGAAFRLAA

SEQ ID NO: 390986 - protein, 346 aa, unidentified
MGTPADRPAARLFVGVDIAATTFTTTWSQDTQPAVRPLTFNQTPTGFAAFQQQLDQTGIVPNATLIVMEATGSYWITLAVTLHEAGYVVSVVNPARVHDYVKSLPRKGETDALDAGYLTQFAAERRPDPWTPPPAVYHELRQRLAARDALLEMRKLAQNHRHALSQWPIVVGSVLTQLDESIADLNRRMGQLEAELAAILQDGAWAESAALVLSITGIGMLTAAWLLVTTLNFTIAPTAESLAAYAGLAPLPHDSGSSVRGRRQLGHGGNRRLRTALYLATLSAARHNPVIRPFYQRLCAAGKPKKVARCAAARKLLQLAWAVVKHKRPFDPAYRVPHSTEAQAVA

SEQ ID NO: 390987 - protein, 334 aa, unidentified
MVAGTLGSLDKEGARKMTKTITLTAGIDTSKSKLDVGIHGQRRCETFENALPGWRKVQTWLAGEGVGRVGIEATGGYERGVVRHLQDAGIEVVVLQPKQVKAFGQLHLRRAKSDRIDAFLIAACTHLLDAHNRMPPDPRFDPLGDHLTYIEQIEEDIARLKTRLEHIGEKRLQRTVNADIARLAKRRADELKRLEAALRTHADLARRFDLVLSVPGLGVRTALSIVVRLPELGHISREQAASLAGLAPFVQQSGKWKGETHICGGRERLRRALYAAALPATFFWNPALKALYGRLTARGKGHVSASVACARKLLIYAKTVVSRGTPWVDEPKPA

SEQ ID NO: 390988 - protein, 330 aa, unidentified
MQVTTIGLDLAKNVFQVHGATGDGEVVLNRSLRRAQVHRFFESIPRCLVGIEACGTSHYWAREIARLGHEVRLIPPAYVKPYVKRGKSDAIDAAAICEAVTRPSMRFVAVKSPEQQAVLALHRVRDLIVRQRTQIVNMLRGVLAEFGIIVRQGAGHAIAFAKRCLEGTEDDLPDLARDVVTNLCHQLVALHRRVLWYGRQLNRAASRDARVARLRTIPGVGPITASAIVASIGDGRQFSNGRSFAAWLGLTPLNRSSGGKERLGRISKMGDRYIRRLLVLGMTSRIKQIQQRPDQFDPWFANILERKPPKLAAVAMANKTARIIWAVLTR

SEQ ID NO: 390989 - protein, 361 aa, unidentified
MKEEQATSGYRNVVGGVDTHKDLHVAAVVDEHNRLLGSECFPTTRHGYKQMLLWMRSFGELARVGVECTGSYGAGLLRYLQQAHVTVLEVTTPDKSDRRKRGKDDALDACNAAHAAFAGVRTVTPKTRDGMIESLRVLKVCRKTAISARRVALQLIHNTIISAPDELRESLRKMTRMQLIRTLAAWRPDLSDYRNLISANRIALKSLGRRYLELHDEIADLDVMIAALVDELAPDLVSRNSIGYESASQLLLTAGDNSDRLQSEASFAALCGVSPVPASSGKVTRHRLNRGGNRAANSALHIIAIGRLRTDDRTKAYVAKRVSEGHSKLEAIRCLKRYIAREVFYVIRQRYRQIAQTQFTP

SEQ ID NO: 390990 - protein, 433 aa, unidentified
MQDVQDEPLFAERVAGLDIAKAGVEVTIRVPSETTAGRRQQETRTFATTRRELESLADWMHCWGVTRAGMEATGDYWKPVFFLLEARGFDCQLYNAAQVKALPGRPKTDRADSVWLAKITERGSVASSFVPPEPIRRLRTHTRYRRHLTQARTAEKQRVEKLLEDGHLKLSSVISDIHGVSGRAMLEAITAGLRDPKALAQLARGSMRGKIRRLEEALDCSFFTGEHAAVLAMMLAAIDHYTAQIEALTARIEELIEPWLHQVAQLDAVDGIGPVCAQDIIAEVGTDMTVFPTASHLVSWAKWSPQVRQSGGKRKGSNATGRGNPYLGAALGEATICAGRTQSFLGAKYRRLARRMPKKKALVATGNSMLTSIHALLSDPQATYQDLGPSYHEQRMHTRRQARSHVLSLERLGYQVTIQALNPGTSELLAPAR

SEQ ID NO: 390991 - protein, 407 aa, unidentified
MEVLHRRCAGLDVHKKTVVACIRIAEGGKVQREVREFGTATRALYALAEWLTECGCSHAAMESTGVYWKPVWHVLEGQLELVLANATEVRNVPGRKSDTKDATWMADLLAHGLIRSSFVPPEPIAELRDLTRTRKQLVRERARHTQRVQKVLEDANLKLSNVVTDILGVSGRAVLDAVIQGETDPGVLMELTSPRLKASREEVAEALYGRVTAHHRFMLRLHLNQIDGVNGAVVTVDAQTEELLEPFRGTVDHLLTMPGIGPTVAAVLVAEIGTDMSRFKTPGHLVSWAGLCPRLDESAGKARSTRTRHGHWLKTTLVQAAWAAVRKKDNYLHAQFLRIKRRRGAKRAIIAVAASMLSAAYHMIRDDADYQDLGGDYFLRYDREQVARRLVRRLRELGLEVEVRQAA

SEQ ID NO: 390992 - protein, 388 aa, unidentified
MSFDHHHEAPTAIQNNLAAIFVSLELSRSIWLITSLSPGFGEKMSKHSVRAGDIAALLARFSELKRKTSERTGKSFPIVVIQEAGLDGFWLHRVLQSEGLESHVVDPASIATSRRRRRAKTDRIDGEALLRALLAHKRGEPRVCAMVKAPTPEEEDRRRLCRERKVLIAERVKHVNRVKGLLFSQGVSGYEPLHRDRRQRLDSLQTGDGRPLPGHLRAQILRELDRLELLLKQIKAVEGERDALLVEQHVATPAPAAMLLDLKGVGPEFAAVLWSEGLFRHFDNRRQVAAYAGLAPTPWQSGSVDHEQGVSKAGNPRLRTTLIQLAWLWLRNQPQSALALWFKERLSSNGGRLKKTLIVALARKLLVALWKYVTAGVVIEGAIVKSPS

SEQ ID NO: 390993 - protein, 359 aa, unidentified
MSHFAGLDVSIEETAICVVDELGVVLMQRPVPTEPEAIASALAPFLATLRRVGHEAGALSPWLHTELKALGVPIVCLETRHVRAVMAAQRNKTDAADALGLAHIMRTGWFRQAHVKSDECYRLRLLLVQRRNLKRKFLDIENTIRHSLKVFGVRLHKVGRAGFEKRVRELVADDSLTAELMECMLNARAALWREYLKLHDLVVKIVAHDELCRRYVRIPGVGPVTALTFRTAVDNPARFKRSRDVGAYFGLTSKRWQSGTSIDVQGRISKAGDPDVRRSLYEAASAMLTRYRGTTALKSWGAKLAKRCHKKAVVAVARKLAVIMHAMWRDNTEYADRPDGAGANEPATQKDRKLLGAHA

SEQ ID NO: 390994 - protein, 367 aa, unidentified
MPRIADAKRPVTGGVDTHADTNVAGVVDQVGRVLGAEEFPATTAGYRMTLAWMRGHGELVKVGVEGTGSYGAGLARHLAAEGVEVVEVIRPNRQARRRRGKSDTADAVAAALAALNGEASGGPKARDGAVESIRALRVVRRGAVKARTQAANQLRDLIVTAPARLRERLAPLPIAGRVELAARFRPGDLTDPAEGTKAAMATVARRHQALEAEIGGLDAALEALVEHVAPERFLTKQGVATQVASMLLTTVGDNPDRLRTEASFAALCGASPVDASSGKQRRHRLNRGGDRQANSALWRVALVRMAHDPRTKAYVARRTAEGKTTKEIIRCLKRYIAREVYKALTRHAQTPMQIAADHAAADFLARA

SEQ ID NO: 390995 - protein, 412 aa, unidentified
MRVIRKRCLGLDLHKKQNTAYLRVHQGSDKEPLGIREQFGTMPEDLERLREWIVGHGVTDVVMESTSVYWMHLYELLEDVTRPAVVNASHVKKVPGRKTDVTDAEWLAELHAHGLLRTSFVPPRDIRRLRALTRYRSKLVAMRTNARNRTIKLVEMAGVKLSSVVTDSFGMTGRIILNGLCREGANPAALAAQAKGKLRLKIPALEGALRHPLDAHQRELLTLHLQAHDLIDAQIAQVELKLSESSTAYAPAIEKLDAIPGINALGAITLLAETGVDMSVYRSDRHLTAIAGLAPGNAISSDKRRRIGVRKGNHHLKRICVQIAWAASRKKDSFLRARFLRLQARIGRNKAIVALARQILVLVFHVLSTDRPYSDRGPNFYQLRDKDRVVQRYVNRLADLGFVATLTPKADR

SEQ ID NO: 390996 - protein, 355 aa, unidentified
MNDRKYIGLDVHQATISVAVLDSAGKLVMEAILETKAETILQFIHGLRGSLHATFEEGTCAAWLHDLLKPHVAHVLVCDPRKNALIKVGNKSNRIDARKLADLLYLDKLHPVFHREAGNRALKELARSYLTLTRDTTRVMNRLKALYRSWAIPCAGQRVYAPRYRSEWLAKIPPAGVHRRAEIYYQQLDALRSLREQVRRDLLAEGRKHKAMNLLRRIPSIGPIRAVLLIALMQTPHRFRTKRQLWAYCGLALKTSTSGEYQIVEGRLRRSRKFLAIRGLNTNHNHDLKNIFKGAATRAAAVPGPFQDFHAGLVARGMKPTMARLTLARKIAAITLIVWKKGVDFDAEHLKQQAA

SEQ ID NO: 390997 - protein, 413 aa, unidentified
MVKREKIELVKRQRIFVGIDIAGSKHRARFIDNMGEEQIKPLSFFNDREGLEKLERRVNEIPRIGDDIIFGLEPTGDYWKPVAQYLREKGYPVVLINPYHLKRTKEIIDNSQDKTDDKDSYLIADLTKQSKYFFPVIPEGVYAELREVSINWKRTSQQLARLKCHLSNFLAKYFPEYKGIFSDILGKTSLYILKHFPLPEDIERLGINKLYRVMKKVSKGSIKEGKIQLLYEKARTSIGLKGGSQTAKVLLKEVLSDIEILKKRKEKLTKMMDELLYQSGYLKNLLSIPGVGIVTGSLFLGEIGDPDNYERASQIEKMAGLNLVENSSGAMKGEKKISKRGRSTLRYVGHLVATVAIGKSPEIKALYRYKVEECKKEKMKALTGLSAKMLRIMFAVCKNKTFYKHEEITRYFR

SEQ ID NO: 390998 - protein, 371 aa, unidentified
MGESSKTLFVGLDVHKDTIAVAYAPNDRGADVVSLGTIGTRQCDIDKLTRRLESKGATLVFVYEAGPCGYWLYRYLARRGFSCSVVAPSLIPRKPGDRVKTDRRDAVTLARLLRSGDLTSIYVPSVADEAIRDLSRGREDAVGDLKRSKVRLKAFLLRQDIRYEGRANWNAAHLRWLARVVCPTPAQQIVFQEYVHTVTEQSERLRRLEAELHTAVKTWRLYPVVEAVQALRGLDLTGAGTLIAEVGDLTRFDTPRKLMSYLGLTPSEYSSGAHRRQGGITKAGNGHARRALVEGAWAYRYPAKVSRHLQLRLEHVPPQARAIAWKAQVRLCKRYRLLSARGKHVNQVVVAIAREMAAFAWAIARTVPVAS

SEQ ID NO: 390999 - protein, 441 aa, unidentified
MGNLQKVHSTAAGIDVGACKFFVGTEDGKVENFKTFTSGCHQAVEYLQQKGVTSVAMEATGVYWITLHDMLRDAGFEVHVVNGRHVKHVPGRKTDVQDCLWIQELHSHGLLRKSFIPPDEVLQLRDYMRIREKDIESKVRAVQRMDKALVMMNIRLSSVISGIQTVSAMSIIEAILQGERKAEVLLQLCDERILKTKRDEVLESLNGFYKEEKLFALQHAWNEYQFYEESIKKCDAEIEKILKKQTEHKKEPSKRPAGKRIYHNKPQIKDLDKMMMQIFDDKDLTVLPGMTSYSALKFYSVVGNDFSNWPTEKHFAAHLALAVSRYQSGKSRKYRKVVCNTEGGQILKECVQPLLKSKHNALGAFGKRIAARRGPAVAIKAMARKLAVWIYRIHNKGLEFVENGIKMYEEQQNKQKMKWLEKQAKQLNMVLTPSSEIGGVH

SEQ ID NO: 391000 - protein, 361 aa, unidentified
MKRVQSNKLDFSGQNIYVGIDVHLKSWSVAILSEYSALKRFSQSPEPEALHKYLVSNYPGANYFSVYEAGFCGFWIHEKLTGLGITNIVVHPADVPTMSKEKLRKTDAVDCNKLARELRSGSLEGIYVPKADVLEIRSLIRTRNMIVKDSTRTKNRIKSLLRFHGVDIPEEFTRSSIGRWSKRFLAWLHSIELSTEYGKKTLELHLEQFVRLRNMLLQETRAIREISRKAPFEKPMRLLTSVPGIGVTTAATLMVELDDIVRFKNADHLASFIGLVPMCHSSGESNGPGNITVRRHFMLRCLLVEAAWIAIRKDPAMTVAYTEYRRRMNPQKSIIKIARRLVNRIYYVLKHEKEYIPCVVE

SEQ ID NO: 391001 - protein, 367 aa, unidentified
MTKSITVERQQASNFAEKKYTVGLDLGDRWSWYCVLDERGEVVFERKVSTTPRALREVFGAMPHSRVALETGTHSPWISRLMKELGHEVIVAQASKVRLIGESRKKDDRLDARTLARLARVDPELLGPIRHRSARAQADLIMIRARAGLVRARTALVNAARGLTKSYGERLRGCSPRNMDAEKSKGLSAELQMALEPLLRAIESLSQQIPDYNKRIEQMAGDRYPEVARLQQVKGVGTLIALAYVLTLEDPQRFTKSREAGCYVGLQPGRRNSGSSTPQLHISKEGDPYLRTLLVQGAQHILGPFGQDSDLRRWGLKLAERGGKNGKKRAVIAVARKLAVLLHRLWVSGEAYEPLRNQRAIELRTAA

SEQ ID NO: 391002 - protein, 316 aa, unidentified
MKTEVFVGIDVSKQHLDVAVRPQGRHFIIPNDDRGLKQLLKRLTALKPQLIVLEASGGYELLATAALAEAQLPVALVNPLAVRQFAGATGKLAKTDKIDAQVLAHFAEAVRPEPRPLPDQEQQLLKAALQRRVQMVKMIGQEKNRLEKTFIPVLRQDIQVHLAWLQQRLEQLDRDLNDQIRRSPLWRDRDRLLQTIPGIGPAVSRAVMAQLPEAGRLPGKKAAALVGVAPYNRDSGRFRGKRMIRGGRSYLRRMLYMAAVVAARWNPVIRAFYQRLLAAGKPKKLALTACMRKLVLILNAMLKNNQPWNHFVTQAP

SEQ ID NO: 391003 - protein, 336 aa, unidentified
MKKVYDKCCGIDVHKKIMVACFIHGKEQEIREFGATTRELLALADWLEQGGCEMVAMESTASYWKPLYNILETSNLPAMVVNARHMKAVPGRKTDVKDAEWIADLLQHGLLQASYIPDKAQRELRELVGYRKSLVADRTRELNRLQKMLEGANIKLSGTVAEINGMSARIILNELLDGKTIDKTRLEEMKKQKIIAHNLRASFDQIADDLNGVMSPLQNKMMRELLKHIDELNVHIKNLDEDIDNHMNDEEKKATSAITEIGGIAGASAKAIISVIGTDMSRFPTDAHISSWAGLCPGNNESAKKRYSGKTNKGNRLLRKVIRNVPYPLQMQQYLI

SEQ ID NO: 391004 - protein, 363 aa, unidentified
MAEEKRRYAGIDLGKREYTMAIIGLNGKIAIHKGTTMEKGRAALYRLLEKSDKVALEAGNLAFKMARELTQRVGCEVRVLNPSKLPMIWSAPTKTDKEDAMKLAHLIEERRDEKLPTVPLPSEREMERRELISNYKREVKGRVRVINTLHSLFWNQGHTGVVKKNLSTAAKAREAIKLLTGQMREDAEDQILHLELHEKRLKALRGKIKEEAKADEDMRRLQTIAGVGPVVAYAFLAHVGNGERFNSGAQVSNFLGFVPRLDYSGTIQRHGHITKHGNGYLRGLLVQAAWMTVRSKNGGALRDRYAHLTREQGKGKKKTIVAIGRRMAELMYSMLRSKTDYEARAWKKPSNTATLAEQARMSA

SEQ ID NO: 391005 - protein, 427 aa, unidentified
MNYTKLKPPMRVLNVAFDVSSETLNWSLEVPERFDDVKRVDGECINHTESIWDELKRIKKIGSENGFTEIRVICESTGIYHRSLLKIASGLGMRTNLVHGEAVAKYRTIRFADHGKTDLKDPQAILTVAKVGRLIRHRELDGRYAQLRELNRLVMRLERRKRAAKNELHADLRMLFPDLRLSKSVLYGPTGQALINVFGGNPHRLISVGFDEFTRRIKAESKNTKQTTLKRIWKAAEASMLQGCDEKIAEIQELGVRGSYAEIMEITERISELERRMQELYDQLREQDRRLPAARKGVISKRLLSRLVAEIGPPEDFQSIRQLTRYAGLNLCERQSGKWRGQTMISRRGRSELRYVLNLMALPLIRRSQLFGDYYWKKKEQDRMPGKKAITCVMRKILKMFFGLYRSEGEFQESRVFVMNSQYHAAA

SEQ ID NO: 391006 - protein, 312 aa, unidentified
MGGYIGIDVSKRTLDLATRPGSEHWQVAYDDAGLVATVQRLQQLSPTLIVMEATGRLEIRVAAALSAAGLPVAVVNPRQVRDFAKATNRLAKTDKIDAHVLAHFAEAVRVVPRAMPSEEARKLEQLLTRRRQIVEMIVAERNRLASCTEPGVCREIDEHIKFLKMQLGGIDKGLEDGIRNSPAWREREDLLRGVPGVGRVLSTTLLLELPELGQLNRKQVAALVGVAPLNADSGTLRGKRRCWGGRPTVRAALYMGTLSATRHNPTIRTFYERLLAAGKPKKTALVACMHKLLLILNAMLKRGRSWLQLNPA

SEQ ID NO: 391007 - protein, 404 aa, unidentified
MNKLTSSRELINFCVKVNYLLSDKIPCCFSLSVHIAIKVFIPIIKDLDDGAKWLVHLLKRINESMKKEVKFYLGMDVSKLWIDIVVMCVVDHKKQPTVSGHFENNAVGMKALDKWLRKNNVSFDENSLLVIENTGVYHRIVWEYCSSQRLPLYIGNATHIKYSFGLARGKNDKIDSERLCAYAFKNADEIKANPVLDPVFLKLKDMMTSRSRLLEQKNSIKVYLGELKLSNSKESQLIIEKAHKSALEGIEVSIDEVEKQIKQIIKENAAIEKNYELLITVPGIGHLTAVYIICCTNNFICKITGKQLASYAGVAPFGNKSGTSIKGRDKVHKMANKELKKLFHMGAISAITHYPEFKDYYDRKVKEGKHKLSAINAVRSKIALRAVAVVNNQEAYVNKYKKAA

SEQ ID NO: 391008 - protein, 357 aa, unidentified
MRIIGCDLHTRQETMAMLDTETGEVVEKTLQHEGEKVREFYSALPRPVQVGIEATGSMLWFLNLMEELGIDSQVGHPAKIRAAEPRKQKHDRRDADLLLKLLMENRFPSIWMPSKELRDLRALLWHRHQWVRTRTRVQNALQAMALTNGLRRGKSLWSQEGQHAIASLPLGPHAAHRRTALQALYRELDADINALDKRVLEQALERPEARRLMTHPGVGPVTALATDVFLGDPVRFENAKALASYVGMIPSEYSSAGRQRLGGLSKQGNPLLRFLWCEAAVHAVRRDPLLQRFYRRKLVQKGMGKARVAVARKLGIRLYIMLRDQIDYEEFCRRGQMRQKSGAARAGIPEVGYGPSL

SEQ ID NO: 391009 - protein, 370 aa, unidentified
MKKKILYIGLDVHKKSIDVAITDEHANGTVRSYGKISGTFAALDKLVQKLKSTGSDLHFVYEAGPCGYPIFRHLTSTGHSCSVVAPSLIPKRSGNRIKTDRRDAINLVGLFRAGELTSIYVPTVEDEAMRDLLRCRDDIKRIERKTRQRLLAFLLRHGLHYPGKKNWTKGHMNWLADLKLAHRAQQIVLQEYIDAANECTRRIQRITEQIQALVPQWSRAPFVRAYQALRGVSLIVATTVVSEIGDMNRFKNPKELMAYLGLVPSEHSSGNRIRRGSITKTGNGHVRRVLIEAAWTYNMRARKTKIILKRQQGLDDRICEISWKAQLRLCTKYRRLFARGKSKQAIITAIARELTAFIWAIDKQVQQLTA

SEQ ID NO: 391010 - protein, 297 aa, unidentified
MNNVSLIGIDLGKNSFHVHCQDATGKALSRKKFTRAKLFEFLANCPSATVVMEACAGAHYIARKISDMGHKPKLISPQFVRPFVKSNKNDFVDAEAICEAASRPSMRFVAPRTESQQEILALHRVRESLVRDKVKTTNQMHAFLLEFGISMPKGLAVIRRLSVVLTENELPPYLAKLLVKLQSHYLYLVEQIRDIENELKLAVNHDDTTQRLMSIPSVGPITASVLMANLGNGQQYKQSRDFAAATGLVPRQYSTGGRPTLLGISKRGNKNLRRLLVQCARVYILHLEHQSGYLGLC

SEQ ID NO: 391011 - protein, 361 aa, unidentified
MPQPNDLSRSLIALEQDATLIAVIEMGQSSWLVAGVVPGVERQPLKKLAVDQAGLLQLLHRWRNEAVRAGCSIKRIAVAYEAGRDGFWLARWLRAHGIEAYVIHASSVPVSREHRRAKTDRLDTELLKRAFLGWLRGEPNHCSMAAIPTLEDEDAKRPSRERESLVRECTRIVNRVKGNLARLGIRGFKVSLAHAAERLGALRTPEGATVPPNTLAELRRDMAHLRFVKQQIKEIEAARAERLEQGSAQGRNGMVRLLARVVGVGIESADMLVQEVFSRELRDRRAVARYAGLTGAPDESGKKRRERGLAKAGNARVRRGMIQLAWGHLLHQKDSVLAEWYRRRTADARGGTRKLGNLMVL

SEQ ID NO: 391012 - protein, 378 aa, unidentified
MRDHSEAFVAFDTSKLRNAVAIADGDRGNEVRFLGEIDNTGAAVAKLVNKLTAKYRRVTFCYEAGPTGYGLYRQITSLGHECSVVAPTLIPKRPGDRVKTNRRDAVSLAKLLRAGELTAVWVPDRRHEAMRDLTRARETAMLDLRAKRQQISSFLLRQGLCYPDGKRNWTKTHMNWLASLKFELAEHRIVFEEMMEAMRQAHGRLERLAEAIHAAVPDWSLCAVVTALMAMRGLDMISAATFLAEVGDLSRFRSPCELMAYLGLVPSEDSTGDKVKRGPITKTGNRRARRMLVECSWSYQHSPRVGKDKQAKVDAVPQAVRDIAWKAQCRLNRRYRALVRRGKLKTVAITAVAREFAGFIWAVARAARAPTTAIAGAR

SEQ ID NO: 391013 - protein, 365 aa, unidentified
MWRPQLFAQRTSVGLDVHARSVVGCAIDEATGEVVHKRFGYELAQVIDWVKSLPGPQSVTYEAGPTGFGLARLLEASGIACVVAAPSKLQRPSGDRVKTDARDAEHLARLLRLGEITGVRVPSVEQEAARDLVRAREDTRGELMSARQRLSKLLLRNGIVYDGANTWSLAHDAWLRRHRFELPGTAAAFEAAYEAVKQAEARKDRLEARIEEAVNGSEYTATVRRLACLRGISNLTGYALAVEIGDWHRFTGRTIGAYLGLVPSEYSSGASRTLGPITKTGNSHARRLLVEAAWHHKKLYRPGAVMQARWDAAPPLAVVRGQDGNHRLHRKWQQYVARKKRPVVANIAIARELTGWCWSLAVMND

SEQ ID NO: 391014 - protein, 389 aa, unidentified
MKIYVGIDIAKLNHFAAAVSSDGEILIEPFKFTNDYDGFYLLLSKLAPLDQNSIIIGLESTAHYGDNLVRFLISKDFKVCVLNPIQTSFMRKNNVRKTKTDKVDTFVIAKTLMMQDSLRFLTLEDLDYLELKELGRFRQKLVKQRTRLKIQLTSYVDQVFPELQYFFKSGLHQHSVYALLKEAPTPNAIASMHMTHLAHILEVASHGHFGKDKARDLRVLAQKSVGVNDSSLSIQITHTIEQIELLDSQLFHTELEMANLVTCLHSVIMTIPGIGFVNGGLILGEIGDIHRFSEPKKLLAFAGLDPSVHQSGNFQAKKTRMSKRGSRVLRYALMNAAHNVVKNNTTFKDYYDSKKAEGRSHYNALGHCAGKLVRVIWKMLTDEVEFNLE

SEQ ID NO: 391015 - protein, 447 aa, unidentified
MKALPVLDPKAAAMDVGSETLHVSIAGDRPEVFGTFTGQLERLRDWFQQQGVRSVALEATGVYWLYIYEVLESAGLEVVVVNGRHVQNVPGRKTDMADCQWLATLHAHGLLRGGFVPPAHIRQLQDYQRLRGDHLIGAASQVQKMQQALERMNIKFHDVISDLVGVSGLKVVRAILKGERRPGELLALCDVQIQKKKSDRVKESLRGCWKKEQLFALRQGLELWETYQQKIADCDRELEALLREMTSPQPPEGGSGNVVAVGPVVLAPAKPPGKNAPMIERMQELVARLCGGGDATQVPGLSVYLVLQLISEVGTEMARWPSEKHFTSWLGLAGGRKQSGKRKGRVKAHRNRAGRIFCAAARALAQSVDKALGGFYRRLRGRLGGLAANVALARKLALLFYRLLRYGMAYVEKGLKNYEAKVLETETRLLRKLARKQGFALIPATAS

SEQ ID NO: 391016 - protein, 342 aa, unidentified
MKITTVGLDLAKSVFHAVCFDEHSKEVKKRVLRRNQVRMFFAQLPPCKVGMEACASSHYWGRELKALGHDVKLIPAQHVKPYLLGNKNDFNDARAIAEALTRPHIRGVALKTTEQQDIQAIHRLRSQCLRDRTAICNSVRGLLAEYGVVLGKGITILRKSIHGLLEDAENGLSLTFRHLLAKSYERLVELDGYIDFYTQELVIQSRQDDACQRLQEIPGFGPITASAFYSAVGNGQSYSCGRDVSASIGVVPRQHSTGGKNVLLGISKRGDVYLRSLLIHGARAVVIHASKKKDRLSQWINRIAAERGINKAAVALANKMARIGWAILRHNAHYQAALKATS

SEQ ID NO: 391017 - protein, 409 aa, unidentified
MEILYPRCAGLDVHKETVAACVLTPGPGAEPNREIEEFGTTTAELRRLLAWLRERGVTHAAMESTGVYWKPVFNILESGCQLILVNARHIKQVPGRKTDKADCAWIASLLRHGLLEASFVPELEVRQLRDLCRMRTTLVREAVQVGNRLRKVLEDANIKLDSVASDALGVSGRDMIRALIEGRDDPAALAELARGRLRAKLPELERALEGQVTRHHRFLLRELMRQLAFLEGEVERFQEEIKRHMRPFEWAVERLITMPGVDRTAACALIAEIGADMTHFPSARHLASWAGLCPGNNESAGKRRSGKSHRGNRWVKGVMTEIAWAATRTKASYPASQYRKLAGHRGKKRALVAVANSLLQAAWYMLTHLQDYRDLGDTYLDQLRQKDLERTLVRRLEKLGHKVTLEPAA

SEQ ID NO: 391018 - protein, 359 aa, unidentified
MTETMTVAGLDVHARSTHAAAIDVRSGELRRARFGAGTDEVVAWLLGLPAPVRACYEAGPTGFALYRAGEAAGVPVEVVAPSKTPRPSGDRIKTDRKDAELLARLLLAGQLAAVAVPSPAYEGARHLARAREQVRGDLMRGRHRVSKLLLLDGRVYLDGRAWTKRHRRWLERQRFEQSPAELAYADALAAVDGLVARKSVLDERLSRLACEGEWWPTVARLRCFRGIDTLTAFVLTLEIGAFARFARPQQLASWLGLVPSLSQSGESRAQGAITKTGSAYARRLLVEAAWQYLPRPDVGPALAERRAGQPAEVIQIALRAQRRLHRLYRSLQARGKPRNVVTVAVARELACFLWAAATV

SEQ ID NO: 391019 - protein, 334 aa, unidentified
MENIALIGIDLGKNSFHIHCQDRRGKAVYRKKFTRPKLIEFLATCPATTIAMEACGGSHFMARKLEELGHSPKLISPQFVRPFVKSNKNDFVDAEAICEAASRPSMRFVQPRTESQQAMRALHRVRESLVQDKVKKTNQMHAFLLEFGISVPRGAAVISRLSTILEDNSLPLYLSQLLLKLQQHYHYLVEQIKDLESQLKRKLDEDEVGQRLLSIPCVGTLTASTISTEIGDGKQYASSRDFAAATGLVPRQYSTGGRTTLLGISKRGNKKIRTLLVQCARVFIQKLEHQSGKLADWVRDLLCRKSNFVVTCALANKLARIAWALTARQQTYVA

SEQ ID NO: 391020 - protein, 374 aa, unidentified
MADYSEVFVGIDTSKLRNAVAIAEGGRNGEVRYLGEIDNTEAATSKLVKKLAAQHRRLTFCYEAGPTGYGLHRLIKTLGHECVVVAPSLIPKKPGDRVKTNRRDALNLAKLLRAGELTAVWVPDARHEAMRDLVRAREAAVDDLKSKRQQILSLLLRLGRHFTGKRTWTRAHMNWLVSQKLAHREQRIAFEEMLLAVRQADERVIRLERAIAAAVPDWSLAAVVTALMAVRGLDLISATIFLAEIGDLSRFASPRQLMAYLGLVPGEESTGDRVWRGGITKAGNHRARRILVECSWSYRHPPRVGKKKLARVEAAPPAVQEIAWKAQARLTARYRALARRGKRPTLVVTAIARELSGFIWAVSRAVGAPATPAM

SEQ ID NO: 391021 - protein, 428 aa, unidentified
MSENSTTHPEPEFVGFVGIDWADQKHAWCSQRTGATQREHGEVEHTPEMVEVWVSQLAQRFGPGPIAVAVEQVKGALVFMLSKYECIHLFPVPSTMSASMRKSLYPSGSKDDPRDAELLLDLLLQHRKKLRRLTPDNEVTRRIQNLVEERRTLVDEKTTQLNRLTGYLKVYFPQMLEWFEKLDTKLVCDLLERWPSLEELQKVPPAELRKFFRQRRGRHQELTEWRLEGIGQAMPAIRDRAVLEAKRAMVQVSAQLLRTLLEGIANLDSKIEEAASAHPDFFIFKSLPGAGSALAPRLLAALGSQRDRYGSAEEVQKHSGIAPVMEKSGKKKWVHFRWACPKFLRQSFHEWAGHSISQSTWARAYYQQQRGRGKDHHAAVRALAFKWIRILFRCWQDRVAYDENKYLAALARRGSQLTSVLTVTATTL

SEQ ID NO: 391022 - protein, 392 aa, unidentified
MAGRVAFLREQDAPEQRIDSSSGARQTDRIEVFETVGQHGSPGSDSLKARTVARATSPHHARQGHRGTGRPGRKGTRMSGDVFVGIDVAKETVEVAVRPSGERWEEGNDEKGRKTLVQRLRDLSPALVVMEATGGYEAELALALTGASISVRVLNPRQVRDFAKGKGLLAKTDGLDAAILAEYAETYRPEPRALPEEEAREMAALLSRRRQLVEMRVAEGNRLEQARGEVRKRILAHVAWLESEIERTESNLDQRIRKSPLYLGKHEMLTSVPGVGNQTALSLILNVPELGALDRKEIAALVGVAPFNRDSGKYRGKRSIWGGRAQVRAVLYMAAVVASRRNAVIRTFYEKLLAAGKPKKLALTACMRKLLTILNAMTRTRSLWAPALAAAK

SEQ ID NO: 391023 - protein, 343 aa, unidentified
MDHFAGLDVSVKETSVCIVDATGKIVREVRVASEPEALLAVLASPAYHFKRIGLEAGPLSQWLFSALAEENLPVICVETRHMRAVLKAQVNKTDRNDARGIAQMMRVGLYRPVHVKTLRSQKLRMLLTHRKLLQSKAIAVDNDLRGTLRNFGLKVGMVGAARFEARIKELIENFPDLAVLVEPLLVVRRVLREQLGILHGRLLAVVRDDDVCRRLMTVPGVGPVVALTYRATIDVPARFRKSKSVGAVFGLTSAKYQSGEIDRSGAISRCGDELMRTMLYEAAQSMLFRSTRWSWLKAWAMQIARHRGMKKAIVALARRLAVIMHRIWVDGSEFRWTREAVAA

SEQ ID NO: 391024 - protein, 374 aa, unidentified
MRSVALDLGGKITFCEVASGEVVGRKTVKAFDHLEDVLGPRTPKARVAIEACREVWHIADRLEAWGHDVLIVDTTRVRQLGVGHHGRKTDRNDAEVLARAVEQGRIPLAHRLSPHRQALRMYLGVRRGLVETRAGYVTMVRSVARSHGVKIPGCETEDFVGVVKATALGEEVRSIVEPLLTMLAVLEPQLRATDAKLARLCQEEPAVLRLGTTPGVSVVIAAQYVSVIDDPTRFRNAHQVESYLGLVPSEHTSVHRKLGSITKQGNSYLRALLVQGAWCILRSKAKDPLVLWAKAVQQRRGKRIAAVAVARRLTGILWAVWRKGTVYDAEYLARVGQRGIEEQQQSLEQQKAALARAERKARHSLSWKGELATT

SEQ ID NO: 391025 - protein, 425 aa, unidentified
MLEDVEDTEQVIERIAALDIGKAELTCCVRVPSTKTPGRRMQEVAAWSTMTGSLLALSDRLQELGATRVVMEATSDYWKPPYYILEAAGFEVWLVNARDVKHLPGRPKSDTIDSVWLCKVAERQMIRPSFVPPVHVRALRDLTRYRVDLVAARTAEKNRAEKFLEDACIKVSSVVSDLFGASGRDMMRALIAGERDPRVLARLARGRMRGKIGTLQEAFSGYFTEHHAFLLAKMLARVEAIEADIADIDAKIDTEMAAIAPFADAADRLAEIPGLGRVSAHALLAEIGLDMTRFPTAGHLCSWLKFTPIITESAGKKKGKNATGHGNRYTARILGEAAVATGRTDTFLGERYRRIARRRGKKKAIVAVGRSILVIIWHLLSDPDQRFHDLGTDFYDRRIQPDRKKRNHIRQLEALGYRVTLEPAA

SEQ ID NO: 391026 - protein, 410 aa, unidentified
MSRVIVGVDPHKKSVTIEAVNEQGKKVATGRFGTDSTGYRLMLRYVRDQWPQRRWAVEGANGVGRPLAQRLLAQGETVLDVPAKLAARVRVFDTGNARKTDATDAHAVAMVALRTPRLNQLTFDEELIALRLLTDRRDELSHLRVQTVNRLHRLLAQLIPGGAKRDLSALQAKRLIASVRPRTLVGKTMRRMAVEEIGDLVAVDAKLKAIKKELRAAVRARGSHLMDLYGIGPAGAARILSDVGDVARFPDRNHFASWTGTAPLDASSGDQIRHRLSRAGNRRLNHVLHIAAIVQIRHDTEGRAYYPRKLTESKTPMEALRCLKRRLSDAVYRQLLADAVPTAAAVIEREAGPGGHSGATPQSSAADLSTPVVGSSDKPQPGPAHPTLPAQQPRSNPHVASAASPSRRRA

SEQ ID NO: 391027 - protein, 317 aa, unidentified
MEEVSFRQVVSRGCGIDVHQKIVVATISGEGLRTQTREFSSITSSLTEMKEWLLDNEVTHVAMESTGVYWKPVYNILEPSGIKVWIVNARHIKYVPGHKTDKQDSAWICKLLLAGLLKPSYVPPKAQRNLRDLTRYRNKLVQNVASEKNRIIRILEDCNIKLSSVMSSTSGVTATKLIDKLCDGKVVTREDIDEVYHGKLQCSKDDLYEASQGFITDHHIFLLQTIKRDIESTESLISELGSKIKESLSEYDNSIEALRGIPGLNTKTVEDLIAEIGLDMSVFPTEKHLASWAGMSPGNNESAGKKKAEEPPTGTNR

SEQ ID NO: 391028 - protein, 473 aa, unidentified
MIKSVGIDLAGNSEHKVRCLDEQGQLCDGFSFDSTPAGLSKFEERVFKNGSNPIIVFEPTGLAWLIVAVYIRGQHPDCRLVRTQGRNVVALRKYLHRSSKSDTLDALTLAKMPFVDQERLNDVYIPPAKVSAILRLARQRQRLESDVAGRKKRILSIVNGYIPDIRQAFSNIWSPQGREFLRTHLNPLSAARSGEKAFDRFLTRARFRKKEDGEESHIVYLTCKMAATIYEKSRSTGAIDDDFFATLQDEIARELRLMEAEEAESDAIAQRIDELYRELHPSDNLRTIPGVGDQTAPIFLAIVGDPARFHSQSAFANYNGVVPDSRQSANTEAKGLRMTKAGPAIMKLALYQSSQIGRRFDPQLAWVYYHEIMNNGKNHKQAMGAVMSHIGARILAVLRENKPYELRDLQGKLITWENARRLILANYQIPEEIKQERRRCKSDGLPDKVRNRRREMKAHRAHEATTDPQPVVA

SEQ ID NO: 391029 - protein, 407 aa, unidentified
MNTEVLYLGLDVHAENIAVAIAEAGRDGEVRNHGMISSDLHAVEKLVRRLGHPGKELRVCYEAGPCGFVLARRLKQLGIACAVVAPSLTPKGSGDKIKTDRRDARMLARLHRAGELTAVHVPDERDEAIRDLCRARTDAIQDRRSGRNQLKAFLLRHGYRYSETTAWSQAHMRYLRELVLPHAAMKIVLEEYLQGIEAAGERIERLEIHMQALLEEWHLAPVVKALMGFRGYQTVAAMITVSEIGDIHRFAHPRQLMAYLGLVPGESSSGGSRCQGGITKCGNGHLRWIFNECAQHYRLPPKVSTQLSKRQEDIPKAHRREVKEISWRCQNRLHERGRKLAARGKTRQKVQIALARELSAFVWEVMRAVMPLANGSHAGSTARRKRVKVQAQPAGRKKVRHYVLKAQ

SEQ ID NO: 391030 - protein, 458 aa, unidentified
MYRELQPLRAALQQELEGHLPPAVAGIEPDKLLQTYLHQLTLYVGVDVADQTFTALAIDASGETMADLPDCPNCPAGFERLVTWARAQRNQHRLRLIAVAAETTGIYYWALWDYLGQQADLARVLFNPRTTEHMGEVLGKRVRTELVDALLLAEQLRLGSTPEVRLAEDADLLAARYYSRAARDLAQQINRRKNQLRALVRAYCPPLSQIFSGNKLHHPAVYALLQHYVFPAELVQAGEDQIAAILVAHCRTAFGPTEAHQLVQAARTAPARPSNPTAIRHLIQHHISDITIYQQRQKRYLQQGYQLIEGRPETPLLRGVVGAGVSNTLALVSEVGEVQRFPSGRHLASFLGLTTSKHISGATLYQTKHITKQGSPNARYAAINIAGYLSRRVPRYQAMYQRIKGRRPPRKGHYVALVAIARDFVANVLYDMWRDQRPFFLEVEDYRRYRQQHPRSQD

SEQ ID NO: 391031 - protein, 456 aa, unidentified
MEKSKKKRGRSRRALTSINPDAAGIDVGATFHVVAIPPGRADESVRSFRSFTGDLYALADWLKSVGVKSVAMESTGVYWIPTFEILEERGLEVLLVNARDSKNVPGRKTDVNDAQWLQQLHEHGLLRGSFRPRDQVVHLRALLRHRERVVEYAAAHIQHMQKALMQMNVQLHHVVTDITGVTGMKIIREIVKGVRDPKVLAQHRDVRCKETVETIEQALTGNYRPEHVFAMRQALELYEFHHVKVAECDVEIEAVLRTLNEDRPQPEKTIPALRHAGGRNEPRFDVRAALYRLLGADLTQIHGIGAYTVLRLIAECGDDMRKWPTAKHFTSWLTLAPGNKISGGRVLSSKTRRSSNRAAVLLRIAAVNIGRTQTALGAFYRRLAARVGKAKAVTATARKLAVLFYNALRHGLTYVDPGVSYYEERYRQRVVHNLQRRAKQLGYALVASEVASNGVS

SEQ ID NO: 391032 - protein, 344 aa, unidentified
MKIVGCDFHPSFQQVAILDVCSGEVRELKLMHADGEAERFYRGLESPVLIGMESMGNSLWFEQLMEQLGHELQIGDAARIRASYVRRQKTDKRDAGHILTLLLEKRFPRIWVPSRLERDQRQLLLHRHRLVQMRTRVKTELQHLALNQGLQKQRGLWSVRGRADLEKLPLQGWTAHRRADLLQVLDMLQDQVAKLDEAVGKVAFSNEQARLLMTQPGVGPITALAFVVTMGDVARFKRGKQVASYLGLIPSERSSGKRRRLGAISKQGNVFLRTMLVEAAQSAVRHDEQFKKEYAHRCHQKPKGVAKVAAARKLAVRLYWMLRTQTPYAHAVHNGGSPSHPVVG

SEQ ID NO: 391033 - protein, 398 aa, unidentified
MKTSGLDVHKDSIFCAIYDGKSYTVVKEFSTTTHSIRLLGSYLQSEKVEKVAMESTSTYWVPVWDILYEMGFELKLVNPLHIKQMPGRKSDAKDAQWIAELLHKNMLRGSLVPSPLIQELRSYTREYRTLVNQRTKVLTQMDRILVMCGIRLSSCISNIDSKSFMLIVEALIRGETSPDTLVKLVYGNRKNKESGKLKECLTGNMKAHHHLKLTTCKQQFDLLESQIQLYLNEMQRLCSEHFSEELSNLTTLPGVSQISAMIIIAETGGDMSVFENSGKFTGWTGLRPRNDESAGKFKSTATTKGNKHLRAIIVQVAWAASRTKGSFFMDKFMKLALRKSRKKALVAIGRKMLVIIWHILSEKTQYNPNLVHIYDPVKVEHKIKYHEREIERAKKLIA

SEQ ID NO: 391034 - protein, 362 aa, unidentified
MNTLARETSAAQIEVAGGVDTHQDTHTAAVVDQAGRLLGHRTFPTTEAGYGELLAWLGGFGRLRVVGVEGTGAYGAGLARYLMAQGQAIVEVDRPDRKARRAAGKSDPIDAESAARAALNRVRTGLPKQRDGMVEALRNLRVARRSAVSQRADCMRRIKTLIITAPKELRERLRDLSDTQLLRLCAGFRPNLCLVGEPEQAAKVALRALGHRHAALSEEIAELEALIDPLVEQINPALLALNGVGPDSAGQLLITAGQNTERLHSEAAFAMLCGVAPIPASSGKTNRHRLNRGGDRQANAALYRVVLSRMRWDPRTREYVARRTTEGLSKKEIIRCLKRLIAREIYYVLRQPAATLVSAHPR

SEQ ID NO: 391035 - protein, 428 aa, unidentified
MSESIAAAALQAVAAYIGIDWADQKHDVVLRSASQPNKVEHRIIEHKLEALMEWVGQLQQRFGGQGKILVCLEQSRGALIYHLMGYEFFELYPVNPLQLARYRETFSPGGAKDDRADAELLCELLYCHRDRLRAWKADSELTRKLVFFTEGRREAVDQRARLSQAIKSQLKVYFPLALELLNNDTTTALAADLLLRWSSLEALQKQSAHTLRKFFYGHNCRGEAKMLERLQLVQEAQPLTQDAAVIEPAALRVQMLARQLKHLLPDIARYDKKIAELFAVHPDRFLFENLPGAGLALAPRLAVAFGSDPNRWESAQEIATLLGIAPTRRASGKKTGKKASVHFRQACPKFHRQSFHEFAGCSIRYCPWADAHYQTQRARGKGHHTAVRSVAFKWIRICFACWKQRIPYDPQRYLQALQRRGSPLADAC

SEQ ID NO: 391036 - protein, 439 aa, unidentified
MTIPRIRFVGLDVHKRVVEACIVDHAGKVVLRHRFALNRRNLELVAHKLLQPSDHVALEATTNCWAVADTLRPHVARVLVSNPMATKAIAQAKVKTDKVDAHVLAQLLRCDFLPEVWAPDEATRRLRELTGRRSALVGQRTMMRNRIHSVLAMRLIEAPTRLFNAAGLEWLAAVELDDQGRMLVDSDLRQLGFLQKEIDLLDGELARRGHARESVKLLMTLPGVDVATAEAMIAAWGDAKRFPDGDHAASYLGLVPSTKQSANQCYHGPITKRGNSHARWMLIEAAQHLDKHPGPLGHFFRRLAKKKNHNVAVVAGARKLAMIGWQMLVKNEPYRYAIPRSTEAKLSRLRVKATGVRRKCGPPKGTKCTAKLPGGSRSIRALHEVCRAEGLPSLQPLSPGERRTVKAAGCDAFVAQIATARLVPRPPKRPKLQEVAAHE

SEQ ID NO: 391037 - protein, 343 aa, unidentified
MQTITTVGVDIAKSVFQVHGVDADGNIVIRRQVKRRYVLAFFQKLPPCLVGIEACASSHYWSRELQALGHTVRLMPPAYVKPYVKRHKNDSTDAEAICEAVTRPNMRFVATKTPEQQSCLTLHRTRHLFIRQQTSVINAIRAHLAEFGIVAPIGRHGVEQLLGVVSDAGDTRLPEVARACLAALGAQLRTLKAQILQFDRMITAWHRSSEASRRLDDIPGVGPVLATALVASVADPKAFRSGRGFSAWIGLVPKQNSSGGKDRLGNISKRGDRYLRSLFTTGALAVIRYAKIHGTRHRPWLTALLARRPTKVTAIALANKIARMAWAMMAKGERYKEPVALAA

SEQ ID NO: 391038 - protein, 343 aa, unidentified
MQSISTIGLDIAKSVFQVHGVDAAGQAMLRRQLRRRHVLAFFQKLPPCLVGIEACASSHHWSRELQALGHTVRLMPPAYVKPYVKRQKNDTTDAEAICEAVTRPNMRFVSTKTVEQQSCLMLHRVRHLFIRQQTAVINSIRAHLAEFGIVAPVGRRGVEQLLEVVADTADRRLPEVARACLAALGSQLRALKAQILEFDRRIMVWHRSNATSMRLDAIPGVGPALATALVASIAEPGAFRSGRDFSAWVGLVPKQNSSGGKDKLGSISKQGDRYLRSLFTAGALAVIRYAKIHGTKHRPWLTALLARRHTKVAAIALANKLARMAWAMMATGERYNYPASLKV

SEQ ID NO: 391039 - protein, 322 aa, unidentified
METAATIGLDLGKSVFQVHGVDAGGAVVFQRRLTRGKVLAFFAKQTPCLVGMEACAAAHHWGRELSKLGHRVRLMPPRYVKPYVKRQKNDAADAEAICEAVTRPSMRFVEIKTCEQQGTLVLHRVRLMLMRQRVQLSNAIRGHMAEYGLVAPVGRNGLQRLIAILGNPNDERVPAVARASLAPLVCQFGLVNDQVLENDRRVRASARSTEIGCRLMEVPGVGPVLASAMVATVPDPTAFKSGRDLAAWIGLVPRQNSSGGKESWVASPNRATGICGSCWWRGPWLSSVTLTGMEPSGPGWCICSPGARQRSRRLRWPTRWPG

SEQ ID NO: 391040 - protein, 444 aa, unidentified
MLKSSRETKYEIENLGDVIHPVCCGLDIHKTWIYAAILIYNFEKKQIHWITTRVTSFKKKLDKLAKWLIVNGCKYICMESTGQYWIPVFDALEDAGLKPIVAHPKYLKVLSGKKSDPNDARWIAKAFACGRVVASFIPPKVIRNLRSLVRFMIKISHEATSNKNRARNCLTSLGLKLDDVFSDVFGKSSRSIINYIIAHPGEKFDVAPFVDKACKTPIAMIQDSIDKAIDAKQDAGTLLKLRKALERLDDAEKDIQELKGNITQQMGAYKKQLDLIRTVPGFDTDPFTAMRVLIEIGPDMKVFPTMKHFCSWAGVCPHHDSSAYKVKGRRISRSGTYLKPLLVNIAKAVVRSKNHPEISQRFNRIKNRRGYMKAIIAVCRMFLTAIWNILSKGEPYRADGFMPVNNGNNKAISISQALAYVRSRGYAIIDDNSGALTTTGSQGT

SEQ ID NO: 391041 - protein, 353 aa, unidentified
MKSDKYIGMDVHQETTVVAVVDCDGKVILETIVATEGSAIVRLLNGLSGPLHVTLEETTQAAWLYEVLRACAGDVIVCDPRRNGLLTEGSKGDKPDARKLAELRRAGLVRAVYHGHDGTRKLKELVRGYETLSIDTERTMVRIKAVFRGRGIRTPGTAVYQAKQREQWLGLLTEEGVRQRTTWLYDQLDHLRALRKEAKRTMLAESQQHRATALLKTIPQLGPIRSALIVATVDTPHRFRTKRQLWSYSGLGIVTHTSAEYEIQAERVVRRRKAVSTRGLNRNFNRRLKNVFVAAAIGGSHCEPYRKYLEGLTQKGMRAEMARLTLARKIAAVALSIWKKGETFDPKKLNWTT

SEQ ID NO: 391042 - protein, 390 aa, unidentified
MEARVVNNLSPAAAHDGAVRCLLAIELSKKSWVAAVNTPLSDKISLYKLKPCDWKELLQLIERIRKRVSEELKKPVEVISCYEAGYDGFWLHRLLEAQGVRNHVIDPASLQVDRRARRAKTDGIDVGKLLRSLMAYLRGEPRVWSVVRVPTIIEEDDRRLHRERSRLINERIQHVNRIKGLLAIHGIYDYEPMHPERIQRLERLRTADRHSLPLRLKAEILRELQRLELVLGMIQTIETERDAIVSAKSKSQQTSAKKIKHLVKLKSIGPEFATVLVGEVFYRTFDNRKQVGSYVGLTPSPFQSGSTSRDQGISRAGNAKARTTMIELAWLWLRNQPDSPLSVWFRERVGNRKGRIKRIAIVAMARKLLIALWRYLETGVVPEGAVLKSK

SEQ ID NO: 391043 - protein, 356 aa, unidentified
MCPDPCRSPQSGEHILHLLGYPEQSLEHDIRRSSFKQGRESMKTQTVYLGIDVSKRKLHLASTDRFLGEFDNNIAGCTRLLKCIIALKPDGIVLEATGGYERLAFEEIQACALSVTIAQPSSVKYFAKSLKVLAKTDKIDAQVIARFGEATKPMPSPKIPENVRKFRALCDRRTQITEDRVREENRLEGCADSDMRKHIQVNTRHLQAIEDALVEKIARFVNNDADFQRKIKIMTQMKGVGVKTASILLAHFPELGTLTRQQVAALAGVAPYPRESGMWKGKRRIYGGRGAVRKAMYMAARTAARWCPVISEFYNRLKKNGKPFKVNIIACARKMLVHLNTLLKEENMKLSHPNEA

SEQ ID NO: 391044 - protein, 348 aa, unidentified
MRGAVHMQITTIGLDIAKNVFQVHGIDSNEKVVVRKQLRRSQVLAFFKTLPPCLVGMEACATAHYWARELTKLGHRVRLMPAKDVKAYVKRNKNDAADAEAICEAVRRPTMRFVQVKSAAQQSQLMLHRTRDLLMRQRTQVINALRAHMAELGIVAAQGRDGIKELLKIIASEQDARLPVDAHTSLVVLATGLQALQTMIRSIEKRIVVQHRSNEASKRLATIPGIGVIGATAIAATVPDPKVFRSGRDLAAWIGLVPREGSTGGKQKLGPISKQGDQYLRRILVVGAHAVLKRARQQPEKYPWLTGLLARKPFRVVAVALANKMARIAWALLAKGGTYRAPALTAAA

SEQ ID NO: 391045 - protein, 331 aa, unidentified
MKSKELIGIDVSKNVLDVFILAVSYHFTVENNPVGFAKLLETCCFKLSCNKAHLFFCFEHTGRYSWLLSIFLSESSIVFAKVPAMDIKQSRGLTRGKSDKKDAKMIAQYANRKRDELMPTKLHAPEVGQLRQLLSLRNKLLRHRTAYKNSIKDLQDCFIEGETEFIRTTQERLIQHLNVELDNVEGKIDTIINSMPDWERNFRLMQSVKGIGPVVSRYIIIYTENFTRFTDPKKFACYCGIAPFEYSSGSSIKGRTRLHPCANKQLKSLLNIAAMGAVRLKGEYKTYYDRRTEEGKNKMSTLNIIRNKLLFRIFAVVKRQTPYVDLTMFAA

SEQ ID NO: 391046 - protein, 336 aa, unidentified
MEYKFFIGIDISKKTIDVAIKAKNMKDFIHKQFENNKSGFMKMLRWIKQETKADEKEMFFCMEHTGIYTLPISCFLSGKDLAYRLENPYHLKHSMGIQRGKNDKADSRMIARYAYMHHEELKLTEFSSAEIIRLQNLLAHRERLIKTRTQYKVAPKELTEFSGKGLYAFISESSHEIVQLINKKILLAEQEIETLIAGHEGLKKNFELARSVKGIGLVIASYMLVYTQNFTSITEGRCFASYSGVAPFGERSGTSINKSPHVSHLANKRMKSLLNNGAWVAVKYDKELKTYYNRKIKEGKHELVVINAVRNKLIGRVFATVKRGTPYVELHQYCKN

SEQ ID NO: 391047 - protein, 344 aa, unidentified
MVEVSTIGLDIAKAVFQVHGVDGAGAVVIRKRISRSKMLEFFAELPPCLIGIEACPSAHHWGRELQQLGHTVKLMPPSYVKAYLKRSKNDANDAAAICEAVTRPSMRFVPIKTKEQQTALMLHRTRQLLVRQRTMLSNALRGHLAELGIVSAKGRIGMGELLRIIADGADNRVPPAVRSILDVLARQYSAIGSEIGSIDKSILALHRSCEASRRLAEIPGIGPIVATALVAEIGDWKTFSSGRSLAAWIGLVPKQHTTGGKDRLGSITKQGNRYLRWLLVVGAMAVIRYARKHGTQKRPWLARLMERRPTKVAAVALANKIARMAWAIMVRGERYKEPKLLMAA

SEQ ID NO: 391048 - protein, 403 aa, unidentified
MQHVIAFDVSMGKSYMVIYNAQKQCIFESEINHSKPDFEELRKRIDQLMNENKKSPHIVFEATGVYSRQLERFMQDNKFEYFLLNPLEAKLQCDSLRIHKTDRSDAHQLALTHFTASRREKTGTDNLFYQLKSLSRFYSELDDELSLIRSRMHKVIQLTFPELEQIFTTKSDLFLNFVQLFPHPDFVQNLSKTVMKNQIRKNTNKNISISIAEKKAMEVLEAARYSYPAVRQDDVLCEQLKSYAKRYQELLYQKEQCITKMVRLAESRTEYPIILSFPGIGPNTAIRLLAEIGDITRFENNKQLNAFAGIDIRRFQSGKTFFKDKINKRGNKHLRKLLFLIIQNMIKLRRYGQNHIVEYYDKLKTQPYNKCHKVASIACVNKLLKLLFYLITHNIHYDYRLTA

SEQ ID NO: 391049 - protein, 430 aa, unidentified
MKKQEDYQQMPVVHQQVAGIDVGSQFHVVAVGDDPKNDVSQFGVSTKELFRLADWLQQNGVKQVAMEATGGYEKPLVSVLQEAGFEVLVTSGVNTKNYRCFKSDTSDAIHIRTLHSLGLLPPIFLPDEFSTLIRPLVRLRRNLVENAADYIRRIQKALRAGNVRLDAVLTDTNSVSGLRIIAAICQGEEQPDKLAALVDASCKKRPMEIIELLRGNWTQAIRFEVRSCYRLYLNLQIEITELDKELDRHFIDHTNGLKQPPLSSDPTAGRKNRRSGRDALLTFMAEVGESITKFHSAKAFAKWLGFTPNNKASGGKVLSRRTLKNRSTLPNTFRMVANSLGNMKKPNPLTAFFQRIAYKAGRIKAITATARKLAVVVYKMLTAGEAYEPIKLVRDLEQVKQQQIRQIKKKLVKFDISSQDLGLIAISSPN

SEQ ID NO: 391050 - protein, 341 aa, unidentified
MSSLVCGLDVHKSSVFATVMNYGGEVIERRKLADKDDVVNFLGQYQIDKVAMESSTSIVPVYRELRGRGYKVLVSHPKKTRLIAESRIKTDRVDSWALTELVRLDALPLSYVPPDNIAALREKVRRRAFLVRMRSKLKVKIRNDLTINGLTPPSEYGLFTRKGTAWLHSLRSDPVESYLPILSTLTLQIEKLSKELRSIAPEDEDAKLLMTIPGLGYYSALLVKSEIGDISRFPDGEKLCSYAGLVPSVSSSGTHKRHGPITKEGSRWLRWIMVESVRIHIKYDTGITRAYHAIAERKGTGVAKVAAARRLLMCCYSVLKNRQPYYDPAGHYQPSRSGRGE

SEQ ID NO: 391051 - protein, 372 aa, unidentified
MDRVCGLDVHKDSVFMCILTANGEKIEDVFGTLTPELDRLRDTLVSHGVGKVAMESTSIYWVPIWRILECDFDVKLVNPYFIRQLPGRKTDIKDAQWIATVLQKELIKGSYIPDSKIQELRQYSRRIFHLTRRKQQAESAIDLTLQRCNIRLSNYVSDIGCKSMRKVVNALICGETDSEVLALLVHKRIRNKHCHEVIKSSLTGIVSSSDRDMLKMSLEEVELYDRQLLECKEKMRIICEGHYAEELEILQTAPGIKEESAMRIIAEIGVDMKAFLTASALVGWAGLRPRNDQSAGKIKGRKTLHGNKYLRVMLTQCAWGACRTQTSKFYSRYHTLKKRMNHNKALMANARKLLVVIWNLLAKKQPYMPLVI

SEQ ID NO: 391052 - protein, 340 aa, unidentified
MAITTVGIDLAKNVFAVHCVDQNGKTVLVKPKVSRAALPELIASLPPCVIGMEACSGAHYWARVFRQYGHEPRLMAAKFVSPYRMAGKSGKNDAADAQAICEAVRRPHMRFVPVKDESQQAMQCLHRTRQGFIEEKTATYNRLRGLISEFGVIAPQSTDALRHIVSEQKNSLPLQVQQCVDDLLEHINRIEDNIAEYDRILSRMAKTDHRSQRLMELKGIGPTTACALVASIGNAHDFKNGRQLAAWLGLTPSQYSSGGKSKLGRITKAGDSYLRTLLVQGARSVLIGAEKRTDSFSRWVCTLVERRGYWRAVVAIAAKNARLCWASLHYGDDFRLYSAS

SEQ ID NO: 391053 - protein, 443 aa, unidentified
MGKSEQKALQIENSNAAGIDIGDTEHWVAVEPDRDNEPVRKFGTFTEDLVAIAKWLEKCGITTVAMESTGVYWIQLYLLLEEKGFEVFLVNAKHVKNVTGRKADDTDSQWIQRLHSYGLLNNSFQPEGEIRELRDYARQRKQLVQGAAREIQHMQKAMEQMNIKLHTVISDLTGVSGRRIVEAILAGNRNADYLAGLVDPRVKASQEEIIKSLTGYWRKEYLFALKQANDLYKYYNDKIIECDEEIEKALQGLIKEDIPSQEDVKKSRQKNHPSFNMSYYLEGIFGVDVTEIYGISSLTGLEILSETGCDMTKWKTYKHFVSWLGLAPNNKKSGGKLISSHIPKKKNRAGQAFRTAAASLTKSRNELGDFYRRIRSKAGPKQAVVATARKIAIIWYNMILKQEKFNPIGYDDYNEQYKQKKIKYLMKQLKQFGISPQQLTEVS

SEQ ID NO: 391054 - protein, 402 aa, unidentified
MNCVGIDVSKGKSMIAVMRPFGEVVVSPFEVRHTANELSELAGLLKSLDGETRVVMESTGNYHAPVAWLLHDAGLYVSVVNAMLVHDYGNNSLRRAKTDKKDAIKLANYGLDHWLTLPRYVPEEDTRLMLKACYRQYQQYSKVQTMLKNNLISLLDTTFPDANRLFTSPPRADGSEKWVDFVATFWHCECVCGRSEKAFTTQYQKWCRKHGYNFSEDKALDIYASACRHFGVIPKTDTAKLLVEQAISQLQTTSSALAALKQEMQSLAASLPEYPVVMGMFGVGPTLGPQLLAEIGDVRRFHSKKALVAFAGIDAPPYQSGQIDVRSRSISKRGSASLRRTLFLVMSVILQCAPIDEPVYQFMDKKRSEGKPYRVYMMASANKFLRIYYASVKAYLESLEHD

SEQ ID NO: 391055 - protein, 384 aa, unidentified
MSTDPRPEQTAIRTDLGAIFVSLELSRATWLITSLSPGRQKMSKHQVHGGDAAGLLARLAELQARAHARTGQLFPLIVIQEAGLDGFWIHRVLQSESIESHVVDPTSIATSRRRRRAKTDKIDGEALIRTLLAYKRGEPRVCAMVKAPTPREEDERRIGRERKVLTAERVAHVNRIKGLLFAQGICDYEPMHRHRRARLDDLTTGDGRRLPQHLKAQISRELDRLELLLEQLKAVEAERDALLAATESPAKLASAALLLDLKGIGPEFASVLWSEGLCRSFANRRQVAAYAGLAPTPWQSGAVNHEQGVSKAGNPRLRTTMIQLAWLWLRHQPGSTLSHWFHERVERRGGLRKTMIVALARKLLVALWRYVTAGVVIQGATMKA

SEQ ID NO: 391056 - protein, 356 aa, unidentified
MTVYYIGADVHSNSTELAIEKRGKIVARYSVPTSIPAIINVLDSLQGKKYLAVEEGPMSGWLYRNLNGKLDQFISSDPRRNKLIASDGDKDDKIDAGKLASLLRGGFLRAIHHSDDDGRAELKHWVSLYHDRVRDAVRGINKIRARCRMYGVKIPRAALRDPARRIGWLQKTNHRPLANQLKMLWIGYDATVQQVKFAKRQLSTLSKKYDIIQQWNLLPGIGLIRATTIFAYLDTPWRFKKKNKLWKYCGVGLQRTTSGTDKKGKPKPARLKLSWAVNRTLKNAVLGAALSAINQQDNIFKDYYERMLKDGIITSNARHTVARKMLTVMWAMWKSNRSFDEKVVCNELNRPTVSVI

SEQ ID NO: 391057 - protein, 291 aa, unidentified
MQSMYYIGLDVHKKKISYCVKDGSGIVHAEGAIPATRWDLDRWMKMLPQPWTAAMEATIFTGWIYDHLKPHAAALKVAHPLMLRAIAAAKKKNDRIDANKIADCLRCDFLPQCYMASTKIRERRRTLRYRNLLVHQVVQLKNKISGLLMEAGVSYNKQKLHKVGYFKELLASNPDINEGLRPLLRLCRETLVRLQKTESALVRSLQRDALLAERVERLMTIPAVGPITALTWVLEVDDVKRFSSIKKAISYCGLCGAEKVRQRPSNGRRFPSNATNTCKACWSRRPRWHHA

SEQ ID NO: 391058 - protein, 355 aa, unidentified
MLIIGCDYHPGFQQIAFVDTETGEWKEQRLEHRECAEAFYRELASRAAKVRVGMEASGHARWFERLLAELEIELWLGDAAVIRAKRGRRKPKTDRQDAQHILHLLLKDDFPKIWVPSWENRDLRQLLWHRHRMVQARTRIMNQLQAVALNEGLRCKKRLWREKGRKQLEAIRLAPWASRRREELLKLLDGLNPTIAELTQAIDQEVEKSAEARGLMTHPGVGPLTALAFVLIIGKAERFQCGKQIAAYLGLVPLEDSSGDRRRLGHITKQGNSLLRFLMVESAQVAARSIPQWRNQYFHLAMRRGRKIAKVAMARKLAIHLFWMMRQGWDYEQMKKFGSHAGQPGHRDGVQYSIE

SEQ ID NO: 391059 - protein, 482 aa, unidentified
MKKKNIYVNQSQELLTLFEEAGNSAKIMCVPIDYAKKDHVVMFCNGHGDILRKPFSVKNNPEGVKYITEQVSRSCRHHKINQNHVFFGGEDVGSYAENFASTLRSGGWLVAGVNAHDAKKQRANLQASTDRLDLMGIATMLLNRRANCSPAQSGIYRNLRTLVRHRRRLVVMTTEVRNRIHAIVDRLFPGFLDERKSGITPFSKSSLYLMENRFSASQIRRRRRSTLIEALRGLGTPKPDCAVAKLEEYAQQVLKTPDEYVSTLQLSMAQHVKHYRCLQENIEQLERETALWLAQTQGAFLTSVRGIGIVLAAGVTAEIGDPFEQKPLNNLVSYSGIIPRVIQTGGPEGEIYTGKVAKRSNRILKDYVVQSASHLGLHGPEDLMIDHKRRDAAGQHADFGIARRYLRMAMCLMRTSRVYLPPRLRKPGMKPEERAGYYLMSWPYLRDKWQKLGALEAAFSEDRPLGRWRNMVQEFYKIKLTL

SEQ ID NO: 391060 - protein, 417 aa, unidentified
MGISNNSEFTAYVGIDWADKKHDACIQAAKGNQREFVVIPHQVKSIDEWVQSLYQRFGGPIAVAVELTKGPIVTALQKYDFLVLFPINPSTLAKYRQAFSPSRAKDDPTDAELALDLIVRHPERFSPLKPQSTTLRTLATLVEHRRKLVDDRKRITNRLRSTLKQYYPQALEWFNRIDTPLFCDFLQNWPTLKQVKRARKATLETFFRAHNMRFKALMQERITAIKSATALTDDIAIIAPHRLHALVLIEQLRVLLKAIDQFDEESEKLANQHVDYGLFSCLPGAGPSLAPRLLVAFGEQRDRFKNVVEFQCYSGIAPVTERSGQKHTVHWRYLCSVFLRQTIVEWSAQTINKSYWAGIYYRQQRDKGSSHNAAVRALAFKWLRILFRCWQTRQPYNESIYLKALERRGSNLVKQAA

SEQ ID NO: 391061 - protein, 368 aa, unidentified
MAAVMIGVDPHKASHTAVVISAAEEPLGELRVRACAAQAERLLAWAAAWPQRTWAVEGAGGTGHLLAQQLLSAGERVLDVPPKLGARVRLLAAGDVNKNDPNDARSVAVAALRSAGVREVGPDDHAAVLKIWSKRYRDLGRTRTQVVCRLHAVLCQLVPGGLSRPIYASHAAGILQQITPPDAVAAARCELAAAFLDDLRRIDTQIRETRKKLAVAVQATGTCLTGLFGVGPVIAAAVIGDVRDVSRFPGRDHFAAYNGTAPIEVSSGPRKVYRLSRRGNRRLNHAIHMAAVTQIHHRHSQGRAYYDKKLAEGKTPKEALRSLKRQISNAIFACLQADAARDKGPGGQQGNDSVASAAGSGERHQQRQ

SEQ ID NO: 391062 - protein, 424 aa, unidentified
MGAISTMDVIYRSCAGLDVHKQTVECAVRCLTESGTVRVEIRQFGTMTDDLLEMVKWLKAQGVTHVAMESTGVFWKPIYNILEGAFTVVLVNARHVKQVPGRKTDVRDCQWLAQLLQYGLLRGSFIPPRWQRDLRDLTRERTQLRDEQTRVANRIHKVLEDANLKLGSVATDILGVSGRDILERLMAGEEDVEKLAERARGRLRGKIPELRRALQGRLSEHHRFQLRLNWNHLRSLQELIEQLDERIRKLCEPYHAQIEQLDDIVGIDQASAESIVAEVGVDMEVFPSEPHLSSWAGVCSGNNESAGKRRSGRTPKGSRWLRRTLVLAAQAAGRAKDSFLASRFRRLAARRGKKRACVAVAHSILKIAYYMLKDGRSYHDLGGSYFDQLDPQRLTRYLVRRLERLGLKVTLEPATVAQQPCSVA

SEQ ID NO: 391063 - protein, 347 aa, unidentified
MEKASQAEVQVFAGIDVSARELSVAVQCGIKEGIAITTFPNQAAGHKALLAYLLRAKGRARVCLEASGNYSLDLALTLQAHPQVEISVVNPRRARRFAESLGERSKTDPVDARVLCEYALRMPWVPWVPPSLAALRLRSITRAIEDLVAMQAQEKNRQHALLASDALPALLIRELEQHLRYLKLRITRLRREALRLIARNPELNRRFHLMLTTPGLGETSSLQILGELAVLPETLDARQWVAFSGLDPKQFSSGTSVEKKPRISRGGNRHLRRALYMPALVATRHEPFLRDFYQRLLRRGKAPLQGVVAVMRKLLHALFAMFRRDEAYNGSKLCPAEFARHTAVVCV

SEQ ID NO: 391064 - protein, 384 aa, unidentified
MARDLSREPVQEISPCFLSHCVEIRTASEAIFEPVFISLDLAMTAPDRSESASFSCPSVGIDVSKASLDVALLGNGEKATVSRKVPNSKEGFEALLSWIEKQTNRSLEESPEQIHVCLEASGGYQRPVARFLHERGLTVSVVNPQRTSAYADSQLARSKTDRVDAHLLARFCEREEPTPWEPSSCEHRSLKEMTRGLEQLKKERDRLKNQIGQSENPTVTDSLESVLESVNEQIDRLEDRIDQHVESTDTLARNRDLLETIPGIGQTTAALVLAELGDYERFESARQAAAYAGLTPSHHESGSSVHRNPRLSKVGSSRLRRALYFPAITALRCNAAIEAFGDRLADRGKEKMVIIGAAMRKLLHICYGVLKNGTPFDASLHPGT

SEQ ID NO: 391065 - protein, 369 aa, unidentified
MEHHTDVFVGLDVAKLRHAVAVAEDGRDGEVRFFGEIGADAPSIRRLVGKLEKRHGRLHFCYEAGPTGYGLHRQLTALGHRCTVVAPSLIPRRPGDRVKTNRRDALQLARLLRAGELTAVWVPDEAHEAMRDLVRAREAAVDDLRRKRQAVSSMMLRQGRVFPGKKTWGARHIQWLQAQRFEYPAHQLILQEMLLAARHAHERLGRIEATIVEFLPTWSLAPVVEALQALRGVNLITATIIMVEVGDLRRFENPRRLMGYLGLVPGERSTGESVRRLGITKAGNGRVRRSLIESAWSYRHLPRTGKAKHYLLERVSPAVRDIAAKAQARLCARYRALSGHGKNLNVAVTAIARELAGFVWAIGREVLAA

SEQ ID NO: 391066 - protein, 340 aa, unidentified
MGEYIGLDVSLKKTAVSVRRGGKRVWRGKCLSDPAVIASLIRKHASSAERVVFETGPLSVWFFHALTAEGLPAICIDARHAKAALDMAANKTDANDADGLAHLAEVGFFREVRVKGFDSMLSRTLVASRTKLMRLTLDVANQIRGLMKTFGLIVPRSMGGKFEAHVRSLLADDAGLARIILPLLEAWRSLRVQAAELGRQLLAEARRSQQCQVLMSIPGVGAITATAYLTAVEDPANFARSRSVGAWLGLTTRRYQSGEVDYDGHISRRGDAHVRSLLYEAAVVILTRSHADSDLRSWGLNLREKIGFKRAAVAVARKLAVIMHAMLRSGELFTRRTAAA

SEQ ID NO: 391067 - protein, 363 aa, unidentified
MFVERTSVGLDVHARSVVATGLDSMTGEVFKTRLVPAHEEVITWLRQLPGPVATTYEAGPTGFGLYRALTAAGIRCEVVAPSKLTRPSGDRVKTDAKDALLLAQLLQVGQITGIRVPTVSQEAARDLVRAREDVRGDLMRARHRVSKLLLRHGHVYYGGKAWSGDHAAWLRRIRFDQSGTRTAYEADLEAVEFAIARRNRLDAAIAAMAADCEFTATVRKLCCLRGISTLTGFALAVEIGDWERFTGSSIGAYLGLVPSEYSSGQSRRQGGITKAGNSHVRRLLVEAAWHHKPTYRVGKVLQARWDQAPAAARTRAHAGNQRLHRRWASYTARKKKHTTATTATTAIARELAGWCWSLATLPD

SEQ ID NO: 391068 - protein, 321 aa, unidentified
MKIGVDVSKDSFDVAYRDGNDYRHGTYEQCEQGYDAFIQHARSLEGDVQCVMEATGIYHLRLATRLTQAGIKVSVINPLVIKRYAQMRLRRTKTDKADARLICEYAEQNETPEWQCEEQIVTQLNQLDMWMESLHKQQTMIKNQVQALEHQPYQDPFTLRQMKQQLEQIHLQLKGLEQHMEELIKKYNARLYTILRSVKGIGAKTASKLIAVTHGFKRFENVNQLLAYIGMSPRTYESGTSVKGKGSISKMGAGRLRQLLYMCAWTAKFSNRACRALYERLKAKGKPEKVIKIAIAHKLLKQAFALARKNELYDENYPVKA

SEQ ID NO: 391069 - protein, 363 aa, unidentified
MDEFTTVAVGLDVHARSIRLAAVRADELLEERTLHYDEEEVERLLRRWPGARCCYEAGPTGFGLYRHLVGCGIDCAVVAPGLVPQRPGDRVKTDPRDARKLARLLAGGLLEPIHVPSPELEAARDLVRAREDARLDRMRDRHRLSKFCLRHGRLLPTSAWTVTRRKWLGEQRFEHAAEQITFDTYLHAVDLVDARIVQLERAIRATAEQGSWRELVARLRCLRGIDTLTALALVAEIGDFGRFATAEEFMAFVGLVPSEHSSGEQRRQGSITKVGNSHVRRLLVEAAWHARRRPKVGYDLARRQRGQDAAVIERSWRCQQRLYQRWQRMAGRGKPHQKIVVACARELAGFVWAIATDQPLRST

SEQ ID NO: 391070 - protein, 338 aa, unidentified
MKLYGAIDLHSDNNVTALIDEHDQVVYQKRLRNDLAMILEQLSPYQPSIQGIVVESTYNWYWLVDGLMEKGHRVHLANTAAIQQYEGLKYTDDHSDARWLAHILRLGILPEGYIYPQQERAVRDLLRKRSQLVRQKTANVLSIQNLFSRHRGSSISTNRIGQLSSEKVESLFASSDVALAVKANLAVIHSLKTEIGTLEKVVKERIKLRPAFHHLLTVNGIGPILALTIMLETGDIRRFPGVGNFASYCRCVGSEKLSNGKRKGTGNTKNGNKYLSWAFVEAANFAVRYDPLIRRFYQRKKAKTHGVVAIKAVAHKLSRACYYVMRDEVAFDVARAFA

SEQ ID NO: 391071 - protein, 470 aa, unidentified
MVKSNNTISQHLSGSKGNTLTSQLHYKDLENVMVVPIEVGKSYNKALVANYFGCLLKDPFEFHNSQEGFRLLHNTIADVAKNQPVEEVLIGMEATGHYFKNPAESLAEMGYNNLFILNPLSTSHCRKAGLTWSKTDDIDLRAVGQALISGYGTVFRLERPLWEDLRQICRYRRFLIRHQTAYKNRIHCILDRLLPGITELEIFTGSHLWSDASLAFFNKHPDLDSMKQLKAKSVITFFQKKGRRISPEEAHRLIRWAKEALHPSSLIKTTRQFVLASLIERLKQLSQGIREIEIKLLGYLVRIPAVVLLSIDYIGPVRAAEFAGEITPIDQYSRSRSLVKAAGLDPTRYQSSTQESTKHYVSNMGSRALRYITINSANDLMKHNDYFAHFAKELMRRGKSKGCACVAVGNRFIRVAFWMIKEQKSFRPPNGLGISKDPFFKIKAFLQDHQASELIEEYLSHAQKYLGKKE

SEQ ID NO: 391072 - protein, 339 aa, unidentified
MELNVIGVDIAKKVFQLHWVEADSGSIERLKLKRAQLLAWFAERQPALVVMEACGGAHEWGRQLVKLGHEVRLLPPRMVRPFVQRNKTDAADAQAIWTASRQPGVRFVALKTEAQQVVLALHRMRAQLMKMRIMQTNELRGLLYEFGIVLSEGHVALLKELPAALAQAQQRLPSMLMDSLHEQVSRIGQLQADIGAIERRLAQHLRASATCNALAEIPGVGLMTATAVVASMGSPTAFKDAREFAAWIGLVPRQTGTGGRIKQLGISKRGDAYLRTLLMHGARAVVRSDHATTWPWLAALLKRRPYSVAVAALANKIARTIWAMLAKGQTWRPTAWQAA

SEQ ID NO: 391073 - protein, 343 aa, unidentified
MNHTLIGLDLAKSVFHMIKLDRHGKLTWRKKFSRAQLKRYFANRQSTHIAMEACGSAHYWARLFESLGHTVALLPPKHVKGYLRGQKNDYNDAQAIAEAAYHGALRSVPVKSVPQQDEQAFHRMRSQCVGERTRVVNQIRGLLAEYGLVIPQGTTAVRKALPLILADAENGLTPRFRELLDRQYQRLVTLDEELGWYKAQLQQQSKQDEVCQRLQDIPGFGPVVSSAVKCWMGDGQQFRRGRDASAALGIVPRQYSSGDKERLLGITKRGDGYTRSQIINGARSVVIRAGGKTDALSCWIVRLVETRGFNKAVVALANKLIRIAWVVIARGERYQPREALVQG

SEQ ID NO: 391074 - protein, 323 aa, unidentified
MNNSNPTASADHGFYGLDVSKDTLDLAAYCEATVHHFGNDPEGIQSVVRHFQQRPVTLVVLEATGGYELTLLVALVAAKVPVVRINPRQVRDYAKALGILAKTDRIDARVLARFAHDVRPPIRALPGENERELQALIARRRQLIDLRTAERNRRHQASLPEVQQSIQAVLDVLDAEVIAIDKKLEVAVQASVTWRETDQLIQSVPGLATKISFHLLSGIPELGKLKHRQITALVGLAPFNNESGHGRKPRAIRGGRAEVRSALYMAAFNAIRCNPVIQAFFQRLQAKGKPYKVAITACMHKLLIILNAMVRDRRPWTAIAANS

SEQ ID NO: 391075 - protein, 344 aa, unidentified
MEYYAGLDVSLRSCALCIVDSKGTVLFERELPCEVSDIAEWLAGFPHPIERVGFEAGAMSQHLFFGLTAEGFDVVCMEARQVSAALSAMRNKTDKTDARGIAQILRTGWFSPVHMKSREAHGLRALLSTRKALLKKTMDLANEVRGLLKIFGVRLPKTVKHGSFDSVVRPMIEIDDVLAHALVPLLDARVVLYQHYLELDRRVKRAASHDDVCMKLMTIPGVGPIAALSFKSAVDDPTRFKRSRTVGAYFGLTPRRYQSGEHDNPGRISKAGDRDVRAVLYAAANALLMRTMASSQIKSWGMRLMRTKGRRRAVVAVARKLAILMHRMWIDGSEFRQDQVGGMA

SEQ ID NO: 391076 - protein, 318 aa, unidentified
MSDVSMVVAGIDIGKARLDVALHGAADRPAFDNSAAGHRRLIKWLHAAQVVRVGLESSGSYSQEVTGALREAGFEVAVLQPLQVRAFAQYRLQRAKSDPLDAALIAACTALLDKVHEAPDARLAPLAEHLRLIEQLEEDVVRAKTRLEAAHLAHVRRALRREVERLERREAAERALLLKSIAAEPDLLARLQLIQSVDGIGERTALSLLLLLPELGRLEREPIASLAGLAPFVRQSGKWKGYSRIGGGRDRVHRALYAASLAAAFRWNPAIKNLYQRLKAAGKPHRKIMVACARKMLIQVNAVVARGTPWISTRNAAA

SEQ ID NO: 391077 - protein, 393 aa, unidentified
MTVVIGVDPHKGSHTAIAIDAHEQQLARLQVRSGPRQLEQLLAWADEFDERTWAVESAGGLGYLLAQQLVGAGERVLDVPATLASRVRMLATSKSQKTDPHDAFSIAIAALRAPDVRPVARADHAVVLRLLAKRHRDLGRARNRTACRLHALLIELVAGGISKEITVNAAQQLLDRITPTDPVAQIRHDLACEHLDDLRHVDVQMRASKRRLEAAVRASGTTVTELFGVGPVVAAMVIGHARDINRFSDRDHFAAYAGTAPIEFESGGRSIRRLSLRGNRQLNHAIHIAAVTQIRHRHSPGRAFYDRKLAAGKTKKEALRAFKRRITDAVYRQLRADNARQQAGPGGQAGTTHQSSVAGFEPRTPTLRKNHSRTRPNARTRTPRTPPTPATAT

SEQ ID NO: 391078 - protein, 407 aa, unidentified
MYYLGIDISKKSFTVSVLDEEGEAITKFLTFSCTRKGFEKLVDKISSLKLKKSEVVIGIEATGNLWENLYSFLEGYKVIILNPYQTRKYHQVLSKKAKTDKVDSLVIAGLLRSKEALASYVPEEEVQVLRELVRLRHHLQKDKKNYLRKAYNLLNLVFPEYTDLIKSPFKKVSSMILKKYPTAIHMARARRTDLVKMARRIQGNNYSSELAEKLIQIAKESIYSGKASEVRGMALRILIDEIESLRNKIKEIEDKIEEILSSDEPSSPQKRLLGIPGVGPKTVAAFLGEVGGDVTRFSSANKLIGFIGWHPKISESGEKKNLHPKMSKRGPSALRASLYMAAVASLKHNPYLRSLYHRKISEGKESKQALVCVGKKILSIMYSMLKYEEDYDPQRIFFQLEKEQVLI

SEQ ID NO: 391079 - protein, 337 aa, unidentified
MEYFAGLDVSMAETHVCVVTRNGAVIHNAKVPSTPADIAAELAQAPACRRIVFETGRMAPMLYHGLSQLGLPVVCVESRQAYQALKLLATHKTDRNDARGLAHLARTGFFKPVHVKSLPAHAVRSLIIARKKLVGQRVTLENQIRGLAVVFGVRLPRALSPAFIRQALGASEGIPGLSAAMRGLVAARAAVLAAVVAIDADIKRMVRASDACRRLMSIPGVGQLTALAFTAAVDDPRRFRRSRDIGAYLGLVPRRYQSGEVDYTGSISKCGDRRVRTLLYEAANVMLTRYKGPLKLKDWAFAIAKRSTMRKARIALARRLAIIMHAMLRDGTEFKPA

SEQ ID NO: 391080 - protein, 387 aa, unidentified
MSRNARVPVPVTTLDQDSTLVVVLELSARSWLVGARVPGIGRMSRYALAPSAEALAAWLGTAKARAGAAGRTVVRVVLAYEAGRDGFWLARYLEARGVEVYVIQPSSVLVDRRARRAKTDALDVEMLMRTLLAWLRGEPGVCSMVPIPDVAEEDGRRPVRERQGLIGERLALLNEIDGLLATFGITGYRPLRRDRRAQLAALRTPEGDPLATNAAARIGRILDRLELVMQQIAELEQVRDAVLAKEVASGEAETMIRGLARLKGIGAELATVLVWEAYVRSFPNRKALGAYAGLTGTPFASGSTTREQGISKAGNRRLRSSLVELAWLWLRYQPDSKLAAWFRGRTGSAGSRMRKVMIVALARKLLVALWRFCRDGVLPEGAALKAM

SEQ ID NO: 391081 - protein, 430 aa, unidentified
MNESVSEQPLSPKVAAFVGIDWADQKHDVVLRSAGDPAKAEHQVIKSEINALNDWIAQIQERFGTKGKVLVCLEQSRGALIYQLMAYELFELYPINPSQLANYRKTFFSSGAKDDRPDADLLSELVMCHRDRLKAWKPDDQLTRELASLNEGRRNAVNRRTELANEIKSQLKLYFPVALQILENDITTALAADLLVQWQTLAELQKVSPGKLRKFFYGHNSRQEKKILERLALIKEAKPLTTDVAIIRPNALRVKLLAQQLKSLLPFIAEYERRIAELFGSHPDRFLFDNLPGAGPALAPRLLTAFGTDRDRFEVAGDLLNLSGIGPVRIASGKKTGKSASVHCRRACPKFLRQSFHEFGECSIRYCPWAQACYQAQRGRGKGHHAAVRAVTFKWIRILFACWKQRTPYDPQRYFQALQTRGSDYAQTTA

SEQ ID NO: 391082 - protein, 330 aa, unidentified
MTQDPSQDPSQVVPPVFVGIDVAKDKLDLARSDSVELIAVANDGQGIARVVRELTAARPSRIVVESTGGLERPLLEALLDANMPVALVNPARVRHFAIGIGILAKTDPIDARVLVKFAQLAEPRLAQKRTENQAELDELVTCRRQLTAARTAQANARLTTRSGDAQKSIDAVLKELDKQVELLDRKIRKLIDSDDDFKHLDGLLRSVPGVGPVLSATLLAELRELGTTDRRQITALVGLAPFNHDSGKSTGRRAIRGGRTSVRCVLYMAALAAIRFNPVLSRFADRLRRTGKRAKVIIVACMRKLLALLNAMIRDNLTWTELRVVKALDI

SEQ ID NO: 391083 - protein, 363 aa, unidentified
MQTIHRSQTLFVGIDVHKDTHTAVGLTPFGEKVFEARIGNETEDFISLVQKTKVEAEKLNLVPSFGLEDVHSWGERLSSFLVEEELSVRAVAPILVDHRRSKMTHPEKNDSLDASGVAEVMIRRIDSLPLYKLTEEAQKAKQIRELSLEREWLVKERLRLKNQLHILLYRIHNSGYRTKFKDPFSLKALRYWMRSIPRDANMILAQRAKRAVRRLLDLREEIQEIEEELETLMKESKQTITTASGCGTVIAAELIGEIGDINQFHSPGALAKYAGCAPREHSSGKTIRWRKTRSGNRRLNRAFHRMALSQISRSGNDAARAYFKKKVSEGKTKAQALVCLRRQLVNVVWMMLKHKTEYRLPTN

SEQ ID NO: 391084 - protein, 392 aa, unidentified
MIYVGIDAASQKHDFFIQRDTGEVFSKKAIAIKNDIDGLKKLHNSIQDFVESTKDSNVRIGLESTGHYCKIILLYLIKEGYQVSLINPILTSMDIKASSVRKTKNDKLDAEAICRFLDKNRFDFKPYTLLSYHIDALKSLTRQRFTIVKQQTQQKLIFQRLVNVIFPEFLSLFSSDYTESVLNILYAYPTPKKMARAHESSIDKLLHHTCKTTASKIIETAKSSIGQSENYLGFELQHTIDMIRFYQKQVEIYNNQIEIELNETEYGKIITSIPGVGTITGAMIISEIGDINNFKSPDQLLAFAGLDPSVYQSGEFEASHTKISKRGSKYLRWSIHQVSSGIWRWDKTFGDYYSKKINEGKHHYVAIGHIDKKLVRVIFSLLKNKQSFIPQK

SEQ ID NO: 391085 - protein, 378 aa, unidentified
MRFYTEQHRFYCGVDLHARTMYLCILDQAGAVVLHQEVSAEPTAFLEAIAPFRDGLVVACECLFCWYWLADLCQAENIAFVLGHALYMKAIHGGKSADDRIDSQKIAQLLRGGNLPIAYVYPKGLRETRDLLRRRMYLVHKRAEVVAHVVNTNSQYNLPSFGKKLIYARNRQALKITDRFADASVRKSIELNLRLLDALDDLLGDVELYLERTVKLDDADTFYRLRSIPGVGKILALVFLYEIHDIHRFASEGMFLSYARLIRPRKTSAGKVKGGGGAKIGNAHLKWAFSEAACLLARESDQAKRFLARQQKKHGKPKALGILAARLGRAVYQMLRQKKAFDPKRFWNGEPGVTPAQLHKAAVQRPRRAKGSSCVLEA

SEQ ID NO: 391086 - protein, 355 aa, unidentified
MDSTKYVGMDVHKDTISIAVMNSTGKVVMESVLETKALTILQFMQGLRGSLLVTFEEGTWAAWLYDLLKPHVTKVTVCNPRKNALLKSGNKSDRIDAQKLAELLRNGSLSAVYHGENGLRMLKELARSYLTVSKDLTRVMNRLKALYHSWGIACAGTQVYAPRHRLEWLSKITEVGVRGRAEFTYQQLDGLQALRQAVRRDFLAESRKHPATKRLREIPGIGPIRAALLVALLQTPDRFRTKRQLWAYSGLAIETHGSGQYCYLEGQLRRVKKPVALRGLNRNHHHDVKWIFKSAAVKASSPSGPLHQFHEALLAKGIKPSLARLTLARKIAAITLTVWKKGVRFDAEHLKLQAA

SEQ ID NO: 391087 - protein, 338 aa, unidentified
MVHVGVDLHKRMSQIAVLTEDGEIAQRRLANEPARLEAFFAQLPPRTPVAIEASGTWWWLVDLLERSGHRPVLSNPKQTKAIAAARLKNDRVDAERLALLLRGDLLPTVWIPPAALREARELIRHRVSLVWLRGEVRNRLLAMLARRNLQPTSGKSWLTGRGQRELQALPLTPIATTIREDCRALLPLLDEQIRRLDDDLRQRWGDDPRVRRLMTLPGLGAFIAIALVMELGDIDRFPSAKHVASYIGLTPRVRASADRIRSGHISKEGNRLLRWVLVLAATQAARQPGPLRAWFRVMKQRKGTKIARVALARRLVEIVYHVWKHDYFTVLRRGAVRG

SEQ ID NO: 391088 - protein, 381 aa, unidentified
MDTKSAQGSLQNPISPTLYLAFELSQKQWKLGFTIGVGQRPRIRTIQARDLPALQWEVQEARRRFRLPDTVTILSCYEAGRDGFWLDRYLHAQGIVNLVVDSASIEVSRRSKRAKTDKLDVDKLLEMLIRYHSGERKLWRVVQVPSLEVEDQRQLHREMITLKAERTRHINRIKGLLIGQGVSIPVAAGFLERLDSVHLWDGSALPDALHTRLEREYQRIQWVNQQIQQLEKQQEELLRTSDHPSVAQVRQLLRLKGIGVSSAWLFVMEFFSWRAFRNRREVGALAGLTATPYSSGGTSREQGISKAGNRRIRAMAVEIAWIWLRYQPNSRLSCWYQQRFGQGNNRMRRIGIVAMARRLLIDIWRYLETGTLPEGVVLKSV

SEQ ID NO: 391089 - protein, 341 aa, unidentified
MQIAVLGIDLGKNSCSLVGLDQNGAVMMRRRMRPGSIVGFTRSLSACIVAMEACCGAHHLGRQLVAQGHTVRLMSPEYVRPYVKAQKNDDRDAEAIAEAATRPTMRFVTLKSEAQLDLQILHRARERLVGERTALINQLRAILLERGITVPQGRRKLEQYLAALPEPEDDTSVSPRIRRLIEDMRTEWQALDQRINALDAEFTARAREDADARRLTSIPGIGVLNATALTAAIGIGETFARGRDFAAWVGLVPRQVTTGGKPRLLGISKRGNKYLRKLLIHGARAAMPALASSSTPLGHWLRALMQRVHKNVAVVALANKLARIAWAVLRRGVAFNAAAAA

SEQ ID NO: 391090 - protein, 272 aa, unidentified
MELYGGIDLHSNNSYLGIVDQECRIIYKERHRNELPLILSALAPYKSELKALAVESTYNWYWLVDGLMDAGYQVHLANPAAMKEYKGLKHKDDKKSALWLANLLRLRILPEGYIYPKEERPVRDLLRKRLHLVRHRTSHILSIKNIVTRNLGIAIKSDDIKALTEKDVERLISDECHRLAIMASLSTVHHLTGQVDQIEKTILGRVRLRDEFKGLLRVAGIGTILGLTIMLEVGNIRRFAEVGNYASYCRCVRSIRTSNDKKIGEGNRRNGK

SEQ ID NO: 391091 - protein, 388 aa, unidentified
MARESVPNTYPIALDYGSTLVLAIELSNTSWVLAAQVPGLPRVKAKQSIEPTAEALLAAIDGYRDRARAAGRTVERVVATYEASWSGFWLARWLLRRDVETYVVQPSSVPVDRRARRAKSDGIDAELLLRTLLAWLRGEPRVCSMVPIPDEADEDERRRVREREDLVAERVSLVNRIGAVLATLGVRDYNPLRRDRRRCLEALRTALGDPLPPHAGARILRMLDRLELVCAQITELERERDAVLEEKAPDKAEEMIQQLAGLRGIGAQSATVLVREAFVREFANGKALGSYAGLSPTPFSSGGTEREQGIDKAGNRRLRTVMIELAWLWQRYQPGSAQVIWFRERVGGTGKRLRKVMVVAMARRLLIAFWRYATQGVVPEGAVLKPAP

SEQ ID NO: 391092 - protein, 374 aa, unidentified
MREFSKYVGLDTHKETIAVAVADAIGGKARYYGEIANAPEAIRKLVKKLCPDGEVISFCYEAGPCGYEIYRQISRLGHHCSVVAPSLIPTKPGERVKTDRRDSEKLSQLDRAGELTAVWVPDQEQEAMRDLTRAREDMKGLERITKQRLNAFLLRYGRMYESGKSRWTQAHFRWLEGLKFDVTVQQIVFQEYVDAAKQAEARVAGLEKEMEKALEHWVLAPVVEAMMALRGIKLITAMTVMAELGDISRFDSPRQLMSFLGLVPSEASSGQTRRQGGITKTGNSHVRRVLVESGWCYRFPARKTAHLQRRAEKCSDEVQAIAWKAQKRLCGRYTHLIGRGKLKVQVCTAVARELVGFIWAIACEVMNKPVENTC

SEQ ID NO: 391093 - protein, 325 aa, unidentified
MQITTIGLDIAKNVFQVHGIDAAEKVVVRKQLRRGQILGFFEALPRCLVGMEACATSHYWAPELTKLGHQVRLMPAKDVKAYVKRNKNDAADAEAICEAVRRPTMRFVQIKSVEQQGQLMLHRARDLLMRQRTQLINALRAHMAELGIVAAQGREGVKELVKIIASEQDARLPVDAHTSLVVLAAGLQALQTMIGSIERRIIAQHRSDEASKRLRSIPGIGIVGATAIAATVPDPKVFRSGRDFAAWIGIVPREDSTGGKHKLGPISKRGDQYLRRILVVGAHAVLKRARHQPENYPWVTRLLERKPFRVVAPDDEGAGYRDRCP

SEQ ID NO: 391094 - protein, 343 aa, unidentified
MQAVTTIGLDIAKSVFQVHGIDAEGKVVVRRQLKRRYVLSFFEKLQPCLVGIEACASSHHWSRELRALGHTVRLMPPAYVRPYVKRQKSDAADAEAICEAVTRANMRFVETKTPEQQSCLMLHRTRHLFIRQQTAVINAIRAHLAEFGIVAPVGRHGVDELLKVIADPNDKRLPAIARTCVAALGSQLRMLKTQILQFDRMIMAWHRSNELSKRLDKLPGVGPALATALVASVANPKAFRSGRDFSAWIGLVPKQNSSGGKDKLGNISKQGDRYLRSLFTIGALAVIRYAKIHGTGHRPWLTTLLARRPTKVAAIALANKLARMAWAMMAKGEPYKEPVALAA

SEQ ID NO: 391095 - protein, 371 aa, unidentified
MVHGTRAFVGIDVAKARNAIAVADGERGGEVRYIGEVDASDESMRRAVKQIAAKYDDVLFCYEAGPTGYGLHRLIRSLGFDCTVVAPSLIPRRPGDHVKNNRRDAIGLAKLLRAGELTAIWVPDEGHEAMRDLVRARATAVETLRVHRQQVSALMLRHGRQFPRKTTWTRSYLRWLQEQKFDHPAHQIVLQEAIEAVRLGTERLERLEQSIEEFLPTWSLAPLVRALEALRGVSMIVAVTFATEIGDLRRFDSPRQLMGYLGLVPSERSTGETVRRGPITKAGNARVRHMLVESAWTYRHPPRVGRVKLYKLEQAPPKVREIAWRAQARLTSRYRALCARGKKPTVVCTAVARELAGFMWAVGREVQPTQS

SEQ ID NO: 391096 - protein, 325 aa, unidentified
MKEMYAGLDVHAEELYGTILDGQGEIVAQGGLPNRKEAIQSFFEGIPSSKLVVAIEACGMWRGTYNLLKELGYETVLANPLKVHQIASKKKTDKVDSRILADLLRTGYLPVVYIPSHDVLRLRDLARHRAGLVRIRASLKCRIKSYLLRDGVRYRMGWSKKSLEHLKGLDPKIANFVRILETIDVEIKQVTREINNVAGNMRLANLLRTVPGIGGFSSIMILGEIGDIKRFHNPKSLVSYAGLCPGVYQSGDRSRAVANRACNKWLKWVITECSGKASMLDTRYMKHYHRVKDRKGFKVARRSVARKMLTDIWHMLVKEEPFMAS

SEQ ID NO: 391097 - protein, 337 aa, unidentified
MQVSLIGVDLAKNILQVAGVNRAGRQIFNKTIKRNKLLDCLRQYPDCIIAMEACSGSNYWGRTLEAQGFEVRLIPPIHVKPFVKGNKNDRNDAFAITEAAVRPHMQFVKPRTLEQTNAFMLHKVRERWVHQKVALTNQLRGLLSEYGIVIGLGDSVLRAQLADILEDADNGLSLSTRALIQAIWQEWSETEERLAGLNKQMEATAKQDADCQRLMGIKGVSTITATAIKVFAGDGKQFKNGRHFSANLGLVPKEHSSGGKQSLGGITKRGNSYIRRLLVQGAWSVLRYAEGSEDRLSQWALKVLERRGKHKAVVAIANKMARICWSLLANQTEYKAV

SEQ ID NO: 391098 - protein, 355 aa, unidentified
MSQEKYIGMDVHQATISAAVRNAHGKLLMECVLETKAETILEFVQGLRGPLALTFEEGTWAAWLHDLLTPHVSRLVVCDPRKNALMKDGNKNDRIDARKLAELLRTNQVKAVHHENHGTRALKELGRSYMTITKDATRLMNRIKSVYRSWGIPCTGTSVYTRRHRAEWLAQLVEPGVRIRAEHLYQQLDSLQPLRLEARRQLLRESGKHAAVKLLRQIPAIGPIRAALLVALLQTPHRFRTKRQLWAYSGFAVEVHDSGEYRWVRGKLQRNRERITVRGLNDNHNKDLKNLLKGAAIAASTRPGPLHDFYLARVESGMRPTMARLTLARKIAAITLTMWKKGANFDPNQLHRQAA

SEQ ID NO: 391099 - protein, 393 aa, unidentified
MNGDGGERVVVGMDPHKRSVTIEVMTADESVVGGGRYDTDVAGYRAMLKYLRAWPDRVWAIEGCNGIGRHIARRLIVDSEQVVDVPPKLSARARLFATGQGRKTDATDAHSVALVGTRMTGLRPVVADEQREVLRLLVDRRRALGEEHTRKVSQLHALLLELIPGGAKKDLSAAQARRLLATVRPRDVVGKTGKRVAMELVVDLEKIYARTKAADKELKQLVKATRTGLLDLHGIGPSGAARLLVEVGDITRFPDRGHFASWTGTAPIDASSGDHVRHRLSRGGNRQINQVLHIMAVVQLRNPTEGRAYFDRKKSAGKTSMEAMRCVKRRLSDIVYKTLLDDLVTAQKTGPGGQPGNVSVSSVTGSQPSTGSSDKSLPEPATTDPRPTLPTVS

SEQ ID NO: 391100 - protein, 420 aa, unidentified
MIYAGVDIAKVDHVIGAVDERGSEACGPMGFKNSAAGFERCEAWLEGVAASPADVPVGMEAAGRYWMALYAFLASRGYAVAVIDPLQVRAVRRFKGLGGVKNDRVDAGLIAEAMRIGQYDPTRLATDDARSLRTLTRYHQSLKSELAEVKVQCTCLLDAYFPEFSGVFSDMFGAAGRAVLSRSPLPSEVRRRRVDSPRRDISSAARGSRRVDGKAAEIKELAGRSVGIALGERAASLQVRSLVRQMDFLDAECAKIEAEARGLLDRVEPLVLTIPGVSYTTGAQIVAEIGDVSRFRNASAPVGYAGLNSSVCQSGMFDSGGGPITKHGSPYLRRALWLAASWARLHDPSLREFYERKRAEGKCHRVAVTAVARKLCHIVFAVMRDQVPYDPSRPGRDPSKHSVSGSQGAAKSKTKSKTEN

SEQ ID NO: 391101 - protein, 326 aa, unidentified
MQGKEASEQETELKSSVGIDVSKHWLDIHVLPSNERLRVCNNCQGIRQLKRWVTRFDPALIVVEATGKWHRDVQRSLAASGIPVALVDPFRVRMFAKADGILAKTDRLDAKVLASFAAVMTPPVRPPAPQVLAELAELMAARMSAVKIQTMLKNERSAATFKVVQRHLDRRIERGDKEIAALDAAMLERIQADEGLARRYAILTSIPSFGFVTAAVLIACLAELGSICAKTSAMLAGLAPIADQSGTRDGVRVIFGGRARVRRALYLAALSAVRFNADMRAFYRRLRASGKPPKVALIAVARKLVVLANALIGENRLWRPKTQIYA

SEQ ID NO: 391102 - protein, 374 aa, unidentified
MKNSITYVAMDTHKKQHKIAYQQPDQREIIECTVLNTAREIKKMVKKIVRQAPGPVVFCYEAGVCGFVLKRQIEALGCRCYVIAPSLIPRKPGERVKTDRRDAKKLLSLFQAGLLTEVQAPDESQEAARELTRLRETAQENLKRIRHQILKFLTRHGYVYTEGRHWTQKHLTWLHALEFSEPRLTQVFENYFAEMVYCQSRLQHLDQEVTRLAESPAYREVVRLLCCFHGIDTLTAITLLTEIFAFGRFASPRQLMSYLGLTPGEDSSGDRQRKGAITKTGNARVRRLLNEAAWHYRHRYLPSRALQKRREGQPAWAIAIAEAAGRRLSQRFRYLVNVGKLPTKANIAVARELIGFIWSLVRHYEAQNPTVQTA

SEQ ID NO: 391103 - protein, 473 aa, unidentified
MAADVSKGYADFVLWDQQGNALESAFKLMDNKEGHQQAKQLVKEFMKHYELTEVYVGMESTGGYENNWFLLFRSMQTQGVSQVMRINPKAVKAMGTARMVRTITDAVSAENIAQYMLSFVKDSKPVHKQDNQFRVVRHISAWTRNINKQITQTSNHLEKIIYQTFPELLVYCRHGLPDWLLYMLQKYPLPSDILKAGKSRLTKISFITEPKAQSIIQKAKDTVAGSAADDLLAATIRSMITVLLCHRQQINMHKKALTKQFGEAQEVQLMDTMPGITAETAVLMMIEIESVDDYPGAKQLCSHFGMHPTFKQSGDGTWAARLSKMGRSSIRGLLYMPAITAIRTNEYFKTLYAGQRAKGKKHKQAICVVMHKMLCIIYGMLRSKKPFDLSIHTNNQQQGEQKQKEAEKTAQQRKKERKNKRERYITANPLEAPISRKQTKQIKKELLASIDKNQDIRGPEALNEDKQINCLSS

SEQ ID NO: 391104 - protein, 360 aa, unidentified
MTDGSSEQPQMTAGLDLGDKYSYLCLIDQEGGEVIEEGRLRTSPEAFRRRFASERPLRIAIEAGTHSPWASRVLEECAHEVLVANARKLRLIYANKRKTDEIDAENLARLARLDPKLLYPLKHRGEDSQAHMALIRSREALVSTRTQLVNHVRGAVKSFGARLPKCPASSFHKKKAAEHIPEALWPALGPILQTIGSLTQRIRDYDCQLETISKEHYPETELLRQVEGIGPLTALTFVLTLEDPYRFEKSRSVGAYVGLVPAQDQSGDRDPREKRISKEGDEMLRRLLVSSAHYILGPFGSDSDLRRHGQKIASRGGKNAKKRAVVAVARKLAVLLHSLWISGEVYEPLRNTHRSGGQAA

SEQ ID NO: 391105 - protein, 357 aa, unidentified
MNTTHTISFADIHFFVGIDAHLKNWKVSIRLDGLELKTFSMNPSPLELLAYLRKQYPDGIYHIVYEAGFCGFWALRIFREHNIDCIIVNPADVPTTNKEKVNKSDPIDSRKLARELENKSLRGIYIPDTFHEELRALMRLRYRIIQSQTRIKNRIKGLLYTQGIQIPLQFSGRARWSHAFILWLQQLHLNTPAGNFTLQNSILQLKEIREHNKNVLKQLRTEAKHPDIAPIMKALQGVPGVAFITAMYLYTEIMNMKRFANDNHLVSFVGLVPSTQTSDENVYSNGISFRQNPFLRSMMIEAAWTAVREDPAMTLKFKELTKRMNSQNAIIRIAKKLVKRIRHVWLKQEEYVYALVA

SEQ ID NO: 391106 - protein, 370 aa, unidentified
MDVHTTNYTLCAMEPIIGEDDRVFATIKVTPDYKNILMFIENLKLKLGLNDEYDIQCGYEAGCLGYSLYNQLTAAGVKCVILAPTTMLTPQGVRIKTDMRDAYMIAQCLSYGGYHAVYIPTEDDDSVKEYLRMRNDHKLALKKIKQQINAFCIRYGFCYDGTKWTQAHLKWLKKLEITNGLYRETLNEYMASYEEQEAKIERYDKRIEEIAEQTKYHDKVKKLECFLGIKTHTALSLIVETGDFERFAKGNQYAAYLGLAPGENSSSDSIRRLGITKAGNSHLRQLLIEASGGICKGAVGHKSKELRARQNGNTADVIAYADKANTRLRSRYYKFIRHGKKRNVAVAAIARELACFVWGMMTDNIEMKVA

SEQ ID NO: 391107 - protein, 314 aa, unidentified
MLSPECFVGVDVSKAALDVAVRPAGVMWQMGNDKAGICELVRRLGQLEPVCIVLEATGGYERAAARALFKAGFPVAVVNPRHPRAYARATGRLAKTDRIDAQVLSQFGEVVRPRLLTSDNTAREELSGLEARRQQLREMVTAEENRLRTAQPNVARGIREHLDWLKKKAKQLDKEIEERMHSRQEWSMTEEILRSVPGVGPVLSAAIIAGLPELGCADRRQIAALVGVAPLNRDSGTLRGRRCVWGGRAPLRSVLYMATLAATRHNPVIGAHYRRLCAAGKPRKVALVACMRKLLTILNAMLRNRTPWRTSPVG

SEQ ID NO: 391108 - protein, 346 aa, unidentified
MTIVEDARAITGGVDTHADTHVAAALDSLGGLLGVREFPATAAGYAGLPGWLSGFGTVALVGIEGTGSYGAGLARYLAAAGIRVVEVDRPDRQDRRRAGKSDPLDAVSAARAALSGRAAGAPKGRDGQVEAIRALMVARRSARAGRTQAINQARALLVTGPGDLRARFARHAPAQLAGGLAALRPRPGDMPGYATRAALRELGRRAGFLEAQIARLDELIVPLVAGRAPGLLALPGVGPHTAALLLIAAGDHPGRLRSEAAWAHLCATAPIPASSGKLTRHRLNPGGDRQANHALWRIVITRMSSHPATRAYVARRTAEGLTKPEIIRCLKRYVARQVYPHLRGTC

SEQ ID NO: 391109 - protein, 358 aa, unidentified
MGKVSRVTSNRVCGLDLGDKTSFLCICSASGEVEESYRVKTSAAGLAVRLEGVEPMRIALEAGAQSPWVSRLLSQWGHDVVVANARKVRLIGNSRKKTDRIDAQSLADLVSVRPRLLHPIEHVSLQAQADRSVLRSRDALVRTRSGLISHARGLVKAMGGRLPSCSAESFAQKAAAAVPASLSCALEPILKVVAELTTTIRSYDRQIQQLATRYPLSQRLRQVSGVGPITSLAYLLALGEEPQRFVHSRQVGAYFGLVPAQRSSGDSKPQLRISKEGNPYVRRLLVQCAHYILGPFGQDSDLRRWGLGLIQQGGKGAKKRAAVAIARKLSVLLHRLLVTGQPYEALRRGDSGEVQKVA

SEQ ID NO: 391110 - protein, 415 aa, unidentified
MALKIVYQICCGIDVHKTFVVACIASTNKQGVTIYKRHRFSTFTQGLKELLQWLLDNHCKDVCMESTGKYWIPIYNVLEKDCNIVLAHPKYVKAIRGKKTDKKDAKWIADLFKHDLVAGSFMPPADIRQLRDLMRYRFKLTCFMSSEKNRLQNCLTVSNIQLASVVSDTFGKSSQRILDKILENPDDTSFDIEPLIHGSMKKKLPELELAIDGFITPEQAGKLKVIKKHFEDLESRKAELEKLILALASPYQQELDLILTAPSFKNKFTAIGIISEIGVNMEAFPSAKHLCSWAGLTPTNNESAGKKKSVRVSKAGCYIKPLLVQCANSVVKSEKHPEIRNRYLRLRKRRGHKKAIIAIARMLLTALYNMLKNKEPYNAELYRKSDALPVNREITIEQAILIAQFQGYKIKSAAE

SEQ ID NO: 391111 - protein, 339 aa, unidentified
MSHNVIGLDIAKSVFHLYTIQADGKILKKMLRRQQVLEFFANYPVSLIGIEACGSSHYWARELIALGHEVKLLNARHVKAFVKGNKNDFNDAEAIFDAVSRPNVRTIAIKTTEQQDIQLIHRIRQEAVKRRTALVNQIRGLLGERGIVIGQGIHQVRKHLPELLEDAENALTTLSRAAFAEQYERLLELDKEIKRYDQKMGELCKANELSKRLAEVPGVGPMTATIAAADLGEGQHYTNARHYSASLGIVPRQSSSGGKSVLLGISKRGNCYLRSLLIHGARAVLRTCHNKEDKLSLWLQKLIKRRGFNVAAVALANKNARILWALANKNEHYEMPVSA

SEQ ID NO: 391112 - protein, 406 aa, unidentified
MEHQNYVFVGVDTHKNQHTACVLSCFHQKMGLTQTPNNPASFESFIQDINLFKSPDKKLVFGLEDTQGLGHSLSQWLLDQGYTVKEVNPALTKRERHHSANPDKSDEIDAEAIASVLITDFNELPDAFYDANFKAIRQLNNQRQTFVKEQTKLKNRFHNLIHQQYPEYKKFFSDPFGKTAMAFYEKFPHPADLNYYAEDRLQKFLNDQVKSIGNDKAATILSLVDKNRKKTADAEARNTIIRDIIKHLRLLAKSLNKINQKLKSAVEKSQYQLTTMPGIGFKMAAMFISSIKNIDRFDSASKLARYAGLAPVEHSSGTSKRLNHKKYGCRDLNHAFYMLAFQQIGNNKNPASYSYYQKKLKEGKPKKIALICLQRRLVDIIYAMMRDRSAYKLPQNIGYEVLDKAG

SEQ ID NO: 391113 - protein, 326 aa, unidentified
MTQQFEHKTFSQPPDPSVLTNYLERNFPGATYHAVYEAGYSGFWIHDQLRGKGIDCIVVNPADIPTTDKERSGKNDKVDCRKLARCLRNGELKGIYVPTRIKIEDRSLLRTRRNMVKKHRCKNQIKSLLAFYGIHILPDIVHRNWSSKFIRWIEEIRMERASGNFVLKVHLHELEHLRGTITALNRNIRMLSRTDEYKTNVRLLRIVPGISTFTAMTFLTELCNIDQFQSLDKLASYVGLIPNTDSSGEKDTTTGITNRRNEFLRHLIIESSWIAVRKDPALLMAFERLSKNMPKTRAIIHITRKLLNRIRYVLKNQKEYVPAVIS

SEQ ID NO: 391114 - protein, 456 aa, unidentified
MTQKRSKPKIDRTMPMVHPNAAAIDVGATMHTAAVRADWTPEPVRSFGTFTTDLHRLVNWFKECGVETVVMESTSVYWIPIFELLDARGFSVFLVNARDAKHVPGRKTDVSDAQWLQRLHSYGLLRASFRPKGQIAELRAYVRQRERLLEYAASHIQHMQKALTEMNLQLHHVVADITGTTGMRIIRAILAGEHDPKVLARLRHYSCHSSIETIEKALTGSYRAEHLFALEQALTLYDAYHEKVSACDVRVEAVLKELSVRRGRQSGSLPSSHRRTDQANGLAFDARAALFSLLGKDITQIDGLGPYLSLKLIAECGDDLSAWPSAKHFTSWLCLAPSNKISGGKVLSSRTRRGSRAAALLRLAAVTVGRTDTALGAFYRRLSARIGKAKAVTATARKIAVLFYNAIRHGMEYVDPGSSFYETRYRKRVVDNLRRRAKSFGFVLQPFEPTPSVPVS

SEQ ID NO: 391115 - protein, 408 aa, unidentified
MTVFVGDDWAEAHHDVHLMNKAGDQLARRRLPEGLDGVAAFHAMVAEHATDPSEVVVGIETERGLWVQALVAAGYQVFAINPLSVSRYRDRHNVAGAKSDPGDAKVLADLVRTDRQNHRPVAGDSDEAGSVKVLARAHQNLVWDRTRHTNRLRNDLREFFPAALVAFDDLAHHDAVAVLTKAPNPADAARLSVAQIRSALKQGGRQRNLDTRAAEIQQALRSPQLAAPAAVTAAFAATTRTLVEVVAGLNQAIAELETELASAFEQHPDADIYLSLPGLGDVLGARVLGEFGDDPNRYADTKSRRNYAGTSPLTVASGKKRAVIARHIRNRRLYDAIDQWAFCSLQTSPGCRAFYDQRRAAGSLHHQALRALGNRLVGYLHGCLRTRTHYNEHTAWAHRQPTNHATAA

SEQ ID NO: 391116 - protein, 434 aa, unidentified
MRLMYPRCAAIDVHKRTAVVCPRQTERDGAVKSEVKTFGTTTPELLQMMDWLSGWEVTTVAIESTAEYWKPVFNLLEGEFEVILVNAKHVKQVPGRKTDVKDAEWLAELLSYGLLKASYIPAKPQRDLRDLTRHRVTLVQERVRIVNRLQKVLEHANIKLASVASDIMGVSGRQMLEAIVGGETDAAAMADLAKGRMRNKMEALEKALTGVVRPHHRFMIGEHLAHIDFLDEQIERVSEKIGQQIETMSQPSEPDEMPPGDESSLTWAESVELLDSAPGVDKKAAEIVLAEMGIDMTQFATADHLTAWAGLAPGNNQSGSKRHKAKTREGNRNLRQIMVQVAWAAVRTKGSYAQALYRRLAGRRGKKRAIIAVARTLLSSFWYMLTRGEAYKELGGDYFDQRRKDVKVNILTKQLEKLGYAVQLEPVKFQLAPA

SEQ ID NO: 391117 - protein, 377 aa, unidentified
MSKIRFVGLDVHADTIAVAVAEPGGDIHSLGIIPNRLESVRKMIGKLGPVAKLKCCYEAGPTGYVLYWQLSQLGVACEVIAPSLVPVKSGDRVKTDRRDAEKLARCYRAGELTAVWVPDAAHEALRDLVRAREAAKKDQLRHRHRLGKFLLRHGKRPTDAGEAWTKKYLNWIRIHARFDQPALDATVTHYLHEVEHVAEQIIKLEKAIDEAVAKAAPEVRAVIEALQALRGVAQTTAATVVCELGSLARFPSPSQLMGYSGLVPREYSSGSRVQRGAITKTGNAHLRRVLVESAWTYQHRPNVQGRVLRRQKALALSDEAKRIAWKAQGRLHKRFTQMAARGKERGKIVTALARELLGFMWAIAVHTEAQFKLTKAA

SEQ ID NO: 391118 - protein, 412 aa, unidentified
MRRVIGIDTHRTFGEVVIWEDGRLRHVGRVDMTRTALEGFGKKLLATDEVVIEATGNCMAVSRVLTPFVKRVVIANPLQVKAIAHAHVKTDKVDAGTLASLYAAGYLPEIWTPDAASERRRRLVARRYQVVRHRTRIKNEVHSILYAHLIPRCPHADLFGHLGRTWLTSQPLPDDERAAIERHLRELDRLGDDLRVLDQEIAQSALDDAAIKRLITITGVNLAVAAGLVAAIGDIGRFSSPQKLVSYFGLNPRVRQSGLGAAHHGRISKVGRSHARAMLVEAAWATAKAPGPLHAFFVRIRARRGHQIAAVAVARKLAVLCWHMLTKQTDYHWARPALIANKRRAMELQAGRPQKKGNKRGSTYAYNVKALRDQEMRLAQQAEQSYENLVAHWQPRPAKKQARGRLKPAGLE

SEQ ID NO: 391119 - protein, 350 aa, unidentified
MAMTTMTDSPRRITGGVDTHRDVHVVAALDEWGAELGVEFFATTPAGYRAALRWLEKFGKVGRIGVEGTGSYGAGLARFLAIKGVQVVEVSCPNRQRRRSHGKSDPVDAIAAAKAVLSGDAVVEPKTRDGNVEAIRALRTADRSARHARVKALNQMRALLLTGPQELREQFRGTTVYRLVRGAATLRLGDPTTAVGGTKYALRILAKRVLELEAELAELKAILRPLVAATAPELVARHGVGTFTAGALLVAAGDNPERLRDERAFAHFCGVSPIDASSGSVVRKRLNRGGDRHANEALWRIVMVRMVSDPATRHYVERRTKEGLSTLETMRCLKRYVARELYPFLAASVP

SEQ ID NO: 391120 - protein, 338 aa, unidentified
MNHVAIDLGGRESQVCARSEDGTILEQGKVATKSLPRLFKDWQPSTVILETSAEAFHLADAARSCGHEVRVVPATLVKQLGVGSRGVKNDRKDAQVLSQASCRIELPSVHIPSAESRHLKSLCGSREALIRCRTLVINNVRGWLRTQLIRIKTGATRTFPARLRQHATTHGIELPSHIERALVVIETITTQLREADEQLAQVAKESAVCLLLMSVPGVGPVTAVRFLAAIDDASRFRTAHGVQSYLGLTPGERSSSERTQNTGITKAGPSELRRTLIQASWVIRRHYPGEPMAQWAQQIEARRGKFIAVVALARKLAGILFAIWRDGTTYCSSRSAML

SEQ ID NO: 391121 - protein, 419 aa, unidentified
MNYVGFDWASRAHDVTVLDEAGGVLDRWAFPHSETGWVTTLDRLARHGSAAEVPVIIERTSGLIVDRLLAAGHPVVPVHPTAFYAARPRWGASGAKSDPGDSYKLADYLRTDGHRLRRLTPTDPGLHELQALVRLRDDQVRARTAATNQLTAILDTYWPGPKQLFMSLASQIALAFLTDYPTPTSAAHLGEARMAAFCRRHAYRGGKSPAELLSRLRAAPVAPVGLPPATLAAMVTAQVTLLKTLQTVISDVERLIAVRVVAHPRSNLFENLPGVGMINLAQLLAEVGPILDRADSAEQAATECGAAPVTRSSGQTRGVYFRWAANTRARKAITSFAHNARMQDDWAAALYADARARGKRNPHATRIVARAWLRVIWACWTSGQPYNPDRHHSSRFLHRCHPAGAQARSRWSPPPEERS

SEQ ID NO: 391122 - protein, 364 aa, unidentified
MTSMTTTSGPVTSGLMTGGVDTHGETHHAAVIDQVGRHLADREFPTTPAGYRALSRWLGSHGGVLQRVGVEGTGAYGAALTRHLRAEQISVVEVDRPDRRARRAKGKSDPLDAYAAARAALSGTAGGTPKLRVGQVEAIRALRVVRRSAVKGRTQTMNQLRALLLTGPAELREQLRSLSPTVLITTCARLRPTAELADPEQAVKAAVRRLARRHQQLTEEVRDADADLAPLVAAAGPRLLALQGVGVDVAGQLLSSAGDNPQRLHSEAAFAHLCGVAPIPASSGRTHRHRLNRGGDRAANNALHIIALSRLRYDPRTAAYVAKRTKDGLNKKEIIRCLKRYIAREIYTALQPAPAVTEALASAA

SEQ ID NO: 391123 - protein, 343 aa, unidentified
MQAITTIGLDIAKSVFQVHGVDTKGNVALRRQIKRRYVLAFFEKLPPCLVGIEACASAHHWSRELQALGHAVRLMPPAYVTPYVKRHKNDAIDAEAICEAVTRPNMRFVATKTREQQSCLTLHRTRHLLIRQQTAVINAIRAHLAEFGIVAPVGRNGVDQLLGIVADASDKRLPELARACVAALGAQLGTLKAQILQFDRLIMAWHRSNQASRRLDDIPGVGPVLATALVATVADARAFRSGRNFSAWIGLVPKQHSSGGKDRLGSISKRGDRYLRFLFVAGALAVIRYAKIHGTKHRPWLTALLARRHTKVAAIALANKIARMAWAIMAKGEHYKEPVALAA

SEQ ID NO: 391124 - protein, 348 aa, unidentified
MSITMIGLDTAKSVFQIHAVDVAGKPQLKRKLRREEVIPFFEQQERCTVVLEACGAGHHWARVLTQLGHEAKLLAPEAARPFVKKGKKNDAADAAALCTAGSRPEVTFVPVKSSEQQGVLALHSVRTLLVKQQTMLANAMRGLATEFGLVVAKGIHKLDELEAQVQAEASMPATAKQAFAELHGHSQAAATRIAGLEAQIVAHARQDATARRLATIPGIGPITASLITATVGDTIGSFKSARHFAAWLGLVPRQHSTGGKTRLGRITKAGNSEIRRLLVLGATSMVFRAAQWNSAAGAWLRGVLERRPVRLATVALANKMARIAWAVMTRGETYQAKGRAPAAAAAVA

SEQ ID NO: 391125 - protein, 363 aa, unidentified
MKEEKRRYVGIDLGKREYTMAIIGKNGKMNIHHGKTNAQGRQALCQKLEKEDKVALEAGNLAFITAQEITEKKGCEVRVLNSAKLPFIWDAPTKTDKEDAMKLARLVEERRDEKLPIVPLPSEKELARRKTISSYGREMRNRTRHLNTLHAIFVHQGHTAVVKKNIATAERRKEAVGILAGAEREEAEWLLKYLDLHERRIKELKEKMQKDAKEDEDMKILQTIPGVGPVVAYAFAAYVGDGSRFSKGAQVSNYIGFVPRLDYSGTIQRNGHITKRGNSCLRGLLVQAAWSAVRSKKGGALRMRYSYYTLCHGASKKKTVVSIARKLTEHMYSVLRSGTAYELRRWKGPQNDVIDITNLKNNA

SEQ ID NO: 391126 - protein, 345 aa, unidentified
MQTVTTIGLDIAKSVFQVHGVDAQGKVMVRRQLKRRYVLAFFQKLPPCLIGIEACASSHYWSRELQALGHTVRLMPPAYVKPYVKRQKNDCADAEAICEAVTRASMRFVATKTVEQQSCLMLHRIRHLLIRQQTAVINAIRAHFAEFGIVAPVGRTGVEELLKVASDGNDKRLPDVARVCIAALGAQLQMLKARILEFDRLIMAWHRSNQVSKRLDEVPGVGPALATALVGSIADPKAFRSGRDFSAWIGLVPKQHSSGGRERLGGISKQGDRYLRSLFVAGALAVIRYANKRGSKHRPWLAALLARKPTKVAAIALANKIARMAWAMMAKGERYKQPVALAAAW

SEQ ID NO: 391127 - protein, 354 aa, unidentified
MKRRTKYVGLDVHQAMTVASVREEGGRVVARTVVATEEAALVEYFSGMRGAVHVAFEEGTQAQWMHDLLMPVVDRVVVCDRRGESRRGNKGDQVDADQLSELLRRGGLRAVYHGSADRATLKEFTRTYQNVVEDTTRAMLRLKALFRARGIKTPGKRVYHPKQRAQWLAKLPERGARFRAEALYAQLDVLRELRPKAKAAMVAEARRDPAWSVLRSIPFLGPVRVALLMATMRTPWRFRSKRNLWGYCGLAVVTSSTSDFTLVEGRPVRRRRKPLTRGLNRNHNPVLKDVFKGAATAATGRPGPLQEFYHAMIARGMEPELARVTLTRKLAAVTLRLWKTGERYDPTMLTVQAR

SEQ ID NO: 391128 - protein, 401 aa, unidentified
MNSVGIDVSKGKSTVAVMRPFGEVVAVPFEVNHTADELREFAVYLKSLLGETRVVMEYTGRYFEPIARSLCEAGLFVTVVHAMLMHNYGKNSIRRVKTDKADALKIAGYGLDNWAKLTPYALEDEVRSLLKNYNRQYNYYIRLKVMLKNNLIASLDQTFPGANQLFSSKPRKDGHEKWIDFAAAFWHCGCVSGGSEHAFKTRYAKWCAKAGYNYSASKAESIYAKARSLVPTLPKSDSVKNLVTLAVTQLNAINETTTATHKEMLRLAAMLPEYGVVMAMRGVGVVLGPQLMAEIGDVRRFAHKRSLIAFAGIDAPPFQSGAFESQSRRISKRGSPALRKTLFQVMDVILKTAPEDNDVFQYLDKKRTEGKHYYVYMMAGANKFLRIYYARVKEHLGALDA

SEQ ID NO: 391129 - protein, 347 aa, unidentified
MTIVGNPDAVVGGADTHADVHVAAVVNHLGGVLGVESFTTTSHGYRQLVSWLRSHGELVLVGVEGTGSYGVGVSRYLQREGVTVVEVDRPNRQTRHRKGKSDPVDALAAARAALSGAATGSPKARNGNVEAIRVLMIARRTAVDTRIETLNQLRHVVFTATPEIRAKFSGLSAIALVNKAAALPPREEEDQVRYTTLVTIRALGHRVQYLREETRRLNRILRPLIRQTAPTLLEVYGVGYDTAAKLLVAAGDNPERIRTEGAWANLCGTAPIPASSGKTKRHRLNRGGNRQANSALYHIVITRMRHDQKTRDDVARRLSEGKTMGKIARILKRYAAREVFSHLPRPA

SEQ ID NO: 391130 - protein, 248 aa, unidentified
MILEDNLSTTPKGVQQAFRKIPRSRIALETGTYSPWVSRQLSEMGHEVIVAHARNVRLIGESSRKDDRLDARTLARLARIDPGLLGPVRHRSAKAQIHLTVIRARAALVSTRTALVNAARGLTKSYGERLRKCDTEQMNREIAKGLSQELRDALDPLLGEIESLNERIAEYDRRIEQIAKEVHPEVAWLKQVKGVGTLIALTYVLTLDDPHRFRRSRDAGCFLGLRPGRRNSGQSEPQLHISRKATAT

SEQ ID NO: 391131 - protein, 338 aa, unidentified
MNIVFLGIDLAKSVFQLCGVNQAGKPVYTKRTGRKELLQTLANIPACLIGIEVSTGAFYWQREFEKLGHKVKVISPQYVKPFVRGQKNDGNDAQAIAVALMQPTMQFVPPKSPEQQDIQALHRARQRIVNHRTATVCQIRGLLLDRGIPIGSAVSRAHRAIPLILEDAENGLSSRMRRTIAELYDLFNDLGCRIHFFDKEIETVFRQSEACQRIAKVKGIGPKTATAVVAAIGKGTEFKNGRHFAAWPGLVPRQHSSGDRQVLMNMTKKGDRHLRTLFIHGARAVVRVATNNNDGHMNQWVNQLKERRGFNKTTVAVANKNARIIWSMLRNDTGYQVV

SEQ ID NO: 391132 - protein, 421 aa, unidentified
MDFEVKHLICAGLDVHKKTIVAAVCMTDPVTLEAAYKVKSFSTNNSQIAAMRDWLLSYNCHDVYMESTGKYWIPVFNILETHMHVVLTHPKYVKAIKGKKTDKRDAKWIANLFRFDIVKASFIPPADIRALRELSYMRSAEKNRFQNSMTISRIRIDCVLTDPFGKTASSIMDYLLSDVPFDETECAKLIHGRVKASNEEIFDSIRGFEILSEQRFKMSHAKQHMELLSSYMDDIETELFRLSRSYDEVIKRISGIVGFTERSALFVISEIGADMGVFESAKHLCSWAGLTPANNESANKKKSTRYSKAGQYLKPLLIQCALAAVKSKKNPCYAIKYKRLAKRRGRKKAVIAIARMMLTSIYHMILNNEEWKPDDYEAIIHPSKPVKVALTLDNVIQFLGEQGADPETLKLLQQQCAVTPG

SEQ ID NO: 391133 - protein, 485 aa, unidentified
MSALEASSLGRCATSLAIDEHSDEDGKGEAVSLWCGIDWAENHHDVSVVDETGSQRVRVRIEDTAAGFARLMRLLAEQNAISEQPITVAIETAKGLLPAALRAAGVPLIAINPLAVSRYRDRHSPSRAKSDAGDAFVLANILRTDPHAHRPLPVDSELAQSIHVLARAHEDAIWDRMQIANKLRSVLREYYPTFLGAFTELASREARAVLHLAPAPAQGQLVRRPSLTAALRRAGRTRGIPAAVDQIHTALHQDQLRQPPRVEAAMTHRATALLHALDTAVANVARLEAVLAEAFEQHPDAEIITSFPGLSTVLGARILAEIGDDRTRFASTRGLKAFAGTAPITRASGMKTLVTRRVVRNKRLGQAAYLWALPMIAHSPGAHAHFTARRDHGDSYSAAARNLTNRALGMLHHCLQTRQHYDENKAFPNRHNQPVTSDKPSAGKAYQEAEAQPTPTARTPTCPQPAASIAPPASQAHRKIEAQPA

SEQ ID NO: 391134 - protein, 337 aa, unidentified
MERQTQYVGIDLHRRRSVIVRRNQAGETLDTVRIDNDPVALAAELAKAGEHPEVILEATYGWYWAADVIQECGGTVHLAHPLGNNWGNRRVKNDERDATDLVDLLRLGRLAEAWVAPPPLRELREIIRYRGKLVHLRTSLKSQIHAVLAKEGVTVSMTDLFGMGGQVLLDKVHLANAYRVRVESLRDLIDQVNREIAMLEEQTAPYFAGDLGYHAVQSIPGVGPVLAAIFVAEIGDISRFTSARHLSSWAGLTPTHKESDVTVRRGHITKQGSRLVRWAAVEAVAHQRTDGPIRRHHRNVGERRGTQIGRVAAARKLLILIYYGLRDGEIRCLAQTG

SEQ ID NO: 391135 - protein, 333 aa, unidentified
MITIGIDPHKSSLTAVALDPSGHQVGQVGLAVTKNLEHQLLSWAQAWPDRQWGVEGASGLGRGVAQLLAAADQQVLDVPAKLAARARLLGAGSARKTDATDAAYVGAVTQRNERLRPVQAENHTVVLRLLSDRRDDLVAERTRSLNRLHVLLRDLHPGGAKRDLSTLQAAALLRLIRPLTAVDEQRKALARDLLADLRRLDTAIRTSTTALAAVLNTAGSTLTEVHGLGPVLAAKIVAHSGDVTRFPSRHHYASYCGTAPIEASSGDLRRHRLSRAGNRQLNAAVHVVAVCQAAHPGPGRDHYRRKLAEAKTPAEARRSLKRQLSNVIYKRRR

SEQ ID NO: 391136 - protein, 400 aa, unidentified
MYYIGIDWADQHHDIAIADQSGKYLKQFSIPHNRTGFEKLKEELLKLTSNPEELVIGIETKHGLLISFLLESGFSVYPLNPKVVDNRRKASGAKSDPIDARLITDIVRTDIHKLHRLKQDSELIQELKILTRDQDMLIAEATRITNRLIACLKAYYPAALNFFSDLKRPIARAFLKNYPTVKLVCETEISDLAAFLKAHKHPKPNQTAITIWQHANIPQMSASAAVERAKSRLMISLLIQLEPLLKEIENYDDEIHRLFQSHSDSVIFTSLPKAAQRLAPRMLAEWGDDRDRYQDAKVVQALAGTSPVLHQSGKYRYARQRKSCVKQFRRVMQLFAFQSLSIPWARSYYDNQRIKGKSHHEALRALANVWVRIIFAMWLNKTTYDESTFLAAQAKHAKVA

SEQ ID NO: 391137 - protein, 343 aa, unidentified
MAYFAGLDVSVKETSICIVDDTGKIVREARVASEPEALLQVLTNTIYRFKRIGLEAGPLSQWLYSVLAEAGLPVICVETRHMRAMLKAQINKTDRNDARGIAQMMRVGLYRAVHVKTLRSQKLRVLLTHRKLLQSKTIAIENDLRATLRNFGLKVGMVGTVKFEVRIRELVENLPDLAVLVEPLLIVRRVVREQLGILHRRLLAIVRDDDVCRRLMTIPGVGPVVALTYRVTVDVPARFRNSKAVGAVFGLTPAKYQSGENDRTGAISRCGDEMMRMMLYEAAQSMLVRSAKWSWLKAWAMKVARHRGMKKAIVALARRLAVIMHRVWVDGTEFRWTREVAAA

SEQ ID NO: 391138 - protein, 340 aa, unidentified
MTIIIGIDPHKATHTAVAIGSDESELATVTIRATRQQTDKLLSWAEPFEERTWAIESAGGLGYLLAQQLVGAGEQVLDVPATLASRVRVLGSGRSNKNDPNDARSVAIAALRSPGLRAVSIADHAEVLRLLAKRNGDIGDHRTQVVCRLHALIAALEAGGIAKELNASDANGLLGTFEPSSPAEHTRHQLALELLADVRHLDGQLAESKQRIKVAVSASGTSLTEVFGIGPVLAYSLIGYTGDVCRFKSRDQFAAYNGTAPIEVSSGGRVAHRLSRRGNRNINHAIHMVAICQIRHTHSEGRAYFDRKVAEGKTKREAIRSLKRQISNTVYRHLVLDAAK

SEQ ID NO: 391139 - protein, 403 aa, unidentified
MFYCGIDIAKYKHETTVIDEAGAALLDSISFANSKEGCEKLLALFQRLDISQEDLLIGMEATGHYWLSVYGYLLEQGFEVKVINPIQSEAFRKMYIRQTKNDRKDSFIIAQIMRFGQFSATNLAEEAIVAMRQLRRNRLALVDACGDCKRRIIALLDQVFPEYDALFSDTFGVTSKEVLSRYPTPEDLLSVSTKKLSNLLEKASHGRFGREKAEQLKAAAASSFGVCFAKDAFAFQIRQLIEQLEFLEGQITELEEQISSLLKQTGSYITTIPGIGDTLGAIILGEIGDIHRFDAPGKLVAFAGLDVRVTQSGEFTGTRQKISKRGSPYLRRAIWLAASRAAFCDPILSEYYQSLRARGKHHLTAIGAVSRKLCNTIYSILKEERPWQPTPPRDKKVTNYTEQ

SEQ ID NO: 391140 - protein, 341 aa, unidentified
MKITTIGIDLAKNVFQVHGVDAHGQAVLRKPLKRAQFALFFSNLPPCLIGMEACGSAHHWARKLQTFGHTVKLMAPQFVKPYVKTNKSDSADAEAICEAVSRPNMRFVAIKTLEQQAVLSLHRARQGFVKARTAQANQIRGLLAEYGLVIPKGISHVTQQVPRILEDAENELPSVFRQLIARLLDHFRELHRQVAELEIPIKDWHRNSEASRKIAAIPGIGPLTASALVASIGDAKTFKNGRQLSAWLGLVPRQHSTGGKPTLLGISKRGDVYLRTLLIHGARSVILGAQRRSISTGWLAELLQRRHPNVAAAALANKNARVVWALLAHDREYQPAYARAA

SEQ ID NO: 391141 - protein, 406 aa, unidentified
MNKLFVGIDVSTQNNVSYLMESDGTKYSSFSVQNNLGGAKLLTEKIVSAMETLKLSDVVIGMESTSIYGNHLVHSLREDGTLGRYQRKIHVLNPKQVNRFKESYPDLPKNDWVDAFVIADCLRFGRIRSEVYMDDYRYEALKTLTRARFYAVQNLAREKQRFANLLFLKCSGLAQSTDIKNTSSTVLSLMEEYETVDDLANADLEDLTAFVTAAGRGRFADPENTAKTLQAAARGSYRLPKTINDSVNQAMSVSIATMRSMKEQIKALEKAIEQQFEIIPNTLTSIPGIGKVYSAGIIAEIGDINRFQSQASVAKYAGLVWTQHQSGNFEAENTRMIKSGNRFLRYYLLEAANSVRGCDPEFQRYYDLKYHEVNRGQHKRALALTARKLVRLVFRLLKDNRLYNRW

SEQ ID NO: 391142 - protein, 343 aa, unidentified
MQISTIGVDLAKHVFQVHGVDGQGKIVLVRQLRRQQMMEFFSKLPSCLVGMEACATAHHWARELMKLGHSVRLIPPSYVKAYVKRSKNDAADAAAICEAVTRPSMRFVPIKTAEQQATLTVHRTRDLLISQRTQLINALRAHLAELGLVANQGRDGVTKLVAIVTAENNLPALPAMMREALQGVVAQLASLQQQIRELERCIHAQHRASDVSRRLESIPGIGVIGATAIAATITDPDVFKSGRDLAAWIGLVPRQSSTGGKERLGGISKQGDRYLRRLLVVGATAIVQHARRHPNKHPWIAKLLAKKPAKLVAIAVANKTARIAWAIMNKGGIYRAPALAAAA

SEQ ID NO: 391143 - protein, 370 aa, unidentified
MKEYSEAFIGFDTAKKKHAVAIADVGREGEIRYLGEIDSSPLTIERMIRKLAGRYEKLHFCYEAGPTGYGLYRQVRGLGHDCTVVAPSLIPKKSGERVKTNRRDAVTLARLFRAGELTSVWVPDTVHEAVRDLVRARETASQDLRRKRQQLLSFLLRHGRIFSGRQHWSRAHLRWLAQQKFDHPAQQIVFQDAVDAIDDAAARLRRLDEQVAAIVPSWSMAPVVEAYQAMRGVSFVVAVTFVAEIGDLRRFDNPRQLMAFLGLVPSERSTGERVRRAGLTLAGNKRARRVLIEGAWSYRYPARVSQTLQARLEGLPKAVREIAWKAQIRLCARYRRLNATGKKLPVVIAAIAREMAAFLWAIARHVAPAA

SEQ ID NO: 391144 - protein, 473 aa, unidentified
MVKSTNSIHQHINGNKGNIFLSQLRSKNLENVMVIPLEIGKSYHKALIANYFGSLLKDPFEFHNSREGIRFLHHAITDISKHQSVEQVVIGMEATGHYFKMPAAMLHEIGYNNLFILNPLSTSYCRKAGLTWAKTDDEDLRAVGQALICGYGNPYQPEKPLWEDLKEACRHRRFLIEYQTRLKNKTHSKLDLLLPGITELAMFSANHLWSPASLEFFLKYPDLESIRQLTPKSIIKFFQGKARRISPEMASQLIQWSKNALDPHSQATDCRKFTFKSLIEQLRKLSQDISQIEVKLTGYLVQIPAVLLLSIDYIGPIRASEFAGEISPLEQYPESGALIKAAGLDSTRYQSSTLESSKRPTSKKGSRRLRYITIEIADSLMRHNQHFAYLSKKLLERGKSKGCACVATGARFIRTAFWMIKEQKPFQPSDGLGISEEPLAKITAFLQAHHASDLNDEYLSYAQKYFTKGKKPM

SEQ ID NO: 391145 - protein, 337 aa, unidentified
MNPTVPLFVGLDYSQHKVQVCALDPTGKVLFNRAVPDDADAIDQAVRRLGVVHGAALEACTGAADLAEQLTDRFGWPMHLGHPGFVSRMKQSPDKSDFSDARVLADLERVGYLPRVWIAPKHLRELRTLVRDRQQLVAQRRNLKLAITALLREHRQRCSHTRWTVAWRRWLEHEAQLPEQARWVMSQRLRRLEWLVAEVHAVERRLDEVTKDDRTVRWLRTIKGLGPVTAWTVRAEIGPFNRFRTGKQLARYCGLTPCNRSSGDKEADAGLIRAANPELRRVFVEAAWCLIRCQPRWRQLAQRLRAQGKPSTVVTAAVANRFVRWLYHEGVRQQAAA

SEQ ID NO: 391146 - protein, 343 aa, unidentified
MDYFAGLDVSVKDTNVCIVDDMGKIIREVKVASEPDALLQVLRNATYRFKRIGLEAGPLSQWLFSALGEANLPVICVETRHMRAVLQAQINKTDRNDARGIAQMMRVGLYRPVHVKTLRSQKLRMLLTHRKLLQSKAIAIENDLRGTLRNFGLKVGMAGATKFEGRIKELIENLPDLAVLVEPLLVVRRVLREQIGVLHRRLLAVVRDDDVCRRLMTTPGVGPVVALTYRATVDVPARFRKSKSVGAVFGLTCSKYQSGEIDRNGRISRCGDEMMRVMLYEAAQSMLRSKKWSWLKAWAMQIARRRGMKKAIVALARRLAVIMHRIWVDGTEFRWTREATAAA

SEQ ID NO: 391147 - protein, 429 aa, unidentified
MNCTQNKKIAQVKETTMIVGIDVGSEKHYFRAFNWRGIELTQKPVSFSNSMEGYNSFFNTITELMQKNNLEEAMGGIEPTGHYWFDLGQFMNGKNIRFVMVNPHHVHKTKELDDNSPSKNDRKDPRVIAGLVRDGRYFYSYMPTGVYAELRNASNRRFVLVEEQTRAKNRLQKWIAVYFPEFKGIYTHIDAKGGLLVLKNAPTPEEIVKLGVDGIIQIWKTKKLRGNGRKKAMQIVNAAINSIGLKEGLTEARMEIQDLLEDYELQVKRLERVNDLIKELCFQIRYVDKLLEIKGIGITTVAGFIAEVGDITRFDDTKELQKLAGLELVADSSGKHNGKTKISKRGRKRLRYLLFEAAISVVGKNEEFRKIHEYYTTRAKNPLKKMQSLIAVACKLIRVFHVILTKGVSYDASKMLGDIKRPGTQLKAA

SEQ ID NO: 391148 - protein, 427 aa, unidentified
MSEEKAVELRVSVDVGYRRHSVAMGLSSGEVLEEFEIDHRPEGFQEFFSRIEKHQKAKNCAVAVAMEGYNGHARPLDSLVRQRGYRLYNINNLKLARFKEIFPGAAKSDRIDARRGLELFQLSDHLPLAKEVLQEVKGTPKGNEVLKRLTRRRRRLVNERVRVVNNLQADLQAVCPGLLEITTEAGNQWFLNFLLSADSVAQLARLRKSTLLKIPAVGRKYASLIQNWQKRAHFSEEAAWVSEMIQEDAKRCLELEEKIKTLEIKIAQVAKGSQIAKILLSIPGFGPVCTSELAGEIGTVERFSKEASFALYLGMSTLDNSSGQYQGTKAPKHVNARAKAAMMIALDRHRKYVPESQRYYEKKRGEGKKHNQAIRALGRHLCRIIYKMLKEEREYEIRLEKGNTKTKVNPRSCVKTKIRRSKISRRG

SEQ ID NO: 391149 - protein, 315 aa, unidentified
MSDAPCFVGIDVAKAQLDIALRPSGERWAVANDASGVATLVDRVQTLHPTLIVREATGGLERAVTSALAAASLPVVVVNPRQARDFARATGQLAQTDALDARALAHFADVIRPTPRPLPDVQTQELRALLGRRQQLIVMRTAEQNRLAGTSERLAKAIVAHITWLNADIATLDNDLETTLRASPLWRENDDLLQSAKGIGPVCARTLLLELPELGTLTRQQIAALVGVAPLNGDSGTLRGRRTIWGGRAHVRTVLYMGTLVATRYNPQIKAFYERLLAAGKVKKVALTACMRKFLIILNAMLKHRTPWHAQEVEG

SEQ ID NO: 391150 - protein, 420 aa, unidentified
MQVTRGMRRRSEKMARRRDRLPADALIAGVDLAKKESVVVFVRASDRARVGRLRVSSDRAGTERLVARGRELVAEQGSGPLVIAADGAGVGYVLVQGFVVARARELDDLTRDKTDARDAALIADLAAELRFTETRLPEGAWAELDLLVAARDARRIERAASLQEVRALLELAWPGLLSACPALAGTHLQALLRTGITPQAMAALSPRRFTALLRRHHPRRFLRWMAGRLHAAARDVAALPETPAAALRWRLAAERVALADIAIAELDARMIELIEASGYGWLRGQIRGLGDATLAALLALTGDPTRYDDARCLVKLAGSNPTERSSGEREAAGGIHRRGRPVLRYVAYHAAVTLVRHEPEFQRRYAELTDPERTNRLEPKQAYVALANKLLRTLWSMAVSGRGYEPAIARGEVRPLPRAA

SEQ ID NO: 391151 - protein, 421 aa, unidentified
MKNSAANKLKQVPKGYVVVGVDPHKKRHAGVVMTQDFTIHSKLKFNNSKEGFEMVLARARTEMLKTDCHGVIFAIETGGHYWRNLAYFLDERGVPFRFINQLTLKRRREGKDLNRRKNDYRDSEVAAQLLCTGEFTESRIPQGVYAELRAAHNAYRRLVKERTRITNLVKGLLDALFPEFTQVFKDPCGLTALSVLSTCPIPSVIAEMAEEEFVATIEAKHQGRLMRRKLRALYCLATTSIGIDAGAWSVSSGISFLVEKLELIRRQTRIIERTLVRLVDETEEGKYLLSVRGLNYIAVGGLLAELGCFKSYRSAKQMIKMAGSNPTESESAGKRRTHTPMSKQGRPVLRYCAWTSVIPMLRLNSDFRAWAKRMRERPTHAHPLNGREIVGASLNRLLRLAFALVKNHSLYRVPQLVQISC

SEQ ID NO: 391152 - protein, 429 aa, unidentified
MRTESTPGARGPVFCGVDTHADSHWLCVLDWRGRRVLSRRFPADAAGYEALAGAIAAAGEPACIAMEGTSSYGAGLTRHLASLGMPVREALSPAGTQRRRPGQGKCDEADAERAARAAMSGSKLGTPKSQDGWVDGVRCMLAARSGAVKARTSAINTARSLLTTAPEGLRSRFRGMAGPRLMEELPSVRAEGALGAALGALADLWAAARDAALDMERAIEASLEENCPALLAMYGCGPVSAAKLAVAAGDNPGRLRSEASFAAICGACPIPASSGKTVRHRLNRGGDRQANSALHEIARQRVMRDPETAEYAERARARGKSDREVMRCLKRYVAREAYRALMRPHEVRRPEDASGLVAARRAARVSQVRAASILGTSEKYISMLERGQRELKPIRRAYEAWVEAGLPLDWDRQAFEAERKMDSKKHLAK

SEQ ID NO: 391153 - protein, 314 aa, unidentified
MDKPAVWVGVDVSKAELVVAVRPSGEQFSLANDGRAVRSLIKRLEPLNCARIVVEATGGYETLLVASLQAAALPVVLVNPRWVRSFARGLGQLAKTDHIDARVLALYAERAELKVRALPDEQTRELRAMCARRDDLLDMIVAEQNRLEHAPKRLLREIRSHVDYLRKRLKHLDRDIANAVRGSELWRQKNELLNSVPGVGPVLRASLLAWLPELGTLNRQEAAALVGVAPFNRDSGLMHGRRTVSGGRAPLRRVLYCATSAAIIWNPLLRAYYEHLIGNGKLHKVALVATMRRLLLILNAIIKSNTPWKSPRPA

SEQ ID NO: 391154 - protein, 320 aa, unidentified
MMAQNEVIVVGIDVAKDKVDACIRSLSLRQTCPSTAQGHRKLMAWLRKHKVTKAVMEASGGYERAWAKVLREAGIEVRIVDPRRVRSFAQSAGRLAKNDAIDAEMIAWFAETFSEAPSQVHDAAREELQILVKARLGLIDYRMRLVSQSEHAAPGLVQKAHAHILKSLASEIAKLEAAICAKVRSTPDFAERAEIIESVPGLAGTSAANLVAGMPELGQVSDGIAAALIGAAPYDDDSGKRRGERHIKGGRRWVRNALYMPCVGAATQNNPVLKAYYQHLLAKGKEPKVALIACMRKLIVILNTMIARRQKWDSSRDAVS

SEQ ID NO: 391155 - protein, 324 aa, unidentified
MRFYNTQHPFYCGIDLHARAMYVCILNQAGETLLHRNMQTTPEAFLTVIAPYRPDIVVAVECMFTWYWLADLCADEEIPFVLGHALSMKAIHGGKAKNDKIDSQKIAVLLRGGMLPQAYVYPAEMRATRDLLRRRMHLAHKRGELLAHVQNTNSQYNLPAIGKNIAYKANRDGVAERFADPAVQKSIEVDLALISYYDELLRDVELTIVKTAKQHDANTLYRLQTVPGIGKILSLVLLYEIHHIDRFPRVQEFASYCRLVKCAKESNGKRSGTSGAKIGNAHLKWAFSEAAVLFLRDNPAGQKFLARLEKKHDKGKALTILAHK

SEQ ID NO: 391156 - protein, 351 aa, unidentified
MLLIGVDYHPSFQQVAFSDQETGECDELRLNHSDGEAERFYRDLKSRGISVRVGMEATGYSRWFERLLAELGFELWIGDPAEIKAKRVKKQKYDREDARLLLRLMRENNFPQIWVPSAENRDLRQLLWHRHRLVQMRTRIMSQLQALAMNENKCWKKKLWSDRGRAEFEKLPLGFWASRRRQELLELLDRMNPKIEELTAAVEQEAKKRPDALRLMTHPGVGPLTALAYVLIIGTPARFSRGKQVGAYVGIIPSEDSSGGRQRLGHISKQGSSLLRFLLVEAAQAAARSHPEWRRRYIRLAMRRHKSIAKVAMGRRLAVQLYWMWRNGCEYSQSVKCGSYVGQLGSGHGVK

SEQ ID NO: 391157 - protein, 321 aa, unidentified
MSVSSLTVVGIDVAKAHVDVAVLGAEFGVRRFENEAQAHSALAAELQPLRVALVVMEATGGHEAALACALQAAGFAVAVVNPRQARDFAKSMGRLAKTDRMDARMLAEYASVLVRRDDLASFIRPLADAQQQAMAAMVTRRRQLLGMLLAERQRMSLAMPVVRPSIQAMIDAIRQQLDDVEAQMVGHVKAHYGELDKLLRSTSGIGPIASATLIAELPELGKLNRREVAALVGVAPMANDSGNTKGRRRIQGGRFEVRRVLYMAALTAARHNPVIKNFYERLLAAGKQQKVALVACMRKLLTVLNAMVRTNKPWDESLHGA

SEQ ID NO: 391158 - protein, 410 aa, unidentified
MIEAVVERCAGIDVGKKFVLVCVMTGAAKDEPQTKIKKFGTIVSELERLAAWLVDEGCTHAVMESTGSYWKPIFNLLESHVRVILANAADVQNRRGHKTDPNDSRWLAHLLRHGMIRPSFIPPLPIRELRDLTRRRRQLIGENSRERNRVQKVLEDANVKLGDVLSNVFCVSGRLMLQALLDGELSPDQIAELAKKKARVKIPQIAASIAGHRLTDHQRFLIRHAQRHLQFLDEEVEALNQEIRRRMADPALGEAFLLLQSIPGIKEESAASILAEVGADMQQFPTSAQLSSWAGLCPANHESAGVKKSVRTNRGNVWLKTTLTQSAWAATNRKGSRLQSRYYALKARCGNKRAIVALGHTLLNTVYSVLSSGRPYQETPIGEEAERQEQRARHHLRCLRKLGYPTLAGE

SEQ ID NO: 391159 - protein, 361 aa, unidentified
MAGTMTWVGLDVHARSTHAAAIDTMTAELTRTRFGPGTDAPVAWLQALPGPVRACYEAGPTGFGLYRAATAVGIAMQVIAPGKTPRGPSDRVKTDRKDAELLARLLLAGSLTRVVVPPPEVEAAREMTRAHDACRRDLMNARHRVSKLLLRHGRVYPKSTTWTAEHRRWLSAQQFDEPASSLVFADLVAAVDGLTSRKQAIALRLSELATDERWWPTVARLRAFRGIDTLTALSLHLELGADWKRFETAPALSAWLGLTPSLNQSGESSRQGSITKTGSMLARRLLVESAWHYSRQPRLGATLANRQAGQPDHILAISNRAQQRLHRVNRTMRARGKPHNVTVVACARQLACFLWAAATAD

SEQ ID NO: 391160 - protein, 425 aa, unidentified
MFQREAHVYVGIDIHKRSNVAVMVDCFGEAMGRATKFDNTPAAYPEWLEKVKQRAGGKGIIFGLEDCHGLGRPLALFLLEQGQVVKFVNAYSTKKTRDSINKSDALDALAVAKVTAEKNLRLPEADMDPLQWALLSTVAFRKGLVQEVNRTKNRLHYLLLNNWPEYDKFFSEPFDSKTALAFWTRFPSQYRLAGVGLSELTAFLREESHYAMGEKKAAAILAAVDGSKEPAYQFQQDTLIRSSVEVLRSLQQQLADVEEQLGRLLAETDYRLTHVPGVDVITAAELVALVGDVTRFRNVDKFMAYTGIAPTTQGTGETETRYRSQYGRRELNALFYRIATTQLVVHAKTGEPRNPEAKAYYDRLLGAEAALPAKQRNRKVVKKAILSLMRQQAKPFYKLMKQQKCEAMARRAGAVTEPAGAPTAA

SEQ ID NO: 391161 - protein, 376 aa, unidentified
MEKSTKVFVGMDVHKESIDITVAEPGGAVRRLGQIGGDRGSLLKMVRKQQSQGGERVFVYEAGPCGFWIYREITALGERCMVVSPALIPKRAGDHVKTDRRDSERLASLARAGELAAIHVPDIRDEAIRDLVRGRDDAVVAQRRVRQQLKALLLRNDIRYVGRTSWTGAHRRWLSELKLPEPAQQITFEEYVDAIAVATGRIERLTRAIETEVITWRFAPVVAALQAMRGIQFVHAVTLIAELGDLTRFASARQLMGYLGLVPRENSSGEHRRQGSITKAGNSYARRALIEAAWAYRHPANGPAQGRLRHRLACAVALVGQVPAPERPAPQSQQDRGRPRARALGLRLGHRPVRQAPGELNAPRSRIGKRPFPSTR

SEQ ID NO: 391162 - protein, 341 aa, unidentified
MGQASTIGLDIAKWVFQAHGADATGRVVFRKRLVRAKVLEFFAGQPPCLVALEACGGAHYWARGLGKLGHTVRLIPPAYVKPFVKRQKNDVADAEAICEAAQRPGMRFVPVKDEAQQANTVVFRARDLLVRQRTQCINALRGHLAEYGHVVPQGPAHVDSLVALVEDPKSSVPESARGILQVLIRMLNALEEQLKELDGEIARRAKTDPVARRLMTIPGIGPIAATAITALVPAPEGFRAGRDFAAWLGLTPLQKSTGGKRKLGAISKRGERTIRRLLILGASAVVRWASRRGAAAGSWLARMLARKPRMLVTTALANKMARIVWALLVKGGTYRAPAVAA

SEQ ID NO: 391163 - protein, 429 aa, unidentified
MNYNTQNAKIASITEKTLIVGIDVGSETHYARAFNWRNYEYSKKPFAFSNDEIGFAAFKEWVNDIAEKHGMEVIIPGMEPTGHYWLNLGAYLQEQGMKPVHVNPHHVKKSKELDDNNPSKNDRKDPKTIASLVNEGRFSYPYIPTGIYAEIRNLSNLRIQTQEEITRVKNRMARWFSIYFPEIKDVYRNPDAVSGLMVIKQAPLPCDIRELGVEGVNKIWRDARLKGAGIKRATTLVTAAEHSIGNTEAPRSARKEIRNLLNDYEIYKNRMDELMEEIEKTLSEIPYIDKLMEITGIGIKTVSCFIAEVGDIGRFDNPKQVQKLAGYAIVADSSGKHNGESRISHRGRKRLRYTLYEAAISVIGKNKEFKEIHSYYRTREKNPLKKMQSVIAVACKLIRIFYMILTKGADYDGRKMLNDIVRPEIQPAA

SEQ ID NO: 391164 - protein, 427 aa, unidentified
MTSTPPPLAFAATIGLDWADKKHDLWIQAAAGGKPEHLVIPQTPEALHEWVAQVRARFVNERIAIAIETSRGAVISALGAYDFIVLFPINPGMLCSYREAFCVSGAKDDRTDAMLLEEYLRLHAVKLRRLEPDTELTRKLAALVENRRGLVDERTRLVNQLHSLLKTYYPLMEVLFEDMTSPLAAHFLLKWLDLASVKKAGSATLRKFFYGHNCRSDKALEERLQAIEKAQPLTKDPALIEPAVLKAQALAGMLKVLHQSIELMETRIEQTTDAHPDAAIFRSFPAAGPTMTPRLLVAFGTNRDRFASAQEAQQFYGIAPVKKQSGQSKVIHMRHRCPKFGRQTFHENASHAVRKEGWTKSCYERQRARKKGHHAAVRSVAFKLMRIYFSCWKHQKCYDANLYEKALEKHGSPLASLLKNPAPAVGE

SEQ ID NO: 391165 - protein, 391 aa, unidentified
MTKPKTKAVNDFSRCLDPLDMDATVIAVIEMSQSSWLVAGIVPGVERQPLKKLAIDERALLHLLNRWRGEAEKQGHRITRIAVAFEAGPDGFWLARWLAARGVEAHVIHASSVAVTREHRRAKTDRLDTELLKRGFLGWLRGERGHCKMVAVPTLAEEDAKRPSRERETLVGEASRIITRVKSAFVRLGIRGFNPKLKAAATRLETLRTPENEPIPPNTLAALKRDLERHQIVKKQIRELEQTRLESLAQAPAKGPNVMVLLLARVIGIGVETADMLVQEVLSRTMRDRRAVARYAGLTGSPDESGAKRREKGLARSGNARVRHGMIQLAWRFLLFQKDSALARWYRQRTADAPSMRKTLIVALARKLLIALWRLARDGVVPEGVRLRPAA

SEQ ID NO: 391166 - protein, 370 aa, unidentified
MQSIVYVGMDVHKESLSLCAVNSDTGEILGETKCALDTQMLGKFLATLRKNCGEQTKFVTGYEAGCLGYSWHNSLEELGIECHIMAPTTMYSSSKNKMVKNDRQDAKMIARNLMNGTYRSVYVPDSEDNSIKEFIRMRKSFKLAQKKIKQQINAFVLRLGFSFDGKSKWTEAYLNWLNKLPLTGHLKMVIDEYLIQYDELSRKIARYDEELENLSLSDKYAEPVQKLRCFKGINTVTGMVIHVEISDFSRFPTPTAFASYLGLTPNEHSSGNSINKGSITKQGNSAVRSTLVECAHSLVRGRIGRKSKRVNARQKGQPGKVISYADRAVERLQRKFFRLVAAGKPQNLAIVAVARELACFIWGMETQHLD

SEQ ID NO: 391167 - protein, 407 aa, unidentified
MICVGIDVSKRKSTVCFMAPGDKIIRRPFDVKHTKEELQPLVDEIRVQAKYDEIKVVMESTGVYHLSIAYFLQQNGIFVSVVNALKVANFNKAENFRHTKTDSIDSTNIARYGIAYWAKLPQFDLNGDKYFLLKRLCDAYLNFSEERSRILLQLQSQLEQTMPGIFDLFGGFDINSGKDKLLDFLERYCHIEDIIAKSEAEFVSSYREWAKEKGYRSNESKAATIYAQAKNGIPSIPNNPIVRETIMWYVGLLRRADEALMASLTRMEDIAKDLPEYELVGEMGGVGRVTRVALIAQIGDVRRFKNKHSLICFAGLTPSIHESGKFRASQNHIVKKGPARLRKVLYQVMMSLVMHKIPKDDAVYRFIKKKEAEGKYKKVAKVAGMAKFLRIYYGRVMHLYRDLGLAA

SEQ ID NO: 391168 - protein, 426 aa, unidentified
MPFAALDLHKKIVEAVVLDEHGAPAWRGRFPATRPALEQFARAQLSPQHHLALEATTNTWAVVALLEPFVAEVVVSNPLRTRAIAEAKIKTDRVDALVLAQLLRSDFLPRVWTPDPATRQLRSVSTERANLVADRTRLKNRIHAVLHQRLIEAPAGDLFQPTSRAWLEQLELDPLGRQTLDRHLRQLRRLDEELTALTDGLAVQAHADPRTRLLMTLPGVDFPVAQTLLAALGEIDRFPSADRAAAYLGLVPSTRQSAAHCYHGPITKQGNSHARWMLVQAAQSLARHPGPLGVFFRRLQKKKNRNVAVVATARKLVTIAWHMLRANEPYRYAQPAALEAKFSRLRIRATGKRKRTAPAKGSPRAAAYGTGKRTRAVPSLDQVCAAAELAVLPEAAPGELRMLDESGTAAFAQAIRKPKRVPRRSA

SEQ ID NO: 391169 - protein, 362 aa, unidentified
MVSSVTTIVADVYRYVVGVDTHAATHSYTIVAAANGALIDQATFPTTAAGLRRARDWIGRRTDGDLDGVLVAVEGTGSYGAVLGDVLEEAGYRIVEAPTPRRERGRGKTDSLDAALAARSTLVVPLSMLRDRRAGQVHAALQVLTVARDQLNADRLRCINALTALARSHDLGVDARRALTTPQITTIAGWRQREEPLGVATARAEAVRLAKRILVCDDELGDNREQITGLVTAQAPELLDLPGVGAITAAVILTVWSHPGRIRSEAAFAQIAGTCPLPASSGNTIRHRLNRGGDRRLNRALNTIVLTRMRTDSDTCNYIQRRLGEGKTNREIRRILKRYTSRQIFRTLAAAHRPHEVAESAV

SEQ ID NO: 391170 - protein, 319 aa, unidentified
MSPTRIYVGIDVGQTRLDVAHGTEGWWVANDDRGIADLVARLEALQPTLVVLEATGGIEMPLVGALAAAEVPVVVVNPRQTRQFAKATGRLAKTDAIDAQVLARFAEGVQPALRPLPDAATQKLSSLVTRRRQVVEMLTAEKNRLRTAAPAVGGHIKEHILWLERSLSDLDSELAQAIHSSDIWRAQDDLLQSAPGVGPVLSTTLLAELPELGRLNRKQIAALVGVAPLNRDSGTLRGRRAIWGGRSQVRATLYMAALVAARHNAVIRAFYDRLIAAGKPKKVALTACMRKLLTILNAMIQHHSPWQTMDLTLDLKDSC

SEQ ID NO: 391171 - protein, 355 aa, unidentified
MEQYIGLDVSMKETAIAIRQDGRRIWRGKCASDPHLLAEVIRKRAPHVHRVVFETGPLSVWFYHTLTTEGIPAGCIDARHAKAALDMAPNKTDANDADGLAHLAEAGFYREVRVKGFDSMLIRTLVNVRRQLLKMRMQISNQIRGVMKTFGLVVPKGAGSVFERNVRTLLEDEEKLAHIVLPMLQAWRDIRVRAAELNSHLVALAREDQRCRQLMSVPGVGTVTATAFVAAVEDPANFKNSRSVGAWIGLTPRRYQSGEVDYEGHISRRGDNQMRHLLFEAAAVILNRTRDTSSLRTWALELKERLGFKRAAVALARKLAVVMHSMLKTGELFDPRAGRSPQADPVDAFCDHASS

SEQ ID NO: 391172 - protein, 337 aa, unidentified
MEYFAGLDVSMAETQICVMARNGSVIHKAKVPSTPADIAAELAQLPTCRRIVFETGRMAPMLYHGLRQLGLPVICVESRQAYQALKLLATHKTDHNDARGLAHLARTGFFKPVHVKSLPAHAVRSLIIARKKLVGQRVTLENQIRGLAVVFGVRLPRALSSTFIRQALQASEGIPGLSAAMQGLVAARTAVLAAIVAIDGDIRRMVRASDACRRLMSIPGVGQLTALAFTAAVDDPKRFRRSRDIGAYLGLVPRRHQSGEIDYSGSISKCGDRRLRTLLYEAANVMLTRYKGALKLKEWAFAVAKRSTMRKARIALARRLAIIMHAMLRHGTEFKAA

SEQ ID NO: 391173 - protein, 459 aa, unidentified
MPKGKPKKIRVTSSLPTIHLNAAAVDIGSEEHWVAVPADRDKRSVRCFKAFTDDLYALADWLAACHVDTVAMEATGVYWIPLYDILELRGFDVHLVNAKHVQNVTGRKTDILDCQWLQQLHTFGLLSGAFRPDQDILVLRSYVRQRKMLIEYASSHIQHIQKALTQMNLLLHNVVSDVVGATGMAILRDILKGERDPQVLARHRDYRCKASEETIARSLCGSWRAEHLFALRQALELYDTYQTKIHDCDSVIAQQLDRIKKKADRANIPPERTRYKRDRNTPQANFREPLFEIAGVDLSQVAGIQPYTILMFLAETGTDMTPWPNSKRFASWLGLCPGTKISGGKRLDGRTKRRKSRAASILLIAASTLRSSDSALGAFFRRKASQFGVPKAVTATAHKLARIIYALLSTRKPFADLGAEAYDLQFRDRTVKRLNRKAQLLGYTLVQLPQSDPSQGAVS

SEQ ID NO: 391174 - protein, 340 aa, unidentified
MEKRYIGIDLHRNRFTCCIRLENERTYVTGWELADLGKFVKKLRPTDEIAVEITGNTRLFFDAVAPRVARVVVVNTNQFKVICESVKKTDPHDARALALYLSKDMLPEVRMKDKQHGQLASLTQTRDTLVKLRTALKNKINNILSARGLNLAKEALSSEKKLAQVLELPFDDIVRIELRVIVEQIRSLNRSIAELEKTIGEEGSKLDGHKGLSSIKGIGKITGAILLNVIGDVNDFADEGHLASYFGIVPRVSNSNETQHSGRIHKRGTKLGRTALVQSALIAANYSPYLKQFYEQVKARRGAGKAIIALARKFLGIIYRTLKNKWVFEDFPNFVLAEKA

SEQ ID NO: 391175 - protein, 435 aa, unidentified
MGADAHWVAVPPDRDERPVPCFGAFLADLYALAAWLRQGPIETVVLESTGVYWIALFEVLAERGFDVKLVDPHTVRQVPGCKTDVKDGQWLQELHTSGLLRGALRPEDEVCGWRSSLRQRRMLVAMASRAVQHRQKALEQMHLKLTEVVSDSTGKMGMTILRTILAGARAPQWLATSRDKRCKHEQGTIAKALTGHWRAEHLLALQQVVDQYDFLAQQLQACDGHIAGCLQACVPDVETDAPPSPPARTWRASRSNPLRRDVQASLEAMTGVDLPPIDGIDSLTALKVISEIGLDMTRWPTSKHCAAWLGLCPGNKLSGGKRYRMRSKPSANRAATALRLAAQGVANSHSALGAYYRRMRARLGAPKAMTATAHKLARLVYSMLRYGTAYVDAGQQAYEHKYRDRVLTNLQRKAKAFGYQLVHAADIDGGVASTL

SEQ ID NO: 391176 - protein, 375 aa, unidentified
MMHVAVGQPTQEVKETPMNSVGLDIHKTRCVTCVKTQEGRIVEEFAFQNTPHGHEELITHLKAYPHVQVAIESTGNLWIPIYNRLEDEHIHTILTNPKKTRLIAEAKIKTDKLDARILADLLRANLLSASYVPPPEIRMQRSIIRERARLTQLRTIIKNRIHTLLDKHSYKSPFTDLFGKHGLEWLAKLELPAGDRILLEVNLEQLNSLNHSITRLTESIAASAITNPEVKLLMGFTGIDYYSAMFLINEIGPIARFSSPKKLVSYAGLAPSTRQSGNHTTHGPITKEGNSHIRWILIEAAHQAARHDPRLNQFYLRIMKRRGHNRALVAVARKMLVTIYHVLNHHSQYRGLRPELFENKIRRLERITHPSLQTA

SEQ ID NO: 391177 - protein, 351 aa, unidentified
MPRTSMVHAVTAIGIDMGKNTLHMVGLDSRGAIVLREKVSRGRIALRLANLPPCLIGIEAGMATHYVTRELAALGHDVKQVPPTYAKPFRQGHKNDFRDAHAVAEAVQRPTTRFVPAKTDDQLDLQALHRVRSRLVSERTAVINQMRGFLLERGIIVRQGLRFLRQMLPDILAKRTDVLSPRMVRIVADLASDWRQLDERIEAVTDEIETLAKSDDSCRRVMTVPGIGPIISSAMVAAIGSGAAFARGRDFSAWIGLVPKQMSTGDRTILGRISKRGNGYLRMLFIQAARVILLRPASWPKHGFGVWLARAAQRLHPNVLAAALANKLARIAWTVLAQERSYEARVTKIAA

SEQ ID NO: 391178 - protein, 476 aa, unidentified
MNSKTKRANNQVNSVINVQEQREMVEKANRILSEMKSFTWRDLETQGKFKKNDKLSFISDDMLIIGCDIGSETHYARAIDTRGRELSRKALAFNNNAEGFQKAHDWAVQLAAAHDKKQIVLGLEPTGHYWFCLAAWMVSNGISVVQVNPYAVKQTKELEDNSQQKDDRKDPKLIANLVKDGNYGMPYLPEKVYAELRRLSMFREQLTEDRNRSMNRLHREMKIYFPEYKDAFGKIDGAFCMAVLKEAPFPEDILKLGAEGIREIWHQAKLRGRGYSRAAEIVKYAETSIGLKDGTAVGREAVRWFTEKIMELDEELAEIENRLNEKCKEIPHAENVLEIPGIGGKILSGILAEMGDISRFDDAKELQKLSGLGLVSCSSGKHKGETRISHRGRKRLRYWLFQAARSAVAHGEEYKWIHAHYTTRAGNALQKMQSLIVIACKLLRVIYTMLKTGKPYDPEKLLKDIRYPENVQTAAA

SEQ ID NO: 391179 - protein, 318 aa, unidentified
MENISQWVGIDISKATLDVYLRPLSKAMKVANTKEDISKLVETLKSYTVNLIVLEATGGLETELVIQLQEADLPVALINPRQGRDFAKATGKLAKTDAIDAQILAHFGEAMQPQILAVESEESRQLGDLISRRQQLVEMRTAEKNRRERARGKALVDIEAHLEYLDNCLEKLNQEIEELTQANQQWLEKVNLLKTVPGIGQVISTTLVSDLPELGQLTAKQISRLVGVAPINHDSGQHKGKRMIQGGRAQIRATLYMGAVVAMRHNPVIKTFYERLVGRGKLKKLALTACVRKILVILNAMVRQNQPWQLADNLPPCS

SEQ ID NO: 391180 - protein, 346 aa, unidentified
MLYAGLDLSRKRLDFHLLDGEGATLEVGAAPPDADGLDGLTERLARHGAPIRAAIESMNGARFVHDRLELAGWQVEIADAQKVKGLAPLACKTDRIDAWVLAELARRDLVPAIWLPDPRVRAERERARWRLHLVRHRSSLKQRVHAVLLTHGKPCPLSDLFGVRGRQLLARLGLPEPWQGTIEASLRLIDELDREIGECERELRRLGADHHYVPLLCTVPGISWVLAYTIAAEIGDIGRFPTPRKLVGYSGLCPRVYQSGERDLRGPLAKQGPRYLRWALVEAATHACTHPAYRQRYTDTKARIGKQRGAKVAQVDLARRLAEAIWHMLTREQPFAPAGATDPLAA

SEQ ID NO: 391181 - protein, 391 aa, unidentified
MPTTLTHCTTPTATLYMALELAAHEWLLTFAAGPGSARRHVTIPARAGARLLAEVQRAKVKLGLPADAPVLSCYEAGRDGFWVHHWLTRQGITNAVVDPASIEVNRRLRRAKTDRLDGAGLVRLLARWHGGERDAWKVCTVPPTLAEDLRQPIRERLELVEERTRLVNRIRGLLAGVGAVVDGPLTAATDLDALRQWDGQALPPLLRARLARDRQRLALLERQVTDLENAERRAVRDDATPQVEQARRLLGVKGVGPTSTWLLVRELFGWREHLTPKQTGALAGLCPTPYTSGDSAREQGISKAGSKRVRWALVELAWGWLHHQPHSALSRWYQRKYGAGGARHRKVGIVALARKLLVALLRLALTGAVPEGAEVRDWYTKVTGRPRATAT

SEQ ID NO: 391182 - protein, 407 aa, unidentified
MIFVGVDWAEAHHDVHVQDGEGERLGRARLPEGVEGIARFHDLVGPFVEDPAEVVIGIETDRGLFVAALVAADYQVYAVNPMSTSRYRDRHSVSGAKSDPGDAKVLADMVRTDRHNHRPVAGDSVGVEAIKVLARAHQRMVWSRGRQTNLLRSTLREFYPNALVAFDDLASPDALEVLRIAPTPTLGAGLSRSKIASALRRGGRQRRIDERTVEIQTALRAQQLHAAAVVATAMGASVAASVAVIAEMTAQTAALAAELEAGFDQHPDAVVVRSLPGLGTILGARVLGEFGDEPNRYASAKCRKNYAGTSPITRASGTKHVVLARHVRNKRLADALYLWAFASLTASPGARRYYDTRRAAGDTHHQSLRALGNRLVGILHGCLDHHALYDETIAWAHRSGSDHTQAA

SEQ ID NO: 391183 - protein, 407 aa, unidentified
MTSVGVDVSKGKSTICILKPYGEIVCSPFEVQHEEGAMEAFVDLLAKLDGEIRVVMEATGIYHLPILTFLHDKGYFVSVINPFAMKKYAKNNSIRGAKTDKLDSMMIANYGIEKWYKLQKYEGDEETYAELKLLGRRYRYYMELHVKALQELTHILDYVMPGIKKMFNSWNEANGKDKLSDFVEKFWHFDLITSKNLEEFTEEYLVWAKEKKYHCSRSKAEAVYELACNGIPTLSSDTPSTKMLVQEAVSVLRAIDSSLTLILARMQSLAKSLPEYSTVREMGGVGDVLAPKLIAEIGDVRRLHSAKALIAWAGIDPPPYESGQFIGSKRRITKRGSSTLRKVGYEVMRVLKSHPAPKDDAVYNYILKKEAEGKSKKHAKIAGLNKFLRIYHSRVSKVLSESEKGDT

SEQ ID NO: 391184 - protein, 430 aa, unidentified
MSYRIAGVDVHKKMLAVVVSNVEIDGQYQFERRTFGSNPEQLRSLAAWLLEQEVEEVVMESTAQYWKPVWEALERYWQPISQKREGAGRMSGSLHLAQAQSNRARRGRKRDFPDAERLVKRLVARELTLSFVPDAEQRLWRTVTRRKYQLTRDHVRLQNQLESLLEEAHIKLSSLVSNLLGASARRMLKALADGETNPAALATLADKQLRATPEQLCDALGACTDLKPVYRRLLKMALEQLQFLEQQISQLDQEMANLLSHHQDAVKRLAEVPGLGVDSAQQIIAEVGPTAVTFPSEKQLSSWVGVCSGDDESAGVNYSHRSPNGNRHMRRVLNQAANAAARTKGSIFEIVYRRSIPRLGHNQAIGAIAHRQCRLIWLILHQGVRYEERGPAVTTRSKQKRTARMIRQLRNLGYRIELPNSQHPSSTQAR

SEQ ID NO: 391185 - protein, 348 aa, unidentified
MIIIGVDFHPEFQQIAWVDTETGEFQEKRLAHPDEAEKFYRALAGEKVRVGMEASGHARWFERLVSELQFELRIGDAAEIRTKRVRKQKTDRQDAQLILRLLLEDRFPQIWVPSSENRDLRQLLWHRHRMVQARTRIMNQLQAVALNEGLRCKKKLWRERGRQQLESFRLAPWASRRRRDLLELMDRLNPTIAELTQAVEYEAEKCPQAQRLRTHPGVGSLTALAFVLIIGKAERFSCGKQVASYLGLAPLEESSGNRRRLGHITKQGSSMLRFLLVEAAQVTVRSDPQWRSRYFHLMMRRGRKTAKLAMARRLAVSLYWMWRKGWEYEQFKKFGSHAGEPGNRHGVE

SEQ ID NO: 391186 - protein, 310 aa, unidentified
MRYVGIDVSKDRLDVHVLPEGTALAVARDGKGLAELVERLSALEPERIAIEATGGFETMAAAALAGARLPLVIVNPAQVRHFAQAVGQRAKTDPIDAAMIARFVEATKPKLRPLADEAAQLLADLVARRRQIIEMIVAERNREKRAHVKRIKKSIARLIGALEKELAEIDAEIDESVRGSPAWREKEDLLVSVPGVGPTTARTLIADMPELGTLDNKRIGSLGGLAPFTRQSGQWKGKAMIGGGRASVRAALFVCAMAAVRHNPVLKAFRDRKVAEGKPKKLVLIAVARKLLTILNAILRDKQPWRPQIA

SEQ ID NO: 391187 - protein, 354 aa, unidentified
MKKEVLKQSLGIDVSKDSISITLAEVTPELRKHFESGADLANDSKGFSKLIRWLSCRVLDKERFIVVMEATGVYHQCLALYLYQRGFSVSVMQSGRVKRYAQSLQQRSKTDALDSKMLSMLGCERELPLWEPPRKVLSELKALSRERSALIRDRVTNNNRLDAITRSPFQHSREIARYKKRIKLLERQIKEVEEEMRKLVEKDKELSRKLHYLRSIPGVSFISTATVVGETLGFAGITNAKQLTSYAGYDVVIRESGTYKGKSAISKKGNRNIRSVLHMPSMTAVRVNPTLKPFYHRLKGNKAKPIIALVAVQRKLLVLMYSLWKNETYYDPDYQQKRSSSLVELPCRIVSTLV

SEQ ID NO: 391188 - protein, 310 aa, unidentified
MSSSVYVGIDISKHRVDVATEPATPPTHFPQTEAGIGALVTHLQPLGPALIVLEATGGFETAVVTALAAADLPVVIINPRQVRAFAQAIGRLAKTDAIDAAVLALLAARLQPPRRPLPDAAQQELKARVARRRQIREMITAEQQRLPQTRGRIRADIEAHIAYLKARSDEIDTDLRRLIAESPHWRATDDLLQSVPGIGPTTAAALIADLPELGRLAARPLAALVGVAPLNHDSGTLAAPRITWGGRAPVRSALYMATLTATRYNPIIKAFYQRLLAAGKPRKLALIAAMHKLLTILNAIVKTQKPWAHA

SEQ ID NO: 391189 - protein, 354 aa, unidentified
MSQTLKATIAVAGIDIGKNSFHVVGLDQRGAIVLRQKWSRGQVEARFANMPPCLIGMEACVGAHHLSRKLKALGHDARLMPAKYVRPYSKGQKNDFRDAEAIGEAVQRPTMKFVATKTADQLDLQALHRVRERLVSQRNGVINQIRAFLLERGVAVRQGLRFLRAELPRILGMPPEVLSLRMVRVIEDLAGDWRRLDERVESLSDEIEAVARKDAGCERLMSVPGIGPIISSATVAAIGTGDVFSKGRDFAAWLGLVPKQISTGDRTILGKISKRGNRYLRVLFVQAAWVVLIKPKSWERHGLKHWIEAAKKRLHRNVLAIALANKLARIAWSVLAHGRNFEARKIDEAAAQPA

SEQ ID NO: 391190 - protein, 411 aa, unidentified
MIKEDYVYVGIDLHKETHTAVIIDCYNNKLGEITFANRPADFHKLVNKVKKSNTDGKAVVYGLENAYGYGRPLAVWLIDKGYLVKDVNTAISHRQAKHRGAMYRKSDSDDAGAIALATLNMLDKLPDACPNDTYWSLGQLVHRRDNIMKQRTRLVNQLHEQLCIAYPSYKQFFNDISRPTALYFWEHYPSRKYLKGKTVEDLREELVPVSHNKCSTKTCEKILDAVASDKVKNNDFQDARDMVTLSIVSDLQHYGKQLAEVDKMLEKMYDMLHCTLTTIPGVSIITAVKILSEIGDIKRFANSNKLAQFAGIAPLHLSSSGKGKDFATKQGNRRLQATIYFLAIQMVQVSSKGTPRNPVVRAYYEKRKAEGKSSQQALICISRRLISIIYGMLKNGTEYHMPVVENAGENR

SEQ ID NO: 391191 - protein, 366 aa, unidentified
MREQQNNRQKRTIIGLDLGDRWHRFCVLGESGQVVEEGSVANNRVALSELSSRYPGALVVMEAGCHSPWVSRHLEQAGCEVIVSNPRKTRAIYQHERKSDRRDALMLARIARMEPALLYPVRHGSEEAQQDLLRIKLRDSLVRARVGLINSLRFTLKSLGYTIANPSTERFHKVIQSALPESVVQMIAPSMQAIEELSLRIKLLDWEIRTLAHTKYPETSWLEQIPGVGPITALYFVLKIGDPARFERVRDVGAFIGLCPRRDQSGENDPQLRISKRGDAYLRRLLVSSAHYILGPFAPPSALRQYGLALAAGATARAKKRAVVAVARKLAVLLLTVWKNKSPYQAFPQQREKMRTHDLERLRCIA

SEQ ID NO: 391192 - protein, 347 aa, unidentified
MRFYTKTRPYYCGIDLHARSLYLCIVDHNGKNLLHKDIKAAPEPLLKALSPYLGELVVGVECMHCWYWIADFCEAHGIEFILGHALYMKAIHGGKAKNDKIDSFKIARLMRGGNFPLAYVYPKEMRAIRDLLRRRTKMVRYSAQFKAHVSNTSTQYNQLPPAKGKLRTVTGREGMANSFDDLAVQRSIDMDVHLVATFDHEIQQVERFVERLAKQHNPRDLKLLQTIDGIGRILALTILLEIGDISRFDTVQQFASYGRLVKCKAESAGKSYGTQGNKIGNAHLKWAFSEAAVTHLKGNPEAQAYLEKLQRRMSKAKALSVLAHKLGRCVFYMLKNQTVFDEKKFLG

SEQ ID NO: 391193 - protein, 329 aa, unidentified
MAIVGIDVSKSKLDICWLKDPQAMRIKTRVFSNTDSDIRKLNDWLVSQTGKRPEAVRVMMEATGIYHERLAYALYEAGFQVYVVNPQHVHSYAKSFGRRSKNDRKDSVIIARFLSDRQQELPLWQPEPQEVRHLKAMLARLNALDADIQREQNRLEKALVQKASQRVESSIRTMIDALQQERKKLEQDIDNHIDGTPSLKEDRRLLESNPGIGRVLSVELMATMRSRDFKSASQVAAFLGLVPIMRQSGSSVDERPRLSKGGSSRIRAKLYMGSVVAIQHNPMIQRQFARLVGRGKSKMSALGAAMRKLVQIAYGVLKHQTRYDPQWAA

SEQ ID NO: 391194 - protein, 343 aa, unidentified
MYIASIGIDLGKTTFHLVAMGERSKVLLRKKFSRAQLLAYTANLPACLIGLEACAGSHFLGAALREQGHQVRLIPGQFVKPYRKSNKNDFLDAEAIAEAVTKQNMRFVPIKSEEQLDLQAMHRVRDRLVQRRTALTNEIRGFLLERGITFAAGPIHLRQHLPGVLEDAEQNLSPRLRWLLDRLGQEWKQIEIDITAITEGIERISNEDARCRRLRQIPGFGPLVSTATVAAIGNGAAFRRGRDFAAWLGVVPRQCSSGGKQKLLGISKRGNIYLRRMLIHGARAVLLRVKYDTGGLGQWVHRLAQRAPRNKVVVAIANKLARIAWAVLSSGNDYRHQPLQAAA

SEQ ID NO: 391195 - protein, 464 aa, unidentified
MNGDSKAGSGQEGGRKEEGIAALGRRVAGVDVGSKEHWVCAPVREGEGREVGVFGATTAQLEKMATWLIERKVESVALESTGVYWVAVYEVLEARGLKVLLVDGRALARVPGRPKTDRRDCQWMQRLHSCGLLQGAFRPPEQICMLRTLVRDKGNLVAEQGDWVRRMQKSLEQMNVRVHRAVADLTGATGMALVRAIVKGEREAGELAKLRDPRCHKSEEEIAEQLKGHWREDHLFSLGQALKMYEAIQERIQDYERAILEKLKAMEREECREQEPPELKNKKKAQTILHHGQEPLRQALYRASGADLTAIDGLGVETVQAVTSEYGTDLSAFPQEKQFVKHVLLAPNQSTSGGKPVKKKQKHGTASSRVAAALRMAALSLRHSQTALGAYYRHIARHKGDDVAVFATARKLATLIYRMLRWGRDYVDEGAEAYENRYREGRLRRLTSLARELGYQLAPLPAKP

SEQ ID NO: 391196 - protein, 421 aa, unidentified
MTPTSHTTFAAFVGIDWADAKHEGCLQAAGSAKRECFQLAHTPEAIDAWVTTLRTRFHGHPVALCLELTKGPLVSALRKYDFLVLFPINPLTLARYREAFTPSRAKDDPTDAALQLELLLTHRDKLQPLQPQSPTMRALAQLVEHRRRVVEDKVRVTNRLTSALKNYFPQVLQWFQEKDTCIFCDFLSRWPTLKAAQLARRSTLETFFRDHHVHTADVLATRLHAIKAATPLTTDEGIIAPNVLLVQTLVSQLRVTLDAIEAFDQAIAQRALHHPDFPLFQALPGAGPVFASRLLVAFGEQRERYASAAARQKYAGIAPVTERSGKKAWVHWRLQCPKFLRQTFVAWAAESIRHSFWAQLYYQQQRDKGKAHQAAVRALAFKWIRILYRCWQERTPYDEAVYLQALHHRGSSLIQNLAKAS

SEQ ID NO: 391197 - protein, 361 aa, unidentified
MKRYIGLDAHSQTCTFVVLGESGKILKQEVVETHGTSLINFVKLIPGHRLLCLEEGGQSEWLYHLLTPHVHGLHVVKGEGKRGNKNDALDAKELADRLRTNRIGTSIYKPPRRAGALRECARSYQCLNRDVTKTKSRIKAAYRRYGLKYPKQQEMFLHSRREAMIALLPSCAQEPVGLLFDALATTSSLKQKASCAMLAEARKLTTLKGIRSVPGMGEIRSCLLVSQVVTPFRFHRVRQFWSYVGLAVVQRSSSDWMQGNNGAWTRANTMQTRGLTRSYNRLLKYVFKGAAVSVIQHHKSDPLYAGYCRSLESGVNPDMAKLTLARKIAAITLAVWKQGGVYESSKVCSSQIDPGMSHVAH

SEQ ID NO: 391198 - protein, 421 aa, unidentified
MKGLRGIRGKTVREGTLIATVDIGLTTNTGYCTTLDGRDSKSFRFDNPKEGFEKFWCMTMASKNRFRCDEVVVGYESTGPYAEPLVHYLANKQVKIVQVNPMHTKKMKEVNDNSPLKTDDKDPRVIADIIRLGRALTIVVPEGDAAYLRRLTNARERHVGEQTALLNQLQQLVFLIFPEFKTVLKDMKGKTAQYILKRYTIPERIATVSKEVLGEQMRKRSMGKFGIQEAESLIGLARETVGIKEGLGGIFMDIRHILMQLEAEVRFILEIEAEMGATLERIPFSGRLLSIKGLGIVSVAGLIGEVGDFSKFSTQSEIMKLAGLDLYEISSGKRKGQRRISKRGRSLLRKILFYAAIQMIRKNGIMFDYYARLTGRGMERMRALIAVSRKLLRIIHAIVRDNSDYVGQYQAPERRVVNIAA

SEQ ID NO: 391199 - protein, 336 aa, unidentified
MLIIGCDFHTRFQQIAMLDRETGELVERRLEHERGEAQAFYAGLAGRARVGMEATGSARWFERMLAEQGHELWVGDAAAIRAAVVRKQKTDSRDALHILDLLLADRFPRIWIPSPLEQDVRQLLRHRYKLVCFRTSVRNQLQAQAMGEGIRRRKKLWTAKGRQELEGLALGAWANRRRQELLEMLDRLDRSIEELDGAVIQEAQSRPLAVRLMEHPGVGPVTALAFVLTIGEIGRFRRSKQLVSYVGLNAKESSSGGKQRLGSTSKQGNAMLRFLLVEAAQTASRFDPELQRDYQRLKFRRGPGVAKVAIARKLAVRLYWKLREANPSSAVGSHAE

SEQ ID NO: 391200 - protein, 319 aa, unidentified
MNATQQGGVRVGIDVSKRTLDVCLLPEGESFVVPNDQQGLDELLSRLEDSPPELVVLEATGRYERLAATSIATAGIPVAVVNPRQARDFAKAIGRLAKTDRIDAFVLARFARAVDPSPSVIPDEEASALQAILARRRQILSMLVAENNRLQIAPKALKKRIRAHIEWLRKELSRTDGDLEEAIEASTTFKENEALLKSVPGVGPILARTLLAELPELGEITHKRLCALVGVAPFNRDSGQSRGKREVWGGRAPVRAALYMGALVATRHNPILKEFYERLLAAGKPKKVALVACMRKLLSILNAIMRDRVPWHLAHLRTP

SEQ ID NO: 391201 - protein, 432 aa, unidentified
MKHNPSSKQNQRISRISETTLVIGTDIAKHQHVARAFNYRGLELGRRCLFQNDENGLLNLLAWAESIKQEHGLTDVLLGVEPTGHYWFPLFHFLKQRGVEVVLVNPHHVRRSKELDDNSPTKNDIKDAKVVAKLVLDGRYTQPQLPEGVYADLRVLMNQRDRLCGDLNRVKGRIHNWLDRFFPEYRQVFKDWEGKASLITLQHFPLPQDVVSAGETTVMATWKNNGVNRAVGPKRAELLYRKAQASIGLTEGATAARYELAMYLEQYTLLCRQIERLMEQVAALVEQIPGASHMMSIPCIGLVTVAGFLAEVGDLSGYEHSQQIVRHAGLSLRENSSGLHKGETTISKRGRCRLRALLYRAALTMVAKNPEFRALHLYFTTRRENPLKKKQSMIALCIKLIRVLFELGRKQKHYDASKVLGPHREAQLQAAA

SEQ ID NO: 391202 - protein, 388 aa, unidentified
MNRIIKIGMDVHSTNYTLCAMEPVLGAEDRIYGEIQVAPDYKAVVAFIDSIKMKLGLSDKYSFECGYEAGCLGYTLYNQLTSAGIKCVILAPTTMLTQRGKRIKTDRRDARLIAQCLCYGGYNPVYIPTGEDDAVKEYLRMRDDHKLTLKKLKQQIGAFALRHGHQYTGTKWTNKHIAWLRKLELDPIYQETLNEYMASYDEQEAKILRFNKRIEEIAAQSSYKENIGKLCCFLGIRTHTALSLIVESGDFTRFAKGNTYGAYLGLAPGEHSSADDVNRLGISKAGNTHLRRLLIEAANGICKGRIGHKSKELCARQKEQSADVIAYADKANIRLRSRYYKMIRHGKKKNVAIAAVARELACFIWGMMTGNISVVSRAGSSVPAASQG

SEQ ID NO: 391203 - protein, 428 aa, unidentified
MADQLNNKPYGAWIAIDIAKDFNAVLSETKEGKRQHFRIANSAADHHRFIAFLKSLPPPCIIGFEATGNYHRALGHRLVTAGFEVCFISSVASARYREVMFNSWDKNDPKDAAVLLELLKQGITQRYVDPLIAGHHDLQELSKTYYQVTLSRTRLQHSILTHYLPLYFPEMGKWWNSTRSAWWINYLLHFPIPSAVIKYSQEAFCQIASPVVGRKVNKAAKLIELYETALHSIGLPVEEDSLACKTFQIQLRRYQEINDCRTQLELTAQAVLSDNLDSAILQSVPGIGPINALTILAEGGDLRRFDHHRQFLKYCGFDLAKNQSGNYRGQEQISKRGNARLRLALWMSVNRAIQQPENSFQQKYLRYIKSAPQDKDLQRKARTAVAAKMARVVYGLVKSKQMYQGYYEKALPSGSIPLCGAVEAARTS

SEQ ID NO: 391204 - protein, 412 aa, unidentified
MTEENLAWFAGVDWGSERHQVCVVDAQGNIVGERDFAHSGEGLAALGDWLLSIAGAANTMAVAIEVPHGPVVDTLVDRGFVVHAINPKQLDRLRDRFSVAGAKDDRRDAFVLGDGVRTDRRLFRRLHVADPKLIELRAWSRLAEELKQERRRLSNRVGQQLWRYYPQMQGLTDDLAAPWFLELWGIAPTPAKVRQLRKPTVERLLREHRIRRVGADTVLRMLREPAIKVADGVAAAAGVHLRSLVARLRVVNRELQETEKQIEKLCMSVGESDAAAGECLRRQDVLILRSMPGIGSINLAALLCEASGPLVRRDYQALRTLCGAAPVTKRSGKQHIVVMRYAAHVRLRNTVYHWARVASQRDPKCRARYAALRHRGHSHGRALRSVADRLLALACVLLQRQTLFDPNFARAG

SEQ ID NO: 391205 - protein, 408 aa, unidentified
MERYHLGVDWADKFHQIWVSDGQGQKITEKKVGETVEELAEFGRWLDESRAKGSELWAAIEKPQGRIVDFLLDHGVLVYPVNPKAVDRARDRFRMSSSKSDSFDAYVLAEFLRTDHGHLRPLEPSSQQAQELKMLSRDEHRLVRQKTRLLNQIRVTLKEYYPRPLEVFSDLESKTALDFLKQYPTPQALSELSRRKWNRFAKREHYLGEDRCQEFWEKLCQPQLTVPQHVIRVKAQLLLVLLVQLEALSEAVGTYKEKIRSFFASMPAAELVKTLPGAKTGTIVATLWAEIGDAKSRWESFRHLQAEAGMVPVTKASGKSRVVHFRFSCNKLMRHAAYWLAFVSLNRSEWANHYYRDQRARGHNHHQALRALGAKWLKIIFVMWRDHKPYDENYHLANITRQKMRQAA

SEQ ID NO: 391206 - protein, 419 aa, unidentified
MSKSNTAKQLAQVQPGTLHAGVDLALEKNVTIVINEKAERLDHFSFPQDRGGYDYFLRRLEGLRQKYQASEVVVAMEPSNYFWKLLAKELEEKRITYHLVNAYTVKKHREGDQLDRSKDDQRDAGQIAELSRNGKYTETHLQKGAFEDLRQYATLHDQSVQGIRRERQVLWGLVGQVFPELSRVFKNLVGETSQALLMTCTSAVIIRQLSAEDFIAQVRAAYSGKNLSVSKLRRVHQLAATSIGVTEGLGAIQLAVQVHLAELQTFQKQLKWVTTAMTTCLATLPEAPYLLSVKSLGAVSAAIFMAEVGDPKRYQSAAQWVKLAGIQPAPNTSGKKQRSLTPMSHQGRARLRTMLYYTCLRLIQHDDHFAQLYSNLQRRQKNQLTKMQAIGVLMNKLLHILWALIQNQTLYNPSFAQSI

SEQ ID NO: 391207 - protein, 376 aa, unidentified
MKNKTNPTQHGKDNTNHLAPAGNAPVRHVFKLGLDVDLNNVVTAIQCDRGTIALPQKFTRARLLAWIEQQVAAGHEVHTVYEACGFGYTLHHALSAAGVQSLVTTPMRLSPERRRKNDRLDARELCVRLSRHLEGHAHELKPIRIPTVEEQRRRELGRQRDFFVRELRRLENHGRALRIEFEHETLPGGWAGPRKWKQIAATCSEFVRTQLEPVVTQIRQVKAELSKLTAQIKATVAQEALPTGLGALTIALLDGEVCDWQRFKHRKAPASYTGCCPSEHSSGGVQRFGHIDRHGNKHVRVLLVEAVWRFLKWQPHWHARVKYLQKLKHGASLKKKIAVALARQLAIDLWRWRTGRATAAELGWSLRPAPVEKREA

SEQ ID NO: 391208 - protein, 418 aa, unidentified
MKKHSKSCRRSEASSKRVKSRGPVQRDVKEVMAEVLGKLTAKLDAPTVSTRAQENRKGNTVSPNRDRLTVGVDLGDRWSQYCILGLEGETLGEGQLRTTREDVGEFFVGLTTARVVVEVGTHSAWVQDVITELGHEVLVANPRLMEGSKRRKRKSDRIDANKLARLGRVDPQSLYPIRHRSREVRQDLVVLRARDALVSVRTELINTTRGLVKSMGTRLPGCSSPSFAEKVKDAIPIEVGEALQPLVQLVETVNECIERYDEKIEELGRKKYGHTTLLRQVKGVGPITSLAYVLTLEDPQRFANSREVGPYLGLVPKQEDSGDCQPQLGISKTGDRMLRRLLVGSSQYMLGAFGPDSDLRRYGLRLCERGGKNAKKRAVVAVARKLAVLLHHLWVTGDVYEPLHRRETGTGIAQAAAA

SEQ ID NO: 391209 - protein, 408 aa, unidentified
MNPLFVGIDVSSRNNVAYLMKPDGSKYSSFSVQNNLGGAKLLAERIVSALRSMQLSDVVIGLEATSIYGDSLVYALRENGSLGQFQRKIHVLNPKQVRKFKEAYPDLPKNDSVDAFVIADHLRFGRIAREVYMDDYRYQALRTLTRARFDVIQNLTREKQRFANYLFLKCSGIAQDKDIPNTSATTIALMEHFETVDDLANADLEELTAFITETGRGRFADPDATAKVVQAAARASYRLPKTVNDTVNQAMGVSIASIRALEKQVKVLDKAIEQQFEIIPNTLTSIPGIGKVYSAGIIAEIGDIHRFDSQASVAKFAGLVWHKDRSGEFEAEHSHMIKSGNRYLRYYLLEAANSVRRCDSEFRRYYDLKFHEVNKYQHKRALALTARKLVRLVFRLLKDNRLYIPPEG

SEQ ID NO: 391210 - protein, 335 aa, unidentified
MGRTVTKPSSAAVAARVVIGMDPHKRSVTVEVMAADEAVLDGGRYATDRDGYQALMGFAKRWPQRVWAIEGCAGIGKHVANRLLADGEDVVDVPPKLSARTRVFATGQGRKTDATDAHSVALVGTRMAGLRPVVNDEQLAVLRILVDRRRSLGEDHTRMVSQLHHLLLELIPGGAKKDLSARQARALLAKVRPRDAAGKTRRRVAAELISDLERVYDRKKAANKELTDLVAATGTGLLNLNGIGPSGAARLLVEVGDITRFPNKAHFASWTGTAPIDASSGDNVRHRLSRGGNRQINRVLHIMARVQIRNPSLGRDYYDRKKADCTGTIDPCMLH

SEQ ID NO: 391211 - protein, 423 aa, unidentified
MHATYAGGETGRYVGLDVHRRYATVAAVDSQQQVVVTARRVNFEDFELWIRKHLRPTDAVTLEATNNAWYLHDLLVPLVASVTVSNPIQVALIARARVKTDPRDALALARLLAAGLLPSVWVPPHEVRELRALVAHRVRLVKQRTQVRNRLRAVLFRHNLVAPPGEVFGPEHRSWWNELTLSTSEQLRVRHDLTILDCLELLIKEVEAEVVRQSSLEPWAERVAFLVQLPGIGVLNAMLLLAAIGDIGRFATASKLVGYTGLGASIHSSGQEHYGGRITKQGRREVRSTLVEAAWVAVRSHPYWKAMFDRLADRLGRPKAIVAIARKLLVVVWHVLAEQVADREAQPERVAGKFLDWSWKLGRANRAGLTTAAFIRRELERLKLGDGVTAVHRGNRTFRIAPPEPSERSGAVPSGERAVLPSG

SEQ ID NO: 391212 - protein, 347 aa, unidentified
MLYAGLDLSRQRLDVHLLDEDGRTVEVTAIRPDGDALRTLVARTERYGQPVSAAIESMNGARFVHDTLELAGWEVEIADALKVKGLAPLAAKTDRIDAWVLAELGRRELVPAIWLPDPANRAERERARFRLHLVRHRTALKNRIHATLIAFGHPVPVSDLFGVAGRELLAGLAIPEPWTTTLATSLRFVDELDAEIDACERELRAMGADHPYVELLRTVPGIAWVLGYTIAAEIGDIGRFASAKKLAGYTGLCPIVRQSGRRDDRGPLAKNGPKYLRWALIEAATHASRHPMYRDRYERNKQRLGRQRGSKVARVDIARELSTAIWHMLTKNEPFAPGRSPATPLVA

SEQ ID NO: 391213 - protein, 342 aa, unidentified
MKHFAGLDVSVKETSICIVNDTGRIVREVKVLSEPDALLKVLGNPAYRFERIGLEAGPLSQWLFSALAEAELPVVCVETRHMQAVLKAQINKTDRNDARGIAQMIRAGLYRPVHVKTLRSQKLRMLLTHRKLLQSKAIAIENDLRGTLRNFGLKVGMVGKVRFEARIQELVENFSDLAALVEPLLIVRRALREQIVILHRRLLAIVRDDEVCRRLMTTPGVGPVVALTYRATVDVPARFRKSKAVGAVFGLTCSKYQSGEIDWSGRISRCGDEMMRVMLYEAAQSTLRSKKWSWLKAWAIQIARRRGMKKAIVALARRLAVIMHRIWVDGTEFRWTRETAAA

SEQ ID NO: 391214 - protein, 322 aa, unidentified
MAVVMIGIDPHKASHTAVAINAAEQSLGQLRVRASAVQAERLLGWAQPWPERAWAVEGAGGIGHLLAQQLLAAGERVLDVPPKLAARVRLLATGDINKNDPNDARSVAVAALRSAGVREVRQDDHAAVLKVWSKRHQDLAQARTQVACRLHQVLCELIAGGVPGQITAGQAGQILASITPAGAVEAARWELACELTGDLRGAGTRIRETRKKTAAAVRAAGTSLTGLFGVGPVIAAAVIGDVRHVSRFPNRDHFAACNGTAPIEVSSGGRKIWRLSRRGNRRLNHAIHRAAVTQIRYRHSPGRAYYDKKLAEGKPAKKRCAR

SEQ ID NO: 391215 - protein, 343 aa, unidentified
MDYYVGLDVSLKQTSICVVNQAGSIVHEGVADSDPEAIASFVRSKAPGTVRIGIETGPTTTWLWTELKRLGLPVICIDARHAKAVLKMQINKSDRNDAAGIARIMQTGWFKEVRVKDLDSHAVKALLASRALLVKIKRDLENQIRGLLKNLGLVIGRAKFNVFAVRAEELIEDRPELVAAVRPLLDARKAIERQVGDLDRKVHKLARHDVQVRRFMTVPGVGPITALCFKATIDDPTRFRRSRSVGAYVGLTTRRHASGEVDWSGRISKCGDAMLRMYLFEAAGVLLTRVPKWSGLKAWGAKLTKRNGLRKAKVAVARKLAVILHRMWIDGTKFNWSTKKAAA

SEQ ID NO: 391216 - protein, 341 aa, unidentified
MAEVSTIGLDLAKNVFQAHGADASGAVLFRKKLRRHQVLAFFAAQAPCTVAMEACSSSHHWAREISRLGHQVRLIPPAYVKPFVKRQKNDAADAEAICEAAQRPTMRFVVPKSEQTQAAALVFRARDLLVKQRTQIINALRGHLAAFGIVAAKGPARVPQLMQAVEDPDEPIPELARPILQMLIETLRGLDKQIARLDHEIAQRAKENEAARRLMTIPGVGPVTAVALAALAPPVETFKCGRDFAAWVGLTPLQRSTGGKQKLGATSRMGERTLRRLLIIGANSVLVQVARHGAPAGSWIARMVARKPPMLVRVALANKMARIVWALLARGEVYRAPAAAA

SEQ ID NO: 391217 - protein, 367 aa, unidentified
MPKVYIGIDAHKESNVVALAFSGQGEPELYGKASADLKAFEAVLRRIMKKYDLSKEDVALCYEAGPTGFVLARRLLKLKFECIVVAPSKIPTQSGDRVKTDRRDARKIARLFRAGELTGIHIPDVEDEVIRDVCRGRTDAVDERSRTKKQLLSFMLRNGYRYKGTAHWTEAHMRYLRELILADPAQKIILEEYLQRIDFAVKQVERIDSQMEKLLQTWSRKPLVDALMGFRGFKQTAAMVIVSEIGDFKRFKHPKQLMSYLGLTPSEDSSGGRRRQGSITKCGNGHARWMLVESAEHYRKPPKISKGLSVRQEGLSREVRKLSWHAQNRLNKRSYKLAIRRLHPNKVRVAIARELSSYIWDLAQIVD

SEQ ID NO: 391218 - protein, 315 aa, unidentified
MTNPAETFIGIDVAKDHLDLAIHAPAQTWRVENSAAGRAVLCAELQALQPSLIVLEASGGYELELVAELATTQLPVVITNPRRVRNFARATGQLAKTDQLDARLLAHFAAALRPAVRPLPSADQEYLTALVTRRRQIVDMLTVEQNRLHTVRSVMRQDIEEHLTWLREKLAKLDAEIDDFIHGSPLWSDTDALLQSVPGVGPVTASTIVALLPEVGTLNRQEIAALVGLAPLAKESGKKQGKRRIFGGRAAVRSVLYMAALSARTHNPVIKRFYERLVAQGKPKKVALTACMRKLLVILNALVRTKQAWRPASAV

SEQ ID NO: 391219 - protein, 317 aa, unidentified
MNCKNNQKEITIGVDTGKFQLDIHIRPLDIYFSVDNNEKGIKEALKKIKPHKPTRIVIEATGRLEHAFIIACSEANLPFAVANPAHVKKFAGAIGRKAKTNKLDAQLIAYYGEAIKPTLSTLKPENMRLMSDLLSRRRQLMTMQTMEKNRLQIMPKEISGIIKPILTAIKNQIEKVDSKLSKLIEKCSEYRTKNSIIQSMPGIGNVVAFNLLSDMPELGYLTNKEAASLIGVAPFNKESGSYEGQRNIRGGRHKIRTVMYMAMMSAMQCNPVFKSTYQRLVAAGKPKKTAIIACVRKMVIILNSMVRDGVMWAPKMN

SEQ ID NO: 391220 - protein, 405 aa, unidentified
MPINMQYERAFGLDLSKKTFHGCILDGPDLGSRHFFTGEMGQQGKAKLAGRLCKGDLVLMEAGTASFSLARFLLENTESEVVVLNPAKLYNIFNSTLKTDKADSEKIAKIARTMPRDEWPTVSIPTREEQAERSVVSLEVFLAQEITMLVNRLYALFNSMGHPFVKKSDLKTEESRLALANRLLCEDGLAIEQAVMLSDQIGNVTGQLEQCKQRLRDICLSHPKEALSLLSIPGIGLMTAASQIAFLGDGSRFDSPDSYVNYVGLSERRFDSGTKVSKGHISHMGNKCIRRNIIQAAWAASKTTKCNPLSERYEHLRLRGKSKPVAAVAVAKKMIQLSYILVTSNGIYEFTKQQGLAAFRRRLQYHKLAELLDYLPEPIRMEMEEIDRTKRKEAAATTSRQKKFA

SEQ ID NO: 391221 - protein, 272 aa, unidentified
MTVVTVGIDLAKNVFAVHGVNAAGKAVLVKPLVRRAKLLELIATLPACLIGIEACTGAHYWAREFQKMGHTVRIMAPQLVSPYRMSGRHGKNDAADAAAICEAVARPNMRFVPIKSVEQQGQLFVHRAHQGYVSERTALINRIRGLLSELGIVLPQAFKAFLSGVAQVLEDLPGYCNQVIGDLLNELYHIEEKIKNSEKLIQQLARDNSAAQLLMQFRGIGPMTATAIVASIGNGHDFKNGRQFSAWLGLTPRQQSSGGKARLGRIDLLPVD

SEQ ID NO: 391222 - protein, 363 aa, unidentified
MKKHTTVQQPLPADISACATIAIDLAKRVFQIAGEDALGQVLHEQRIKSREAFQAFLCKLPTAITVLVETGPGAQAWARQLQAQGNPVRILPAQHVADHRSGPKNDRNDALAILRAGRDSRISAVPVKTAAALAMQALHRARQGCVRRRTAVANQMRGLLLEHGIAMAQGEASIRQRIPRVLEDATVPLPDLLRELVDELMTEWLFLSESVRRLTGRLEKAAKEDETARRLMTIRGVGPIIATALLAKQTQPERFANARMFAAYFGVVPSQNSSGERVRLGRMSKQGDAYVRSLAIQGAHAVLKQLRPNSQQPDDRRLQRWVSRLGTREAAVRVANRNLRIIWALLQNNQSYRRDPGHDQEAA

SEQ ID NO: 391223 - protein, 388 aa, unidentified
MLGTDIIKAKFLPRDYDVFAGLDVDKKHIDVTFSDHDQRMKSIKIPYSADHLLAYARRHYPGQPIAFAYEAGGTGYGLYDQITAAGYRCLVVAPSMVPTAPGQRVKTNRLDSKKISTALRGGELTSIHIPSEPYRHLRHLVHLRDTFVRQATASQVRIKALLLFEGIPFPDPQGRWSTNAWAQLRTLPCASPVRFKLDRLISMATFADEQARQTARELHRFCRHNTELSSTLELLMSAPGIGRITGTHLLARIGDWRLIRHVHQLPSFLGLVPCEDSTGDAANRGPITRTGDRRLRAKLLQAAWVAIRQDPELDDFYIRIYQRNPKPMAAQKAITAVANKLCRRIACILKEQRPYVLRDASSRTTKEETASPQGETRFPAETSAPPVP

SEQ ID NO: 391224 - protein, 383 aa, unidentified
MEVTMSTVIYIGIDVHKDTYTLSSFLFSTNRVFGQSTIANSSNLVKKYVEKIQKEYPGSDVLCGYEAGPTGYGLYRDLERYDIPCVIMAPTTLPKASGDRVKNDRLDAQLLSKQLAFGTYSAVYVPTTKDEAVKNFTRLRNTRKIALKKAKQNLLAFLLLVGDCYSDGSYWTLKHYAWLRRQEFGDQIDQQTFNEYLQEVIDQQEKVNRYDEKIEEMAAQDGYREQVARLRCFRGIETHTALSLVTEIGDFSRFAQAPQFSAFLGLVPSEDSSGKRERRGAITKAGNSRLRLLLIEAANSTLRSRTYGKKSKRLLARQKGQDPDVIAYADRANRRLHKVQDRLISRGVIPNKAKVAAARELSCFIWGMMTGNIEGRTAQAARQ

SEQ ID NO: 391225 - protein, 403 aa, unidentified
MKKARDPRVVGVDVSKKTLMVSSYGVGKKARAQRSVVADEAGVAALAAELARDKVRVVAMEATGGYERRLLKALDAAKVPAVLLQPERVKNFARSQGTRAKTDSLDCECIANYASVTDVPLWVAPSAALEAAMALGRHRDALIRDRTREKNRLQTATVVAVRESITTHIAFLTKQARAVEKQLLAHIMSEPQSVARFELLKSVPGVGALTAARLVAELPEIGEIGISKLSSLAGLAPMNKDSGEHEIKRKYAPGRRQVRTALFQAAHSGVLFNPVIRAHYVRLISKGKERKVVLIACAHKLLRILDAMVRHDERWDASRHPAGLAAMAVAESEAIEEALAELEVGPTEFESEQASNPATKPTITRRTSTKTASKPAAKRTAQAPVTSARSRRPTRPVVEPKHG

SEQ ID NO: 391226 - protein, 352 aa, unidentified
MEKSNKLDFGGQHIYVGMDIHKKSWSVSIHTEQFEHKTFTQPPEIEKLTYYLQRTFPGATYHTVYEAGFSGFWIYDKLREKGIDCMVVNPADVPTKDKERAGKTDRVDCRKLARGLRNGEIKGIYVPPRVKVEDRSLVRTRQSMVRKQTRCKNQITSILFFYGIVIPEEGRWSRRFINWIESIRMERASGDLALKAHLEELKHLRQIIANLNRAILSLSRTEEYRSDVLLLKSVPGISTLTAMILLTELADLSRFSSLDKLASYAGLVPDIRSSGETEYSTGITFRRNAALRALLIESSWIAVRKDPALTMAFNKLSARMKKTKAVVHIARKLLNRIRFVLKNQQKYVPAVV

SEQ ID NO: 391227 - protein, 391 aa, unidentified
MIYVGIDVAKDKHDCFITNSDGEVLFKPFTITNNLDGFNELYQKIESVTEDATKVKVGLEATGHYSYNLLGYLIYKGLAAYVINPLHTNLYRKSLSLRQTKTDKVDARTIASMLMSDVNLKSYSDISYHNEELKSLTRYRFDKVKERAKLKSSVSRLVCILFPELEKLVPTLHMASVYSMLSEFPGAKHVASAHLTRLTNLLSEASKGRYSKDTAITFREAARASIGSNMPAKSLELKHTIKLIQELDSEIDEIENEIKVIMDEINSPILSIPGINYRMGAMIIAEIGDFNRFDSPDKILAYAGFSPSTYQSGQLDGAYAHMEKRGSRYLRYALYNAAKYVCHWDPTFAGYLAKKRAEGKHYNVAISHAVKKLVRVIYHLEKTKQQYIKVA

SEQ ID NO: 391228 - protein, 342 aa, unidentified
MQITTIGLDIAKNVFQVHGIDGAEKVVVRKQLRRIQVLAFFKALPPCLIGLEACATAHYWARELTKLGHQVRLMPAKDVKAYVKRNKNDAADAEAICEAVRRPTMRFVQIKSAEQQGRLMLHRTRDLLMRQRTQVINALRAHLAELGTTSAQGREGLKELLKIVASDADERLPADAHASLVVLAAELQAMQTLIGSIEKRIVTQHRENKASKRLLTIPGIGIIGATAIADTVTDPKAFRSGRDFAAWIGLVPRQDSTGGKQKLGPISKQGDRYLRRILVVGAHSVLRRAKLNPQKHPWLTQLLARRPFKVVAVALANKMARMAWALLAKGGAYRAPALAATA

SEQ ID NO: 391229 - protein, 377 aa, unidentified
MRFIALDVHRDFCEVAIAEGGQVRLAGRVETTPAGLELFAQSLGADDQVVLEATGNALAIARVIEPHVARVVLANPKAVKGVTQTAKTDKLDARTLAQLLAAGFLPEVWTPDERTRALRRRISRRAQLVRQRTREKNQIHAILIRNLKARPPVTDLFGVQGRKWLSEQGLPGDEREMVEACLRGIDFLDREVAAIDRTLAELVLASPEMRRLMTLPGVNFVTAAGLLAAIGDAKRFPTARHLVSYLGLDPRVRQSGSEPARHGRISKQGPGEARHVLVEAAWHAARTTGPLLGAERTSPPSPSHASSQSSPGTCSPAGRTTPSSGPRSYARRSAASSSWLAPSDAKGGGTPCASSQPASSTGSRRSSPHKLSSHTDG

SEQ ID NO: 391230 - protein, 334 aa, unidentified
MTFDMVAIDLGKLSFHLHGVSSDGVVLSRKVSRAKLFAVVTELAPAIIAMEACPSAHYWGRRFQEAGRHVLLIHPRFVKPFVRGAKNDAIDAEAIFEAASRPTMRFVPVKTIVQQDLQAVHRIRDRLICQRTALINQVRGLLAEYGIILAKGPSRLTTEGPAAVADAGLSDLAREVFVDLFDQLRDLERRIGALDTRLVAICRENAASRRLATVPGVGPVIATALVASIDDGRHFRSGRQLAAWIGLVPRQYTTGGKPKLGGIGKQANHYLRRQMIHGARSVAFRASGRGDVRSRWLQALVARRGFNRAIVALANKTARIAWALLTRQEVYQTA

SEQ ID NO: 391231 - protein, 319 aa, unidentified
MSESAVVEVFVGIDVSKNTLDVGMDLGNEFFRVSNDDAGIQDLCRRLQTLLPTPTLVVMEATGGLEACVACELTLQGFAVAVVNPRQARDFAKATGHLAKTDRIDALLLARFARAIRPEARPLKDTETQELADLLSRRRQLVDNRVQEELRLHSAKMLRVRKNLKAHVEWLNKRISELDDDLYGHLQKSPAWKEKDDLLQGIPGVGKVTSLAVIARCPEIGTLNRREIASLVGVAPHACDSGKFRGKRAIWGGRADLRAVLYMAALSAMRSNPGIKRFAERLKAAGKPAKVVIVACMRKLLTVMNAMIKNNTPWQSDFA

SEQ ID NO: 391232 - protein, 326 aa, unidentified
MNVLGIDVAKLSFDATLLLTTGEQHYASFSNHAEGFTQLQAWLSEHNVTELHACMEATNIYWEALATWLHAHGYTVSVVNPARIKGYAQATMQRNKTDKLDSAVIASFCAKHQPTAWEPQSEEQRRLRALVRHRDDLLQTQLQQQNRLRDTTDALVKASLTTLLKAITIELAAVERQIKEQLAAQTTLRTNLTLLTSIVGIGAVTAAKLLAEFADLDQYESAKAAAADAGLTPSHYESGTSVRRRPKLSKIGKAGVRAALYWPAITAMTRCPAIKAFAERLAAKGKAKKLIIGAVMRKLVHICYGVLKHQTPYDPAKAVGRTAPAT

SEQ ID NO: 391233 - protein, 470 aa, unidentified
MAHVGGQLQAQFMARIRGLDLQRCLVVPVDVGKSTAMALVADHYGEVVTEPFEFPLSEPGFALLATAIARSEASRSAEVVRVGVESAGHYHRSLVARLRAGGYEVVELNPAAVKESRAQQLLARLKSDARDLGAMAELMVRGAGRQPALRTDALATQAAWVAHRRRKVTARVALANQVIGELDLVFPGLDACFKDVLRAKAGRVIVSHIADPDRVRRQGVEGLRRFVARRGVALSRPKAAEVVEAARVALRLPGAERAAMGRVLGADLSLLAALDAEIVAAEGALAGVLGDTPAGILQSLPGIAVVRASNYGAGIGDPARFPNAAAAYRAAGLVPALYESAGRTRGRQHISREGSVELRQAIIELGRGLSQHDPDFKAYRQRRLDEAKEPVVAAVAVGHRAHRLAFAMLRDQSPYDPGRWAKSVAAGRTAMAKTKKARQNDVTCPPPGTSLAQGGEADKNDNPAGRRARG

SEQ ID NO: 391234 - protein, 340 aa, unidentified
MNHVAIDLGSKESQVCIRQPDGTIVVEKKHPTRKLGELMQTWPTSRVVLETSSESFRVADLALAASHEVRVVPATLAKQLGVGERGVKTDLRDARKLSEVSCRIDLPSVHVPSADARELRSMLRSREMLVSTRTKLVNHVKGWMRTQLWKLRSGAPATLPDRLRAHAVTLQQAVPVHIEETLVVLEALAPQINASNNRVRKLAREHSVARLLMTIPGVGPVTALTFIAAVDRVNRFERTHHLQSYLGLTPGENSSSERERRTGITKAGSTAVRRTLVQAAWTAIRTAPNAPMVKWMAQIAERRGKFIAVVALARKMAGIMFALWRDNTTYSTFKAAASLR

SEQ ID NO: 391235 - protein, 443 aa, unidentified
MSTLIDAEMNTPAYAAWIGLDWADQKHFWTMRTADGKIQRGELRNTPEAVEMWAADLAQRFPGRSIAMALEQARGAVIGMLSKYAHLVLFPVHSTTLANYRKAFSPSGAKGDPSDADLILDLLLNHPDRLRRLQPDTVETRGLQFLTEERRKLVDQQTSELQRLTNWLKQVWPQMLVWFDDLASPLVGDLLLRWPSLQALQKASAKTLRTFFHQHNCRSEERIQQRLDQIRQAVMATTDAALRETATLCIAHSVRALAQMRSGIQTFDRRIAEIYRDHPDRAIMESFPGAGPALEPRLIAAVGSRRERFDSAHSLACFTGIAPVQESSGNSSWTHWRWACPKFIRQTFHEWAACSIRSCDWARAFYQHQRGKGKGHHAAIRALAYKWIRIFFRCWRDGVPYSAERYQKALQVHAVAGVPPVAQRTLEVSWISCGGFFKLVKNS

SEQ ID NO: 391236 - protein, 410 aa, unidentified
MVKENFIYVGIDLHKETHTAVMIDCYNQKLGEITFPNRPADFPKLVTKVKKCNTDAKEVVYGLENAYGYGRPLAVWLIDKGYFVKDVNTAISHRQAKHRGAMYRKSDSDDAEAIALATLNMLDKLPDACPNDAYWSLGQLVHRRDNIMKQRTRLVNQLHEQLCIAYPSYKQFFNDISRPTALYFWEHYPSRKYLKGKSVEDLRTELVPVSHNRCSTKNCEKILDAAASDKVKNNAYQDARDMVTLSIVSDLQHYDSQLAEVDKMLEQMYKMLGCTLTTIPDVNVITAVKILAEIGDIKRFSNANKLAQFAGIAPLHLSSSGKGKDVATKQGNRRLQATIYFLAIQMVQVSSKGTPRNSVVRAYYEKRKAEGKTSQQALICISRRLISIIYGMLKHGTEYRMPVVESAGEK

SEQ ID NO: 391237 - protein, 344 aa, unidentified
MDHFGGLDVSVKETSICIVDDTGRIVKEVKVASEPAALLKVLGNPTYRFKRIGLEAGPLSQWLFSALAEAELPVICVETRHMQAVLKAQINKTDRNDARGIAQMIRVGLYRPVHVKTLRSQKLRMLLTHRKLLQSKAIAIENDLRGTLRNFGLKVGMVGKVRFEARIQELVENIPDLAVLVEPLLIVRRVLREQIVILHRRLLAIVREDEVCRRLMTTPGVGPVVALTYRATVDVPARFRKSKSVGAVFGLTCSRYQSGEINWSGKISRCGDEMMRTMLYEAAQSMMHSKKWSWLKAWAMQIARRRGMKKAIVALARRLAVIMHRIWVDGTEFCWTREQATAAA

SEQ ID NO: 391238 - protein, 377 aa, unidentified
MMGTPSAQTLDDVGVRKMFQELEEVPMTMVGGLDVHRQQITFDYVDDDGLVHWGQIRPATRKTLRGWLAEHCPDGNGEFALEGCTGWRYVSEELAAAGLGVHLGDPAEIAVLRGPKKRAKTDRADAKLLRTLLLEGRFPESWIPPAHVAEIRSLGRLYYTLMDERRAWQQRIHAQLFHQGCPPIKALLSASGRDALARAPLSAAGRQYVDTALRRIDELSAEIEPLRTQLANFARRQQGCQALQRHYGIGWLCAAIIWAEIGDTRRFTSSDQLVRFAGLDITVYSSDSKRSPGHLSRQGSPELRWAAFEAAKCAARRGSPDYAYYHRQAAKHDGHNGKNPTLAVERKILRRCYHTLRDLGDAALALPDTRPQQEVAA

SEQ ID NO: 391239 - protein, 357 aa, unidentified
MRRPKAKSNDKLIAGIDLHGNNLVIGVINQDGTRLMHRKLDCRLEQVEEFLRPLKLRLQSMAVESTFNWYWLVDGLRARGYQIDLANPAKIEQYSGLKHADDKDDAFHLADLQRLNILPKAHVYDPELRPVRDLLRRRTNLVHQHTALLLSLQSLYARTTGQRLDLGEAKKMEPKQAPQLYEHPANQLIAQVQVEHIGALAKSIHRIEKAVLDCAREIPLYEKLLTLPGIGRILGMTITMEVGDVSRFETAGDFASYCRMVDAKRLSNGKCKADNNRKCGNKYLAWAFVEAANFARRYDESCRRWYDRKAAKAGKIVATKALGCKLAKAAWHVMAQQCNYDEKRMFPELANKPMKTS

SEQ ID NO: 391240 - protein, 323 aa, unidentified
MKHKFIGIDISKQTFDVAFCKNEKWEYYEFPNNLVGFRSLLKLIDLEDWVVMEASGPYYLSLASYLYSKQVQVVVENPLVIKRYSQMKLYRAKTDRKDARTIAEYACSNGLKRWEPNEKYITDIKQLHTAIEGLQKQLHQGSQQLEAFRSSGALDKYLEKEMKRIASFLQSKISKLEKRQEELAKEHFASSLKKLTSIPGIGNKTAIMLIVITNDFQKFDHYKKLIAYVGFSPRIYQSGTSVKGKGHICKMGKAQIRKLLYICSWSAKRWNKACKEMYERLAAKGKPERVIKIALANKLLKQAFAIAKGDKLFDENYQPNICF

SEQ ID NO: 391241 - protein, 429 aa, unidentified
MNYTQNEKIEQVTDTTLVIGIDIGSQIHYARAFDNRGLELTRKVFSFGNDIEGFNTFNQWAEDLKIEKNKTDILIGCEPTGHYWFAFAKYVTEHKMTLVMVNPFSVKKIKELDDNSPKKTDAKDPKTIAKLVIDGRYSIPYMPEGIYAEIRDLVYSRDRIVKQHNISANRIQRWLAIHFPEYLGIYTRFDAASGLAVLEKAPLPKDVIALGVGGIKKLWHDKKMRGRGVTEVRAKTLVDAAHNSIGLDGGAGTRSELYMLLEEHRLWTSQIEAVEKAIEEAVLKVKYVEKLLAIKGVGIITIAGFVAEIGDIRRFKSPKQIQKYAGLELVENSSGKHKGRSRISKRGRRKLRRILYQVMIPLLASNREFRSVYDYYVTRVKNPLKRRQAMVAVSCKLIRVFYAVLTKGMDYDRFKMMSDIHRESDQIVA

SEQ ID NO: 391242 - protein, 351 aa, unidentified
MESRVTALPKLFIGIDIHKRSWKIHCSTDLFAGKSFTMPPEPEKLREYVQKHFPDHEVSTAYEAGCCGYAAHRSFVNFGWRSLVVNPADIQRKGKERYTKTDRIDAQLISRELKDGRLESIIVPDIEREELRSLFRRRNELVKDFRRVKSVIKMQLLYYGVKVPPEFDNDHWSHDFRHWVDSQKFVFGTARECMASKLRNFRFIDKELRDVSSQLRAYCRKHFKQDFYLLRSIPGIGGIVAVGIIAELGDLRRFSSLKHLAGYVGLAPSIYQSGVNSKSMGMNPRCHRLIRSYFVEAAWQAIRTDPVMQAYYRQHLGKDVKKIIVKVAHKLLSRTLAVIKTKTPYEIGVIS

SEQ ID NO: 391243 - protein, 341 aa, unidentified
MDIVVLGIDLGKNSCSLAGLDASGRVIMRRRMRRSSVESFVNGLGRCIVAMEACCGAHHLGRVFAAQGHETRLMSPEYVRPYVKAQKNDELDAEAIAEAATRPTMRFVAVKSQSQSDTQALHRARERLVSERTELINHLRALLLERGIVAPQGRRKLQEELLVFADEDGIEALSPRIRLLIEDLRSEWRALDERIAAFDGEFVRMVREDDAVRRLTTIPGIGTINATALAAAVGNARAFGRGRDMAAWLGLTPRQMTTGGKPRLLGISKRGNRYLRKNLIHGARAVLPYLVQRETPLGRWARGLLARAHKNVVVVALANKLARIAWAVLARGRTYEAASAV

SEQ ID NO: 391244 - protein, 357 aa, unidentified
MAALSIADVPANVTVGVDTHKHSHIARAKDGLGRHLGQLEIETDPRGYAGLLAWAQEFGPVVTFGIEGTSSYGAGLTRFLRAHDQAVIEVLRPVRRDRRFGGKSDPIDADAAAGAVLSGKATAVPKAGDAGVEMVRALKIAKQTAIKARTQAVNAVKGLVVMAPDPIREQLRNLKTPALVRTCSAYRVDRASDPTSAIKLSLRSMCRRYVALDQEVRSLEKELEALTIRLVPQLRQLFGVGQDVAATLVLAAGDSGDRLRSEASFSMLCGASPIPASSGMVQRHRLNRGGDRQANAALHYIVIVRLRHDEATKAYFAKRKAEGKSKKEIFRCLKRYVAREVYRTLVGPREDAIRSAA

SEQ ID NO: 391245 - protein, 423 aa, unidentified
MKYALVRVLPEVPPGGVCAGIDWASADHAVCVVDLAGRVRDRFTAVHDRAGIAGLIARLRENQAGEVAIERGDGVLVDALLAAGLTVVVIGSRQVKNLRSRYGSSGAKDDRFDAFVLADTLRTDRARLRPLVPDSPATLALRAAVRARRDLVAHRVSACNQLRAHLAVAFPGAIGLFSELDSPVSLAFLAAFPGQQAAARLDEQALAAWLATVPRRGNTAPAGVLAARLAAAPRGAAGADAAQAAVTTQLAAATAGLAGRVRALEAEIAAQLAAHPDQHIFTSLPRAGTLRAARLLAETGDCRARYPDPWSLAGLAGVAPVTRRSGTYISHEFRWNLNRQLRDAICDFADGSRHASPWAATVYAAARDRGKDHPHAVRITARAWVLIIWRCWQDGTSYDPAKHRALQDILTRQAAAGTPQPHR

SEQ ID NO: 391246 - protein, 456 aa, unidentified
MAGSKSTRGRSSGQLGTINPKAAGLDVGSTFHVVAVPADRDEQPVRTFRTFSGDLHRLADWLEETGITTVAMESTSVYWIPVFEILEARGFEVLLVNARDVKHVPGRKTDVQDAQWLQQLHQHGLLRGSFRPRDGVVRLRAYLRHRERLVEYAASHIQHMQKALMQMNVQLHHVVSDITGATGMRIIRAIVGGNQAPERLAEFRDVRCAASEATIRAALTGNYRAEHIFALRHGLELYDVHQAKIAECDAEIEQVLRALNEARTMPREPLPAVRHAKAKNEPEFDARPALYTLLGADLTQIHGFGAYTVLRLVAECGDDMRKWPTAKHFTSWLSLAPRNKISGGRLLSSKTRRSSNRAATLLRIAAVNVGRTQTALGAFYRRLAARTGKAKAVTATARKLAILFYKALRFGMAYVDPGASYYEERYRQRVIEHLQRRARHFGFALVADPAATGGVS

SEQ ID NO: 391247 - protein, 345 aa, unidentified
MKHYAGLDVSVKETSLCILDETGRVCRELKVTSHPDDLAQVLRDPAWRLERIGLEASPLSQWLYSGLAAAGLPVICIETRHTKAFLKAQVNKTDRNDARGIAQMMRVNLFRPVHVKTLTSQNRRALLTDRKLLQEKAIAIEHDIRGLLRNFGLKVGAIGKVRFDDRICELVAGLPELAEVMDCLLEAHQSLRERFATLHRKVLATVRGEDVCRRLMTIPGVGPVVSLAFSATIDIPARFKNSKAVGPALGLTPVLNQSGESNRIGRVSLCGDAMMRALLYEAAQALLNRVQKWSWLKAWAMNVARRRGLQKAIVALARRLAVIMHRLWSDGTEFRWTKDGVLAVT

SEQ ID NO: 391248 - protein, 422 aa, unidentified
MSYCPVAGIDVSKRFSDMCILSPDNKIFAQEKIYHDETSINRANALLQEAERLFFSKPVIVMESTSHYHLILFQFFSEHGYDVIVVNPLQSNSMKDFSIRKRKTDRVDAFKLAMMYRTKTLRPSQIPQTATRALRQLCRHRAELLNDVSSYKNRLTALLDQTFPGYDKVFSDVGGVTSCAVLVRFPTPTILLVEEESELVEVIAAASKSGYSFAKKKAGLLISAAQKAQTLGIHSCADATLIVCTIQMLRTLSESVLQIEAAIDHLLAQIKEMRSNVSLLQSIPGIGSHSAALLLGEIGDISLFKKPKQLAAYFGLDPTERQSGSFRGTKNKLSKRGSPYARAALHMGVVNAICKHGKDSAANPVLLSYYEKKCRNKPAKVAQAASMHKLVFIIFAVLRDQKSFELKTPEQHAVEQGFVKAA

SEQ ID NO: 391249 - protein, 321 aa, unidentified
MTKDTQIYGIDISKDIFDVCTPDKGLLQFKNSESGFRAFAKVLPKNAHCIMEATGYYHLQLAYYLKGQCIAISVINPLKIKRFIQMNLSKVKTDRSDAIWIMKYGLSQEVALWTGESKIMQESLQLTRLLSVYTKQTTQLKNKLHGESVLGIPSKEVVRSLKRQLKALSKEMRLLEDALLQNVKSEHQESLTLLKSIPGIGEKTAISLIVLTDNFERFYNYKSLCSYAGITPIIRESGSSVKGRSRISKMGNARLRNLLFMCSFNACKFNTPCKALYDRLVAKGKSKKLALLAVCNKLLKQAFAIVKSGLPYDPNYKSALN

SEQ ID NO: 391250 - protein, 449 aa, unidentified
MMEPQEIEDEGHERIVERVAAIDVAKASGMVCVRVPHESRPGRRVSRVWEVAATTGAVTGLGDHLACQGIEKVTVESTSDYWRIWFYLLEAAGLEVQLVNAREARNMPGRPKTDKLDSVWLAKCTERGVLRPSFVSPAGIRMLRDYTRLRTDLTQERTRHWSRLEKLLEDALIKVSAVASTMNTKSVRDMIEALIAGERSPRALADLARGRMRAKRAALIEALTGRFDDHHAELARMLLNQIDALSAQIGTLTGRIEGLIGAMPAARGVNADGTTGPGAGTGPGAAVLPALARLDEIPGISLAGAQGILAEIGLDMTRFLTAGHLVSWAKLSPRTIQSGAKNHSGKTGKGNPYLKGILGEAAAAAARTDTFLGERYRRLVKRIGKLKALVAVARSILVIIWHLLSDPAAHFCELGSAYHASRTSTQRKARGHIRQLEALGYTVTLTQAA

SEQ ID NO: 391251 - protein, 355 aa, unidentified
MSQEKYIGMDVHQATISVAVMDSKGKLIMECILETKAATILEFIQGVRGTLAVTFEEGTCAAWLHDLLKPHVSRLVVCDPRKNALLKDGSKSDRIDARKLAELLRGNQLSSVYHGDHGLRTLKEVGRSYLTITKDLTRVMSRIKALYRSWAIPCSGTTVYAARHRSEWLAKISEPGVRLRAERFYQQLDMLRALHQEARRDFVVESHRHPAVKLLRQIPSIGPIRAALLVALLQTPHRFRTKRQLWAYSGFAVETHDSGEYRVVRGKVRRNRERISVRGLSDNYNRDLKNLFKSTAISASIRPGPLRDFYLALLTKGMRPTMARLTLARKIAAITLAIWKKGVDFDAKQLDQQAA

SEQ ID NO: 391252 - protein, 414 aa, unidentified
MEQIHDRVAGLDVHRDSVVACVRATGPRGGAVADRERFGTTTAQLSHLKGWLTDRRVSLVALEATGVYWKPVYYALEHRFAVWLCNAHHVKNVPGRKTDLSDAEWLADVVAHGMIRPSFVPPPAIRELRDLTRYRKSQIDARVAEVQRLEKVLQDACIKLTSVASKVLTQSGRAMVEALIVGQRDPAELAELALGKLRPKIPELREALDGHFGPQHAVAARRIRDHVDFLDASIAALTEQIDARTEAYRGVFQLLLPVPGFDRLTIDTVIAETGADVSRFPSPGHLAKWAGVCPGNHESAGKRRPVGVGPGNRWLRRALIEAARAAARTGGSYFGAQYRQIAKRRGPNKAAVAVAHSLSDLIWHLLSTGECDQDLGNDYFQRRRDPEREPMRLVRQLEQLGYRVTLTATPPPAA

SEQ ID NO: 391253 - protein, 444 aa, unidentified
MSKIRSAHLRGDRGQAFADLVRGIPPEQILCVSVDISKYFHVAMIHNGLGEIITPNFEVDIYQSGFDQLCQKIDAARLQVQAQVVLVGMEPTSHYFENLARHLLEHSQPVKLINSYSVKQNREQQLMRREKTDQIDVAAIGDLLRRGEGTPYQPPSRVYLQLQQIDRVRLGKLKIETMLKNQVLGHLDRIFPGLVLIGEAAQERYTPFFNVDFWRCRTLQALIRICPNPHQLVEMSPEQLIQLFHAQKCRMGPAMAAKIIAQAHKTLLPDLELAAIRCELLQHDLALLEAIQAHITSLEQRLTQLVAQTPYQVWTKLKGISSVQAASLAAAIGDPAHYTEAAQVFRRSGLVSGRNDSGTHQRKGRGNPILKIGDVYLRRSLMNAVSTLLVHQPALYGYYKRLALSKPAGVARVATARKAIGLLWAAQRDQFSNTLIHCKGADML

SEQ ID NO: 391254 - protein, 446 aa, unidentified
MRVEHERCCGLDIHKASITACALITEQGTTQEETRRFGTMTEDLRALARWLEKKAIQHVAMESTGVYWKPVWNILEPAGVELLLANAHEVKVVPGRKTDQKDSQWIADLYKHGLLRNSFVPPRPIRELRDLTRSRAILTQEHSSVCNRIQKVLEDANIKLGSVASDVFGVSGRAMLGALMKGENNPEVLADLSKRTLRKKIPQLRRALDGQVTQHHRSLLTGHWNRMEFLERQIADFEGQIAERIKPTPEETALTMPNTAIEDAVPLSPREEAIQLWMEIPGVGWTAACSMVAELGIQMDQFPSAAHAASWAALCPGNNESAGKRLSGRTRKGNVWLRRTMCEAAWAASHTKDTYFAAQFRRIAARRGSKRALMAVAHSILVTAYHMLKQKRHYQELGADFFDTINRDKVRDRLVQRLAKLGFDVTLKSTDIVETMPAHDDHPAGQ

SEQ ID NO: 391255 - protein, 426 aa, unidentified
MGMGKFTKTLCISERKEYSIMEGPIITVDVSKGSCHYQPFIENGHPMRKPKSLSATIDGFQKLGQTIKDLEAKTEREDIPVIFEATGVYHRPLQKYLEDHKIRYYIISPLLSATYRKTSLHSNKTDALDCAHIAKAYYCEKGLRQYQVQPQEYKRLYQLSRIYESELVHLRKRKVSLRSMLDIIYPRIDKTFKGNQNLYDPIPMEILKRYPHPSLLLSHREDTIVKTVGHRTGHLKGYTERIVHKIYEKAKECYSGCDIDDIEVVKLPTLIENMQEQKKKCNSLLKEMIEIARTCPYFASVVSIVGIGENLAARIIAELGDVNRFDNRAAIVAYAGLNPKIQQSGDIDGLHLKISKKGNKHLRCLLYLGAQCNYRLRKEDPLYEFTKKKRQQTQCPLSSKAAYTASAHKLLVIIYSLCKNGTLYHS

SEQ ID NO: 391256 - protein, 424 aa, unidentified
MAKLKIVYPICCGVDVHRDFLVACIASTNKQGVTTYESKRFSTYAGQLREFGQWLLERDCHDVCMESTGKYWFPVHNILVPLGLNVVVCHPKFVKAIKGKKTDKKDAQWISDLFKHDLVRGSFIPPEDIRQLRDLCRYWCKLTYYTTGEKNRAQNSLTVSNFKLDGVFTNVFGKSATAIIDQLLIRGGEPFDVTPYVHGHCKTPIDVIQNAVDGAFSPEQAEKLKIIRQHIDDIATLKSELEKMIFRLAERYQPQIELLLTVPGIGTPMTAIRIIAEIGADMSVFDSAKHLSSWAGLAPQNNESAGKKKTTRIGKAGAYIKPLLVQVALAASKSKANPEITTKYHALKKRRGGKKARIAIARRIMVAIYNMLLKNEAYDGTLYSKSEVIPEKREVTAEQAFAILRKQGFFIKDMDPLPKIAITV

SEQ ID NO: 391257 - protein, 456 aa, unidentified
MNRKRTKSKLDRTMPMVHPNAAAIDVGATMHMAAVRADRTPEPVRSFGTFTTDLHRLVNWFKECGVETVVMESTSVYWIPIFELLDARGFTVFLVNARDAKHVPGRKTDVSDAQWLQRLHSYGLLRASFRPKGQIAELRAYVRQRERLLEYAASHVQYMQKLTEMNLQLHHVVADITGATGLRIIRAILAGEHDPIALAHLRDYRCHASAETIGKALTGSYRAEHLFALEQALALFDAYHEKASACDVRIEAVLKELSISRGRRSGSLPSSRRRTDQTNAMAFDVRAALFALLGKDVTQIDGLGPYLSLKLIAECGDDLSAWPSAKHFTSWLCLAPSNKISGGKVLSSRTRRSGSRVAALLRLAAVTVGRTDTALGAFYRRLSARIGKAKAVTATARKIAVLFYNAVRHGMEYVDPGASFYETRYRARVIDNLHRRAKAFGFVLQPAEPTSSVAVS

SEQ ID NO: 391258 - protein, 408 aa, unidentified
MELKPMHRRVIALDVHQAKIIACAVVEHDDGRVEVTKRDFGAFRRDRRALAEWALQIGPEVVVMESTGVYWKSPFAALEAVGIIAWVVNARHVKAVPGRKTDMADAQWLATLARAGLLRASFIPPARMRELRLVARQRQKLVGMCSAEKNRLHKVLVDAGIRINVLVNDIHGQSARAMVKALLQDRPLHEVLDLKGRLRASRVELFEALSTEQLSATHRFVANEILQHIEQIEQRIALMDQYLLQGLQPWQAQLKLLQTIPGIDEQGAAMLLVEIGADMDAFGSAERLASWVGICPGNNESAGKRKSGRIRRGNAWVRRLLCEFAQAAARTRCAFKDKFQALAIRKGHKKSIVALAHKILRTVYAMLANGAHYQDRAVDYEALNVQRNAPRWIKMLRKHGFIATPAAA

SEQ ID NO: 391259 - protein, 415 aa, unidentified
MALKIVYKICCGIDVHKTFVVACIASTNDKGVTSYESHRFSTYTSGLKTLLQWLLDRNCKDVCMESTGKYWIPVYNILEKDCSIVLAHPKYVKAIRGKKTDKKDAKWIADLFKHDLVAGSFMPPADIRQLRDLMRYRFKLTCFKSSEKNRLQNCLTVSNIQLGNVVSDTFGKSAQAILDKILENPEDTSFDLEPLVFKSLKKKLPELRDAIDGYITPEQAGKLKIIKAHYESLESRKAELEELILALAAPYQQELAILQTAPGISSDFTAIGIISEIGTNMEAFPSAKHLCSWAGLTPTNNESAGKKKSVRVSKAGCYIKPLLVQCANAVVKSSKHPEMRNRYLRLKKRRGHKKAIIAIARMLLTALYHMLKNGENYNAELYRKSDLPPVDREITVEQAILIARNQGYKIKSATA

SEQ ID NO: 391260 - protein, 386 aa, unidentified
MIDGILGIDVCKNTLDVSISSYTKVRTKSFTNSPDGWRHLLDWLIAQKIQRVHACLESTGRYSLGIACALYEADHVVSIINPAQIRDFVRTKLGRNKTDGVDASHIREYCELFKPSPWAPPSKAHRRLGELQTIRSGIIAGLTEWKNRKNSGIVDAEAQALADATISHFTSQLGAVDKAIALTIDNDCDLQSKRDLLLSISGVGETLAGVVLAELPGPDVLRSSAEVVAYAGLNPRQHQSGTSIDRATRISKIGNAVLRAALYMPALSAMRYNSAIVALVTRLKSRGRLKPKQIVVAAMRKLLVLCFGVLKTGRPFDAAIAMGGCATSRSLSHGGHRLEAEAEVKFRSPKGCAAARGLDARLRLQHPSCHRETLHSQQLRSIKKSH

SEQ ID NO: 391261 - protein, 401 aa, unidentified
MNNTTMFYVGIDVSKDKSDICIKNENGNDLIHRFKITNKKADLEMFYEIIESIKSKTPGNSDVVIGMEATGIYSLPLYSALIRDGHKVKLYNPIQTNGFRKMNIRKTKTDPIDSAIIADMLRHSEPPQVSEIQDFHLFQLRELVRIRHRLIEKQSLCKVQLVRNIDAIWPDYESVMKRVFGATSLAILKKYSVPSKLRNESFEQFYELVQKKSRSKISRSKAEKLYTHAGNVLTIPELDSVISIEIKTLITQLELHDEQIRSVESNINQMMKQIDTKIMSIPGIANILGPTILGEIGNVKRFSNAKKLIAFAGLDPVVSQSGRFESKGGRISKRGSPLLRHALFLAANTAIQNDDNLKQFYVKKRSEGKHHFSALNAVAAKLLRIVYWVLKNKKEYQIQLS

SEQ ID NO: 391262 - protein, 369 aa, unidentified
MTRVIYVGLDVHAETIAVATADEGREGEVRYHGVIANTAEALKALCGRLSRKGERPDFCYEAGPCGYGAHRLVTALGFRCSVVAPSLIPRKAGDRVKTDRRDALMLARLHRAGELQPVWTPDEAHEAMRDLIRFRRQATDALKAAKQQLLSFLLRHGLRYPGRSRWGKAHWRWLDELRRFPFDHQQLVFEEQKRAIRQIETRIATLDAKIQEAVAGWRFGPVVEALRSLRGVDTVIATTLAAEIGDISRFDNARQLMAWLGLVPSEHSSGASVRRGRITRAGNALARSMLVEASWSYRHPAREQRRYLQRAAGLPERIRDIGWKAQTRLCGRYRRLAATGKALPKVLTAIARELAGFVWSIAREQPARA

SEQ ID NO: 391263 - protein, 380 aa, unidentified
MGDHSEAFVAFDTSKLRNAVAIAEAGRSGEVRFLGEIDNTPAATAKLVRKLAAKYDRVAFCYEAGPTGYGLYRQITGLGHECVVAAPSLIPKKAGGRVKTNRRDALDMVKQFRAGELTAVWVPDPRHEAMRDLTRARWAAVEDLRSKRQQVSSFLLRLGRHYEGKKTWTKTHMNWLASQKLEHAEQRIAFEEMLLAVRQAQERVARLEEAIRAAVPDWSLAEVVEALIAMRGIDMVSATAFLAEIGDLSRFRTPRELMAYLGLVPSEHSTGDTIKRGPITKTGNRRARRILVECSWSYRHPPRVGKEKQDKVAAAPRAVREIAWKAQSRLYARYRALIRRGKLKTVVVTAIARELSGFIWAVNREIVAGRAVAPQQGIQG

SEQ ID NO: 391264 - protein, 380 aa, unidentified
MQPAQHANANATLTLSIELAGNSWKLAATDGLQPNPAVLATDVEDRWSRLQDVFGHIDALRKKWRLPAHARVAVIYEAGQDGFWIARALQARGVQVFVVDAASIPVPRHLRRRKTDRLDAIKLLEVLRAWLRGERSEVHMVRIPSEEAEAQRLLSRQRGLLQKEVLQHRDRMRKLLLLQGCAETVDRGFAERLMAGQVRRGDGRPLPQQLWDWLLLECERLELVERQLASVEKTLMHQLPQSVQQTITVLARLRGVGWVGATRLVLELFWRDFANRRQVGACVGLVPQPYDSGQSHSDQGISKQGNARLRALLIEMAWKWLQHQPDSALAKWFARRTAGEHKRGRRVAIVAVARRLAIDLWRYLKNGVIPAGAQLKPAGC

SEQ ID NO: 391265 - protein, 343 aa, unidentified
MKIHALGIDLGKTVFHLVGLDASGQVVVRKRCSRTQLLAFTANLQVGLIGMEACSGAHFLGRALRAQGHEVRLMPAQYVKPYVKTNKSDYIDAEAIAEAVQRPRMRFVPIKTEEQLDLQALHRVRERWVMRRTAVVNQIRSLLLERGLTLPKGRSHLDEQLPRILEDAELNLSDSFRVLLAQLKLELEQLAARIEEMDRVIQKTARENEACQRLTEIPGVGPVTATALIAAVGNASAFGKGRKLSAWMGIVPGEYSTGGKQKLLGISKRGNKYLRRLFIQGARSVLQQRHKQAPGLSEWLAQLLARTHQNVVVVALANKLVRMSWAVLCKNERYRAPVFAGTT

SEQ ID NO: 391266 - protein, 376 aa, unidentified
MLYVGIDVAKNKHDVTALNVPGKTVLKPLTFSNNKAGFELLDLSFRQLNQDCLIALEDTGHYAFNLLNFLHEQGYKVYTYNPLLIKEFAKSLSLRKTKTDKKDAHGIALKLLSDPNREQFQHDNRQVELKILARHIHRLKKKQSDWKVQYTRCLDIIFPELDKIVGKHSEYTYQLLTCYPNPQKRLEAGFDKLIEIKRLTASKIQDILSVAPRSIGTTSPAREFEIIEIIKHYKRLIDKAETCVNDLMAEFNSVITTVTGIGGRLGAVILAEIRNIHAFDNPAQLQAFAGLDSSIYQSGQIDLAGRMIKRGSPHLRWALIQAAKACARFSPAFKAYLKTKLEQGKHYNVAIIHLAKKLIRTLFYILKKSCHLTNKK

SEQ ID NO: 391267 - protein, 368 aa, unidentified
MKKVSTAAAKASRNISRQTLTVGLDLGDRNSWYCVLDEAGQIQLEQRVGTNAKALREVFGAMPRSRIALETGTHSPWISRLLSELGHEAIVANARKLRLIGESRKKDDRLDAQTLARLARIDPQLLYPVKHRSAQGQADLAVIRARAGRVRARTAMLNTARGLAKSYGERLRGCNLRNLNPEKAEALSPELQAALQPLLAALESVSQQIREYNQQIETLAQERYPQTALLKQVKGVGTLIALTFLLTLEDPQRFGKSRDVGCYLGLQPGRRNSGKSQPQMHISKEGDPYLRTLLVQGAQHILGPFGVDCDLRCWGLKLAERGGRSGKKRAIVATARKLAVLLHHLWVSGEVYEPLHNSRRRTTVAAAA

SEQ ID NO: 391268 - protein, 409 aa, unidentified
MKFFVGVDVSSKDLKVCIMDCDGNSLKRFTVQNNPAGASFLRDQVISLADKHSCQEIHIGMESTSVYSFHPAMFLNEDEALHRYQTKVYLINAKLINKFKEAYPYLDKTDDIDAWVIADRLRFGRLPYTAVMQEQLLALQRLTRMRYRLVNNMIREKQHFLQNLFLKCNAFKSEVESSAFGNAMMELFLEQYSLDEISSMDVSVLADFLREKGKNRFPDPEGVAKCIQKAARSSYRLSKCVEDSVDVLLATSIECIRTLSAQIKQLDKAIERLLDGIPNTLQTIPGIGPVFCSGILAEIGDINRFKGEASIAKYAGLTWTKYQSGKFEAEETRMIRSCNHYLRYYLVEAANSVKKVEPEFRDYYQKKYREVSMHQHKRALVLTARKLVRLIYALLRNDQIYTPRRKVNR

SEQ ID NO: 391269 - protein, 367 aa, unidentified
MLYLGIDQHKRQLTVNLRGEDGTVILKRQVSTTWEKVRAFFADLAEKARGESGFLAVLEVCGMNPWLLEMLQEYGCREIVVIQPTERSKQKTDRRDAGELSHLLWVHRQQFLDGKHPLGLRRVEPPTPQQADDRQLTVLRARLTRKRTAVLNGIHKILRKHNLEQACPTKKFQTQKVRRWLAEMELPGLDRLEMNLLLPQWDLLDEQLQVVEAKIAERAEADEQVKLLESVPGLGHYSAVAIASRIGNIQRFKRPDGLANYFGLTPGCRNSGEATQRLGSITKRGSKMVRYLLNQAVVRVLRFDGAMRTWFKRIKKRRGSKIARVAVMRRLATILWHMLKRKQRYRYDGPIKKHREFERFEGQTEAA

SEQ ID NO: 391270 - protein, 322 aa, unidentified
MYEVILALDWSKSNMAIARLDKDRDTPRVFERPTDIAYLKKYISNIKESKSVTIEETSSAHYLYSELIELVDEVIVVDPYRNRLLLDGPKNDKRDAANLAMLTRSKNLMKLVHHEISENYEIRKLISAYEDLIKASVRAKNQLAAYELNNTKRMPTDSFVISQIKQTIICIGNSRKEYEKKFAELAKNHKDIKRIAKIDGIGIKSAVKIVGVILDAKRFSNYRKFLAYCGLVKYRKVSGDRDYGARITRYSRTLKTVFKMAALTAITNDTPFKEYYENLISKGVFSHNARNCVARLIAKTVLAVIKNGVKYDVKIIKQKIGN

SEQ ID NO: 391271 - protein, 387 aa, unidentified
MTARTVSNLPAATHVETARCLFAIELSKQSWVIGFITPLSAKISRRILSGGDWKGLLDLIEEVRARVSRETGRAVDVISCYEAGYDGFWLHRLLEAHGIRNYVIDPASLQTNRRARRVKTDRIDTERLLRSLMAYLRGEPKVWSVVRVPSVAEEDARRLHRERDRLVSERVQHVNRIKGLCALHGIYDYQPLRPQAMARLEQLRTAQGISLPPRLKSEIKRELQRLELVVEMIATLEAERDAIVEDEASTHVNAKKIQNLHQLKAIGPEFAAVLVGEIFHRDFNNRRQLASYVGYAPSPFQSGNVAHDQGISKAGNRKGRTTGIELAWLWLRYQPDSDLSVWFRARVGTTKGRIRRIAIVALARKLLVALWRYLETGVVPRGAVLKG

SEQ ID NO: 391272 - protein, 331 aa, unidentified
MSTLYTHFIGIDIGKFECVANVYGSKTTTSFANNSDGITKFYNEFKSSLEKGLVVCEVTGGYERLVIEQLQNHEIAVHRANGRQVKNFIRSYGIIGKNDHIDAKALGAYAFERHPKLALYERNAHESLREANERRDDLVRMRTAEKNRSSAPGGQSCATNFEAVISVLNAQIELIDTKIATLIASDPELLMKIEMLKTVPGVGNVVATAILSHMPEIGTMNQKQAASLAGVAPHPNQSGMKNGYRRTRGGRRQMRPILFMSALSASRSKSVLGDFYQHLLGNGKPKMCAIVAVARKIIVIANARIKEALAAAQKNDEALASLKKEDSMVPA

SEQ ID NO: 391273 - protein, 392 aa, unidentified
MYIVGIDIGKNHHEASIVSPEGKQIGRSLRFATTHKGADSLMSFIFKNIGNSPCVFGMEATGHYWYPIYSFLKAKGYTIYVTNPIQSDSLRKMYIRQTKNDSIDSFLIAEVIRFGQFGTTSMADENILAMRQLCRYRDSVISSRTEIKLRIGTIMEQIFPEYEKQFSSLWVSTSMGILEKYLTPENIENAPIDELFEIIKDKSHNKLTMKKAFSIREAAADTFGIKIAQDAFSFQLKQLIDRMNFHDKQIEALDIEIMKYYEQFDCYLHTIPGIGIIGAATILAEIGDISRFKNSSALVAFAGIDPTVRQSGEFNSTHNHMSKRGSPYLRHAIFLAATTCSFHNSPLNAYYKKKRDQGKHHLTATGAVARKLTTVIYAVLRDSKPYEPKKFC

SEQ ID NO: 391274 - protein, 344 aa, unidentified
MKYYAGLDVSLEETSVCIVDGEGTIVAERKVASQPGAIAEALRDSGFALTRVGLEAGPLSPWLHAGLRAEGFAVICIETRQAKAALRAMRNKTDRNDARGIAQIMRTGWFRIVHVKSGESHELRFLLTNRKTLQRKALDIENEIRGTLKAFGLKVGKVSRRRFEARVLELVADRAALHRMVVPMLKARAALLEEFARLHRMVLEVVRDDEVCRRLMTIPGVGAITALTFKTGVDMPGRFAKSKTVGAHFGLTPRKFSSGEIDYQGRISKCGDAMVRSALYEAANVMLTRCTRWSALKAWAARIAKKAGAKRARVALARKLAVIMHRMWIDGTDFQWGEQTKAAR

SEQ ID NO: 391275 - protein, 339 aa, unidentified
MVEVYVGLDVSDKSTHLCVVDGSGATVWSGACATDPDVIARTLKTRAAGLVRVILETGPLSAFLYHGLVERGVPAICVCARHAKGVLSARVNKSDPHDAKGLAQMARTGWFKQVRIKAEATHMDRASLKIREQLIAARQSIAGQLRGLLKLFGLRLGQVTTPGKRRERLRMLFAQRPELEPILTPLIESLEALEVQIARSTRQLAAQAAADPVTARLMTAPGVGPITALVFKSSIEDPERFSRGEDAGAFAGLAPRRNQSGERDYKGRISRAGDPMLRRALYEAANVLLGRVKRPCALRDWGLKLAETKGTKRARVAVARKLAVLLHRLWRSETDFRWA

SEQ ID NO: 391276 - protein, 346 aa, unidentified
MKYVGIDLHKKTISICVVNQERKQLDHKRFLCAAPDVIVNYFRKLGDFQAVVEATASYEWLVRLLEPLAKRIVLAHPKKLRVIAESTRKSDKIDARLLAEFLALDMIPQAYRPTPRQREHRVLVRQRYYLQRRITSIRNKIRRILSNYNADRESLFTAEGLEYLSTVKLSSSDRFAVEQLRKEFEFQRVQLKELEATLKQFIAEAPAAEAEARALLQSIPGVGPVTTEVVLSELADPQRFRAAKCAVAYAGLAPGQRESAGKRKDLHIERTGSKMLRWVLVEAAWQLVRRTGRWRVTFERLSGRIGRKKAIVAIARRLLCVMMALLKSGQPYRHAYEPALAGGKAQ

SEQ ID NO: 391277 - protein, 412 aa, unidentified
MEVLHPRCAGLDVHKETVVACVRIVSGGEVSRAVRTFETTTVGLIELAEWLEASGCTHVAMEATGVYWKPVWQVLAGGGFELVLANASHVKNVPGRKTDVNDAMWIADLVACGLIKASFVPEQEIQELRGLLRTRKQLVREKASHVQRLQKTLEEPNIKLESVLSDVMGRSGRAMLQALIAGETDPAKLAALAHPKVRAPQARLREALRGRVKRHHRFLLGLHLQQVDTLDAAITAIDREVDAGLASFRDAGKQLSTIPGVSELSAQVILSEIGTDMSRFATAAHLRSWAGLCPRNDESAGKRRSTRLRAGAPWLKATLVQCGWAAARTKATYLNAQFVRLRTRRGPKKAVCAVAASILTAAYHMLKDGTCYEDLGAAHFDRRRPDAQARRLVRRLAELGFSVELKSPVAVS

SEQ ID NO: 391278 - protein, 350 aa, unidentified
MCTLPVFVGLDYHDASVRVCVLDTDGRELANADRCNDWKAIAEFADRFGRPVRAAIESCCGAADLAEELVSCAGWSVDLAHPGYVQRMKQNPDKTDYQDAQLVADLERIGYLPRVWLAPQHIRELRQVVRYRLQLTEQRRATKLRVRALLREQRCRAPQGVNAWTKAWDHWLRHTAELSAEGRWVANQHLQELACLATRIRQVEKRLERLTANDVEVQRLQQQVGIGPVTAWTIRAEIGHFDRFRTGKQLARFCGLSPRNASSGQRQADAGLIRAANPALRAVLIEAAHRLVNYDRYWQKFAQRLRAAGKPGSVVAAAVANRWIRRLYHEMKTPSGELAVAVRSARSEDS

SEQ ID NO: 391279 - protein, 501 aa, unidentified
MRRKAYRATDVKDVRLEEVLKRAPAGAVTAGVDIGKEAIYGVVRWSDGSFERPWKAKNPAEVATLVGVLRALAGRRELIVAMESTGSYGEPLHSKLAEAGLTVHRVGGKAAHDYAEVFDGVPSQHDGKDAAVIAELAAFGKSTPWPFRAKSAWEAEMAFWVDWLDIQQNLQRMWIGRLEALLARHWPEATRVLEFSSMTLLRALAHYGGPADLAKDRQASARLASWGGYWLRKEKIEKFLASAAQTVGVPQGAEEVRRMQQYAAMALAARGETRKARGELKRLAAGNEAIQRQAKAVGIGTACVLWVMLGDPKDYSCGEAYRKAMGLNLKERSSGKHQGMLKISKRGPSIVRRWMYFAALRTAQSAFVKPWYEAKKAKDKDRGHGALIAIARKLALALHAVGARGTTFEPWRLFSQKVLVGKQQQAKQRAARSRSNSGREVLVGMGAPPPNPRDLSPGANPGDKKSARGRTPPPPSPVLAPGSALGSVPTVALSSAQVKRV

SEQ ID NO: 391280 - protein, 355 aa, unidentified
MSNEKYIGLDVHQATISVAVMDSQGKVVMESILETKACTLLEFFGGLRGSLFVTFEEGTWAAWLYDLLKPHVTEVLVCNPRKIPLLKQGNKSDKIDARKLAERLRLRDLKPVYHGETGIRMLRELARSYLTVVKDLSRVMNRLKALYRSWAIPCAGRDVYYRRHRRAWLEKIPEAGTRRRAEQLYQQLDLLQHLRQQARRELLAESRKHAITAKLRKIPSLGPIRSALAVALIQTPHRFRSKRQLWTYSGLGLETRDSGEYHYVQGQVRRRKKQATIRGLNKDYNHDLKGLFKGAATRASVKPGPFQEFYQRSLAKGIKPTMVRLTLARKIAAITLTLWKKGEDFDINKLNSQAA

SEQ ID NO: 391281 - protein, 367 aa, unidentified
MKKVSTAVTKQGRKVSQPTRTIGLDLGDRNSWYCVLDEAGQIQLEQRVRTSAKALQEVFGAMPGSRIVLETGTHSPWISRLLGELGHEVIVANARKVRLIGESRKKDDRLDAQTLARLARIDPELLCPVQHRSRQGQADLAMIRARAGLVRARTALVNTARGLAKSYGERLRGCNVRNLNPEKAEGLSPELQSALEPLLAGIEELSEQIREYNERIEKLAQESYPQVALLKQIKGVGTLIALTFLLTLEDPHRFRKSRDVGCYLGLQPGRRNSGQSAPQMHISKEGDPYLRTLLVQGAQHILGPFGVDCDLRRWGLKLAERGGRNGKKRAIVATARKLAVLLHHLWVSGEVYEPLHNSSRTTVAAAA

SEQ ID NO: 391282 - protein, 405 aa, unidentified
MEENRKRYIGLDVHKHYLIALGVDADLNVVLPARRVELSHLEAWVKKSLTRADEVVLEMTTNTWQLYDELVEYAGSVTVVHPPHVALITRSQVMNDKIAASILARLLAKGLLVGIWIPPQEIRELRGLVAQRQKMVRLATQAKNRLQAVIQRHHLVPPAGNPFGASHKAWWQSVSIGKLEKLNLQSDLETLQFAEKQEKQLTEIMEGMAAEEEEIGRLLHLAGFGVVTAVTVWAAIGDIRRFAEPQKLVGYAGLGTRVHDSGMTMRSGKITKAGRRDLRTVLIEAANVAANSHPHWKAELARLEPRLGRNKAIVAIARKLLVAVWYVLQGKTDKYAEPEAVAQKMLKFAYQVGKTKRPKGQTAAQFARIRLDALGLGSELTSIPWGSKKPIPLPPSNLLEKKAMP

SEQ ID NO: 391283 - protein, 315 aa, unidentified
MSAVPCFIGIDVAKAQWDIALRPSGERWAVPNDTSGVTMLVDQLQALSPTLIVLEATGGLERLVTSALATAGLPVVVVNPRQARDFARATGQLAKTDALDARVLAHCADVIRPTPRPLPDAQTQELRALLGRRQHLIVMRTAEQNRLAGTSERLTKDIVAHMTWLNAGITTLDDDIETVLRASPLWRENDDLLQSAPGIGPVCARTLVLELPELGTRTRQQSAALVGVAPLNCDRGTMRGRRMIWGGRAHVRTVLYMGTLVATRFNPVIRAFYKRLLAAGKVKKVALTACMHKFLTILNAMLKHRTPWKAQEVQS

SEQ ID NO: 391284 - protein, 407 aa, unidentified
MEIYCGVDWAEAHHDVTVIDQTGRVLAHRRISADAAGLRVLLELLAEQAGQVQSVPVAIETEKNLIVVGLQAAGVTVYAINPRACARYRERHSQSGGKSDPGDALVLANILRTDGHLHRPLPELSDSARAIKVLARQHQEAIWAMHQTTSRLRSVLLEFYPQALEAFPNLQHRAALTFLEAFPSPRRARRLTMSRTVSLLRSSGRGNRAGLAERIRSTLRGAGIEQPEPVEEALALTAQTLVGILHQMHQGIARLEEALDTAFTAHPASKTMQNIPGLGPVTGARILAEIGDDPDRFASASSLRAYAGTAPVTRASGRSHYVKARRVRNKRLADACHWWAFASLTHSPGARAHYDRRRAAGDHHNAALRHLANKLLGRLWWCLRHNINWDEYAAWPSVELTPVELAA

SEQ ID NO: 391285 - protein, 354 aa, unidentified
MKKFFIGVDVSKDTVDVSFFDDDRMKSPEYLAQYSNSPKGFREMVKDLRMCCHGVSSGQWLFCCETTGRYDHPMCHWLVDHGMVVWRESALQIKWSSGIQRGKNDRVDSLRIAEYAWRHQDKMQKFVKPSESLSNLKAAFTHRRRLVEKRTATRCQLKSMSSEKGLSASVARMIVRDLSREIERLSASIATMDESIQKIIRSDSELDRNYRHIISVKGVGPITAVALIVCSGNFKAITSAKKMACYCGVASFRSQSGTSINRKASVSNLSNRQIKSLLSMAARSASRSNPVFAEYFNRTLSRGKPVALVYNNLRNKIITVVYKLIERDCDFDVDYMRMHSTGQRANEPAIREAV

SEQ ID NO: 391286 - protein, 319 aa, unidentified
MAQNDLVVAGIDVAKDKVDVCIRSPSLKRTFVNTIEGRCELTSWLRRNKVGKAVMEASGGYEREWAKVLRNAKIEVRIVDPKRVRSFAQSAGRLAKNDTIDAEMIAWFAETFGEVPGQTYDAAREQLHQMVHARQALKDMQSKLTSQGEHAAPAAVQRIHARIVKTIAVELVKIEAEITALIQATAHFAKLAEIIESVPGIGRVTSAALIAAMPELGKASDKIVAALLGVAPYDDDSGRRRGERQIRGGRRRTRNVFYMACLGAATQHNPVLKAFYDRLVAKGKLKKVALTACMRKLISILNVMIARREKWDAKRYAVN

SEQ ID NO: 391287 - protein, 366 aa, unidentified
MDYGVYCGVDFHARQQTICCLTTEDGVIATYELKHDNKKAVRDFYAQLPGPVLVGLEAGGYSLWFEQLLEELGHEIWLGDATEIRRCARRRQKNDRRDAALILDLLVRGEFPRIHRQAPLSREILRMLRYRHRLVKLRTISKNCLQALAIQSGLSLKSQLFTQAGMQQLTSVTMSPVMQCQREQWLQLLPALEQRITACEKWLSEQAAADPRVRRLRTHPGLGLLTSLAVVHTLDPVSRFPNQRKVAAYGGFDPCEDSSAERKRYLGISKAGSKLLRFLLIEAGQTAVKEDPDLKRFYRRLQQRRNKPKAKVAVARKLLIRSYILLRDEIDYAEFQRRAVAARLARENARLNACPLIEQSASLAGD

SEQ ID NO: 391288 - protein, 340 aa, unidentified
MKLYCGIDLHSNNSVVVILDEVDKVVYQKKLNNDLASMLAQLSIYKDKITAVAIESTFNWYWLVDGLMEAGYTVKLVNTAAVQTYSGLKHTDDKDDARWLAHLLRLKILPTGYIYPKEERAVRDLLRKRSQLVRQSTTNILSLQNILARNTAQSLSSYKIKKLDDVQAEKLLDDPNTTLALKCNLNVIRCLQSTIAEIETTVLQQARIRAEFKQLLTVSGIGEILGLTIMLESGDMSRFPKVGNFSSYCRCVKSERLSNGKKKGEGNRKSGNKYLAWAFIEAANFAIRYNDKVKAFYQKKKAKTNGIIATKAVANKLARACYHVLKDQVPFDVNKSFSRW

SEQ ID NO: 391289 - protein, 379 aa, unidentified
MVTNVIPAERVRPSDFDIFAGLDVDKKSMSITFVDQDDFLKSLKMPCNAQALLSYARKNFADKRIAFAYEAGPTGFSLYDELTAAGERCFVVHPAGIPEAPNNQVKTNRRDSKQLAEALSGGHVKGIRVPTAIYRQLRHLTHLRNSYSAQVRATKCQIKALLLMEGIEFPAATPNSQWSSQVIERLSTLECNPGVRFTLDQRIAQLQVLALQKQVTHKEILRVCKSDPETAASVRYLMSVCGIGPIIACYTVARVGDWRGLRNPRELGAFFGLTPTEHSTGDRTVRGSITRAGDRTLRSMLIEGAWSAVYKDPELAEFYQRIKSRNPKDRASRIAIVAVARKLTARMYAVLTERREYTIHGQANLSADKASHVKATTEE

SEQ ID NO: 391290 - protein, 358 aa, unidentified
MSMQQVPAHRRVVIGVDTHKYVHVAVAITDLGAILESRSFAADSGGYAQLLDWAAGLGGKLTFAIEGTGSYGAGLTSAVRRRDIGVIEVMRTDRRDRRLRGKSDTLDAENAARAVLAGQATAIAKSADGVVEMIRQVKVAKDVAVKARTAAMISLKQVIVNAPPELREELQPLSKMALINRCAGLRPGPVTSIPAATKHTMRAIARRWQQLNTEITAHEKILAQLTSQAAPELSAAFAVGPDTAAEMLIVAGDNPDRVRSEPAFAKLCGVAPIPASSGMTTRHRLNRGGHRQANAALYRVVIVRMQHHEPTKAYVTRRTAEGKTKAEIIRCLKRLLARELWAAMRPLRATRETLPGAA

SEQ ID NO: 391291 - protein, 404 aa, unidentified
MYNAVGIDVSKEKSTVTVLQPGGTVIRKPFDVSHTSPNLNELAEYLDSLDGDTRVVMECTGRYHEPILKTLSEAGLFVSVVNPHLIKNFGSNSLRKVKSDPADARKIARYTLDNWNQLRQYSGMDNTRTQLKTLNSQFSFFMKQKVAAKANLIALLDNTYPGVNKLFDSPAREDGSEKWVDYAYSFWHVDCVRGIGLKAFTERYQAFCKRHHYNFQADKPEKLFHASKELVAVFPKEKTYKLLIRQSIQQLNLASAHVERLRREMNELASTLPEYNTVMGIYGVGKTYGPQLIAEIGDVSRFTHREALTAFAGVDPGVKESGRHKSRSNRASKVGSARLRKTLFQIMTTLLQNAPEDNPVYRFLDKKRSEGKPYYVYMTAGANKFLRIYYGKVKECLRNLEQTE

SEQ ID NO: 391292 - protein, 424 aa, unidentified
MNDTQNKKIAQVTDKTLVVGVDVGSDKHIARAILARGFEVSKKPFEFANTRDGFEKFVNWSYHLAKENQLTKIFVALEPTGHYWFNLADYLKAYDVKLVLVAPQHVKHSKEMDDNTQMKNDRKDPLVIAKLATEGRYMFPYIPEDIYAELRAAFNRRCDLVDALTRNTNRMVRWFDIYFPEYREVYGKANAISGMMILMRAPLPSDILNLGVNGICQIWREAKVRAAGINRAKKLVAAAERSIGRKGCEAVRQELWQLMEEHDLLSRQLSDMMQIITDILGQIPGADRLLDVPGAGVVTVAGFLSEVGDISRFTDPKQIQKLAGLAVVENSSGKRKGLPGISRRGRKRLRWVLFQLARCMVKSNKEMKAYHQYYTTRKENPLKKMQSLIAIAGKITRIFFGMLKNGTEYDPAIVMKDLKKVVAA

SEQ ID NO: 391293 - protein, 346 aa, unidentified
MGQYTYSHYLEQLPGAHDSVSTRLRNEEPIMNEKSYKFHVGIDVSKAILDIAISNNNSLLQFPNNEEGLKALVKALPSKKQTLVILEATGGYEKFAANYLRQKKFSVAVVNAKRVRDFAKASGKLAKTDGIDAKTIMMFGKAFNPAPQPLASKEEDQRQQNINRRDQLVRIIAMEKQHLEHASDAIKKSINKHIHYLEKELALIENHLKDLFNQDSELKDKMERLDEIKGVGEITAMNILIHLPELGKLSHKEISALAGVAPFNKDSGQSKGKREIWGGRAPVRAALYMAVLTARKFNPALKRFYDRLIGRGKIKKVAMVACMRKLIIIMNAMLRDGTQWEVRYVN

SEQ ID NO: 391294 - protein, 370 aa, unidentified
MLDTTTFVGLDVHARSIKAVSLDVMTGEVRCATFGYDAGAVAGWVRSVDPRARCVYESGVTGFDLQKRLSGLGVDCVVGAVSKMIKPSADRRRKNDRNDAEFLARMLSVGNVVEVWVPDDECEAARDLTRALEDARDDLSRSKQRLSKFLLRHGLAFDERTPTGRRKGNWTRAHWSWIESIRFAEGADNDVLAYYVDAVRRAAEEKARLEGLVEAEARKPRRRKRVDSLRCLKGVDTASAADLVFEAGEFSRFRNARSFAAWVGLTPSEHSSGESDRRGAITKAGNKHLRKTLVEAAWHYLTCSGRPKDLAKGQAPDRGARRHAAKGVRRLVERREALLARGVHGNKANVATARELACWVWAVGLMAEEA

SEQ ID NO: 391295 - protein, 345 aa, unidentified
MSEFYAGQQFVGMDLHRRRSVLVRMSETGEHLETTRILNDRDSLAKVMARAGESPEVVLEATYGWYWAADALAELGATVHLAHPLGVKAFSYRRVKNDQRDAADLADLLRMGRLPHAWIAPPETRELRELVRHRAKLVAMRSQCKAHIHAGLAKNGIWVPMTDLFGVEGNLLLDKVTMPAPYQERIASLRRFIEAFDAEIDLFTILAQRRLTHDAGYTAIQQIPGIGPVLGAVFVAEIGDVHRFAKPAQLTCWAGLTPSHRESDTTVHRGAITKQGSRLVRWAAIESVKMLPKSSHIGAIRDKVADRRGNRNIGAVAAARRQLELVFYGLRDHHIRALHHPPRAA

SEQ ID NO: 391296 - protein, 356 aa, unidentified
MNKIKASFENQTIYVGLDVHKRSWNAAIYLNDQYIRNIHQPPTPQALYHYLQNNYPKANYVCAYECGKFGFWIQRQFRHLGVECLVVNPADIPSTHKDEVYKTDSRDARGVGHALSIGQLKSIYVPGEEQEADRHLVRQRKKIWRDLVRCKNRVKGFLDYSGINVPSQYDNANWSRNFINWLNELEFVQGSNRITLNYLLSEMELLRKELLSISNTIRKLMRSKKYNHLYYLLRTITGIGPLTTASLLTEIGDMKRFRDFYHLNSFIGLLPMEHSSGERELKGSITVRKQRQLRSDLIECAWTARRTDPVMAMYYSQQIKRGKNGKEAIVKVARKLLGRIRYVWLNGEPYQTGVVK

SEQ ID NO: 391297 - protein, 397 aa, unidentified
MARATQPQNPPTAEVETARLLVSFELSEGRWVVTMRQPGSAKLSRFSMPARDTEQLLRLLTTQRQQAERGGQRAVRIISIYEAGRDGFWLHRWLLAHGVESHVVDPASILGPRRRRQAKTDRIDGEKLLRSLAAWLDGEADRCSMVMPPSVAQEDERRLSRERDELVAERTRLSNRINGLLANQGIAGFKPLQKDARQALDELRTGDGHALAPHLHMTIVRVLQRLALLGQQIKAAEAERDALLKAVPADTGAASQPAASAEAAMARELFRLRSIGPEFATVLSLECFYRRFDNRRQVASFAGLAPTPWSSGSVEREQGISKAGNRRLRKTMIELAWSWTRHQPSSALTRWFHKKVVGQGKRMKRVAIVALARKLLVALWRYVNDGVVPQGAVLKPN

SEQ ID NO: 391298 - protein, 319 aa, unidentified
MQSKLTFGMDIGKNEVVVACHEGAFAILKMANAVAGLRRWLGSVPAGSRLGLEATGGYHEPVAELAYSLGFTVYILNPKDVHFYARALGARGKTDRLDAQIIAAYVAEHNARLHPFTPLSADEKLLRELARRRATLVNAKSMLQQSLRVLPGFEREGRELLRAMGSFADRLERKLAQIAARSSERATLVKRLQTIDGVGTLTSIRCATLFTRVPFHSSDAVVAFFGLDPRPNDSGQHRGRRRLSKRGPSEDRRLLYNAAMSAIRTPAWRPLYLHLRNRGLASTEAIIIIARRIVRIAFAMYQNHSNFNPRLGPRPYCPA

SEQ ID NO: 391299 - protein, 412 aa, unidentified
MEGETVIAGVDTHKDVHVLCLLDGLGRKIWSGSFGADPEGYDRLAEAIGDPGSCMVVGVEGTASYGAGLTRRLVELGYNVVEVLRPKRDKVRPGEGKSDPLDAERAARKAASGKGCSVPKSQDGWVEAVRQLYVARRLAVATSTSCVACAKSMLTTAPSALRERFRGRERPKDLMPLLARGRKAGDALEESVLASLRSVAAVWKEARSQVESLDERIRALLEANAPALLGVEGCGTTTAAALVVAAGDNPGRLKGEAAFSMMCGASPIPASSGKTERHRLNRGGNRQANWALYEIAIKRMAYDERTRRYVARRTSEGKSRREAVRCLKRYIAREVYHVLMDPNPDGAAPEGPELAKMRKAMRVTQRQAAAELGLSAATLGHLEHGRRRSTKLERRYYELLCELERTLPQTAS

SEQ ID NO: 391300 - protein, 372 aa, unidentified
MRKILYIGLDVHKASISVTTAEEGRDGEVRFIGTIPNTPTDVAKLAKRLANEGRRLEFCYEAGGCGYGIYRQLVDLGHGCTVAAPTLIARKPGDRIKTDRRDSQKLALQHRFGDLTEVWVPDPVHEAIRDLVRARMDSVMQLMRARQQCLAFLLRHGRTYGPGKKNWTLRHRRWLATQQFDQTTHQIVFQDYVEAVWSAQDRRDQLEARMSAMLSDWSMAPLVEALRTVRGIDLISSVIFVAAVGDLGRFESPRQLMAYLGLVPSEQSSGSRIRRGGITRAGNGEARRMLVEAAWSYRYQPRVSSGKTDVVERQPKPVRDIAWKAQVRLCSRYRKLAAAGKKPTVVVTAIARELSGFVWAIGQTVRPPMPMV

SEQ ID NO: 391301 - protein, 328 aa, unidentified
MKLYNVGADLSKKTIDFVIHQLKAFLKIENSISGFRELIKWFYQHSINPSEVMIVMEHTGLYSYQLEQFLHQNGISFTKVSALAIKRSLGLVRGKSDKIDARRIARYAFEKQDCLSADQPVSENLTMLQRLHSTRERLVKTRASYMTAVNEEQQACNLKQTDFAIAAQLKVIKTLDQQIQKLEDKIQAIVQTDKDLNKNYSLLQSIKGVGPVVALATIIKTGNFTRFTNPRKFACFCGTAPFEHTSGSSIRGKTKISSLRDKKMKTLLDLAAKSATQHDKELHEYFEKRIASGKSIKSSRNIVRNKIIYRMFAIIKRQTPYQEHRMIA

SEQ ID NO: 391302 - protein, 344 aa, unidentified
MDHFAGMDVSVKETNVCILDDTGKIVKEVKVASEPQALLKVLGNPSYRFRQIGLEAGPLSQWLFSALAEAELPVICVETRHMQAVLKAQINKTDRNDARGIAQMMRVGMYRPVHVKTLRSQKLRMLLTHRKLLQSKAIAIDNDLRGTLRNFGLKVGMVGTARFEARIRELVEDLPDLVALIEPLLIVRRTLREQIVILHRHLLAIVRDDEVCRRLMTIPGVGPVVSLTYRATVDVPARFRKSKSVGAVFGLTSSRYQSGEVDWNGEISRCGDEMMRTMLYEAAQSMMHSKKWSWLKAWAMQIARRRGMKKAIVALARRLAVIMHRIWVDGTEFRWTREQAASAA

SEQ ID NO: 391303 - protein, 389 aa, unidentified
MAEVLRKLTGRAALDAGVVSGNGKKDGRGNTVGPNRDRLTVGVDLGDRWSQYCILGLEGETLAEGQLRTTQEDVGEFFRGLTTARVVVEVGTHSAWVQDVITELGHEVLVANPRLMEGSKRRKRKNDRIDANKLARLGRVDPQSLYPIRHRSREVRQDLVVLRARDALVSVRTELINTTRGRVKSMGARLPRCSSPSFAEKVKDAIPAEVREALQPLVQLVETVNECIERYDERIEELGRKKYGHTTLLRQVKGVGPITSLAYVLTLEDPQRFASSREVGPYLGLVPKQEDSGDSQPQLGISKAGDRMLRRLLVGSSQYMLGAFGPDTDLRRYGLRLCERGGKNAKKRAVVAVARKLAVLLHHLWVTGDVYEPLHRTETGTGTAQAAAA

SEQ ID NO: 391304 - protein, 319 aa, unidentified
METPQVSFKQVVSRGCGLDVHKKVVVATIDGEGIKKQAREYSTVTSSLKELKDWLLENGITHVAMESTGVFWKPVYNVLEPAGLTVWIVNAAHVKYVPGHKTDKKDSAWLCKLLLAGLLKPSYIPAKEQRELRDLTRYRTKLIQSNASNKNRIIRILEDANIKLSGVLSSTNGVVGTKLIDKICEGKEITMQEIDQVYHKKLEASKEEIFEACQGLITAHHVYMLGIIRQEMDNTQQTIESLDQRIKEVLLPYDNALGLLKKVPGISVKSAEDLVAEIGLDMNVFPTEKHLASWAGMSPGNNESAGKKKAEGPLKVTSK

SEQ ID NO: 391305 - protein, 360 aa, unidentified
MNEITRVGVDLAKRVIQVHAVNATGRVVVAKALPADKFAAWCVQLPAGCLVAMEACGGAHHWARKLCSYGLDARLIAGHFVTPYRMAGKGGKNDANDAAAICEAAGRPHMRFVPVKTPAQQALLAIHRLREGYKEDRTACINRIRGLLTEFGIVFAQSPEALRQGLADVLEDASNELPGIARLALQEARLHWIELECHIASCDERITAHVRSDAQAKAAAQLAGIGPVTASALVATVGDFTQFKNGAQFGSWLGLVPRQNSSGGKTVLGRITKRGDDYLRTLLIQGAKSAVMTAHKRSDKISQWLVQLLARVGWQKAVVALANKNARIVWALLAKGREFDPNYVSVKPGEVLPIPPAMPA

SEQ ID NO: 391306 - protein, 412 aa, unidentified
MEVVYPCCCGLDVHKKSITACVLWAEAKGKSRKEKKRFGTFTHDLLQLADWLAQCGVTHVAMESTGVYWKPVWNVLAEQFEALLVNAQHIKAVPGRKTDQKDSEWIADLLQHGLLRGSFVPPRPTSELRDLTRYRVSLVQEINRIANRIQKVLEDANIKLASVATDALGASGRAILEAMLAGERDSARLAEMAQGKLRNKIPELQLALEGRMTEHHRFLLRQLFDHLRFTESKRSEIEQEIDKRMRPFQDEVIRLCTIPGVDRVTAWGLLAEIGLNMNQFPSSGHLASWACLCPGSFESAGKRLSGKMRKGNVSLRRCLSQAAWAISMMKNNYLSALYRRIAARRGAKRAVMAVAHALLVIAYHMLKRKEDYRELGADHFDRIDVNRIRRSLVNRLERLGHKVTLEPLAQTA

SEQ ID NO: 391307 - protein, 426 aa, unidentified
MSITQNEKISQVKNTTLVVGIDISSETHYARAFDWRGLELSKIFKFESTSYGFENFSEWLAEICKTNQKDNIIIGAEPTGHYWFTLAEYLKEHDIKFVFVNPMHVKRTKELDDNHPSKNDRKDPKVIAKLVIEGRYLIPYIPEDIYAELRIMNENRMRINREMIAIENRIKRWFAIYFPEYKNAFGNWECDSSIEVLINAPLPADAVNMGAEAINGLWRAKKIRAVGMKRANLLVETAKSSVGVKHGASAARCEISMLIEDYLRKKEQMQRVVEILETLCIQVPNAEKLLNIKGVGILTVASFFGEVGDIRRFDSPKQIQKLAGLAITENSSGKYKGRSCISKRGRKLLRYTLFQAVMSMTMHLPEFRELHRYYTTRDKNPLKGKQSKIALCCKVIRIFYALLIKGTEYDSQKLMKDIIRPEPMAA

SEQ ID NO: 391308 - protein, 362 aa, unidentified
MSSTFQSFVGVDLHQCTVTLAAVDPLGEKISQLKISTKSTGKIEEWLTALPRPVHLAVEACPFVEWFIDRFRPCVDRIDIADATELANRRGKRRKTDRNDSLDIAHRLARGECPLGFIAPAELMQLRKLGRHWRCLSRLLARTKHSMKSMLHAANIRGPKFDGAAAQRWLLANRDLLGGVQQDAFADFIDILNLVERQRERLRRQMIFASRGGKHAATIARLMTVPGIAEIWGTIIAAEIGPFDRFPNADALEFWAGLTADMKESAGRTQSGHITKAGSATLRWALGKAAVTLCQSDAKQEATRQRLVARLGKPKANVAMARRLLRILFAMIRDGKAYQGGPRRDRTAAANRARLGRKKQVA

SEQ ID NO: 391309 - protein, 406 aa, unidentified
MAALGTKGRSPSCTKIGLYRREADEPGEGLAAKSAALDVVDGARSRHRSAIEWFVGANHMRGAVHMQITTIGLDIAKNVFQVHGIDAAEKVVVRKQLRRAQVMKFFAALPRCLVGMEACATAHYWARELTRLGHQVRLMPAKDVKAYVKRNKNDAADAAAICEAVRRPTMRFVEVKSAEQQGRLMQHRTRDLLMRQRTQTINALRAHLAELGIVAAQGREGLKQLLEIIADKTDERLPIDARASLIVLAAQLQALQTIIGVIERRIIAQHRANEASKRVATIPGIGFLGASAITATVTDASAFRSGRDFAAWIGLVPRQDSTGGKQKLGPISKQGDRYLRRILIVGAHAVLRLAKKNPQNYPWLAQLLARRPFKVVAVALANKMARIAWVLLARGGTYRTPQLAAA

SEQ ID NO: 391310 - protein, 323 aa, unidentified
MAQQPVFVGIDVGKDWLDVARHTSEEVRRFHNNEAGILELVAHLKPLRPHLVVLEATGGFEFPAAAALAAAAIPVVIANPRQTRDFAKSTGRLAKTDTIDALGLALFAARVRPNVRELPTEEARALEAIVARRRQIIDMMTAEKNRLGFALKPVQKGIEKHIRWLERQLHDVDHDLDSMIRSSPLWAAKSDLLQSVPGVGPNLSRTLIAELPELGRLSHKQLAALVGVAPISRDSGKARGKRMIWGGRAPVRSALYLSVWSAAKWNPVIRLFHDRLRANGKPPKVAQVACMRKLLTILNAMMRDGHPWDPSIPLEQLRLQHSC

SEQ ID NO: 391311 - protein, 434 aa, unidentified
MSGNGSTIQQYNGPSALLPSEGRAAFARTFSLHVGVDAGRSFHKMVARQPEKPRTAPFRIEVNRAGFDAADHFLRTKFPRVPRRRVLVGVEVGGEYGITFASYMAKKGYMVVSVLGTTTKRGRELDDNSPRKDDDKDAAQICGHLANGYFSRSMVLSEWGASLRLLVNERERYARDLRRVRTRLKRALAIAWPEFQAHFNNFGKHSVRFMLEAWPLPVDMCATDPRTVRRLVRKVSHGRIDADAVDSVRSSARQTVGLAVAREFRRAELRRLLASWNLLTDQLEAIDECLAGLIEQRPGARALLTIPAVQVVTAAHFVSALGEPADFASPRQVLKLAGLNLTQRQSGTTVASTVRISRRGRSHLRASLYWLAVRWTGPHGLYRRDYEALLVRNGGKAKKAICAIARKLVPLMLHVAKTGEPFDLERWKAAHRTA

SEQ ID NO: 391312 - protein, 376 aa, unidentified
MREKLRFLGLDVHAETIAVAAAEPDGEVRSLGTIANREDSIRKFIRKLGSPQQLRACYEAGPTGFVLYWQLTQLGVECAVVAPSLVPKKPGDRVKTDRRDALKLARSHRSGDLTAVWVPDEDSEALRDLVRQREAAKQDQLRARHRLTKFLLRTGRRPPLGLKAWTERYLAWLEQIRYTQPAQQATLVDCLNEVEHMSARVKRLEAAILEVVKLAPQSMQEVIRGLQALRGVAHISAVTIAAELGNISSRFESARKLMGYSGVFPSENSSGKRIRKGGITKAGNAHLRRIVVESAWSYRHLPRVGAKLRKRQQGVPAEITEIAWKAQNRLHKRYMKLTMAGKDQRKIMTAVGRELLGFIWAIGIKAEAACKQRMAA

SEQ ID NO: 391313 - protein, 342 aa, unidentified
MTIAVLGIDLGKNSCSLVGLDAGGRVVLRRRMRRETVIAFGAKLTPCVVAMEACCGAHHMGRALAAQGHTVRLMSPEYVRPYVKAHKNDDRDAEAIAEAATRPTMRFVAIKSEAQLDMQTLHRVRDRLVGERTALMNQIRSILLERGHVVPQGRAKLAGFLTSLLEAEEGVILTPRMQALVADVRERWQLLDQRISALDAEFAEQARTDEAARRLTTIPGIGALNATALVAAIGDVATFARGRDLAAWLGLVPRQVTTGGRPKLVGITKRGSKYLRKMLIQGARATMPTLRQSDTRLGQWLRGLLARAHANTAVVALAAKMARIVWALLRHERVYEATAAAA

SEQ ID NO: 391314 - protein, 425 aa, unidentified
MKHRHSDENGFSIYVGLDWGTTFHRACVLDASGNSLRECRIDHSGQAIMGFLRELTGMVSGKPDSVAVAIEVPRGPVVEAFLEGGFTVFSINPKQLDRFRDRYTVAGAKDDSRDAYVAADSLRTDQHCFRRLSVHHPDVVRLRELSRTEESLGGDLRRVINQLYQLLLRYYPQLLQLSSTPDEPWIWALLELAPIPQRGARLTVVRLKQLLSKHRIHRWTAEEVREVLATTPLPLAAGSADAISEHALLLLPQLRLLYGQRQQIRDRIEALLDRMTILGREHSEFQEHRDIGLLLSLPGVGCLIGANLFTEGSDPLAQRDYYALRAHSGVAPVTKQSGKSKQVVMRRGCSERLRNAMYHWARCSVQHDPLSKLHYARLRQAGHNHGRALRGVADRLLAILIAMLKSGQAYDAKLRQPNRAGADGA

SEQ ID NO: 391315 - protein, 391 aa, unidentified
MVCVGIDVAKDKHDCCILDSDGTIRADCITIPNNMDGFKQLLQTIRDCTKKSDKIKVGLEATGHYSYNILGFLLDNGLPTYVINPLHTNLYRKSLSLRKTKTDRVDARTIATMLLSDVDLKSYTDTAYHNEELKSLTRYRFDKVRERAKLKQSVSRLVTILFPELEKLVPSLHIASVYALLSEYPGAKQISEIHLTKLTNLLVTASKGRYGKDKAIQIRDAARTSIGSVMPAKSLELKHTIKLIRELTSEIDEIEVSIQKIMDELNPPILSIPGVGIQSAAMILAEIGDFSNFESPDKILAYAGCSPSTYQSGKLTNCYAHMEKRGSRYLRYALYNATKYVCHWNPVFAEYLAKKRAEGKHYNVALSHATKKLVRLIYALQKSGKTYLTAA

SEQ ID NO: 391316 - protein, 378 aa, unidentified
MSQNDFKTSETIQPQEARPVKHHMSVLGIDIAKRVFPVVGMDERGQIVLRKRLSRHDLMPFIATLPPVLIGMEACGGAHYWARRFRAHGHEVKRMAPQFVKPYIKSNKNDMRDAEGIGEAVTRPPMRFVPTKAVEQQDIQALHRVRERLIGARTALVNEIHGLLHEYGIVVPTGVSKFRQTVVGKLEADKAKLTPLSQEMFGKLIDEFAALEKQLAYYQEKLEALATTHPECQRLMTIPGIGPLTATALVAAISDASAFKNGRQFAAWLGLVPRQHTTGGKERLLGISKRGASCLRKLLGHGARTTMRWVGRQTDRRSPWMRHLVERRGTNRTAVAVANKHARMVWALLTSHQDDQPATSAGEQTRVSAAAQGVLARI

SEQ ID NO: 391317 - protein, 314 aa, unidentified
MSTELLVGIDVSKDKFDLASTASCKQLQFDNNNRGIDHLVKWLDKQQPTLVVLEASGGYEMALVSALALTGLPVAVVNPRQVRDYAKASGKLAKTDAIDAAVLTSFAAAIRPQARPLPDAQALQLKALVARRRDLVDMAVAESNRLETALPAVAGGIRKHLRWLEKQLAAINKEIADIIRSSPLWREKDQLLQTAPGVGPVTSFALMAELPELGQLSDKKIAALVGVAPYNCDSGRHKGKRVCWGGRADLRRTLYMGTICATRFNPPIREFYQRLLADGKPKKLAITACMRKLLSHLNAMIRDNCPWQNNLCQA

SEQ ID NO: 391318 - protein, 424 aa, unidentified
MENTAARKRKQVPEGYLVIGVDPHKKRHAAVAITQDFANQAKFKFDNTREGLEMMLDRARVEMLKSGCRGVIFAIETGGHYWRNIAYYLDERGIPFRFINQYTLKRRREGKDLNRRKNDYRDSEVAAQLLCTGEFVESVIPQGVYAELRTSHNAYQRLVKERTRITNLVKGLLDALFPEFTRVFEDPGGLTALSVLPTCPIPRVIAGMTDDEFVATIDARHKGRRLMRKKLKALHYSAKTSIGINAGAYSLSHEIAFLVDKLELIRQQIRIMEGMPVKLVDETEEGKYLLSIMGLNYIAVAGLLAELGCFKLYRSAKQMIKMAGSNPTESESAGKKRSKTPMSKQGRPLLRYCAWTSVISMLRFNTDFRAWAKQRRERPVHANPLSGREVVGAALNRLLRLAFALVKNQTYYRDVKPVLIPVAV

SEQ ID NO: 391319 - protein, 341 aa, unidentified
MRYIGLDVHKDNITACVLTSTGKPKFEKDFIKDSESWNLSELMEYGDKEGFCVMMESGTYAYQPFRFFSDRGVETHVVHAQALKVITQSDKKTDKKDAYTIARMLRLWKKGDIDLQIAFMPTREQCELKDICRYREEISRKISDETRRIKSHMSRNCEYLPDDFDNFQTQRARNYVRFNFSSDITLMNRMAELERLFKERDSVKTEVESRLPDSKEVDLLTTIPGVARQTAVQIMSMIVDIDRFDDSEKLCAYFGMVPRVRDSGGKEHHGRMTKNGDRMMRVIMERVTESHVRNCDSSVTQYYKRKCSEMGTKKALITASRKMLSVIFAMLKSGSDFRLAA

SEQ ID NO: 391320 - protein, 411 aa, unidentified
MIKENYIYVGIDLHKETHTAVMIDCYNQKLGEITFPNRPADFPKLVAKVKKCNTDGKTIVFGLENAYGYGRALAVWLIDKGYLVKDVNTAISHRQAKHRGAMYRKSDSDDAKAIALATLNMLDKLPDACPNDAYWSLGQLVHRRDNIMKQRTRLVNQLHEQLCIAYPSYKQFFNDISRPTALYFWEHYPSRKYLKGKSVEDLRAELVPVSHNKCSTKTCEKILDAVASDKVKNNAYQDARDMVTLSIVSDLQHYDKQLAEVDKMLEQMYKMLGCTLTTIPGVNVITAVKILSEIGDIERFANANKLAQFAGMAPLHLSFSGKGKDVATKQGNRRLQATIYFLAIQMVQVSSKGTPRNPVVRAYYEKRKAEGKTSQQALICISRRLISIIYGMLKHGTEYRMPVVESAGENR

SEQ ID NO: 391321 - protein, 424 aa, unidentified
MHNRKANRMKSWQELTHYAGFDWAKDHHALVVVDRQGRIVADFEFAHTLEGWKGFADKLSAWPNLAIAIETSQGAAVDQLLQRECLVYPVHPVAAQSYRERKAPSGTKTDHLDAWGLADALRGDGHGWKALRPMDPLTQQLRLLCRDEVSLIEQRTALVNQLQQALAEYCPIALQAFDDWTRPFTWEFVLAFPTPQELVGAGKRRWEKFLHTHKLWRPETAEKRLRLFAQAGQFKASEPVVRAKSQLAVSLCKLLCTLEQQLKLYRKQIEALFREHPDHDLFGSLPGAKQVLAPRLLGAVGNDPDRYGSQEVLQCIAGTAPVSYQSGQINKVRVRWLCDKFMRHTVHLWANCFRKASVWGQTYYRKKRREGMSHAAALRCLGQRLLKILFRMLQTKMPYDAELHARSQQKHGSWVLKLVNQSPA

SEQ ID NO: 391322 - protein, 340 aa, unidentified
MKGYYYVGLDVHKKIIAYCVKRGDGTIVDEGEMGATRKELYEFSRKLPRPCLVGMEATQFSGWIYNYLKPLVNRIKVGHSLMLRAICVAKKKTDRLDARKLADALRCDWFPESYMPEEKIMELRTALRYRELLVREETRMKNKTAGLLMEAGAEYNKQKLHGKRYFNNLMEGLDYVPETMKELICMSHAGAQYFDASQRKLVNALREHPELKERVERLMSIPGVGEITALTWVLEVADPHRFNTVKAAISYCGLCSSDRESAGKKHRAPLSKQRNKHLQRVLIEAAKLARTWNPGIELAYEKSLAHRSNKNEATIESARKLVAYLMYVDKTGERFEIKAA

SEQ ID NO: 391323 - protein, 392 aa, unidentified
MYIVGIDIGKNHHEASIVSPEGKQIGRSLRFATTHKGADSLMSFIFKNIGNSPCVFGMEATGHYWYPIYSFLKAKGYTIYVINPIQSDSLRKMYIRQTKNDSIDSFLIAEVIRFGQFTTTSMADENILAMRQLCRYRDSVISSRTEIKLRISTIMEQIFPEYEKQFSSLWLSTSMGILEKYLTPENIENAPIDELFEIIKDKSHNKLTMKKAISIREAAADTFGIKIAQDAFSFQLKQLIDRMNFLDKQIEALDIEIMKYYEQFDCYLHTIPGIGIIGAATILAEIGDINRFKSSSALVAFAGIDPTVRQSGEFSSTHNHMSKRGSPYLRHAIFLAATTCSFHNSPLNAYYKKKRDQGKHHLTATGAVARKLTTVIYAVLRDSKPYEPKKFC

SEQ ID NO: 391324 - protein, 393 aa, unidentified
MNVVGIDIGAARHVAAVCREGEQEAEKAILRISSRRAGFDDLDRWMTRHGDVGLVVMESSGHYWMSLASHLRRRGLPVALVNPLSAKYFAKSRLQRTKSDPADARTLAVLGMSTHPTPREPLAGAELREAARFAMTLVTEQAKVCQRIQRLVDLGFPELRDAFEDPTCVSALAVLRQAPTAAAVQRKRATTLARATRPGGGRAIGPKRAESLKALAEQTVAPPELERQVGFELALLIEQYDLLEGQITQAESRLAGLVEGDVARRLQSIPGVGPATAATLLAEIGDIFRFTDVDQLLSYAGVHPREASSGRKGANPETSWHMAKTGNAHLRAALYRMAMVGVQHNPVIAEHYARKRAVGKSKMNALGHCMAKALALVWGVWRGGRDFDPAYRA

SEQ ID NO: 391325 - protein, 363 aa, unidentified
MKTTNQQNNAQVDGAIVVSKPYRCIKLGLDVHADSIRVVRMIDGATPQPAQKMTPQEFPQWAAKQLSLADKVCSCYEAGPLGYGLHRKLLALQIENIVIRPQVLDEYRKRVKTDKTDALALVKRLDAYVRGNRKAFAVVRVPTEQEEQERTVSRQREQLVSEVRRLAAQGRSLMLFHGFHIHGVWWRLQWKTLEEKLPDWLVERLEVFRALLKVLDAQIRKLTQGVEAQAPAARPRGLGALSFEVIRREIGDWRRFSNRRQIGSYTGLCAGVSSSGGSRKTLSINKCGNPRLRSSLVTMAWRLVHYQPRCRLIQKWKRVLLKSQAAAGARKKAIVAVARQLAVDLWRWQTGRIQPDQLGWQMT

SEQ ID NO: 391326 - protein, 345 aa, unidentified
MKNTMVGVDLAKEVIQVCIYTNKKVHSNVEITHHEFLAWLFKTKSTTIVFEACGMSNYWKQKAIEAGHKAHLISAKLVATVRQNQKTDKNDALAIIQAAQLPDINFIKGKNVEQQQLQSVMRLRELAIKQKTAISNQIKGLLLEFNVRVSTKNGGMGGAIQAFIEDAENELSFEFREALNTAHEQYVLIVKSIKTYDSCLEKIVAQHSDCKKLLNLEGVGTVNAVNLYIALGCAELGAFTKGKDASACMGLTPLQYSSGGKTKLGSIGKYVKNSLLRSQLITGAMAAVSQATRRTAVTKKDAWLQALVERKGKKCAAVALANKTVRTAFAMLTQGTEYKAELLLA

SEQ ID NO: 391327 - protein, 341 aa, unidentified
MEKATIIGIDLAKRVFQVHAASKDGRPVLRKKVSRAQLLGFLAKQPPTIVAMEACATAHEWGRAISGLGHDVRLVPPIYVKPFVRRQKNDAADAEAIAEAASRPTMRFVALKTEEQQARSMIFRTRDLLVRQRTQLVNALRGHLAEHGIVAAQGLAKVKVLATAMQDTGSLHPLVHELGQRYLDHIARLDVEIAELDKRLRRPSKDDEAAKRLQSMPGMGPITAAAIEAFAPPMATFKRGRDFAAWLGLVPRQHTTGGKPRLGRTSKMGQRDIRRLLIIGAMTVVRWAVRKGAAKGSWLARMLAQKPRLVVAIALANKMARSVWAMLSKGEEYRGSALAPA

SEQ ID NO: 391328 - protein, 422 aa, unidentified
MLHDSEDTEEIIERVAALDIGKAELVACIRVPHPDKPGQRAQEITTYPTMTRSLLGLADRLQELRVQRVVMEATSDYWKPVFYLLEARGLDPWLVNAKDVKHLPGRPKTDKLDAIWLAKVAERQMIRPSFVPPPPIRLLRDLTRYRADLVNTRTAEKNRVEKLLEDAQIKLSAVASDIFGVSGRQMLAALLAGQRDPTTLAQLARTRMRAKIPLLEEAFVGRFSEHHAFLLGTMLARIDQASADIAAVETRIEGLIGPFTQTVDKLDEITGVGPAAAHVIIAEIGIDMTRFPTAAHLCSWARFAPGVKQSAGKNKGRGTTGHGNPYLARVLGEAAVAAGKTDTFLGERYRRIARRRGKKKAIVAIGRSILVIVWHVLADPDTRYHDLGGDFYDNRISPDRKKHHHIRQLEALGYQVTLTPAA

SEQ ID NO: 391329 - protein, 354 aa, unidentified
MSQKLSSEIAVIGIDIGKNSFHLVGQDRRGALVLRQKWSRGQVEARLANLPPCLIGMEACVGAHHLSRKLGSLGHDARLMPAKYVRPYCKGEKNDYRDAEAIAEAVQRPTMKFVATKTAEQLDLQALHRVRERLVSQRTGIINQIRAFLLERGIAVRQGLHFLRVELPGILAKRTDVLSPRMLRVIEDLAGDWRRLDERIESLSAEITRLVEQDPACQRLMTVPGIGPLTSSAMVAAIGTGDVFSKGRDFGAWLGLVPKQMSTGDRTILGSISRRGNRYLRKLFVQAAWVVLVKIKPQQWERYGLKSWIEAAKKRLHRNVLAIALANKLARIAWAVLHNGRAFECVKTNAPRPA

SEQ ID NO: 391330 - protein, 407 aa, unidentified
MLLVGDDWAEEHHDVEVQDEAGRRLARARLPEGVGGVARLHELVGEHLAGDADPGQVAIGIETDRGGWVQALIAAGYVVYAINPRQVARYRERHGTSGAKSDAGDAHTLADMVRTDRHQLRAVAGDSEQAQAVKVVARAHQTLIWERHRHLLRLRTALREFFPAALDAFGDLTAPDALELLARAPDPASAARLSRAQITAALKRARRRQAEGKAAGIAAALRTVHLAQPPAVAAAYAATVRSLVTMIAAFNTEIAAMEEQVKVCFGQARDAEIYLSQPGLGPVLAARVLGEFGDDEHRYAGAKNRKNYASTSPITRASGKKKTVLARYIRNDRLADALHQQAFCALTASPGARAYYDQLRRRGQGHHAALRQLANRLVGILHGCLKTGTTYDEHTAWAHHQARQTAA

SEQ ID NO: 391331 - protein, 391 aa, unidentified
MRRIGLDLGVRHIAYCEVAHGKVVDRVTVKSLSELRSRLGPGTEQAIVAFEACREAWFVHDTLKEWGHDPRMLDTTRVRQMGVGQHRRKNDPIDAEAIAMALDGGRIAEAHVLSPARRALRAQLSVRSALVSTRAQYVTTIRALARAAGVLLPTCDTSRFVQKLDTLDCDAHTCTLVAPLVALLRTIEEQLVGVEHTLAGMAAEDPVLNLCATVPGVGLIVGATFVSVIDEAGRFKNAHAVGAYLGLVPSESTTGGADKRKLGSITKQGNSTARTMLIQAAWTIFRSRDQNNPLKRWVAQVADRRHKRIAVVALARKLAGVLWAMWRDGTVFDARGLAEQSAKGTRKSAQLQLGHAEALTRSAAKLARPATRAPAPPPKPRRPKSSRRVAM

SEQ ID NO: 391332 - protein, 345 aa, unidentified
MQSMYYLGLDVHKKTISYCVKDGSGNVHAEGAIPATRWDLDRWMKMLPQPWTAAMEATLFTGWIYDHLKPHAAALKVAHPLMLRAIAAAKKKNDRIDANKIADCLRCDFLPECYMASTEIRERRRTLRYRNLLVHQAVQLKNKISGLLMEAGVSYNKQKLHKVGYFKELLATNPDINEGLRPLLRLCRETLVRLQKTESALVRSLQRDSLLAERVQRLMTIPAVGPITALTWVLEVGDVKRFSSIKKAISYCGLCGAEKSSADTVKRTPISKQRNKHLQSVVVEAAKMAPRLSPELALIYDREKQKGNANRATLAVARKLVAYLVAIDRSQRDFLVVEKENCAAA

SEQ ID NO: 391333 - protein, 366 aa, unidentified
MKKTSTVRVNGNMIFKGHKLTIGLDIGDRWSYYCILDEAGEVLLEQKLSTTPEAMKQTFERVPRALIALETGTHSPWVSRLLRELGHQVLVAHAQKVQLISKSNRKDDRHDARTLARLARIDPELLGPVRHRSAKAQIHLTVIRARAELVSARTALVNAARGLTKSYGERLPNCGTQQVNRELAAELSAELREVLEPLLKEIESLNERIKEYDARMEKIARESYPQVALLKQVKGVGTQIALTYVLTIDDPHRFSKSREVGCFLGLKPGRRDSGESQPQMHISKEGDPYLRTMLVQGAHYILGPFGEDSDLRRWGLRLAERGGKNAKKRAVVAVARKLAVLLHRLWVSGEVYEPLRNSHKAMRAAA

SEQ ID NO: 391334 - protein, 333 aa, unidentified
MHYVGIDVSKRSLDVCLLAEGSKGSRKTKTLSNGQDSAQNLAKWLILQKCELSQTHVIMEATGIYHEYLACGLHQMGILTSVINPCRSREFAKAMGIFTKTDAVDAYVLAFYGCLKQPEAWMPPEEEVRKLRALLQHRDSLLNDKLRIDNRLNTLKSTEAVQEVMDSLSLVNQYLKSEVARIERLISSHIAQHPGLKRDLKLLMSVDGIGKQIGWNMLAVLRGNNFKSAEQLAAYLGVVPVERRSGTSVHGRARLSKIGSSNIRAKLYMGALTAISKNSHIKALYERLLAKGKMKMSALGAAMRKLVHLCYGVLHTQQPYDEKYKAKIINFSS

SEQ ID NO: 391335 - protein, 413 aa, unidentified
MESYLVAGIDVHKRMLAVVIADAGREGEFQFQRRKFGTTASELPELRGWLDRQAVREAVMESTAQYWKPVWQELEGHCGLALARAHSSRAPRGRKRDFADAERLLRRHVAGELVLSFVPHPEQRLWRTVTGSKRQLTRDRVRIHSQLESLLEDGRIKLSGWVKDLLGVGSRRMLRALAEGETDPAKLAPMAVPNLCATPEQLQDALSAARTLSPMHRSILGLFPARLDLVESQIQALDAMAAAALRAHLDAVQRLAEVPGYGPDSAQQAIAEVGPTAGSFPSPERLPSWVRTCPRREESAEVSRNNRSPKGNRTMRRVLTQVAHAAVKSTGSLFETLYRKLAPRLGHNKAIWAIAHRLCRLTWKILHQGVGYIEFGNRPNPRAVRKRAAKLLRELPSLGYQVQLRPHSHAAPS

SEQ ID NO: 391336 - protein, 346 aa, unidentified
MEHYAAIDVSLEWSSVCIVDASGRIVREAKVRSEQEAVVAFFQASGLTFARIGLEAGPLSQWLHAGLVEAGLPAICIETRHVKAALKAMTVKTDKNDARGMAQLMRLGWFRPVHVKTLVAQEIRALLTARRLLLAKLCDLETSLRGILRGFGLKVGTISKLRFESRIRELAAGQAMLERVVEPVLQVHAVLRREYAALHRTLLAVVRDDQVCRRLMTVPGVGAVVAMTFKSAIDQPERFQHSKAVGAHFGLTPRKYQSGETDRTGRISKVGDAAVRAALYEAANILLTRAARWSSLKAWAMRVATRQGMKKAKVALARKLAVVLHRMWLDGTQFRWGSQAAPGSVA

SEQ ID NO: 391337 - protein, 391 aa, unidentified
MIYVGIDVAKDKHDCFITNSDGEVLFNVFTIANNLDGFNDLCQKIASVMEDVTKVKVGLEATGHYSYNLLGYLIDKGLPTYVINPLHTNLYRKSLSLRQTKTDKVDARTIASILMSDVNLKSYSDISYHNEELKSLTRYRFDKVKERAKLKTSVSRLVCILFPELEKLVPTLHMASVYALLSEFPSAKHVATAHLTRLTNLLSKSSKGRYGKDTAITFRDSARASIGSNMPAKSLELKHTIKLIQELDSEIDEIENEIKIIMDEINSPILSIPGINYRMGAMIIAEIGDFNRFDSPDKILAYAGFSPSTYQSGQLDGAYAHMEKRGSRYLRYALYNATKYVCHWDPTFAAYLAKKRAEGKHYNVAISHAVKKLVRVIYHLEKTKQQYIKAA

SEQ ID NO: 391338 - protein, 363 aa, unidentified
MEVAGRFIGIDLGERTYEMCIVDQKGKITRTGGKTDFAGIDKLCEKLNADDAVAIEACNLAFRIERAISKSVGCKVCIMNAGRLAVIYMSTRKTDKEDSMKLAKLLKNHDEDELPIVTPPSDEEWERRKLLSEYRSLKCQRTKEINKLHAIFEHNGYTQFVRKDMSSEKNRDNILPLLKGYEKEEAERLIERLTLLEKQIAQLLQKINAEVEKDEKIQKVMTVPGIGPITALAYVAYVGDVKRFDNAHQVSNFIGFVPKVDNSCTICRSGHTTKQGNPLLRSLLVQAAWATVKSKNGGALRDKYKYMAETRCIGKGKSIVTIARKLGELLYLILKTDQEYKPQKFITPEIRISKLAEEALEYS

SEQ ID NO: 391339 - protein, 357 aa, unidentified
MLSSNVKYIGLDVHKEAIALAVLNGAGKLVMESIVETKSSTLLDFLHGLRGELHVTLEEGTWAAWLYDVLKPHVREIVICNPRRNALLKEGSKSDKIDARKLAELLRGGMLRAVYHGENELRTLRELARSYLTVSKDLKRVKNRLKALYRSWGISCAGKQVYTPRHREQWLSKIAQLGVRRRVELLYQQLDGLQVLRHTVRVELLDESRKHKAEKILRQVPLVGPLRAALLLALMQTPHRFRSKRQLWTYSGLAVVTYDSAQHRYVDGQLQRSKKPQQIRGLNQNHNHAMKDIFKSTALSASCCAGPLQDFYARLLAKGMKPDMARLTLARKIAAITLTLWKKGGSFDAEHLKSQAA

SEQ ID NO: 391340 - protein, 435 aa, unidentified
MTADLLAPNAPPSSEPLPLGEFAALVGLDWGDKKHALALSVRGVQAPPEELVLDHCAETLHAWLDQLGERFAHQPVAVAVEASKGAIVAALMEHPWLVLYPIHPATSRRFSTAFTPSRAKDDAPDARVLLELLQCHRARLRPLVPQEPETRRVALLVEARRKMVDQRTFLTNQLQSLLKNYYSQALKLVGERLYAPLALDFLERWPELAALQRVQAQKLRAFFYKHQVRREESIQARLALLHDARALTTDRALIEVSILQLHALLAQVRTLNTHLSKIDEAIAEAFAAHPDAHFFRELPGAGKAMAPRLCVLFGVDRLRWANAQELQNYYGIAPVTEKSGRQLYVHWRWNAPLFARQTLVEWAGLSVQACPWAKAYYLQQKQRQKGHSAILRSLAFKWLRILWRCWMNHTPYDDALYLKQLKHRNAPLLAFLPAN

SEQ ID NO: 391341 - protein, 405 aa, unidentified
MDLLYARCGGLDVHPRSVSACARIMTDGRVTHEVRTFGTSTRELQEMADWLAGLGCTHLAMESTGVYWKPVWHVLEGRFELVLANAMHIRNIPGRKSDVKDAVWISDLLAHGLLRGSFVPPEKIQELRDLTRSRKQLVREITRHTQRIQKTLEDANVKLTEVISNVLGTSGRAILRALIAGETDPARLVDLAEGRLKAPRETLIDALRGRITEHHRFMLRMHLEQVEHLENAVRELEARADQGSFRPATELLMTIPGVSEVTARVIVAEIGDDMSRFPTAGNLISWAGLCPRLDESAGKRRSNRTRRSAPWLKTVLVQAARAAANKRESYPRAQYLRLKARRGPNKAVLAVAASLLTAAYHMLKYGVEYRDLGPNHFDRDKELQATRLIRRLKALGVEVTVKPAA

SEQ ID NO: 391342 - protein, 345 aa, unidentified
MLYVGLDLSRKRLDWQALLPDGERAAVGAVPPDRDGLSKLVRRLGDGEGVLAVIESMSGARFVHDELELHGWDVRIADALKARGIAPLACKTDTIDTWVLAELARLELVPEIWLPDPEVRAERERARFRLHLVKHRSSLKNRIHAILFQHGVPNTSSDLFGSAGRALLASLRLPEPWASTVAASLELIDLLDERIAACEGDLRRLGAEHRYVPLLMTCPGIGWVLAFTIASEIGEIGRFASPRKLVGYTGLCPKVEQSGERDRRGRLRKNGPSYLRWALVEAAHTANRHPSYRPVHERFLARHGRERGTKLAAVEIGRRLAEAIWHMLTTNEPFAPAGAPASLAA

SEQ ID NO: 391343 - protein, 338 aa, unidentified
MTIETLGIDIAKTVFQLHGVNRNGRLVLRRRVMRDQLLHVIAQIEPCTVAIEACTGAFYWQRKFEELGHRVKIVSPQYVKPFVRRQKTDGNDAEAICTAARQPHMRFVPTKTIEQQDIQALHRARQRMVNHRTAVVSQIRGLLLDRGIAFPKSITRARRMVPEILADEESELTALAREAIGELHDLFRDLDRRIASFDKKIERVFRASEDCQRIARIKGVGPKTATAVIAAIGDGTEFKNGRHLAAWVGLVPRQHSSGQRTVMLGISKRGSQHLRSLLVHGARSVVRTAAGKTDPFNAWVNQLHQRRGFNRATVAVANKNARVIWAVLRSGEVYHAAG

SEQ ID NO: 391344 - protein, 401 aa, unidentified
MTTPLGEVIGGVDTHADTHHVAVIDLNGRHLGDAKFPTTPAGYAALAGFLTAFGSVRRVGVEGTGSYGAALTRHLRENSFEVMEVIRPNRQLRRMRGKSDPIDAYAAATTALAAADHPAPKVTTGTTEAIRNLLVARRSAVKARTAAQVQIKSLLVTAPTSIREKFRGNGDKALIEGLSRMRSNPADPVLGPIVTALRSLARRHQQLTAEIGELEAALTPLVTNTNPALAATKGIGTVTAAQLLITAGDNPDRLRSEAAFAALCGVSPIPASSGKTNRHRLNRGGDRQANAAIHRIALVRMTYEPRTRAYIEKKRAEGMTSKGAIRALKRAIAREVFTLLTKQVEVPRVDDLRPLRQARGISLTAAATHFSVWPMRISELERGKRRDDDLANAYRQWLLTA

SEQ ID NO: 391345 - protein, 347 aa, unidentified
MKKSNEKERGEKIIGIDVSKQTLDVVLLNSQEKILLQKQWKNTLNGILKIIKLAEKNDCFVVMEATGVYHLNLANHLHAAKRDVSVVNPLVIKRYAEMRMLRAKTDKLDAKIIACYGLNQKLQRYVPPSENQDKIKIISHFIDNLKKLINQNKNQIEALKHHTCPYIEIIDIYKKKNMELEEEVKVYTKKLNKLISDTYPEESKKVLKIKGVGLVLCSIIFGYYRNFEHFENAKQVVAYAGLNPSPYQSGTSVKKKARISKRGDTRIRNVLYCCSLSAKRYNPDCKALYERLISKGKSKKEARIAVAAKLLRQCFAVVKYKREYKSFYYLEQQENYSKKMEKMKNVA

SEQ ID NO: 391346 - protein, 344 aa, unidentified
MGYFAGLDVSLEETAICIVDDAGQIVREARVCSEPEVLVAFFGACGMKMERIGLEACSLTAWLHAGLTEAGLPAICIEARQAKAAMSAMPNKTDRNDARGIAQIMRTGWYRAVHVKSPRCRSWRALLTARRMVLNKRRDVENGIRALLREVGLKVGTPSRKDFPARVRELAADDPVLANLAESLLSVIEAMTREVERLTKRVLDEVKLEPTCRRLMTVPGVGPLTALAFRATIDQPNRFRRSRDVGAHLGLTPRRYQSGETDVQGGISRCGDELARTALYEAAHSLLIRTSKWSTLRAWGMAVAKRRGMARARVAVARKLAVILHRMWADGSEFRWGKQAAPAA

SEQ ID NO: 391347 - protein, 388 aa, unidentified
MQDVADQSAAPTTIGADLCAIFVSLELSRSTWLATSLSPGRGEKMSKHSVSAGDIAALLARFSELRRKACARTGKSFPIVVIQEAGLDGFWIHRVLLSEGIESHVVDAASIATSRRRRRAKTDRIDGETLLRALLAHKRGEPRVCSMVRAPTPEDEDRRRVCRERKVLIMERVQHVNRIKGLLFSQGASGYEPLRRDRRARLDALQTGDGRRLPQHLKAQVCRELDRLELLLEQIRAVEAERDALLDAEQTKASTPPPMLLGVHGVGPEFASVLWSEGLSRHYDNRRQVAAYAGLAPTPWQSGSVNREQGISQSGNRRLRTMMIQLAWLWLRHQPRSALTLWFQDRMERNGGRRRKTTIVALARKLLVALWKYVSAGVVIEGAMIRPA

SEQ ID NO: 391348 - protein, 357 aa, unidentified
MGKSIRNLTAVTRVGLDLAKNAFQVHAVDATGAIVVARKLTRGRLVPFFAELAPCVVAMEACASAHHWGRALIELGHEVRLIPPAHVKPYVRRNKSDQVDAAAIYEAMSRPGQRFVPVRSIDNQAELMRHRARELLAGQRTAALNALRGHLAEIGLIAPQGAQHAYGLKRMAADGFNENGEIVVPDCVRGALRSLVGQIDALDEAIGAIDRELAASVKADETAKRLMTIPGVGPVTASAIMATIQDASSFASGREFAAFLGLTPRQNSTGGKTRLGRITKMGDRYLRKLLVVGACATLRHRRGNNDAMRLWASGMLERKTVKYKFNLTAVALANKVARIVFVLMTRGGQYDDRPVAA

SEQ ID NO: 391349 - protein, 304 aa, unidentified
MNGIGIDVSKRQLDVGTTDGETLQVWNNRSGFSELDVWLKKRPVSQIVLEATGGYERPVLDFLHAAGHPVVRANALRARRLAQGMGQMAKTDRLDAYALAQMAALVKLPAYQPLEPWQQKMREFVRARRQAMHALTIARQQQEMVGDRELRRLLQANITRLQTLVERLGKQIAEQVAQQPQLAVLKSMKGVGPGLQAVLASYLPELGRISGKAIASLVGVAPMSHDSGTMRGKRSIHGGRAEIRQVLYMASMSAMRHEPRLRDFYQSLRARGKEGKVAIVAVMRKMLVILNARVRDAEKGLVPA

SEQ ID NO: 391350 - protein, 342 aa, unidentified
MKFYCGIDLSARDCHVCVIDEQLQVMVQQKLRNELAKICQLLGPYKANLKIVVESTFNWYWLIDGLQAEGFDVVLAHTLGLYLITGAKVKTDRRDAYSLAKLLLVGVVPAAYIYPVETRPVRDLLRRRGHLVQVRAGEYGSLRRLLLRQGILSSQQQEIKTATETELEQWFAHPLVRLHASQELQRIELYSQQIAELEKTILALAKTEQSYELLRQLPGVGQTIALTILYEVGELTRFANVKVFSSYCRVVPGIAQSGQVTRRGRASKQGNHYLKAAFSQAAVHAVRCYPKVRRYYERQLKRHQGRGRQMICYNIIAHKLAQAAFHVLKEQTEYREELLFGR

SEQ ID NO: 391351 - protein, 356 aa, unidentified
MQRKSTKLDFSDQEIYVGLDTGKKSWKVSILTKEFEHKTFSQPPKPEVLIEYLRKHFPGAKYLCVYEAGYFGFWIHDALREQGVDCLVAHPADVPTKDKERRNRNDTVDARKLARSLRNGELTALYVPKRKALEDRSLVRMRMSMVKKQTRCKNQVKGLLSFYGYTIPDELAKSHWSRNFINWLGSLEFQGESGKQALQTLLDELKHLRQSIAQLTRQIRALAQQEPYQTNVQYLKSIPGISTFTAMVLLTEIVDINRFKRLDHLAGYVGLVPGEDSSGEQERNTGISRRRNAYLRTLLIESSWIAVKKDPSLLMSFNQLTKRMPKNRAIVRIARKLLNRIRYVLRNQEPYEIGVV

SEQ ID NO: 391352 - protein, 306 aa, unidentified
MTIVAQAHPFVIGVDTHARNHALSVLATAHGEVVGDGEFPATSAGMARAIEWVGRRTGGDLEVLWVIECAATYGAQLARAVTAAGYQVVEAARMNAKANRGIGKSDPLDARRIAAAVLPLQVDRQRHLRKDTGVRAGLRILMAARDHRTSERTATINALIALLRVLDLGIDARKPLTGKQITEIAKWRTRTEDIAAVIARAEAVRLAKRIGDLDDELAENVKTTTALLKESPARVLLDKPGIGPVTAAVALTAWSHEGRLHSEAAFASLAGVSPIPASSGNTVRHRLNRGATGASTRPCTWPSSCE

SEQ ID NO: 391353 - protein, 408 aa, unidentified
MSIVFGIDVSSRDSSVCVLQSGVTREYKVTNDTIGFKTLLIDLKEYAEHPQIILEATGIYSRRITRFLDEYDYDYVLLNPLKAKKEINQGLRRNKTDRNDAYHLALAQDRNQHQPNRKEPEAYHQLQSLSRAYEELTHDIVSSKNRLHKYLQLTFPELETIFNNSRGVNYWYLVELFPHCQDVRNLDVSTIAKQIKDFKGYGINRAQKLAIKLKHLADLAYPAVDQDDPERDEVVYYANRLLRLTADCERRSEAMIKLAKTLPNRDLEILMSIPGIAEITAVRILAELGDIRRFSNPNKINAFVGIDPGRYQSGEKDSSLRISKHGNAVARKILYRAIGQIDLAAKTSPCHIADYYERKKQFSQTKGFKKIAIASIHKLLRTVYILIITDQMYDYNVANNNQKDFCRN

SEQ ID NO: 391354 - protein, 343 aa, unidentified
MKLHVIGIDLGKTVFHLVGLDSTGRAVIRKKCSRKQLLAFTANLEVELIGMESCSGSHFLGRALREQGHEVRLMPAQYVKPYVQTNKSDFLDAEAIAEAVQRPRMRFVPIKTEEQLDLQALHRVRERWVMRRTAVVNQIRSLLLERGLTLPKGRRYVDQQLPRILEDAELRLSGSFRVLLAQLKLELEQLGARMEEMDRVIQKTAKENEDCQRLTEIPGVGPVTATALIAAVGNASTFQKGRNLAAWMGIVPGEYTTGGKQKLLGISKRGNKYLRTLFIQGARSVLQQRDKQAPGLSHWLAQLLGRTHQNVVIVALANKLVRMAWAVLCKNERYRAPVLAVAT

SEQ ID NO: 391355 - protein, 314 aa, unidentified
MTGPAVCVGIDVSKATLDLALRPTGERWTVANEAAAIEALAQDLRPHAPSLIVLEATGGFEHAVVAALAAAGLPVIVANPRQVRDFARATGQLAKTDAIDAEVLALFAERVRPEPRPLPDEAAQALDALLTRRRQLLDMLVAEKNRLGFARAVVRRGITQHIHWLERRLGDVDHELGQMIEQSPVWRATDDLLQSVPGVGPVLSRTLLGELPELGRLNRKQIAALVGVAPLARDSGTLRGKRMVWGGRAPLRAVLYMGALVATRWNPVIRVFYQRLRAAGKPKKVALVACMRKLLTILNAMARTGTSWRLGAAT

SEQ ID NO: 391356 - protein, 366 aa, unidentified
MKQVTTYVGIDAHKKDLFVAMLIGDATTPMTWQLANEPGAVRRLVRKLERDAPGRVVVFYEAGPCGYALQRQLTTPRVTCHVIAPALMPRKPGERVKTNRRDARKLAELGRAGLLTVVQPPTPADEAVRDLARARDDAREDLQRCRHRLGKLLLRRGLHYAGKNWTQAHRRWVDSLTWSHTAERVVVEDYQLAIDHTEARLEELDARLAALAEEAPYREPVGWLRCFRGIDTLTAMLILAELHDFRRFGSARALMAFLGLVPGEDSSGERHRRGRITKMGNALVRRVLVEASWHYQHRPAVGRALKARRTGQPPRVIAIADKAQQRLCRRFRRMVAANKPKPKVAVAVARELAGFLWAALQPPAAA

SEQ ID NO: 391357 - protein, 342 aa, unidentified
MSVYVGIDVHRKRSQVAVIDPGGQVLANRNVPNGAEPILKVIGGLPPGTPAAFEACYGTSWLVELLEDYGFDPHLVHPSRCKAIASARLKNDKVDAAILAQLLRADLLPEAWIAPPAIRQLRALLRHRVALVRLRTRLRNRIHAIVADYGHDRSGGGYWTGPGRAWLASLSLPAVSRELVEDDLGLIDALQGRIDRLDWEIRQRARSDPRVKVLTELPGVGPFTALVILAEVGDISRFASARKLASWAGLTPTVRGSDRVAHYGHISKEGSVWLRWVLCEAAQTAKRSPQFTATFQRIAKRRGKKIATTAVARKLLTRAWHLLTEADQAAAPQPAAPPTAAR

SEQ ID NO: 391358 - protein, 475 aa, unidentified
MKKSQKNKSAEVLKLLSKQKIRNVKELDGYKLSICHPDSAGIDLGSRELYVALNPAIAAEMDLPIVHKFSTFTSGLYACRDLLVSCGVTTISMESTSVYWVNICDVLEASDIKVCLVNPKKFRMVPGRKTDVLDCQWLQTLHLYGLLSGSFHPESQIRKLRSYMRQREKLLQDRTRYVQRMQKALTLMNLMLVNVIDDITGKTGLDIIRAILQGERDPRRLATLRNSRVKKSEEEIAEALTGDYKEEQLFLLELNYNAYCFFGQQLEKIDSQITDLLKNFPLKQEVPLGDTSKPKKQIKKSSGKNALQTKENLNELLFNIAGVDLSSITGLQTNTILQIIAEVGTDMSKFPSAKHFASYLGFVPHNKITGGVIISSKTDRIKSNAAQAFKKVIPSISQGKSALACFYHRIASKAGTGKAVVAVCRKLAMLYYNVLTYGKDYVDIGQSVYKKKLEEKEKMLLVKLAKKHNMLFVQS

SEQ ID NO: 391359 - protein, 429 aa, unidentified
MRTESTPGARGPVFCGVDTHADSHWLYVLDWRGRRVLSRRFPADAAGYEALAGAIAAAGEPACVAMEGTSSYGAGLTRHLASLGMPVREALSPARTQRRRPGQGKCDEADAERAARAAMSGSKLGTPKSQDGWVDGVRCMLAARSGAVKARTSAINTARSLLTTAPEGLRSRFRGMGGPRLMEELPSVRAEGALGAALGALADLWAAARDAALDMERAIEASLEENCPALLAMYGCGSVSAAKLAVAAGDNPGRLRSEASFAAICGACPIPASSGKTVRHRLNRGGDRQANSALYEITRQRVMRDPETAEYAERARGRGKSDREVMRCLKRYVAREAYRALMHPHEVRRPADASALVAARRAARVSQVRAASILGTSEKYISMLERGQRELKPIRRAYEAWVEAGLPLDWDRQAFEAERKMDSKKGLAI

SEQ ID NO: 391360 - protein, 463 aa, unidentified
MAKKNTTSRKSKSKARKSVLERINPNAAGIDIGANFHLVAIPEDRAEENIRKFGPFTSDLHRLADWLTEHHIETVVMESTGVYWIPVFQILEQRGFEVKLVNAAHVKNLPGRKSDVSDCQWLQQLHTFGLLNGSFRPKDEVCILRTFLRLRDTLVKDCSSHVLRMQKALTEMNVQIHRVLSDITGYTGMAIIRAILTGERNALTLAQMKHPQVKASTEQIVKALEGDYRTEHLFALQTAVELYDVYQLKIAGCENKIEQQLEQFESKLDFEQVLEQSGALKVRSAKVRLELQRQAYLTSVCGVDLTRLPGLSTLAVEVIISETGLDMNCWKSEKHFCSWLKVCPDNRISGGKVLSSKSRKTKNRAAGMFRLAAQGAMQSKTAIGAFIRRLRARLGAPTAINAGANKLARLFYRMLKFGAAYVEQGQTYYEQKYKERVLHNLSKRAKELGFQLTPFQPATVSVS

SEQ ID NO: 391361 - protein, 415 aa, unidentified
MDVLHDRCAGLDIGKKDLKACVRTPSPTGRRSRRQEVRTFATTTNALLELRDWLLDQQVTLVVMEATGDYWRGVYYLLEDTLNVILVNAAHAKGLPGRKTDVSDSAWLAQLGECGLLKASFVPPEPVRHLRDLTRYRTTLTVERTREAQRLEKELEDAGIKISSVASNILGVSGRAMLTALIDGQDDAQAMADMARGRMRSKIPALVQALTGNFGEHHSFLCRLHLTRIDELSATIEELSARIEAEMRPFAPQIERLVTIPGVKKSTAQVIIAETGADMTRFRTPANLASWAGVCPGHHESAGRQRSGRRRHGNRWLGGALGTAAMAAGRTRERTYLGARYARLVPRLGKQKTIVAVEHSILIAVWHMLTDNVDYHDLGGDYFTKQDPERAMRRIIRQANALGLTVRFDPIPDVA

SEQ ID NO: 391362 - protein, 288 aa, unidentified
MSYSTTVGVDLAKNVIQISVVSSRGKELSNRSLTRKKFAEFLGKQKPSLVAFESCASAHYWARAAQRHGHEARIIPAKAVAPFRQGHKTDSNDALAVAEAARRPNIKEAPMKTVEQQGLQAIHRSRELLIQECTALSNHLRGLLMEFGIVIPKGFASLLKAVPEILEDGENELPDLYRPTLHRMYSRLLELREDIEAMTKEVDRLAKAHPICSRLMALEGIGPIGALLLYATMGSGAAFSGSREFAAYLGLAPKQYSSGGKTNIVGLSKKIGNSRLRSVLILGARAYT

SEQ ID NO: 391363 - protein, 354 aa, unidentified
MKYYTSTTQFNCGIDLHARQMYVCVMDRDGKKLVHTNIRNNDFAFFLKLVAPYRHDLTVCAECMFGWYWLADACQDAGLNFVLAHALYLKAIHGGKNKNDRIDSEKIAHLLRTNLIPPAYVYPAAKRPLRALLRQRILYVWRRSELLARIQSHQLAYNRPTLPQTRSNRDRWEEKLLTQEDNPIRQLALQNDLALIRHYDTQITALEAQLQRLTKAAAWRDYTLLQTVPGIGEHLGLTLLYEIGDIHRFPTVKDFLSYCRLVKGTVASAGKLKGLRGAKLGNAYLRWVFGEAAVIAKRDHTVIGPLAQRLEAKLGNKFKANTVLAIKLARAVYFMLRDHTVFDPERLVAALTHQ

SEQ ID NO: 391364 - protein, 337 aa, unidentified
MKKNYQIIVGFDVAKAKLDYCILSVGCIDTCSFGCIQNTEKAIKHFISSILKKEKQKDILFCLENTGVYSMPVSYWLQEAKLDYWVVSALEVKRAKGICRGKTDKADSKDIAFYALSHLHQLKLSTLPEKDFLQLRLLLAEREKLIKSLGIFKTTNENKNFLPAEILKSVLAHNKKTVALLEQQLKAIEKLIQDIIDGNALLKEQSTLLQSVPGIGPQTCINLIAYTNAFSSFQNWRKFACYCGIAPFPYESGSRVRGKTKVNHIANKKLKSLLNLAALSAKRTDTEIKQYFERKVKEGKNKMLVLNAIRCKIISRAFAVIQRNTPFVDLYKFANAS

SEQ ID NO: 391365 - protein, 419 aa, unidentified
MSGMLPPEIRCVVGIDVAKASHVVCALEAPSGVVLLKSTPIPATAEGYAQVIGWLREWAGGDGDPAHLLIGLESTGSLWEPLYDALVQAGYAVLLLNPHQTAAWAASLGLRAKTDGIDAHTLARGLLAGWARASTVPDETVQALRALTRARRDLVASHSAARQRLHDELVPVFPELVGHLPEHADLGAAAVLRLLSRYSSAQAFATAPLDDLSRVLDEVSARRWTRAHAQALQELAHHSAASTRAVAARAVVVRTLALHLLDLHARVAELDAALAEVLRHDPPSQQLQAHVPGLGPTWTATIRAELGDVARFCRVDQVIAYAGLEPRTHDSGRYAGQRRLSKRGPGALRHALYMATLVAVRCRPEWQLRYRRLLDRGRAKKEALTILSRKLLTVIYHLLRTGASYDPAFISPAPPAGQA

SEQ ID NO: 391366 - protein, 443 aa, unidentified
MTRKNQKRFEVIHPDCGAVDVGGREHLAAVDPTKCNEPVKRFSTFTDDLHAMADWFESMNIKVVAMEATGVYWIPLFEILDSRGFEVYLVNSRATRQITGRKSDVLDCQWILQLMTHGLLRGAFRPSDQVCSLRSLVRQRGNKVRDQAKALNRMQKALVQMNIQLAQVISNIAGVTGMSILRAIVDGERNPEVLAMLRDKRVKADQATVARSLRGNWRAEHLHALSQELAVYDFLEKQIGECDQAIAFALERLPVLQDEIVIPAKTLRNPHRSNEQQLILHRALNKVMGVDLTAIPTIGIDTALVLASELGADLSRFPTSQHFCSWLGLAPPTRISGGKPLPGKSVKVINRAAQALKQAASIARNDKSFIGASHRARLTRMDTCCAIKATAHQLARLIYAMLTKGQPYVEHGMEAFEERSRDRQLRALERKARKLGLQLVKAA

SEQ ID NO: 391367 - protein, 345 aa, unidentified
MEHYAGIDVSLESASLCVVDATGRIVREAKVASEPEILIGWFRGLEFAVTRIGLEAGPLSQWLYAGMREAGLPVELLETRHVRNAFKAMPVKTDRKDARGIAQLMRLGWFRSVHCKSLPAQEVRALLTARKLLQTKNHDVEMSLRGVLRGFGLKVGRTTPRTFVGRIRELVAGHATLSTVAEALLAARGTLFEQWQKLEKRLRSLAREDRRVRLLMTAPGVGTIVALTYASAIDDPGRFRSSKAVGAHFGLTPKKYQSGETDVTGRISKIGDGGVRTALYEAANVILTRPVKGSTLKSWGMRLAARTGMRKAKVALARKLAVVLHRMLADGTSFLANKAAAAVAR

SEQ ID NO: 391368 - protein, 316 aa, unidentified
MANLVVKSVVGIDTAKLELVTYKADLDLLEAIANQKPAIKRWLKTLSAATAIAIEATNIYHLDVVELAYEAGFEIYIVDGYQLSNYRKGVGGRSKTDASDARLLARFLTNEGKNLRPWVPPPAVYGKLQSLLRRRAALVQAKTSLTQSWSNDALLKAAFAEFTKSMERLDLIVQKKLKEVLREAGLLEQVARCQAVEGIGFLTATALVMAFTRGNFSSGDAYIAFLGLDLRVSDSGQKNGRRRLTKRGCSEIRRLLHNAAMSASRSAAWKGFYEEHRSGGKATTQVLVMLARKLARVAFSLMKNQSEYRAKSAIMA

SEQ ID NO: 391369 - protein, 404 aa, unidentified
MYNAVGIDVSKGKSTVAVLQPGGVVIHKPFDVPHTSKDLNQLSEYLSSLDGDTKIVMECTGRYHEPMANALHKAGFFVSVVNPHLIKNFGSNSLRKVKSDPADARKIARYTLDNWTELRQYVDMDNTRTQLKTLNSQFSFFMKQKVAAKANLIALLDNTYPDVNKLFDSPVRDDGSEKWVDYAYSFWHVDCVRKIGLKTFTERYKAFCKKHHYNFQPSKPEELFHASKELVAVFPKEKNYKLLIQQSIKQLNLASEHVEQLRKEMDALASSLPEYTTVMNIYGVGKTYGPQLIAEIGDVSRFTHREALTAFAGVDPGVDESGQRKPKSNRASKVGSGRLRKTLFQIMTTLLQNAPADDPVYRFLDKKRSEGKPYYVYMTAGANKFLRIYYGKVKECLRNLEQNS

SEQ ID NO: 391370 - protein, 385 aa, unidentified
MMTLTRTGESTAVTTPVAPTLLLAFELGERTWKLGFSTGPVQQPRIRQIPARATDRLVEELARAKARFTLPADAPVMSCYEAGREGFWLHRWLVAHAVSNHVIDSSSIEVNRRARRAKTDRLDLGGLLSLLARHQQGDRRWRVVRVPDVAEEDARQLHRTRETVQQDRNRLINRLKALMTTQGLKLPVDANFATRLETAQLWDGTRIPAGLKARLQRGWAQLEFLNRTIEELDAERAALTADPQTTMGRYIHALPTLRGIGPVGTWTLATEIFGWRQIKNRRQLGGLVGLVPAPYQSGESSHDQGITRAGNKHVRRLMVQLAWGWVRYQPDSALTHWYQGKFGHGSRRLRRIGIVALARKLLIALWHYVEHGEIPEGAIVKASAA

SEQ ID NO: 391371 - protein, 348 aa, unidentified
MWRWTCIRQPRSRSVREDSGRVIARAILPTEEAALVEFFRGMRGTIHVACEEGTQAQWVHDLLVPLVDRVVVCDRRGESRSGNKADQVDADQLSEQLRWGNLRAVYHASAERTTLKELTRSYTNLVEDSTRVMLRLKALFRARGIPAPGQRVYHPRERAEWLAQLADRGAQLRAEVLYAELDMLRQLRPQAKTVMVAEARRDPAWAVLQTIPFFGPVRVALLLATMQTPWRFRTKRNLWAYAGLAVVTRSSADYVLRAGQPVRRRRAPLTRGLNRNHNRVLKDVFKGAATAATARPGPLQDWYQERLAGGMRAELARVTLTRKLAALTLRLWKKGERFDPTQLTRQAR

SEQ ID NO: 391372 - protein, 348 aa, unidentified
MPRMSTRLLRSIVSEITQLYFLTHFTMYFIGVDVSKDKLNAACIDMQGEVIFETEAINNLLGFRKILSLLGKHTGGDPYRIGFESTGVCHLKFLKFCLDNRLNAFIINPVLSAQAVRLSVRPRKTDRIDAVLIAQLVMGGQGRLIASYDLPQGRKAILNAIDQYQECLQKLKGHLHNMRAEDPVVLSAVQHSLKESIRQMAGEVKALKKMLDSMNTRETELLCSLVGISTFSAHKILDQIGTIDRFARGEQLVAFTGLEPKPIKSGSSIDYRGKITKRGSRKLRQIIYQCAGVARIYDCELKEFFEKRRSGGLHHTAAVCAVGRKLLLRIYAVLKRGTPYIPQKVLTC

SEQ ID NO: 391373 - protein, 343 aa, unidentified
MAYFAGLDVSVKETSVCIVDDAGKIVREARVASEPEALLQVLTNTIYRLRRVGLEAGPLSQWLYSVLAEAGLPVICVETRHMRAVLKAQINKTDRNDARGIAQMMRVGLYRPVHVKTLRSQKLRMLLTHRKLLQSKAIAIENDLRATLRNFGLKVGMIGTVKFETRIRELVESLPDLAVMVEPLLIVRRVVREQLGVLHRRLLAVVRDDDVCRRLMTTPGVGPVVALTYRVTVDVPARFRNSKAVGAVFGLTPAKYQSGENDRTGAISRCGDEMMRMMLYEAAQIMLVRSTKWSWLKAWAMKIARHRGMKKAIVALARRLAVIMHRIWVDGTEFRWTREVAAT

SEQ ID NO: 391374 - protein, 428 aa, unidentified
MNEDELSRVQEFRQLKKQIQGSESHLIVGIDVAKDRHHAFLGTATGRTLVKKLIFENSASGFSELLARVEAVRAQSGLSGVVFGLEPTSNYHKPLGRYLISKGCHVVLVGGKAVKNNRELLDERWDKHDTKDAANIADLVSRGKCFYYDMPSGQIEELRELHSLRARLKKEEHSLNLRIRNNLLAKHFPELDSFYTASERETLAIVRWCLNPQQIAGMPFDEFFKRVAPNARGIGQKLRLQKIHRLAHESIGCPVDSAVQLQAGLLVEKIKQVREQIVQVEQVIQQLCVQFPSYEYLLSIPGFGPYVASKVLATIADPRRFDTAKQVIRTAGYDLCADRSGKSSDQAVPVISKKGNSQLRYALYQAALIASSRHRFFMAYFARMLQGRERERGIRTKMRVKLAAKMLVIAWTLMKRGEPFNPEYLKMQ

SEQ ID NO: 391375 - protein, 356 aa, unidentified
MQLQDALTIPKIFIGLDIHKNSWSVSIQTDLFFHRTFSMPSVAEDLFQYVERTFPNHDVDLVYEAGCCGFSAARYFLNLGWHVLVVNPSDVKTSDKERYQKTDALDSKNLSNQLKAGVLSGVYIPTEAHEQFTTLARHRTQVTKKLRQSKSHIKSMLLFHGIAIPQEFDNSNWNKDFMVWLENIKFSSPCGELALQGKIRMYQFIRSEYLEIANQMRAHCRKTYKKDYNLLRSIPGIGGYLASVILAECGDLRRFNTEGQFSSYIGLVPGIYNSGGSEKCLGITPRSRSQLRSYLVEAAWIAIRKDAEMQNYYRKHQGKNVKSIIIKIAHKLARRILSVIKTETPYQINRNVVLEK

SEQ ID NO: 391376 - protein, 386 aa, unidentified
MQKLNDFSRSLIALEPDGTLIAVIEMSLSSWLVAGIVPGVERQPLKKLAVDESALLKLLHRWREEAEKAGRRIERIAVAFEAGRDGFWLARWLKARGIEVHVIHAASVAVSREHRRAKTDRLDTELLKRAFLGWLRGERDHCKMVAIPSIKDEDVKRPNRERENLVSEQSRIINRMKAALIRLGIRGFNPKLKRAAGRLEDLRTPEDEPIPPNTLAELRRDMERRRLVRDQIRQIEEARQERLDHASGDGPHAMVRLLVRVIGVGIETADMLVHEVLSRNMRDRRAVARYAGLTGSPDESGRKRREKGLARSGNGRVRRGMIQLAWRFLMHQKGSALAQWFRARTDNARGTRKPMIVALARKLLIALWRLVRQGVVPDGVVLRPAE

SEQ ID NO: 391377 - protein, 340 aa, unidentified
MKTLYAGIDLHSNNSHLAILDQDDKRVYHKRLPNMADVILAELEPHQKKLSAIVVESTYNWYWLVDSLMDVGYRVLLANPAAMQQYKGLKHINDKHDAFWLAHMARLGILPQGYIYPKKDRPIRDLLRKRGHLVRLRTSLINSLQGIISRNCGFSLNANKIKQRRKNHVTPLLNNQEDLALCGEVSKASIDFLSDQINKIESLTLARVKLSESFQCLNSIPGVGVILSLTIMLETGSIDRFAKVGNFTSYCRKVPSEWISNNKKKGKGNTKNGNKYLAWAFSEAAEYSRRHNDLARSFFNRKAAKTNKAVAYCALGHKLARAAYYIMRDQVDFDEKKLFT

SEQ ID NO: 391378 - protein, 341 aa, unidentified
MSKTLFCGVDLHSNNAMYVITDQEDRPVLKKRLSNQLPVVLESLEPFRKQLKVVAVESTYNWYWLVDGLMDHEYPVVLANPSAIDQYDGIKEADDLTDAAFLARLARLEILPTGYIYPREDRPVRDLLRRRTLLVRQRTAIILSLQNLALRQTGQRMGWRAIRDLSAEERTALLGDHDCLAFVTTEQADLIQLLTEKIKRFEKKVLEHARLKPVYRCLLTLPGVGVILALTIMLETGDIGRFATVGDYTSYCRCVRARHTSNGKNKGKHNGKNGNAYLAWAFVEAVHESFQTCPQAKRFYDRKRAQRNGALATKALAAKWSKAAYYMMKRQEVFDLTRVFG

SEQ ID NO: 391379 - protein, 356 aa, unidentified
MEIHKVQNFVVKGKEVFVGLEDSKKTWKIAVRYNKMLIHRVSMPAQYQVLIQCLRNKFPECTIRLIYEAGFRGFNLFDRLTEEGIDCIVIPPHLVTEPKVNRVKTDKRDANRLAVMLENQDFKDPCFVPDRERREDRQISRTLWGIQKDIIRQRNRIRKFLDFNGIEVPFPDRWGKEEFRALKELPLGDSLKKSLMTLITMLEQLWAHKESLQEALRHLCSKERYKKAFKIAMSLPGIGWATAIRFVLELGEDLSRFTSGKKIASFVGLTCSEHSTGEAERKGRITGMGSGFIRATLVENSWMAIRKDPALLAKFTRIWKGRGSKKKAIVAVARMLIVRLRACLISGTPYAIGTVK

SEQ ID NO: 391380 - protein, 317 aa, unidentified
MTTPGPVVGIDVAKAELVVAVRPGGDQWTVPNNEAGVACLRARLQQLVPTLVVLEATGGYERAAVAALAAVQLPVVVANPRQVRDFARATGQLAKTDSIDADLLALFAERVRPTPRPLADETSAALDALLTRRRQLIGMLGAERNRLEHAPPTVARGIRTHIRWLERQRGVVDRDLDDMIHQSPIWRAKEDLLRSVPGVGPVVSRTLLGELPELGQLNRRRIAALVGVAPFACDSGTQRGRRVVWGGRAPVRTALYMSALVATRHNPAIRAFYLRLVAAGKPKKVALIACMRKLLTILNVMLRTNTPWREMNQQETA

SEQ ID NO: 391381 - protein, 343 aa, unidentified
MTEVITVGLDLAKNVFQIHGVDGLDEVAIRRQLRRSQVIPFFTKLPPCLIGVEACPTSHYRDRELQVLGHEVRIRPANDVKPYVKRNKNDAADAEAICEAVTRPTMRFVAVKTAQQQSLMLLHRTRSLLIRQRTMLVNANRAHLAEFGIVAPVGLRGVKRLVAIVSDPTDARLPSLARTCLESLTASLTTVAWEASCNKRRILARHHSSEASRRLETIPGIGPIIATALVASVSDPSMFKSGRELAAWIGLVPKQNSTGGKERMGRISKQGDKYLRWLLVAGAMSVIRHGRKTNFEKNPWLANLVHRKPTKVVAVALANKISRTAWAVLATGETYRQPAPVEA

SEQ ID NO: 391382 - protein, 351 aa, unidentified
MPHKTAATVAHTIGIDAGKNTLHLIGLDDKGAIVLREKVARDRITVRLANVPQCLIGIEAGMATHYVARELSALGHDVKQVPPAYAKPFRQGHKNDFRDAYAIAEAVQRPSTRCVPVKTDDQLDLQALHRVRSRLVGQRTAVINQIRSFLLEHGIAIRQGLRFLRQQLPDILAKRSDVLSPRMIRIIEDLSGDWRRLDERIEHITAEIEILAQGSESCRQLMTVPGVGPIIASAMVAAIGNGTAFAKGRDFAAWLGLIPKQMSTGDRTILGRITKRGNRYLRTLFMQGARVILLRPANWMKHSFGPWLTAAANRLHHNVLATALANKLARIAWTVLMQARSYEARVEPRTA

SEQ ID NO: 391383 - protein, 372 aa, unidentified
MYYNTVYVGMDVHKNSFTLCAYTIESEKASYFERTEADYKKVLKYLEFLRTIYGNNTKFLCGYEAGCLGYTLYHQLSAQNVDCVILAPTTMLEQRSRKRIKTDRRDAEIIAKCLAQHNYSPVHIPSATDEETKEFLRMRDDHKLALKKVKQQILAFCLRHGYRYDGNSHWTAAHMKWLKALNPEALYKEILEEYLLTYTTLSDKLERLDQRIDELASQEEYKKSVKKLCCFIGVKTHTALSVVVETGDFNRFASASKYAAYLGLVPGEDSSGDDKTRLGITKAGNRHVRMLLTEAAQCFARGQIGYKSRALKSRQLGNTPQVIAYADKANERLRRRYYKMVLAKGKKHNVAKTAIARELACFMWGMMTDHIA

SEQ ID NO: 391384 - protein, 488 aa, unidentified
MKMLYDRCAGLDVHKKSVSACIRISKGKETSQETRTFGTFTADLEDLRDWLLKHKVTHVAMESTGVFWIPVWNVLEQCEANFVLTLINPQHVHALPGRKTDRKDGERIAELMQYGLLKGSFIPPPAIRELRDLSRRRTHLQGERNRVINRIRRLLETANIKLGSVVSDITGKTARLILGEICRGNCTPEELAKLAQASLKNKRAELIGSLKGFYSEHFRWLLTEAVQDLAYLDRKLEPLDQQLAKRLLPHGDLIRRLCTIPGVDFTTAAVIIAEIGLDMSRFPDAAHLVSWAGVCPGNNESAGKRFSGRVRKGNRYLRRVLTQSAWSITHKKECFLTSLFWRVAARGGRTKAAIAVAHRVLAIAWHIIKNEGEVYREVGGSHQDRLRPQRSARRLVHRLEQLGFEVNLKAKAREAAPAPESVTLPASPVNRRSHRSLSSSPASHQKPQAVAADPSICRRCARWGIACIHLRNANRRPSVVVSPDESIT

SEQ ID NO: 391385 - protein, 341 aa, unidentified
MTEVSTIGLDLAKNVFQAHAASASGAILFRKKLRRDQVLAFFATQPRCLVAMEACASAHYWAREIAKLGHEVRLIAPTYVKPFVKRQKNNATDAEAICEAAQRPTMRFVAVKSEAKQASAVVFRTRDLLVGQRTQIINAIRGHLAEYGLIAPQGPSQIDQLIAQIEDPSSDIPDPARSCLAVLVETLRALQGKIAALDTEIAARAKRDDGARRLMSIPGIGPLIATAIEALAPPVETFRSGRDFAAWVGLTPLQRSTGAQERLGKISRMGERTLRRLLIIGASGVVRWARRKGVPAGSWLARMLARKPPMLVIVALANKMARIAWALIAKGGSYRAPAVAA

SEQ ID NO: 391386 - protein, 331 aa, unidentified
MMNASEMIFVGIDVSKDTLELALDDKSKTQCFNNNEQGIKQLLARINTVKNGDEPVSVGAIVLEATGGFERQAAVALCEAGWPVMVINPRQARDFAKAMGYLAKTDAIDARVLSHFARTLHQSDRRERLLMKLPDAQQVALQALLTRRSQLITMRVAEDNRLAISHKSQRKSIETVRKVINKQLAGIDSNIDGLLQAHFADKLSLLKDFKGIGIGTQASLMAALPELGLLTHEQISKLVGVAPLNCDSGRHKGKRFTWGGRVDVRSMLYMAALSAVRYNSVIKPFYERLLAKGKPKKVVLVACMHKLLVILNAILKSGKKWNPLHLKTITA

SEQ ID NO: 391387 - protein, 346 aa, unidentified
MKILALDLGKYKTVGCEYESESGAHQFKRGVTTPAGLAKMVLEVKPDRVVIEVCSIAGWVCDLLWEMGIEVQVANTSDDAWRWRKVKQKDDRRDALKAARLSAVNQLREVYMPAQEVRQWRALITYRQHLIRRRTKIKNHIRDLLLREGQILARGSSCWSQAGMAALAAQARPFSACGPAELWRGELQLELEQLKEMQRQVATVTAQLDKIGAADARVRLLRTIPGVGPRLAEAIVALLDQPQRFRKASQVSGYIGMVPKAMDSGETERRGHITRQGSRLVRSLLVEVAWAGLRHNAWVRQTYQRLSGGKKARKKIAIVAVGRKLLVKCWAMLRDNRRWDWQPQIT

SEQ ID NO: 391388 - protein, 380 aa, unidentified
MLLLDDMGCQAGGEAASLTTMITDDKTETNKSYETIKLGIDAHAKWYYVARQLDGATPQPVQKMDFHGLLRFVVRQKDLAREVHTCYEAGAFGYHLHRKLERLGVHNLVVQPQDWDERGKGVKTDRIDVLALCQRLDRYVRGNRKAFSVVRVPSEEEERERAFSRQRQQLVRERQRLQAMGRSLLAMQGIHVRGKWWKGQTWAAICREAPAWVVERLEVFMKLIEPVEVEERKLTEGIQKVGRKSRIPKGVGPLSFEVLRREVGDWSRFNNRREVSSYTGLCPREHSSGGKRRGGSVNKSGNPRVRAMLVEMVWRMMRWQPGYHALRKWMAVLGDASRSAAVRKKAIVAVARQLAVDLWRLFTGQTTAEKLGLIYLPEAS

SEQ ID NO: 391389 - protein, 320 aa, unidentified
MLSFCGIDVSKDRLDVIVLPEEQCSSVSNDGTGWADLVERLRRRSIAAIGIEASGGYERGVMRTLLAAGMPVRQVNPFKLRQFARASGVLAKSDPLDARMIASFVAIMPTRPAQRTPAGAAQVAEILAVRRQLSAEKVAAENASRLLEDAMLRRLSRGRIGRLAGDIDLLDKRMVEIVASDTVLAHRYRLLTSMPGVGSLLACTLIALLPELGCISRKQVAALVGVAPYAFESGTLKGRRCIWGGRANVRQVLYMAAMSASNWNPRLKAFHDRLQAARKKPKVVIVAVMRKMITTLNAMVRDDVVWADRYIGRHSVATAR

SEQ ID NO: 391390 - protein, 369 aa, unidentified
MGEYSEAFVAFDVAKLKHAVAIADGGRGSEVRFLGEVANAPAAVERLIGRLAGRYGKLHICYEAGPTGYGLHRQIQALGHACLVVAPGLIPRRPGERVKTNRRDAVTLARLHRAGELTGVWVPDATHEAVRDLVRAREAAADDRRRKRQQLLSFLLRHGRVFSGGGHWTLAHRRWLAQQSFEHPAQQIVFQEAIDAIADADQRLRRLEQQLALIVPSWSMAPVVEAYQAMRGASFIVAVTFAAEIGDVRRFDNPRQLMSFLGLVPAESSTGETVRRKGLTLAGNRRARRVLVEAAWTYRYPARVSETLRSRLDGLPKAVRDIAWKGQVRLCARYRRLSAAGKKLPVVVAAIAREMAAFLWAIGREVAPA

SEQ ID NO: 391391 - protein, 352 aa, unidentified
MRTSQKTQGMITTIGIDIGKNTFHLIGLDKRGAIILQQKVSRSQLERRLANIPHCLIGMEACSGAHHIGRQLIAVGHDVRLIPAQYVKPFLKGHKNDYRDAEAIAEAVQRPTMHFVTIKTPEQMDLLALHRVRSRFVSQRTGVINQIRGFLIERGITVRQGPMPLRKALPEILSADTGVLSPRMVGLIIDLVQEWRRLDERIAAVSAEIEALAEQDDGCERLMTVPGVGPIISSAVVAAIGNGTGFKQGRDFGAWLGLVPKQESTGDRTILGKISKRGNKYLRTLFVQAAHVILARRPSAAMRGLWPWIEQASKRLHRNMLAIALANKLARIAWAVLARGGTYQPRITAHAA

SEQ ID NO: 391392 - protein, 340 aa, unidentified
MRTTTIGLDLAKSVFQAHGVDETGATILVKRLHRKQMLPFFSKFSPCLIGMEACGTAHHWARILAAMGHEVRLIPPSYVKAYVKRGKSDALDAEAICEAVQRPTMRFVPVKTIEQQSILMTHRARSLLVRQRTMIANALRAHLAELGLVANPGITNLAKLAEQALSDENALPVHARTSLGILVRQIMALNDEIAELDRQLMAWHAQSEASRRLAGILGLGVITATALAATVTDPDQFRSGRQFAAWLGLTPQQHSTGGKTRLGGISKQGDRYLRRLLVVGATAVIRHTKDKPTAMANWIRKLMEKKPFRLVSVALANKLARIAWVVLTREEAYRPYELTA

SEQ ID NO: 391393 - protein, 452 aa, unidentified
MAKLRKNKKAHGLVAAPVMEPNAAGVDIGATEIYIAVPPDRDTQPVRRFAAFTEDLKAAADWLERCRIETVAMESTGVYWIPLFQILETRGMKVCLVNARHVKNVPGRKTDVSDCQWLQYLHAVGLLRASFRPSGQVCAVRSLMRYRESLVGMAAVHLQHMQKALDQMNLQLHHVISDLSGTTGMAILDAILGGERNPLKLAQLRDPRIKASPETIAKSLVGDYRREHLFTLRQSVTAYRSYQQLLACCDVEIEQMLGEFSDGAGPDTPVLADPKDRHRPRRNEMKFDLRGHLYRIFGVDLTEVPGLNALTAHTLLTEVGPDLSAFPNVGAFASWMGLCPDNRVSGGKVLSSHTRKVNNRAARALRMAAQSLFRSQSWLGQYYRRMRAKLGAPQAITAAAHKLARIVFHMLTNRHAYDETVFAQQEIQNQHRLQQKLMQQAKKYGFQLIPIT

SEQ ID NO: 391394 - protein, 425 aa, unidentified
MSKDNVGIAAFVGLDWADQKHVVTLQEAGSDQKDRFKLEHTPESLQSWIEQLRQRFGGRVVAIAVEQTRGALIYALMHVEFLHLYPVNPQTVAKLRQAFYPSGAKDDPVDADLLLEILMTHRQHLRVWVPDDELTRSIQLLTEGRRHLVDERTALTNQLTAALKAYFPQAVEWFGELHTVRACAFLDRWPSLQVLKAATPSAVRKLYKRLGYRGEDKLEQLITHIQQAQPLTQDGAVILSSSMMVQALVSQISRLTESIERYDQQIASLFDRHDDSTLFGSFPGAGPALAPRLLAAFGSDRSRFECASEIQQLSGIAPVTEKSGKGIWIHWRLACCKFLRQTFQEFAGRSILQSDWARAYYDQQRNRGNSHHAALRALAYKWIRILFRCWQQRTPYDEVAYCKSLQARRSPLAAQLSAAGKPVLT

SEQ ID NO: 391395 - protein, 392 aa, unidentified
MRFVGIDIAAEQHVVAAIDPSEQVLIRPTPFREDAAGYRQLRALLGAPSDTLIAMEATGHYWKNLFAMLVTEGFPVALLNPLRTRRFAGEELERTKTDAIDALGLARFAAQKRPTPARLPDAATEELRELVRLRDRLVQDFGDRLRQLHRLVDLGFPEFTRYVRSLESELATAILREYPTAQAFHGVSVKRLARLCYDGRHRVGDELAQQLVAAAQSSVGRHHGEASRLQVRYACEDLDLLRRRLRTLAGDIEQHLDAHEIGTLLTTIDGIGPQTAARLVAELGDPAAFRDAGALAAYVGVIPATKQSGKRTGQRAGLTPIGHAGLRAALWMPTLTAVRTNPWLRAYYERLRARGKLPKVALVAAMRKLLCAVYAVAKTRRPFVPHLAESRP

SEQ ID NO: 391396 - protein, 341 aa, unidentified
MDEYIGLDVSLKDTAISVRRDGERVWRGKCPSDPRLLAEVIRKRAPQARRVVFETGPLSVWFYHALSAEGLPAICIDARHAKAALDMAANKTDANDADGLAHLAEVGFFREVRVKGYDSMLIRTLVAARLKLVQVTTELSNQIRGLMKTFGLVVPPSKGGQFEANVRRLLADHDGLEAIILPVLEAWRSVRTRAADLWRQLLAGARRSRSCQLLMTIPGVGAVTATAFTTAIEDPANFKTSRSVGAWLGLTTRRYQSGEVDYDGHISRRGDAHLRGLLYEAATVILTRTQADSNLRAWGLKLREKVGFKRAAVAVARKLAVIMHAMLKSDAAFDRAAGAMA

SEQ ID NO: 391397 - protein, 359 aa, unidentified
MIAIGVDVHKRQCTVAIQREDGELGCFGPMENTREGWRELLDRLPPEAEIALEVSTSGYFAMSVLEEAGWLDRAHWVHTAGIDSLRKQKYDRLDAQRLARKLSVADRDPLPEAWFPPAEIRQLRLRARQRCWLAVLRTQVKNRLQSLLQMHGLRPTVTDVFGVAGRAWLAGQVLPEATRESVEQLLRVHDFLSQELEKAEAHLRAVDPRFPELRRLRTIPGIGEILAPVIWSEMGRLERFRSAEAWVNYTGLVPSLYESGEVSIRGGITHQGSAWVRWALVQAANGVIQGVNPFARRYRRLRRRKVSNVAKTAIARSLARCVYGVLKSGGDYQAARWGRCPAEFARSSGAGKPEVAMGH

SEQ ID NO: 391398 - protein, 326 aa, unidentified
MEHELHYIGIDTAKEKLDVDVLRPDGRHRTKKFANTTKGHDELVSWLKGHKIDHAHICIEATGTYMEPVAECLYDAGYIVSVINPALGKAFAQSEGLRNKTDTVDARMLAEFCRQKRPAAWEAPHPLERALRALVVRHQALTDMHTQELNRTETAREVQRPSIDAHLLWLEAELKRLEKQIKDLTDDDPDMKHRRKLLESIPGIGEKTSAVLLAYIGLKDRFAHARQFAAFAGLTPRRYESGSSVRGTSRLSKAGHVSLRRALYMPAMVATSKTEWGRVFRDRLAANGKKGKVILDAMMRKLAQVAYGVLKSGVPFDAARHNPVAA

SEQ ID NO: 391399 - protein, 349 aa, unidentified
MTMVGGFDVHRQQITFDYVDNDGLVRWGQIRPATRSTLRSWLAEHCADGDGEFALEGCTGWRYVSEELAAAGVGVHLGDPAEIATLRGPKKRAKTDRADARLLRTLLLEGRFPESWIPPVHVLETRTLGRLYCALMDERRAWQQRIHAQLFHQGCPPVKGLLSAAGRDALAGAELSAAGRQYVDTALRRIDELTIEIDPVRMQLINFARRQVGCQALQARQYGVGWLCAAIMWAEIGDARRFHSSDQLVRFAGMDVTVYSSAGKRSPGHLSRQGSPELRWATFEAAKCAARRGAPDYAYYQRLAARPGSGKNPTLAVERKILRRSYHTLRELGDAALAPPVPEAKGVAA

SEQ ID NO: 391400 - protein, 352 aa, unidentified
MSQKPESTIAVVGIDIGKNSFHVVGLDKRGAIVLRQKWSRGQVEARFANMPPCLVGMEACVGAHHLSRRLKALGHDARLMPAKYVRPYSKGQKNDFRDAEAIAEAVQRPTMKFVATKTADQLDLQALHRVRERLVSQRTGIINQIRAFLLERGIAVRQGLRFLRAELPRILTTPPDVLSPRMVRIVEDLAGDWRRLDERVEILSDEIEATACQDAGCERLMSVPGIGPIISSAMVAAIGTGDVFTKGRDFAAWLGLVPKQISTGDRTILGKISRRGNRYLRVLFVQAAWVVLIKPKSWERHGLKSWIEAAKKRLHRNVLAIALANKLARIAWSVLARGRDFEAGSIATVQPV

SEQ ID NO: 391401 - protein, 364 aa, unidentified
MLIIGCDYHPGFQQIACVDTDTGELREHRLAHREEAEAFYRILKQRNLSVRVGMESSGHSRWFERLLLELGFELWIGDPAAIRTKRVRKQKTDRQDAQLLLQLMLENRFPRVWVPDAENRDLRQLLWHRHRLVQMRTRVMNQLHVVPLNEGLRRKKALWRPAGRKELESIALAPWASRRRQDLLDLLDQLTPKIQELTRALEEEVEKRPVTRLLMTHPGVGPLTALAYELVIGTPKRFHCGKQLASYVGLVPEEKSSGDRRRLGHISKQGNVLLRFLLVEAAQVTVRSQPVWRSKFFHLAMRRGRKIAKVAMARKLAVHLYWMWRQGCDYGQTRKLGSHAGEPGNPDGVQSITDVMIGHPAPSK

SEQ ID NO: 391402 - protein, 315 aa, unidentified
MDDTLVVAGIDVSKDKLDVHVLPGNLVFTVGRDRRGLAELTRRLHRAGIGRVALEASGGYERLVLDQLEADGLVVHLLNPARVRHFAEAAGVLAKTDPIDARMIASFCQHFPDKGLTRKPESARKLTEFLAVRAMLLKTIGDARNQLEHLAHPDLRGLMESCLAEARSRLVAIDQGIAAAIAEDEAMACKAKLVRSMIGAGPVLTSNLLARVPELGSADRRHAAHLCAVAPADKRSGKSRRRATIKGGRDQLRPILHMAALAAIRHNPVIAAFAKRLTAAGKPWRLVIAACARKIIVILNAMLRDQTSWHIKQPA

SEQ ID NO: 391403 - protein, 333 aa, unidentified
MFKFKTFIGIDISKKTFDAALIFPQTGVITHQCFNQNKEGFGAFINWLRSQEVNINDTLICMEHTGLYTNGIIEFLTGLKANLWVEMAIKIKRSMGLQRGTDDKASSITIAQYAMRFGDRANLWKPVDATLLKLRDMIAQRDRIVNSLKQLIVPIEEMKQCGAAKQAKDLERLQLPAINGLKKAKEKIESSINDFVTSEEKINKTISLICSIKGVGLQTATSLYVYTKGFTMFENAKQLACYCGVVPFSKSSGTSVRYKPGVSPFANRKLKSLLHLCAMSALRWDKEIKAYYERKVIEGKNKMSVINAIRNKLLQRIFAVLRDQRLYVENYHL

SEQ ID NO: 391404 - protein, 356 aa, unidentified
MELHTLGIDLGKVVFHAVGLNERGDVVTRKKCSRTQLLRFTANLKVDLIGMESCGGAHFLGRSLREQGHEVRLIPAQYVKPFVKTNKNDYIDAEAIAEAVSRPTMRFVPIKSDDQLDLQSLHRVRERWVMRRTAVVNQIRSVLLERGIILRKGRKFVDQELPGILENAELRLSGALRMLLAQLRIELGQLAQRITEMDHIMQLTASEHEGCRRMQAIPGVGPVTATAIVAAIGSGCAFGKGRDFAAWIGLVPRQYSTGGKQKLLGISKRGNPYLRTLFVQGARAVLQKRMHQSPGLRCWLERLTSRKHGNVAVVALANKLARMAWAVLAKNEPYQPYALVRAGQLRGGIHREFSEA

SEQ ID NO: 391405 - protein, 433 aa, unidentified
MDDGMASLGRDSAQTVLCAPFVMGVAPGAIVAGFDVHRRQITVDALDTASGELWRGQLDSTPAAVAEWAAKFAGREVHVAVEACTGWLFVCRALEAAGAVAHLAEPVETSALRGRKRRAKTDRADAKWLRQLLCEGRLPESWIPPEHVRQWRSRARLRNTLLSERTSWIQRIRATLYHHGVDGAPDDLRTLAGRRFLEQLELSIDAAERVRVALEIIDMLEIQLAAIERDLRTLARHQPGCQALMTQYGMGELSALVTLTELGDVTRMHASRQAVRMAGLDIGVHRSDRHAQLGKLTRQGSAPLRWALFEAAQSACRPASPDYADYHALKARGLSHNRASMTIARKLARRSYHLLRALGPAALDPPDPSPVNRSDQAHTSPMRPKHAASSRSARGTHAQRGDPRKTERPQSLHRNDRSTISSPTATTGRRAPR

SEQ ID NO: 391406 - protein, 309 aa, unidentified
MKEELVYLGVDIAKSYLDAAMGGEKRRFSNDTIGHRELIKWVKQRSVAVQVICESSGGYQRGLVRALVGARVKISLIQANRVRQFARAAGILAKTDCIDAQVLCEFGKVMRPPMVTAATLEQEHLRELESQRRHLTHLLVMEQNRGARMSDASVVRLNRSLINQIKKQIDRLDLLIKNHIARSKELSAKAAKLTSISGVGARTAALLLAQMPELGELNRRQVAALVGVAPFNRDSGKMRGKRAIYGGRRRVRHGLYMAALVAARHNPILRDFYQRLRAAGKPAKLALTATMRKLLIVLNSALKPNLIYA

SEQ ID NO: 391407 - protein, 455 aa, unidentified
MPKKSTGDRPELKPVNVNAAAIDVGSKMHMAAVNPTCTDTPVRTFGTFTQELHDLADWFKACGVTSVAMESTGVYWIPVYEILEQRGFEVMLVNARFAKNVPGRKTDVSDAAWLRQLHSYGLLRGSFRPDAEVVTLRAYLRQRERLVEYAAAHIQHMQKALMEMNLQLHHVVSDITGATGMRIIRAIVAGERNPDVLATYRDVRCHSSIETIRAALVGNDRDEHVFALTQSLELYDIYQAKMLDCDRKLEVLIAALSNKGAKPVGKLSKPRVKTKQVNAPTFDVRTALYGVLGVDLTDIHGLGPSLVLKLIGECGTDLKAWPSAKHFTSWLCLAPGNKISGGKVLSSRTRRSSSRAAALLRLAATTVGRSDTALGAFYRRLSSRAGKSKAVTATARKIAVLFYNTLRHGMLYRDPGADQYERQYRSRVLANLQRRAKSLGFMLQAIPGDADPAVS

SEQ ID NO: 391408 - protein, 373 aa, unidentified
MPRYSTAFGMDVHLRSTTVCALDAETGEAVTRRFRGNPWGEVAEWMSGFPGPSLAAYESGYLGFAPQRELSALGVDCVVAAVSRVPRSAADLSSKNDRNDAARMAKAILSHDVTPVWVPSPEIEGLRDLAGAHDAATARLAAAKQRLLAFLARRGYAYGGTTPAGNPRRYRTYDFLRWLDKVRPADDGGIRALAALRNEVEAAAETRDDLHAEYRAAVAAGPLSAEVEALQSIKGCGFALAAAFASEVGDFSRFRSGRQVTAYFGLAPKQRSSADSVRLGGISGAGNALVRRLAVEGSWSYVQASHQPKLMPKGSGVPLEVRMHGRKGSERLLRRRGEMLARGMPQAKANAATAAELVRWLWALGAMCREATE

SEQ ID NO: 391409 - protein, 353 aa, unidentified
MSEAFDPRKSATAFDQASTLVVVLELSGKSWRAGAIVPGVSRRPSRQLGPRDIGGALGAIDRWKNEAGKAGHDVRRVVVGYEAGLDGFWIARALGERGIEVYVMHPASVSVERRGRRAKTDRIDVDILLRALLGWLRGEPRHCTMAPIPSEVEEDMREPGRQREALTGARLKVENQMRSLLARFGIAGFRPRLKKAAEHLDKLRRFDGKPLPSNTKASLERLLAQHRLLSEQLKEIETARERVVTIVDPDRFQRMIQALAALVGVGVETATTLVHEVFSRRFRDRRALAGFVGITGTPYDSGASKREQGVSKNGNPRVRRILTQLMWRWLIFQPLEARSPSGSSRAPKAPRAG

SEQ ID NO: 391410 - protein, 606 aa, unidentified
MRSLPPQVTETTKAPQCSAELPRLENQTVASGGENIAIRPYGVGVDCHSKFIAVCVLISGIEVKRFEQNFATSIPQLVAAREWVHQVLFENNVDEPVFQWVIESTGCYHFPVVRVFGGRPAIVNPTLAGPTRRKTDTLDARLLAYHSMTGFWPASFFPKAEFHEIRVMALRRRQLMRERNRISNQINNIILRFGHTCGSHGKVTDAHYRPLIEDMCNLGTTIEDPYLSPTGIPPYVGKAIVEMFLDWDIVARRVREQEKTFREAIEAQKWETMKGELDGKEMMKLLLSVPGVGPVTAMSWLAETITPRRFATSRNVAAFCGCDPSLKVSAGKVTEHKRRKGNIIIHRTVCMVAQGLLQRRNEPFGQWAFAYSARHTKGGWVKATGALARRIGISLWCVQSKGEPFSYDGYRLVVDESVLKGVLVKELGFTRRVEALLVYNGIKYADELCKAFTSWLPKTRGFGEVAIKEISEWYEKVRKMLPKTGPTQNPVAGQSSAVDALPMEGCSSAVKSLPGRARSSSKKTGTSVSAEVTKSSPDVTSTGSTTGVSLPPCPSGNKSKSKSRRVRLHLDQVLSTGSTSSKSKTGSLKKIRMLIPVKTPSIDNNT

SEQ ID NO: 391411 - protein, 342 aa, unidentified
MSDTIIGVDLAKRVFQVHGATVTGHVIFRKKLAREQFRIFMAAQPACVIVFEACGSASYWAREMEALGHEARLIAPQYVRPFVKRQKNDATDAEAIVTAARQPEMRFVTPKSQEQQAKAVLFRGRERLVHQRTELVNALRAVLYECGHVFPIGLSHLKRIDALVKDPACDLPALIIAECQDLLLQIAAKTERIDVKTKTLKALAAKADTSRHLQTMPGVGPLTALAVEAFAPDMAQFKCGRDFAAWLGLVPRQRSSGGKERLGRISKAGQADIRRLLIIGAMTRIMGPARHKISANSWIGRMLARKPKMLVGIALANKMARQIWAMLSKKEDYRDPALATAA

SEQ ID NO: 391412 - protein, 414 aa, unidentified
MESVYRVIAGIDVHKKMLAVVVRKQCGERVEYEKRKFGATRAEIQHVEAWLRAQGVSEVVMESTAQYWRPVWYGLEPHFRLHLTHPLKTRAPRGRKSDFRDAQRLADRWSSGDLEESFVPGAEQRSWRWLTRTRVQLKKKMGVIRCHVEGLLEQGGIKLSAVVSDLFGVSGWAMLEQIARGVSDVEVLAKEARGGLRKKDKQLKEALVGQLEPVYQMLLKQHMEQVRLLRRQVEEINQTVAEAMKEHIPALCRLSKIPGVDLYAAQELLSEIGPKAAAFASAEQFASWVGVCPGSKESAGVNYSHRSAKGNRYLRRLLCQIAWAAIHSKGTFFAGLFARLKPRVEAKGAAWAVAHRIAKIVWLLLHQEVEYRETGAAPPNERTLLRKFKRMLKEFGHLGIDVRALLDQQLPASA

SEQ ID NO: 391413 - protein, 371 aa, unidentified
MKKHTTFVGLDVHKDSIDVALAAAGRDGEVRFYGTIGGDLEALHKVVRKLQSTGAELRFVYEAGPCGYDIYRSLTTHGFECMVVAPSKIPRKSGDRIKNDRRDALNLARLHRSGELTPVYVPTAEDEAMRDLTRGREDAVKALRVARQVLLAFLLRHGYRYSGKSYWSNAHKNWLADIKMPHRAQQIAFQEYLHAAQEQLDRVRRLTQQIQELVPQWPLMPLVTALQALRGVSLIVAATTVAELGDLTRFDSAKQLMAYLGLVPSEHSSGPNVRRGGITKTGNGHVRRVLTEAAQTYSHPARESRTLLSRLDGLPEEVRKIAWKAQVRLCGRFQRLLARGKNRNAVVTATARELAAFMWAIACAILPSPVA

SEQ ID NO: 391414 - protein, 321 aa, unidentified
MIVSDSTSPVVGIDVSKARLDIACLPVSTTALSHVDNDPKGHAALIAWLRGIAPRLIVLEATGGYQRAVVAALATAGLPVVVVNPRQVRDFARALGILAKTDAIDAAVLARFGASMNPILRPLPDAQATALADLLTRRRQLIELHTAESNRLGQTFAPKVKASIRAVLTVLKKQLGAIDDELNGLIQQCPCWQEKETLLTSVPGIGTLTARTLLACLPELGQLSRQAVAALVGVAPINRDSGTMRGKRTTWGGRKVVRSSLYMAALVASRHNPVICAHYHKLLNTGKAKKLALVACMRKLLVMLNAILRNRTPWRSAYVTP

SEQ ID NO: 391415 - protein, 338 aa, unidentified
MQITTIGLDIAKSVFQVHGIDRHGKVVLRKRLTRAKLLAFFANLPRCLIGLEAGGGAHHWARELQALGHEARLMPPQYVKAYVKSNKHDAADAEACCEAVQRPSMRFVPVKSAQQQATLMLHRVRDQLIGQRTATINALRGHLTEFGIVAAQRQAGVRQLLAIIGEVEDGQIPPLAREVLQTLATHLRELESKLAELDRRLVALTRTDPVCRALSEVPGVGPVIATAFAATVPDAGAFRSGRHLAAWLGLVPRQHASGGKDRPLGLSKRGDAYLRRQLIHGARALVWRSPGREGRLWSWVNGLLARRPFNVVVAAVANKLARILWAVLRHGEAYRAAA

SEQ ID NO: 391416 - protein, 339 aa, unidentified
MNKVKFFIGVDISSEFFTVSILNTETMKYTSFKDFENSINGFQNLLSEFQSYKIEKSDSLICMESTGVYGEKLAYFLVGNNYALVIESPLKVKKAFNPARGKTDKIDSEQIAEYAYRYFDKLKIWSPKSEIIEEIRMFLTQREQFMVQRIANINAKKAVEKKFHKSEKVISYYNELISKIDENIKSIDKEIISLIEKEPEYRQIFANVISIPGVGKILGFHLLAVTNGFSEHLDCKKLASYLGIVPLPFRSGSSIRKNNSSSGIGPSKLRQVIYMASMSAMQCNKELKNYFLRKVAEGKNKRLVINNISNKLLKLIIAIIKSNKPYIEKFVSINPIYKK

SEQ ID NO: 391417 - protein, 347 aa, unidentified
MITIGIDPHKDTHTAAAVEDATGQLLGELTVPGTEEGHHRLLAWAHELAPAEAKPRFALEDCRHVNGRLERFLVAAGETVLRVGTRMSAHARQGARTYGKSDSIDALAVARAALREPNLPQATNDPELRELKLLVDHREDLVGERTAHSMRLRWHLHDLDSGLEPFARTLNDEKVRRGLSQRLGRYGEGVQVRICRELLARIGDLTRAIDSLRSEIASRVRPMAPALLAISGVGELVAARILVEAGGPGRFTSDAALARHAGCAPIEVSSGRTRRHRLSRMGNRKLNATLHVVVLTQSRVHPPAQAYLAKKRAEGKSNKEAFRCLKRHLVRVVFRALQEPQAVAVSP

SEQ ID NO: 391418 - protein, 377 aa, unidentified
MKRILKIGMDVHSTNYTLCAMEPVIGAEDRVFANIQVTPDYKNIILFIESLKQKLGLKDTYDIECGYEAGCLGYSLYNQLTAAGVKCVILAPTTMLTEQGQRIKTDSRDAHLIAQCLSYGGYHPVYIPTEQDDSVKEYLRMRDDHKKALKKIKQHIGMFCIRHGYYYEGTKWTIAHLKWLKKLELAQMYQETLDEYLASYEEQTAKIERFDARIEEIASQTEYAEKVKKLGCFLGIKTHTALSLIVETGDFTRFAKGNVYAAYLGLAPGEHSSAVKVNRLGITKAGNSHLRLLLVEAAGGICKGAIGHKSKALRQRQQGNSAEVIAYADKANARLRSKYYRLIRHGKKRNVAVAAIARELACFVWGMMTDNIDVTAA

SEQ ID NO: 391419 - protein, 453 aa, unidentified
MPHPREAQARPMPNAAAVEFDWYVGIDCGGAAHQVWVLDAQGRRVGERVVAHSGAAFAAFVAWLHELAGPSLARVAVGLETPHGGPVALCLEHGAAVFAINPKQLERFRERASAAGAKDDRRDAFAAASALRTDRAAFHRLAPEAAALVQVRELSRVSDELREEAARLSNRLRAQLERYFPQVLAVVPGADEPWLWALLTLAPTPAAAARLSERRLTRLLRDYRIRRVSAAGVRALLQAPALPVAPGTAAAVGAHVALLVPQLELVTRQHRACLARLAAALTALAGPEDDPPAPAAPAAPNADGRAGAGAGPGGADRLGPVVRLLRSLPGVGVGVAGVLLAEAAPALLAGDYHALRTRGGAAPVTRQSGKQRLVVMRYACNRRLRAALFHWARVSIQHDTAARQYYAALRARGHSHARTLRSLADRWLRILTAMLTTRTAYDAGRFAVAAPTP

SEQ ID NO: 391420 - protein, 346 aa, unidentified
MLHAGLDLSRKRLDFHLLDERGETVEVGEAPPDTDGLRGLAVRVGRHRQPLRAAIESMTGARFVHDQLELRGWEVEIADAVKVKGLAPLACKTDRIDAWVLAELSRRELVPAIWLPDPTVRAERERARFRLHLVRHRSSLKQRVHATLLTHGKPCPVSDLFGVSGRELLARLRLPDPWAGDVEASLRLIDELEREIEACEAELRLLGAKHRYVPLLTSIPGIAWVLAYTIAAEIGDIARFPSPAKLVGYTGLCPRVYQSGESDRRGPLSKKGPRYLRWALIEATSHASRHPAYHDRYQRTKLRLGKQRGPNVAQVDLARRLAAAIWHMLTRNRPFAPAGATTPMTA

SEQ ID NO: 391421 - protein, 482 aa, unidentified
MKHKQQEKTKDATCHPTQGQWQEMNRKQRREMTRKIQSEDISLEVIHPDAAGIDIGNESHYVAVPPTRDTQPVRRFGCTTAELKEMTVWLKQCAIRTVAMQSTGVYWIAVYDILEEAGLEVYLVNARDTKNLPGRKSDVQESQWLMKLHTYGLLRNSFRPSQEIRTMRTYWRQRNDLVQSAGRHIQRIQKAMTQMNIQLANVLSDVSGMTGQAIIKAILGGQRDPHKLAEFRDPRVKASEEEIARSLEGNWQEDLLFLLQQEQDGYEFCQKQMAECDQRLEQYLQQREDRSAGANLPEEKRKERLKKKKGNKPRFDLRTGLFRMTGTDLTRIDGLDVMTAITILSEAGGDMSKWETEDHFVSWLRLCPDNRISGDKIIGKGRLPTNNRVSIALKMAASSLRLSKTYLGAQFRRLRSRLGTPVAIKAMAAKLARLVYRMLRYGMKYVDRGAEFYDAQHRQLQIKHLKSKAAKLGFQVIQVPAA

SEQ ID NO: 391422 - protein, 387 aa, unidentified
MIYCGIDIAKHKHAVSLLDEKGEQVKPVFMIENTRPGFDRLNQELGGVASPITVGLEATGHYWLALYEELSKQGHTLIVLNPMQVAAYRRSGVRKVKNDRHDALWIADFIRIANLPATSRDIPVILQMRELSRFRFRLSEQVGDCKRKILTILDRVFPEYERLFSNVFIKSSRQVLKTAVSAREIADYDLSELALLLHSASRGRFGDEQAERMQTAARQSVGIGFLTNAVRVEMGCLLDQIELLEDQRAQVDHAIELLMQEIPQHITSIPGIGPVTGAAILSEIGDIQRFDAPEKLVAYAGLDASVYQTGQFVASVAHISKRGSPYLRHALWQAANVAVQYDPDLLAFYQIKRKEGKHHNVVIGAVCRKLLARVFIVLKEHRPYVIR

SEQ ID NO: 391423 - protein, 362 aa, unidentified
MSDSTTWVGMDVHKENILTVSISGDSGAVMTRWETPNTAKGKERLAGRIAGLGKARCVYEAGPCGYDLRRFLDGKGIPCDVIAPSLIPTRPGDRIKTDRRDAEKLARMHRMGELTAICVPTPAQEALRDLVRAREDANEDLVRCRHRLQKFLLRQGRRFEGKSWTREHWRWVRALTFDDANAGTVLVEYVLAVDQQLERVARLDARIEEEAQNPGIAPAVARLKTLRGVRTLTAMTIHSELIDLSRFASPRDLMSFIGLVPSEYSSGGKQRRGSLTRAGNAHLRRVLVEAAWHYRHPPHRTGETIRKRREGQPPDVIETARKAEVRLYRKFTRMVMRGKRTTVAAVAVARELAGFVWAIGRI

SEQ ID NO: 391424 - protein, 340 aa, unidentified
MTITTVCIDLAKNVFAVHCVDQNGKAVLVKPKVSRAALPELIAGLPPCVIGMEACSGAHYWARLFRQYGHDVRLMAPKFVSPYRMAGKTGKNDAADAIAICEAVQRPHMRFVPVKDESQQAMQCLHRTRQGFIQERTATYNRLRGLVSEFGIIAPQSTDALRHIVSDQRETLPVQVRLCIDDLLAHITNIEEKIAEYDRVLSRVAKTDHRSQQLMELKGIGPTTASALVASIGNAHDFKNGRQLAAWLGLTPSQYSSGGKSKLGRITKAGDSYLRTLLVQGARSVMIGAENRTDSFSRWVCSLTGRRGYWRAVVAIAAKNARLCWASLHYGDDFKLYSAT

SEQ ID NO: 391425 - protein, 348 aa, unidentified
MKIVGCDLHARQQSIAMLDRETGELTEKVIRHEGNAVREFYASLGKPVVVGIEATGAMQWFLELLEELGIESRVGDPAKIRAAETRKQKHDRRDARLILDLLERDRFPAIWMPTSEQRDLRSLLRDRDQWVKMRARLQHTLQAIALNHALRKGRSLWSGTGQEVLGKLPLPPYTSQRRNELMSLYAQLQRRIQQLDKQVEEQAQHRPQARRLMTHAGVGPVTALATDVFLGDPSRFTTANEVASYIGMIPSEHTSGKRQRLGKMSKQGNSLLRYLWTEAGMHASGKDPELKRFYRRKLIQKGMGKSRIAAARKLGIRLWIMMRDEIDYEEFCRRGKLRQIGESPCRSA

SEQ ID NO: 391426 - protein, 455 aa, unidentified
MEHNSVAAVRCRPGTAKDWLGAVPDCMLLKSSQEGSAGGTSRFRKVSTTVLISGPAGISAVRNTNGRGGSTPAYNQVLDPDPTNMREVGMDGKRMVGIDVGKYWLDVAREDADEVERFANEANAIATLVASLDPARDVVVFERTGGYERALEAALAAAGVSWAVVHSLKVKAFREVQGIKAKTDRIDARLLQTFGRDRLDAGKLRLGRRQDVTLNALMARRRQLNRALHAEECRLETAAIGAVQGSIERMISHLKAELAATELEIAEHEAGDPLIALKEAVMCERKGVAIATARSLLAELPEVGSLDRKEITALGGLAPRVHQSGTNRKRRGLSPGRNAIKAILFNPARSAMRCDPQIRAFCNRLRARGKPGKVILVAVMRKMLVQLNAAVRDAIEKEQVATSAAPAPAAIIDHGDQLRTRAKAVKAGRRPPRKAARSGLDGRARVRTLAVAINK

SEQ ID NO: 391427 - protein, 313 aa, unidentified
MPISTPALRCIGCDVGKANIVVFDSLTQKITTIENQPQALASFAARLDASCFVVCEATGCYESGLLAALVTAQIPAHRADARKVKAFIRSFGTLGKTDAIDARALAQYGHERADRLLRWQSPDKIREKLQRLVLARRDLVAEHQAYTNRLAAPGADSAKPFLGPVQSCLAEQIVAIEVAITALVSADESLKADTKSLSGVGGIGQITAVSLLALMPELGHLSGKQAAALASLAPHPRQSGASDAYRRTKGGRPLIKAVLFMAALSASRHNKTLKAFYDRLVAAGKKPIVAITAVMRKLIVICNALLRDAHATI

SEQ ID NO: 391428 - protein, 401 aa, unidentified
MKRLSGGIDIGKSSHHMVILDEKEDILYQRKIPHNLSKMKEIMRQLEDLEKSKKAHLSFALEGKNGYGNPLDRLLLLKGFTLYNVDNYKLKRFREAFPGEWRDDNRDALMLSKMLSLKEHIDSGQEKIFVPIERPSKVTESLKLLSRHQQDLIAEKVRLTNRLGKKLLEISPELLLLGKLKNKKMIALLAKYPDLSRYHKITLKMLLAVSGIGKKQAPHLLAGLHELAYMSEMTAIYKTIIFSCAKRILQLNKEIKEIEEKMEKIGMLDKSFRHLKSMPGVGTRLASRFIGEIGNIFRFSSQSKLAIYCGIACVTSSSGKMTKTKAVYKANKIAKQTLITIAGCSIRFNPECRDYYFKKRQEGKTHNHALRCLARQMIKVIYKMLTLGRDYKIRKEDVKIA

SEQ ID NO: 391429 - protein, 337 aa, unidentified
MDYFAGLDISMDETHVCVLDREGMVVRESKAESTAQAVANELAKAPSCRRIVFKTGRMAPILFHGLSQLGLPVVCVESRQAYQALRSLATHKTDRNDARGLAHLARTGFFKPVHVKSLPAHAVRSLISARKKLVGQRVTLENQIRGLAVVFGVRLPRALTAAFIDNALRASEGIAGLSAAMRGLIAARTAVMSAVTAIDADIRRMTRASAACRRLMTIPGVGQLTALAFVAAIDDPSRIRRSRDVGAYLGLVPRRYQSGEVDYIGSISKCGDRRVRTLLYEAANVMLTRYKGQLKLKDWAFAIAKRSTMRKARIALARRLAIIMHAMLRDGTEFASA

SEQ ID NO: 391430 - protein, 337 aa, unidentified
MYSGIDLHSNNSVIAIIDDGDRVVAQKRLPNDVTMIVGFLVRWQEQLAGIVVESTYNWYWLVDGLQDAGFHVHLANTAAIKQYEGLKHSGDETDAQHLAHLLRLGILPTGTILPREHRVVRDLARKRMQLVQSCTTHVLAVENIMARQLGGRMTSNQIKRLTDDTIDSLPLEGDVGLAIKANVAVIATLQSQIEVLEKRLQERVKPRPQYGLLTSVPGIGQTLATVIFLETGPIDRFAQVGNFASYARCVDSVLTSNRKKKGEGNVKNGNKYLAWAFVEAANFARRFCPEAKRFYERKKAKTNNVVVATKALAHKLARACYHILKEGKPFDVTRCFA

SEQ ID NO: 391431 - protein, 376 aa, unidentified
MREKLRFLGLDVHAETIAVAVAEPDGEVRSLGTIANREDAIRRFIKKLGSPEQLRACYEAGPTGFVLYWQLTQLGVDCAVVAPSLVPKKPGDRVKTDRRDALKLARCHRNGDLTAVWVPDEASEALRDLVRQREAAKQDQLRARHRLTKFLLRTGRRPPLGLKAWTERYWRWLEQVRYTQPAQEVTLRDCLNEVEHMSARVKRLEEAILEVVKLAPQPMQELIRGLQALRGIAHISAVTIAGELGNISSRFQSARKLMGYSGAYPDEDSSGDRIRRGGITKAGNAHLRRIVVESAWCYRHWPRVGARLRKRQQGLSPEIIEIAWKAQNRLHKRYMKLSMAGKDQRKIMTAIARELLGFIWAIAVKAERIATQPMAA

SEQ ID NO: 391432 - protein, 346 aa, unidentified
MLYAGLDLSRKRLDYHLLDGEGATVEVDAAPPDVDGLRGLTQRLDRHGAPIRAAIESMNGARFVHDQLELAGWQVEIADAQKVKGLAPLACKTDRIDAWVLAELARRDLVPAIWLPDPRVRADRERARWRLHLVRHRSSLKQRVHAVLLTHGKPCPVSDLFGVRGRKLLAQLGLPEPWQGTIEASLRLIDELEREISDCERELRRLGADHDYVPLLCTVPGISWVLAYTIAAEIGDIGRFPSPRKLAGYSGLCPRVYQSGERDLRGPLSKQGPRYLRWALVEAATHACTHPTYRDRYQQTKARIGKQRGAKVAQIDLARRLTEAIWHMLTREQPFAPKGATDPLAA

SEQ ID NO: 391433 - protein, 343 aa, unidentified
MQAVTTIGLDIAKSVFQVHGIDAAGNVIVRRQLKRRYVLPFFQKLPPCLVGIEACASSHHWSRELQALGHMVRLMPPAYVKPYVKRHKNDAVDAEAICEAVTRANMRFVATKTPEQQSCLMLHRTRHLFIRHQTSVINAIRAHLAEFGIVAPVGRNGVEQLLDVAADASDKRLPEAARACLLALGAQLRTLKAQILNFDRQIMAWHRSSEASKRLDELPGVGPALATALVASVADPKAFRSGRNFSAWVGLVPKQHSSGGKDKLGSISKQGDRYLRSLFTAGALAVIRYAKIHGTKHRPWLTALLARRPTKVAAIALANKIARMAWAMMAKGERYKEPVALAA

SEQ ID NO: 391434 - protein, 457 aa, unidentified
MPQAKRSRSPRDLSPVHPAAAAIDIGATIHVAAVGVDRDEEPVRTFQTFTDDLHRLADWFARCGIKTVVMESTGVYWIPVYDILEQRGFEVMLVNARDAKHVPGRKTDVSDAQWLQRLHEYGLLRASFRPQAEMAGLRAYLRQRERLLDYAAAHIQHMQKALMQMNLQLHHVVSDITGATGMGIIRAIVAGERDPTILASYRDVRCHSSVETVRRALVGNDREEHIFALTQGLELYDVYQTKVAACDKQIEAILRRLKKNATPPVNELPPPRRRSRQPNAPAFEVREALHAILGVDLTQIHGLGPYLALKLVGECGTNLSAWPSAKHFTSWLALAPHNKISGGKVLSSKTQRTSNRAASLLRLAAVTVGRTDTALGAFYRRLSGRTGKAKAVTATARKIAVLFYNTLRHGMSYDDPGASYYEDRYRQRVLRNLQRRAKSLGFVLHQADLAATQVGVS

SEQ ID NO: 391435 - protein, 355 aa, unidentified
MNDAKYIGLDVHQATISATVLDCTGKLVMESILETKAATILQFIHGLRGSLHVTFEEGTCAAWLHDLLKPHVTRVLVCDPRKNALLKVGNKSDRIDSRKLAELLRSNLLRSVYHEQTGVRTVKELALSYLTITKDLTRVMTRLKAIYRSWAIPCAGQQVYAPRYRAEWLAKISEAGVRRRAELYYQQLDALRPLHQEARRGLLAEGRKHNALKLLRQIPSIGPIRAVLLLALIQTPHRFRSKRQLWAYSGLALETRNSGEYCMVRGQLKRSKKVIAIRGLNKNHNHDLKNIFKGAAIRAAAVDGPFQEFYAALLAKGMKSAMARLTLARKIAAITLIVWKKGVRFDAEHLKQQAA

SEQ ID NO: 391436 - protein, 303 aa, unidentified
MNKMNKFLSLSDDQTFIGIDVAKDNLAVFVDSTAQHSVCVNQIKELRQLAKQLKKLNPTLIVLEASGGYETSAAVVFAEFELPFAVVYPLRVRQFALGVGILAKTDEIDAEVIAYYGPIAQIQAKPLQSDELLQLQAFTTGRLQLIEMRIAEQNRLETAHPKMQKNIKKHLVWLEAQIEDLETEINNRIQADETLQETDELLQSVPGVGAVLSATLLTELPELGVLSDKKISALVGVAPFPRESGKFKGKRFCRGGRNVVRRVLYMQRFQPPGLTRLSNSSTTTCVKAAKSKRWRLSRVPENY

SEQ ID NO: 391437 - protein, 406 aa, unidentified
MAVMIGVDPHKASHTAVAIDRAEQVLGELRVRSSGDQCQRLMSWAARWPERSWAIEGAGGLGYLLAQQLVAAGETVLDVQPKLGSRVRLLATGNVNKNDPNDARSVAVAALRSKDLAQVAPEDQAAVMKLWSKRRRDLSSLRTQVVCRLHALLCDLVPGGMPGKEVSAAQAARALEAVAPTGAVGQARYELALDFLADLRRIETQMKETKKRLETAVKASGTTLTEVFGVGPYVAATVIGYVGDVARFADRDRFASYNGTAPIEVSSGGHKVFRLSRRGNRKLNHALHMAAVTQVAHRHSEGRAYYERKLKEGKTPKEALRCLKRRISDAIFAHLVADAKRKALAAKMGPGGQRGNGSVSSAAGSNPQHRHFGQATPEPVPTIGPRATSRRPRTRLTERKKSQKAS

SEQ ID NO: 391438 - protein, 409 aa, unidentified
MDIVPIYKRVIGLDVHQAQITGCAITEQADGSVAYERREFGGFKRDRKALAEWARAIDPDVVVMESTGIYWKSPYAALEGVGIIAWVVNARHVKAVPGRKTDVADAQWLASLARAGLLRASFIAKADLRSLRHIARHRQKLGGMLASEKNRLHKLLTDAGIRLGVVVSDLHGQSARAMVKALIAGKTVPEVLNLASKRLRASREDIFEALQAEEITPAHRFVLIEIMAHIEELEGRIARFDAELLRSLQAAGYGAPLQLLQTLPGIDLMGAAMLLVEIGSDMSVFGSAQRLASWVGMCPGNNESAGKRKSGRIRKGNAWVRRLLCEFAQAAGRSRCALKDKFQALNVRKGHKRSIVALGHKMLRTIYAMLSKKTHYVDKTVDYEALMVARNAPRWLQMLVKHGFVPTPA

SEQ ID NO: 391439 - protein, 342 aa, unidentified
MREKRSIGIDLHRRRFTCCIRLENGRNCLSEWSLEQLPRFTQKLRRRDEVAVEVTGNTRLFYEAVAPFVARVVVVDPNQFCVISHSVKKTDPHDARNLALYLAKGLLPEVRMKEKEQAEVASLTQTRDRLVKLRTALKNKVNNLLSARGIELDKESLSSEKGLTWVLEQKIEPLAHLELDIIVEQIRSLNRSIARLERVIDEAGKKLEGHRNLTSIKGIGSLGASILLSVIGNVNDFAHEGKLAAYFGIVPRVQDSNETEHRGRITKRGSKLGRTALVQCALIAKRYSPYLHRYYERIRARRGTGKAIIALARKFLSIIYHTLKNNWIFEDFPNFVLAEAKA

SEQ ID NO: 391440 - protein, 438 aa, unidentified
MPVSHKQIESAMNEGRIPNTKICCKWGFRMNITCVGVDVSDGHSTVSAYTWGDLMVMKPRDVPHTVSALRKLADEIGQLPGEIRVVMEHTGRFWLPIAQTLRGAGLFVSAVNPKLIKDFGDNKLRNVKTDKADSKKIARYGLRYWNDLQPYAPTEATRQKLLEFSRQLDNSNKLLTAQKNNLQAIVGATFPGVRKLLTSPAREDGHIKWVDFVCEFYHCDVIRKLGEAAFAQRYGAWCKRKGYYFTKSGFAKIYALACDCVPSLPCDRDTKLLIGEVAKQLTAVSAAVEVYRAKVYDLASTLPEFDCVMSIYGCGKTTGPQLMAEIGDPTRFKDRVVDGKRVKGKKQLGQFAGVAPGNNQSGSYEQKSVKASKKGSPHLRKTLFQVVSTYLKQKPDEPIYYFLDRKRAEGKPYYAYMTAAENKFLHVYYARCKEALAA

SEQ ID NO: 391441 - protein, 449 aa, unidentified
MHGAHIGGQRAGAFLELVGGVDPKRVLLVGVDVAKATWFVVVSNLLGEVVVDGVRLVADRAGLAELERVLGAASARVNAAMVVVGIEAAGHHHQTLTAHLADRDELVVRLLNPAQVAAVRNQQGNRRRKTDWLDAAAICELLARGEGALVHLDGSAAAALRPLWSGRKDLVDTRSRLRQQAGALVDCLWPGCSAKDTAAGVTPVLCDLFATKAGRVLLELLAQGWTPARVAATSVAALRGLFAVRGCRLTRPLAARLIGRAQAALPAHPAATAGKAATLAALLSTIDTLDREIACLEAAMAPLLAHTQGAKLTQLRGVGVVAAAGFVAFVGSTDRWAEWSKVWRAAGLDPARSQSGPSDARLGISREGSAWGRRAILDLAAAVCQQPGPWRDRLRTRTTQQHKPAKVALAATANAIGRTLFALMASGADFDPHFQAKRTAAQKAGGQAA

SEQ ID NO: 391442 - protein, 360 aa, unidentified
MELHVGLDVALEETSVCIVDATGAKVLESSVTSDPEALCLALRPHVAAISRIGIEASAMGIWLARELKSEGLAVIVVETRHMRSALSAMRNKTDRNDAHGIAQMMRMGWFRAVHVKAEETQQLKTFLANRRLLKRKLIDLQNHIRGALRTYGLRVGPVAAGRFDARIRELIEGADYMLHTMIESMLDVRAALFAGFQRLHRILLLIVKSDDVCRRFMTVPGVGPVTALSFKVSIDDPHRFQRSRTVGAHLGLTPRRYQSGTSVDWGGRISRMGDVDTRGALCEAAASLILRVQRYCALKAWALRIAKRSSKMCAIVAVARKLAVILHRLWIDGTEFDWKAGAKVTEKRKRDPKTGLLQAY

SEQ ID NO: 391443 - protein, 308 aa, unidentified
MQYDAGIDVSLEQSSVCVVDAAGKIVKEAKVATDPHVLVTFFKGLGFPVTRIGLEAGPLSQWLYAGLTQAGFDVVLLETRHVKAALSAMVVKTDRKDARGIAQLIRMGWFRAVHAKSASSQEIRALLTARRLLLDKLRDVELSVRGILRGFGLKLGKVTQRGFETRVHELVANHPMLHQITRSMLLARATLQREHNMLHKALLKIVRGDKVCRQFMTAPGVGPIVAITYKTAIDDPHRIKKSKGAGPLFGLTPKRYQSGETDVIGGISRIGDAMVRAMLYEAANAVLSRTLRFSALKRWVWRSPRGAG

SEQ ID NO: 391444 - protein, 409 aa, unidentified
MEVMHSRCCGIDIHKESVVACLRVQEGRRAKTEVRRFGTTTAELLRLHEWLSHAACSHVAMESTSVYWKPVFNVLEGSFEVVLANAHHIKAVPGRKTDVKDCEWIANLLAHGLIRASFIPPAPIRDLRDLTRHRKSLIRDRVKATNRVHKLLETANIKLANVVADVLGVSGRAMLDALVAGETDPQRLAKLAKGSLIPKMKPLAEALRGGFTSHHAFLLRQMLTQLDQLAAMVAQCDARILEVSKPFEANIRRLQTIVGVGRRSAEVMVSEIGVDMSRFSTAGHLASWARICPGSYESAGKRRSAGTGTGNNWLRTTLLESAWAAAHSRKSYLGAQFRRISKRRGPKRAGIAVAHSILVIAYHMLRNGVDFNDLGADYFDRMNTAKLTRYHLRRLAELGCDVRALAVSA

SEQ ID NO: 391445 - protein, 438 aa, unidentified
MSNKVIFNLDELFISVGIDVGADFSWMSIALPNQQFVGKPYKILHNSIDSLTTAVSKIKEAEELYSLESRIFLESTGIYHYPLFCYLRDKGFNCSVINPIITKNSTNINIRKVHNDRFDSKKAALVGLKSDLKVSLMPSDLALNCRNLCREYYDLMDNRSAYVNKLQGELRMAFPQYLGIFSKVTINTSLTLLETYTSPSAFLEADKQEIIDIIKSTARFGLTYAQNKYNAIIQAATDANQFGYIIDSNIKRIRLYISFIRKYDEEINSILESLHELVDANEDADFVKQIHLIETFKGAGFLSAVSIMGEIGDFSAFSKPKQLFAYFGLDPAVKQSGKFEGTKVQMSKRGSAIARRVIHTLTLQSISISRNGEAKNPVLREYYLKKCDSKPKLVAMGAVSHKVCNMIFAILRDNKPFKIIAPQEHIKQYNAAKCDIAA

SEQ ID NO: 391446 - protein, 342 aa, unidentified
MESAVTIGLDLGKSVFQVHGVDAGGAVVIQRRLTRGRLLAFFAKQPACLVGMEACAAAHHWGRELQKLGHKVRLMPPRYVKPYVKRQKNDAADAEAICEAVTRPNMRFVEIKTCEQQGILVLHRVRLMLTRQRVQLSNAIRGHMAEYGLVAPVGRNGLQRLVAIIGDPDDARVPAVARASLAPLVRQLWLVNDQVLENDRLVRASARSTELGHRLMEVPGVGPVLASAMVATVPNPTAFKSGRDLAAWIGLVPRQNSSGGKEKLGGITKQGDRYLRQLLVAGALAVIRYAQRHGTKRPWLVRLLSRRTPKIAAVALANKMARMIWAMMVTGERYREPMVAAV

SEQ ID NO: 391447 - protein, 349 aa, unidentified
MGEVSTIGVDIAKSVFQVHGVDADGAVVIRKRVGRAKVIEFFANLPSCLIGMEACATAHQWARELKKLGHDVRLMPPTYVKAYVKRGKNDAADAAAICEGVTRPSMRFVPIKSVEQQSTLMLHRTRDLLIRQRTQLINALRAHLAELGLVAAKGHEGLQQLVMAVTESSDKRLPSNARFACQSLVAQLYALQTQINGLDKRIIQAHRANADSKRLEAIPGFGVILSTAVVATMIDPRAFRTGREFAAWIGLVPRQNSTGGKERLGSISKQGDRYLRRLFVLGAISIVGTARTRPDKYPWVTELLGRRPAKVAAVALANKMARTAWAVLAKGETYRTPTRSSSAAIAAIA

SEQ ID NO: 391448 - protein, 408 aa, unidentified
MKTLHKRCAGLDVHKAEVVACLRTVVRSKVSYEVRRFPTTTRGLLELAEWLEAAQCTHIAMEATGVYWKPVWHVLEGRFDLILANAAHIKGVPGRKSDVNDATWIADLLAHGLILASFVPPQPIQELRDLTRTRKQIGREIVQHTQRIQAVLEEANVKLSSVIADMLGQSGRRMLKAMISGETDPAKLAGLGSRRLFAPRDALADALSGRLRDHHRFLLDQHLKTIDQLEVTISAFDARIEAALQPFRATVERLKEVPGLSETSAQIILAEIGLDMGPFPSADHLLSWAGMVPRQDESAGKRRSTRVKKGAPWLKPVLVQCAWAATRKKNGYFQAQFLRLKARRGTKKAIMAVAASILRTVYHMLRDGTFYQDLGAGHFARRDPAKAARKLAERIRSLGYEVDIRAAA

SEQ ID NO: 391449 - protein, 373 aa, unidentified
MDYNTTYVGMDVHKATISVAIAEEDRDDPVSLGLIPNSHDALLKLLKKLQKPGRKLLFCYESGPCGYEIYRFLTGRGVSCIVAATSLIPAKAGDRVKTDKRDAKKLARLFRSGELTPVWVPDEAQEALRDMVRSREDAVRDLQRKRHQLGKFLLRLGIHPPQGIRNWSAKHRQWLDALKMEQSAHQVVLSDYRNAMIQAEDRLKHLEKEVEHYVQGSVHEPVINALKALKGIDLITAVCLVAEIGEFGRFKNPAQLMAYAGLVPSEYSSGPRSRRGSITKTGNHHVRWLVVEAAWHYRHTPKIGYKLKKRQQGQSDSIKQISWRAQNRLNFKYRKLVGKGKLKQTAIVGVARELLGFIWSVAIEAEKEMKKAA

SEQ ID NO: 391450 - protein, 386 aa, unidentified
MQRNDLSRSLVAFDQNSTLVAVVELSLNRWVVQGLVPGLSKQPLKALGPDASALLALVNRWQLEGTKGGGRIKRIVVAFEAGRDGFWLARWLRSRGIEVYVIHATSIPVSREHRRAKSDRLDTELLMRALLGWLRGERKHCQMVRIPTIEEEDARRPNREHQTLVGERTRNVCRIKSTLVLHGIRDFNPKRLKASERLETLRCPEGGSLPPNTLAELRREMAQLRLISGQLREIEKTREERLKRAPRQGTHPMVLLLAKILGIGIETADMLVHEILSRELRDERAVGRYAGLTGSPYDSGAKRREKGMSRAGNARVRRGMVQLAWRWIRFQKDSQLTQWYNNRTESARGDIRKTMIVALARKLLVSLWRYVTTGEVPVGAKLKAAA

SEQ ID NO: 391451 - protein, 302 aa, unidentified
MKYIGIDLHTNSFTACYLEEGNPERIETFRLQGPGLQRFIETLVEEDEVALEATGNSCFFRDEILPYVSRVVVIAPWQFEVIRRSVKKTDKHDARAIAFFLSKDMLPESRIRKTEHTQLASLIQTRDQLVRLRVSLINKVHGLFTRHGFKIKKETLTTKKGFESSIKTLAWDSLEKVEIDIITEQLESLRNSLYKLEKEITSFGETLPGFKNLISIKGIGPLSAAILISTIGDIADFEKTGNLASYLGIVPRVSQSNDQHLVGRITKRGSKIARKTLVQCTLIAKRYSPYLRGFYESIKARR

SEQ ID NO: 391452 - protein, 420 aa, unidentified
MPSHPSDFAAVIGLDWADRKHDICLLEAGQHTPEFSVLEHDPVVIDAWATMLKKRFGSRPIAVCLELARGPIVSALLEYDFFVIFPINPAMLAKYRRAFSPSRAKDDPKDAFLALDLFRHHSDRLVPLRRERPAMRALQSLVQSRRSLVDDRSRLINRLTCALKEYFPQVVRWFRDKYTDVFIDFVTRWPTLDAAKRAHRDTLVDFFHAHNVRSGKVTERRIAAIKVARPLTSDLAVIEPSRLMAEALLAQIAALAQAINRFDAEIAARAAELPDFKIFAALPGAGTALAPRLLAAFGENRDRFPDAASVQKCTGIAPVVERSGNKSWTHWRFIGPTFLRQTFVEWVGETVPHSFWAKAFYDSRRAKGIPHQVILRALAFKWIRILWRCWHDRQPYDEARYLLALQKHNSPIVALAAQSP

SEQ ID NO: 391453 - protein, 345 aa, unidentified
MNITAVGIDLAKNVFQVHAVDARGKVVLRKQLRRAQVAGFFSNMPPCLIGMEACASAHHWGRTFECFGHTVRLMASQFVKPYVKTNKNDVADAEAICEAVGRHSMRFVPIKSVEQQAILSVHRVRQGFVKARTAQANQIRGLLGEFGLVIPQGIYNVAKRVPELLEDATNELPVPFRHLIARLTQHLKELDRQVKEFEKEIIEWHRSSELSRKLEAIPGIGPLAASALVASIADPHSFDNGRQVSAWLGLVPRQSSTGGKPTLLGMSKRGDAYLRTLLIHGARSAILAAKNKVDNTQGWLTNLLKRRHPNIAAVALANKNVRTVWALLAHGREFQADYMPTRMAA

SEQ ID NO: 391454 - protein, 421 aa, unidentified
MRRKNDNRQVEKRQRITDATLVIGMDIGCEFNAMCLMSKEGTILGRYPKIYNSRKGFDYFHGIVESMKKKYGFTDVLIGMEPTGHYWRKIAYFAMDKQYEVRFIRTTALKHQRELDESSSAKNDIRDAYTIANIAREGKYIDTVIEDNIFRQLRTLAHTREKIQRISTGAKHALKGMLEDYFPELKHIFWSMKAKGLWALLEHCPFPEDVLKTDIDTVTELIAQSTRRKIQAHEKALQIYKAAQHSIGLQRVGDADRWRVAAYLSEIRHSETQLKEIEAQIEALLKKIPFAEYILSMPGIGTLTCGVFLGELGNPCNFTNPKQIVKYAGYDPKEHDSGQRTGRRIISKKGRWLLRKYLYFMAMRVVHRSPFLKDYYENKQKTMTKKEALCAVVIKLIKVIFALLRDKRTFTEKQSCLKQAA

SEQ ID NO: 391455 - protein, 356 aa, unidentified
MNKISKLDFTDQQIYVGMDIHKKSWSISILTDKFEHKTFTQPPNVEVLVKYLNRNFPGGSYKSVYEAGYSGFWIHDRLQEHGVQCHIVNPADVPTKDKERRSKTDRVDCRKLARSLRNGEIESIYVPSRPKVEDRSLLRTRHSMVRKQTRCKNQIKSILHFYGIQIPEELGDSYWSNRFIAWIETITMERASGNFILKVHLEELNNTRKIIADLTRGIRSLADSEEYRQNVCLLKTLPGISTLTAMTLLTELYDINRFRNVDKLCSYIGLIPDTDSSGETERKTGITKRRNAQLRGILIESSWIAVRKDPALMMAFNTLCKKMPKTNAIVRIARKLLNRIRHVLKTQQEYVPAVVQ

SEQ ID NO: 391456 - protein, 341 aa, unidentified
MQISTIGLDIAKNVFQVHGIDAAEKVVVRKQLRRGQVMKFFEALPPCLVGMEACATAHHWARELRKLGHQVRLMPAKDVKAYVKRNKNDAADAEAICEAVRRPTMRFVEVKSAAQQGRLMQHRTRDLLLRQRTQTINALRAHMAELGIVAAQGREGLKTLLAVIADGKDERLPVDARASLIVLAAQLQALQTMIGSIEKRIIAQHRASEESKRVATVPGIGTLGASAITATITDPSVFRSGRDFAAWIGLVPRQDSTGGKQKLGPISKQGDRYLRRLLVVGAHSVLRRVKQSPQDYPWLAQLLARRPFRVVAIALANKMARVAWALLAKGGTYRAAVPAAA

SEQ ID NO: 391457 - protein, 388 aa, unidentified
MFKTVERPDAPAAIRMDIGAIFVSLELSRSTWLLTSVSPGAGEKMSQHATPAGDLRQLFECLAELKRKAMARTGKTYPIIVIQEAGLDGFWIHRALEREGIESHVVDAASIAVPRRRRRAKTDRIDGKMLLRTLMAFKRGEPRVCAMAKPPSVEEEDRRRLGRERKTLIAERVEHVNRIKGLLFTQGAIDYQPLRRDRRARLEALRTGIGDPLPARLKGLISRELDRLELLLAQIKAVEAERDALLAKQSGQAPAAAAMLLAFKGIGPEFATVLWLEGLFRSFANRRQVAAYAGLAPTPWRSGSIAREQGASKAGNPRLRATLIELAWLWRRHQPKSALTLWFEDRVKANGGRIKKTLLVALARKLLVALWKYVTTGLVIEGAVMNTA

SEQ ID NO: 391458 - protein, 351 aa, unidentified
MNTEQTAAPKLFIGIDIHKRSWKVKLATDLFDGKSFSMKPSPEELHKYVAKYYPDYQVSTAYEAGCCGYKAHRCFVTYGWKSLVVNPADIHRKGKERFTKTDEIDAQLICRELKDGRLKSIPIPDIEQEELRSLFRRRNDLVKDYRRIKSLIKMQLLYYGIHIPEEYDNDHWSHNFRNWIDSLEFNYSTGKESINSKMRSFRFIDKELREVSNQLRAYCRKYYKKDYYLLKSIPGIGGIVACGILAELGDLRRFNNLKHLAGYVGIAPGVHQSGSNYKTIGMNPRAHRLIRSYFVEASWQAIRRDPVMQNYYRKHLGKDTKKIVIKVARKLLSRTLAVIKTEIPYEIGVIK

SEQ ID NO: 391459 - protein, 423 aa, unidentified
MIMYCVLRMIKTMETICNDPQVCRIVDLPVYYELETNNGNRDYRIQIGGHYMNYNTVYVGMDVHKESFTLCSCKYEDEKASHYQRTPASYKNVLRYLAFLRTIYGEDTRFVCGYEAGCLGYSLYHQLENFNVECVILAPTTMLEQRSKRRIKTDKRDAEIIARSLAQHNYSPVHIPTETDNQTKEFIRMRDDHKAELKKIKQQILSFCLRQGYQYDGSGNWTAKHVKWLRSLKPAGLYKEILDEYLLTYTILTDKLNRLDQRIEELASKEEYKESVSKLTCFLGIKTHTALSVIVEVGDFQRFVSARKFAGYLGLVPGQHSSGDDRNGLGITKAGNTHVRRLLVESAQSYTRGKIGYKSRVLRSRQAGNSPQVINYADRANERLRRRYYKMVLKDGKKYNIAKTAIARELACFIWGMMTDNIY

SEQ ID NO: 391460 - protein, 318 aa, unidentified
MDDVGVFVGIDVSKDWLDIAILPSADHSRVPYDRLHVGSLVKRMIKLCPVRIVLEATGGYEVLVAAALSDAALPVCVINPRQGRDFAKATGELAKTDRVDAHMLALFGRSLRPSLRPVPDAQTRQLREIMNRRGQILEMLLAEKNRLQRTESKIVKASLRSHIRYLERQLDKTETALADEIDASPTWQAQVNLLTSVPGVGQLTAANLTLLLPEIGTIGRRQIAKLVGVAPLSRDSGLRRGSRSIWGGRAQVRRMLYMPTLVATRYNPVISALYNRLVERGKPKKVAIVACMRKLLVITNAMVRDQTPWCPELAAALS

SEQ ID NO: 391461 - protein, 420 aa, unidentified
MKVVYQTCCGVDVHKSFLVATIIKTISGVEPSYQKKRFSTFNNSILQFKNWLIENQCRDVCMESTGKYWVPVFNLLEDDINVTIANPKWVKAVKGNKDDTKDSKWMGDLFRLGLVPGSYIPCKPIRILREFTRYRYKLTSCRTSEKNRYQNALTVCNVALDSVVSDIFGKSATSVIDYLIERSDNSINHEEIASRLLRSLKKKSDSVIESIEGYQMTDSQKYRMRLVRAHLDYITSTINDIDTMLDSLIASYENAVQLLCTIPGVDRNSAITVVSEIGTDMTPFSNSKRLCCWAGLTPGNNESAGKKKSVRITRAGVYLKPALVQVAHAAVKSDKSPYYKQKYERIMKRRGKKRAIIAIARMILTAIYQMLSTGEAWNPTDLYKIDIPEPLKEKQKEKAIKQAKKLLIREGILSESQLAS

SEQ ID NO: 391462 - protein, 407 aa, unidentified
MEKTSKNKLEDVTRLLALQKIRDVKDLESYKLSVCHPHSAGIDLGSREIYVAIDPRIAAEMGIPIVHVFNTFTSGLQDCRKLLMNCGIQTVAMESTSIYWTTIYSILVSAGFEVCLVNPKKFRMVPGRKTDVLDCQWLQTLHLYGLLRGSFHPEEKIACLRSYMRERNLIIKDRSRHVNRMQKAMTKMNLLLTNSLSDITNKTGISIIKAIIAGERDPEKLASLRSVRCKFTQEEIAESLNGYYKEDQLFLLKTNYEAFCFFDSQLYEIDKKITDLLETFPLKKGKDEISPPSQKSKYQRKNKNDIRTDKNLKDMLYRILGTDVTSVTGLQSNTILQIISEVGIDMSKFPTCNHFASYLGFVPHNKITGGEIKSSKTDRIKSTAAQAFRKVVPAISRTDSALAGFIY

SEQ ID NO: 391463 - protein, 388 aa, unidentified
MDVLYQSCAGIDVHQATVVVCILHGPLTSTRPKREMAQFDTTTKGLKACHDFLSQFHVEAVGMESTGVYWRPVWHELCDDFELILAQPAHMKAIPGQKTDKKDAHWIAQLTRIGLLPRSFVPDETIQELRELTRQRKHYVESRNRETNRIHKILQSGGIKLTTYIEDIMGASGRNLLQLLIDETPLTPRMIHQSVYTSLKRKVPQLLEALDGYFSAHHRFMLGQSLEIYDFYQKQIDCLEERMNGYLNLYERPVEILDSIPGIDLTTASVIIAEIGVDMSQFPTAGHLASWAGLCPGNNESAGKKRSTKIRHGNSYLKRCLCQAVFAAKRQKGSPLAERYYQIQSRRGPQKATIALAHQLLKIAYILLKENLTYQEFVLQKRLLETSQ

SEQ ID NO: 391464 - protein, 337 aa, unidentified
MGVDTHKESLAACAVNEVGRPVAERTFANDSRGHEVLRDWLKELPEPRRVGLEGAANFGAGLARVLLEADEDVREVPSILTRRERRRTGRHGKSDPIDALAIARVVARDEQLPPALPSRASEDLKALVDYRDQLISERTRVQNRLHADLQILAPGYRAKVRRLTTRPQRARAAELLSAAPGIRAELAGRRLERLEELDADVATLTRRIETAVRTSGTRLVSIVGVGAITAAKLLGETGDPRRFRSMGGFAMACGAAPIPASSGQTNRHRLNRGGNRQLNRALHTIALVQARVDSRARTFVVRKQAEGKTWLESIRCLKRHLADVVYRRMVDDLVAGT

SEQ ID NO: 391465 - protein, 344 aa, unidentified
MNHVAIDLGSKESQVCMRAPDGTVVLEKKHPTRRLGELLTSWPQSRVVVETSSEAFAIADAARAAGHEVRVVRSTLSRQLGVGERGIKSDLRDARKLSEVSTRIDLASVHIPSAEARALRSRIRSRDILVTTRTALVNHVRGWLRTHVITLTTKGTPATFPARVRATVASRELELPSYIEHSLSTIDVLNQQILAATKELAAIAKAHDVCRRLMTVPGVGPITSLAFVAAIDDVSRFSNAHRVSSYLGLTPGEDSSGERERRTGITKAGASSVRRLLIQAAWGAYQRAKHDPMVAWMKRIADRRGKFIAIVALARKLSAILFALWRDQTTYRSARAAQSVPMPS

SEQ ID NO: 391466 - protein, 339 aa, unidentified
MKPIPVGIDIAKNVFQVHHVDQDTGVIVNKPIPRAKFLEYFANRAPCLIGMEACGGSHHWARQLTGMGHQVRLMPAEFVKAFNIRNKNDAADARAIWLAVQQPGKAIAVKTEMQQAMLALHRSREQLVKFRTMQINCLRGLLTEYGQVMGKGRLALDKAMPDVLARVANRLPAVLIDTLREQWNGLTKLDKQIATIERRLREWKQEDRAVKAISEIPGVGLLTATAAVAMIGDAKAFRSGREFAAWAGLVPKQTGSGGRVNLHGISKRGDTYLRTLLIHGARSVLQHAKASGPWVEQMSKRRPPNVVIVALANKMARTIWAVLAHGRSYQKGHVSVAPV

SEQ ID NO: 391467 - protein, 343 aa, unidentified
MYYIGLDVHKKAISYCVKDAAGHVQGEGKIGSTRRELEGWIRALPQPRMIAMEATIFTGWIYDHLLPHAEKVKVAHPLMLRAIAAAKKKNDRIDASKIADCLRCDFLPECHMASTEIRDRRRTLRYRSLVIKQMVQMKNRVSGLLMETGVSYNKQRLHKLGYFEALMTSNEDVHDSIRPLLKLSREMISRSQKLDYALISSLERDPLLTERLRRLRTVPGVGPITALTWALEIGDFTRFTSNKQAISYCGLCGEEKSSADKVLRMPISKQRNKHIQRVLIEAAKLATRESPELAMIRARELERGNPNRATLAVARKMVIYLLAVERRQQDWVAAEQFRRTAAA

SEQ ID NO: 391468 - protein, 417 aa, unidentified
MAVPEEKAGPSVRKFLTTTRGLYELADWLKECGIETVAVEATGVYCTPLLEVLDARGFEVVLAKPSSLKSVNDRQKSDMKDCQWLQLLHTFGLLRGSFRPSTQVATYRSYNRQRQMLIQQASTTIEHMKKALTSMNVRVELAVSDVTGKTGMEIIRAILGGERDPHELAKLRDDRCAKDEETIAEALFGKYSDEHLFELEQAVRTWDHYQVLIRECHARLEAHAKTLEKKADAKDLPKPRRVEHVRKNVLTFDARSLFFELLGQDLTQIDAISTGTVSALLAETGTDLDAFPTVKHFTSWLRISPGQNTTGGRNRSGKNRSTTNRLTLALRIAAQTLSRSRSALGAYYRRKRSQLGPQRAINAAAHKLARMIYFTLKFQRPYVDPGPDAYAKRNQDRILRSMQKRATQLGYTLVKAA

SEQ ID NO: 391469 - protein, 363 aa, unidentified
MRMKRHPQYFISNSPRRGSRVGTTIGIDLGDVWSHYCIINEEGEVIDRGRFRTNPSGADKRFRDLEPIRIAMEAGTHSIWISEQLRDLGHEVIVANVRELRAISHSDRKSDTVDAEKLARYARLDPEILRPIAHRTVTQQETLTLIRARDVLVRLRTGAVNSVRGLAKPCGYRLPASSTLCFAKRCLAMMPPGLSVALSPLLHQIGDMTVKIKEYDRAIKKLTETEYPETQALIKVYGVGNLTALTYVLTLGKKERFRRSRDVGCYLGLRPKRSQSGDSDPQLGITKAGNGYLRQLLVECANHVIGPHGRDSSLRRWGLSLGARGGSHARRRAVVAVARKLAVLLHRIWITQEAYVPFYAVAA

SEQ ID NO: 391470 - protein, 339 aa, unidentified
MEYTHYIAVDWSIENMAIARMTGKSNKVTVIDVPSDIVELKMYLDNLRGSKIMTLEETTTSQWLYTELKDHADRLVICDPVRNHLLSEGTKSDKIDATKLVQLLRANLLKEVYHSAEGFLELRRLVSGYEDLVKAMVRLKNQRYSLLRASGMTGEESIGTRLKGSVEQRVIEGIERQLECCKKEKNIYEEDFKKLAKKHAEIRHQKSLPGIGLIGAVKIVSRVVSPSRFIDAGHYLSYAGLVKLERKSGGVLYGRKDSRYSRELKSVYKIGAVTAIDGNNPIGDYYKYLMKEKGYPDYQARHKAARRLAVLSLGVFKSKKRYQPNYRRGNNVNEASQEN

SEQ ID NO: 391471 - protein, 337 aa, unidentified
MNFVGVDLHKKTIMVCVVDKDRKVICRRRLACAEPDEIRRFFAAQVPFQVVVEATASYEWFVQLVEPLAARVVLAHPKKLRIIAESTRKSDKIDATVLAEFLALDMIPPAYRPTPRQRAHRVLVRQRVYVQRRITAIKNKLRRIAANYNADREDLFTAVGQSYLEQLKISAADRFAVEQLLAEWRLYRQQLVAADKQLRNFAREAPVAEQEARAVLDTIPTVGPVTIDVVLSELGDVRRLRSLKKATAFAGLAPGCRESAGKAKQLGITKQGSRLLRWILIETAWRLVGKTRHWNWMYGKLKKRCGAKKSIVAVARRLWCMMVSMLRTGEPYRLAHA

SEQ ID NO: 391472 - protein, 320 aa, unidentified
MTSRGAEKMQNDTIGVDVSKDHLDAHRLADGANQRFANNKGGHKALIKWLAETPLCRVVFEPTGPYHRAVERALGASGVPFVKVNPRQARRFAEATGKLAKTDRLDAQILARMGALLELEARPARSEVLLELKELYVAREALVKDRTAAKNRGKALTLSLLKRQNAQRLEQIDRQMATLEAAILQIVEADASLADRFAILISIPGLSNITAFALLIAMPELGALEAGQAASLAGLAPIARQSGRWTGRSFIRGGRADVRQALYMPALVAARFNPDMKAKYAHLIETGKPAKVALTAIMRKLLVLANALLKANRPWTQRTA

SEQ ID NO: 391473 - protein, 343 aa, unidentified
MQTVTTIGLDIAKSVFQVHGVDAEGKVLIRRKLKRRYVLAFFEKLPPCLVGIEACATSHHWSRQLKGFGHSVRLMPPAYVKPYVKRQKNDAADAEAICEAVTRANMRFVETKTPEQQSCLMLHRTRQLFIRQQTSVINAIRAHMAEFGIVAPVGRKGVEQLLAIAMDASDRRVTEVARACLAALGTQLRMLKMQILELDRRIMAWHRSNETSRRLDAIPGIGPALATALVASVADPKAFRSGRNFSAWIGLVPKQHSSGGKDKLGSISKQGDRYLRSLFTAGALAVIRYAKMHGTRHRPWLTALLARRPTKVAAIALANKIARMAWAMMARGERYKEPVALAA

SEQ ID NO: 391474 - protein, 412 aa, unidentified
MQDILNCAMGLDVHRDTIVACLAKGELGTDPEIEIRSFSTLIPEMQKLRDWVLETDCHHVAMESTGIYWQPIYEMLETCFGGEINILVVNARHMKNVPGRKTDMRDAQWIATLLRAGLLKGSFIPDKAFRELRHLTRYRKSVVHDITAQKNRIDKFLQNSGFRFTAFLSDAFGASGRNIIRHLIQNGSIDREALDKCLKTQTRNRIDEILVALNGSLSIHQRSFLSMAFHHLEQLEAHRNEVEDAIAAEIMKHSEALNLLCSIPGIDVTAAASIIAEIGTDMSAFPDSQHICSWAGLSPGNHESAGKRKSAHINKGNPYLKSMLCEVGWIISGKRTLYLSGWYWRVKQRKGAKRATVALARKLLTLIYTMLKTGEPYNEDCFEQRRKRSERKRANRMANELQKLGYLVVAPE

SEQ ID NO: 391475 - protein, 413 aa, unidentified
MEQQDKACGADIHKDFLVACIHSRDGSKVISKFDMTVEGILNFEEWLKTNGCKKVAVESTGNYWHLVYQVLEDDFEFILANAFQTRGHPGAKTDRLDAEWLAELCLNNQIKPSRILPEKDRELRALTRARKGYMDFRGKTKSRITQELEACTVKLSSVLSDVFGKTGRHILEGLINGMNIDDIVQNLPSKNIKKSKEEIKEAIQAGLTPVSMFLLRSHLDLIDEVDKKIEQIDIECRRLIQRRKTDLEIAMSMPGISFVSAVAILSEIGDYRNFGRGEQLAAFSGLDPSVYESAGKKYTGPITKKGSKYLRRMMIECAHASSSTKAKTRLKRFYLRVLAKKGKKVAIVALARKMLCILYHLLVNQEIYKDDGLEKPKRVKVKYSDVSNYPSLEEMVKIVGEAGYKVTREFPEG

SEQ ID NO: 391476 - protein, 348 aa, unidentified
MQTKSQIRSIGIDLGKTTFHLVALGSRCQVVVRKKFSRSQLLVYTANLPSSLIGMEAGVGSHFLGRALREQGHEVRLMPAQFVRPFVKSNKNDYRDAEAIAEAVERENMRFVPIKTEDQLDLQALHRVRERLVSRRTSVINQIRAFLLERGISFAKGPARLRREIPEILENADEKLSTRMRRLLDFLWQEWKHLQLQIESLSEDLEKIANSDAACARLQQIPGVGPLVATAVVSAIGNGAAFHKGREFAAWLGLVPGQWSTGGKAKLLGISKRGNPYLRKMFIHGARAAVLRVQREGSYLGQWMGGLESRAARNVVIVATANKLARISWAVLSSGENYRPRPALAVAS

SEQ ID NO: 391477 - protein, 415 aa, unidentified
MIFVGDDWAEAHHDVYVCDEAGARLASRRLPEGVAGIGALHELLAEHAGEPGEVHLGIETDRGLWVGALVEAGYTVYAINPKAASRYRDRHTLSGAKSDSGDAKMLAELVRTDRHNHRPVAGDSDLAEGVKILARAHQNLIWDRTRATNRLRSALREYFPAALDTFDELADRDTLAVLARAATPPDAKALTPGRVRTLLRAAGRTRNIDTRAQAIVAGLRADTLTAPEPVTRAFAATTRSSVAVIGELNRQIAALETELGAHFEQHPDADIYLSQPGIGVILGARALGELGDDPNRYADAKSRKNYAGTSPITRASGNRSVALARFIRNPRLADAIDQWAFCSLGNSPGARAFYDRRRRLGDSTTKPSGPSATASSASSTAASAPAPPTTSSPPGATAMTKKPTLPLDTYRSWGV

SEQ ID NO: 391478 - protein, 410 aa, unidentified
MTDGQVTVGIDIGSHMHRVAIGTPEKKIAEEFDLPHNKDGFEKFFERISYYENTYQVPVVVAMEGFNGYARPLDQMVQKKGYRLLNVNNLKLRRFKEIFPSPAKTDAIDARKILELVRLQPLLTDQEVILQEVREVPREHQMLKRLTRRRRQLVCEKAAVLNRMQSDLHAVSPELVELARNKDGLAFLRFVTCREDLRQLQRVQKRTLLGIKGIGKGFAGKIQEWQKKAQFSEEAEYAGPMIIEDARRILELKKRIKGLDTQIGELCERSRLAGIVRSIPGFGLTCTSEIVAEIGTMDRFRSEQSLAMYLGMAPLDNSSGRRKGTRHAKQVNIRARTAMMTAMNRHILRVEESELYYRKKRNEGKKHNQAIRSLGRHMVRVLWSMIKDGHFYEERAIDNIIEVTKEQIPA

SEQ ID NO: 391479 - protein, 436 aa, unidentified
MEEVTDEPLYRDRVCGIDIGKAGLVATIRVPAEKDPARRAAETRSFGTTRREVLALADWLRCWQVPAVVMEATGDYWKGPLYRLEAEGFECVLADAKQVRHLPGRPKRDPADSRWLAACFERGAVTPCFVATEEFRVIRLHTRYRRDLTEERTREKQRAEKLLESAAIKVSSVLTDLHGVTGRDIMGHLIAGDRDPKVLAQLARTAARRKISRLEEALEGAEFFTPAHAALLAVMLARIDRLNADIDQLTEVIERLLAPHEEQLQQAESMPGWGRRAAQDSLAETGPDMTRFPTGAHLASWAGRTPLDHQSGKRQGRSKAKKGNRYLGAVTGETAVAAGRTQTREGARYRRLARRRGKPKAQVAVGNTQLKVYHKLLSNPGMRYADLGPDYYERQRGIRRQIAHHVGKLGDLGFEVTLVRLPSPGPEPGGTHNPAA

SEQ ID NO: 391480 - protein, 422 aa, unidentified
MQTPWAEITHFAGLDWGKDHHDVLVLDGTGRIVTEFRFDHTAEGWSLCRQKLAEFPQLALAVETGHNAAIERLVTLGYRVYPVHPRSSKSYRTRKLPSGTKTDRADCWALADALRLEGDSWHALTAPQPLVQQLRLLCRDEVGLIGQRTALINQLQQALYEYYPAALEAFDDWCAPSAWAFVETFPTPQALVQAGRHRWQKFLHTHGLYRPQMNEKRLAIFAEADQFCGHEAVTAAKSTLAIALAKMLCTLERQLARYRTLIEECFQAHPAHGLFESLPGAGPKLAPRLLGELLAVQPLAEQPQVLQCLAGMAPVSYQSGRVSVVYLRRQCNRSLRCAVHLWVDLSRHYCDWAQVYYAAHRQKGQSHACALRCLGMRWLKILAAMIRNHTPYDAALHAQNQLHHGSWVLQLQPDQPAVGDAS

SEQ ID NO: 391481 - protein, 365 aa, unidentified
MKSLFYVGMDVHKDSVRIAVLKGTEKQTVYEATVKNDISKIVKIVSGYKTKGTVVAGYEAGCMGYTLQRSLAAAKVDCRVIPPNKIPRLGSERIKTDARDAVLIARMLKNNEGESIYIPTADDEAARDLLRCREDLRAELHRAKQQLQKQLLRTGFIFDGEKKLWTKAHRDWMAKLEFPHELQKETFTQYYCHIQELENRLERIDAKIVTVAEAEPYREPVARLRCFKGIDYITALAFVCEIGDFRRFASAASFMAYLGLVPSERSSGAKRRQGGITKTGNTHLRKLLVESSWHYRYRGAASAALQARRAGMDEKVIVYADKALHRLQSKFAHLLFKGKSSKTAVAATARELAGFVWGMMVGAYC

SEQ ID NO: 391482 - protein, 430 aa, unidentified
MNESVSEQPLSPKVAAFVGIDWADLKHDVVLRSVGDPTKSEHQIIKSEINALADWIAQMHERFEAKGKVLVCLEQSRGALIYQLMAYELFELYPINPSQLANYRRTFFSSGAKDDRPDADLLSELVMCHRDRLKAWKPDDQLTRELASLNEGRRNAVDRRTDLANEIKSQLKLYFPVALQLLDNDLTTALAADLLVQWPTLAELQKVSPAKLRKFFYGHHSRQEKKILERLALIKEAKPLTTDLAILRPNALRVKLLAQQLKSLLPFIAEYERRIAEIFGSHPDRFLFDNLPGAGPALAPRLLTAFGTDRDRFEVAGDLLNLSGIGPVRIASGKKTGKNASVHCRRACPKFLRQSFHEFGECSIRYSPWAQACYQAQRGRGKGHHAAVRAVTFKWIRILFACWKQRTPYDPQRYFQALQTRGSDYAQTTA

SEQ ID NO: 391483 - protein, 353 aa, unidentified
MSQSHKTAVTVAHTIGIDTGKNTLHLIGLDDKGAIVLREKVTRGRIAARLANVPRCLIGIEAGMATHYVARELSALGHDVKQVPPAYAKPFRQGHKNDFRDAYAVAEAVQRPSTRCVPVKTDNQLDLQALHRVRSRLISDRTAVINQIRSFLLERGIPVRQGLRFLRHQLPDILATRTDVLSPRMVRIVEDLVGDWSHLDERIENVTDEIEALALGDASCRQLMTVPGIGPIIASAIVAAIGSGIAFAKGRDFAAWLGLVPKQMSTGDRTILGRITKRGNRYLRMLFMQGARVILLRPVNWAKHSFGVWLTAAAQRLHHNVLATALANKLARIAWTVLAQGRSYEARVEPKVA

SEQ ID NO: 391484 - protein, 473 aa, unidentified
MQRLLGLDLAITAESRACLTDGGGKVLCERRFHLTRPDLEALHEAATEGMGHGDVLVVVMEPTGVSWVAPASFFRSRGALVHLVPPEQSADLRRYYAKHVKNDRIDAKLLARLPLLHPEGLHEAEVPSGARGTLRRVVARRARLASECSRHRQRVRSMLQLAMPEMPEAPGEELGKGALAVLSRYGDPRHMLRLGRARLAQVLIKATRGAWRERKAEHILFAARAAVELWEGLEGCDFTEVAEDLAAEVRLIRSIESELRELDARAAGLLDEIDADGLHLSFPDFGERTATRVAGRLGDVRRFPGASKVRSYVGVIPGTNQSGESESRPRLTKAGDHTLRHALFMAAETARRLDPQLAAIYHRQVIERGNHHTKAVCAVATALTTRLVAVLREERPYIIRDINGTPVDPQEAKRIIAERYTVPAEIRAARRQPRSAQRMKGRPTGGVKSKASPPSPPADEASEQDATRVLVEA

SEQ ID NO: 391485 - protein, 410 aa, unidentified
MNASDSKCLFVGVDLGDERFQVCVVEPTGASGEQRSFAHDAEGIGEAIAWLKSAAVERIAIAIESPCGAVVAGFLEAGFEIFSINPKQLDRFRDRFSVAGSKDDRLDARVLGDSLRTDPRAFRQLIAEPGWLVRMRQASRMEDELKQEQRRSANRLRAVLHEYHVELLALVPAADEPWFWDLVAIASTPALGARLRPKQVERLLAEHRIRRVTAQDVIERLRRRPVPARPGVVEAGSTHALMLVPRLHLLTQQLIQCQAQIQKLLDELAAEDQPEQTSEHRDVRILRSLPGAGRYVVATMLAEAFWALQQKDYRLLRALCGVAPITEQSGRSRFVYMRHAGNRRLRTAAHHWAWNATLVDPHFARLYRDMRARGLTHARALRGVADRLLNVTVATLNNGTRYDPSLSAAA

SEQ ID NO: 391486 - protein, 447 aa, unidentified
MKQKKPFSKRSSKLPRHLQHLNQHAAGIDVGSRSHFVAVPEGTDEQPVREFSTFTDDLERLAKWLRSCGVTAVAMESTGVYWIPVFELLERHGFEVRLVNARHVKNVPGRKSDVLDCQWLQQLHTYGLLRGAFRPTDQICTLRAYVRQRATLVRSSASHIQRMQKALAQMNLQLHNVVTDITGVTGMGIIKAIIAGERNPQTLAGLRDKRCKNSVETIARSLHGNYRAEHLFSLQQAVELYEFYLRKVADCDQQILAQLKSFDSSGGSDPDSKPPRSIEEALQQMSGVDLSSINGINTNTALKIIAEIGTDMNRWKTVKHFTSWLGLCPGSKISGGKVLSSATKPVANRAAAALRMAALTLFNSKSALGAYLRRQRSRLGAPKAITATAHKLARLVYSMLKHGTDFVDAGQEQYEERYRSRVVQNLKRTAQQLGYKLVSLQEEPQTV

SEQ ID NO: 391487 - protein, 340 aa, unidentified
MFTNFVGIDVSKSKFDLALIKGQDKDHVIQGVFDNTLKGIKSMNNFLEREHKVQLSETIFCMEFTGVYGYPLTDFFVKKDCHVWIEMPVNIIRSLGLQRGKNDRVDAYRIALYAYKNRDDVKLWKPQREAILKLRDLLALRERLIVAQKSLQMPINEKISMGDKKGAEILRKGCQKSMSSLENEIGQIDKNLDDIIKEDPQLKELFQLATSVPGIGKLTALFMICFTNEFSMYTNPKQLACYCGVAPFEHSSGSSVRGRTRVSHMANKVLKRMLHMGAMSVISRDPELRDYYQRKVAQGKNKMLVINAVRNKIIHRLCAVIKRGYEYQFENIFKERLVLS

SEQ ID NO: 391488 - protein, 427 aa, unidentified
MQVTIQNNVVNSNESMIVAVDVGKTKLNFLARVWVKGRQMTLTDERRNSNKAIEHVLSEYTRKARELGYKSLYVVCEPTGGYEQKLLATARRKGHSTEYVSGEAVNRCKSVESNDSGKTDQKDPGIIHTLASQGRTLTSRELTGSYDSLRVLNETFEKEQDNLVEIKNRLHAAVVELFVDWDMRPGFLYTNTAASLVEEFGCSPYRIVEAGWEEFSRRLRKAGRGFRWKTAAKIWRAAQSSSLHRHAAEVEHVLVERIRMLYQDYKTQHDRIEHIRAQMEELYRKLPESELLSTLPGSVSTFLLARVIAETGPLSDFRSYRQLLRYAGLNLRECKSGKYQGKIRISKKGRPVLRKVLYQIVFADLIPEGCLYSGYYQQKKQDLSNGMKAIVAVMRHFLRCLHGVVRSGQKFSCERVFRQTQQLPRAA

SEQ ID NO: 391489 - protein, 398 aa, unidentified
MTEPQPDAIRPMPCHPARMAQALADTVEAVIGVDTHTDTHSACLVSAVGSVLAECTAPASPVGYRQLMDWAKDEQQSRGLAEPVWVLEGSRSHGTGLARFLTAAQQRVLEATRPLRPSRRPGGKSDAKDALLAARSALAATHHGQPRVDGPREALRTLLVIRASAITARTDAINQLKSLILQAPDELRDRLRSMTSAAQIAACRRLRVPAAPPRSILKSTPGLVLDDAEHRTRVASMRRLANRIRTLTGEIDDAQTELVDLTRALAPGLLAETGIGPITTAQILVSWSHPKRLRNEAAFAALAGVSPIDASSGRQQRHRLNRNGDRALNRALHTIAVTRERCHPATKDYIARRLDQGSTRREARRMVKRYLARHIYRHLEVAAAAQSADPASIPELAA

SEQ ID NO: 391490 - protein, 464 aa, unidentified
MPLRLGIDIACRAAHQVSLADEQGRFIWAGRRFRTTPQDLARLWNMLPEGTDPAEVMVVMEPTRNAWVPLAAWFRRHGADVVLVPPERSADLRKYYSKHSKTDRLDSQLLARLPLLHPDGLYAEQGLGPGDALKRAAKLHSTLTHRRSQSLARLDALLEILGPAWHAAIGADLANRTPLKFLAAGYADPYVVKRLGRTRLARFCYRHSRGAWGEPHADALLAAANQTLELWSGGELDYPDLAEDIAIEARLALQLTEEIKDLDERTTLLLKQADPNGILTSAPGVAAITAAAILGRLGDPNRFNSLAGARAFTGLVPILDASGLTGRHGGPTKRGDAVLRQALFMAASQARRIDPTLAAKYQRLMIEAGKHHNSALCHIATTLLTRIIACWRAGQPYVLRDVDGTAVTIEQARAIIAERYAIPKELRARRRTTTDTRTDRRNKESQSAPSTGPSKPNATTTTAA

SEQ ID NO: 391491 - protein, 417 aa, unidentified
MRRVLERCAALDVHKKQVTACARIFGEGGELEELTVEFSTMAADLLAMRDWLKQLGVTHVAMEATGVYWKPVYYVLEDDFELLLVNAQHVKNVPGRKTDTGDAQWLCQLLECGLLRASFVPPKPIRELRDLTRYRKALIRERASEANRLQKTLEDAGIKLSSVATDVLGVSCRLMLDALVSGTRDPEVLAELAKGTLRKKIPALERALAGEFKPHHTLIVSHILAHLDYLDEAIATLSVEVERRLTPFAHKAELLSTITGVAERNSQVILAELGPDMSRFPSDRHAASWVAICPGNDESAGKRRSGKTRRGNPYLRAALIESAHAAARSKNTYLRAQYEQVKRRRGHKKAIVAVAHSILIAAYHILNDEVPYQDLGADYFTRRADPARITRRLVAQLQRLGHTVTLETSTADEAVAA

SEQ ID NO: 391492 - protein, 359 aa, unidentified
MVKNSMLIVGLDLGDRCSYLTILDQDGELIEESRLPTTKVSLQGKFSNLQPCRVAMEVGAHSRWASQLLKDLGHDVLVANARKLRAIYHNPRKGDRADAETLARLARLDPALLSPIHHRSPQAQADLAVLRSRDAVVRSRTLLINHARDIVKASGSRLPSCSVDSFAHKVAPDIPESLRPALAPILDTIASLTQQIRAYDRKIEELCSERYLETKLLREISGVGPLTSLAFILTLENPDRFRRSREVGPTLGLVPRRDQSGDKDPQLRITKTGDPYLRRLLVGSAQYILGPFGPDCDLRRWGLRLAERGGKNAKKRAVLAVARKLAVLLHRLWKTGEIYDPSYHARKHDQALEAIAAVA

SEQ ID NO: 391493 - protein, 418 aa, unidentified
MTVDSVARKRAIIKPDTLVIGIDLAKHTHVARARFYDGSYTRPVKVPNTRAGFLALSEQVGDWKPRPDSAVFVGVESTGSYGVNLVRWLSEYGCRVVLVPGLHVCREKELLDNSRGTSDDKDALIIADLVARGQYLGFVALSGACLELRPLVSLRARLVREQTGWLNALHQTMDVLFPEFETVFADLKPPSARLVLGRFGTVAAAQAHSPTAMRRLLTRDGAVRLSLAKLKRLQAAAAESIGPLEVSAGQERSLREMLETLATLEERIAGLEAEIVRLLEQLPEAEYLMSVKGVGAMTAAVILAETGGLVQYSCASAVLKLAGLDLYQNSSGQYQSGRRISKRGRSQLRRALYMVAVQHAKRGWPLQPYYAALVARGKPKNVALTAVCCRLVRLLYALVRDGRCYSECPPEAGRLAAA

SEQ ID NO: 391494 - protein, 366 aa, unidentified
MKKTSTVRVNGNMIFKGHKLTIGLDLGDRWSNYCVLDEAGEVLLEQKLATTPEAMKQTFERIPRSLIALETGTHSPWLSRLLRELGHEVLVAHAQKVELISKSNRKDDRHDARTLARLARIDPELLGPVRHRSAKAQIHLTVIRARAELVSARTALVNAARGLTKSYGERLPKCGTEQVGRELAAELSAELREVLEPLLKEIESLNERIKEYDARMEKIARESYPQVALLKQVKGVGTQIALTYVLTLDDPHRFAKSREVGCFLGLKPGRRDSGESQPQMQISKEGDRYLRTMLVQGAHYILGPFGADSDLRRWGLRLAERGGKNAKKRAVVAVARKLAVLLHRLWVSGEVYEPLRNSHKAMRAVA

SEQ ID NO: 391495 - protein, 405 aa, unidentified
MELVYERCCGIDVHKKLVVACFRNGRKSETRNFGTLTSDIKKLCAWLEEKDCQKVAMESTSVYWKPLYNLLELQGIDVIVVNAHHIKTVPGRKTDVKDAEWIANLLQHGLLKPSYIPDREQRELREIVRYRKNLVDERAREINRLEKTLEGANIKLSSIVSDITGVSSKKLLTQLLTAEITEDNIDSLIHISMTKKREQIILAMEGVLSPVQKKLLKAILSHIDDMTQRIRDLDDIIDVEMKRYEDNIKALDEIPGIGKRSAEIIIAEIGTDMSRFPTAAHLASWSGLCPGNNESAGKRKSGKTNKGNKNLKSTLIQCAKAAKNNKNSYFYAQYQRLVVRRGANRATVAIAHSMLIAIYHMLKNGVPFHDLGSDYYTKYNTQAKMMYYTRKLKELGVPLSVLVTT

SEQ ID NO: 391496 - protein, 344 aa, unidentified
MNEEYVGQQFVGIDLHRHRSVLVRMTESGERLGGVRINNDPYAFASVMAEAGVHPEVVLEATYGWYWAADLLAELGAEVHLAHPLGVKGFAYRRVKNDFRDAADLADLLRMGRLPESWIAPPAVRELRELVRHRAKLVHLCTSLRCQVHAVLAGQGITVPVSDLFGVQGSKLLRQVQLPAACRYRVDSLLQLIAAFDREITQTAQLTSDRLRDDPGYAAVRTVPGVGPILGAVFVAEIGDVHRFARAEQLTSWAGLTPKHYESDKTVHRGRITKQGSRLVRWAAVEAVQHAPTGTPMKQVRDRIVARRGKDARHIATVAAARELVEMVFYALRDHHVRRLATAA

SEQ ID NO: 391497 - protein, 345 aa, unidentified
MKFLYFIGIDVSKQTFHAAILPLRGKNIQAESHFSNRPGGFSSFYRWLLSQLGETSLSQLVICMEHTGLYDLELSQYFYGKGLSYSHRNPLEIKRSSGITRGKSDRMDARRIAHFIRKERDDLQLSRPNSSILIQLHRLFAARELLSKHKRALRQHMSSISAIKGDSVVKKLQRKFKSMANQYEKQLGNIEHQIMQVLKEDQTLLRNYELLLSIPGIGKVNAVYLLITTRNFSAFQTWRQYAAYAGTAPFARQSGSSLKGSKRVNHFANKKAKTLLTTAAKVAKRHDYELKKFYDEKIQAGKHKFWVINAIRNKIISRAFAVIERQSAYKSVDQFCKWKGVTLAA

SEQ ID NO: 391498 - protein, 359 aa, unidentified
MSQNENVKFIQQSGGSMKQDISVLGIDLAKNVFQIHGANVHGKRVLSKRVGRKELIELMSNFTPCVVGIEACTGAHYWARLFNSMGHTVKMMAPQFVKPYVMSNKNDKNGAKGIAEAVTRPEMKFVPIKTVEQQDVLLLHRARELCVKNRTAQSNQIRGLLAEFGVIINKGLSEVRKLPELLDLNKDKLSVKAIHIFERLYEQFKRYEEQVLLYEKDIEAHVKSEPLCKEILKIEGIGPMTASALVATIGDAKVFKNGREVSAWLGLVPKQHSSGNKIRLGGISKRGDRYVRCLLVHGARSALRCVDNKTDKKSRWAANKKATQPMNKAAVALANKNARIVWAMMATGECYRQENVHAA

SEQ ID NO: 391499 - protein, 411 aa, unidentified
MEVIYKRCCGLDVHKEIVVACLLIREGGKVVKEIQTFLTMTVDLVVLHDWLKAHQVTHVAMESTGIYWKPVFNLLEEDFTVLLVNAAHIKTLPGRKTDVKDCEWIADLLSHGLLRGSFIPPEPIRDLRDLTRYRKSLTDERVRQVQRLQKFLEGANIKLASVASNVMGVSGRAMLEALTAGSTDPQVLSELAKGRLRQKLPELKKALEGRFRSHHGFMVAAILTHLDFLDEAIERVSQEVSSRIVPFSKMAELLDLIPGINQRAAEGILSEIGVDMSCFPTDGHAASWAGLCPGNNESAGKRKSGKTRKGNQWLRRYLIEAAWAATRKKGSYLSALYHRLVVRRGKKKAIVAVAHRLLVIIYHMLKDQTSYRELGSDHFNKLNAAYVQRHHVKRLESLGFKVILEPLPEAA

SEQ ID NO: 391500 - protein, 342 aa, unidentified
MQTAKKQHIWVGVDISKKSFIAAVDVPEANGNRKALTSLPTKEFELTGAGSAQFHEWLSETFAEYRFSIVMESTGCYSKKLKKFLSEKQNDLPIAVLNGRQSSNFVKSLDLPHKTDKSDAQALARFGTERFPEPTANEDGIRETLKELSRERSALVKARQMLENRSDSLFDAFTQKVNEHVIATLNSQLQVLEKEMERCIKNDAELRHEAELMQTVPGVAAVSAYGFLAELGTLKQYSSRKLSLISGLTPRIISSGTSVNHSCLSKRGSARVRQLLYLDCMTAVTRIPELNTQYRNLIAKGKAKMTARCACMRKLLLIIRAVVVQDRPYRDFRKFPQNALDF

SEQ ID NO: 391501 - protein, 407 aa, unidentified
MEVIYPRCAGLDVHKQTVVVCVRIARDGATLQEVRTFATTTSGLLALVDWLDSFGVEQVAMEATGVYWKPVWHVLEGHFELVLANAAHVKNVPGRKTDVNDATWLADLLAHGLIRASFVPPVAVQELRTLTRTRKQFVRERAAHVQRIEKVLEDANLKLGVVLSDIVGKSGRAVLQAIIDGHTDPERLASCISTRVKASRGELLEALRGHVSAHQRFMLKLHLSHIDALDQAVAAIEQEVGRGLEPFRQAARLLSTMPGLSNVSANVVVAEIGIDMSRFATPGHLLSWACMCPRNDESAGKRRSTRLRPGGKWLKTTLVQAAWSAVKVKGSYLQAQFHRLRARRGVKKAIVAVAASMLTAAWHMLRNGTEWHDLGAAHFDRADAHKTALRLVRRLQQIGYAVQLTPA

SEQ ID NO: 391502 - protein, 358 aa, unidentified
MNPSRTSSYVIGGVDTHKDIHVAAIVNDSNQLLSSEYFPTTRHGYKEMLKWMSSFGKVSRVGIECSGTYGLGLLRYMQSSGIEVLEVTAPDKVDRRKRGKDDTIDAENAAHAAYCKLRTVTPKTRDGMVESLRILKGCRKTAMAARTVALQMIRTSIVSAPDEIRDTLRHMTRMTLIRTLASTRPDLTAYKNISSAYRIVFKSLARRYLELHDEIADLDKMISSIIDALAPELIQQKAVGYESAAQLLITLGDNPERLNSESSFAALCGVSPIPASSGKTNRHRLNRGGDRSANSALHIIAIGRLRTEQRSKDYVKKRIADGLSKMEAIRCLKRYIAREIYYLLKNKNALVNSVQITT

SEQ ID NO: 391503 - protein, 355 aa, unidentified
MSQQKYIGMDVHQATICAAVVDAQGKVLMECVLETKASTIVEFVQGLQGTLSLTFEEGTWAAWLHDLLKPHVSRLVVCDPRKAALLKEGNKSDRIDARKLAEMLRTNQLRPVYHGEHGLRTLKELGRCYLTLSKDVTRTMNRIKSLYRSWGIPCHGSSVYAPRQRAEWLAKIVEPGVRMRAEYLYQQLDGLQPLRLQARCELLRESHKHAAVEHLRQIPSIGPIRAALLVALLQTPHRFRSKRQLWAYSGFAVETHDSGEYRWVRGKLQRNRERITVRGLNDNHNRDLKNLFKGAAISASTRPGPLQDFYLARVAQGIRPTMARLTLARKIATITLTMWKKGASFDPEQLRRQAV

SEQ ID NO: 391504 - protein, 408 aa, unidentified
MQRRENLLYVGIDLHKETHTAVMVNCWNEKLEVVVIENKPSEFKKLAEKVNRKSNHLGLESIYGLENAYGYGRSLAVWLIENGYIVKDINPALAYDQRKSAPMYRKNDAHDAYCVATVLINQLHTLPDAKPKDNEWTLAQLVNRRDLLVKDGIRFKNGLHEQISMAYPSYSKFFSEIDGKCAMYFWKTYPSPVHLQEKTAEELTMEFKEISPIIRRDKAELILDCVQNDGNTIREYQESRDYITTSLVRDLEHQKEELAGLDKEIEKILLSFDYKLTSMPGIGTSIASKLIAEIGDIRRFSNADKLARFTGVAPVKFSSAGKGKEQSSRQGNRQLHGLFYFLAVTMVSRPKNGVPNHPVFYDYYMRKIGEGKTKSQALVCIMRRLVNIVYGMMKNKTEYREPLPEKEQ

SEQ ID NO: 391505 - protein, 302 aa, unidentified
MTSIKYSRTGIVLGQDGETLWHGKVPSTKTDTQAKLKALSIPLDTIVAAIESVEHYGWYATILTECGVGEVKLANPHKLRLIAENPLKNDKKDAEIIARYLRSGTLPESYLAPQETRDLRELVRTRMYLARQRTSAKIRIRNALSKHGLTCRFKDIGGDKARVWLKQVPLPADHKREVESLLAVIDTFDTQIASFEIEMKQRSKRYPEVKILKTIPGIADIRALVILAEVGDFARFPSVNKLTAFAGLVPRSFSSGGKERLGHITKRGSSLLRYAMVQAAQQAHPKWGRVVYLQRSSGGPFS

SEQ ID NO: 391506 - protein, 342 aa, unidentified
MKIIGCDFHPGFQQVAMVDTETGEHTEKRLTPEEAAQFYKQLQGPVVVGMEACGNTLWLERLLAQFGHTLWLGDAGKIRAMEVRKQKTDRRDAELLLQLLIEGRFPRLWVPNLEQRDLRQLLLHRHKLVGMRSQVKNQLQHLALNQGIQRKWKLWSRAGRKLLEELPLSGWTARRHEELLILLDDLEPKIGELDVAVEQAAKKDAVAQLLQTHPGVGPITALAFSLTLGQIERFAHSRKVVSYLGLNPSEHSSGGRQRLGSISKQGNAMSRSLLVEAAQSAARLVPELKRAYQRLKHRKHSAVAKVMVARKLAVRLYWMWKMQQPYAATRMQGSPTGPVAER

SEQ ID NO: 391507 - protein, 396 aa, unidentified
MQVLYPRCAGLDVHKDMVMARVRCVSEPPHDEVRSFATTTSALLELNDWLSGHGVTHVAMEATGVYWKPIWHLLEGHFELVLANAQHIKNVPGRKTDVNDASWIADLLAHGLIRSSFVPPTPIQELRDLTRTRKQLVREIAQHSLRIQKTLEDANIKLGSVLSDVLGKSGRAILAALIAGETDPEKLAELVEALRGRIRAHHQALLRIHLNLVEALCQALADVDARVGKTLAPIKHSARLLTTLPGVSELTAQVMVAEIGVDMARFPSAPHLISWAGLCPRNDESAGKRRSTRVRKSGTWLKTALVTAAWAAVRAKNTYLQAQFLRLKARRGAKKAILAVAASMLTAAYHMLKSGVEYRDLGADHFSGRDRSKAIQRLVRRLNDLGCNVQLTPQPA

SEQ ID NO: 391508 - protein, 424 aa, unidentified
MKVTYQTCCGVDVHKSFLVATIVKTTGGIEPSYQKKRFSIFNNSILEFKQWLLNNNCHDVCMESTGKYWIPVFNLLEDEINVTIANPKWVKAVKGNKDDTKDSKWIGDLFRLGLVMGSYIPCKKIRILREFTRYRYKLVSCRSSEKNRYQNALTVCNVALDSVVSDIFGKSSTSIIDYLLEQSGTSINHEEIASKLLRRLKSKEDAVIESVEGYQMTDAQKYRMRLVRAHMDYITAEINDVDKMIENMISSNPDFENAIQFLCTIPGVKRDSAITIISEIGTDMSQFSSSKRLCCWAGLTPGSNESAGKKKSVRITRAGVYLKPALVQCAHAAVKSDKSPYYKKKYESLVKRRGKKRAIIAIARMILTAIYQMLSTGEQWNPSDLYKIDIPVALVEKQKAKAIKQAKKLLQREGLLPPDEPLAS

SEQ ID NO: 391509 - protein, 420 aa, unidentified
MIREFPAHTAGLKASAAFLREHQVPTVALESTGVYWIPLDELLQAEGFEVLLVDPRYRHQLRGRPRTDRRDCQWLYRRHSVGLLAAAFRPDETTCPLRAYLRQRANLVRQARQHLQHLPKALEQMNRKRTEILSDLTGLTGRAILRAILGGTRAPAKLAKYRDKGCQASEAEIAQALTGSYREEHLFELKQAYEAWQFSLGQVEKVDAPIARQLGRMTCDRALPPLKAKARPKRRVHSPRFDVRTALSYVVGLDVTEIEGISDLTALTVISAIGPGVSQFATVKQFGSWLGLCPNWKKTGGRVTSSRTRRGVNRAAQALRWAAQSLHHRQGAQGGFRRRLKGRRGAQAAVTATAHQLGRIVYLALTHGMTYVRQSQEEYEAQRKEKPVKALRRKARQLGLEVVEQASGGVPTAAATSAQG

SEQ ID NO: 391510 - protein, 408 aa, unidentified
MNPLFVGIDVSSRNNVAYLMKPDGSKHSSFSVQNNLGGAKILSERIVSALESVPLSDLVIGLEATSIYGDSLVYALREDGSLGRFQRKIHVLNPKQVRKFKEAYPDLPKNDWVDAFVIADHLRFGRIAKEVYMDDYRYQALRTLTRSRFDIIQNLTREKQRFANYLFLKCSGIAQAKDIQNTSATTIALMERFETVDDLANADLDELTAFIAETGRGRFADPDAAAKAVQAAARGSYRLPKTVNDTVNQAMAVSIASMRALKEQVKVLDKAIEQQFEIIPNTLTSIPGIGKVYSAGIIAEIGDIHRFDSQASVAKFAGLVWHRNQSGDFEAEHSQMIKSGNRYLRYYLLEAANSVRRCDSEFRRYYDLKFKEVNKYQHKRALALTARKLVRLVFRLLKDNRLYIPPED

SEQ ID NO: 391511 - protein, 470 aa, unidentified
MLRCYLASRLHYKPFVGTRTARPGKDGNELMKEQDSEPQWAAFTAIDWADQKHFWRLVPAGSDRQEHGELENTPEAVEVWAMGLHDRFGGRAIAVCLEQSRGSLVCLLAKYPHLVLFPVHPKTAADYRETFCPSGAKSDSGDTASLLDLLLRHRQQLRQLQPDSVETRLLQILVETRRCIVNEKTRQKNRLTACLKLYFPQVLKWFDEVDSPLVGALLQRWGTLMELQRAHPGTLSRFFHEHNCRGEERLRERITAIQQAMPATEDPAMVEGGSRKARVLVAVIETLRNSIGEYDRRIAELVASHPEGSLFGSLPGAGPALVPRLIVAFGTRRERFEAASEVQNLSGISPVTEASGKAKLVHMRWACPKFLRQTFHEFAAHSLAQSAWAKAYYDLQRHNHKDHHAAVRSLAYKWIRIIYRCWKNRQPYDEQLHLRSLQHRNSPVIGAFVPTTAGEWKLVSGFQKFSRNNS

SEQ ID NO: 391512 - protein, 367 aa, unidentified
MKKVSTRAAAQSRNISRQKLTIGLDLGDRNSWYCVVDEAGEIQREQRVRTSGEALQEVFGALPRSRIALEIGTHSPWISRLLSELGHEVIVANARKVRLIGESRKKDDRLDAQTLARLDRIDPELLYPVKHRSVQAQADLTLIRARAGLVRARTGLVNTARGLAKSYGERLRSCNVRNLNPEKAESLSPELQAALEPLLNAIESLSERIVEYNERIENLAQQSYPQVALLKQIKGVGTLIAVTFLLTLEDPHRFGKSRDVGCYLGLQPGRRNSGQSEPQMHISKEGDPYLRTLLVQGAQHILGPFGVDCDLRRWGLKLAERGGRSGKKRAIVATARKLAVLLHRLWVSGEVYEPLHNGSGTTVAAAA

SEQ ID NO: 391513 - protein, 285 aa, unidentified
MQTVTTIGLDIAKSVFQVHGVDAAGNVIVRRQLKRRYVLPFFQKLLPCLIGIEACASSHHWSRELQALGHTVRLMPPAYVRPYVKRQKNDAADAEAICEAVTRANMRFVATKTPEQQSCLMLHRTRHLFIRQQTAVINAIRAHLAEFGIVAPVGRNGVEQLLDVVADASDKRLPEIARACLLALGAQLRTLKAQILNFDRQIMAWHRSNEASKRLDEIPGVGPALATALVASVADPKAFRSGRNFSAWIGLVPKQHSSGARTSSAVSANRAIAICAACSRRARWP

SEQ ID NO: 391514 - protein, 344 aa, unidentified
MKNSNVIGIDLAKNVIQVCKINKHGELISNKAISPGKLKELLAKSSPSLVAMEGCGACHYWARLAQKYGHDARVISPKKVKAFLQGHKTDANDALAIAIAATQFGMIFSQIKDEEQQSLQTLETSRKFLDKELTALNNHIRAYLYEYGITMSKGKKGLRETIVLVLDDLDTRLPQCLKGTLQLLWERYQLTVVQLKKTEKNKAALVKQLEPCKRLMDLEGIGNVCASMLYASIGDGREFKNGRQASVYIGLTPKQHSSGGKTYIRGIDKQGGNKALRAALYQGALSVISRLPSEPRTVKEKWLLALVERAGVKRACIALANKTVRTAWALLATGKSYKPVLLTQ

SEQ ID NO: 391515 - protein, 350 aa, unidentified
MDHKCKVIIGIDTHKATHVAVALDTQGTRLAALSIPTNPKGYLELERWSQSLGEVHAFGIEGTGSYGAGLSRSLLAQGHNVVEVTRPNRQLRYSQGKTDTLDAEGAARSVLSGQATARPKTQTGLSEMIRHLKVARDTAVKSRSQAMVTLKTLIINAPADLRDVLDKIRGKVALIRHIAAFRPGEINNTMASAKAAMRALARRWLWLHEEIITHDKELERLVTERAPDLMTSHGIATLTVAEMLILVGDDPTRIRSEAAFAKLCGVCPIPASSGKTHRFRLNRGGNRQANAALYRVAIVRMRGHEPTLAYVRKRTKDGKSKSEIIRCLKRYIVREIYSQLCLPKSAQIAA

SEQ ID NO: 391516 - protein, 360 aa, unidentified
MEHIAIDLGGRESQICVRGSDGTIVEERRVATGSLRKQLAKRPPSRVVVETCAEAFAVADAALALGHEVRVVPAALVKSLGVGARGVKNDRSDARVLSEVSCRIDLPSVHVPSAEARTRKTMCGMREGLVGCRTKLVNGVRGWLRGRTTRLRTGSVDTFAARVRAAVPELPAHVERLLHTIEELAQQIEQADKELAQLAQTDPVCQRLMTVPGVGPVTSVRFTATLDEVGRFANAHQLESYLGLVPGERSSGERKRMTSITKAGSTKMRWALVQACWSARRCRPHDPMVQWSLAVERRRGKRIAVVALARKLAGILYAMWRDGSSYNPMRGAAPVTRAAPDFDLAQDFAPAGQEVQPPGE

SEQ ID NO: 391517 - protein, 385 aa, unidentified
MIEAVIERCAGIDVGKKFVVVCIMTGPLDGEPRTEIRSFGTMVPDLERLREWLVAEGCSHAVMESTGSYWKPVFNILEDSVQVVLANAFDVQNRRGHKTDPNDSRWLAHLLRHGMIRPSFIPERAIRELRDLTRRRSRLVQESARERNRVQKILEDANVKLGDVLSDVLGLSGRLMIHALLEGILPAEEIAQLAQRKARQKIPELIAALRRHRLTDHHRFLLRHAFRHIDFLETEIEALNVEIRSRLSAKQFQQAHTLLQSIPGIKEEASATILAEVGPNMAQFPSGAHLASWAGLCPGNHESAGIRKTGRTNRGNDWLRSVLIQCAWAASNKKNSVLQSFYSRLSSGSRKKRAIVALGHRLLRTIHAVLLHARPYQEAWRPLRA

SEQ ID NO: 391518 - protein, 539 aa, unidentified
MEYFARVSAWFRCECDYVNGGSVILEKGERLDPDGESDEFSPPGPSQFNPITEDEDSMKSTRQEQSSPSTQASVSVTWQGMNRKQRREMTRKIQSADIGLEVVHADAAGIDIGNEAHYVAVPPTRDSQPVRRFGCTTAELKDLAAWLKRCQIRTVAMQSTGVYWIAVYDILQAAGLEVYLVNARETKNLPGRKSDVQESQWLMKLHAYGLLRNSFRPSPEIRALRTYWRQRHDLVRSAGRHLQRLQKALTQMNIQLANVLSDVSGATGQAIIQAILAGERDPQQLAAWRDARVKASQEEIARSLEGNWQEDLLFMVKQEQDGYQFCQKQIAECDQQLAQYLQQQTDRSAGVPLAEEKRKWRRKKKKGNNPQFDLRTELFRMIGTDLTRIDSIDVMTATTVISEAGYDMTRWPTEHHFVSWLRLCPDNQVSGDRVIGKKRLPTNNRLTVAFKMAANTLRKSDSYLGAQFRRLRTRLGAPVAIKAMAAKLARLVYRMLRHGLEFVDRGATFYEAKHRQREINSLKRKAANLGFQILETPAA

SEQ ID NO: 391519 - protein, 345 aa, unidentified
MMIIGIDAHKRSHTAVTIDGNGRQQETKTVGTTTQDHLKLLKWATALGGERLWAIEDCRHMTRRLERDLIAAGESVVRVSPKLMADVRDSARTYGKSDPIDALAVARAALREPDLPVARLDGVERELRLLIDHREDLVAERARIISRLRWHLHELDPGWLPPASIDRTSAFTAITAHLETCWEDGLVLRLSRRLVQYLQVLTLEINALTAEITERVTVVAPSLLAIVGCGPLTAAKILGETAQVRRFRSKDAFARLNGTAPIPVWSSNKQRHRLSRTGNRQLNAALHRIAMTQARMHPPARELLARRKAGGDGGMEALRVLKRRLSDVVYRAMLSDETQSAPAAA

SEQ ID NO: 391520 - protein, 379 aa, unidentified
MYDAITGMPAETILHGALELSKNGWLLAVQFPDRAQPSLHPIRGGDTEGLMAKLMAARDRWTKLSGKTPSIVLCYEAGYDAFWLARFLKARGIECLVVDAASMQVNRRARRAKTDRIDVGMLLRALIAWGQGDRHVWSVVRVPSVDEEDLRRSHRERDRLVRERTAHINRIKGLLFGQGIRGINVKNKYKTLQIDKLVTGDGCPLPPRLASEITREIARLALIQEQIATLESERDQAPTPCKATERKRVQLMCLTGIGPAIAAVMTREVYYRQFDNRRQVAGFLGLATSPHDSGNVERSQGISRAGRGQVRGTIIQAAWLWLKHQPKSAITRWFVQRTAGQSGRIRRIMIVAVARKLAIALWRFLEQGLVPQGAMLANR

SEQ ID NO: 391521 - protein, 449 aa, unidentified
MREPQEIEDEEHEQTWERVAAIDVAKASGMVCTRVAHPSRPGRRLTKVWEVPATTGAISELAGQLAGLGIQKVTVESTSDYWRPFVYLLQAGGLSVQLVNAREVKNVPGRPKTDRLDAVWLAKLTERGMLRPSFVPPAEIRRLRDYTRLRADLTQERARHYQRLEKLLEDALIKVSSVASKLDGLSVRDMLEALIAGERDPAVLAGLARGKLKAKHGALAEALAGRFDDHHAELARMLLDQIDALGGQIGTLTARIEELLAAIPAAHGVDADGTTGPGAGSGPDAVVLPAVARLDEVSGIGPGTAQVIIAEIGLDMGVFPTPGQLVSWAKLSPRTLQSGATRRAGKTGKGNPYLKGVLGEAAAAAAKTDTFLGERYRRLVKRRGKLKALVAIARSILVIVWHLLADPTARYHDLGAGYYASRIDKDKKARNHIRQLQALGFAVTLTPAA

SEQ ID NO: 391522 - protein, 321 aa, unidentified
MKMSDTTALTAGIDTSKHTLDMAIHGQCAVAHVPNTASGWKQLADTLETAGVKRVGIEATGGYERGVMGHLRRQGIIVTLLQPVQVKAFGMLHLRRAKTDRIDAMLIAACTHMLGDQGRMPPDARFEALADHLTYIEQVEEDIARFKTCLEHITDKRLHRQVVADVQRLRTRLLAEIKRLVAVICTYEDLGGRYRLALSVPAVGERTALALVVRMPELGHVSREQAASLAGLAPFVHQSGKWKGETHIGGGRGRLRRSLYAAAFPGAHHWNPALAALKTRMMARGATHTSAIVACARKLLIQVNAVVTRGTPWEEIRPTGA

SEQ ID NO: 391523 - protein, 309 aa, unidentified
MEPIKFERVIKIGCGLDVHKDVIVATIRKGNETFETREFSSYTSSLTCLRDWCKSEGGTHVAMESTGVYWKPVFNVLEEDFEILLVNARHVKNVPGHKTDKADSIWLSKLLLSGLLKGSFIPKTEIRDLRDLVRYKKKVIGEIAREKNRIIKVLEDANIKLSSVLTNVDGAVGNRIIDALIEGKSEVEELLEFYHGKIKAGKELFGLALEGKLRKHHSFMLKVIKQSITDKEALLTTLETEIEELAKDYEVELTNLQSIPGVGRDSAIAIISEIGADMSVFPDEHHLACWSGMSPGNNESGGKKKRQKP

SEQ ID NO: 391524 - protein, 354 aa, unidentified
MLKYALGIDVSKKDIHVCLSVIDAKQQVKVKASNKFANREQGFKDLLVWVTRHKKESDIPLVNVIEATGVYYEACALFLFKAGLSVAVVLPNKAKKYLQALGLRTKNDKIDAAGLSRMGAEQCLELWKPMDEFFYTLRSMTRHHQSLQELKTNINNQLHADEHSIYSNKAVIKQLKKLITTIEKQLAETDQGIHDHLYSNEEIAKKTDHIIAIKGLGYLTVATVLAETNGFALFKSASQVVKYSGYDVIESQSGDRRGKTKISKKGNSHIRRAMHMPAFNVVRYEKGNFKIFFERILARHHQKMKAYVAVQKKLLIMIYTLWKKNEAFNPHVKINTSGDGETVSSFALANGQNE

SEQ ID NO: 391525 - protein, 343 aa, unidentified
MKITAIGLDLAKNVFQVHGVDERGHALVKKTLKRAQLAAFFASVPACLVGMEACSGAHFWARKLQGFGHTVRLISPQFVRPYVKSNKTDAADAAAICEAVTRPDMRFVPIKSIESQGLLVLHRARQGFIRSRVAQTNQVRGFLAEFGIIIPQGAYHIQPRVAEILEDAENALPGTVRELLLQLVAHVRYAHEQEQLLEARIKRWHKDNEASSRLAQIPGIGPLTASALVASIGDVSAFRNGRQLAAWLVLVPRQHSTGGKAHLLGISRRGDSYLRTLLTHGARSVIICAKQKPGYEQSWLGRLLKRKHHNVVVCALANHNARVVWALLKHDRQYRADFSPQAA

SEQ ID NO: 391526 - protein, 356 aa, unidentified
MSRDIKYIGMDVHKEAVVIAVLNSTGQLVMESIVETKASSILQFMHGLQGELHVTWEEGTWAAWLYDLLQPHVQQVLVCDPRRNALLKEGNKSDKIDARKLADLLRTGMLRPVYHGEHGLRTLRELGRSYQTISQDLNRVMNRIKALYRGWSIPCAGTQVYAPRYRQPWLQKIEHAGVRRRAELLYQQLDGLQALRRTLRLELLAESRKHKASKLLRQIPCIGPIRAARLIALMQTPHRFRSKRQLWTYSGLGIATRDSAQYRFVRGQLQRAKKPQQIRGLNRNHNHEMKDIFKGAATRASCGVGPLRDFYVALLDKGMKPEMARLTLARKIAAIALTLWKKEERFDAEQLKQQAA

SEQ ID NO: 391527 - protein, 406 aa, unidentified
MRLVRARLPEGLEGITRLHALVAEHAPSAWAELTAEQAVGRVVVGIETDRGPWVTALRAAGYLVYAINPMSAARYRERHATSGAKSDAGDAHVLAEIVRLDRDHHRPVAGDSELADAVKLLARAHQNAIWERTRHVLRLRSTLREFFPAALEAFDDLTASDTLNLLGRAPSPALAAKLTRGQLAAALRAARRHHVEAKAVTLQQVLRAPALRQPPVLDSAYATIVAGQVRIIAALNTQITGLAEVMGEHFGRHPAAEIYLSQPGLGVVLASRVMGEFGDDKTRFVDTRARKNYSGQSPITRASGRKTVVLARYATNRRLGAALHMQAYAALTGSPGARAYYDTLRGRGIGHHAALRQLANRLVGILHGCLKTGTPTTKTLPGSTTDQAPQASPLDKFHHGMSINLD

SEQ ID NO: 391528 - protein, 330 aa, unidentified
MNYSHFVGLDVGKKSFDASLVSLDQELSHHTFPNTPEGIEELLHWIKQHGVEVETALFCAENTGSHVIDLCLSSYQYHFPLALECPLTIKKSIGLQRGKNDRIDARRIAQYASLHYRKLRLYELPDKDLVRLRNWLVIRDNLVKQKVSSLKLLELTRETSRLADLMVPMTFLENQICQIKEKISYVEEEMEKIITEHITLSTNYRLLTSIKGIGPVNAIVLLCVTDNFQRFSAPRKFACYSGVAPFEYSSGTSIRGKTKTSHLANREVKVYLTRAAITAIAWDPQIKAYYKRKIAEGKHKASVINAVRAKIIARCFAVIKRKTPFVTLSA

SEQ ID NO: 391529 - protein, 364 aa, unidentified
MEQITRGECGRVVVRVGVDLAKRVIQVHAVDAAGRLVTGRALARDRFIAWCAQLPGGCVVAMEASSSAHHWARKLCSLGLDARIIAARLVKPYRKQGSSDKNDANDAAAICEAASRPSMHFVPIKSVEQQSMLCVHRLREGIKEERTACINRVRGLLAEFGLVFAQSPKVLRLALADTIEDASNEMGTLARLTLQRAHAQWRELDEHLAWCDERIAEHTRTNEQVKTATTLLGVGPLTASAVVATVGDFRQFRNAAQFGAWIGLTPKQHSSGGKTRLGKITKRGDTYLRTLLIQAAKSAVLTAHRRSDRISNWLCTLRERSGWQIAAVALANKNARILWALMTKGEAFDANHLSIKPGMSSQQT

SEQ ID NO: 391530 - protein, 360 aa, unidentified
MFTERTSVGLDVHARSVVAAAIDGVTGELFQTRLTPSHDHIRSWLGDLPGPVAVAYEAGPTGFGLSRSLAAAGIRCEVVAPSKLQRPSGDRVKTDAKDAVHLARLLRLDEYTSVSVPSLDQEHARDLVRAREDARGDLMRARHRLSKLLLRQGIVYSGGQAWTEVHDVWLRRQRFDSPALQMTYESDYDAVLTVKARRDRLDEVIAVMAANSEFTPIVRRLGCLRGVSNLTALALAVELGDWHRFTGNTIGAFVGLVPSEYSSGQSRVQGSITKTGNTHVRRLLVEAAWHHRARYVVGKTMRERWELASPAARARGDAGNRRLHARWNTFRERRKRHVVANVAIARELAGWCWSLAVLEE

SEQ ID NO: 391531 - protein, 463 aa, unidentified
MARNNKSKKQKMPVRSLKTIQPDAAGIDLGSREHWVACPPLEDNTPNVQRFGTTTPELVRLADWLKEQKVKTVAMESTGVYWIPLFEILDSRGFEVILANARQISHVPGRKTDMLDCQWIQLLHACGLLRGSFRPSDDICRLRALFRERNTMTEQRSDWVRRMQKSLDQMNVCVHHAVSDITGSTGMAIIRAIVDGERDPRTLAKMRDRRCKKSEEQIAEELTGNWRPEHLFNLRQALKMYDQFCQIITEYDAEIFAYIKTLQPGADDDQCVPPPASKSKARNIAKKGQEPMRQALYQLTGFDMTIIDGIGVDTASVLISELGFDYSAFPDENHFVSYLRLAPNLSISAGKKVPSKLKGTTTSRVATALRMAALSLRNSKTALGAFYRRISRRKGASVAVFATARKLAQIIYRFVCHGQAYIDIGAKAYEAQFNNRRLKYYTKALKDMGYKIKPLAAAQAKAA

SEQ ID NO: 391532 - protein, 351 aa, unidentified
MMIIGVDYHPSFQTIAFLIEETGECGEQELNHSEGQAEKFYRDLKQRGICVRVGMEATGYSRWFERLLAELGFEVWIGDPAEIKTKRVKKHKTDREDARLMLKLLLENRFPRIWVPDPENRDLRQLLWHRHRLVQMRTRIMNQLQALAMNEGYRWKKKLFSEQGRAQLEKLSLAPWASRRRQELLELLDRMNPTIEELTTAVEREARKRPAAQRLMTHPGVGPLTALAFVLIIGTWERFPRGKQIGNYVGMIPSEDSSAGKQRLGHISKQGNSLLRFLLVEAAQAAARCNPDWRRRYMHLAMRRHKSIAKVAMGRRLAVRLYWMWRNGCEYSPSLEFGSYAGQLGTGHGGK

SEQ ID NO: 391533 - protein, 412 aa, unidentified
MEVLHPHCAGLDVHKASVVACVRHMMGGAVKREVRSFQTTTKGLIALSQWLSADDCTHIVMEATGVYWKPVWHILSDGEFALVLANAAHVKNVPGRKTDVNDATWLAELLAHGLVRGSFVPDEPTQEMRNLLRTRKQLVRERSRHIQRLQKTLEDANIKLDSVISDILGLSGRRMIEALIAGETDPNALAALAHRRIKASPAELEAALRGRVTRHHRFLLGLHLQQIDAIDAAIDQIDPEVDALVEPFHAAVQLLTTIPGIDALSACVILAEIGRDMSRFPTAGHLISWAGLCPKNDESAGKRRSTRMRKGAPWLKTTLVQCASAAARKKASYLQAQFHRLRARRGAKKAIGAVAASILTAAYHMLKNGTLYEDLGPAHFDKRAQAKQVHRLIDRLRNLGFAVQITPMEAAA

SEQ ID NO: 391534 - protein, 412 aa, unidentified
MEVLHARCCGIDIHKKSITVCVLIREAGRKEQKHLREFGTTTSEILSCADWLRSLGVTHVAMESTGVYWRPVWNLLEGQFDLLLANATHMRNVPGPKTDIKDSEWIAQLLQHGLLKPSFVPHTGLRDLRELSRDRTSLVAERSRLKNRIQKILEEANIKLGSVASDVLGKSGRAMLTAMVEGQENPQQLADLALGQLRLKIPQLVEALRGRVRGVHRFRLKQQLERVDFIDAQIAQLEAEIEKQNAPFDEAVSLLAEIPGFDRTTAWSVIAEIGIDMNQFPSADDLASWAGVCPGNNESGGKRLSGKTRKGSRWLRQKLCQSAWCASRCKHSYFAAFFQRIAAHRGRKRAIVAVSHSLLVVCYYLLKRKCHFQDLGVNYFDQLNHEKLTRYFVKRLTRLGHRVTLEPCSAAA

SEQ ID NO: 391535 - protein, 340 aa, unidentified
MSEITTIGLDLAKHVFQVHGIDAQGTTVLRKRLRRGQVLAFFSRIPRCVVGLEACATAHYWARELGALGHEVRLMPAQYVKAYIKRNKHDAADAEAICEAVQRPTMRFVPVKTAEQQATALLHRGREQLVRQRTMLVNALRAHLAEFGIVAAQGLRNVSELIAIVRDDGDTRLPDVARQVLQVLANQIEQIETAVAALERQLLAWHKTNPMSQRLASIPGIGPIIATAIATTVTDPNVFRSGREFAAWLGLVPRQNSTGGKTRLGGITKRGNRYLRRLLINGASANLLRSKATKADPWVIGLRRRRPPLVVAVALANKTARIAWAVMLREKEYQPRAMAA

SEQ ID NO: 391536 - protein, 324 aa, unidentified
MKVQHIIGADLSKTTIDLFLQSRLQIENTKIGFQQMMNWFKQQNINASEVMIVMEHTGLYSYCFENFLHEHHIAFCKVNAYAVKRSMGLVRGKSDSIDARRLANYGSKEKLSVEPQLSKELQRLQMLYSTRERLVRHKAALLNAVSEYRNIGLAARDLIMTTHTRVIKSFEKQIEKLQNQMDDIVKNNPSIKGNQNLLQSIKGVGRVLSIATIIKTRNFTRFQSARKFACFCGTAPFEHTSGSSIRGKTKVSQLADKTMKTLLDLSAKSAIQYDKELREYYLRRIESGKSKMSTINIVRNKILYRMFAVIKRQTPFVENYLQTA

SEQ ID NO: 391537 - protein, 457 aa, unidentified
MNANNARFQSASKIRISLLLIVLQCPMKGGDFMKNNFLSTLFVGIDVSSKTNVLCALDFQGNKLLNLKALNNQPGAESILESILDCLNSNSLKFVVIALESTSFYSTHIANFLSSNEVLLAYSPMVYCLNPKTIANYRKSFVDMDKTDPLDAYVIADFARCGRIKSQPWRGAQFLALQRLTRHRLHLVESIAKEKVYMVSNIYLKFSQLAVLEKPDKPFSNTYGATSEAVLTEFLSLEDIAYSSIEDLVAFIKDKGKNRFSDPVGTAKLLQKAARDSYRLDKVLYEPLNISIASSFNVIKALQIEIKEIDKAIEKNIKGINTTEYQSLISIPGIGPVYASGILAEIGSITSFSSNDALAKYAGLTWRIKESGDYSADETNMTKTGNKYLRYYLIEAANSVRHRIPEFNVYYRKKFNEVPKHQHKRALALTSRKLVRLIFGLLTKNQIYSNSKVGEIQ

SEQ ID NO: 391538 - protein, 322 aa, unidentified
MNVPGKTVLKPLTFSNNKAGFELLDLSLRQLNQDCLIALEDTGHYAFNLLNFLHEQGYKVYTYTPLLIKEFAKSLSLRKTKTDKKDAHGIALKLLSDPNREQFQHDNRQVELKILARHIHRLKRKQSDWKVQYTRCLDIIFPELDKIVGKHAECTYQLLTRYPNPQKRLEAGFDKLIEIKRLTASKIQDILSVAPRSIGTTSPAREFEIIKHYKRLIDKAETCVNDLMAEFNSVITTVTGIGNRLEAVILAEIRNIHAFDNPAQLQAFAGLDSSIYQSGQIDLAGRMIKRGSPHLRWALIQAAKACPRFSPAFKAYLKTKLE

SEQ ID NO: 391539 - protein, 387 aa, unidentified
MTDPFDVRKSDRPFDQDHTLVAVIELSQTSWLVGGIVPGLKRSPLKKLKPDREALFRLLVRWRDEAVKAGQEIMRIAVACECGRDGFWLVRWLRTQGIEAYVIHAASVAVSREHRRAKTDRLDTELLKRAFLGWLRGEVRHCSMVTIPSFEEEDAKRPSRERETLVKERTRVINAMKSDLTRLGIRDFNPKLRTAREKLETLRTPEGALIPPNTLAKLLRDMERLRLVVAQIKAIETARLKRLESSPQEKPHAMVILLARVVGVGIETADMLVREVLSRELRDRRAVARYAGLTGSPDESGSKRREKGLSKAGNARVRRGMIQLAWRLLRFQKDSALVQWYQARTADGRGGTRKTMIVALARKLLIALWRLVTFGEVPEGLILRPAL

SEQ ID NO: 391540 - protein, 315 aa, unidentified
MDTELHSFVGVDISKERLDIGVSREGESWQANNDEVGIRNTANRLVEIQPALVVVESTGGLETALVVELCARQIPVALVNPGRVREFAKSLGLLAKTDKLDAHLLARYGKAAELQPSVLPSTDIQHLSALMSRRRQLIQILSMEKNHSLSTALNLRPRLQEHIAWLEQELDRLTEEIQQAIQATPLFKEKEHILRSAKGVGRITASILLSDLPELGQLDRKKIAALVGVAPFNNDSGRRRGPRRVKGGRSSDRNVLYMAALVASRFNPVIKRFYQRLVAAGKKKKVALVACMRKLLTILNAMIRDMTPWKSPAFA

SEQ ID NO: 391541 - protein, 354 aa, unidentified
MVIVGTDVHKRTHTFVAVDEVGRKLGEMVVPATTAGHQKALGWAREQFGGDLLWGIEDCRNLSARLERDLLTAGQKGVRVAPKLMFQTRASARTRGKSDPIDALAVAQAVLRYPDLPVASHDEVSRELKLLTDRREDLVAQRTSTINRLRQRVHELDPAAEPKPASLHRAKPCAVLADWLDTQSGILAELARDELADIIHLTEAIDELAARIGERVREVAAALLALPGCGELTAAKIIGETATISRFRSEAAFARHSGTAPIPVWSGNTAGRVRLNRSGNRQLNAALHRIAITQIRLTDSAGQRYYRKRLADGKATKEALRCLKRHLARSVYRRLHTDDHTRRAHQNSDMRTAA

SEQ ID NO: 391542 - protein, 453 aa, unidentified
MTKRKTGDHPDLKMVNPNAAAIDIGSTMHMAAVNPDADIMPVRAFGTFTQDLHDLAAWFRSCGVTSVAMESTGVYWIPAFEILEEHGFEVILVNARYAKKVPGRKTDVSDAGWLRQLHSYELLRGSFRPEAEVATLRAYMRQRERLTEYAAAHIQHMQKALMEMNLQLHHVVSDITGATGMRIIRAIVGGERDPEVLAAFRDVRCKSSIDTIKAALVGNDREERVFALTQSLELYDFYKAQIETCDRRLEAAVAALTVRADGDLAPLPKARIKGRQHNAPSFDVRAALYGVLGTDLAQIHGLGPSLALKLVAECGTDLRAWKSAKHFTSWLCLAPGNKISGGKLISSRTRRSSSRAAALLRLAAVTIGRSDTALGAFYRRLSSRIGKQRAVTATARKIAVLFYNAIRHGMTYQDQGAAAYEERHRQRVLSNLQRRARTLGFALAPIPETAAVS

SEQ ID NO: 391543 - protein, 316 aa, unidentified
MEAIFDNCCGIDVHKKTLTACIMIGREGKITKKEIRTYSTMTEDIEGLRDWLKSEGVTHVAMESTGIYWRPVYNILEEGFEIMLVNARHIKNVPGRKTDVADSEWLCRLLRNGLLNGSFIPPIYIRQLRDLTRYRSKLNNNIAAEKNRLQKYLEDANIKLSSVATDTLGVSGRLMIRDIIKGNTDAEGLSELAKGRLKNKKEELKKSFNSRVTEHHRMLIEMSLKHIEYIESMMVKLEGKMDELIKKQDLAKDLELLDTIPGVDKIGATAIVAEIGADMSKFPTDAHISSWAGMSPGNNESAGKKKAQGPRMETYG

SEQ ID NO: 391544 - protein, 390 aa, unidentified
MLRKNIVQTLDAATSWKVFGLDLAKHDLAVVAIPADGSEVQYVKRYSYADFLEFTAQIPSATMVFEPGNGANHFALRLQAQGHTPKMVSGASVKSWITLHMSGQKTDFNDAYALARLSEDPDLKTVRIKSVDQNRLQSLQAMREQLVEQRTKTIVSIKGIFQCWGILFKKDSRSLKKFKEAANNNKELLGEEVVEAMILQIDRIADLDKDIKHVEELLKKVTMQDPRAQPMLDIPCVGLQTVSRLCAIMGDIKDFETPRSFVAFIGLVPKNMISGNKTTTPSGYEQVGQGKVNRRGDKMARSLIIQCASSMYMNFHKDNFPECALKDWIQKQKDAHKPYGKIMVSLAAKLLRIIYAVLKHGEAFSYEKAGISRSALAALKAAQPAEVGNA

SEQ ID NO: 391545 - protein, 347 aa, unidentified
MRFYTKQHPFYCGIDLHARTMYVCILDQAGETLLHRNMTATPEALLKAIAPYREQIVLAAECMFTWYWLADLCAEQGIPFVLGHALYMKAIHGGKAKNDKIDAHKIAVLLRGGMLPQAYVYPAAMRATRDLLRRRMHLARKRGELLAHVQNTNSQYNLPAIGKKIAYKTNRDGVAERFADPAVQKSIEVDLALITYYDELLRDVELTIVKTAKHHDAHTLYLLQTVPGIGKILSLVLLYEIHQIDRFPRVQDFASYCRLVKCAKESAGKRFGPAGTKIGNAHLKWAFSEAAVLFLRDNPAGQKFLTRLEKKHSKGKALTILAHKLARAVYFMLKNKRAFDMDTFLHS

SEQ ID NO: 391546 - protein, 424 aa, unidentified
MKNCNKQNEKIELVDEKTLVIGIDVGSYDEYARAFTCRKQELSKKPLHFHNTAEGFKTFKYWAVNIMKTNGLEKIIVGMEPTSIYWEALATYCKDNGMILVHVNPAAVHKSKELDDNDPSKNDRKDPKVIAGLVTDGRYSFPYMPEEEYAQLRELSNLRIRTQESLTQSKNRLARWYSRYFPEFKEAYKNVVSKTAMIIMDMYPLPEDIVTLGVEGILQIWRNKKIRAAGESRAKKLYEAAKNSIGRKEAAAVARLEFQSIKEDLDRYQERLEAIDKEVDEILPKIKNADKLFGIKGVGKATVLTFLSEVGDISRFENPKEIQKLAGYAIVTNDSCKHQGEKRISYRGRKRLRWALYQTALSVIGKNEEFRQIHQYYTTRKKNPLKGIQSVVAVACKMIRIFYKILTDGVSYDGTKMTQDIVRV

SEQ ID NO: 391547 - protein, 343 aa, unidentified
MGMFAGLDVGGKKTAVCVVDGTGRIVWQGTVDTHPEIIAAALKRWQGKLDKVGLESGPFTPHLHRALVASGYPMVCMDARRAADAIKSRRIKSDKADAWALAEMLRTGWFTPVHVKSIDSHRIKTLLGARDQLVKVKRSLGNQVRGLLRPFGVRLPSRVGTKRFAEAAFQATQSDAVMHTSIKALLEALVSIDAQVGRLDAELKEVAGRSEIAWRLMSVPGVGPITVMAFIAAIEDVNRFKRTRDIGAYLGLTEKRYQSAETDIRMGISKQGDAMARHYLYEAANVLLTTVKKRFALRSWGLQLMKKIGPKRARVAVARKLAVLMGRMWKDGTHFEMAMPVAA

SEQ ID NO: 391548 - protein, 356 aa, unidentified
MSRDIKYIGMDVHKEAIVIAVLNGSGKLVMESIVETKASSILEFIHGLRGELHVTWEEGTWASWLYDLLQPQVKQVLVCNPRRNALLKEGSKSDKVDARKLAELLRTGMLRPVYHGENGLRTLRELARSYQTISKDLNRVMNRLKALYRGWGIACAGTQVYAPRYREEWLNKIPRAGVRRRAELLYQQLDGLQGLRRTLRPELLAESRKHKAVKLLRQIPCIGPIRAARLMALMQTPHRFRSKRQLWTYSGLGIETHDSAQYRYVGGQLQRSKNPQQIRGLNQNHNHEMKEIFKGAATRASCGRGPLHDFYAALLAKGMQPEMARLTLARKIAAITLTLWKGGKAFDAEQLKPQAA

SEQ ID NO: 391549 - protein, 342 aa, unidentified
MQTINDNTDVQTKAVQQSEYKPEQKPEHIFIGIDVSKLTLDVDAYPNPTPRSFPNDDVGRAELVRWLHQLQPTLIVVEATGGLQTPMVATLVADGLQVAVVNPRQTRDFARALGILAKTDRVDARMLARFAQAIRPEARPQPAPETVALAGVLARRQQLVEMLTAENNRLLMAHPLVAKTIKQHITWLQKRLAASDADLDNMIRKSPVWQHKAALLESVPGVGRVTATAMLAQLPELGMLSNKQIAGLVGVCPYSRDSGAMRGRRTIWGGRASLRAVLYMAALVGSRYNPVLKAFYQKLVKAGKPKKVALVACMRKLLTILNAIVKHDRSWKFDEVVATKPA

SEQ ID NO: 391550 - protein, 330 aa, unidentified
MQNTLVGIDVAARTLEVRLQRPNGEEKVYELANEHKGHRELIKHLTRRRGRARVAFESTGVYHLDLALALHEAHGIEVMVVNPRAARDFARAAMQRSKTDSLDAAVLLEFVRRMPFKAWIPPTREAFELRMLARRIVRRTKARAQEKNRLHATERTGSQMVCHDIKLEIRHTNRRIIALQSAALALIWKVPMLRKQFTHLTSLRGIGKASATLILAEICVLPKDMKPRQWVAHAGLDPRILQSGTSRNVQASISKMGNRYLRAALFMPALVAAQYEPSVQAFYDKLIAKHKAPLQALVAVMRKLLHSIHGMLRTGTDFDGTKFYAIPESA

SEQ ID NO: 391551 - protein, 451 aa, unidentified
MGKKQMNLEVVNPNAAGIDVGSKSHWVAIGQDAEDIREFGVYSEDHRELCLWLAKNKITSIAMESTGTYWQTLFSALTATGFDVILVNGKQTKNVKGKKTDIKDCQWIQKLHCLGLLSHSFLPDSTTEIIRTYSRHRQNLIRQTGRTVLKVQKYLRLMNMRLDVVVNDVVGLTGTKIITAFIAGETNGKNLAKFRHYNCRKPEEEIAKALQYNGRADYLFALKQEWKTYLHIQKQIDEVDVQIKKFLEDIIDNDENKKQHVVNKKSYKRKNKNTIRGTDMNKLSYQYFEGVDLMEIEGVNDATIMAIISEIGLEGIKKFPSAKQFTAWLRLAPNNKISGGKVLSHHIPKGSSRLKIALRNAANAIGNLKEGHLANFFRKINYKKGRPTAINATARKLAIIIWNMLVKGQNYNPPSQYIFLDEKRRLGLVKRIQKQITKFEIQPEQLVFTNT

SEQ ID NO: 391552 - protein, 377 aa, unidentified
MKKAKTHTGSASATVEQNGQRATLIKLGVDAHADSYRVVRQIDNGSLQPPQNMKPEKFYAWAEKQKSLAERVVVCYEAGTFGFDPARQLEKRGVECLVMVPVDLDEGNTRVNTDRLDARRIAVRLDRHLSGDKEALNLVRIPSLQEEEQRDLGRQRQTIVREIKRNADRGRAYMRKYGYRVKGRWWESPGWEKLKQKLSASMVQHLERWRRILITLQEVLVEVHSGLIAQGEAHLQGRLLPVGMGLLSYELLRLEVCDWGRFKNRRQVGSMTGLCASESSSGPSRHQGSVTKHGNRLMRWALVEMAWRLVRYQPNCWAVAGWREELESARKNKAKRKKIIVAIARQLAVDLWRVATGQSSFEKLNFTMPSKKTTATK

SEQ ID NO: 391553 - protein, 391 aa, unidentified
MSMYFVGIDISKYKHDCCIISAADQQIVSKFTVKNDKDGFEHLLTTLNSLSNPEDIKIGFESTAHYALNLELFLENAHHSFMEVNPVLIKEYKKSTTLRRTKTDSVDCESIARWLMTVEYKPHSKGFYHSYSLKSLTRLRDRLIRQRSFYLVKITNVLDHTFPEFKPFFNERLSKTAIYLLENYGSAEKMAHMNSASYDKLRCASRGKFSIQQFLRLKELAANTVGVNNSIFDIELNSLLTLYNSLCKEIKTLEAEITKLIEEVHPHYMSIPGIGPISAAVIYAEYGDISNFSNPGQMLAFAGIEPGINDSGTESHGGRMVKHGSSQLRYVLLNSCLPLIRFDLTFATYYAKKRAEGKKHRVAITHVAKKLIRVIYALERQDVDFNVQKLR

SEQ ID NO: 391554 - protein, 367 aa, unidentified
MSMILAIDMGKNKSVYCHYNPADGNHRFGRIATSPKDFHDVLVEHAQDTVVIEVSPLCGWVSDLCSALGVKLLVVNTASEAWSWKKIKDKSDRKDAHKIAVMQAMGQHRYVHVPSSEVRQWRELISYRDDQVGRVTACKNRIRSVFDRQGQSWPAGRSGWTEAALKELRSETRALEECDGKSLWRGMLHQELSALEQAMERLEKVTARLDQMAEASERVVRLRTIPGVGNRTAEIAVAMLDDSSRFKNVSEVGAYTGLTPRRCQSGQMDRQLGISYAGSKVLRKMLVQASWIGQQTNPWMQETFQRLTGGKPDRRKKAIVGVARKLFVRMWAMDRDGKDWNGPAAVKHNWRTAAAGGSAVIRDAAEA

SEQ ID NO: 391555 - protein, 318 aa, unidentified
MTSYIGIDVGKKSLHIYLPIADKSIEITNNQQGLAKLLSCCVEYYQHLSDIIIAFEPTGGYERELREFLKLNKVNFVTVHPNKVRSYAKAKGLLAKTDLIDSKLLSEYATVFSLLVKQDYNCKSQEDLHCFIQRREQLIAFKNQEIARLENHYNKVVIKSIKSHINQLDKQLIQVQQSIEELCNNDLAIKDKVSKLTSIPGVGIVAATTAICEIPQLGNIEFSQLTALVGIAPYARESGGYKGKRSIFAGRGNLRKVLYMAAVASLRCNKKLKEFYDRLLANHKPAKVALVAVMRKLLGFMHAVVKNNSFWNNNYVTP

SEQ ID NO: 391556 - protein, 389 aa, unidentified
MPTTEITTAAAITRSECGAIFVSLELSRSTWLVTALAAPLGGKMSRHQVRGGDIAGLLERFSDLQRAVRRRTGHVCPVIVIQEAGLDGFWIHRALAAAGVESHVVDPASIAVSRRHRRAKTDRIDGEALVRTLMAWKRGEPRVCAMVRVPTPEQEDRRRVCRELKSLIGERIRHVNRVKGVLFAQGVEGYEPRNRDRRDRLEELRTGDGRPLPRHLKALVLRELEIIELLNRQIETVKEERDALLSEVQTTGSTPTPVQMLLGLKGIGPGFAGALWSEGLFRRFDNRRQVAAYAGLAPTPWRSGTINHEQGVSKAGNPRLRAIAVEMAWLWLRHQPDSALARWFHDRVRRLGPRARKVTIVALARKLLVALWKYVTSGIVIEGAAMKTV

SEQ ID NO: 391557 - protein, 465 aa, unidentified
MKPIYRRCCGIDVHKKSLSVCVLPPEGQQGEVKREQFRTFLRDLKRLRAWLLRCRVTDVAMESTGQYWRPVWNVLEGHIANLVLLNPAHVKGLAGRKTDRRDAEWLARLHEREHLRGSFIPQMELREMRELTRTRVHLLEDCNRTKNRIAQLCEAGNIKISSVASDLFGTSGRRMLAALIEGRHGPGWIADYACTRLRGKRDQLAMALEGTLTAHHKGLLKRLTGQLNAQETEVADLTREIESRVAVWAEVIGRLVEIPGIERVSAWTILAEIGTDMNVFPDAQHLASWAAVCPGNRESGGKRMSGRTRKGNAYLRRILCQAAWAAARKKGSYLGAFYRRIRARRGHQKAIMALAHHMLTVIYHMLRDNQPYREPGASFYEDKRKPEITRRMVKRLERLGYQVTLEIRLTPDQIRELEPVLTQQLTVPPAVRRRGRPCKCSDRGIACVHRIPTPTTQEPAKLNPQ

SEQ ID NO: 391558 - protein, 354 aa, unidentified
MSEKPNSAIAVIGIDIGKNSFHVVGLDDRGAIVLRQKWSRGQVAARFANMPPCLIGMEACVGAHHLSRKLRGFGHDARLMPAKYVRPYSKGQKNDFRDAEAIAEAVQRPTMKFVATKTADQLDLQALHRVRERLISQRTGVINQIRAFLLERGIAVRQGQRFLRAGLPDILAAPSNVLSPRMVRVIEDLASDWRRLDERIEGLSSEIGAVAHQDAGCERLMSVPGIGPIISSAMVAAIGTGDAFSKGRDFAAWLGLVPRQMSTGDRTILGKISKRGNRYLRVLFVQAAWVVLIKPKSWERHGLKSWLDAAKKRLHYNVLAIALANKLARIAWSVLAHGRSFEVTRIDEAITQPA

SEQ ID NO: 391559 - protein, 337 aa, unidentified
MEYFAGLDVSMEETHICVLDRDGGVVLETRATTSPEAIAAGLAKAPGCRRIVFETGRMAPTLYHGLDALGLPVTCIESRQAYQALKSLVTHKTDRNDARGLAHLARTGFFKPVHVKSLPAHAVRALIIARKKLVGQRVTLENQIRGLAVVFGVRLPRGLSPAFAEHAISGSEGIAGLSGAMRGLLAARNAVLKAIAAINGDLKRLARSSEACQRLMTIPGVGQLTALAFVAAIDEPERFRRSRDVGAYLGLVPRRYQSGEIDYTGSISKCGDRRVRTLLYEAANVMLTRYKPSLKLKDWALAIAKRSTMRKARIALARRLAIIMHAMLRHGTEFKTA

SEQ ID NO: 391560 - protein, 404 aa, unidentified
MNGLPDRTYAVYLGLDVGKEHHHACALDPAGKRLHDKTLPQDEQRIRDLLTDLSVHGDVLVVVDQPASIGALPVAVARSMNIQVAYLPGLAMRRIADLHPGNAKTDARDAYVIADAARTLPHALRRVDVGDDALADLEVIVGFDDDLAAETTRVTNRVHGLLTQIHPALERAIGGSLHHPAVLELLSRFGGPSGLRTAGRRRLLAVAKPRAPRKYQAFVDAIMTALDEQTVTVPGTRAADLVLPKLADQLAGLLAQRAEAATQVEEMLDAHPLAQVLTSMPGVGVRTGARILLEVGDASSFATPGHLAAYAGLAPVMRRSGTSIRGEHPSRSGNKNLKRAFFLAAFAALKDPASRAYYDRKRAEGKRHNAALICLARRRCDVLYAMLRDGTTYQPGRPVTPIAA

SEQ ID NO: 391561 - protein, 346 aa, unidentified
MTVVGIDIGKNSFHVVGLDRRGAIVLRQRWSRGQVEERFANMPRCLIGMEACVGAHHLARRLRALGHDARLMSPKYVRPYSKGQKNDFRDAEAIAEAVQRPTMRFVVTKTPDQLDLQSLHRVRERLVSQRTGVTNQIRAFLLDRGVAARQGLRFLRCQPPIILATRSDVLSPRMMRVIEELAGDWRRLDERIDGLSQEIEALARQDPACERLMTVPGIGPIISSAVVAAIGNGAVFTKGRDFGAWLGLVPKQISTGDRTILGAISRHGNRYLRALFVQAAWVVLVRIKDWDRYGLKAWIDAAKKRLHHNVLAIALANKLARIAWAVLNKERVFECVRTRATASQPA

SEQ ID NO: 391562 - protein, 349 aa, unidentified
MDFIGFDLGKVASQVCITTEDGELIERRIKTDREHIYELLGSRPPARILIESGTESEWVARHLEALGHEVIVADPNFASMYATRSRKVKTDKRDARTLADACRLGAYRPAHRTSDQQRHVRAQLGVREAMVRTRSRYISLVSTLLRRDGLHIHNSGYTPTFIKRLAQLELSDSLRAEIAPLVLLLQSLNEQIKQADQQLAALAEGDEVLARLRTVPGVGVITATSFVSTLDDAGRFAGAKEARAYLGLVPSERSSGERQQRGHISKAGPGRARHMLVEAAWTILRRRSPANATLHDWAAAIAARRGSRVAVVALARKLAGILYAMWRDGASFEARAPKAGDVASVAVAA

SEQ ID NO: 391563 - protein, 367 aa, unidentified
MSKAENSRLCVGVDLHKTQFTVCALNEDGEYLLEKQYPTKEEGYQEFSCEMHDLEEQGYSIELAVETTGNARHFKNRMESECFAVKVVNTNRFKVITMSTRKTDTNDAATLAFYLMKEMLPEAHICSQTSEEIRRILKTRSILVQSMVKIKNQIHGMMLGYGIETKAAQLQSKKKRQELMNDLEDHDYSAYTASSLKVMLKILDDLSSEIKEVEKHLKGMVADNEDVELLMTVPGIGINTATTIAAYTEELDRFEGNYKKFAAYVGIVPSVRNSNESKHYGRITKHGPQELRTAFVQAALGMIRLTKVTSDWRIIKDYQRRKGDKGSGRAIIALARKITRIVFVMLSKRESFNPELMRYEEIIQQTA

SEQ ID NO: 391564 - protein, 354 aa, unidentified
MKLYVGLDVGLEETSLCIVDGDGLTVREVKVITEPEAIRSAVEGYADRLERVGVEASSLGIWLYRELQPAGLPIIVVEARHMRVSLSTMRNKTDRNDARGIAQMMRLGWYRAVHVKNIDMQKMRTLLTNRKLLKRKLIDLENHIRGALRAYGLLVGAVARGGYEARVRELIERSDPIFVMSIEAMLDVRRAILEGYDRLHRVLLQVVQHDAVCRRLMTVPGVGPVAALSFKVGVDDPRRFARSRTVGAHFGLTPKRHQSGTSIDYEGRISKQGDVAVREALCEAAASLLLRVRKWSALRAWGLRIAKRSSMLCAITAVARKLASILHRMWVSETDFHVGFGAKVTQRLRLKPAQ

SEQ ID NO: 391565 - protein, 316 aa, unidentified
MTTSSYSFYIGIDVSKLFLDIFVLPTNQHLRFENTDTGIKKLVKKFKHKPDCFFLMESTGGYEKPCKRGLAQAELPAAVMNPRQIRDFAKASGYLAKTDKIDAELIAQFAQKLTPEPNVSLDDAQEELADFHARRKQLVDMISAEKNRLDKASPAIEKHILRNIKNLEKELAKIDKILVTKVAQDETFAKKSALLQTTKGVGEKTAIGLLAHLPELGRLNKKEITALAGLAPFNRDSGMFKGKRMIRGGRAPVRCSLYMAALVATRHNPCIKAFYERLCAKGKAKKLALVACMRKLLITLNAMIKNNQPWQSSFAN

SEQ ID NO: 391566 - protein, 425 aa, unidentified
METRHQENEEYIFYVGIDWATEQHQCCVMTTTGKVVGNRSVEHSGAGVSAMLGWVRALTGAEPSKIAVAIETPRGPVVEACLEHKHPVFAVNPKQLDRFRDRHSVAGAKDDDRDAFVLADSLRTDQQCFQRVKSDGPEILRIRELSRMEADFTENMQRAVNQLYQLLLRYYPQILQLSKNPDEPWLWALLKLAPIPQLGAKLSLARLQKLLKAHGIRRWKAEQIRDILAAPPLPLTPGSQEAISERVLLLLPQLHLLQMQGKQVAKRLQTLLDKMLIPDPKKPESTEHRDVAVLLSSPGVGRIIAATMLAEASQPLAKRDYHALRVYGGVAPVTRKSGKTKQVLIRYSCNQRVRNALYHWARVAVQQEDRTKNHYARLRQRGHSHGRALRGVADRLLAMLMAMLKKGTPYDASLRAPTSTDAQAA

SEQ ID NO: 391567 - protein, 429 aa, unidentified
MKIIYPRVCGIDVHKKFIVAVICISESVEPIYLKKRFSTFHNDLIRFREWLIQNDCQNVCMESTGKYYIPVYNVLESHISNIVVANPKWVRAVKGEKDDDKDAKWIADLFKFGIVRSSFIPQKDFRILRELTRYRYKLVNMRSSEKNRFQNALTSGNCKLDMVFTDVFGKSASNIIDLILSDNPYTDEDILSKVHKKCKASPDMILDSVNGTDLTPVQKARIELVNDHIKQLSSNIQKLDKLIDLMIEPYEDYISFLCQIPGVSRNSAIIILSEIGIDMNQFTTSRRITSWAGLTPSSNQSAGKKKSVRISRAGVYLKPCLVEVAHAAVKDKSHPCYANKFNKISKRRGKKRAYIAIARKILVAAYHMLLTGEIWNPADLSEVETPVEQRLKYVKNNLKSDIKQLLDIGLTVEELTLMIQQNANIIATQ

SEQ ID NO: 391568 - protein, 416 aa, unidentified
MNAVGIDVSSRKSTVAVLRPLGEVVCLPFDVSHDADGLASLAEKLKALDGETRVVMEHTGRYYEAVAKALHEAGFFVCAVNPLLIKEYGANSLRRVKTDKADAIKIARYVLDNWADLRDFTPMDAIRYDLKTLNRQFQLASKQRTASANNLIALLEQSFPGIRKCFDSPVRSDGTQKWVDFAHSFWHVDCVRKQPFAAFCERYRKWCKLHAYFFKLRNAEKVYALAKSAVVLTPKAKVVKVLVQEAANQLISISRSVEVYRAEMDRLAAMLPEYPVVMAMYGVGKSYGPQLMAEIGDVRRFERKQALVAFAGIDPMPNQSGDKNVRSNKSSKRGSPYLRKTLFNVIRTYLQCAPQDEPVFQFLNRKQAEGKPFYVYMLAAANKFLRRYYAKLRDYFASLDTLQPAAPIPTILKATL

SEQ ID NO: 391569 - protein, 429 aa, unidentified
MNFRPIAGIDVGKFFSEMAILSPSNEVISRMKIHHDSNTDVERAVELLKKTEKEFASRPFVVMESTGHYHKILFHSLCKAGFEVSVTNPIQTDSIKNIGIRKVKNDKVDARKIALLYRFQELRSTNIPNEDIECLRSLCRQYYKLSDELTAYKNRLTGIVDQLMLNFKNVFPNIFSKAALAVLEEYPTPTHILKANRNKLIALIQKNSHRSLKWSTAKYELLVSKARDFEPLSINNSSNIAMLSVYISMIRTLEENLEKVLKAIRLLIAEDMAKDMPMLALTLELLQSLPGIGLLTAATILAEIGDFSAFSKPGKLVAYFGIDPSVMQSGEFTGTRNKMSKRGSRLLRRVLFTIALANIRTKRNKKACNPVMLEFYKQKCQSKPKKVALGAVMRKLVNYIFAVLRDRKPYQLRSPQEHAKNLAAKHTAA

SEQ ID NO: 391570 - protein, 391 aa, unidentified
MPDVSSNASAATTRTFVALDVHKNAITAGVLAREGSQPELVQLENSEKAIRRFIKRLGGARGLAVCYEAGPCGYEPSRLLASMGVACDIVAPSLTPVRPGDRVKTDRRDAKKLVRLYRAGELSLVAPPTPEQEGLRDLVRCRDDLRRARTAARHRVGKQLLRYGRVYREGKKACTLRHRAWVRRQRLDDPLAQAALEHMLCHLDAIDAQIAALDRQLEQVAASPPWCDPVRWLCCFRGISTLTALALLAEIGDFRRFASARELMSFLGLTVSEYSSGERRQRGSITKTGNRHARRLLVEAAWHYQHPPRLSARLRSSGQLVPPEALARAWQAQIRLHERHRHLTANGKLPTVATVAVARQLCGFLWATMTRQPLRDDHSAHPRPRTEVLAA

SEQ ID NO: 391571 - protein, 311 aa, unidentified
MEHYVGIDVAKHSFDLCGLPQQEIRQFENNTKGIRQATRLLMKLQPTLVVMEATGGYETPLAAELYAAGLPVAIVNPRRIRDFARAHGRLAKTDKLDAALIATFAARMQPPTQQQIDHSSRLMKALVARRHQLIRLQTAENNRREHALDKVIAKSLDRILKTIEREIENVEQLIRQQLAAMPQWQAKAQVLDSVPGIGERTAAMLVTEVPEMGRLNRRQIAMLIGVAPINRDSGTFRGKRMTGAGRRDVRSRLYMPTLVATRHNPVICRFYHHLLSKGKTKMTALIACMRKLITILNLMVAKNETWNPKFN

SEQ ID NO: 391572 - protein, 423 aa, unidentified
MMKLKYSICCGLDVHKNVIVATIVTTNKDGISEYLQKSFSTINSDIQRFHNWLIENNCYHVCMESTGKYWIPIFNYLENDIDVCLTHPKYVKAIKGKKTDKKDSKWIADLYKFDLVRCSFIPPKDFRQLRELARYRFKLVCMKSSEKNRIQNCMTISNVGIASVLSDPFGKTATEIMSYLLEHTADSMDEKAVRKLIKKGAKAKSDEIIEAIKGYNIETDQAKKLELARGHLEYLDDMITQTEVELYVRIKPYYEFVEFVSTMPGMTELSSTIVLAETGVDMDIFDDAKHLCSWCGLSPANNESAGKKKSVRIAKAGDYLKPMMVQCALAAIKSKKQPYFAIKYGRIKKRRGHKKAIIAIARMMMVCIYHMVSEKKPFTPTDYEELMNPQNHVERVVLNENNVFAYLESLGYDSSKLVKRNDN

SEQ ID NO: 391573 - protein, 337 aa, unidentified
MSILPVFVGLDYHDMVVEVSVMETDGRELAHRRCTNQVLEIAEVAERFQRPVRAAIEACTGAAALADELVSSRGWSVDMAHPGYVSRMKQNPDKNDFADARLLADLERVGYLPKVWLAPEAIRQLRRVVRYRQQLVAERRNIKLRIRALLRENRIASPDGCPWTERWMCALKAIANLDGESRWLMERHLRRLEQVSQEIRVVERRLRTLTRNDVLVEKLQSIKGIGLITAVTLRAEIGRFDRFRSGKQLSRFCGLSPRNASSGQRQADAGLIKAGNRELRTVLIEAAHCLMRCDPRWQSLAWKLRQCGKPGSVVAAAVANRFVRWLFHQMKCYGLSL

SEQ ID NO: 391574 - protein, 342 aa, unidentified
MQITTIGLDIAKNVFQVHGIDAAEKVVVRKQLRRGQVLGFFKALPPCLIGLEACATAHYWARELTKLGHQVRLMPAKDVKAYVKRNKNDAADAEAICEAVRRPTMRFVQIKSAEQQGRLMLHRTRDLLMRQRTQVINALRAHLAELGTTSAQGREGLKELLKIVASDADERLPADAHASLVVLAAELQAMQTLIGSIEKRIVTQHRENKASKRLLTIPGIGIIGATAIADTVTDPKAFRSGRDFAAWIGLVPRQDSTGGKQKLGPISKQGDRYLRRILVVGAHSVLRRAKLNPQKHPWLTQLLARRPFKVVAVALANKMARMAWALLAKGGAYRAPALAATA

SEQ ID NO: 391575 - protein, 311 aa, unidentified
MIGIDVAKDTLAVCWWPAGASAPKWERSYANSKAGLRRLLKDTPPEEPWVLEPTGSYSLGVVEAALEAGRKPRQADPYAAKRYLESHTSRVKSDRIDARGLARLGLDRELPAYRLKDPDLQRLWELLLVRRGLTKARATLQQQRHVLAQVQSSIAQAMASLGQQIQSLDREIKAEGRKLELFRRLRKVPGLGPINAAALTVRLSSIPFATDHAFVAYVGLDVRLRESGKYRGRRRLTKQGDAVLRWLLYLAARATLRSKKDPRFKQLYQRKRAEGCTSTGALCILARKLARLAWALAHSGKEYDPTRVFAQ

SEQ ID NO: 391576 - protein, 321 aa, unidentified
MTNKYVGIDIAKKQLDLAFRPSGERRQVNRDEPGLAALVQALVADKPALIVLEATGGLEVSVVSALLQAELPVVVVNPRQVRDFAKATGRLAKTDRLDADVLAHFGEALKPTPRPLPSEQQRQLDALIGRRRQLVEMLVAERNRHGIARPKAQPSLERHITWLEAELADLEGDLQTLIRETPAWRECDDLLQGVPGVGMVTSTSLLALLPELGQRSHKQIAALVGVAPFSADSGQHKGKRMIWGGRTASRGHLRSVLYMATLSATRFNPTIRTFYQRLLTAGKPKKVALVAAMRKLLTMLNAILRDKRPWQPPLSLVSSQS

SEQ ID NO: 391577 - protein, 417 aa, unidentified
MNSFPETIPIERYIAIDSHKHYVMVGGMNKQRAWTLRPRQVQMHRFRAWAAQNLKKGDAIVLETTANVWDIYDIVAPLVSKTVVANAYKVRQIAEARVKTDKEDVKRLITLLIADIVPEVWVPPMHVRELRSLISFRWRLSKQITMSKNRLHSVVQRFNLTPPEGNLLAEKNQDWWAEQEFSELTGFQVEHDLRIVEQLEAHKAEIDQKLAELSDTTPWADEMVYLMQIPGFGLLTGMILLAAVGDISRFSHPKKLVGYAGLGAGVHSSGQKHQEKSITKQGRKELRWVLVQAAWAAVRSDPYWKAQYQRLTKVKHPNKAIVAIARRLLVAAWHILTKLEPYRRSDAETIAYKMMIWSQRMDEKALRGLTRQQFIKYGLLRLGVGQDLTRIERKGVPRRIAPADEVLKLRPHLKLPD

SEQ ID NO: 391578 - protein, 354 aa, unidentified
MITIGVDFHKRTSTYNVRDEYGKQLKRSKLENRPELIAGFLQEFPGPKRLAMEATRNWGLYYETVRPHVDEFLLGHPRRMKQITESQTKNDPKDADLICQMALSPFFPKAYVSSLDSRQMRSLLRFRHFLVGQRKSIRNQIQILLDRNLWPSQRPQNFKNPFCKRGLTWLRGVALPERERFILNGSLETFQQLSQQIADLESFIEAQSLDHSDLPYLRRVPGFRKSKVNAYIVLFELVDIHRFRKAKNFAHYAGLIPSEHSSGDKHRTGRLVKEANHFLRTAFIESTFAALRQDKVLKLYYQTVKERAGSGAAIIACARKLSYAVYHVLKSKTDYRPFNPSATTSHPLSVSAKG

SEQ ID NO: 391579 - protein, 429 aa, unidentified
MNSTQNKKIEQVKETTMIVGIDVGSEKHYFRAFNWRGIELTRKPVAFSNSMEGFNSFYNTIVELMQKSELEEALVGIEPTGHYWFDLGQFMGEKNIKFVMVNPHHVHKTKELDDNSPSKNDRKDPRVIAGLVRDGRYFYSYMPTGVYAELRNASNRRFVLVEEQTRAKNRLQKWIAVYFPEYKGIYTHIDAKGGLLVLKQAPTPEEIVRLGVEGIIKIWKDAKLRGNGHKKAMLILNAAMKSIGLKAGLTEARMEIQDLIEDYELQTKRLEQVNDLIKELCRQVRYADKLLEIKGIGITTVAGFIAEVGDITRFDSTKELQKLAGLELVADSSGKHNGKTKISKRGRKRLRYLLFEAAISVVGKNEEFKEIHRYYTAREKNPLKKMQSLIAVACKLIRVFHAILTKGIRYDASKMLKDIRHPGEQLKAA

SEQ ID NO: 391580 - protein, 369 aa, unidentified
MTKQNQNSTALLRYCVGIDVSKDTLQVCVSVIDINGKITIKASGKVINKTTAFDSFLTWTAKHCKDKSVPVRFVMESTGVYHEQLAWFLFQNDLAVSVVLPNKAKYYLKSIGNKSKNDTIDARGLAQMGLEQNLKLWEPVSKSIYQLRMLTRHYQTLQELKNQSQNQRHAVLHSRTIDKFTLKHLEKLIKVYDKQLDETKKEIAKLIEKDANLKVKIAQLCQIKGLALLSVATIVAETNGFAGFENIRQLVSFAGYDVVENQSGQRAGKTRISKKGNSRIRRILHLPAFNAVRLGDPACKALFERVFERTKIKMKAYVAVQKKLLTLCYAIWKNDTQYDPNYTSNNVKEQKNINKKIVPTSGTTQDIAA

SEQ ID NO: 391581 - protein, 349 aa, unidentified
MIIIGADFHPEFQQIAYVDTSTGEYKERRLQHPEEAEKFYRDLAAQAISVRVGMEASGHARWFERLMAELGLELWVGDAAKIHAKRVRKQKTDRQDAQHILQLLLKDDFPKIWVPSWENRDLRQLLWHRHRMVQARTRIMNQLQAVALNEGLRCKKRLWRERGRQQLEAFRLAPWASRRRRDLLELMDRLNPMIADLSQEIERQASASVEVQRLKTHPGVGALTALAFVLIIGEAGRFHCGKQVASYIGLVPLEDSSGNRRRLGHITKQGSSMLRFLLVEAAQVTVRSDPRWRQQYFHVMMRRGRKIAKIAMARRLAIRLYWMSRRGWDYEQVSKFGSHAGQPGNRHGV

SEQ ID NO: 391582 - protein, 394 aa, unidentified
MRFVGIDVAAERHVVAVVDETDRVLLKATPFTEDADGYAKLFEVLGVPTDALVAMEATGHYWKNLFAALVAGGFAVALLNPLRTRRFAGEDLQRTQTDAIDAVGIARFAAQKRPPASRLPDRATEELRELVRFRDRLRQDFGDRVRQLHRLVDLGFPEFTRHVRDLGSELATGLLREYPTAAGFHGVPMRRLAALRYDGRHKVGDALAASLIAAATGSVGRHHGEAYRIQVRYTCEDLDVLRRRLRDLERDIDRLLERHEIGRLLTTIDGIGPQTSARLVATFGDFSSFPSAGALASYVGAVPALKQSGKRTFQRASLTPIGAARLRAKLWMPVLTAVRTNPWLRAYYERLIARGKLPKVALVAAMRKLLHAVYSVATHRRPFVANLVTAEARP

SEQ ID NO: 391583 - protein, 301 aa, unidentified
MGMPRWVGRAIGLDVHREFCEVAICEDGRTRSAGRVSATPEGIAVLARSLLPSDRVALEVTGSCWEVARILEPRVNRVVVVSPDDTGITSARAKTDKLDARALASLLWKGELEAVWMPDERCRVLRRRLARRQQLVWSRSRAKNEIHAALQRRLQPKPPCSDLFGVKGRAWLSSLELPLEERESVDAGMRHIEFLDAEIAAVEKLIAKQALSWPEIRRLMTVPGVNLICAASFIAAVGNPNRFLTSRKLVAYLGLDPRVKQSGEGPARSGRISKRGSPSARWALVEAAWTAVLQPGPLHAF

SEQ ID NO: 391584 - protein, 340 aa, unidentified
MQIIGCDLHAAQQTIAMLDGDTGEVVERTLTHDGDTVREFYASIPGPAVVGIEATGSMGWFLRLLEELAIPCRVGHPAAVRKAETRRQKHDRRDADLLLKLLVEDRFPAIWMPSTEQRDLRALLLHRHQWVRMRTRVQQALQAMALSHGLRRGPTLWSRNGLAALAALPLPPHAAHRRSELVALYRHLAAQVDQLDTRVAEAVRPRAAATRLMTHPGVGPVTALATEVFLGDPGRFADGKALASYVGMIPSEYSSGSRQRLGALSKQGNPLLRFLWGEAAMHAVRRDPELQRFYRRKLSQKGLGKARIAAARKLGIRLWIMLRDQIGYEEFCRRSPRRPA

SEQ ID NO: 391585 - protein, 373 aa, unidentified
MLYVGIDVAKNKHDVTALNVPGKTVLKPLTFSNNKAGFELLDLSLRQLNQDCLIALENTGHYAFNLLNFLHEQGYKVYTYNPLLIKEFAKSLSLRKTKTDKKDAHGIALKLLSDPNREQFQHDNRQVELKILARHIHRLKKKQSDWKVQYTRCLDIIFPELDKIVGKHSEYTYQLLTRYPNPQKRLEAGFDKLIEIKRLTASKIQDILSVAPRSIGTTSPAREFEIIKHYKRLIDKAETCVNDLMAEFNSIITTVTGIGNRLGAVILAEIRNIHAFDNPAQLQAFAGLDSSIYQSGQIDLAGRMIKRGSPHLRWALIQAAKACARFSPAFKVYLKTKLEQGKHYNVAIIHLAKKLIRTLFYILKKSCHLTNKK

SEQ ID NO: 391586 - protein, 393 aa, unidentified
MYYLGIDIAKHSHVASLIDSDGKVIIKTIKFTNDAIGYQKLMAQINAVIPNADKRDIAIAMEATGHYWLSVFSVLIDDGYHVSVYNPFQIKSFRGAFHNRRQKTDAIDAVIIANYIRTFGGDVTTLPNEALLSLKQLTRYRSDLVHNISALKNQVIAILDKVFPEFSSLLSDTFGSTGKALLSVCPTPEAVMSLSGKRLLKIVSTASRGHHKQDFVDKLKAAAKSSFGIKFTTKACAFELKQLINTIIFLEEQTDELDVEIKTLYSGLDEFLVTIPGIGEVLAPIILAEIGDIGKFSDPAKLVAFTGIDPSANQSGQKISGDEKISKRGSPYLRSAVYHAAFIASNHDPHLREYYLRKKAEGKHHYVALAGVQRKLLQIIWAVLKEQRAYRPY

SEQ ID NO: 391587 - protein, 464 aa, unidentified
MKYAPVQVLPDVPAGGVAAGIDWAVADHVACVVDMAGRVTDRFSAVHDKAGIAMLIARLRRSGAGEVAIERGNGVLVEALLAAGLTVVVISPHRVKNLRARYRSGGGKDDRFDSFVLADTLRTDRARLRPLVPDTPVTLALRAAVRARKDLVAHRVRACNQLRAHLAVAFPAAIGLFAELDSPVSLRFLAGFGSQDAAAALDEQALLGWLAAGPGRGRGNTAPASVLCARLRAAPGGVTGEEGAAHAVITTALAATAGMLAAQIKILETAIGVQLAAHPDAHIFTSLPRAGMLRAARLLAEIGDCRSRYPGPQALAALAGVVPVTRASGTHTSHAFRWAVSRPLRDAVCDFADGSRHASPWAQSVYQAARDRGKDHQHAVRILGRAWIIIIWRCWQEGIPYDPAKHTALQAVLDQQAAQAAAAAPAGGISPCPAADSAPSKSPPAPPQPPRSATAAPAAATWNQ

SEQ ID NO: 391588 - protein, 336 aa, unidentified
MSHYCGIDLHSNNHVVVIIDEEDKRVFEKRLSNDLSLTLETLHPYRKTLRGIAVESTFNWYWLVDGLQEQGYDLQLVNTAAVKQYDGLKYSGDHQDAFHLAHLMRLGILPTGYIYPKEQRAIRDMLRRRLSLVRTASTQLISVQSQIWRSTGIRISSEKLRKLEFVPPHVDGYTLQAICAGLAVYQAVQQEINGLEKSAHQAVKLTDVFKILQTITGIGKILGLTIMLETGDIHRFAGAGNFASYCRCVDSTRTSNGKKKGEGNAKAGNKYLSWAFSEAAHFAVRFEPLAQRFYERKKAKTNGIIAIRAVARKLARATWMMLKHQVPYDARRMFPG

SEQ ID NO: 391589 - protein, 345 aa, unidentified
MTEAYDGRQVVGMDLHRRRSVIVRMTEDGRKLETVRITSSPAALRREIAKAGKHPRVVIEATYGWYWAADVLEAAGAEVRLAHPLGVQAYSCRRVKNDQRDAADLAGLLRMGRLPEAWIAPPEIRELRELTRYRHKLVQARTSVKDQVHAVLAKLGIAVTHTDISGVHGQAWLDELKLPQPYAGKVTSLRQLAGELTAEITLLEQVPGDLLAGHEGYAAIRQLPGIGPVLAAVIVAEIGDIRRFRKPGQLACWAGLTPRHRESDAKVTRGHISKQGPRILRWALCEAIQHQPAGTRPRQVKDGIIARRGPQARNIAKTAAARDLLTLIFYALRDGRVRRAASPAA

SEQ ID NO: 391590 - protein, 378 aa, unidentified
MKNCTRYLGLDVHAETITAAIAEGRDRIRNLGKFPNRPEAVRKLIDKLGGGRNLKVCYEAGPTGYALYWQLTKLGVDCEVIAPSLIPRKSGDKVKTDRRDAEKLARSYQSGDLTPVWVPTPEHEALRDLVRQRAAAKSDESRAKHRLITLLLRHAAREPNGSRAWTHPWWRWVQALKFDHEARQVALADCIAEVLHMGERLARLDQAIDRMVESAPPHMRAVIEALQALRGVAKLTAVTVVTEVGTFQRFHRPTQMMGYTGLVPCEHSSGSRQAQGGITHTGNAHLRSVLVEAAWHARHRPWLNLRLKKLLPTLPAGVAEIAWKAQERLHRKFSKMIYSRKHAGVVAAAVARELVGFIWAIGTMVESKHTEDTMARAA

SEQ ID NO: 391591 - protein, 320 aa, unidentified
MRNAVGLDISQNTFDAAAIVNGQRKQALFDNSINGFENFKAWLDGFDCELHICMEATGNYFEDVADYISQFYTVSVINPYKISEYGKSRFHRTKTDKQDARLIAEYCHTAMLKDLPARKKISIGHYRLKRLLALYEQLKTQKTAQKNRLKVAKDEFVRRIHQAQIQELDQHIQQAEAEIQAITNDNKDLKTVSEGLQTIPAIGKLTAAILTNYLLSGDFKTANQFTAFAGLNPQQRESGTSVKGRSSMTRYGNRRLKAALFMPAMVALNRDYFHDFVKRLKAKNKPKMLILGALMRKLLVVAYHVYKTQKPYNPERYKPA

SEQ ID NO: 391592 - protein, 438 aa, unidentified
MLDPRAAFVDVGSEKMHVSIAGGPPAVFGTVTSQLHALRHYLVEHQVRSVAMEATGVYWLPLYGVLEASGMEVIMVDGRQARNLPGRKTDMKDCQWGATLHAHGLLRAGFVPPAHVRRLQDYLRLRGDHIVAAAGHVQHMQKALERMNIKLHDVISSLTGASGLAVIRAILAGERDPQALLGLCHRQIRTVKAERVVESLRGDFAEEHLFALAQAVQSWDHYQGLIAACDRQIADILRQMPDANTPPPAASTKKATPRRQPGVNAPDIADLRDMLEQICGGKDLTILPAHTEYSVLQIIGEVGTDLTKWRTEKHFTSWVGLAPGSAQSGKRNGRVKRRRNRAGRIFCVMARSLARSKYIAFGGFYRRMAARRGGLVANKALARKLAALFWRAMVKGLDFVEMGVAQYEAKVLETKHSLLHKLARQLGQQVVPKPIAVA

SEQ ID NO: 391593 - protein, 391 aa, unidentified
MSMYFLGIDISKYKHDCCIISAADQQVVSKFVIRNDKDGFNELLKTLNSLSNPKDIKIGFESTSHYALNLELFLEKAHHSFMEVNPVLISEYKKSTTLRRTKTDRVDCESIARWLMTVEYKPHPNGFYHAYSLKSLTRLRDRLIRQRSLYLVKLTNVLDHTFPEFKPFFGERFSKTAFYLLETYGTAEKMSRMNSASYEKIRVLSRGKFSPQQFIALKEMAANTVGVSNEIFETELTCLLTLYKGIAEQVDCLETKIVELISEIRPHYISIPGVGPISAAVIYAEFGDVSNFSSPAQMLAFAGLEPGVNDSGTESHGGRMVKRGSSHLRYVLMNCALPLIRFDITFATYYAKKRAEGKPHRVAMSHVAKKLVRVIFALERQKTDFVTAALH

SEQ ID NO: 391594 - protein, 442 aa, unidentified
MLRTIYRRVAGLDVHKKTVVATRMRMTEDDRVVWETKTFGTTTPDLLELHDWLLEWSSTHVAIESTGDFWKPVYNVLEGTFELLVVNAKHVKHVPGRKTDATDSEWLAELMMHGLLKASFIPPEPQRALRDMTRYRTTLVQERARVINRVQKLLEGANIKLSSVATDIMGVSARAMLDEIVAGQADTTLLAELAKGRMRTKIPELEKALTGKVKAHHRFLLAKQLAHVDFLDEQIEEISAEIGRHMEEMGGPSRPGADAGGGEKPTEGEQPLPPLTWEEAVALLDTIPGVNRRAAEVILAEIGLDMSRFPTADHLASWAGLAPGNHESGGKRYSGRRTKGNRSLSSMMTEAAQAASRSKDTFLSARYHRLAARRGKKRAIGAVAHSMIVMIWHILTSRQPYRELGGNYFDERKKESKVNYYLRRLEQLTGAAVTLGFQPAAA

SEQ ID NO: 391595 - protein, 409 aa, unidentified
MDIVHTHFVGLDVHKKTVVAAIIVPGKKETRTFETMTSDLLVLSDWLTVEGVTYAAMESTGEYWKPVFNILENNFEVLLVNAQYIKSVPGRKTDIKDAEWIADLLRYGLLKASFIPPVGQRELRELTRYRTTFVQEKATLVNRIQKVLESANIKLASVASNVVGVSGRAMLAAIIEGKAAPAEMAELSKGRLREKRDQLIKALEGQVKAHHRFVLTELLCQIDSLDETIARFDQQIQEYSRPFEKVVNLLDTIPGVARQTAEIIVSEIGIDMSRFESANHLSAWAGLAPGNNESAGKRLSGKTGRGNKALGVALNQAAHAVSHMKNNYLAAQYHRLAGRRGQKKAIVAVAHSIFVITYHMIKRKESYRELGGDYFDKRRPEATAKRLVKRLEQLDFTVSLEQASAPLAA

SEQ ID NO: 391596 - protein, 455 aa, unidentified
MAREGRKRAGVRLVEDEEYQLRHERVAGIDVAKASAAVCVRLPPARAGGRRVSRTEEVEATVPAVTGLAQRLLADGVEMVSMESTSDYWRIWFYVLEGAGLRVQLVSPSQARRLAGRPKTDEQDAQWLARLTEMGLLRPSFVPPAEVRALRDYTRTRLHLVQDRTREYQRLEKLLEGALIKISSVGSGLTSKSARDMVAALADGQRDTWALASLARTRLRAKWDHLERALDGMFDDHHGELARIHLDRIEALDRHVARLDDSIAAALDAIPASWGADADGTTGPGAGTGEGAAVLAAADRLAEVPGMSRDLARNLIAEIGLDMSRFPTPAHLVSWAGLAPETLQSGARSRTRKGRGNSYARNAATQAANGAARTRTFLGERYARIGRRRGKARALVAVARSILVIIWHLLKNPAARFTDLGPDYYARKVDKDKKLRSHLAQIQALGYQVTITPAA

SEQ ID NO: 391597 - protein, 347 aa, unidentified
MNFYNNMHPYYCGIDLHARLLYVCIIDNTELILVHKKIKDDPEALLILLKPYTGDIVVGVECMHCWYWVADLCKEHTIDFILGHALYMRAIHGGKAKNDKIDSYKIAKLIRGGNFPLAYVYDKDMRAIRELLRRRTKIVRHGADLKAHVANTASQYNLPAHNVNLKNVCDREKMRYYFPDPVVQRSINLNMAILDCYHNELKPLEHYIEQMAKQHNPVRLNILQTINGICRILALTIIYEIGGINRFSSVQKFASYSRLVKCKAESAGKTYGTQGNKIGNAHLKWAFSEAAVLLLRHNHNANKYLEKLQKRMSKAKALSALAHKLGRCVYFMLKKETVFDEAKFLKS

SEQ ID NO: 391598 - protein, 346 aa, unidentified
MKYYAGLDVSMKETSVCIVDETGKICRELKVVSHPDDLISVLKDPAICVDRIGLEAGPLSQWLFEGLAKAGLPVICIETRHTKAFLKAQPNKTDRNDARGIAQMMRVNLYRPVHVKTLTSQRRRALLTARKLLQEKAIAIENDLRGLLRNFGLKVGMVGAVGFEARIRELVEDIADLAEIVEPLLDARLKLRQNYAALHRKLLAIVRDDETCRRLMTVPGVGPVVALSYVATIDIPARFQRSKAVGPSLGLTPVLNQSGESNRVGRISCCGDDMMRSLLFEAAQVMLTNVRKWSWLKAWAMNVAKRRGRQKAVVALARRLAVIMHRMWQDGTEFRWTRDVAMPAAA

SEQ ID NO: 391599 - protein, 336 aa, unidentified
MWYVGLDVHVRRSTFCVLDENGKQIEKRTIHGTWNSVLGELRRIKEPFVICFEASTGYAYLFSQLGKIAKRVVVAHPGQLRLIFRSKRKNDRVDSEKLAKLLYLDEVPPVHVPSIEVRSWRSMIEHRGKLVVERARAKNGIRSLLRTHGIVPTRRLWSRAGRTWLRSVELPTEMYAVQYEILLERLESLTTMIQRVERLLAKYSDKHPGVALVMTIPGVGIRTAEAVVAYIDCAGRFHSNKSIGRYFGIIPSQDESAGKNRLGHITREGPSTVRGLAVEAAWQGVRRSSRIRAYFERIRGDNPKRRKIALVATAHYLLRVMLAMLKTGEVWRQETA

SEQ ID NO: 391600 - protein, 371 aa, unidentified
MNNNNTESTSGSEGNEAREQHKGDRVLKVGLDLHYRQVTVAMQEDGGRIKGAGKMSHQAFGHWMDKKLAAGWQIESCYEAGASGYWLHRQLVALGVKNLVVAPKAMGQGGKRQKTDRRDSAELVDGLDRYLRGQDKALSVVAVPSVEGEEKRALIRYHRQVMADRSRFEGRGKGLLCAQGIEVRGRWWQAKGWRELNADPGLKDWMKEQLEAWRQKVLSAEEEQGELRRRIEALAPAMRPKGVGAYSTAVLEYEMKGWQRFHNRGQVSSYTGLCPGIHQSDGRGKEGSINRCGNRVVRWNLVEMVWRLMVWQPHYGPVRQLAAGLVRSKRAKRRLVVKAARQLAIDLWRLATDQTTAEKLGLIMHSDRRRQ

SEQ ID NO: 391601 - protein, 374 aa, unidentified
MGDYSEAFVGLDTSKLRNAVAIADAGRGGEVRFLGEIENTPAATAKLVRKLSARYERLTFCYEAGPTGYGLHRQIKILGFECVVVAPSLIPKRPGDKVKTNRRDALSLAKLLRADELTPVWVPDGGHEAMRDLTRARETAMLDLRTKRQHVSAFLLRLGRPYPESRKTWTKAHASWIASQKLEHPQQRLVLEEMMLAIRQAQERLQRLEQAVAATVPEWSLAPGVTALMAMRGIDLVSATTLLAEIGDLSRFRTPTELMAYLGLVPSENSTGDTIKRGAITKAGNRRARRMLVECAWSYQHPPRVGQAKQPRVDAAPPAVREIAWKAQCRLYRRYRALIRKGKLKTVAIVAIARELAGFVWAVARAVNTAPAAA

SEQ ID NO: 391602 - protein, 317 aa, unidentified
MTTTPPPPMSVYVGIDVASTHLDVACWPEEASWQEPNTPVGHAALHVRLAALAPALIVLEASGGYERAVLVMLAQAGLPVVRVNPRQVRDFAKAIGRLAKTDRLDAAVLARYAAAVQPPVRGIADETTQKLRDLLAWRRELLVMQTADEQRARHVEASVAARMARHRAWLAEEVRLVETDLAALLASQPTWQAALACLTTMPGVGMLTAATLLALLPELGQLARTEIAALAGVAPFNRDSGQRRGKRGTWGGRGAVRAALFMACVSAVQHNPVLKAFRERLLAAHKAPMVVMVACMHKLLTHLNAMLRDGVPWASQA

SEQ ID NO: 391603 - protein, 342 aa, unidentified
MKDMMIGVDLAKNVFQVHGALRTGEVQFRKKLTRTQFPVFMAKQEPSLVIFEACGSAHYWAREMEALGHEVKLIAPQYARPFVKRQKNDAADAEAIVIAARQPEMRFVEPKTVEQQSRAAVFRGRERLVHQRTADVNALRALLYEHGHVFPQGIRSLNRITALVEDKTADLHPLIREECLDLLAQIAEKTERIIERTTKLKTLVAESDRARRLQTMPGVGPLTAIAVEAFGPDMAQFKTGRDFAAWLGLVPKQHSSGGKERLGRMTKAGQADIRRLLIIGAMSRMNWLGQRSITEGSWLSRMLARKPKMLVAIALANKMARQIWAMLTKNEDYKDPALAVAA

SEQ ID NO: 391604 - protein, 384 aa, unidentified
MQKAITYVGLDVHKDSIVVSLAEAGLGGRLREVREYGKVLNTPAALKAMATKLGASGKELRFCYEAGPCGYGVQRQLSAMGHQCAVVAPSLVPRKPGERIKTDRRDAVKLAKLHRAGELTPVWVPDPAHEAMRDLVRARLTAVRNVREARQQLSGFLLRNGYHYHRHPWTLLHRRWMADLKFDQPLQYIVLHDCIAAIEACEQRRDRLEVRIVAALPEWSLAPLVEALQALRGIALVSAATLVAELGDIARFSNPRQFMAYLGLVPSEHSSGRSRRQGGITKAGNAVARRMLIEAAWSYRFPARISRYQLLQQERLPKPIRDIAWKAQERLCPRHRKLMRAGKPKTVVCAAIARELAGFVWAIATEMSSANGKKGKGKPVVAAS

SEQ ID NO: 391605 - protein, 467 aa, unidentified
MARKQKNIKGMNRKGKPRSLKTIQPNAAGIDLGSREHWVAGPPLADESPNVERFGTTTPELLRLADWLDQQQIVTVAMESTGVYWIPLFEILDSRGFKVFLVNARHVRNVPGRKTDMIDCQWLQLLHACGLLRGSFRPSDDICRLRALFRERNTMVDQRSDWVRRMQKSLDQMNVCVHHAVSDITGVTGMSIIRAIVDGERDPQVLAGLRDRRCRKTKKQIAEELTGNWRPEHLFTFEQSLKMYDQLCNVIAAYDTEILNYIDSLQPPDAQNSLAPPSSSKTKARNFVKRGKEPLRQALYHMSGFDLTTIDGIGVDTAAVVISELGLDYSAFPDESHFVSYLRLAPNISISAGKKVPGKFKAVTCTRVSNALRMAATTLRNSKTALGAYYRRISWRKGASIAVFAIARKLAQIIYRLVRYGQDYVDAGTEAYEARFTQRRLSSYTKALKEMGYKIEPLTDTEAVAVS

SEQ ID NO: 391606 - protein, 470 aa, unidentified
MNDNREAGRRRTKGSRQRKSPGLLERIQPDAAGIDCGAEYHYVAVPPDRDPEPVRPFRTFTADLERLADWLAACGVKTVAMESTGVYWIPLYELLEARGFQVVLVNARDVRNVPGRKSDVADSEWLRELHSVGLLRASFRPAGEIAALRAYLRHRETLVHGAATHIQRMQKALVQMNLQLHTVIADRTGVTGQRIVRDILAGVRDPHALAAHRDHRCRASADVIAASLTGHYRAEHLFALRQNFEAYEFLKRQIDACDAAIDAHLTTLAERQAPPPHTLPTPRRTRKPRDNDPRFEIRAPLFRLTGTDLTQIDAIGPSTALQLIGEIGTDMSRWRSEKHFTSWLTLAPHNKVSGGRLLSSKTPPSANRAAAILRRCAMSLGRTATALGAYYRRLAYRVGKPKAITATARKLAILVYRVLRGDLVYRDPGALAYEQLHRARTLRGLRKRANQLGFGLLNLETGEVLDAAVS

SEQ ID NO: 391607 - protein, 306 aa, unidentified
MTHQTTSECITTIGIDLGKTTFHLIGMDARGRIVLRRKIARGQLQSCLANLPVCLIGMEACAGAHHVGRQLAALGHDVRLLPAQYVKPFPKGHKNDYRDAEATAEAVQRPTMRPVPLKSAEQLDLQALHRVRRRRIGQRTAVINQIRAFLLECGLPVRQGLAGLREALPTLLSQRTDVLSPRMIHLIEDLAEDWRQLDERLETLTWDITALARQDAGCRRLMGIPGVGVITASAMVAVGTGAAFAKGRDFAAWLGLVPEQISIGDRTILGGLSKRGTATCAPCSWAARRPFCSTGTTGKDTASEAG

SEQ ID NO: 391608 - protein, 385 aa, unidentified
MQKHHDDSKACLTAFVQDNTVIAVIEMSFASWLVAGMIPSANREPLKKIAPDPEVLLRLLYRWRDEAIKAGKEITRIAVAYEIGRDAFWLARWLRDRGIDAYVIHATSVAISREHRRAKTDRIDTAMLKRGFLGWLRGERGHCSMAVIPTIAEEDAKRPHREREALVKARTRTINQMKAILAQFGVCNFKPVLRKAVEKIDDVRTPEGVPLPPNAAAALRRHIEHFRLIKQQIKAIEKTRLQRLRQNPTDKFNAMVFLLVRIIGLGVETAEQLVHEILSRKLRDRKAVARYSGLTGSPDESGARRREKGLSRSGNGRVRKILIQLSWRMLQFQSNSGLVRWFKDRTANSQRSRKPMIVALARKLIIALWRYVNTGEVPEGFQLAK

SEQ ID NO: 391609 - protein, 314 aa, unidentified
MVNIGIDVSKERLDVAVRPSGERFSVTNDEEGHAELRKRLKKLKPERIVLEPTGGYEWRVVHVLTLAKLPAIVVNARQIRQFAQATGRLAKTDAIDADVLAHFAEAIQPEIRAVPDAAHRELEALVSRRRQLVEMRAAEAKRKQTAPHVVHPSIDAVIEALTQQIDDLDGNLRRVIMSTPAWREAEELNISVPGVGRVLSTTMTGLVPELGKLNRKQIAALIGVAPLNKDSGKTEGRRTTWGGRASVRAVLYMATLAAIRCNPSIRAFHARLLAKGKLPLVAIVASMRKLLTVLNAIARDRRPWNPQLAPAEQK

SEQ ID NO: 391610 - protein, 319 aa, unidentified
MEVLYPRCSGLDVHKRFVVACLSSVGAKGQRRKELRQFGTMTSEILDLKEWLKAAGCTHLALESTGVYWKPIYHLLEDSFEIVLVNAQHMKAVPGRKTDIKDAEWITDLLQHGLLKASFIPGKEQQAVRDLTRTRMRLMQERTRLINRLQKVLEDANIKLASVVSDVMGVTGRAILMALVAGQEDPEYLAHLARGSLVRKEDQLQAALQGKLTAHHRMQLEELLRLIATLDHSIAHFDREIAERLRRFDALIERIDAVTGLSRCSIEVLLGELGWDMSHFPDAAHAASWVGICPGNHETGGKQRETVARVKAIVGPKRC

SEQ ID NO: 391611 - protein, 385 aa, unidentified
MRRQTADVIMRWCYSLPMKTKTKTPSVVSTSPAAVVSGFTLGLDLGDRAHHVCVLDATGQIVREASLPNTRPALAQLLADFPRATVALEAGTHSPWISRYLTGLGATVFVANPRKLHAISRNERKCDRRDAQMLARLARADVALLHPIKHGTAQAQHDLLGLKLRDALVRTRVNLINTVRFTLKSLGHSVCNPSSESFHKTVLADIPADCLPVVQPLLTVLTQVTEQIKGMERDLVQRSKKDYSVTERLQQISGVGPLTALCFVLKIGDPERFSRGRDVGAYLGLCPRRDQSGGTDKQLRISKCGDGMMRRLLVSAAHYILGPFGPACALREYGQRLAGTGSAREKKRAVVAVARKLAVLLLSLWKHDADYEPRATTPVLVMTPA

SEQ ID NO: 391612 - protein, 322 aa, unidentified
MAMHSFGGIDVSKDRLDVMVLPEEQCSSVPNDAAGWAKLVEQLRGFSISAVGIEASGGYERGAVRALLAAGMSVRQVNPFKLRQFARASGVLAKNDPLDARMIASFIAIMPTRPAQPHAPAVERLAEILTVRRQLSDAKVAAENASRLLEDAMLQRLSRRRIARLAADIDLLDGRLVEIVMADAALVHRYQLLTSMPGVGPVLACTLIALLPELGRMNRKQVAALVGLAPYAFDSGKLKGARCIWGGRASIRRVLYMAALIAMRCNPALKAFHNRLAATGKKPKVVIVAVMRKMIITLNAMLRNETPWVDRSSGRHSVLTAR

SEQ ID NO: 391613 - protein, 342 aa, unidentified
MTIVTLGIDLGKTVCSLVGMDEAGALVLRRRLRRDRVLACTSTLPRCTIAMEACCGAHFLGRCFAAQGHAVRLMSPEYVRPYVKSHKNDDWDAEAVAEASARPSMRFVALKSEAQLDVQSLHRVRTRLIRARTALINQLRAVLLERGVVVAPGPQRLARMLPEILADETNALNPRIRHLIEELRGEWRSLDDRIKALDKELAALAREHDATRRLMTIPAIGPLTATALAAAVGDARALANGRALSASLGLVPRQTSTGGKPRLGSISKRGNPYLRTLLIHGARSALPHLAKTDTPLGRWLRALQQRSNYNTTVVALANKLARIAWVVLARGEAFTAASASAR

SEQ ID NO: 391614 - protein, 397 aa, unidentified
MKKVCGLDIHKDTIFACILKENNEAILEEFTTLTTGINSLKELLLEAGVEEVAMESTGIYWIPIWRILEGHFNLKLVNPYFIKQVPGRKSDVKDAQWIATVLQKDLIKGSYVPEKHIRELREYERRYVSLCGQISRVERQLDNQLTKCNIRITSFASQTGSVSVMSVVKAIINGERGAEELEKHVHGRVRNKYKEKITEALTGCITEVDVFLLRQSYEQLQMFERQQKELVMAMDAICEKYYKEEMKLLCTIAGVQELSAMHIIAEIGVDLSSFEKSSHLSSWAGLRPRNDESAGKIKSKRITHGNKYLCRVLVQCAWAVTRKRDCWLRRKYENLCKRKSKKKALIAIARKLLVIIWFILTKHEEYKEYQPKETKKIILKKIQYYQRQIENLKLKVV

SEQ ID NO: 391615 - protein, 423 aa, unidentified
MKFKSQAKQNQLIEKISAQHLVVGIDIAQQTHVARAVNFRGIVVGNPLFFSNDEEGFNSLLRWIQSLQTAHALTAAIVGMEPTGHYWLNLSKWLSNCQFEVVLVNPHLVKKNKENRDNTPSKSDKKDALVIADMVKNGYYSFTRNTPEAFEELRVFLSNRDSVVTRLVSAKNQIHRWVDVVFPEMRQVFKNIMCIGSLATLRLFPTPEELCKLQPQDILRGWKSLMKRHSGDRKARALISLACRSVGSKQATHAYKLHLKQLLDEYDLACLQLQTVETEIIAVLERIPFAKSMLAVKGISAISLAGILGEAGDLSGFVHGNALLRHAGLNLAEASSGKWTGQMKISKRGRSRLRRFIFMMTMSLVANNSEFKAMHAYNVQIKKMKKMRSIMKLCGKLARILVGMARSGEAYNPPKTSPIQLVA

SEQ ID NO: 391616 - protein, 331 aa, unidentified
MYFSQFIGVDISKNTLDAAIYPAKDKKLDFLHFDNTQKGLGEMLSWLKRRGVKPSEMVICAEHTGVYTNPLITFADKKGLALSLNSPLDIKHSMGIVRGKNDVVDAGRIAEYAHNHRDKLRLYEKPSDAIMKLQYLLTERRQYMRQRTALINLNSAMGKYETPEARNRNESAIRHCEKLVKKVEEQMMAVLCSEPEVKWNFDLVSSVKGIGLINAINTVVYTNNFKAFETPRRYACYIGVAPFDHTSGTSVKGKTQVSKICRTQQKAELSMAARSAVIHDPGLKRYYQRKMKEKGGGKNAHGVVLNAVKFKLILRMFAVVKSGQPYKVLNY

SEQ ID NO: 391617 - protein, 473 aa, unidentified
MFPLGRLVLQKTIGHLPAGLLEQLTTYPVMKTLPVLDPKAAAIDVGSEKLHVSVAGDAPKVFGTFTGDLEALRDWFQEQGVQTVALEATGVYWLYLYEVLEAAGLAVVVVNGRHVQNVPGRKTDMADCQWLATLHAHGLLRGGFVPSGEIRQLQDYQRLRADHLVGAASQVQKMQQALERMNIKFHDVISDLVGVSGLKVVRAILKGERRPGELLALCDLQIQKKKAERVKESLRGSWKKEQLFALRQGLELWETYQQKIADCDRELESLLREMTGPQPPAAGSGNAVAVGPVVLGPAKPPGKNAPVIERMQELVARLCGGRDVTQLPGLSVALVLQLISEVGTDMTRWPTEKHFVSWLGLAGGRKQSGKRKGSVKAHRNRAGRLFCAAARALAQSVDKALGGFYRRLRGRLGGLAANVALARKLALLFYRLLRYGMGYVEQGLKNYEAKVLETETRLLRKLARKQGFALVPN

SEQ ID NO: 391618 - protein, 319 aa, unidentified
MAAEIFIGIDVARDRLEVAVRPTGEQWSVGNHTVGMAELLVRLRALRPTLIVLEATGGLELPVLGVLGSAGLPVVAVNPRQVRDFAKASGKLAKTDAIDAQVLAHFADAIRPAVRPLPDAATQALSALVARRRQLVEMLTAEENRRASASATIRPDIQEHIGWLRKRLRGLDKELSQALRTSPLWREQEDLLRSVPGIGPVVTVTLLADLPELGVLGRKQIGALVGVAPLNRDSGTLRGKRTVWGGRSTVRAALYMAALVGTRHNPVLRALYTRLLAAGKTKKVALTACMHKLLTILNALLKHSTRWATPASLGASSTG

SEQ ID NO: 391619 - protein, 311 aa, unidentified
MMLVIGIDVSKHTLDVYDSAQKKHLSFTNTLDGMQTLISSYTEYKNIKVIMESTGIYQRLAHTILETAGYQVHIVNPLKTRNFAKSAGFLAKTDKIDARMLCMFGQKFDLQVTPSRSKDHKQLESLMGYRNALQKEIQRHKNHLEYQHCSEFVCKLMDERMNQLKIDIKALDQKIKEIIMESDDLRTIFEILTSVPGIGSQAAALLLCELPELGHINRKQIAAICGVAPFTCQSGLFRGRSMIHGGRKILRNGLFMPILTARSHNPVIKRFYEHLKAQGKPTKVALIACMRKLLGVLNYLVKTKQSWKPNT

SEQ ID NO: 391620 - protein, 330 aa, unidentified
MKEYKQFFGVDISKKTIDVTMLQNNQNVHKQFSNDQLGMQQLLGWVQELKVTTEETLFCMEATGLYCFTLTQFLVNNAIDTWVEHAVQIKRATALTRGKNDKVDSLRIAAYASKNLERLRLWKPMNSALEKIKHLATLRDRIVETQKKLIVPIKEFEDVGNVEMAKILTKTIKKSIAALDADLQNIEKQILKILNEDVVLTRKYTNATSVVGIGFVTAINLMVHTNGFTQMTDVRQLACYCGVAPFEYTSGSSIRGKTKVHFMANKKLKCNLHMASLTAIKFDIDIKKYYERKCADGKNKMSVLNAVRNKLLARVLSCVNNDKVYVNKVA

SEQ ID NO: 391621 - protein, 435 aa, unidentified
MSEPDPRAPAPASDPAPAGRPEFTHFGGFDWAGSEHQVVVVDRYGRVVLSLRFADDAGGWATLRRKIEPFPGLAVAIETSCGPAVERLLDLGLSVYPMNPKAAERYRDRKAPAGAKDDALDAWSFADALRTDGHGWRRLAPQDPLTAELRLLCRDEVELIGQRTALVNRLRAALHEYYPAALGAFDDWTGEGPWRFVIAFPDPASLAKAGRRKWERFLHAHKLYRPQTAPARLEAFAGAADFASPNPAVTRAKALLAVTLAKQLCLLESQLKEYRARIAGLFRDHPDGGCFGSLPGAGPKLAPRLLGEFGADRGVFRTAEAVQCYAGTAPVTRQSGRSRAVAVRRACNKTFRATVHLWADLSRQGCAWAESYYQKKRADGMGHAAALRCLGQRWLKILWKMWQTRTRYDEALHLRNQTRHGSWVVKLLPETGPAN

SEQ ID NO: 391622 - protein, 448 aa, unidentified
MSTRKPPRARKTKLPKHLQHINPHAAGIDVGSRSHFVAVPEGSCEQPVREFTSFTDDLHRMADWLLACGVTTVAMESTGIYWIPVFEVLESRGLEVRLVNARHVKNVPGRKSDVLDCQWLQRLHSYGLLEGAFRPAEQVCTLRAYVRQRMNLVRYASAHIQHMQKALAQMNLQLANVVSDITGATGMRIIKAILAGERDALVLARLRDPRCKNDESTIARSLQGNFRPEHLFSLKQAVDLYEFYQAQIAECDRQILDQLAGFDAADGSGSGPPDSLEEALLRMSGVDLTRIDGIDTNSALKIIAEIGVDMSRWKSPKHFASWLGLCPGTKISGGKRLSAASKPVANRAAAALRMAAFTLLRSKSALGAYFRRQRSRLGAPKAITATAHKLARLVYSMLKHGTAYVDEGQKHYEERYRTHVVQNLKRKAKELGYALVETVEKQPKPETA

SEQ ID NO: 391623 - protein, 414 aa, unidentified
MKVFCGIDWSERHHDVALVDQDGTLIAKRRIGESVEGFAELLTLLAEAGDSPEEPIPVAIETSRGLLVAALRATGRPIYAINPMAVARYRERHCVSRKKSDHVDAMTLANILRTDAHAHRRLPADSELAQAITVLARAAQDAIWRRTKAIQELRALLREFYPGFLAAFADGTVTNLASPQARAILAIAPTPAAGARLSQARIATALRRAGRQRGITTLAAHLHRTLRIPQLRQPALVENAMGCQVNALLATLATECANADQLTAAATEAFTQHPDHQIITSFPGLADLTGARVLAEIGDDPTRFTDARALKAYAGSAPVTRASGRSISITRRRIKNDRLNAVGFLWAFATLPRPGPPKDHYDRRRAHGDRHAAALRHLFNRMLGQLYHCLHTRQTYDPIKAFGQPTTTTNQATT

SEQ ID NO: 391624 - protein, 343 aa, unidentified
MSDITTVGLDTAKSVFQIHGVNAEGEVVVRRQLRRRQVLPYFRKLPPCMIGIEACSSSHHWSRELQSLGHTVRLMPPKYVKAYVKSQKNDAADAEAICEAVTRPNMRFVPTKTEEQQSILMLHRTRQLFVRQRTALTNAIRAHLAEFGIVAGIGRNGVEALLKIVADGNDSRVPEVARDCLVALGSQLQTIKAHVLSFDRRILASHRANETSRRLESIPGVGPQIASALVATITDPKAFRSGRDMAAWIGLVPKQNSSGGKEKLGSVTKAGNRYLRTMLMIGALSVIKRAKQLGYSNRPWLSALLARRPTKVAAIALANKIVRMAWAMMARGEKYREPVALAA

SEQ ID NO: 391625 - protein, 346 aa, unidentified
MKYYAGLDVSQQTTSICIVDDEGKIVAERKVASCPDAIAEALEPFAITRAGLETGPLSVWLWNGLKERGVPIVCMDARHANAALKMMPAKTDRNDAIGLAQIVRTGWCKSVHVKSTASHEARALLATRSQLVRTRCDLENQVRGVLRTFGILFGKRVGGFAKRAEEIIDGELHASPTIQAVVEALMRARANILEQIRHLEAKVRSIARQNNVVRRLMSVPGVGVITALGFVATIDDPGRFKRSSSAGAYLGLTPRIYASGETMRSGRVSKRGDDFLRRSLYEAANALLTRIPQFSALKSWGLRIARRGGYRKAKVAVARKLAVILHAIWISGEPFRWSSQEPRELA

SEQ ID NO: 391626 - protein, 414 aa, unidentified
MSNKSKRIQISNEKVMIAAIDIGKDKSTGYFRCSHKIDIKPFEFTNNAEGFNKFWQKIWAAKIINKINDIIIGFESTGCYGHPLIHYLSNKPAKLVQVNPMHTKRVKELDGNSPLKTDRKDPRVIADIIQLGHYLSLVVPKGAAAQLRRLTHSRQRTIINRTMSINRLQSLVYEIFPEFLDIMKGIYSKSSFHILKQYPTPDDIVNLGFENLVSELKTVSRGKLGIERARKLFLAAKNSVGIKEGMESILIEIEHIIKEISFYCGYINQVEEKMKHYLKEIPESRYILSIKGIKEVTVSGIIGEIGDFKKFHNQRSIIKLAGLNLYEVSSGKYKGHMRITKRGRSLLRKILYFAAINVVRKGGIMHKYYQIHIDSGMVKMKALIAVSKKLLRLIFSLARNKRYYTDEYPLKSAA

SEQ ID NO: 391627 - protein, 315 aa, unidentified
MIVLGIDIGKRELLVRMQENRDGAVQILGKRGPFANTPAGYQELTAWMLKRVTGEVQVVMEATNVYWERCAHHFHDLGYRVSVVNPAQIKYVARSVLRRGKTDAMNAEIIARYGLVMQPGCWAPPSTVLMDLKTLTREREAVLARRTQENNHLIALRDAHHVADMVLTLAQQRLDLLDRQLASLDAALHELVEADAALAQQLKLLLSVPGFAYTSAATILAETVGFSRMETAEEISAAAGMAPSPQQSGSKMESQKQWAACSTSQTSTWRSYGLCCPSRNVQTKCWSASTLWMSLSRYQECLQGASGAAFRALAR

SEQ ID NO: 391628 - protein, 411 aa, unidentified
MPNIQKRFIGLDVHKYYLIAYGVDQDLNVQLPAQRVELSRLEAWMKKTLSRQDQVVLEMTTNTWQLYDELSQYASSVTVVHPPHVALITRSQVMTDKIAAVILARLLAKGLLVSVWVPPVEVREMRALVAQRNKMTRLATQSKNRLHAVLQRHHLALPQGGPFRVDQTQWWLALPVGKLEKVNLQSDLDTLRFAETQLARLTTMLSEIAARDERVPRLIQLPGFAVVTAITLLAAIGDIDRFEDARHLVGYAGLGARVHDSGMTTRTGRITKAGRKDLRAALVEAAQTAANSHPHWKAELARLEPRLGRNKAIVAIARKLLVAVWYVLARQSTDRFAEPELVARKLMQFTYQIGKNNRPSDQSTAQFVRQQLDLLQLGANLAEIPWGSKKKPIPLPPSSLLAKKVSDVPNT

SEQ ID NO: 391629 - protein, 325 aa, unidentified
MPDVFIGIDVSKDHLDVAARPSGESWQVANTELGIATLVKRLVKLQPALVVLEASGRLESAAVSALAVAGIPLAIVNPRQVRDFARSTGKLAKTDKLDAQMLARFADAVRPEPRPLPDETQQRIDALLVRRRQLLGMITAERNRRRRAPTMTRAEIDEHVAWLQVRVEAIEDELNKTIRSSPLWRDKVALLRSVPGVGPMLAATIVAQLPELGVLTHKEIASLVGVAPLNRDSGHWRGKRTIWGGRAQVRAALYMSALVATQFNPRIRPFYQRLLATGKPKKLALTACMRKLLTILNAIAHRGQPWRSPASVALIGAAILMPAGA

SEQ ID NO: 391630 - protein, 315 aa, unidentified
MTACLAQNVGVDISKDFLDVAFFPPTESWRFTNDNKGFRALLKKLGKRVIERIVYEPTGAYHRLFERTLAKAHMPLVKVNPRHARRFAQASGKLAKTDRCDAAMLARMGAALQLEPHCVVSDAVDALKELQIARDALVKDRVAALNRQKTARSKLIKTQLGERLQQIDAQIEEIDREQKKLRNVDPTLTQSFDIITSIPSFGAVTANLLLVDMPELGHVDEEQVSALSGLAPIAEESGKHKGKRSIGGGRARVRQALYMPALNAIKPNGIFHKKFTATIDAGKPAKVAITAIMRKMLILANALIRDQRKWTPTPP

SEQ ID NO: 391631 - protein, 340 aa, unidentified
MSMNPNSCLGDRARILQGRERTAMSVANEVFVGIDVSKAELEVCWLPQRERLQVARDEGGLVRLVERLKELGPSLVVLEASGGYEMPVAMALAGASLPCVVVNARQVRDFAKASGKLAKTDRIDAQVIAEFAQAIRPQVRALPDAAAAHLIALVARRRQLVEMLTAEQNRLALSHAAVREDLKQNIAWLKSRLQDLDGELARAVRSSPLWRENDKLMQQVPGVGRVVSAVLLALLPELGRLSPKKIAALVGVCPFNRESGRWNGKRAIFGGRAGVRSVLYMAIVSAIRWNPLIKTFYQRLLAAGKPKKLAMTACMRKLLVILNAMMRDRSDWNPNGALAT

SEQ ID NO: 391632 - protein, 385 aa, unidentified
MSAHPTPIQAAAQLQANTLFASLELSKARWLVTVSAPGSDKLSRHQVPGGDGQALLELLWRLQAAAARRTGAPVMIIVIQEAGLDGFWIHRLLVQNGITSHVVDPASIAINRRHRRAKTDKIDGVKLLRTLMAWMRGERQVCTMVQPPSPEDEDRRRLARERARLLRERIQHTNRIKGLLSGQGIPDYDPLHRDRRPCLAALTTGDGRPLPERLKAEIGRELDRLEMVVSQLTVVERERDALVARTAEADACAAPAALARLRGIGPELAALLWLEALFRRFDNRRQIAAYAGLTPSPWQSGGIDREQGIAKSGNPRLRRAMIELAWFWVRHQTGSALSRWFVERVGTARGRVRRIAIVALARKLLVALWRYVTQGVVPQGAVLKA

SEQ ID NO: 391633 - protein, 371 aa, unidentified
MRKVALDLGARKTAYCEVQDSQVIQRATVTSVETLESLLGPQHPPAEVAIEACREAWHVHDLLSSWGNRVVLVDTTRSRQLGIGQHGRKTDKIDAEVLALALERGGIPVAHVLSPHRRELRRWLNVRRALVESRAQSVTTSRGLAREQGAPLPKCAIGNFVRHARKLAPQPLEVIAPLLKQLEAVNAELEVVDAKLAELCETEPVVKVLMTAPGVGPTIAASFVSVIDDAKRFHSPHQVESYLGLVPSEDSSGAKRRLGAISKKGNSYLRSLLVQGAWSILRKADRKDPLRLWADAVAERRGKKIAVIALARRLAGVLWAMWRDSAPYNAALLASASSRGTRKSARDLEVQATKLSATTRKRVPTEATLQT

SEQ ID NO: 391634 - protein, 370 aa, unidentified
MSHSSTRFIGMDVHKDTIAVAYVAQDHGAEVTSLGTIGTRQCDIDQLIRKMQSKAKHLIFVYEAGPCGYWLYRYLRKKDYDCWVVAPSLIPKKAGDRVKTDRRDAMQLARLARSGDLTAVYVPKVQDEAIRDLTRAREDAISDLKDAKLRLKAFLLRHDIRYTGRATWGPAHLRWLAEVVCPTPTQQIVFQEYVRAVHEHTERLQRLEQELHEHVKAWRLYPVVEALQALRGVQFTVAVTLVAEMGDLTRFDSPRELMKFLGLIPSEYSSGEQRRQGSITKAGNTHARRVLVEGAWAYRYPAKVSRHLQLRLETQPKIIQDISWKAQVRLCKRYRRLVSRGKHANVVTVAIARELAGFMWAIAREVAITP

SEQ ID NO: 391635 - protein, 312 aa, unidentified
MDAIYVGIDVSKDRLDVAVRPNGESFFVSRNGAGIDELIGRLKTVSPRLAAIEATGGFETVVAAGLAGASLPVVVVNPAQVRAFAQALGRRAKTDPIDAAVIAHFAEATKPQVRQLPDETTQMLADLVSRRRQIVEMIASESQRARRVTSARLKKSIARLHKALEKELSDLDGEIGDHVRGTPAWAEKEDLLASVPGIGPTIARSLIAELPELGSLDRRQIAALAGLAPWTRQSGQWRGKSFIGGGRANVRRVLFMGAMVAARFNPELKRFRDRLVAAGKPKLVAIIAVARKLLTILNAILRDKTPWQLKNA

SEQ ID NO: 391636 - protein, 370 aa, unidentified
MHQPSTLFVGLDVHKESISVAHAKGGSTEAPHFVGAIGTRESDIAKLILRLQGRASHLAFAYEAGPCGYVLYRYLSEHGFDCQVVAPSLIPKRPGDKVKTDRRDATELARLLRSGDLAAVYVPSVEDEAIRDLCRARDAARETLKAAKLRLKSFLLRLGLHYTGRANWTPAHRRYLAKVVCPTPAQQMVFQESIRAVDEQVDRLERIEQELLELAPKWKLWPMVEALQALRGVQWIVALTVIAELGDITRFDNPRQLAAFVGLIPSEHSSGDRRKQGSITKTGNSRARRVLVEGAWAYRHPAKISEHILKRIEALPKSAQDIGWKAQVRLCKRFRRLSSRGLNVNVVVTAIARELVSFMWAIAKEVALPA

SEQ ID NO: 391637 - protein, 449 aa, unidentified
MSRPQVIDDEQHERVRERVAAVDVAKDSGMVCTRTRHPSRPGARRSTVWTVKARMGAVRALGRQLHKDGIEIVTPESTSDYWRIWFFILEACGLAVQLVNAAQAKNLPGRPKTDKLDAQWLARLTEMGLLRASFVPPKAIRDLRDYTRARTRLIRERTRCWQRLEKLLEGALVKVSSVASKLTTVSAQDMIKAMIAGERDPEVLAGLARTRMRAKRDDLVQALDGMFDDHHGELAGMLLDQIAFLDGRIAQLSARAAELTAAMPEAWGINADGTTGPDAGAAPGAPVLPAVARLAEIPGISDDLARAIIAETGLDMSRFPTAAHLVSRAGLCPSARQSGPRIRAGKKGQGNGYLRGSLGQAATGAARTATFLGERYHRIARRRGKAKAQVAVARSILVIIWHLLAGPAARYTDLGASYYQTRTDTDRKLRNHIRQIQALGFEVTLTKTL

SEQ ID NO: 391638 - protein, 336 aa, unidentified
MRSITVRSIVRRGISSVDVLGIDISKADFHACLIQGEKRSRKSFPNAAVGYRQLHSWRTNLHSSKVHACMEATGAYWMGLATALDDAGLVVSVVHPSRTVMFARSQLRRTKTDEVDAEMIAEFCKTQTPTSWSPPPGEILELRGLLSYRDHLVREKIRLRQVASQIYVGRELQKLHAQQLKTHEKTIAALERQLRSFLKTHQTLSKAVDSLTAVSGIGLLTALAIVAKLPVDRLRDRKAAAAYIGVTPSERQSGTSIHGKPRICKTGNGSLRRDLYMPAAVAMRHNVILKSFSERLKAKGQAAQGHPHCRHAQAHRPCLQHPQAWAYAIPCLNNQP

SEQ ID NO: 391639 - protein, 349 aa, unidentified
MHSTTVAVDLAKNVFELAVADSEGKIGERLRLNRARFSSFFVHRAPCRVLMEACGSAHYWARRIGTHGHTVQLLPAQYVRQYVRRNKTDRADAAALIEAARCADIQTVPAKSLEQQQVLVLHRLRSQWMCTRQRYLNTLRGLLREFGIAVPLGARLARTRIAHYLAQPPQELPAAVRPLLAQMLSEVKQLEQQIEQVERGLTELSRTDPIVQPLRQIPGIGLLTSTAIRATVGDVQRFPCGRRFASWLGLTPREYSSGERRRLAGISKRGDSYLRTLLVHGARSALLAAHRRQRTGRPLDHLRQWALQCERQRGHNVATVALANRLARIVWATWKHGRAFDGNWGCVTQ

SEQ ID NO: 391640 - protein, 335 aa, unidentified
MRYIGLDVHYSSSTYCILDENGREVQCETARGHWPKLLDRLKEVEGPWTICFEATCGYGYLYRELSRMATRVAVAHPGQLRLIFRAKRKNDRIDARKLAKLLYLDEVPEAYVPGEDVQSWRELIEHRRRLVDRQTTCKNAIRSLLRSHGMIAPRGLWTKKGLAWLQQQEMPTQAAGLKRDLLLEELSESKRRVRTVTQALNEIGRSHPAVILLRTIPGVGMRTAETIAAYMDKAKRFVRSSQVGAYFGLVPCQDASAGVNRLGHITRQGPATARKYLVEAAWQGVYRSATIRAYFERIMHGRPERRKIALVATAHYLLRCMHAILVSGKPWHEAA

SEQ ID NO: 391641 - protein, 721 aa, unidentified
MKTVMAEYLSIVEHEDIKPLDQQFGVHPRKTAPDALRSILFDEPKISRSDLQKWGATTNIPDMATYLVADITAFPDWESEVGRFTSPARSLFIREAEVSLGHAAPYLVTLSDKDDFTRRLFTHLPAFDEDASVHHWHRPYGIIIRSRAGFDAVYTHLRRFTKLMDSEGGWYFRRFWEPRHSYFWLPLLTSDLQIAAKFFGRTSSSENALFHSISVPNGRRGRFLTATWHDDIFLDHEMAARLPASHQQILDASYLSLLDRASQRESLEKIVGYLANAFPVRFSNHDDVRTRTGIFARDVRELALQLGCSSELGWARFASVAVCLGIGFPDDPRFMSRGLSRRRIGHDSQGEMGWMPLSPDGIAMCQTRGVEAQAVGEASMEEVTIIGIDLAKNVFQVHGAAADGSIVFRKKLSRPQFPRFMADQPPCLVAMEACASAHHWAREMARHGHEVRMIAPHYVKPFIKRQKNDAADAEAIVEAALRPTMRFVEPKSADQQARAVAFRTREQLVKQRTEAVNALRSHLYEFGHVAPEGIGYLPRLAKVVDDPDAGIPDLARDICRMLLEQIAHLSDRINVLKAQIAAMSNEAEMPRQLQTMPGVGPITALAVETFAPPMEQFRRGRDFAAWLGLVPRQHSTGGKQKLGRTSKMGQRDIRRLLVIGATAVIRWASRRGAPKGSWLARMLERKPIPVVAVALANKMARGIWAMLTRGESYRGPVLIGA

SEQ ID NO: 391642 - protein, 338 aa, unidentified
MGCFVGIDIGKGKHDYAIVDEDGGVLKTGYFAATSVGFEKLKQVLIQFGIMLIGMEATGHYWRNLWQVLIGYGHACSLLNPASTVYFRRMTLIKHKTDALDAVCIARYLATIRPDARGLDIAGQEALRSLARAQATLAEQITESVNRLHKQLDLSFPEFPKLVGRLDSHKVLMLLESYPTANLMSRSRTLAEKRYGQQNHRIGKPLAKRLKDAAESSIGCAQEPTDALLIRQSVQLIKMLHAQAKILITDMEKMVSEQDQDAANLLSIPGIAIKSAAAVIGEIGDIQRFETAKKLTGYIGAHPRFHESGNKSAHPRMSKAGNKRLRRILWQCTIRHLS

SEQ ID NO: 391643 - protein, 427 aa, unidentified
MKYTQNEKILQVTEKTLIVGVDIAKEKHHARAFDYRGVVYGKRLEFGNNREGMENFLAWAMDLMRENGKDHLMVGMEPTGHYWLCFALYLKDNNVKVVLVNPFHVKRSKELDDNSPTKSDHKDPKTIAMLVKDGRYVEPNIPEGIYAELRVAMDVRERLNKQLGMIKNQVVRWLDIYFPEFNTVFADWEGKAALVTLKEFPTPEKIAKKSMEEILSCWEKEVQRAIGQKRAIKLLDAAKKSIGKNQGIKMAEYELKSILEQYELFTKQLEEVGKEIEELVMQVPGVSEMLKIKGIGINTVAGFISEVGDIERYEHPKQIQKLAGLNLVENSSGKHKGETVISKRGRRRLRSILFKAIMPIVAKNKEFQELHKYYTTRAQNPLKKKQSLIALCCKIIRIFYVILRKGVKYDPVKMLKDIKRPTLQGVA

SEQ ID NO: 391644 - protein, 389 aa, unidentified
MPCYTKQHKSYCGIDLHARSMYVCVLNQDGDIVMHRNMQARPDTFLRTVAPYRDDLVVAVECVFTWYGLADLCAQEGMPFVLGHALSMKAIHGGKAKNDTIDAHKIAVLLRGGMLPQAYVYPAEMRATRDLLRRRMSLSRTRAELLAHIQNTNSQYNVPEIGKKLASKANRAGVAERFPDPAVQKSLEVDLALIGSDDHLRSDVELPSVKAAKQHDAQTLYVLQTVPGIGKILRLVLLYELHDIQRFPRVQDFVSSCRLVKWAKASAGKRDGTSGSKIGNAYLQWAFSEAAVLFLRDHPAGQTYLARLEKKHGTGTALTVLAQKLGRAVSSMLRRDTGCDRDNFLHGEGSGAGEPAASLGHYGTSRVTVLCNDASTASTNAQEHIGALS

SEQ ID NO: 391645 - protein, 279 aa, unidentified
MRWLRARQPEVIALEATGGFERVVAAELDAAGLPVAVVNPARIRHFAFAVGQHAKTDTIDAAVIARFAEATRPAVRPLPDERTRELADLVTRRRQIVEMLGAERAREQRAANRRLARSCQRLIKALERELADADDDIGRAVRASAEWRTKQELLQSVPGIGPTISAQLIGELPELGTLDRRGIAALCGLAPWTRQSGRWRGKSFIGGGRSSVRSSLFMAAMVAARRDRVFADFYQRLLASGKPKIVALIAVARKLLVVLNAILRSGEPWNEAKHVQPSI

SEQ ID NO: 391646 - protein, 361 aa, unidentified
MSLSNWLVAGIVPGVERQPLKKLVVDESALLRLLHRWREEAEKAGRRIERIAVAFEAGRDGFWLARWLKARGIEAYVIHASSVAVSREHRRAKTDRLDTELLKRSFLGWLRGERDHCKMVEIPTMKDEDAKRPNREHDSLIGERSRIVNRMKAALVRLGIRGFNPKLKRATTRLDNLRTPEGEPIPPNALAELRRDMERRRLVNNQIRQIEEERLERIEKTPCDGPHVMVRLLARVMGVGIETADMLVHEVLSRNLRDRRAIARYAGLTGSPDESGRKRREKGLARSGNVRVRRGMIQLAWRFLLHQKNSALTKWFRSRTENARRTRKPMIVALARKLLIALWRLVREGIVPDGVVLRAVQ

SEQ ID NO: 391647 - protein, 382 aa, unidentified
MTIVAQTRPFVIGVDCHARTHTYAIIDANTKRQVACEQFPTTQAGISRALTWVGRRTDGDMACLWAVEGIGSYGAGLARAVADAGYDVAEAPRMNARGRRGIGKSDPLDAAAIGTAVLALEESQLRVPRRGEGTRAGLRILNAARDQLTRERTMNVNALIALLRAHDLGIDARKPLVPAQIATITRWRERQEPIELSIAREEAARLARRVLEVTTQLTANHKRMTELIQQSPAAPLLEMMGAGAVTVATVLTAWSHPGRVRSEAAFASLAGVNPLPASSGNTVRHRLNRGGDRRLNRALHTITMTRMAHDPGTRDYVTKRTQEGRSYREIRRSLKRYIARTLYRQLNTLYATAEPARSHPEGADPCQEGAHRQLHSLSNPGS

SEQ ID NO: 391648 - protein, 516 aa, unidentified
MVAAVVRRPRRVFQVHKPNGQLSPRVQAVGPERFGIIAVDPAKKRSRLLLANFYGTVLVPPITVEHERGPIEAALAALRGAIREHNLGDVVVALERTGTYHRPLQRAFQAAGFETRLVHPFTSKQFRLPADPDNKTDDTDLAGIVRAVTQGFGLLEPVWPELYASIQMLRRHRRDLVDKAALLQNQIRETLHSAMPGFEAAFTHLWQSPAPLAIARQFSSAADILQAGADGLRAALKDAGVRPRHDTIGKVLDWARNAPQGHPLNALQRRIFTALDDDRREKTRLINAIEVDLARLAVQTPYAILLAIPGINIVTVADLAGEMGPMEFYLNANHITGRAGLVPCRYQSDQVDRSGPLVKRANRRLRAVLMQTASNLINCNNTYNARAAAWRRQGKDERWIRVKVAKSFSRLLFAMVAGRRIFPHPALQPRHYVLGKLLEFHMEHKVAPEQMRADLEALCDQLPTHARAAEIPPLQERLDELTRRRAHGPRPLAEILPIVLVRLQGVQSTPRSEDPS

SEQ ID NO: 391649 - protein, 341 aa, unidentified
MTAVGIDTHKDSLAACVVDELGAPLAERTFANDARAHAALFAWVQAEAPAATIGIEGSSRYGAAAARFLLAHGAFVREVPPQLTHRERGRTRLPGKSDPGDALAIARVAARERALPPVRLGDRTVDIGLLVQAREDAVTEAVRVRNRLHADLVLLVPGYSASVGNLVSLRNRQRAATMLRRRSGVQVDLARARLARLRVLDREAKTFEARIGELVGAHPLLEMHGVGLLTAAKLIAEAGDVRRFHSVDAFAMLAGVAPIPASSGQTQRMRLNRGGNRQLNRAFHTIAMVQAVRHPPAREFLARKAAEHKSGREGIRALKRQLVRSVFRLLAAGASGLSPAA

SEQ ID NO: 391650 - protein, 398 aa, unidentified
MTRKNTLKSLPTDTEFRVVGLDLAKSDVSVAAIPVDNNTPSLVDQMTYADLLDWAGKISPTLFAMEPCNGYSLLCLQLENLGHEIKVISGSTVSMWINTHLSGQKTDLNDAIALARLAVSDAELTPIRHKSITEIRIQTVQAVRQQLMSQRSKSIVSFKALAQQWGIPCAAGHRNLKKLRESIEAKVDLITRPVANAMLFLLDAVKSLDRQIGQLNQTLQELVMSDERGRLLQSVLGVGTQISARVITVVGNVERFNSPRSLVAYVGVAPRNFITGHKNLTKKKHGNCPDLSHKGQGKISRRGDKLLRSLFIQGAACLYMQFCKDQLPECQLKRWILKQLAMQKPYGKLIVSLAAKLIRIVWAVLTYREKFNIQKAGMTRSMWSEMALETPLNKEVPA

SEQ ID NO: 391651 - protein, 365 aa, unidentified
MIKPRGLYSRKDYRNKKPEVIPMVSKKQSYVGLDVHKNFIFGCVKDKEGKTLFEQKFKNEPHSTDLFLLNVPKDSKVALESCSCWQYAFDYITDAGFDVVLSNPSKTRLIGESKKKTETEDARKLANLLRVNMLPLSYAAPMHVRIQRQITRHRLSLVNLGVEIKNKIHAILLRHGIQTELDNIFTQKGLEYLESLDLPMCDRFEIDQYISLLRHLNISVDKTQERINEFANDEPHAKLIQTHPGVGVYASLMIVAEIGDVRRFSSSKKLVSFAGLNPAVYQSGEKCYKGHISKQGSKKLRWILVQCANVAAQHDKRLKSFYMRKKLAKGHNKAIVAVARKMLVNLYVMMNHNIPFHALRVNKAT

SEQ ID NO: 391652 - protein, 349 aa, unidentified
METLQKVSHIGCDLHKKFTIATARDAQNRLLWRQRLEHADRPRLQAQLDTWPKGTPVIFEASFGWGWFADAVQAAQLEPHLASSRKVAAWREARGLAKSNRLDADLLSELWGQQPRWWEVWLAPPEVRDQREWLRYRMALVQIQTGLKNRIHAVLHRPRRAGAGSGPAADRPGDTRVSPNGAARAGGRAPAAAAPARRGIAYVLAYTLLAEIGRIERFPNYKHLASYSLLAPRAYDSGEPAEEPPQGRHVGHVGRRTLKWAFIEAARGAVRHGGRWRQMYDRRTDGGQRNRNRGYIAVARELAHLVDIVWRKDVAYMEEPPPRPGLRRRTKRTRPGTGQPVAAMVGVAE

SEQ ID NO: 391653 - protein, 342 aa, unidentified
MRIVVLGIDLGKNLCSLAGLDETGAVILRRRMKRASVLPFTAQLETCTVAMEACCGAHHLGRQLVAQGHVVRLMSPAYVKPYVKAQKNDERDAEAIAEAATRPTMRYVEIKSEAQLEVQSLHRVRGRLVAERTALINQLRALMLERGIAVPQGRCKLARYLPAILADERNGLGPRLRRLIEDMREEWRSIDCRIKGFNDELAERVRNEDTAKRLIRIPGIGVLTATALVAAVGNAQTFSCGRDLAAWLGLVPRQATTGGKPRLLHISKRGNGYLRMLLIHGARTALPGLAKKDTPLGRWVKALLARAHRNIVTVALANKLARIAWAVLARDRQYVTVQAIGK

SEQ ID NO: 391654 - protein, 336 aa, unidentified
MRFIGVDLHTTQITVCYLKTSDEYRFETYGLDEMKRFLAGLEEADKLAVEATGNTRWLVNLVKERVSRVVIVNPRDFEVVKQSVKKTDKRDALNLARFLAVDMLPEVRPKSEAAEQVQRMNETRTKFVRLKTSLLNKIHALAVSNGRKLKKESLSSERGLARVMDQEWTHGERLELEIIIEQIGSLKRSIKRIDIAIGDESRKLTGFENLITITGIGERSAGVLLSVIGEVEDFPDENKLASYFGIVPRVSNSNETVNHGRITKRGSKTGRTTLVQCTLVAIRYSSYLKKYYEQIKVRRGHGKAKIAAARKFLSIIYNTLKNDWVFTDFNNFELAE

SEQ ID NO: 391655 - protein, 346 aa, unidentified
MYQDNLFAIDLSKSSHQGVLFSKSHQIKFNREFSTRKLIEWVSRQQPLTVAMEACSMSNHWTRVFDRMGHRVLLVPTRTAARYRQGQKTNGTDAEGIGVAARQPTTKFVAPKPINLQELQALMRIREHLKDHRLATSNLIRSLLAEFGLLIPKGWKALRERVPELLEDAENELPMELRFQLRDQLDDYLELEKRFAEVDRACTQRVNQDEACHQLLQLEGIGPVNAAGLLLALGEQGDSFRNGRNASACIGATPKQHSTGDQVRIGHISKDCANKRLRANLIQGAWAVIQQLRKRDPRNGKEVWLKGVINRRGEGIAAVALVNKTIRVAWAMLHYGENFKLHPNMA

SEQ ID NO: 391656 - protein, 408 aa, unidentified
MKTLHQRCAGLDVHKQDVVACLRLATKGRVHREVRRFPTTTRGLLELAAWLEAARCTIVAMEATGVYWKLVWHLLDGRFELVLANAAHIKGVPGRKSDVNDATWIADLLAHGLIRASFVPPQPIQDLRDLTRTRKQLSRETVRHEQRLQAVLEEANVKLASVITDILGASGRRILKAMIAGETDPSHLAELGSRRLGCSRDTLVEALDGRVRDHHRFLLDQHLKTIEQLEETMAAFDARIEAALAPFRDTVERLTQVPGLSTRAAEVVIAEIGLDMSRFPTAGHLLSWAGLVPALDESAGKRRSTRVTKGAPWLKPVLVQCAWAAARKRGSYFEAQFLRLKGRRGPKKAAIAVAASILTTVYHMLRDGTCYQDLGPNYFARRNPARTARKLADRIRNLGYIVEIRSAA

SEQ ID NO: 391657 - protein, 407 aa, unidentified
MLFVGDDWAEDHHDVCLQDGAGRVLAARRLPEGVAGIARLHELVAGHLDGDDPGQVVLAIETDRGPWVRALVAAGYRVFAVNPKQAARHREVVAVSGKKDDTFDAAALADMARTRRHQLREIAADSDEAEAVKVAARAHQKLVWERTRHALRMRSALREYFPAALEAYAELTLTGPDTLELLAKAPDPAAAARLTIPQISAALKRARRRGVAGKAQRIQAALRERHLGQSEIVTEAYAASVTAAAAVIAVLNEQIKTMEARVESLFRRHPDAGTYLSQPGIGVITGARMLGEFGDAPGRYAGAKARRNYAGTSPLTIASGKKKTVHARYIHNDHLVNAMHDQAFSAISASPGARACYDELRARDIDHTDALRRVANRMAGILHGCLKTGTAYDEHTAWGHRSQPAAA

SEQ ID NO: 391658 - protein, 426 aa, unidentified
MCYEDDSRLEEFRQFRKEVRGSKDYLIVGIDIAKEKHHAFFGTATGKTLLRRLIFDNTIEGFNKLLDQTKAIQKSCKLKKVVFGMEPTANYHKPLGEHLIRCGRMVVLVAGVSVKRNRELLDGRWDKHDDKDAANVADLISQGKCLFYEYPVMEIRDLRNLLSLKRKLRKQEHGYRVRIRNQLIAQYFPELDRYSGYAETEAIVRWCLDPSRIAGFENDQFETIVSAGRQTLAKKKRLDDIQKLAVASVGCEMGEGASFDAKIMVEGLRHIRKAICETENKIEETCKQFPEYDYLLTIPGFGPDVSAKVLGAIGNPHRFFNQQQVLKMAGLDLGADRSGKTSQNAVPVISKQGKADLRYALYQAAFIAASKNKDFMFYFVKQLQGREKEKGIKTKRYVKLSAKLLVTAWTLMKNQEVFDIKYLTQA

SEQ ID NO: 391659 - protein, 403 aa, unidentified
MAKVRSWAGLDVHAAKVVACVVDAESGEMTVHRLSGETAVVVAFCAGLPGPTRVAYEAGPTGYGLARALAAAGVECVVAAPGKIERPAQDRIKTDQRDAERLVRLLMISGLHPVRVPTPEEESLRDLVRAREDLRGDLMRARHRLSKLLLRHDVRYDDTRSRWGERHRGWLAKVDLGERGAQLTLTEYVGAVDALEIRRATLEAAIGELIGVSPWAQDVARLRCLRGIDTLSAIGLAVEVGDFHRFEQPKLLMSYLGLVPSEHSTGDSRRQGHITKSGSRHARRLLVEAAWHYRRPPRLGTTLERRQDGQDQVVIAIAWKAQQRLHRVWHQLDSKRGKRRTIVAVAVARQLAGFCWAIVTHNPELPALPSSVGIPAGGRPPHADNPQPPKQGKRQQRRHLTAA

SEQ ID NO: 391660 - protein, 458 aa, unidentified
MEEPQEVPADEEHERVWERVAAIDIAKASGVVCTRVPDEDRPGRRKTHLWTVQATSKAVIELGDYLRARQIQVVTLESTSDYWRIWFVILEAAGLKVQLVSARAVKNAPGRAKTGKKDAVWLAKLTGKGLLQPSFIPPYEIRRLRELTRLRAALVHDKSRYRARLEKLLERARIKISAVLSTLDTDTARAMIEALIAGQRNPRVLADLAIGKARARRAELTLAPEGRREDHHSIQARILLDDIDALNRQAEQLTGTIGELISQIPAAWGTDADGTTGPHAGTSPQAPVLPAIAQLDAITGCGIIAAQAIIAGIGLDMTVFGTPGRLVSWAKRCPATRQSGKKTSGGKAGKGNPWLNGILGEITASAARTDTFPGERYRRLARRRGKRKAMVAVARSILVIIFALLSDRSVRFRDLGPDFYDTQINRDRKIRNHIRQLQALGIEPDDLSAFLTKNPPAA

SEQ ID NO: 391661 - protein, 415 aa, unidentified
MTEDTQWFVGLDWAREKHRVVVLDAKGESVAERDVTHDGAALSELCAWLIEVTGAQPAQIAVAIETPRGPIVETLLERGFVVYSINPKQLDRFRDRFTVAGAKDDSRDAHVLASSVRTDRRAFRRLTFDDPLIIELREWLRIEDELKQERIRLSNRVREQLWRYYPQANRLSDDVADDWFLDLWEQVPTPATAAQVNENTVAKILKTRRIRRFNAAEALAILRQQPLQVAPGTAKAATAHIRTMAVRLRLINEQIKQAERRLDELCAGIKASAPGQICEQRDVAILRSFPGLGRINIAALLAEACQPLRERDYQVLRVLSGSAPVSRRSGKSWIVLRRYACNNRLRNAIYHWARVAIQHDAVSKRRYDELRRRGHGRARALRGVGDRLLYVLCKLLQRQTPYDPEYKIQQMQLTA

SEQ ID NO: 391662 - protein, 337 aa, unidentified
MGSYVGVDLHRQRSVVVVLNEDGERVSWSRIDNTPANLAREVTSAGVDVDVAMEATWGWYWAADVIAETGVRLHLAHPLAIAGYANRRVKNDVADATLLADLLRMGRLPEAWISTPAVRELREEVRYRHKLVRLQTGLKCQVHQVLGKEGAIPATKGIWWTGGQAWLDQLELGDAYMNRIGSLRDLIELNGREIRQADARIHRRLRGDPGYEAIQQIAGVGCVLAAVFVAEIGDVHRFADPRRLCSWAGLTPRLRESDTHSHRGHITKQGSRLLRWAAIEAVSGGACDRRCNSIKARVGARRGHNIGRVAAARHLLTLVYYGLRDGEIRCLGTADAA

SEQ ID NO: 391663 - protein, 381 aa, unidentified
MPSILYVGMDVHKSNYTLCCYSFEADDIFAVVQVEPDYLNIIKYINRIKQNQDEDCSLLCGYEAGSLGYTLHHQLTKHGVDCVILAPTTMPRTVKREIKTDKRDAMKIAKCLAYGTYKPVYIPTDEDNAVKEYIRMRDDAKGTLKSLKQQILAFCTRHGMHFTDGRSYWTQKHHAWLKKLEFGDAVLQEAYEEYLAAYYQSSDKVERFDMRIEALASGDRYKEDVKKLTCLIGIKAHTALASIVETGDFHRFQTAGQYASYLGLVPGENSSGDAKQRLGITKAGNSHIRKLFIESAQSYGRGALGIKSKALVSRQAGNDPKVIAYADKANDRLKRKFYRIMFRSKRNIAVAAVARELACFIWGMMTNNIEYHPTEGAFTVV

SEQ ID NO: 391664 - protein, 350 aa, unidentified
MLIIGCDYHPGFQQIACVDTDTGELSEWRLAHREQAEEFYRERKQRDLDVRVGMESSGHSRWFERLLQELGFELWIGDPAEIRTKRVRKQKTDRQDAQLLLRLLMEDRFPRIWVPDAANRDLRQLLWHRHRLVQMRTRVMNQLHVVPLNEGLRRKKALWRPAGRKELESIALAPWASRRRQDLLDLLDQLTPKIQELTRALEEEVEKRAVTRRLMTHPGVGPLTALAFELVIGTPQRFHCGKQIASYLGLVPEEKSSGERRRLGHISKQGNSLLRFLLVEAAQVTVRSQPEWRNKFFHLALRRGRKIAKVAMARKLAVHLYWMWRQGLDSTQLEKFGSHAGAPGNPDGVQ

SEQ ID NO: 391665 - protein, 351 aa, unidentified
MRTSQNTQETISTIGIDVGKNTFHLIGLDIRGAIVLQQKVTRHQLGRRLSNIPRCLIGMETCSGTHFIGRQLTALGHDVRLIPAQYVKPFLKGHKNDYRDAEAIAEAVQRPTMHFVSIKTPEQMDLLALHRVRSRLVGQRTGVTNQIRGFLLERGITVRQGLMPLRKALPEILSSNSDALSPRMINLIGELIQDWRRLDERIAAVSSEIEALAKQDESCQRLMSVPGVGPIISSAVVAAIGNGAGFKQGRDFAAWLGLIPKQESTGDRTILGKISKRGNKYVRTLFVQAAHVVLERRPSTARQSLWPWIEQASKRLHRNMLAIALANKLARIAWAVLARGRAYQPRITANA

SEQ ID NO: 391666 - protein, 334 aa, unidentified
MTMEILAIDLGKQSFHLHGIDADGVVISRKVSRAKLENAVTELDPAIVAMEACASAHHWGRRFSASGRQVRLVNPRFAKAFVRGSKNDAIDAEAIFDAASRPTMRFVPVKTTEQQDLQSLHRVRERLVVQRTSLINHARGLLAEYGVVLPKGPWRFRQQVPAAVAEADLSNLARELFTELMDQLTDVEARLAKLDAKLVSICREHEACRRLAALPGVGPVIATALVAAVDDGRHFRSGRELAAWIGLVPRQYTTGGKPRLGGIGRRANHYLRRQLIHGARAVISRLAAKDDGRSVWLKGIVARAGFNKALVALANKTARLAWVLLARKEDYLPA

SEQ ID NO: 391667 - protein, 393 aa, unidentified
MTSMTTATVRVIGGVDTHGQSHHAAVIDGVGRQLDDPSFPASPAGYGAVLEWLRGYGELDRVGVEGTGTYGVGLTRHLREAGALVVEVDRPDRRARRAQGKSDPLDAYSAARAALSGAASVVPKLRDGRVEAIRALRVARSSAVKARSQATNQIKALIVTGPAQLREQLRHLPTGMIIAACARLRPGHNLGDAEQATKTALRRLARRHQQLSEEIAEADHELDQLVHQVAPALLALRGVGPEVAGQVLTSAGDNPNRIKSEAAFAHLCGAAPIPASSGRTRRHRLNRGGDRGANNALYVVVLGRLRYDSRTRAYVDRRTQEGLSKPEIIRCLKRYVARELYNATVDRHLSVSRRRSVYQNPGCSNAHVEQSGGGGSESAGRKVNSTTFRATAD

SEQ ID NO: 391668 - protein, 328 aa, unidentified
MEYKYYIGVDIAKYTLDFTVLKGNETLLHETVQNSKADIQAWLKKVMAVHRAGGKKTLFCVENTGVYTALLQNELVRRKLPLWLESPLQINLSMGLQRGKSDKVDSLRIAHYAYTNCKKAVLWQQPREIIEHLKKLRSVRERLLLARDSLKAELREMKGFVKTSLNQNLQRHCQGSITAIVTDLMKIDKSIKDTISSDERLNQLYGWITSVYGIGPVLATEMLIATNEFKSFSSPKKFACHCGVAPFRYTSGVSLKGKAKVSKRANQRMKRLLHIAAMATCSHKGEYNQYYQRKVSEGKTKMCALNAIRNKIIHRAFACVREERFYKK

SEQ ID NO: 391669 - protein, 340 aa, unidentified
MSVMIGIDPHKGSHAAAAVDTREMAVAEFEVQATRRQTKELLAWAGRFPVRRWAIESANGHGYLLAQQLIAAGEQVVDVPSAQAARVRVLDSTRSQKNDRNDARSVAIVALRQPGLRVVTSEDHVAVLRMLAKRHKELASLKTQAAARLHALLAILIPGGLSKEMSPRKASALLRQIRPATMVETERKRIAYQLLGEVRRLETERKASKARLSTAVEASGTTLTDIYGVGPVVAGLIIGYTGDVSRFPTRHHYATYNGTAPIEASSGARKRHRLNPRGNRMLNHALHTIAICQLRYPNTEGRLFFERKLAEGKTKKEAIRALKRRLSDVVYRHLQTDQPR

SEQ ID NO: 391670 - protein, 375 aa, unidentified
MNAITKRVGLDVSKEKIAVAVADQDASPRFCGVIPNTREAIPKQLRRLGESHELRVCYEAGVTGYGLSRFLQTLGIECVVAAPSKIERVPGPRVKTDRKDALMLAEKLRKGDLVSVWVPDEGDEALRDLVRARKARMEDRTQARQRVSMFLMRHGIVKPDTMTPWGNPYRTWLRSLTFVNRASQMAFQEYIIAVEETEMAIRRLEQEIHEIATHSSYAPMMQALQALRGFKEIAAATVVAEIGDFTRFAHPQQLMSYAGLVPRESSSGNKVWRGAITKTGNPCLRWILTESAWSYRYRPSVSASMAKRMEGLSPHVQAIAWKAQNRLHRKYMRLLSRGKSRPVALMAVARELLGFIWAIAQQVSHESNGSAGLVA

SEQ ID NO: 391671 - protein, 338 aa, unidentified
MSEISTIGLDIAKNVFQLHKVDAAGVVTRMKLRRRQMVAWFTKEPRCRVGIEACATAHHWARELEKLGHEVRLIPPAYAKAYVRRNKNDPADAEAIYEAVSRPAMRFVAIKSEQQQAAAGIHRVRDLLMKQHTMLRNQLRGLMAEFGIVAAKGRRGLLELLAILAAAEDRRIPSPLREGLIMIAETLRGIDGKLEAIDRQIVAAGRENTTYRHLITTPGYGPILSSAMAAIVTDPTAFRSGRDFAASLGIVPRHEGTGGKVWLGPISKRGNGYLRRLLVNGATARLNSKRATEDPWLKKLLATKPRKVVAVALANKMARIGWALMIRQEDYRHLPLAA

SEQ ID NO: 391672 - protein, 337 aa, unidentified
MEYFAGLDVSMEETHICILDREGALIREGKAPSTPKAIAAFLAEGPICTKVVFETGRMAPMLFHGLTELGVPVVCIESRQAYQALKSLAGHKTDRNDARGLAHLARTGFYKPTHVKSLSAHAIRSLIAARKKLVGQRVTIDNQIRGLVVVFGVRLPRALSPAFKDAALSVSDGVPGLHAALRGLFAAREAILTAVSAIDSDIKAMTRKSEVCTRLMTVPGVGPITALAFAAVIDDPARFKRSRDIGPYLGLVPKRHQSGEVDYTGSISKRGDVRVRTLLYEAANVMLTRYAAPLKLKSWALEIGRRSTMRKARVALARRLAIILHAMMRDQTDFQVV

SEQ ID NO: 391673 - protein, 334 aa, unidentified
MKHTTIAVDLAKSVFEVAVSRRPGQVVGRRRLSRGQFARFLAEQAPATVVMEACGTAHHWGREARARGHRVVLIPPHAVRPYVLRNETDGADAKGLLEAVRNEALRPVPVKSIDQHVLASLHRMRSAWMATRTARLNTVRGLLRELGFMIPLGSRQVVPFVWALVSDAESGLPDPLRPVLAEAAREIGELEGRVRATEHTLERLARESPVVTRLRTIPGVGLLTATALVAFVGDAHRFPREHSSGLRRRLGAISKRGDPYLRMLLIHGARSVLLHAKRTSERERDRLRSWALGCERLRGHNKAAVALANKLARIAWAVWHHDRPFGAPPREETI

SEQ ID NO: 391674 - protein, 354 aa, unidentified
MVIIASDYHPSMQQIAWADTETGECGERRLTHRAEAEQFYRTLKQQGTSVRVGMEATGQSRWFERLLAELNFELWIGDPAQIRAKQVRKQKYDRRDAAHILKLMRKDDFPRIWVPSPENRDVRQLLWHRHRLVQMRTRVMNQLQAIAMNEGVRRKRGLWTQQGRAQLEALTLPPWTRRRRQELLQLLDRFDPSIDELTQAIEQEAARWPEVERLQTHPGVGSITALAYVLVLGTPARFQCGKQVGSYLGLIPCEDSSADHWRLGHISKQGNALLRYLLGQSALRAACLEDDWRRHYAHLAMRRHHAIAKVAMARKLAVRMYWMWRRGWDYEQLKKFGSHAGQLGYRHGVQQITA

SEQ ID NO: 391675 - protein, 348 aa, unidentified
MRFYRGIHRHYCGIDLHARTMYLCLSDQTGTILLHRSIACTPEDFLAAVEPYRDDLVVAVECIFCWYWLADLCSQHGITFVLAHALYLKAIHGAKTKNDRVDSEKLMVLLRGGVIPQSYVYPPDMRPTRDLLRRRLFFTRKRAELFSHVQNTFHQYNLRLPAGSLLAKKNREGLVARFADPIVGRNVEADLQLAGAYHTIINTLEKTVERQARVEDPLTLYLLQTIHGVGRILGLTMLYEIHTVDRFASVQDFSSYARLVKAVKSSAGKPLGTSGAKIGSAHLKWAFAEAAVCFLHNNPRGRQYQKRLQRRYGKGKALSVLAAKLGRATYFMLKQKRAFDLDRFLTTT

SEQ ID NO: 391676 - protein, 356 aa, unidentified
MTEGSWVGLDVHARKIVAGVLDAESGELRSLRAPTLPAETVEWLQRLPGPVRVAYEAGPTGYGLARACAGVGIACTVAAPSRIPRAPGDKVKTDRRDAERLARLLRLGELVAVRVPEPHEEAARDLVRAREDARGELMRARHRLSKLLLRHGLVYDASAWTLAHDAWLRRQGFDSRPLALAFDESYAAMLQAKTRRDALDRAIVEVAAEPPFAETVGRLCCLRGVSTLTALALTVELGDWTRFRPQSLGPFLGLTPSEDSSGERRRLGAITKTGNRHARRLLVEAAWHQRRPLRASTTLERRRQGQPAAVRARADRSARRLHQRWQALEGRGKRRTIVAVAVARELAGHCWALATM

SEQ ID NO: 391677 - protein, 324 aa, unidentified
MNDAVVGIDVSKKTLDTSYAQGQRKQARIFENSSDGWKQMLSWLKAKGSQPAHVGMEATGRYSLGAALMRHDAGHTVSIINPAQIRDFARSKLGRNKTAKADAALIREYTTLFRPQPWTPPSPAMRRLCELQTVRAGLVANRTEWKNRLGSGLGDSTAIQVAKAVIDALSSQLKVIDQAIAETIEQDGDLRGRRDLLLSVIGVGDTLAALLLAEMPEPGVLRHSAEMIAYAGLNPSHHRSGTSIDRPTRISKIGNATLRSALYMPALSAMRFNPVVAALAARLKSAGRLKPKQIVVAAMRKLLVLCFGVLKTGKPFDPAIAMPT

SEQ ID NO: 391678 - protein, 326 aa, unidentified
MLEAINGKEDWILEESVFVGIDVSKATLDIVMRPSGGRKSIPNQEAQIAELVKELSILPTALLVVEATGGLERRIVRALAAAELPVIVVNPRQVRDFAKATGRLAKTDKIDAEVLAHFGEAVRPARRTLPAPASEELRALIARRRQITEMLTAETNRLTHSAKAVRKRIVAHIRWLEAELDRVDSELDQSIQQSPIWREQEDLLKSVPGIGPVISRTLLAELPELGELNRKQIAALVGVAPLNWDSGMMRGRRAIWGGRATVRAALYMAALVASRCNPKIREFHRRLRAGGKASKVALVACMRKLLTILNAMIKHRTRWSVIAEAQ

SEQ ID NO: 391679 - protein, 455 aa, unidentified
MKVNKVSALRVNRGLHRVNGAEPQVVRLTPQTTDNRKTDTMKTYILRQIKPVEPQKSIRTPRPKPVAPVIASVPLVRPEVAVKGPRLFIGLDVHNDSIAVSLAPSDSTEVRRYGIIGGEHDDVLKLANKLQVAHPGTLLKFCYEAGPRGFALCRCLQAHGWDCILVCPSKVPRKPGERVKTDRRDADQLARLYRAGELTGLYVPEPEDEAMRDLIRARFQVGKQQHRARQQLKMYLLRHNRRYGGQTSWSPAHLRYLAKINMPFPVQQIVFQEMLDAITETTARLERYDQEIERAVPGWRWEPVVRALMSLRGMALLHAATLVAELGDFNRFEHPGQLMGYLGLVPSEHTTGNDRQQGGITKMGNAPARRALVEAAWQYRAPARLSPHLKKRQEGLPQTITDMAWEAQRRLHHRYTHLTRVGKKKSQVAVTAVARELTGFVWAIARQVKPKAAIT

SEQ ID NO: 391680 - protein, 452 aa, unidentified
MTKKSKRRCDTLPVLHPDAAGIDVGASELYVAVSADRDPQPVRSFPTFTRDLHALADWLVQCGIHSVAMESTSVYWIPIYQILEARGLEVYLVNAQHVKNVPGRKTDVSDCQWLQYLHSVGLLRASFRPPGFICAMRSLWRHRASLIQMASEHVLHMQKALDQMNLQIHRVLNDITGVSGLKILDAILAGERGPFTLARLCHGGVKSSEDVIAKSLEGDYRPEHLFALRQSLAAFRYYQQLVLEADQEIQRQLAELKTAATAQPKTPPRTKATAHYARHYEPRTFDLRGELYRVFGVDLTNVLGISALTAQTILCEIGTDVSRFRNASAFASWLGLCPEKKISDGKVLFTKSRRVRSRVATALRMGAQSLHHAKDYLGEFFRRITRKLGRPQAITATAHKLARILFHLLNTKEAYTESVFHKSEEETIRRAQYRLRRQAAQLGFQIIPAENG

SEQ ID NO: 391681 - protein, 406 aa, unidentified
MQGPVITVDVSKGSCHYQPYVSNGHPMRKPKVLHDTVEGFQSLSDLIDTMKDRYECETIPVIFEATGVYHHCLQKYLDDHQIPYYIISPLMSASYRKTTPNSNKTDDLDCSHIAKAYYGECNLFPYDKPSKSFHNLRELNRYYECELNHLRMRKNTFRKYLDIVYPRLDKCFKGHSSLYDEIPMEVIKQYPHPSLLLKHKEETIVKKIEKKTSHSALFIQNIVHEMYECSMHCYSGADVTDVESMILPELVDDLQSQKERCDEILKQLVSEAQKTPYFTSIVSIVGIGDNLAARIIAELGDMSRFSCRRAITAYAGLNPKIRQSGDMNGIHLAISKKGNKHLRCLMYLAVSCNYRLKKGDVLYEFNQKKRQQSFSPLKPKAATIATAHKLLLIIYALCTNGTVYHS

SEQ ID NO: 391682 - protein, 339 aa, unidentified
MNSIGVDLHKQIITVCVISDEFQVVARKTLHCNSPDTIVGFLEQFRPFNVVIEATASYHWFVELVDPIAEKVVLANPNKLRIIAESTRKTDRLDAEILAEFLARDMIPQAYLATARQRQHRALVRHRQYIQGETTSVKNKIRRILSDYNADRRNLFTLANQREYIAQIGLNDSDRFVIGQLLADLNHFSDQLVALTKKLKEFAKKAPHREKEAREVLKTVPGVGAVTIDVLVSELGDITRFRNAKAVCAYAGLAPVVRQSGGKKSKDLGISKQGSGLLRWSLVEAAWRIIRTSQKWERVFERIAKRAKRKRAIVAIARKLLCVMYAMLRTMTPYRVLTT

SEQ ID NO: 391683 - protein, 412 aa, unidentified
MSLALPEALFFTGIDWAAATHAVCVMDAAGKITAEFTIAHSADGITQLIRRLARYGTPAAIPVAIERPNGRLAGLLLEAGHPVVPVSPNAIKTWREGEVLSGAKSDAGDAAVIAEYLRLRCHRLQVAVPYSGETQALRTVVRTRSVLVDMRVAATNQLSALLEASWPGAQAIFADVESPISLAFLTRYPTPASAARLGEKRIAAFCTSQGYSGKRSAAELLARLRSAPAGTAGVALTTALGTAVLALVAVLRTLNTAVKDLDRSATARLGEHPDGEIFTSLPRSGQINAAQMLAEWGDCRQAYGGPDAVAALAGCTPVTKESGKHRAVHFRWACNKRFRKAMTTFADNSRHASPWAAKIYNDARAAGKDHPHAVRILARAWIRVIWPCWINHTPYDPARHGAAAALAERITA

SEQ ID NO: 391684 - protein, 350 aa, unidentified
MDTTTPSLASIGIDIGKEVFHIVGFGADGKIAFRRKIKRLALAETFKKLPPCVVGMEACLSAHFVSRALRQLGHEPRIIPAIYVKPFVKGQKNDYNDAEAIAEASLRPNLRSVREKTQDQLDLQACHRVRSRLVSRRTATINQIRAFLIEQGIAVRTGATALRNSLAAILKNRKDEISPRMSGLIAGLYEDWISLDERINTIASEIEKISEKEANCQRLMSVPGIGPLISTAVVAAIGTGEAFERGRDFGAWLGLVPRQYSTGGRSILGRISKRGSKYLRTLFIQAANVILMRPHNWEHFSFGAWLMNAAPRLHRNKLATALANKLARIAWSILRNEKTFDINRHEAMAI

SEQ ID NO: 391685 - protein, 362 aa, unidentified
MKQYIGCDAHTRYSVFVSVDETGKIGKPVRVDHGGRDLRDYLARLGKDTPVAVEASGGWYWFMDELEAAGLDARLVNPGEAKRRIGGRNKTDRLDARGLAILLRNGTLPEVWIPPAKIRDLRGLLRCRLGMRSHTTVIKNRIQAALRRYGTLDSEVEGDLFAKSKRLALSVAIGKLPEETRRATLHEWELLDAVEAHIGELETRIRSSIGCIGWVRLLKSLPGVGEILGATIHLEIGDVKRFPTAAHLASYAGLVPTVHASGGKSHHGPSSKQSNHYLRWAFVEAAGCILMHRHRYAGQHALALYDRIKAKKCHGKAAVAVARHLAESSWWILRKAEKYRQPHAAVVSSSEKRVSAEVVLAQ

SEQ ID NO: 391686 - protein, 429 aa, unidentified
MNLRPIAGIDVGKFFSEMAVLSPSNEVVARMRIHHDSSADVKRAIRLLKKMEKDFASRPFVVMESTGHYHKILFHSLCRAGFEVSVTNPIQTDSIKNIGIRKVKNDKVDARKIALLHRFQELKSTNIPNEDIECLRSLCRQYYKLNDELTVYKNRLTGIIDQVMLNFKDVFPNAFSKAAIAVLEKYPTSEHILKASKGDLVSLIRENSRKSLEWSTAKYELLVSKAREFAPLSINNPSNVAMMGVYISMIKTLDENLTKILKAIRQLITEDMAKDTPMLSLTLELLQSIPGIGLLTAATILAEVGDFSAFSKPGKLVAYFGVDPSVMQSGEFIGTRNKMSKRGSRLLRRVLFTVALANIRTKRDKKPCNPVMMEFYKRKCQSKPKKVALGAVMRKLVCIIFAVLRDRKPFELRSPQEHAQMLAAKRKAA

SEQ ID NO: 391687 - protein, 416 aa, unidentified
MTPWKDITHYAGFDWAKDHHSVVIVDAQGQIVADFEFDHSLEGWKQFEHKCSAWPNLAVAIETSQGAAVDQLLQRESTVYPVHPVAAQRYRERKAPSGTKTDHLDGWGLAEALRTDGQGWKALEPMDPLTQQLRLLVRDEVVLIQQRTALVNQLQQALAEYYPAALEAFDDWTRPSSWEFVLAFPSPQALVQGGKRRWEKFLHTHRLWRPQTAEKRLRIFARADQFKASDPIVGAKSQLAVSLCRLLITLDKQLKLYRNQIRELFDNHPDSDLFGSLPGAKDVLAPRLLGAVGNDPDRYGSQEVLQAIAGTAPISYQSGKINKVRIRWACDKFLRHTIHLWADCFRKASAWGGAYYKKKRQEGMSHACALRCLGQRLLKILFRMITEKRPYDAERHARNQLKHGSWVIQLTNESTA

SEQ ID NO: 391688 - protein, 318 aa, unidentified
MTSHTQDSKFLGVDLSKQWLDAHLLPTGQTWHVATEPAVLEAWVQTLPADLALVVMEATGGLETTVAAQLAGRGLPVAIVNPRQIRNFAKAMGRLAKNDRLDAHVIALFAQRMRPEPRPLKDEQQQELDELMARRRQLVEMLAAEKNRLGQARSRRVRASVEKAIQWLEGQIQRRDKELDGLIKASPLWREREDLLQSVPGIGPGTARCIVADLPELGQLTRRQIGALVGVAPFVHQSGQWRGQSFCSGGRAGVRAALYMAAFNAKRYNLVIGEFFERLVAQGKPFKVAMVACMRKLLTILNAMARVSKKWETRLQPA

SEQ ID NO: 391689 - protein, 359 aa, unidentified
MRSISLVGLDVHAAQTHAAILNAETGELRGVKLRLAPIEVVDFLGSLPGPVTAVYEAGPTGFGLARRARERGIDVQVVAAGKVPRASGDRVKTDRRDAERLARLLAAGELRFAFIPTVADEQFRDVVRAIEDIRGDLMRARHRLGKMLLRRDIRWAGPGHAWTTKHMAWLRTQRFDDPCSTAVFIDYLSGIEMLMSRRAALLAALEQAIPDSTHATTIAALRCFRGIDTLSAAGLCAEIGDWRRFRPKRLSGFLGIVPTEHTSDTKRRQGSITKAGPIHARRLLVEAAHHYRHRPAVGDGLARRQHAQDPRVIEISWRAQRRLHDRWTVLRGQRHKPAGVVAIACARELAAFCWEAATV

SEQ ID NO: 391690 - protein, 370 aa, unidentified
MEEGIKFFVGLDVHKDTIAVAVAETGRAPARLVGSIAHDVNQLLKRLARYGEPAQVHVVYEAGPTGYGLQRALARRGYQAQVIAPSLIPKRAGSRVKTDRRDSLRLAELSRAGELRAVWIPDPADEAIRDLARAREDAVNARTQVRQQLKGFLLRHDVRYARRTSGSKTYYRWLATLNFGETGVQTAFTAYWQAVSAADERVGRLTTALVGSIAGWRFASIVAALQALRGIDQINAIGLVAEIGDIGRFAHPRQLMSYLGLVPTEASTGERVVRGSITKTGNAHARRLLTEAAWNYRFQPRIGMRAQRRAEDLPQAIRDVAWKAQLRLSGRFRRLHTRGVHLNKVCTAVARELAGFVWAVARARSELPQS

SEQ ID NO: 391691 - protein, 338 aa, unidentified
METCIWLGIDVGKQEFHASIATQALHGREWLKLPCQGFEHSPAGMKALLKWLRDQGTAPSQLAGVCVESTGRLSQHFADLAKGRLGSVSIINPARAKFFAQSQGSHHKNDAVDARLLAHFGWQSRPRPRPQRPEHADALKLRELVRAYGALQADLLAQRQRLDDGPGAKEVRAAHGRLIGAIEKELENLKAAIEDLIESNPSLKEDAARISSIPGIGPRVTQLLLAEFGALREYNRDEVVSLAGLYSREFTSGTSVHKKPKIAKGGKANVRAALYMAAMSARRCNPVMKAFADRLAANGKPPMQIIVAVMRKLLMLAHALVVTGKDFDPTHHQVKSQS

SEQ ID NO: 391692 - protein, 349 aa, unidentified
MTKTSHDSAIATIGIDIGKNTFHLVGLDKAGAIVMRQKLSRGQLERRFANLPPCLIGMEACVGAHHLSRQLLALGHEARLMPARYVKPYLKGQKNDFRDAEAIAEAVQRPTMRYVPTKSVAQLDLQALHRVRARLVRHRTSVINQIRALLLDRGIAVRQGYRHLRAALPDILAQDSDRLSPRMVAMIGDLSGDWHHLDVRLATVTDEIETIAMADEDCRRLMTVPGIGPIIASAMVAAIGEGAAFVCGRDFAAWLGLVPRQISTGDRTILGRISKRGNTYLRTLFIRGAKVILMRPKNWPKHSFGPWLEAASRRLHRNVLAVALANKLARIAWTVLAQERDYEFRRLAA

SEQ ID NO: 391693 - protein, 423 aa, unidentified
MMHEERRWFVGIDWGSQEHVVTLCDGQGKKIGQRKFAHGGTGLSDMIAWVLKASGGKPSEMHVAIETPHGPIVEALLERGFNVYSINPKQLDRFRDRFTVAGAKDDSLDADVLTDSLRTDMHLFRKLIVTDPLIVELREWSRIDEELKVERVRLANRFQNQLWRYYPQMLDLATDDLVHDWFLDLWEAAPTPEKAARVRETTVARILKSYRIRRFDAAHVISQLRKPALSVARGTTEAATAHIQVVVAQLRLINRQLADAGLQLDRLCKELAEPIAGDEGENVPGQPQEHRDVTILDSLPGVGRTVLVTMLAEAPDALQRRDYHALRNLCGSAPVTRRSGKSCLVMRRRACNRRLRNATFYWAQTATQCDPTSRAKYEALRARGHGHARALRSVVDRLLYVACAMLENGTLFDPSLAEKKNAA

SEQ ID NO: 391694 - protein, 344 aa, unidentified
MGEVSTIGLDIAKSVFQVHGVDDAGAVVIRKRIGRSKMLEFFTDLPPCLVGIEACPSAHHWGRELFGLGHTVKLMPPSYVKAYLKRSKNDANDAAAICEAVTRPSMRFVPIKTKQQQAALMLHRTRQLLVRQRTMLSNALRGHLAELGIVSAKGRHGTAELLKIITDVEDDRIPPAARGILDVLARQYGAIGAEIGSIDKSILALHRSCEVSRRLAEIPGIGPIVATALVAEIGDWKAFRSGRNLAAWIGLVPKQHTTGGKDRLGSITKQGNRYLRWLLVIGATAVIRYAQKHGTKNRPWLGRLMERRPAKVAAVALANKIARMAWAIMVHGDRYKEPKLLMAA

SEQ ID NO: 391695 - protein, 324 aa, unidentified
MQGWAREAGHSTTNVAGVDVSKRELAVAIGGIAALRRYSNDTPGRCRFCRDLAGSGVLRVGLEASGGYERKVASALRKAGFEVIVFQPIQVRAYAQYRGQRAKTDPIDARVIALATAAYNGTVRHSDDRLAPLAEHLTFIEQIEEDIVRLKTRLDGFTVSALKAKLKAQIKRLTARRNAEIRSLLKSLRQYQDLAFRLELLASIEGIGERTALTLIIRMPELGALSREEAASLAGLAPFDDQSGKIDRIRHIKGGRAKVRRSLYAAALPAAFKWNQALVDLYHRLITKGATHKKALIACARKLLIFANAILARGTPWIKSATTP

SEQ ID NO: 391696 - protein, 340 aa, unidentified
MSEVTTIGLDLAKHVFQVHGTDASGATVLRKQLRRGQVVAFFAALPRCLVGLEACATAHYWARELQAVGHEVRLMPAQYVKAYVKRNKNDAADAAAICEAVGRPSMRFVAIKTAEQQAALLLHRGRERLVRQRTSLVNALRAHLAEFGVIAPHGLRNVARLVAIVRDESDTRLPDLARQVLQVLATQLEQLAAAVAAIEQQLMAWHRSNPASQRLASIPGIGPIIATALAATVVEPIGFASGREFAAWLGLVPRQHSTGGKARLGGISKRGNRYLRRLLINGASANLLRSKATNADPWVIGLRRRRPSLVVAVALANKTARIAWAVMCRQESYRHRSAAA

SEQ ID NO: 391697 - protein, 344 aa, unidentified
MWLFIGLDVSLAKTAVCAITEHGKIVKEAQVASDPEAVAGYVLALGGTVATIGLEAGPLSQWLHRGLTDVGLDVVLMETRQVKGALKAMPIKTDRRDAEGIARLLHLGWFRPVHCKSISAQEVRALLGARKAIQQGMIALELSLRGLLRNFGLKVGAISRGRFDVRIRELAEGNAMLEAATAPMLRARASLRHELAGLERQVRLLAQEDPICRLLMTMPGIGAVVGLTFRSAVDDPTRFSSSKKVGPWVGLTPSRNQSGERDVSGGITRAGDANLRRALCQAATVMMNRGRSSWLRSWAAQVAKRRGTKRAMVALARRIGSILHRMWSDGTVFQSDVPPAAMSA

SEQ ID NO: 391698 - protein, 387 aa, unidentified
MTVPAQVFKIIPRHYDIFGGLDVAKKNMAVTFTDHEALMRSLRLPYSSAHLLHYVRKHFPDRRVAFVYEAGPTGFGLHDELVTAGYRCLVVAPSMVPTAPGDKVKTNRLDSRKLSVQLRGGELRSIHVPAPRYRELRHLVQLRDTQVGQLRATKCRIKSLLLCEGLAFPPAPESSQWSARVLSELLELPCSEAVRFELDQLIGTLHFHFNSAAAAQKQIRYFCQNDPELRQSIRLLTSLPGIGVIVATHLVARLGDWREISNGRQIAAFLGIVSSEHSTGEKANRGRITRAGDSRLRNKLIQSAWTAIRKDAELRAFYLRIYHRHPKKIAARKAIVAVARKLTTRIYAVLKEQRPYVLRPENLPAPLTAEETVGPRGRLVGPQNEQP

SEQ ID NO: 391699 - protein, 462 aa, unidentified
MSNRKQHIQGQRGEAFVKLIRDVPRERIACVSIDVHKYYHQVMIHNDYGEILVPSFRVDVFRSGFERLCAVIDQTMAAHHIRVLWVGMEPTGHYFQNLARHLQKCYAHVRLVNSYAVKEDRNQSMLRTEKTDDIDLGAIGDLVLRNRCFPYQPLEGEHLRLQHWVRFREAKVKTRTALRNQITAHLDHIFPGLVRPNHQKELGGPPKLFADFWECETAQHLTRLCPNPRRLAAMKPQDLIQLFHCHDARMGIVTAKRIIAFAQQVLLPDEEIIAAQLSLLQLDLPLLQAVDQVIAHVDQQIAQCLAQTQGQVLTHIKGVGALRAAAYVAGVGNPDHYEHAGQTFRRSGLVSGRDDSGVRQRRGEGQRVTKVGDPHLRRALVEITRGLCQWQPYFALYCSRLERRGKHPGVAIVATARKANGVLFALMRDQSEFQPLDAHGRLIAPVASMRRKEKATTDIGSG

SEQ ID NO: 391700 - protein, 401 aa, unidentified
MKYGVGIDVSKGKSTVSILSVEGEVIEEPFEINHDLSKLNLLNEKLFTFSKEDLKIVLEQTGTYHLPILTYLLDKGYCVIAENPLKIKKYLDRNLRKAKNDKKDSLKLAEYCCDNWYKLKPNTIEEEKYKELRFLSRQYFTFNDIKVKQKNDLSNLCYLVFPGYYQLLNENNFLLGIIIFKKYNNPESVKNIKEEKFYKEIDKIAQKRGQSKAGKTLAINIYKLAKETYSLCPSSKITQPIIDRSVAALILSIETTNEIITNMSELAKSMYEYKIVRNMDGVGEKLAPLLIAEIGDIRRFKNAGSLIAYTGIDAPPYQSGKFEAVNRHISKRGNKYLRRIGYTTMKAVKTFCKSGTELYDYIVQKENEGKSKKSSKIAGLNKFLRQYYGKVRNEYIEIGIW

SEQ ID NO: 391701 - protein, 391 aa, unidentified
MFYIGIDIAKKNHEASIIDSSGKSLSKSISFPNSTKGIEKFNNFIAEFGVTTNNCIIGMEATGHYWISLFSYIVDLGFTCYVINPIQSDAFRKMYVRQTKNDSVDSFIIAQIMRFGEFSISNFSDENTFALRNLTRYRFALVDECSDWKRKLIAILDQVFPEYSSLFSNIYGVASKELLSKYPLPEDMLSIPAEELGNLLCKCSKGRLGINKAEEIQSCARETFGIKFAKRSFSFQIKQIISQISFLEEQLKEIEIEISCLLEDICPIITTITGIGSVLGASIVSEIGNISRFERANQLVAYAGLDTRVKQSGDFSATNTKLSKRGSPYLRRSIWLAATVAAFKDPALSIYYQGLRARGKAHGTAIGAVARKLTNIIFAVLRDQKPYTPNI

SEQ ID NO: 391702 - protein, 340 aa, unidentified
MKSVGIDLHKKTITLCVLDHEGASVTTRTFACTAPEKITAFFKALGPFQAVIEATASYQWLWELLEPLAQRLVLAHPGKLRIIAQSTRKSDKFDARVLAEFLCLDMIPEAYRPTPRQRAHRALVRQRQFLMKQRTQLRNKVRRLLSDYNADRRDLFAPRGLESLASIPLNPTDRLIVNQLLDQLQFLEGQRQALQQQLRVFAQGGSPREAQDRRLLRSLPGVGEVTCEVVLAELGDVQRFRSAKQVVAYAGLAPGRRESAGKTRDLGITKAGSGLLRWVLVEASWQAVRRSRHWSGIYERLKRRRGGRRAIVAVARRLLEVMMALLRSGRPYREGFGAAA

SEQ ID NO: 391703 - protein, 400 aa, unidentified
MNAVGIDVSKGKSTVAVLRPFGEVVASPFDVIHNDNDLKRLVKLIRSLPGESKVVMEYTGTYFEPIAQFLHNNGIFVSVVNALLVHDYGGNSLRKVKTDKKDALKLASYALDRWTELDEYIPADEQHKTLKLLNRQYNQSIKIQTMMKNNLISLTDSVFPGINKLFTSPERQSDGHEKWVDFLKAFPHKDCVAKLYLSVFKTKYKSWCSKNKYKYSESKAEEIHAYAKSVIAALPMNDSIKLLVTQAVSQLNTILETLSSIRNEMNRIASSLPEYDTVMSMFGVGKVYGPQLIAEVGDTHRFRNRRAITAFAGLDAPPYQSGQLDVSSRHISKRGSAALRKVLFQITEVYILNKPEDEPVYQFIDKKRSEGKHYYSYRIAAANKFLRIYFAKVNQVLISQ

SEQ ID NO: 391704 - protein, 351 aa, unidentified
MTALIARQGSHGSHAVRVIIGVDTHQDQHVAVAIDEQGVRLSEHRVVTNRQGYAELQRWSRSLGEIRAFGIEGTGSYGAGIARFLTNRGYAIVEVNRSDRSTRRRKGKSDPTDAEMAARSVLAGVANATPKSGGGEVEMIRMLKNTKDSAVKARTQAINQMKALVVTAPAELRETLDGLAVGGLAKRCSSFRPGPLGDPTAAAKYALRSLARRHRQLGAEIQNLEAELDRLTRAVAPALVGTFGIGPDTAATLLVTAGSNPERLRSEAAFAALCGVSPIPASSGKTNRHRLNRSGDRQANAALYRIVVVRPRYDPRTKEYMRRRTGEGMSKTEVIRCLKRYVAREVFAGLR

SEQ ID NO: 391705 - protein, 354 aa, unidentified
MIIVGCDYHPSFQQIAFVDTETGELKEQRLVHREGAEEFYRALAATGQRVCVGMEASGHARWFERLLAELRIELKVGDASEIQRKRGRKQKTDRQDAQHILNLLLKNDFPPIWVPSWENRDLRQLLWHRHRMVQARTRIMNQLQSVALNEGLRCRKRLWRAGGREPLESFRLAPWASRRRHDLLELLDRLNPTIAELSQSVEREAENNPAAQRLKTHPGVGALTALAFVLIIGDASRFQCGKEVASYLGLVPLEDSSGNRRRLGHITKQGSSMLRFLLVEAAQVTARSLPQWRSKYLHLMMRRGRKTAKVAMARRLAVRLYWMMRQGWDYQAWNKFGSHAGQLGNRDGVRSNIE

SEQ ID NO: 391706 - protein, 352 aa, unidentified
MAITNISDVIIGVDTHKSIHVAVAIDNNGSRLTAFSAPATTKGYKLLEDWACALGTITAFGIEGTGSYGAGLSRHLLAQGHKVIEVTRPNRQLRYQHGKSDSLDAEGAARSVLAGQAIAQPKTQTGSVEMIRHLKIARDTAVKCRSQAMVTLKTLIINAPAALRDTLDQISGKIALIRYIAAFTPGAMTLTIASAKTAMRALAQRWLTLHEEIRSHDKALEQLVVVRAPTLLASHGIATMTAAEMLILVGDDPTRIRSEAALAKLCGVCPIPASSGKTNRFRLNRGGNRQANAALYRVAIVRMRNHPPTLAYVSKRKMEGKSNREIIRCLKRYIVREIFTHLCRPKTSRTSA

SEQ ID NO: 391707 - protein, 349 aa, unidentified
MKKLSKRTTPVGETVGIDLGDQYSRYAIVDQDGEVVEEGRFRNQASSIAKHFAGPRRRIALEAGAQSAWISRELAALGQEVIVANARQLKWITASDTKNDPNDARKLAMLARADARLLQPVEHRTAAQQAELGVIRARDAVVRARTLLINCARGIAKGFGLRLPASITATFGARALAGLPQALGTALGALLEQIDALSQSVAGYDREVDRVASTHPETERLSSIPGVGTLTAVTFSLTLGRPERFAHSRDVAGFLGLRPKQRQSGARDPELGISKSGDPYLRKLLVQCAHHILGPFGRDSALRQWGLTKGEGGKRATLRAIVAVARKLSVLLHRLWVSGEFFKPFPKMG

SEQ ID NO: 391708 - protein, 332 aa, unidentified
MTPTTTTTPSASQPVYVGIDVAQHKLDLARSDAPGPVLNFDNDTAGIAAIVRLLLWARPAVIVIESTGGLERPLLDALLEAGLPTALVHPGRVRYFAKGLGILAKTDRLDANVLMHFARLAAPRLMQKRSAGQAELAALVVCRRQLTLARAEQTNRRHATANKAALRCIDAVLTALDKQVESLDKQIRDLLNADDDFKHMDTQLRSVPGVRPVLSATLTAELRELVQTDRREISALVGVAPFNHDSGKLKGKRAIRGGRTAVRSVLYMATLAAIRCNPVIKAFSDRLKAAGKQKKVVVVACMRKLLSLLNAMLRDGLTWEQLDVVKKFVPTH

SEQ ID NO: 391709 - protein, 478 aa, unidentified
MAMARTAGVNRKQRKELTRRLQSDDPGLEVMHPHAAGIDVGNSAHYVAVRPDRDPDSVRRFDCFTADLHRLADWLQQCGVTTVAMQSTGVYWIALYEILDARGLDVYLVNARHTKNLPGRKTDVQESQWLLKLHTYGLLRNSFHPSAAIRVVRTYWRQRGDHVQGVSTCIQRMQKVLTQMNIQLANVISDLSGWTGQRIVRAILEGERDPATLAALSHPGIHATRDTIAKSLEGTWQPDLLFVLQQEVAMYDAYQQRIAECDHELEQHLKGFGDKVADPAADAEPSPTTSPKELRSGPKRRRKAGSHAPQFDLGRELHRISGVDLTRIDGIDVGVAQTVLSEVGVDMTRWKTEAHFASWLGLCPDNRITGGKVIRRGTRHVINRAATSLRLAATTLLRSQSYLGAQYRRLRARLGAPKAITAMAHKLARLVYRMLQWGHEYLDKGLQYYEQRHREQQVQLLKKRAAKLGLQIVEPDAA

SEQ ID NO: 391710 - protein, 362 aa, unidentified
MAFDTSKTKHAVAIAEGGRRGEVRFLGEVASSPARVERLTRKLAERYHKLHFCHEAGPTGYGLYRQIRELGHECTVVAPSLIPRKPGERIKTNRRDAVTLARLLRAGELTAVWVPDATHEAVRDLVRAREAAAQDFRRKRQQLLSFLLRHGRIYDGRQHWTMAHRRWLAGQSFPHPAQQIVFQDAIEAIEEASVRPRRLEQQLVEIVPNWSMAPVISAYQAMRGASFLVAVTVAAEIGDLRRFDNPRQLMAFLGLVPRERSTGETVRGTGLTLAGNRRARRVLVEAAWSYRYPARVSETLRVRLEGLPKGVRDIAWKAQIRLCARYRRLSAAGKKLPVVIAAVAREIAAFLSAIARQVAPAA

SEQ ID NO: 391711 - protein, 342 aa, unidentified
MDYYAGIDVSLESSSVCVLDASGKIVKEAKVSSEPEALTGWFRALPFALARIGLEAGPLSQWLYAGLKEAGFAVELLETRHVRDAFKTMPVKTDRKDARGIAQLMRLGWFRPVHCKSMPAQETRALLTARKLVQGKLLDVQMSLRGILRGFGLKVGPTTKAGFASRIMDLTEHHPALEAIAKALLAVHAVLLRELDGFERQVRKLAKGDARTRLLMTAPGVGPIVGLTYVAAIDDPAWFSSSKTVGAHFGMTPKKYQSGETDITGRISKTGDKGVRAVLYEAAHIILTMPVKGGALKSWAAKLAKRVGMQKAKVALARKLAVILHRMLADGAPFDAAKAAAA

SEQ ID NO: 391712 - protein, 346 aa, unidentified
MGMDIAVLGVDLGKNVCCVVGLDPSGAVVMRRKMRRETLVALAAKLPTCVIGMEACCGAHHVGRVFSAHGHDVRLMSPEYVRPYVKAQKNDDRDAEGIAEAATRPTMRFVDLKSQDQLDMQTLHRSRDRLVGERTALINQLRAILLERGMVAPQGKRKLEEFLIVLMDEQGGAGLSPRMSLLVADARAQWTELDRRIAAFDTEFVRWVKENEEARRLTTIPGVGAIVASALVAAIGHAESFERGRDLAAWLGLVPRQFTTGGKPKLLGISKRGNKYLRRQLIHGARAALPYVAERDTPLGRWAKGLMSRAHRNVAVVAFANKLARIAWAVLRRNERFAPTGRTMAA

SEQ ID NO: 391713 - protein, 409 aa, unidentified
MRTASSSSPRRYARFCGIDIAKNKHVACIIDRDGNPIVKSQTFNNDAQGYQLILARLHEAGGPRRIAVAMEATGHYWYGVHDLLTRQGYEVAVLNPLQTAQQAKKGIRKTQTDKIDARHIAVLLKNGEGRAALVPGELGMTCRQLSRLYYTMVGQEARIKQLVWTQLHPIWPEYESLFANPFCKTSRALLQTATTPQELLDLPSETLLELIRKTSRGRYGQVMVDQIRKAAENSVGMQRGLEAARTNIRLLLDQIEALRPIRQRLESKIHNLADRLPAYLLTLPGISAITAVSLFGETDPVAAFSSPSKLVAFAGLDPVVSQSGEPTAQEPRRHISKRGSPFLRRTLWTMSFRAIQQEGELREYWLRRRRKGAHHFAAVIATAVKLCHVTWRIMIDCRDYLPQKPVTKA

SEQ ID NO: 391714 - protein, 286 aa, unidentified
MEHFAGLDVSVKETSVCIVDEAGRITREVKVASTPEALMQVLRAPAYHLKRVGLEAGPLSQWLFGALAEANVPVICVETRHMRAVLKAQINKTDRNDARGIAQMMRAGLYRPVHVKTLRSQKLRMLLTHRKLLQSKAIAIENDLRATLRNFGLKVGMVGTAKFEARIKELVGDDSDLVLMVEPMLIVRRVLREQLAILHRHLLALARDDGVCRRLMTVPGVGPVVALTFRATVDVPARFQNSRAVGAVFGLTPCKHQSGESDYTGGISKCGDEMMRMMLYEAAQIC

SEQ ID NO: 391715 - protein, 341 aa, unidentified
MKKNIFFIGIDISKADFAASIYKAPDQPIVTKEAIPNNPKGFEMLLLWLNSRLIDRKNCRICMEATGVYSQAIAYYLLFQGFPLSVEPPLKVKRAFDPVGHKTDPVDSKQIAEYAYRFQDELTSWKPRDETLEKIRQLLSVREQFSKQKVALKNAIQAYHKQKVQVTLIKKAHQETLSQIEKQIARIDKELAKLINQDPDTFQKASNLKSIPGYGMLLAAHLLVITENFTKIQQYKQLAAFIGIVPYKHQSGTSVSKRAKIRHFGPIPSRKLLRLAAQSVATHDMTFRRYYLRKVAQGKAKALVLNNISNKLLKVACTIIRNDTRYIKDYRSMHPMYLKSA

SEQ ID NO: 391716 - protein, 340 aa, unidentified
MSNLDTCGIEVSAQELVVARRQEGRLEPLRSFANTAEGHQALVRYLRRAGRVVHVCLESTGLYGLDLALALSAQEGIEVMVANPRAVRHFATALMKRSKNDQIDAGVLEQFAARMPFQAWQRPSPAALGLHALARRLGELVQMQAAEKNRQHAAGLSQAIPAAIRRDLARSLRAQARAIERLTREARKLIAQEPELAERFALLDSVPGIGETSAVQILAELAVLAPDLEARQWVAGAGLDPREYRSGSSVQKKRRISKAGNKHLRRALYMPALVAVQHDPHLRAFYQHLLAAGKLKMQALVAVMRKLLHAFHGMFKTHQPYDGSKLFRLSSHPVQEVTRA

SEQ ID NO: 391717 - protein, 342 aa, unidentified
MEYYAGIDVSLECSSVCVVDANGKIVCEARVASEPQALIAWFGSLGFGLQRIGLEAGPLSQWLFAAMKAAGLAVELLETRHVRKAFEAMPVKSDRNDARGIAQLMRLGWFRPVHCKSMSAQETRSLLTARKLVQSKLQDVENSLRGILRGFGLKVGKTTGQTFAGRIEELVAGHPHLQIIAKALLAVRAVLRTEFAAFEKQTRRMVRSDTQARLLTSVPAVGPIVALTYASAIDDPARFKSSKQAGAHFGLTPKKYQSGETDYTGRISKIGDASVRTALYEAANVMLTKPVKGCSRLKSWAMRIKRRAGMSKAKVALARRLAVIMHRMLADGTPFNAAVAAA

SEQ ID NO: 391718 - protein, 414 aa, unidentified
MKKVYDNCCGIDVHKKIMVACFIHGKEQEIREFGATTRELLLLADWLSQGGCQMAAMESTASYWKPLYNVLETSGLNAIVVNAQHMKAVPGRKTDVKDSEWIADLLQHGLLQPSFIPNKAQRELRELVSYRKSLIKVKTAELNRLQKMLEGANIKLSGTIADIDGVSGRNLLNALLSDQKVDETKLDEMRRKKQIAPNLKASNEQLLEDLNGMLTPLQKKMMKELLSHLDELIRHIKNLDDDISENMNGEEKKATAVIQDIPGIAAIGAQQIISVIGTDMSRFPTDAHISSWAGLCPGNNESAKKRRSGRSRKGNAMLRTTLITCAHAAVRNKNSFFYAEFQRVSGHRGSKRAYVAVAHSMLKAIYHILKDGVVFKDLGADYYNQFNKERKINSYLKKLRSLGWQPDAMNYLPA

SEQ ID NO: 391719 - protein, 316 aa, unidentified
MSSITRVGIDTSKDQLDVYIDRPGSKRLKVCNDEAGIAQLKSELREGEHLIAIEATGRYESLARHELEAAGHEVKVQNPRKVRRLADGLGIQAKTDPIDAKLLANTAELCAPNKPRSKEREALGDLSRAIDTLKTERSGHLKRIQVPGYSKVAMGALKQVIKALERQIKKLEAEFEKLVAVSSFSEKYKLIQTIPYVGPNTARTAVCELPEDIENWSVRQISAYSGVAPMDDSSGKRIGRARVPKHGNFHMKAALYMPALNLLKQKGHAAATYRRLLARGLTHQQAIIPLMHRQLFYIVAVLKRGSAWQAEPPKRD

SEQ ID NO: 391720 - protein, 454 aa, unidentified
MNRETPPTSLDHFPVLNRNAAGLDIGSASIGAAVPPGRAPCAVREFGTFTPDLLALAEWLNQCGVDTVVMESTGVYWIPVFEILEVRGFRVAVVNARHVKNVPGRKTDEKDCQWLQRLHTYGLLSGSFRPDDELCAVRAYLRHRASLLEHRAAHIQHMQKALVQMNVQLTQVLSDITGETGLAIIRKIVAGDRDPVALARLRDPRCKHTTDEIAKALTGNYRAEHVFALKQALALYDFYTEQVRECDRELEQRFRVLKPRHDEPTLPPLDPSDKHDSHSKNGPSYDARTLVYHWVGVDVCAITGMNEVTVQQALTETGTDMHAWRTVKQFCAWLRIAPAHDISGGRILRRRTLKTHNRATQAFRLAAQAASRSVHSAYGAYYRRMCARVGPQKAMTALAHKIARAYYFMLKHRPPFSKLSAEEDEQKARDRELAHLKKKAARLGMTLVPQPANA

SEQ ID NO: 391721 - protein, 347 aa, unidentified
MKRIAVDLAKSVCQVAESVQIGRVDRRKRLDAGAFARYVQEQIEPVEWVMEACGTAHHWGRLMQEKGHCVVLLHPRYVRPYRRRNKTDRNDCDAILEAARCQDIRPVPVKSVQQQQVQQLHKLREGWKKSRVQRINLLRGILREAGVEAPNGIKPFLRQACELIERPEVRALRGALQVVLAEINLYEQSMRECEEQLARWHADDEIVHKLDEVSGIGLLTASAFKTAVGKPERFASGRHLSAWLGMTPSEYSSGERRRLGRISCKGNVYVRTLLIHGARAALLAAKRCKARTPERLTQLQSWALQTAERIGYNKAAVALANKLVRICWAVWCHERRFSGNWHSTKPA

SEQ ID NO: 391722 - protein, 416 aa, unidentified
MKKNSKSPMKKEQQAKRAKVQRPVQREVKAVLAELVEKLQGKLAVKATSASPAEAGPRAELSPNLDRLTVGVDLGDQWSHFCILGFEGETLSEGQLQTREAEVAEFFQAIPPARVVMEVGTHSAWMQEIIAGEGHEVVVANPRLMEGSKRRKRKNDRIDAKKLARLGRVDPESLHPIRHRSREVRQDLVVLRAREALVAARTELINATRGLVKSMGTRLPKCSSPSFGEKVKGVIPEKVREALLPLVQLADALSDCIQSYDQKIEELGSEKYGQTKLLRQVKGVGPITALAYVLTLENPEHFAKSREVGPYLGLVPKQEDSGESQPQLGISKTGDTMVRKLLVGSAHYILGPFGPDTDLRRYGLRLCERGGKNAKKRAAVAVARKLAVLLHRLWVSGEVYEPLGYASSRGIVQQAA

SEQ ID NO: 391723 - protein, 360 aa, unidentified
MAKARTLVGLDVHATKIVAAVLDAETGELQCFTLSGDVNEAAGLCAGLPRPVRATYEAGPTGYGLARELTRRGVQCVVAAPSKIPRAAGDRVKTDRRDAEHLVRLLLAGKLHAVRVPGPEEEALRDLVRAREAVRADLMRCRHRLSKLLLRHGIRFDDGQAWTQRHRDWLAEVALDWPAAQATMLDAQGAIDALAHRRDALDREIVALLPPSPWAGQVARLRCLRGINTLTAAGLCAEIGDFERFAKAEQLMSYVGLVPSEATTGQKRRLGAITKTGSGHARRLLVEAAWHYRPRPRIGKALADRHDGQPAEAIAVAWSAQQRLHRTWTRLEQRAKRRTIIAVAVARELTGFCWAVTRIE

SEQ ID NO: 391724 - protein, 457 aa, unidentified
MSRKGKRTEGLEEAHPLTGMSQVNLNAAGVDIGAVEIVVCVAGDAHTQIVRAFGNYTVDLQAIGGWLKEYGVKSVAMESTGVYWIPLFEELERQGFECLLISSRSLRRVAGRKSDITDAQWIQTLHSYGLLESSFRPQAELIALRTLLRHRNQLVEHRSPHILHMQKALLQMNVQLSQAVTDITGVTGQTILRAILAGERDPQELAAMREPGCKKSVEEIGKALTGTWREEHLFILKQSLEMFDFYTRQIQACDEEIERVYGLIRPDWEAGEVKPLGQSKRNSHSKNRPHNPEAIRKHLKRISGVDLSVVDGFGVSLAQTVAVECGTDMSKFPSEKHFCSWLGLAPKHEISGGKVLKNKTLKTKNRAGQAFRMAAQSVKQADCVFGVTYRRLKARLGPAQATVATAHAIARVVYRMLKYKVEYETISVEEYEKKYQAQQLKYMQKKAAKLGYQLVPA

SEQ ID NO: 391725 - protein, 309 aa, unidentified
MSQNNTSILHVGLDVAKLSLQLHLAGRFHSLPNDRKGHAQLLKLPGAHVVCEATGGYEQPVVRALQAADIPVSIIEASRVRHFARAQGQRAKTDPIDAAVLTNYGATFKPAPTPAVSAQQQRLADVSQRRRQLIHTRTAEHNRAEHYTDPLCVRQARQLQKTLEKQIAQCDQAITTLIAADTDLAQKAKRLEAIAGVGPVVAATVLAEMPELGKLNAQTAAALAGVAPYNRDSGALKGLRHISGGRRPVRCALYMATLSAVRHDRILKEFYTRLLTAGKKPLVAMTACMRKLVVLMNHLLKNDKFQLAN

SEQ ID NO: 391726 - protein, 392 aa, unidentified
MYIVGIDIGKNHHEASIVSPEGKQIGRSLRFATTHKGADSLMSFIFKNIGNSPCVFGLEATGHYWYPIYSFLKAKGYTIYVINPIQSDSLRKMYIRQTQNDSIDSFLIAEVIRFGQFGTTSMADENILAMRQLCRYRDSLISSRTEIKLRIGTIMEQIFPEYEKQFSSLWVSTSMGILEKYLTPENIENAPIDELFEIIKDKSHNRLTRAKAISIKEAAADTFGIKIAQDAFSFQLKQLIDRMNFLDKQIEALDCQILEYYEKFDCYLHTIPGIGMIGAATILAEIGDISRFKNSSSLIAFAGIDPTVRQSGEFNSTHNHMSKRGSPYLRHAIFLAATTCSFHNSPLNAYYKKKRDQGKHHLTATGAVARKLTTVIYAVLRDSKPYEPKKFC

SEQ ID NO: 391727 - protein, 343 aa, unidentified
MEHYAGIDVSLESASVCVVDASGRIVSEAKVASEPDVLIRWFGNLGVEVSRIGLEAGPLSQWLYAGMREAALPVELLETRHVRDAFKAMPVKTDRKDARGIAQLIRLGWFRAVHCKSLPAQELRAVLTARKLVQGKRHDIEMSLRGILRGFGLKVGPTTTRSFEGRVRELVEGHPTLLAVADALLLARATLGEQLGKLQKRLVSLARDDMRARLLMTTPGVGVLVALTYVSAIDDPARFRSSKATGAHFGLTPKKYQSGETDVTGRISKIGDASVRTALYEAANVILTRPVKGSLLKSWAMRVAKRAGMRKAKVALARKLAVVLHRMLADGTEFVAGKAAAKA

SEQ ID NO: 391728 - protein, 310 aa, unidentified
MEKVIVGIDVSKDRLDVAVRPSGEAFVVARNAAGLEELVTRLAGLGAHLIALEATGGFETVVAASLGAAALPVVVVNPAQIRAFAKALGKRAKTDPIDAAVIAHFAEATTPEPRPLPDEATQLLADLVARRRQIIAMIGAERQREKRATARSLKKSIARLIKALEKELTSVDTDIDEAMRASPAWREKEDLLASVPGVGPVIARSLIAELPELGQLTRKQIAALAGLAPWTRQSGQWRGKSFIGGGRTAVRTALFQGAMVACRHNPVLKSFFHHLTTAGKPKMVALIAVARKLLIILNAILRDQKPWQTA

SEQ ID NO: 391729 - protein, 390 aa, unidentified
MIYVGIDVAKDKHDCCILGPDTEELFQVFTIRNNSDGYGELFHKIESVSKDKSQIKIGLEATGHYSYNILGSLLDHGYHTFVINPLHTNLYRKGQSLRKTKTDKVDARSIAEMLVTDKTLKPYTGTSYHSEELKSLTRYRFELVKERAKMKTSVSRLVNILFPELESLVPTLHMNSVYRLLQELPGAYFIASSNLTHLKALLADASKGRYGREKAIVIRETAKSSIGSLMPAKSMELRQTIHRIDTLTSDIKEVEQSIQKIMDECGSPITTIPGIKYRMGAMILAEIGDFTRFSNADQVLAYAGLSPSTYQSGQLISSYAHMEKRGSKYLRYALFNAAKYASAWDERFRLYLSKKRAEGKHYYVAISHVIKKLVRTIFRMEITHTSYQPL

SEQ ID NO: 391730 - protein, 360 aa, unidentified
MERLLERCAGLDVHKKTVAACVRVPGPGGKRVQQVHTFGTTAADLLALGDWLATHEVTHVAMESTGVYWKPVYAVLEERFTCVLVNAAHVKQVPGRKTDVADCAWIAQLVEHGLVRGSFVPPRPIRDLRDLTRYRTTLTHERVRHANRLHKVLEDAGIKLATVASDILGVSGRAMLGALVAGTTDPAVLAELARGRLRTKLPALRAALAGRFRGHHAFLVSQMLAHLDYRDEAIATVTTQIEEVLCPFAAVVARLDTIPGISRRVAEVVVAEIGTDMTAFPSARHLASWAALCPGHHESAGRQKSGRTRKGNRWLRAALVQAALGAIGTRDCALAARYRRLVRHTGHNKGGGRRRPRAPR

SEQ ID NO: 391731 - protein, 346 aa, unidentified
MHYIGMDCHITTLDFAVVNEAGRLVKAHTVATSVNGFMKFVKTVPPPRTIYMEEGTLAAWALETCVRFSEKLVITDAKKNRWIGSSGQKDDAIDALKLAQLARGGYIKEINHPVGQRRRFRELMIAYHDTVRSTTRIKNKIKAKFRQNGIQCTGITVYSETYREEWKGKLPQEATLLLILEGLWRQLEQSEQTEKELLAAARAQAKQYPEIKLFKDIPGIGFISAATISAILETPHRFADKKKVWMYAGLGLMKRSSGGKIYSEKLSTDYNRLLKYTLKQAAEVAIRATDNPFRRKYLDMTLLHGIAPHRAKLTIARDMLATMWAMWRKGEKYRPEIREEAAYKQG

SEQ ID NO: 391732 - protein, 388 aa, unidentified
MTPTSGSLSHPITLDYENTLVLAIELSKASWVLASQVPGLPRIKAKQTVEPRTEALLAAIDGYRARSRAAGRTIERVVAIYEAGWSGFWLARWLVRHGVETHVVQPSSVPVDRRARRAKSDGIDAELLLRTLLAWFRGEPRVCSMVPIPDEADEDERRRVREREDLVAERVSLVNRIGAVLATLGVRDYNPLRRDRRARLEALRTALGDPLPPHARARILRMLDRLELVCAQIAELERMRDAVLEEEAPDKAEGMIQQLAGLRGIGVQSATVLVREAFVREFANGKTLGSYAGLTPTPFSSGTTEREQGIGKAGNRRLRTVMIELAWLWQRYQPGSAQASWFRERVGGTGRRMRKVMVVAMARRLLIALWRFATQGVVPEGAVLNPAP

SEQ ID NO: 391733 - protein, 407 aa, unidentified
MEAIYEVCCGMDVHKKKLVACLKKGKKQEIREFGAETKDIKEIAKWLKEEKCEMVAMESTASFWKPLWNVFEIEDIPKMVINAKDYKNMPGKKTDVADSEWIADLLKHGLLKESYIPSREQRELREATRYRKSIIEERARALNRLQKMLEGANIKITSILRDVNGVTCRNLIEYVLDNDEDIDLEKANELVITNINAKLESVVTAMEGIVTPFQKTMMKEVFKHIDELTIRISEMDKLIDNYMTEYEKNKKKIDELPGIGKRSTEIILAEIGQDMSRFPTEGHISSWAGICPGNNESAGKRKSGKTRKGNKILKSTLSQCAKAAVRNKDTFFYAQYQRIAIKRGKNRATIAVAHSMLIAIYHIIKEDMEYKDLGSDFYNKFNTEKKINSYLKKLKELGWEMPSTTAS

SEQ ID NO: 391734 - protein, 355 aa, unidentified
MSSEKYIELDVHQATISAGVRDSQGNIIMESILETKASTILDFFAGLHGSLFVTFKEGTWAAWLYDLLKPHVTEVLVCNPRKIPLVKQGNKSDKIDARKLAERLRLHDLKSVYHGQTGVRMLRELARSYLTVVKDLSRVMNRLKALYRSWAIPCAGRDVYYTRHRSQWLDKIPEPGVRYRAEPLYQQLDLLQHLRQQARRALLAESRKHPITAKLRQIPSLGPIRSALAVALIQTPHRFRSKRQLWTYSGLGLETRDSGEYQFVHGQPRRRKKQATIRGLNKDYNHDLKGLFKGAATRASVQPGPFQEFYQRSLAKGIKPTMMRLTLARKIAAITLTLWKKGEDFDIHKLKSQAA

SEQ ID NO: 391735 - protein, 417 aa, unidentified
MKKNTNSAMKKEQRAKRAKTQRPVQWEPKEVVAELVEKLQGKLEVNATSASPAEAGRRTELGPNLDRLTVGVDLGDQRSHFCVLGLQGETLSEGQLQTREAEVAEFFQALPPARVVMEVGTHSPWMQEIIAGEGHEVVVANPRLMEGSKRRKRKNDRIDAKKLARLGRVDPPSLHPIRHRSREVRQDLVVLRAREALVAARTELINATRGLVKSMGTRLPKCSSPSFGQKVKDAIPEKVREALVPLVQLADALSDCIQSYDQKIEELGSEKYGHTKLLRQVKGVGPITALAYVLTLENPEHFAKSRDVAPYLGLVPKQEDSGESQPQLGISKAGDTMVRKLLVGSAQYILGPFGPDTDLRRYGLRLCERGGKNAKKRAAVAVARKLAVLLHRLWVSGEVYEPLGYASSRGIVQQAAA

SEQ ID NO: 391736 - protein, 295 aa, unidentified
MAVHGREDEVRFANDAAGIADLIAWLQASQVARVGLEASGGYERALRRALDAHGFEVVVHQPLEVRRFAQVQRWRAKNDRLDARLIAAATAQVDAVRAAQDPRLEALAQQLTVYESLTEQTAALKTLLSMLDDAALAAELRSQIEERVRHAKRLMAGILARIRSHTDLLARLRLLLRLPGFGPIVAATMVIRMPELAGLRRGQAASFVGVAPFDRQSGQWKGQRFIAGGRNRPRRMLYLAALAAKRYHPDFKAFAERLQARGKPAKVVLVAIMRKLIEAANLVLARGTPWQRQPA

SEQ ID NO: 391737 - protein, 335 aa, unidentified
MHYLYYVGLDVSKETFDASLVAFEDANEMAHRKFANSRKGICSCLHWVEKRHGIRLDDVIFCAEDMGSYISEMAVCASDRTLNFNFSLISPLVIKYSMGIARGKTDRVDARRIAEYAITHYRKIALYLPAEKELCQLRTWLILRAHLAKQRVAKLVLLEKLDYKEKFADVSIQRSMLQEEIAYAETHMKTIEREMKELIAADSNICRNYKLLTSIKGVGPITAIGMLCSTLNFTKITDHRKFACYCGLAPFEHSSGTSVRGGCHTSSMANRDIKVQLNRSALIAIRCDPQLKAYYERKVAEGKHKFSVLNAVRAKIAARCFAVVRRGTPYVALQI

SEQ ID NO: 391738 - protein, 447 aa, unidentified
MTIIEGSSVAVGIDAAVVANHHIVVRRPEVGGPGSVVDDFVVPPTLAGMERLTKRLASWPGAVAVAEPTSMTWLPLSIALGNAGVEMALVGNRHSARLRSALAGKNKSDPIDAAVLSRAGEFFELDPARVPAAAELALRRAAQRRGKTLVDANRCLRRVLSQARWAFPDVWNAFAGSRPTALAVLARWPHLETLARARVSSITEVVAAHTRGVANVEHRAQQIRSSARAWAEFWDGHLDLDALGWETGELLADLGAAEARVDRATERTCHYWERIWGDDPLLLSVPGMGPIVAPTVRAFLADGSHLDDAKAAQSFVGLNPSNWSSGQMESPSRAITKEGPPVLRLAFYQAANVARVHDPQLADFYRRLMVERGHCHTKANCAVARKLVARTWATLTSGTPYELRDLDGTPVTRRQATALAAALAVPGDVRRRSRAHSAATHRARLTR

SEQ ID NO: 391739 - protein, 413 aa, unidentified
MDVVHARCAALDVSKTDAKVCVRLARPDGGAQDRVTTWGAMTRQIMELREHLIAQQVTLVVMEATGDYWKPFYYLLEDADFELVLANAAQVKAMPGRKSDVSDARWLADLAAHGLVRASFVPPPPIRELRDLTRTRTALTRDRAREITRLEKLLEDAGIKITAVTSRTLTVSTREMIEALIAGQRDPQVLAQMAKTRLRAKIPQLQEALIGRFNDHHAFLARMHLTMIDELDRAIDQLEGRIEVMVEPFRSFLDLITTIPGISTTVAEVVLAETGGDLSVFPTPEQFCSWAGVAPGKNQSAGRTKPARVRPGDRHLKGAMGIAAMAVARSNNTYLAARYRRIATRRGPARALVATQRAMLTAMWHMAHTGEVYHELGPDHFARKRPTYIKNRAIRQLETLGYGVTLTEVPQAS

SEQ ID NO: 391740 - protein, 459 aa, unidentified
MKIRIGVDIACRSPHYAACADETGAIVWSGHRFKTDVGELETLWARLPADVDEVMVVMEPTRNAWVPLAAWFRRQGAVVVLVPSEQSADLRDYFSKHTKTDRLDAELLARLPVLHPEGLHLADALGPGDPLKRAVKIRAGLVHRRSTAMARLDSLLEILGPGWIDALGTRMTQTTFKFLAAYANPHQVKRLGAARLARWFQHHSRKAWGPERAAAIIAAAEATLAIWGNDGLDFDALAADIAAEASIALKVSEQIALLDRRIHDLYLEADPDGIVRSAPGVGDILAGQILGRLGDPARFASLAAARSFSGLIPKRNASGLSDHAGGPTKRGDACLRAALFQAADRARKVDPTLAARYQRLMCDTGRHHNSATCTIAAVLLTRIVACLRNRTSYELRDVDGRPITDAEGRAIVAERHQIPIEIRDARRSIAKARSATRRDERVKKGVAERSETPLVPPAA

SEQ ID NO: 391741 - protein, 408 aa, unidentified
MERYHLGVDWADKFHQIWVSDGQGQKITEKKVGETVEELAEFGRWLDESRAKGSELWAAIEKPQGRIVDFLLDHGVVVYAVNPKAVDRARDRFRMSSSKSDSFDAYVLAEFLRTDHGHLRPLEPSSQQAQELKMLSRDEHRLVRQKTRLLNQIRVTLKEYYPRPLEVFSDLESKTALDFLKQYPTPQALSELSRRKWNRFAKREHYLGEDRCQEFWEKLCQPQLTVPQHVIRVKAQLLLVLLVQLEVLSEAVGTYKEKIKSFFASMPAAELVKTLPGAKTGTIVATLWAEIGDAKSRWESFRHLQAEAGMVPVTKASGKSRVVHFRFSCNKLMRHAAYWLAFVSLNRSEWANHYYRDQRARGHNHHQALRALGAKWLKIIFVMWRDHKPYDENYHLANITRQKMRQAA

SEQ ID NO: 391742 - protein, 426 aa, unidentified
MKSNTQNAKIAAITEKTLIIGIDVGSETHFARAFDWRGYEFSGKPLEFSNTGEGFETFRAWIDELKEKHGMDKVMPSMEPTGHYWFNLGKFLQDHGMTLVHVNPHHVKKSKELDDNNPSKNDRKDPKVIAGLVKDGRYFRPYIPDGIYAEIRALSGLQVLAQSEITRLKNRIARWFSIYFPNYKDVYGNVGAVSGLMVLEAAPLPADIVKLGIDGVNRIWREAKLRGVGLKRAKTLVTAAEHSIGSRDAQEAARIELRILLADYKMQTAREAELMALIEEKIRKVPYVDKLLEIRGVGLKTVTGFVAEVGNIDRFDDPGQLQKLAGYAIVKNESGKHKGESHISYRGRKRLRYVLYEAAVSVVSHSAEFRSIYQYYTTREKNPLKKMQSMIAVACKLVRVFYLILKTGATYDAGKLMDDIRRPVAA

SEQ ID NO: 391743 - protein, 349 aa, unidentified
MNQIIRIGMDTSKYIFQLHGVDASEQVVLRKRLGRKAMLEFFAKLPPTVVVIEACGAAHVLARELGKLGHTAKLIAPQLVKPYVTRNKNDGRDAEGLCEAASRPRMRYVPVKTAEQQAALMLLGLREQLVVRRTQLSNMIRGYAAEFGLIEAKGLDKLISFLAAIKHDESVPTLARELFATLARQYDQVQVELKALEAKLLAWHRANALSRRLAQIPGIGPVTAAALVMKAPDPHAFRSGRLFAAWLGLTPKDHSTAGKTRLGKITRAGDETLRQLLVVGATSVVKIAKSKARGPSWLIELLKRKTPKLAAVALANKMARIAWKLMTTGEQYESTRLEVRTEAQMAAAV

SEQ ID NO: 391744 - protein, 346 aa, unidentified
MKIIGCDFHPSFQQIAVFDTETGEITEHKLVNGNGEAERFYRSLPVGSLIGIEACGNSHWFIDLLGRLGHQVWVGDAAKIRASYVRKQKTDRRDAAHILTLLLENRFPKLWTPSRQERDQRQLLIHRHKLVQIRTRIKNSLQHLALNQGVQKKQKLWSKEGQKILIHLPLEGWTAVRRQDCRELLAQLDERIARLDKAAELAAEAHPQASLLLQQKGVGPITALAFALTLGDVSRFPHSNQVASYLGLIPSEHTSSSKRRLGSITKQGNSFVRMLLVEAAQSVTRLDPQFRKHYVHLCRNKPKAVAKVAAARKLAVRLYWVLRTDQNSQKAVPIESSPRVPLVGAS

SEQ ID NO: 391745 - protein, 488 aa, unidentified
MAKTKRKQSTFERLRSGELNRKQRRNLARRLAGNDPGLTIIHSNAGGIDVGNESHFVAVPPDRDANPVQEFGCWTADLKRMAEWLKDCRIDTVAMQATGVYSIPLYDILTGHGIQVVLVNAQHSKNVPGRKSDVQECQWLMKLHTYGLLRDSFHLEERMEGVRTVWRLRDRHVKDASRAVQHMQKALTKMNIQLANVLSDITEVSGQAIIAAILEGERDPWKLADLKHEMVKASREEVARCLEGNWRDDLLFELRQAVDTYHFVHQQMRACDRQIESLLASLPTKILERPHQTDAPAATAKKARKTRKPRKARRNEPTVDLTTALKRICGVDLASIDGIDVITAQTIISEIGTDISKFKTEDHFASWLGLTPAKDVTGGKIIGSGRRKVQNRVAIALRMAATTLLESKTYLGARYRHLRQRLPSYAAAIKAMARYLAVLVYRVLTHGEAWVDRGAAKFEQRRTESELRSLTAKALAKGFQLVPITATS

SEQ ID NO: 391746 - protein, 350 aa, unidentified
MIIIGVDYHPEFQQLASVDTETGELSDSRLHNPEQAEQFYRELAERGVQVRIGMEASGHARWLERLLAELQFELWIGDAAEIQTKRVRKQKTDRHDAQLILQLLLENRFPRIWVPSSANRDLRQLLWHRHRMVQARTRVMNQLQSVALNEGVRCKKRLWRERGRQQLESFTLGPWASRRRHDLLQWLDRLNPTILELTQAIEREAEKCPEARRLRTHPGVGALTALAFVLILGDVERFRCGKQVASYLGLVPLEKSSGNRRRLGHITKQGSSMLRFLLVEAAQATVRSVPEWRSKYFHLMQRRGRNTAKVAMARRLAVRLYWMWRRGWDYEQLYKFGSHAGEPGNRYGVR

SEQ ID NO: 391747 - protein, 336 aa, unidentified
MERQYVGIDLHRRRSVIVRMTGDGEVLETVRIVNDPVALSLELAKAGPDPEVALESTYGWYWAADLLEADGAVVHLVHPLGLHWDARRVKNDERDATELAHRLRRGDLPESWIAPPEVRELRELIRYRAKLAALRTSAKAQIHAVMAKLGILPTQSDMFSPTGQILLDEMPFEGAYAIRVDSLRDLLEIYERELAMVEQALHRRLAGHKGYWAIQALNGVGRITAAIFVAEIGDVARFPSPHHLCSWAGLTPTHRESDTKVRRGHITKQGSTLVRWAAVEAVARYHGGAPIAPAFIRIAKRRGVMIARVAAARKLLRLVYYGLRDGEIRCLVKETA

SEQ ID NO: 391748 - protein, 344 aa, unidentified
MDHFAGLDVSVKETSICIVDDTGKIVREVKVASEPEALLKVLGNPGYRFKRIGLEAGPLSQWLFSALAEAGLPVVCVETRHMRAVLKAQINKTDRNDARGIAQMMRVGLYRPVHVKTLRSQKLRMLLTHRKLLQSKAIAIDNDLRGTLRNFGLKVGMVGAVRFEARIWELVENQSDLAALIEPLLIVRRTLREQIVILHRRLLAIVRDDEVCRRLMTVPGVGPVVSLTYRATVDVPARFRKSKSVGAVFGLTSARYQSGEVDWSGEISRCGDEMMRTMLYEAAQSMMHSKKWSWLKAWAMQIARRRGMKKAIVALARRLAVIMHRIWVDGTEFRWTREQAAAAA

SEQ ID NO: 391749 - protein, 419 aa, unidentified
MFTKTTLIVGVDVHQRRNVTLVLDGAGAVVAGHRHFANNRLGSEQLADYLAQLAQSGGFNTIHLAAEATNNYWLPFFCHLAEAPALAAWPVRLYPFNPRLVANFKKALGEEEKTDLRDAGIVGERLRFGKKLPRPFAMDELYLPLRTLTRYRYHLVRELVRVKSYCLSLVYLKATGYTDKETKPFANPFGATSQAVLRQFATLDEIANTPLEELSEWLDVKGKRRFPNPEENARKLQRVAEEAYQLPQEWAAVIHDLVSLNLRHIACLENLIGRVETAIQQQMESIPHTLETIPGIGPVFAAGIIAEIGDLARFDYNEAKVASYAGLKWPRSQSDEFEAQDRRLSRSGNHFLRYYFCEAAQLVRLQAPEYRDYYHRKYQEVRKHQHKRAIVLTARKLVRLVVRLLTTHEPYRLRQVPKA

SEQ ID NO: 391750 - protein, 351 aa, unidentified
MTEITRLAIDTSKSVFTLHGVDVADRPVLRRNLRRRELLAFFERLPPVEVALEACGGSHHWGRALLALGHRVRLIPPQYVKPFVKRSKNDRNDAEAISVAAAQPSIGSVAVKSAEQQAAAMLLSVRELLVRQRTQLVNAMRGHAAEMGVVAPLGEKGVSALQAEIATADDAAVPAAAKQAIALLGREAERLETRLRAIEATLMQQHKANPVSRRLAAIPGIGPIGALSLAVRVDPKQFASARHFAAWLGLVPRECSTAGKQRLGGISRAGDERLRQSLVLGATAVIQHANPRVKPAGQGPTGRPATSPWLLNLLGRKPRKLAAVALANKMARIVWAMMTSGEAYRPRPAAV

SEQ ID NO: 391751 - protein, 358 aa, unidentified
MVCVGIDVAKDKHDCCILDSEGTTLVDCFTIPNNMDGFKSLLQTIQDCSQKSDKIKVGLEATGHYSYNILGFLLDNDLPVYVMNPLHTNLYRKSLSLRKTKTDRVDAKTIATMLLSDVDLKSYTDTAYHNEELKSLTRYRFDKVQERAKLKQSVSRLVTILFPELEQLVSSIHGTSIYALLSEYPGAKQISEAHLTRLANILVKTSRGHYRKDKATHIRDAARTSIGSVMPAKSLELKHTIKLIQELTSEINEIEDAIRKIMDELKPPILSIPGMGFHSAAMILAEVGDFSNFNSPDKVLAYAGCSPSTYQSGKLTNCYAHMEKRGSRYLRYALYTATKYVCYWNPVFTEYLDIVNIS

SEQ ID NO: 391752 - protein, 340 aa, unidentified
METVAVVGVDLAKSVFQMHGVDESGAVVLRRRVSRGQFVKLFAKLPPCLVGMEACSSSHHWARQLMALGHEVKLMPAQYVKPYLKRGKNDAADAEAICEAVTRPTMRFVGVKSPEQQAVMMLHRVRKILTRQRTQLTNALRAHLAEFGITARVGRLGLDRLLAVVADPNDDRLPTQARESLAVLASQLEMVKEQILDNDRRIMADARRSEAGRRLMKIPGIGPLLASAIVASVADPAMFSNGRSLSAWIGLTPRQNSSGGKERLGSITKAGNGYLRELLVMGAMAVVRHAQRSSAKRPWLAQLLERKKPKVAAVALANKNARIIWAMMTRGESYREMQAA

SEQ ID NO: 391753 - protein, 380 aa, unidentified
MKDTTKFVGLDVSKDTIAVAVAEGGRGEIRFVGTYPHTVEAVHKVVKQLGGPSVRLEFCYEAGPTGYGLYRLLRAMGLSCIVVAPSLIPTRPGDRVKTDKRDAVRLAQLLRAGELTPVWVPGEVDEALRDLVRAREDAVQDRLRARHRLSKFLLRWNRRPPEGTRAWSKAHRNWLDHLSWSDVRLQTVFQEYLHALDEIEGRIQRVEAAIHEQATQSDRAPVIQALQTLRGVAEVTAVSLVAEVGELSRFRNPRQLMAYAGLVPKEFSSGTRRWQGGITKTGNAHLRRVLVEAAWSYRYKPAIKGQIRKRQEGQPAKITDIAWRAQDRLHRKYRRMVSKGKPIGVSVTAVARELLGFVWAIDCEVERTCVQDGWREAAPL

SEQ ID NO: 391754 - protein, 427 aa, unidentified
MTKSQNLKFDAIENTDAIVGIDIAKNVHWAGIILPNGKEIKKSFSFNNNKKGFESLVETVKNVLTMLNFKKAIIGMEPTGHYWKSCARYLKKIDWIKVVTVNPYHVKNSKEFDDNCQTKNDKKDCMTIARLIKDARFFEPYLPEGIWAELRNLSNTRAELVGKQNAVKNRLIATMDEYFPEYTKVFKKILSRTSEEILKECPFPEDIKSKGKEELLKHIKKTVKRGYSKKQVETIYELANESIGTTEGTEGAKFQLNMYIEEAKLLKKQIKMTEQELERQLKETGFYESLTSIQGIGIVSAATFVGEVGDINRFDSYEQIRRYAGLNLVENSSGNHKGKTTISKRGRSLLRSILYRMAFTMVSKNKEMKELYKYLTTRKENQLKKKQAIVAVIGKILQIIYAVVTKNEEYKATRVFSQDRLEQLKVA

SEQ ID NO: 391755 - protein, 375 aa, unidentified
MPTNNASRPVVYLAIELSASSWVVACRQPMNEKIKMHRMEAGDCEALLALISDQRRKAVAALGVDVIVASCFEAGRDGFWLHRLLLAHGVINHVVEPTSILVTRRARRAKTDRLDAQGLLRVLAATFTGDHDACRVVNVPSVADEDAKRPHREREYLVQERVRIENRIAALLATQGVSKRPSLRSWEADLNALQTGDGRSIPPLLKAELNRLRRRLVVTLDMIREIETERQQALEVQNDDASQTIGALCKIRGIGDNFAAVLTREILYRSFQNRRQLASYLGLAPTPFQSGGMDRDRRINRAGNSRARKTLIQLAWLWLRYQPESGLAQWFRQRVGALQGRTRRIAIVAMARKLLIAIWRFATLGIVPEGAIVAA

SEQ ID NO: 391756 - protein, 389 aa, unidentified
MGESFPGLTLRCLFGQGAGYRPVTADRSGRWQRSEREDETMDHFVGIDVSLESCSVCVVGQSGSVVREAKVASEPEALIAFLRGMDLTITGIGLEAGPLSQWLHRHLCAAGLEAVLMETRQVKGALKAMPIKTDRRDALGIAPLSRMGWFRPVHCKSVSVQELRALLGARRTLQKSMISIELSMRGMLRGFGLKLGQITRRRLPDRARELADGNEMLTAMVTAMLRGHAALRSELAKLENRLRRIARADQVCRLMMTVPGMGAVVALQVKAGIDDPARFRSSKMVGPHFGLTPRSEQSGERDVVGAISAAGDQNVRTALFQAATVMLYQSQTKSWLKAWGMQVAKRRGMKRAVVAVARRLGVVLHRMWSDGTTFRLTHPGSLNAAALRR

SEQ ID NO: 391757 - protein, 343 aa, unidentified
MDKVSTIGLDIAKSVFQVHGVDAAGAVLIRKRISRAKVLEYFGELPPCLVGIEACPSAHHWGRELQGLGHTVRLIPPSYVKAYLKRGKNDANDAAAICEAVTRPSMRFVPIKTKEPQTALMLHRARQLLVRQRTMLSNALRGHLAEYGHVVPQGPAHVNRLVALVEDPKSAVPESARGILQVLIRTLNALEEQLKELDGEIARRAKADPVARRLMTIPGIGRIAATAITALVPAPEGFRAGRDFAAWLGLVPRQMSTGDRTILGKISKRGNRYLRVLFVQAAWVVLVKPKSWERHGLKPWIEAAKKRLHHNVLAIALANKLARIAWSVLARGRDFEASKLRVA

SEQ ID NO: 391758 - protein, 367 aa, unidentified
MEVLYPRCSGIDVHKRFVVACLSIIQHGQRHKELRQASTMTSDILALKAWLKAAGCTHIAMESTGVYWKPIFHLLEDSFEIVLVNAQHMKAVPGRKTDVKDAEWIADLLQHGLLKASFIPGSEQQAVRDLTRTRMRLQKSRTRLVNRIQKVLEDANLKLASVVTASMGVTGQAILRALVAGEVDPERLAHLAQGSLVRKHEQLQAALAGKLTPHHHVLLAELLQLIATLDRSIAHLDREIAERLRPHDALIERIDAVTGLARRSIEVLLGELGWDMSHFPDAAHAASWVGICPGQHETAGKQHSGRTRQGNSFSQNGTHSGGSCGGAYPDLSWRTISPHQCAMREQESSDGCRSQYPGDFLSHGQER

SEQ ID NO: 391759 - protein, 358 aa, unidentified
MKRSTKYVALDVHQATTVSSVREESGRVLARTVLPTEASVLVEFFRGMRGAIHVAFEEGTQAQWLHDLLSPVVDRVVVCNRRGQASDGNKADQLDADALSELLRRGALRPVYHASPHRATLKELARTYENLVNDSTRVMQRLKALFRARAIRTPGRRVYQRGERVQWLRQLPDDGVRFRARVLYAELEVLQELRPQAKTAMLTEARRDSAWPVLRTIPFLGPVRVAMLLATLQTPWRFRTKRSLWAYAGLAVVTRTTAEYELDGQRQIRRRRRQPMTRGLNRNHNRVAKAVFKGAATAAATRPGALQDWYCALLARGMREELARVTLARKLAAVTLHLWKRGERYDPTQLTVQAAQAR

SEQ ID NO: 391760 - protein, 367 aa, unidentified
MKKVSTRAAAQSRNISQQKLTIGLDLGDRNSWCCVVDEAGQIQREQRVHTSGKALQEVFGAMPRSRIALEIGTHSPWISRLLSELGHEVIVANARKVRLIGESRKKDDRLDAQTLARLARIDPELLYPVKHRSAQAQADLTLIRARAGLVRARTGLVNTARGLAKSYGERLRSCNVRNLNPEKAESLSPELQAALEPLLNAIESLSERIVEYNERLENLAQQSYPQVALLKQIKGVGTLIALTFLLTLEDPHRFGKSRDVGCYLGLQPGRRNSGQREPQLHISKEGDPYLRTLLVQGAQHILGPFGVDCDLRRWGLKLAECGGRNGRKRAIVATARKLAVLLHHLWVSGEAYEPLHNSSRTTVAAAA

SEQ ID NO: 391761 - protein, 313 aa, unidentified
MSDSFVGIDISKDSLDVHVLPGDFRKTYPYEKQAVKALIKQLKQIAPQLIVMEATGGYETSIAVQLADAGLNAAIVNPRQIRDYARAIGKLAKTDTIDAYVIARFAQDVKPEVRIQITVKERELKDLVARRQQLIDMRTAEKNRLSRAHTPQIIKGIRKIILTLNAQIKAIDKELQNEIKNNPAWDTKLALITSVPGIGPTTAQVLLFCLPELGTLNRQQIAALVGVAPLNRDSGSMRGKRTIAGGRAQVRKALHMPILSAVTQWNPRLIAFYNRLIANGKKHKTALTACMRKLLVILNTMVKNNSAYRLDFC

SEQ ID NO: 391762 - protein, 400 aa, unidentified
MISVGIDISKEKSMVCILKPYGEIVSKPFEVYHIEKDLSELTTMLLRLDDEVRVIMEATGIYHLPILNYLKEKGFFVAVINPLEMKKYRCQGLRRVKTDKQDAITISNYGIDHWYRLKEYEVQENIYSELKLLGRQYRHYMRMRVEAVLELTHLLDYTMPGIKTLLKGWNETNGKDKLGDFAEEYWHYDNITKKSEKQFIDSYLKWAKKKGYHQSQDKATKIYALAKEGIPTVSSSSLSIKMLVQEAVRVLREVDNTLMTILTQMQALAKSLPEYPVVRAMGGVGDVLAPKLIAEIGDVRRFHSGKALIAHAGIDAPPYQSGQFIGTERKITKRGSASLRKTGYEVMRCLKTHKAPEDAAVYEFILKKEREGKAKRAAKIAGLNKFLRIYYARVMEVYQN

SEQ ID NO: 391763 - protein, 449 aa, unidentified
MMQPREIEDEQYEQITERVCAVDVAKATGMVCTRVPHESGPGRRRTRVWEVEATTGAILELGRLLAAEGIEKVTLESTSDYWRIWFYLLEASGLAVQLVNSRDVKNAPGRPKTDTLDSVWQAKLTERGMLRPSFVPPAEIRELRDYTRLRADLTRDRTRHWQRLEKLLEDALIKVSSVASTLETRSVRDMLEALIAGERDPKVLAGLARGRMKVKHAELVRALTGAFDGHHAELTRILLDQIDQLGRQISTLTTRIEELIGAIPAARGVDADGTTGPGAGLGPGAAVRPVLERLDEIPGVSLDLAQVIIAETGLDMTRFPDASHLASWAKLSPRTIQSGPKSRSARTGKGNPYLKAALGQAAVAAAKTDTFLGERYRRLVRRRGKLKALVAVAREILVIVWHLLADPAARYSELGAGYYEMRIDKHKKARNHVRQLEALGFAVTLTRAA

SEQ ID NO: 391764 - protein, 431 aa, unidentified
MNYNQNHKITQITSETLIVGVDIAKHNHVARAQDFRGLELGKTCFFENTKAGFHSFLVWINQLVKECKLNQVIVGMEPTGHYWLNLAHLLKENNIKFVSVNPLHVKRSKELDDNSPTKNDVKDAKVIAQLVKDGRYAEPTIPQGIYAELRVAKKLRDLLNVDLQVVQGQVHNWLDRYFPEFLTVFKSWEGKASIHFLKLEALPHQLVNYTDEELLLSLRQVVKRSIGLKKIRALKEAANRSIGIRQGAAMAKLELRALLEKYDFIQMKFEEIDHQLDQLLDHIPGVTQMLEMSGIGRDTVAGFFAEVGDLRDYQHPRQIVKLAGLSLKENTSGKHKGQTKITKRGRKKLRALLFRAAMILVAKNKAFKALHIYYTTRSHNPLKKMQSLIALCNKLIRILFSIGKKQFTFQEDKMLKDIPHMATSVVHQTVA

SEQ ID NO: 391765 - protein, 396 aa, unidentified
MWTLGIDVAKRRHNATLLDEDGEAVFRNMSFAHSREGVRALLDRLAATGQSPHGIRVGMEATGHYWMVLFQHLTEAGYAAQVINPIVTAARRNVTIRGTKTDSVDSLLIAKVLREENPRVSAIPERDVQALRGLTRLRFECAQAAISEKLRLVALLDLVFPEYAEHFSDLFGATSREVLAEFPTAEHLAKVDIRRLARILSEASRGRMGRDHAERLKHAAKESFALTGDTVALALEVRFIVERLNLLIEQIAELDRRFAAFLPAEQQLLQTIPGLGKVWAPTILAEILPVFHPELKEGAGKLVAAAGIDVRLHDSGQLVGNGRMSKRGSRYLRTAVMQAACAAVRLAGDPLFKAVYDRQRAHGKHHTVALSHVANKMLHVVFSVLKNKRPYTPMLN

SEQ ID NO: 391766 - protein, 333 aa, unidentified
MNSIGIDVSCQEVVVVVMVKGKARKAKTFKNTPAGHKTMAQSFTKLKGETKVCMEATGVYHFDLAVTLSREDNIDVMIINPKAAHNFAKALMKRSKTDAIDAENLANYAERMPFETWERPADEYISLRAISRRIAALTKQKTQTKNQLHALKSTQETPQLVIDQTEQLITIFESQIISLRNSALAVIKQSSRLEEAYLLITGIKGIADASGIQILSELMILPENMTARQWVAHAGLDPRVFDSGSSVSKKPRISKVGNRYIRQALYMPALVSSRFEPNIKGYYWHLINDNGLKKIQAVCAVMRKLLHAIHGMLRSNKEFDGARFYALPVSTNS

SEQ ID NO: 391767 - protein, 390 aa, unidentified
MYLIGIDISKFKHDCFIATETGQVVKSSFSFDNNQEGFNQLLTVLLSLDHSQQIRIGLEATGHYGTNLKLFLHEHNFSFMEFNPILSDRFRQVSSLRKTKNDKIDAKLISQMLLSFDYKPNSLLSYHISKLKSLTRFRKKLVKDCTIYKERLINILDLVFPEYSNYFTQVWGKVSLYILKNYPTIQDIANINVESVLPIIKSLSRGHYSMPKLIKLIEAAKVSIGCKNDSHTLELKLTINLIEQMNYAIENVENEITIIMNKYNFKTATIPGIGIISAASIVSEFNDFSNFNSSNQLLSFSGLEPSIYESGTQTTYGHLVKRGSSYLRETLMNVAPFVMNYNNVFYQYYLKKRNEGKHHRVALTHLVKKLLRVIYYLETNAVPFDSSKLK

SEQ ID NO: 391768 - protein, 384 aa, unidentified
MRIVGLDVSRSVAEIAYLEDGTLHAGGRTGLRRDELERFAVKLRATDHVVLEATGNTTAIVNVLRPHVARVVIANPLQVRLIAEARVKTDKIDAAVLAQLYASGFLPEVWMPDERTLALCRQISRRSQLVRQRTRLKNEIHAVLIAHLIERCPASDLFGKKGRAWLSVQPLPLDERLGVEQRLRVMLTITGVNTTVAIGLLSAIGDIERFPNPEKLVSYFGLNPSVYQSGPTPARHGHITKRGRSYARAMLVEAAWGATQAPGPLRAFFLRVRDRRGQQIAVVATARKLAVIVWYVLTRGEPFAWDRPALTAHKLRALELQAGMPARHGSHKGSAAAYSLKSVRQQERAVAAQSERTYQRLFNRWKQSRPKSDSTPIRWPEART

SEQ ID NO: 391769 - protein, 351 aa, unidentified
MWIIGCDFHPRYQQVAAMNQETGEIVERRLSHETKEAEQFYESLPPGARIGMEASCPAQWFERLLDRCGHRLQVGDPATIRASVVRKQKTDARDARQLLELLLTDRFPSIWIPTPAERDSRQLLVHRHKLVGWRTQVRNQLSALARSQGVFPGTRFWTQAGRPKLESLSLDRWAAQRRQGLLRLLDDLDAQIVDLTRQIEQQARARNDAVELMRQDGVGPIVSLAFVLTLGTAQRFPRGKQVASYLGLNPSEHSSGGTQRFGHISKQGNRMMRWLLVEAAWMAVRKDPELQRVYQRLAFRRGRKIAAVAVARKLAVKLYWRLREFEQNNAPQSPAPMQGSSGRGLMHSSTL

SEQ ID NO: 391770 - protein, 405 aa, unidentified
MSQDVFVGLDWAVHTHAVCVIDTAGAALDRFEVAHDRSGLAELMRRLARWGARLRIAIERPSGLIVDALVEAGHEVFPIHPNAVKASRPRYRSHGAKSDASDAYLLADLLRTDGHRWRALAQQSDDIRALRALVRSRDDLVDARVAASNQLTASLQNFWPGALAIFADIASPIALAFLHRYPSPRTARRVNEVQLHDFCRRQHYSGRRSPAELLQRLRGAAAGLVGASTEQAMAQVVLCHVAVLKSLVGRIAVLTKRIEQFMTELPDGLLMMSFPRSGEICAAQILAELGDVRERFPSADQLAAEAGAVPVTYQSGKTRSVVFRWACNHRLRKAITCLADNSRHANAWAKSMYQAARARGCDHTHAIRILARAWLRVIWRAWTDRKPYDPSAHGNAVAMASAHGG

SEQ ID NO: 391771 - protein, 341 aa, unidentified
MKQASTIGLDIAKHVFQVHGADSAGHVLFRKRITRVKLLGFLAAQTRCVVAMEACAGAHYWAREIAKLGHHVRLIAPAYVKPFIKRQKNDAADAEAICEAAQRPTMRFVPVKSEEQQANGIVFRARDLLVRQRTQCVNALRGHLMEYGYVFPKGITHVETLVAVVEDLQSSLPESVRVILKLLVDTFTALEAQITALDAEINQRSRSDPTARRLMTIPGVGPIASTAITALVPAAEGFPAGRDFAAWLGLTPLQKSTGGKQRLGAVSKRGERTIRRLLIIGASAVVQQASRRGAPKGSWLAQMLARKPKMLVTVALANKMARIIWALLVKGGTYRAPAAAA

SEQ ID NO: 391772 - protein, 409 aa, unidentified
MEIVHERCCGLDVHNKTVVACLMVLDEQGKLQKTIRTFGTITVDLLSMVDWLLQAGCTHVAMESTGVYWKPIYNLLEGQVEVLVVNAQHLKGVTGRKTDVRDAEWIADLLRHGLVKGSFIPSTQQREWRDLTRYRTSLIQERARTANRVQKVLEDTNIKLASVVTDILGVSARAMLEALLDGETDGAVLAGLARGRLREKQGELQQALQGRLKPPHIFRLSEHLAHIDYLDEAIARVSEQIAERLRPYEQEIARLDSIPGINRRTAEVLLAEVGPDLSRFPSAKHLASWAGLCPGNRESAGKRLSGKTRKGSPWLRQALIEAAHGAARTKHCYLGEQYRRLAKRKGSKKAFVAVGHSLLVIAFPLLTRQQFYQELGDNYFDEHQRQSVQRRLVSRLLRLGYQVTLAPAA

SEQ ID NO: 391773 - protein, 387 aa, unidentified
MRQPNDLSRSLVALDQDSTLIAVIEMGQASWLVAGIVPGVNRHPLKKIATDQEQLLQVLRRWAKEAETTGRMIKRIAVAYEAGRDGFWLARWLRARGVEAYVIHPSSVPVSREHRRAKTDRLDTELLKRAFLGWLRGEPDHCSMAAIPTLTEEDAKRPGRERESLVGERTRIINRIKGALARLGIRNFKPILRNAPKLLETLGTPEGAALPPNTLAELRRDMARLSFVKQQIKEVETGRIERLQRAPGERGNAMVRLLTRVVGVGVETADMLVQEIFSRNLRDRKAVARYAGLTGAPDESGKKRRERGLAKSGNARVRRGMLQLAWGFLVHQPDSVLAKWYRARTADARGVTRKTMIVALARKLLIVLWRLATTGEVPEGLAIRAAA

SEQ ID NO: 391774 - protein, 380 aa, unidentified
MPEAVIGLDVGKSSHWACVATRDGEVLLSTPVANREDDLDSLFGRFPDALVVVDQSRNIGALALARARAAGMSAAYLPGLAAHGAARLFAGDAKTDERDAMVIAKTALGIPDALLPVGDPGPTIAAARALAAQRNFLTCENTRNKNRLRSILLESCPAFEALVDLSDGPQLRLMASLGGAWSVADAGPRRAAALTRGAARGKIEALVRSTASSTRPDASVVAAEDRAVKLLARRISENSAEIEAITAEISALLEGDDTYRCLLTVPGIGPKTASELAISIDIEDFPSHDRLASYCGLAPRNRQSGTSISSVTASRQGNKRLKNLLIFSCNCLTRTEGRWGDYYTRCRERGMSHGKALKALARKRLKVIYAVMRDRVPYAA

SEQ ID NO: 391775 - protein, 350 aa, unidentified
MKYYKSTTEYNCGIDLHSRQMYVCLMDKEGTNLLHTNIKGNDFDYFLKRIEPYKHDLTIVCESTFNWYWLADACCDAKLEFVLAHALYLKHIHGGKNKNDRIDSEKLAHLLRANLIPPAYVYPAEYRPLRALLRQRMKYVWARASLIGHLSMDQHAKGVVPVSTSSNREDWEQRILEQYTDPLHRLAVESDLELIRSYDKLIKRLENELEQRAKKFFRCNYVLLTTVPGIGKIMALTILLEIDTVERFPTVKDFTSYARLVKGSVASAGKVKGLTGGKMGNAYLRWAFGQIAVLAKQHDPLIKLYAERLVAKHGKFKGNAILSNKIARAVYFMLKNKTVFDVEQLIATSI

SEQ ID NO: 391776 - protein, 297 aa, unidentified
MRQSSTLYIGLDVHKDSIAVAYVAQEHGAEVIYLGAIGTRQCDIDQLIRKMQSKAPHLIFVYEAGPCGYWLYRYFTKKGYDCWVVAPSLVPKKAGDRVKTDRRDAMQLARLVRSGDLTVVYVPKVEDEAIRDLTRAREDTLSDLKDAKFRLKAFLLRHDIRYTGRANWSPAHLRWLSEVVCPTPAQQIVFQEYVRAVNEHTERLPRLEQELQEHVKSWRLNPVVETLQALRGVQFTVAVTMVAEVGDLSRFDTPRELMKFLGLIPSEYSSGARRQQGAMTKAGHTHARRALVEGAWA

SEQ ID NO: 391777 - protein, 341 aa, unidentified
MQITTIGLDIAKNVFQVHGIDGEEKVVVRKQLRRSQVMRFFQELAPCLVGLEACATAHYWARELVKLGHEVRLMPAKDVKAYVKRNKNDAADAAAICEAVRRPTMRFVPVKSAEQQAQLMQHRARDLLMRQRTQLINAIRAHMAELGITAPQGREGIKQLLALIADDEDTCLPIDARASLMVLAAQLQAMQTTIGSLERRIVARHRSSQDSKRLQSIPGVGIIGATAIAATVTDPMAFRSGRDFAAWVGLVPREDSTGGKRKLGPISKQGDRYLRRILVGGAVSILRRAKLNPERYPWVTRLLARRPFKVVAIALANKTARVAWALLAKGGTYRRPRLAAV

SEQ ID NO: 391778 - protein, 376 aa, unidentified
MESQVSFTQVLSRGCGIDVHKKMLVATISGEGLRTETREYGTVTRSLTELKDWLLENGVTHVVMESTGVYWKPVYHVLEPSGLTVWIVNARHVKNVPGHKTDKKDSRWLCKLLLAGLLKPGYIPAREQRELRDLTRYRKKLVQDISSNKNRIIRILEDCNVKLSSVLSDTSGVTATKLIDKLCGGKEITMADIDEVYHKKIGASKEDLLEACNGYITAHHIYLLGTLRGNNAHLACLVGELDGRIRQVLAPYDNALALLREIPGLNRKSVEDLVAEIGLDMDVFPDEKHLSSWVGVSPGNNESAGKKKRTHHPREQTGKADPDPGRMGGLPRQGYVLPRPLPPPGCQAGKETGPGGSGTLHPQIGILHPQGWSPVQ

SEQ ID NO: 391779 - protein, 344 aa, unidentified
MSIKVVGIDIAKNLFQVCVLGTNGQILSNRKVKRDKLLDTVRQLPEQTALAMESCATSHHWGRIFQELGYTVALIPAQHVKPFVGRQKNDANDARAICEAYSRPNLHFVPVKSVEQQDLKAIRSVRKRLVENRTALANQIRGLAAEYGVVFPLSIKALRSHLPLALEDAENALSPVMRNLLQTLYCDFVSLSEEIDEMTQSVTMLSQQNPKYEAIRNIPGFGPILTAALISEVGAGNQFQNGRQFSAWCGLVPKQNSTGGKSSLGSLSKNGNRELRALLIHGARAVVRCGANKADATGVWLRGLIARRGKAKAIVALANKLGRVAWHILAKNSEYDINQAFKPV

SEQ ID NO: 391780 - protein, 443 aa, unidentified
MCSIIGAFQLPDTADGRRVLRQSIAGWQQQGLTHLYCGVESTGGYENNWYSLLKGMQNQYPVWVSRLNPKAIKSVSEVLIRRTITDVVSAANIASYLAKFPEKVNYGLQERPQEEHFSDGRQFVTGINMWTKQKVQLSNQLDKLLYGHLSELLIYCRNGMPGWLLRMLAKYPSAEQLKKAGPARLAKIQGVTQDRAVAVLKKIAQSSHRTSPSLQHLIATTATEVLHQKMLVESNKAFLTEQYKDNASVKLLTAIKGIGLDSAVSLVLEIENVDRFASAKKIAAYFGVEPTYKQSGDGLWGTHMSKRGRSQIRSVLYMVALSAVRYNPMFKQLYARLRAEGMPHKKAAGVVMHKMLRVIYGVLKTGKPFNPEIDQKNQERAAEKQAAANQEPKKKTEVENRQIQDYLSSAPMSNRNYKKIKKQLTSQASVEAHTGSSTANTNL

SEQ ID NO: 391781 - protein, 447 aa, unidentified
MLEPNAAGIDVGAREMFVAVPPGADEHPVRVFTTFTEDLHRLADWLAQCGVTTVAMEATGVYWIPLYEILEQRGIRPCLVNARHMKNVPGRRTDWHECQWLQFLHSVGLLRAAFRPEEDICAVRTVLRHRSELVMAATQHVQHMHKTLTQMNLQIHHVISDITGATGLAIVDAILAGQRDPAELVKLRDVRIKADPETIRKSLVGNWRPEHLFTLRQSRELYRIYQQQIVECDVQVETMLGKFEPRVDPAEKPLPPDRKRNRTGKKRRKKMGHPNPGFDLRTEAYKLFGVDVTQIPGLEENTLPLFSEVGRDMSRWPTAAHFVSWLALCPDNDISGGKLLWRGMRVVKNRAGHLFRLAAYSLHHSPTPLGNYLRRMKAKLDPRAATTATAHKIAVIFYTMVKNQVEYDETIWAARDAARERRLEAKLKRQAKQLGYQLVPIEQKPAA

SEQ ID NO: 391782 - protein, 345 aa, unidentified
MPIVGGLDIHRKQLTFDYLDTETGEVKRGQVAPADRAHLRAWLARFAGRNDVAFALEGCTGWRYVAEELAAAGVAAHVAEPADTAFARGRKRHAKTDKTDSRHLRELLAEGRLPECWIPPGHILECRALLELYHDLRAEHTAWVQRIHAVFFHQGAPALGDGALRTGKDLAALRAAAAAHLSPVGQLQVAVSLEVLEALEARLHQVRHQLLAAARHLTGAKVLAARLYGVGPVTALAMTCWLAGKDRFSSARKAVRFAGLDITVWSSDRKGPPGRLSRQGPPVLRWAVYEAGKTHARSSAPDHRYYAQVKDRQDGKRAALSEARKILRQACHILAELGDDALSAA

SEQ ID NO: 391783 - protein, 371 aa, unidentified
MLSKKIVYVGLDVDDTAFHGAGILRETGEYFEFKSKPDHGVLLKKLKEVFKERYEIRLCYEACYIGYSLCRFLQKHGVHCDVIAPSLIPIKTGTRVKTDRLDAAKLAEYYAKDLLTPIYIPNEKDEEVRDLLRSRNFLVKQRKMLKTHILSACTRYNIKFQEETGKKSNWTDQHISWLKTRAKSLDRPICNIDIETLLAQYASLSESIEKLDTAISPIAESERYKKPKDALNTFRGIDTLSAMTIISEIGDIRRFGHPRQLASYVGLDVAEYSSGGKERKKGITKTGNKHIRTILTESCQTASRPAILSKRIKQSRKGQPQAVIDIADRCMHRLNKKATRMLYVGKHKNKIKTACAREMLGFIWEALRLAA

SEQ ID NO: 391784 - protein, 354 aa, unidentified
MNKYDYTGKTIFVGVDVHKKTYSVSVICDGGLIKRDTMPAHPDRLVVYLKKCFHGAVIKSAYEAGFSGFGLHRHLNDNGIENIVVNAASIEVGARDRVKTDKRDSLKIATQLSAGRLKGVFVPSPEMEDRRELTRLRSTFVKDRNRIAVRLKHKAHYHGLIGPEDNQRVCKAWIARLKKMEVKPGLKYTIDEMTSQWEDLNERIKKIDKVLEEQAVVDEELEVVFRSVCGVGKTAARVLANELGDMSQFSSERALFRYTGLTPAEYSSGEHVRKGHITGQGKPILRSILVQCAWISIRYDKDLCETYERISSRAGGKRAIVAVARKLIGRIRACFRKSERYVACYLKSLQGAIA

SEQ ID NO: 391785 - protein, 355 aa, unidentified
MNQEKYIGMDVHDASISAAVMNAQGKLLMECVLETKAATILEFIQGLRGTLALTFEEGTLAAWLHDLLKPHVSRLVVCDPRKNARMRDGNQNDRADARNLAELLRTNQVKAVYHGKHGIRVLRELGRSYLALTQDSTRVMNRIKSVYRSWAIPCGGSSVYSRRHRAEWLAKLAEPGVRVRAEHLYQQLDNLEPVRQAARRELLRESRKHAAVKLLRQIPAIGPIRSALLVAILQTPHRFRTKRQLWAYSGFAVQTYDSGEFRFVRGKRQRNRERITVRGLNRNHNHELKNLLKGAAISAIERPGPLQDFYAALVQKGIRPSMARLTLARKIAAITLIMWKKGVSFDPKQLQRQAA

SEQ ID NO: 391786 - protein, 343 aa, unidentified
MKLIRVGVDLAKNVFQVHGVDRKEKAVWRRRLARANWVKVLLETVEPGCEIGMESCGGAHHWARKLEQMGFTVKLIAPQFVKPYVKSNKNDANDAEAICEAMSRPGMRFVAVKSVEQQDIQAVHRVRSGLIEQRTAKANQIRGLVAEYGLIAPKELSHLRVALPLWLDDAQNGLTDRFRRLLNALWGDLLGLDARVGELDREIVLIAQSNPVAKRLQQLRGVGPIIATALVAAVGDGAQFANGRQMSAAFGLTPRQHSSGSKERLMGISKRGDTYLRTMLIHGARSVIRTANGKADRLSQWVTRLAERRHPNVAAAALANKTTRMAWAMLKNGTDYEPNRIAL

SEQ ID NO: 391787 - protein, 328 aa, unidentified
MCTLGIDVSKNKIDLCLLTAGPGGKKKHKVLTNEPAVAHKVVDWLNAQKCVPESVTVVLEATGIYHENLAYGLHEAGVSVCMANPCRVREFAHGMDILNKNDAVDAFVLACYGELKSPAVWVPPSPEVRKLRALLRQRDALREDVQRTVNRLEKANSTSTPQEVIRSLERTKSWLNEELARIEKLITDHTDNDPGLKADLDLLKSIKGVKDQVGREMLALLKDGMFKSASQVAAYLGLTPVEKTSGSSVRGRPHMSKTGPSGVRAKLYVAALTASRWNKQAKAIYERLVAKGKAKKAALGAVMRKLVHLCFGVLKTRLPWDENYVATA

SEQ ID NO: 391788 - protein, 359 aa, unidentified
MSLASWVVAGLIPGVNREPLKKIAADPEELLRLLYRWRDQAIKAGKDITRIAVAYETGRDSFWLARWLRDRGIDAHVIHATSVAISREHRRAKTDRIDTAMLRRGFLGWLRGERGHCSMAVVPTIAEEDAKRPHRERESLLKERTSTINRMKAILAQFGVRNFKPSLRKAAEKIDAVRTPEGVPLPPNAAAALRRQIERFRLINEQIKTVEKTRMQRLRQNPTGKYNTMVFLLVRIIGLGVETAEQLVHEMLSRNLRDRKAVARYAGVTGSPDESGASRREKGLSRSGNGRVRKILIQLSWRMLQFQPDSRLARWFKNRTANSQRSRKPMIVALARKLIIALWRYVNTGVVPDGFKLAK

SEQ ID NO: 391789 - protein, 341 aa, unidentified
MQITTIGLDIAKNVFQVHGIDGAEKVVVRKQLRRGQVIKFFEALEPCLIGMEACATAHHWARELTKLGHQVRLMPAKDVKAYVKRNKNDAADAEAICEAVRRPTMRFVVVKSPEQQGRLMQHRVRDLLMRQRTQLINALRAHLAELGIAAAQGREGVKELLAIVAQDGDSRLPVDAHASLIVLAAQLQAVQTMIGSIEKRVVRQHRSNEESKRLESIPGIGVIGATAIAATVPDPQIFRSGRDFAAWVGLVPREDSTGGKQKLGPISKQGDRYLRRILVVGACSVLRRARQQPAKYPWVIQLLARRPFKVVAVALANKMARVAWALLAKGGTYRAPRLTAA

SEQ ID NO: 391790 - protein, 371 aa, unidentified
MNSIVYVGMDVHKESYTVCCYSFDKDEVLYKQKLPADYKLILKYLEQFRKRFTDEIEFVCGYEAGCLGYSLYHQLTDHGVKCIILAPTTMAITNTNRVKTDKRDAGNIARCLAFHTYSEVHVPTDEDNSIKEFIRMRDDQKINLKKTKQQILALVLRLGKKFEGGKTYWTMAHMKWLKSLKLGGVYQETLEEYLITYEYFTEKIERLDQRIEELASGEKYEEKVKKLGCLMGVKTHTALSMIVEVGDFDRFAKPEKFAAFLGLVPSEETSDEKQKRYGITKAGNSHLRRLLVEAAQAYTRGNIGHKSIALKKRQQGNPPQVIAYADRANERLRRRFYKRTLNKRLNRNVAATAIARELACFMWGMMTDHVA

SEQ ID NO: 391791 - protein, 349 aa, unidentified
MLADELDYVVGVDTHRDEHVLAVVAAATGAVLARQVVQANERGYQAALRFAGEAAHGARAWAVEGTGSYGAGLARYLADRGETVREVSRTPRTERRLRGKDDALDAVRTARAALASEELALPRSGERREALRLLLVARRSAVDVRREALGQLRGVLVTAPDRLREELRVLPTGRLLERCSRLRRSSTAGADELATRLVLRSLARRIDAATREAAELEREILAHVRALAPRLLDEPGVGPIVAAQLIVAWSHRGRLRSEAAFARLAGVAPVPASSGQTRRHRLSRGGDRQLNRALHTIVLHRRQHDPATRDYIARRTAEGKSRRDATRLLKRYLARHLYRLLQSQEALLA

SEQ ID NO: 391792 - protein, 344 aa, unidentified
MSEVIIIGLDIAKHVFHVHGADEQGRAIFRKRISRGKLLGFFASQPSCTVALEACGGAHHWARQLAQLGHQVRLIPPAYVKPFVKRQKNDANDAEAICEAAQRPSMRFVAVKSERQQAAALVFRTRDLLVRQRTQLINAIRGHLAEYGWIAPKGPSHVAILADLLKEEEMASSLPEAARAMFRLMLDLIAGLDGKIAALDKEIARRARDDEVSRRLMTVPGIGPISATAIAALAPPAETFAKGRDFAAWLGLTPLQRSTGGKQKLGATSKMGERTLRRLLIIGSSAVVLQASKRGAPKGSWLEQMLARKPRMLVTVALANKMARIIWALLIKQENYRAPVAAKA

SEQ ID NO: 391793 - protein, 342 aa, unidentified
MTYYAGIDVSLEYSSVCVVDGAGKIIREQRIASEPEALIAWFRGLDFELERIGLEAGPLSQWLYAAMRTAGLGVELLETRHVRDAFRAMPVKNDRNDARGIAQLMRLGWFRPVHCKSMAAQEVRALLTARKLVQSKLLDVEMSLRGLLRGFGLKVGPTTPSRFATRIRELVGGNATLEAVAAALLAVHETLRREYTGLDKRVRSMGRSDGRVRLLMSTPGVGAIVALTYVAAIDDPARFKSSKGVGAHFGLTPKKYQSGETDITGRISKIGDEGVRTALYEAGHIILTRPLKGCTALKSWAMRLAKRAGMKKAKVALARKLAVIMHRMLVDGTLFASAAVAA

SEQ ID NO: 391794 - protein, 467 aa, unidentified
MKHKSTPHPKPARRPRAFGIPTLRYNVAGIDVGSKQHFVCAPAPDGSTEIRVFDSTTPDLLQLLHWLQQSNVVSAALESTGVYWIPLFELLDSNGIEVILADARQLQRVPGRKTDATDCQWIQTLHSCGLLQGCFRPDDRICQLRSLTRAKASLIAERADWLRRMQKALDQMNVRVHRAVSQIHGTTGMAIIRAIVAGERDPLVLAKFRDPRCHKSEASIAKELTGNWRDDHLFNLRQALLMFDLINDRIADYQTEIRRHLDSMRSPEADSLPLPPVRSKEKAKALKRRGQEPMRLSLHGLTGRDLTTIDGVGVDTAEVILSEYGPNLTRFPSEKQFVKHLRLAPRQNITGGKPRKGKGAKSATIAGQALRMAATTLNHSRTALGAYYRSIAATKGSDVAVFATARKLATLIYRMLRWGQAYVDEGIAAFEQRYQQARLRRISSTANQLGYQLIPKSPLQDAVSNAS

SEQ ID NO: 391795 - protein, 354 aa, unidentified
MRDEQNPVSEAAVWIGVDVSKSTFDAALARCGQRASSPLSELPARCFVRSPEGVAELLSWLRASGVAPESARVVMEATGRYSVEMAAWMAQACPPLSPAIESPRQTTAFIKSLGLRNKTDRMDARALALYGVERRPRAYQPPPACEGELRELVRHRDFLVQQKVAAENRAGEMRDSKYVQREMRRLILQLERGIAKTEKEMERVKKASPELENDIDLMTSIYGVAFLTAATIRTELGDLRRFEKARQLTAFAGLNPSLRQSGSSVHGRPHISKVGNPRVRRALYLSAMVAIRGDNDFRHDYERLRAQGLSKMAALCAIMRKILVLMRALLISGKPYVPLWKNRPQLEEKMCLEA

SEQ ID NO: 391796 - protein, 428 aa, unidentified
MGRSIGLDVHREFCEVAVSDGGPARSAGRVGTSAEQLQLLALSLEAGDRVVLEATGNALAIARILAPHCAEVLLAHPKRLRAISHAKVKTDKLDARVLAELLAANLIPAVWIPDEQTRRLRRQISRRRALVKRCTAMKNEISAVLIRNLKRRPEATDVFGRTGREWLHRLELPLDERETVDACLRQLDFVTRELSMIDTQIAEAAIRSAQMRRLMTIPGVDATTAATVIAAIGDVTRFPSSRHLVGYLGLHPKVRQSGSSPAHHGRTSKEGPAAARHVLVEAAWITTRSPGPLRAFGQRVAARRGKHIAAVAVARKLATLAWHMLTHEQDYAFQRPTLTRRKLRRLELMTGAPRVKPGPNHTPIRKTGAAQIEWQLAEQAEIAYRRLIADWQATGPKEGAGATPGRASQRPSKGKAARQATRPQTPAL

SEQ ID NO: 391797 - protein, 407 aa, unidentified
MSITCGIDWAEAHHDVTLIDEHGVVVARHRIDTGIAGFSVLLALIAEHGGGVDDTAIAVETDKNLIVVALVEAGFVVYPINPRAVARYRERYGQAGGKSDPGDAAILAHILRTDRHMHRRLPANTNQAGAVKVLARQHQEAIWALQQTVSRLRSVLLEFYPQALQAFPNLKHHAATTVLAAVPTPAAAEKLTKTRVTSLLRRSGRGNHTALAERILLELRVPALRQPACVEVAYGHTVQGLVGTVVAMRAAVDQLEKALFCEFDQHPQSTLLRSVPGLGPVLAARILAEVGDDPERFGNPQSLRAYAGAAPVTIASGRSHYVKARKVRNKRLADACHWWAFTTLTKSQGARAHYDHRRAAGDHHNAALRNLANKLLGRLWWCLVNNQPWDEDDAWPNTARTEKATAA

SEQ ID NO: 391798 - protein, 450 aa, unidentified
MAKRKKKGKTVKTLHTLQPNAAGIDIGATEIYIAVPEDRCSETVRHFGTFTEDLHQAAQWMKQCNIESIAMESTGVYWIPVFQILDRYGFDVSLVNARHVKNVPGRKTDVQDCQWLQYLHSVGLLRGSFRPGQDICAVRSLLRHRDTMVKSASSHVQHIQKALTQMNFQIHNVISDIVGVTGLAIIDAIVAGERDREKLADLTNPRIKADRQTILKSLEGDFRPEHLFTLKQALSSYRHYQQMIRDCDLEIGNHLNSFDSHPDFDETSLPPSNRSKRKSKDTEPAFDLKSHLHRLFGTDLTQIDGVSTLTGQVILTEIGPDLSMFPTANHFCAWLGLSPQNKISGGKILSSKTRPGSNRAANALRLSANALFRSKSYLGNYYRRMRSRHGAPKAITATAHKLARIIYHLIKNQKPFDETVFAEQERKHQERMKRSLIKRAKSFGLQVVPA

SEQ ID NO: 391799 - protein, 417 aa, unidentified
MTQYAAYLGIDWADKKHDLCLVDATSGKKTKQVLPHTPQAIAEYFSNLRCRYPGQQIAVGLEQSRGPLLFALLQYDFLVLYPLNPTTLAKYREAFTPSRAKDDPTDADYASELLMKHSERLKAWHPDDDQTRTLRYLVEHRRRLIGDRTRLSNRLTSLLKCYFPQVLAWFPELTTVLVCDFLLRWPAWERLQGVKRITLLNFFRAHHSVRADTLERRLAAIKASVPLTTDRAIIDSSVLMITALAAQMKTTIGAIKQFDEAITKLCVVHPDFPLFQSLPGAGEVYASRLLAMMGTQRDRWTTADELACLAGIAPVMERSGQSVWIRWRYFCPKFMRQSFHEYAGESVKHSFWARAYYEQQIAKGKSRQAAVRALAYKWIRIIWKCWQTRTPYSEVKYLEALRKKGSPLLSFAATKAA

SEQ ID NO: 391800 - protein, 463 aa, unidentified
MPKARKSRKKLALKVDVTAGLEALHHHAAGIDVGNAEHYAAVPVGRDPQPVQTFGSFTADLHRLAKWLKACQIETVVMQATGVYWIALYEVLEGYGLQVNVVNAKYTKTLPGRKTDVLECQWLQKLHSFGLLNNSFLPPEEIRVLRTYLRQRENLVAAAGACIQQMQKVLTQMNVQLANVSSDLSGMTGMAILQAILDGQRDPQQLAALADPRVQASRKEIAQSLAGHWREDLLFVLRQVHGLYFTYLESITACDQRIEAHLKTMPAKVDVVAQPLPEARPKDRLPNRKHIPQFGLREELYRITGVDLTRIDGIQVQTAQVLVSEVGVDMTGWPTEHHFSSWLGLSPNNQITGGKVIRRGTKKVLNRAATALRLAAQTLHRSKSYLGAQYRRLRARLGAPKAITAMAHHLARLIYRLLRFGTQYHDKGVEYYERKYRETEMKWLQKQAAKLNMQLIPTGALTK

SEQ ID NO: 391801 - protein, 386 aa, unidentified
MSPEHSIDIFLGLDVGKSEHHACALDRDGNKVFDKPLPQLESELAGVFHQLQKLGTVLVIVDQPNTIGALPIAVARDCGCEVGYLPGLAMRKAADLYPGRAKTDKRDAFIIADTARTMPHTLRAVDRNDEVLSALKMLSGFDDDIARDCTRTVNRLRSVLTQIYPSLERVFAGSTLTRTPILELLIHYKGPQGLKRAGYQRVLNWMIKRTRKDPTPLVDDIFAALKAQTVTVPGSDAAELVIPQLAANIQALKEQRNTIAEQVEEMLADFPLCEVLMSMPGVGIKTAAQILLAIGDGSDFASAGHLAAYAGIAPVTRRSGSSIRGEFPARSGNKRLKTPCSTPHSQLSAATNRHGGITNANALKENATTQQSSAWHDADAMSSTRC

SEQ ID NO: 391802 - protein, 403 aa, unidentified
MNSVGIDISKGRSTVAVMRPFGEVVISPFEVRHTDSELSELARQLKSLDGETRVVMEATGNYHAPVAKLLYDAGLYVSVVNAKLVHGYGNNELRRVKTDRKDAIKLANYGLDRWLTLPRYVPEEDTRLLLKNCYRQYRQYSKVQTVLKNNLISLLDTVFPNANRLFSSPIRGDGSEKWVDFVAEFWHCRYVSEKSERAFTSKYLRWCRKHGYNFREAKAHTIYAEASGHIGVMPKSETTKLLVEQAVAQLRATSTALAALKHEMQALTSMLPEYPVVMDMFGVGPTLGPQLIAEIGDVRRFYSKKALVAYAGLDAPPNDSGDVTGRHKSMSKVGASSLRRTLFLVMSIYLQTAPLDEPVYQFMDRKRAEGKPYRVYMMASANKFLRIYYATVKAYLESLEHTA

SEQ ID NO: 391803 - protein, 371 aa, unidentified
MKDHSTFIGMDVHKNSIDIAIAEQGREGRVRHYGKIDGTLAALAKVVRKLISKGNQLHFVYEAGPCGYQIYRHLTAQGLDCTVVAPSRIPKTNGSQIKNDRRDALMLARLHRAGELTAVYVPRAEDEAIRDLTRAREDAKSDEKRSKQRLLSFLLRSGIRYTGGSPWSKAHMRWLSDIKMPHRSQQVVLQEYVGTVDQCTQRVQRLTEQIHELLPEWQLFPVVQALQSMRGVSTIVAATTVAEIGDLKRFHTPAELMSYLGLVPSEHSSGQKTKRGSITKAGNGHVRRVLAEAAWAYRLPARVSRALLRRQEDLPESVCDIAWKAQLRLCSRYRHLWNKGKAKQVIVTAIARELCGFIWAIANEIEDPADN

SEQ ID NO: 391804 - protein, 343 aa, unidentified
MPTTRMEEVIMEVLYPNCAALDVHKDTVVACSRRVVGSKVEREVRTFATTTSGLLALSEWLSSRGATHIAMEATGVYWRPVWNILSDGEFQLILANAKHVRNVPGRKTDVNDATWLADLLAHGLIRASFVPDMATQEQRGLLRTRKQLSRERTSHVQRLQRTLEEANIKLDSAISDVIGTSGRAMIEAMIAGETDPAKLASLAHPRIKVAPAKLAEALRGRITKHHRFLLRLHLKQIDALDNAIAEIDKEVEANLDPFRPFIPILTSMPGIAELSARVILAEIGTDMGRFATARHLISWSGLCPKNDESAGKRRSTRMRKGAPWLKTTLIQCAWAATRRKGSY

SEQ ID NO: 391805 - protein, 356 aa, unidentified
MSIFETGFRTANIIIGVDTHKSKHVAVAIDQQGARLGAISVPVNPKGYKELGNWSQSLGSILAFGVEGTGSYGAGLSRYLMSLGLNVIEVTRPNRQLRYQHGKNDSLDAEGAARSVLSGQAIAAPKTQTGSVEMIRHLKITRDTAVKSRSVAIVTLKTLIINAPAGLRDELDQIKGKVALIRLIAAFRPGPITSTTASAKVAMRSLARRWLMLNEEVLEHDKELKALIEAKAPSLLMSHGIATMTIAEMLMLVGDNPSRIRSEAALAKLCGVCPIPASSGKTHRFRLNRGGNRQANAALYRVAIVRMRSHEPTLAYVRKRTKDGKSKSEIIRCLKRYIVREIFRHLCRPETLKIEY

SEQ ID NO: 391806 - protein, 416 aa, unidentified
MNAAGIDVSSSKSTVAVLRPFGEVVKLPFDVRHSVEELASLAKQLKSIEGETRVVMEHTGRYYESIAKVLHEAGLYVSAVNPLLIKEYGNNSLRKVKTDKADAMKIAKYALDNWSELRDYTPMDTIRYDLKTMNRQFQLAIKQKTATANNLIALQEQSFPGIRKLFDSPVRSDGTQKWVDFTHDFWHTDCVRSGSLNAFTERYRKWCKRNRYQFSTEKAAEVYALAKSAVVLVQKTSVTKTLVQEAANQLTAISRSAETYRSEMNKLVSQLPEYSVVMEMYGVGESLGPQLMAEIGDVRRFERKQSLVAFAGIDPAPSESGDYCSRSNRTTKRGSPYLRRTLFNIMKVHLQRAPADEPVFQFMDKKRAEGKPYYVYMIAAGNKFLRRYYGKVMAYFSSLENLPPVDMESTGLHLTK

SEQ ID NO: 391807 - protein, 310 aa, unidentified
MDRITVGIDVSKDRLDVVVCPSGETFAVDRNANGVEKLATRLRELSPHIVALEATGGFETVVAAGLGAAGLPVAVVNPAQIRAFAKAIGQRAKTDPIDAKVIAHFAEATRLEPRPLPDEQTRLLADLVGRRRQIVAMIGAERQREQRVTASRLRKSIARLIKALEKELASMDADIDDAIKGSPAWRAKEELLTSVPGIGPVISRTLVAELPELGQLSHKQIAALVGLAPFTRQSGKWRGKSFIGGGRSTVRAALFMGAMVAKKYNPILKAFFDRLVAAGKPKMVALIAVARKLLTILNAIVRDGKPWQNA

SEQ ID NO: 391808 - protein, 380 aa, unidentified
MTFIQTRAGLNGRTHPSGQRITTAVAIVAHAYPFVIGVDTHARNHTYAILAAATGQRLANQEFPTTAAGLKRAMAWVARRTGGDLAVLWVIECIATYGARLAHAVADAGYEVAEAARMDARAHRGVGKSDPLDADRIAAAVLPLDTTQLRRPRTDEGVRAALRVLTTAREQMTTERTAYVNALTALLRAVDLGSDARKPLTNTQISEVAAWRTRTEALATSVARAQARRLAKRIQDLSEETVENLAQIKSLILSSKAAPLLDKIGIGPVTVAVAYSVWSHPGRVRNDAAFACLAGVNPIPASSGNTSRHRLNRGGDRRLNRALHMATVTRMIHDPETRAYVEKRRAEGRTTKEIRRCLKRYLARQIYRTLEALHADPSPA

SEQ ID NO: 391809 - protein, 421 aa, unidentified
MTPTSHDTFAAFVGIDWADAKHDICLQAAGTAKRECFQLDHTPEAIEAWVTTLRTRFSGQPVAVCLELTKGPLVSALRKYDFLVLFPINPLTLARYREAFTPSRAKDDPTDAELQLELLLTHRDKLQPLQPQSPAMRALEQLVEHRRRVVGDKVRITNRLTSTLKNYFPQVLQWFQDKDTHLFCDFLSRWPTLKAAQLARRSTLETFFRDHHVRVGDVLATRIHAIKTATPLTTDEGVIAPNALLVQALVSQLRVTLDAIEAFDHAIAQRAQRHPDFPLFQALPGAGPVFASRLLVAFGEQRERYTSATALQKYAGVAPVTERSGKKAWVHWRLQCPKFLRQTFVEWAAESIRHSFWAQVYSQQQRDKGNTHQAAVRALAFKWIRILYRCWQDRTPYDESVYLQALHRRGSSLIHNLAEVS

SEQ ID NO: 391810 - protein, 364 aa, unidentified
MYDSTTTVAVGLDVHARSIRLAAVRADELLEERTLPYDEEAVERLLRRWPLVRCCYEAGPTGFGLYRHLVDRGIDCAVVAPGLVPQRPGDRVKTDPRDARKLARLLAGGLLEPIHVPSPELEAARDLVRTREDARLDRMRDRHRLSKFCLRHGRLLPTSSWTVVRRRWLGEQRFEYAAEQITFDTYLHAVDLVDARIEALERVIRETAELAPWRELVLRLRCLRGIDTLTALALVAEIGDFSRFRSAEEFMAFVGLVPSEHSSGEHRRQGSITKVGNSHVRRLLVEAPWHARRRPTVGYQLARRQRGQDALIIERAWRCQQRLYQRWQRMVGRGKPQQKIVVACARELAGFVWAIATEQPLRST

SEQ ID NO: 391811 - protein, 365 aa, unidentified
MRKSSTVAMDRIENFRDHKVTIGLDLGDRFSHYCILNEAGEIIGEHNLATTPKGIDEVFGRIPRSRIALETGTHSPWVSRQLARLGHEVIVAHARNVRLIGDSSRKDDRFDARTLARLARIDPGLLGPVQHRSAQAQIHLTVIRARAGLVSARTALVNSARGLTKSYGERLRKYSTQKIREMAKGLSQELRDALDPLFGEIESLNERIAEYDRRIEQIAKEVYPQVALLKQVKGVGTLIALTYVLTLDDPRRFRRSRDAGCFVGLRPGRRNSGMSQPQLHISKEGDVYLRTMLVQGAHYILGPFGEDSDLRRWGLKLAERGGKNAKKRAVVAVARKLAVLLHKLWVSGEVYEPLRNNHKAVAAVA

SEQ ID NO: 391812 - protein, 359 aa, unidentified
MNDGNRATPMVTAGLDLGDKYSYLCLIDTDTGKVLEEGRLRTTPEALRRRFCSEQRMSVAIEVGTHSPWVSRVLKECDHEVLVANPRKTRLIYGQGRKTDKLDAEKLGRLARVDPKLLSPLEHRGEASQAHLALIRSREVVVRSRAQLINHVRGTVKSFGARLPKCSTASFHKKVAACIPEELQPALEPLLETIASLSTRIRHYDRELEELAQEHYPETKLLRQVQGVGTLTALSFVLTLEDPGRFEESRQVGAYLGLVPGKDQSGERDPQRRISREGDEMLRRLLVGSAHYILGPFAQDSDLRRHGLKIAGSTAAKDARKRAVVAVARKLSVLLHHLWISGEVYEPLYNARQLKGRAA

SEQ ID NO: 391813 - protein, 428 aa, unidentified
MSEVESVSQEPHFAAFVGIDWADQKHVWCLQAAGSEKRESGELEHTPEAVEAWVGQLCQRFGNRPIAVAVEQSRGALVFMLAKYEPLHLFPVASTMAANMREALYPSGAKDDPRDADLLLDLLLQHRDKLRGLSPDTEATRRVQNLVEERRKLVDEKTEQCNRLTSHLKIYFPQILDWFEHLDTELVCALLEHWPTLEELQKVPPPKLRTFFRKQHGRDQELIERRILAIRQAIPAIRDRAVIEAKSTVVKVIVQLIRSLVKGIADLDEKIEEAAAAHPDFFIFESLPGAGAVIAPRLLAAFGSQRERYDNAGEVQSYSGIAPVTERSGKKKWVHFRWACPKFLRQSFHEWAGHSIAYSVWARSYYQQQRSQGQDHHAAVRALAFKWIRIVFRCWKDGVAYDESKYLASLARRGSPLAAVVAAGKTPC

SEQ ID NO: 391814 - protein, 394 aa, unidentified
MTATQTHSSDFQPALYLAFELGWNEWKLAFATAPADAPRLRSIGARNLEALQQEIAKAKKRFGLPEDAMVYCCYEAGRDGFWLHRWLQGQGLHNIVVDSASIEVNRRRRRAKNDKIDATKLVSMLLRYHGGEKKLWRVVRVPSPEDEDRRQLHRDLLELKAERTQHINRIKGLLASCGLAAPTIGKDFVAMLAELRQWDGSPVPAELQQRLLREYERHEFVERQIRDQENERARRIRTSKEKPLEKVRKLLSLRGIGVNSAWLYVMEFFAWRDIKNRRELAGLAGLTPTPYDSGDSSREQGISKAGNRRLRTMTVEIAWCWLYFQPKSALSEWYQQRWGKGNSRQRRIGIVALARKLLVALWRYLETGVVPAGAETVDWKEKMRVPKTAAEALA

SEQ ID NO: 391815 - protein, 354 aa, unidentified
MSNKSIATIATMGIDIGKNSFHVVGLDRRGAIVLRQKWSRGQIEARLANMAPCLIGMEACVGAHHLSRKLQGYGHDARLMPAKYVRAYSKGQKNDFRDAEAIAEAVQRPTMKFVATKTADQLHLQALHRVRERLVRQRTGIINQIRAFLLERGVAVRQGLRFLRTELPGILTKRSDVLSPRMMRIIEDLAGDWRRLDERIDGLSANIASLVEKDPACERLMTVPGIGPIISSAMVAAIGTGEVFSKGRDFAAWLGLVPRQISTGDRTILGKISKRGNRYLRVLFVQAAWVVLIKPQSWERHGLKSWIEAAKKRLHHNVLAIALANKLARIAWAVLNKGRNFECARTNAMASRSA

SEQ ID NO: 391816 - protein, 385 aa, unidentified
MSSASSESTAARSIIYLGMDVHKDSITIAVLPHDAKTPTRLERLPNDLAKVKRLLDRLAREGEALHELRACYEASGAGYVLHRALREWGYACDVIAPSLIPKRPGVQRKHDKRDACELARLYRAGELTAVRIPSETEERVRDVVRCRETFQREILKSRHYILKFLARRGFVFREGANWCTAHLRWLVHLASEQSPLASADRLVFREYHALLAYKLQRRDELDRQIEHLALEPTLAMAVGRLQCFRGISLHAAMVLATEIVDWRRFERPGQLAAYLGLVAREDSSGPRQRKGSITKAGNSHCRHVLVQAAWTYHYRPHLSVEIKRRQQGQPAAVVAHAWKAQQRLHARYQHLAYRKQPQIAVVAVARELVGFLWAVMQDLPDAAAA

SEQ ID NO: 391817 - protein, 391 aa, unidentified
MVCVGIDVAKDKHDCCILDSEGTTLVDCFTIPNNMDGFKSLLQTIQDCSQKSDKIKVGLEATGHYSYNILGFLLDNDLPVYVMNPLHTNLYRKSLSLRKTKTDRVDAKTIATMLLSDVDLKSYTDTAYHNEELKSLTRYRFDKVQERAKLKQSVSRLVTILFPELEQLVSSIHGTSIYALLREYPGAKQISEAHLTRLANILVKTSRGHYRKNKATHIRDAARTSIGSVMPAKSLELKHTIKLIQELTSEINEIEDAIRKIMDELKPPILSIPGMGFHSAAMILAEVGDFSNFNSPDKVLAYAGCSPSTYQSGKLTNCYAHMEKRGSRYLRYALYTATKYVCYWNPVFTEYLTKKQAEGKHYNVALSHATKKLVRLIYALQKSGKAYLAVT

SEQ ID NO: 391818 - protein, 345 aa, unidentified
MTEAYDGRQVVGMDLHRRRSVLVRMTEDGRKLETVRIENSPAALRSVLARAGKNPRVVVEATYGWYWAVDVLEAAGAEVHLAHPLGVKAFSYRRVKNDERDCADLADLLRLGRLPEAWIAPEPVRALREVTRYRHKLAGQRTSCKDQVHAVLAKAGIPVTRSDIFGRGGGIWLDGLPLPQPYAGKIASLRALIAVLDGEIGRLEEQAAAMLAGERGYAAIRQLPGIGPVLGAVIAAEIGDITRFRNPGQLASWAGLTPRHYESDTRVIRGRVSKQGSRMLRWAVVEAIQRAPAGTRPRQVKDAIIARRGAEARGIAKTAAARVMLTQVFYGMRDGHIRRAISQAA

SEQ ID NO: 391819 - protein, 407 aa, unidentified
MAIIDDAGRVVSSNRIGNDVAGFAQLLTMLAESGDTPANPVPVAIETDRGLLVCALRATGRVTYPINPLTASPYRSRHQVSGAEADASATVLLANIVRTDAAAHRPLSTDAELAQAVRLLARAQQDAVWSRQQLGNQVRSLIKDFYSAALEAPAALGRGGLARDARTVLAAAPTPDRSTKPTRPQLRGLQGKSGRQRNIDTEVDRLRTVFRANYLHQPVMAENAMGIQLASLLRQFYAACTAAEKSAEAARAHCEGHPDATTTSFPGLGSLAGARLGETGDDRKRFTDARGLKAFAGSATTTRASGKKTVVLHRQIKNRCLAVVGSIWSMWSLRASPGARHHFDARRAARDWNQHAQRRPFNKFLGQLHHCLQPGCLYDEHRAFHLHTRGLTLNSVKCLVLKLLPPG

SEQ ID NO: 391820 - protein, 430 aa, unidentified
MKSNTQNAKIEAITEKTLVLGIDVGSETHYARAFDYRGVEYSKKPFKFSNTEAGFVTFKAWVLDIKEKHGKDKVIPGMEPTGHYWFNLGKFLQDNEMKPVLVNPHHVKKSKELDDNHPTKNDRKDPKVIAGLVREGRYMIPYLPDGVYADLRTASNIRFQLQAELTRIQNRINRWFNIYFPEYKTVYGKPDAKSGILILKEAPLPEDILTLGIDGVNQIWRDAKLRAVGKARAKTLIEAAEHSVGSKEGVVSARMEIRMLLEDYESRNIRLQEVMGLIEGLVNQIPMAEKLLEIKGVGIKTVSGFLAEVGDIRRFNDPKELQKLAGLALVENSSGKHKGKTTISRRGRKRLRYLLFEVAMSLVAKNPEFRELHNYYTTRRLNPLKKMQSLMAIAAKLLRVFYAILTKNVGYDPKKMVNDIRRPATYAQAA

SEQ ID NO: 391821 - protein, 345 aa, unidentified
MNIIRVGVDIAKSVFHVHGVDRHDQTQWQGKYSRHKWLDAISRKVPAGAEIGMEACASSHYWARELQKRGYHVRLIAAQFVKPYVKSNKNDRVDAEAICEAMSRPNMRYIAPKTVAQQDIQAAHRIREELVGQRTAKANQIRGLVGEYGIVAPVGIQQLRRALPTWLEDAENGLSDSFRILLNGLAEDLQHLDDRVAKLDERIADSVKQDPVAQRLMTLRGVGPLTASALSGALGDAKAFRRGRDFAASLGLTPRQHSTGGRDRLLGISKRGDSYLRKLLVHGARAVLRHVDGKDDGLSHWLKGLASRKHVNVATVALAKKTARIAWALVHNDTDYDNNLAAASM

SEQ ID NO: 391822 - protein, 319 aa, unidentified
MFVGIDVAKAELVVGVRPTGTGWTAVNDDQGVRDLVARMQALGPTLIVLEATGGYELLCVAALAAAGLPVVVVNPRQVRDFARATGQLAKTDRIDAAILARFADTVRPAIRTLPTVEAQALDALLTRRRQLLEMLGAERNRLGQVFGSGKKPVTKSLTAHITFLERAVARADAELDAAIAQSAIWKAQDDLLRSVPGVGPILSRTLLADLPELGRLSRREIAKLAGVAPLSRDSGTMRGRRFVQGGRAPVRAVLYMAAMVAARRNPVIKAFYERLVAAGKPKKLALVACMRKLLTVLNVMVRTTTPWNPEFATMSVATA

SEQ ID NO: 391823 - protein, 424 aa, unidentified
MYRIAGIDVHKRLLVVVIAELRADGVVILERRKFLATPEQMRKLAECLLEWEVEEVVMESTAQYWQPIWGMLEEVWQPARRQRTGAGPKAGKLYLAQAQSNKGRRGRKNDYEDAERLVKRLEANELVLSYVPEPEQRLWRAVSRRKIQLNRDRSRVQNQLECVLEQAHIKLSSVISDLLGVSAQRILRAITEGGSDPVVLAGMVEKNVKATPEELADALSAVRRCRTEYRQLIQMMLDHVKLLDEQMEQLILQAAKLMKPYEDAVQRLAETPGLGVDSGLQIVAEVGPRAEVFPRPGNLCSWVGSIPGEQISAERNASSKSPKGNRQMRRILTEAVQAAVKQKGNIFEVKFRKFITHMDYQEAIWCVVHFMCKIVWKILHDGVRYQERGPAVDAKNAHRRNQKMARHLKAVGYNVLPPVAPMPS

SEQ ID NO: 391824 - protein, 350 aa, unidentified
MLIIGCDFHTRYQQIAMLDTLTGELTERRLDHESGEAHAFYRGLPGPVRVGIEATGPIHWFERLLSELNHELCIGDSAKIRASEVRKQKTDERDAALILELLLSNRFPRIWVPTPQERDLRQLLWHRHKLVRMRTMLGNQLHFLAMSQGLCRKQKLFNKKGQTELLDLCLRPWASRRREELLKLLDQLDPAIAELDRAVLEEAKRREDAVLLMTHPGIGPNTALAFLLAVGPVQRFACSKKIASYFGLNPSEESSGGRRRLGAISKQGNTMVRWLLIETVHHAVRQDLELRQDYQRLKFRRGHAVAKVAIARKLAVRMYWMLRSGAAYAQLVRRQGSPGPTLVETTPSLG

SEQ ID NO: 391825 - protein, 320 aa, unidentified
MLSFCGIDVSKDRLDVMVLPEEQCCSVPNDASGWAALVERLQNFSIIAIGLEASGGYERGVARALLAAGMSVRQVNPFKLRQFARASGVLAKNDPLDARMIASFVGIMPTRPAQRPTPAAELMAEMLAVRRQLSTEKVAAENASRLLEDALLRRLSRRRIGRLAADIELLDKRLVEIVATDAALAHRYRLLTSMPGVGPVLACTLIVLLPELGGMTRKQVAALVGVAPYAFESGTLKGRRCIWGGRANVRQVLYMAAMSASNWNPGLKAFHDRLEAAGKKPKVTIVAVMRKMITTLNAMVRDDVVWADRHSGRNSVTTAR

SEQ ID NO: 391826 - protein, 492 aa, unidentified
MKQRVFVGIDLGGKFHEVQVTAAAGERLGKSFRIGRGRAGLVELEQGLRRVAGAEVEPVYTIEATQNYWLELVHPLKRCGAAVYLVSPSKSAALRTFYRRHTKNDAIDAESMSRLPLVDVDLRPAHVSEPRWDMLRRLVRQSWLVKGQMANRKRRIMTRVLMVYPGYEEVFRDRYCGASLLFCRRYLAPSKARHLGRRRLFTLLCKRAWGKFDEPRAERLWQVIENAPELAVSYDDLQLLVNQDLDLLEAEERSQQALRERIAELYGELDPETRLSTVPGLGDFLAAAITAFIGEPGRFRNADEIVAFSGLCPRLKSSAGTDTANQPITQHGDPVLRGCAYLAAEIARHYDPELQAFHRRLTARGKHYKQASCALGAKILRRCFALLREGRAYEVAHREQMTHRQKEEGKTVRESVHEVAERLNDGSGPSSPEFAAYAPAKVPASTDRTSQPTTGRNQLPRNPVQPRSPSAMTSESWENGDPPTPARRTKSA

SEQ ID NO: 391827 - protein, 315 aa, unidentified
MAMPVSVSKPIVGVDVAKNELVIYHAEVDLLETIPNTKAAIKKWLKALSCKVAIAIEATNIYHLEFADLAHEAGCVVYMVGGYELKHYRESVKIRAKTDALDAKLLVRYLRKEADELRPWTPPSPLYRHLLSLFRRRAALVQARVSLTQSWANEPLLKASFAEQVKSMQRLEGLIEKMISDCLKEAGLLGQLKRCLKVEGIGFLTGARLIATFQRGEFRNSDAFIAFLGMDLRVNKSGQKDGRRSLSKRGDSEARRLLHNAAMAASRTETWKAFYQAQRARGYSTTQALVILARKLARVVFALLKGQSEYQPKVG

SEQ ID NO: 391828 - protein, 310 aa, unidentified
MESVFVGIDVSKEHLDVAVRPSGEAFVVERNAAGLDRLITRLRELSPHVVALEATGGFETVAAAALAGAGLPVVVVNPAQVRAFAKALGQRAKTDPIDAGVIAHFAEATKPQLRPLADEATRLLSDLIARRRQIIEMISAERQRENRITVPRLRKSIARLVKALEKELASVNTDIDDAMRGSAAWREKEDLLASVPGIGSTIARTMIADLPELGRLGRKEIAALVGLAPFARQSGKWRGQSFIAGGRKAVRSALFMGALVAKRHNPVLKAFFDRLVAAGKPKMVALIAVARKLLTILNAIIRDNRPWQTA

SEQ ID NO: 391829 - protein, 387 aa, unidentified
MIYVGIDIAKLNHFASAISSEGEILLQPFKFTNDYDGFHLLIQKLDSLDSNNIIIGLESTAHYGNNLVEFLVKHNYKVCVINPIQTSTMRKNNIRKTKTDKVDTYIIAKTLMMNPHHFFSQHDLSIMHLKDLGRFRMKLIKKRTQGKIQLTSYVDQAFPELQYFFKSGIHQKSVYAVLKEAPSTTDIASMHLTHLSHLLEVSSHGHFKKDTATELRILAQKSVGCNDSSISTQITRIIQLIELLDSQVHDVESEMELIVNSLDSVIMTIPGIGFINGGMILGEIGDITRFSNPSKVLAFSGLDPTVYQSGNFNASHTKMSKRGSRPLRYALINAAHNVVRNNKTFKDYYDQKISEGKSHYNALGHCAGKLVRIIYKMLTDNVPFNLD

SEQ ID NO: 391830 - protein, 329 aa, unidentified
MYFLGIDVSKAKVDCCVFAEGLNGKKKTKVFANIDSGFNSLVAWLLKLNLELKQTIVVLEATSIYHESLAYYLYDQGLQVCIVNPARVRRFAEGLSILNKTDQIDSEVLARFAALAEPDLWQPPSPKIRLIKALMARREVLLTDLQRELNRQEKALSTLTPEAVLKSIDSSITFIRREIAKLDEEIKDHIDHDPDLKGDLDLLTSIPAVGERTGLLMLGLLHSHEFQRASQVAAYVGLVPVQRQSGSSVRGRSTLSKAGSGKVRAGLYMATVVAIRYNPHIKAMYERLLQNGKSKMSAICAAMRKLVHLCFGVLKHQMPYQADYQAKLP

SEQ ID NO: 391831 - protein, 352 aa, unidentified
MKEHSNERVAKVVGIDLAKRSFHGYGVDERGQRVISKTFTRTRLSEFMANLPACTVAMEACGSAHYWARQFRSHGHEVRLIAPQFVKPLVKSNKNDAIDAEAICEAAQRPTMRFVAVKSIEQQDIQAIHRMRSLVVARRTAQVNQIRGLLLEYGIEIPQGRAAVGRCLAEILEDADNGLSDRFRAELRELAEELRHLDTRVDHYDAQIEAIAQSHPQARQLMAIPGLGAKGATALVAAVGEAPRLFKNGRGLAAWLGLVPRQHSTGGRERLLGISKRGDVYLRQLLIHGARAVLRWVERKDDPTSRWATGLKTRRHPNVAAVALANKIARIAYAVMTTGQPYDPAMGALVEV

SEQ ID NO: 391832 - protein, 341 aa, unidentified
MEQYIGLDLSLKETAISVRQNGKRIWRGKCPSDPQLLAEVIRKRAPNATRVVFETGPLSVWFYHGLMAEGLPAICIDARHAKAALDMAPNKTDANDADGLAHLAEVGFYREVRVKQYDSMLTRTLVGARGQLIKIVTELSNQIRGLMKTFGLVVPKGAGRVFEVNVRHLLAGNNGLEQIILPLLEAWRGVRGRAAELDRQLVAVARESAPCRLLMSIPGVGSVVAASFATAIEAPENFRTSRSVGAWLGLTTRRYQSGEVDFEGHISRRGDNHLRGLLYQAATVILTRSRADSTLRSWGLKLREKVGFKRAAVAVARKLAVVMHTMLKTGERFDRSAGASA

SEQ ID NO: 391833 - protein, 402 aa, unidentified
MQQSNTMIRSSITRKRRKARVLPPTAMSGMELLTIRRSTVIGLDVHKHKITVAVLPPAEVHPTESWEIENHPKVVARMATRLAPRGKLIFVYEAGPCGYEVHRQLTQLGYQAVVIAPALVPRRPGDRVKTNRRDAAKLASLYRSGELTKIRVPTREEEAARDLVRAREDTLKDRLRARHRLSKFLLRQGRIHYGTKAWGTVHWAWLRSQRFEFPLSQATCEAYMRAVEEADARLESLEQQVLALAQTEMYRIPVQYLRCFKGIDTLGAVTALVETQDFRRFPKAPMYMDFTGLVGSEESSGDRERRGGITKAGNSHLRRLFVEAAWSYRHRDITSRELAKRRHGCPPAVVQIARNAQHRLHRKFWRLTSRGKLNQVAVVAVARELAGFVWAIAQQFPPQMAA

SEQ ID NO: 391834 - protein, 384 aa, unidentified
MEKSITLHVGLDVHKDSIEIATADIGREGEVRHVGSIGGDLASLDKALRKLTAKGHRLHVVYEAGPCGFVIWRHLTALGQACDVVAPSSIPKRSGDRIKTDRRDAMLLARLDRSGDLTAVRVPGPADEAVRDLVRSREDGVRECRNARHRLKALLLRNGITYTGKSSWTGAHLRWLGTLKMEHPAQQIGFQEYLHSITEATARIQRLEQAMRDTLADWSLKPLVQALMALRGVQLIAAMTLVAELQDFVRFESPRKLMAFVGLVPGEHSSGPKRRQGSITKAGNSAARRMLVEIAWHYQHSPRVSPVIATRHDQLPKEITDIAWKAQLRLHAKFKRLVARRLMKNKAVVAVARELAGFVWAIGCEVQTSGWQGIAAEPAGTAVR

SEQ ID NO: 391835 - protein, 414 aa, unidentified
MSVTLQGVPARVCAGVDWAKDDHAIAIIDPDGEVLDRFAVTHDAAGLKSLVRRLLSAGVDEVGIERGDGPVVEALIQAELTVLVIPPGQLKNLRSRYGSAGNKDDRYDAYILADVVRTDRRRLRPLVRDSAATTALRTTVGARRDLVDHRVAAANQLRAHLQIVFPGATTVFAAIDSAISLTFLERFTTQTQADWLSPKRLGTWLSSESYSGHTDPEILHTRLLTAPYGTIGAEAQTHAVTTLAFVGILRSLNTQIQALAASIGEQLAIHPDAHIVTSLPRSGTVRAARLLAEIGDARGRFPTADSLACLAGVAPSTRQSGKVKAVTFRWGANKELRDAVCDFANDSRHANPWAADLYAKARARGHDHPHAVRILGRAWVHVIWRAWQDNVAYDPSKHGALQALLNCTTTEKAA

SEQ ID NO: 391836 - protein, 367 aa, unidentified
MLTIGVDAHKRIHMAVAVDTAGHEVARWRGANSVEGWRQAAAWAAALGGDVHWGLEGAWNYGRGLAQQLVAAGATVYEVNPRWTAEGRRRARRTDKNDRRDARAVALLVWREAAALPVVAADDETAVLDLLVTEREAAIAEATRLRNQAHQLLLQLDPDYGQHLPRLRTKAGARALEAYTTADPHPLQQQRAAAVRRLARRLRLALEPARDLASQLRALAAPRFAPLAGICGVELLTAAALAGICGVELLTAAALAGILGPGRRFATDAQLAAYAGVAPLEASSAERARHRLNRGGNRRLHAILYRVALTQTRASPLAQAYLARRISAGKTRREAIRARKRHLARVIWRACQACQRSADGVPTSVAT

SEQ ID NO: 391837 - protein, 351 aa, unidentified
MKALYYCGIDLHTKQCHLCIIDQDGNRVDEVRMKNDMPGILKFLEPYSQGLKIAVESTINWYWLVDGLKANGYDVTLAHSAGLSLITGAKVKTDRRDAFKLARLLRLGEMTQAYIYPVKQRPVRDLARRRDDLVAERAGLYVRLRALFMQYNVNTMGLNALKAMTVDEVNALALPAEAKLYASLFIERLPLISEQIVKIETYLSAKDTAAVCLLMTIPGIGPVFARSIALEVGDIDRFATEKHFCSYARLFPGTSESAGKAKRGRRAKEGNPYLKCAFMNAAKIACVYVPEIKALKEKHAKRRGGKALRGNAIIAHRLGIAAYHMLKTGCVFDQEQFISGKSSKATAMPSA

SEQ ID NO: 391838 - protein, 421 aa, unidentified
MLIKYGSEGAAVLFVGDDWAEAHHDIEIEDEAGRVLVRRRLPEGLAGITTLHELIAEHLDPAAEPDQVQLGVETERGPWVQALLAAGYVVFPINPLQVARYWERHSVSGAKSDPGDAHLLAEIIRLDRAHHRQIAGDSEIAEHVKIATRAHQTMIWSRVRQVNTLRSLLREYYPAALTAFGTELASREALVVLTAAPSPDLGRRLSQSRIETLLRRAGRQRNVSATAAKIRAALTSDQLTARPGVIPAYTASTSALLTVLTAMAAQTEVLAGQVEQGFGRHPDAEIYRSQPGLGLILGARVLAEFGDDPGRYADAKARKNYSGMSPITKASGTKHVVLARFARNRRLGDALFLPAYSALKASPGARAFYDRQRARGATHYQALRALANRLVGILHGCLHHQTLYDEHLAWHSNPDKLSPAA

SEQ ID NO: 391839 - protein, 307 aa, unidentified
MLVGIDGSKDQLDVHLRPAAEALTIARDRQGLEQLVARLVAAGPELVVLEATGGFEITVAAAVAAAGLPLAVVNPAQIRAFARAIGRLAKTDRLDAELIARFAEQVRPEPRPVLDEQTQILAELVARRRQIVEMIGMESNRRRQARSAKVVHGIERTLAALQAALAELDQEIDGQVRGSPAWRAAEDLLTSVPGIGKITARTLIAELPELGRLDRPRIAALVGGAPVNRDSGAWRGHRAIAGGRAAVRRVLAMAALSATSWNPAIRALYLRLRVRGRPAKAALVAAMRKLLTIPNAIMRDRRPWQPA

SEQ ID NO: 391840 - protein, 317 aa, unidentified
MSQHSTLIAGIDVAKDTLDLAIHGQAARLCVANDTAGWRRIAAVLHHAEVRRVGLEATGGYERGIASHLRHAGFDVRLLQPLQTKAFARLHLKRAKNDAIDAGLIAACTAMLDTPPDLVDPRLEVCADLLTFVEQTEEDIVRCKTRLEHIRHARLRRIVERDIARLQARVAAELKRIAAALRRFDDLATRFALVLSVPGIGERTAVAVVVRLPELGRVSREQAAALAGLAPFDDDSGTHRGQRHIVGGRGRLRRSLYAAALPAAFRWNPALKALYARLIARGKPHKTALVACARKLLVYANTVVQRGTPWIPQPERG

SEQ ID NO: 391841 - protein, 411 aa, unidentified
MGSGDRTRLLRNVPSGSREKGGSYLISVGIDVAKRTHEACFMDAEGQEMGRPLRFPNTAGGVATLSDRLRRLEQPVSIALEATGHYWLALHERLTREGFPVQVVNPIQTGAYRRTTVRKVKSDRRDSWIIADFHRIGRVRPSYVPDATTIQLRELTRFRLKLARQVGDAKRKALTILDRVFPEYERLFSDVFIVTSRQLLRTATTAEDFAGFDLEELAVLLRRSSRGRFGREKAEVIQMAARNSLGLSSLGPVASLELRWLLDQVEFLEKQIAQVEAAIEELMAAQEQYLTTIKGISTVLAATILAEIGDIHRFNRLESLVAYAGIDPAVYSSGEFTGSQAHLSKRGSPYLRRALWLAATSARRFNPDLKEYFERKTRAGKPYGIVMSAVSRKLLGRIYVVLKENRPYEVR

SEQ ID NO: 391842 - protein, 369 aa, unidentified
MIVIGADTHKRSHTLAAVSEATGRALGEVTVAATRRSFGQLLRWARGVGGERVWALEDCRHVSGSLERFLLARGERVVRVPPKLMAGARDSAREPGKSDRIDAVAVARAAIREGVETLPVAQLAGAELDIRLLVDHRERLVKQRTALINDLRWQLHDLWPELEIPLRALTGPRWQQRLAGRLQRTEQSTRVRVARDELKRIRELTRAITTLEQELAALVAAFAPRLAADPGCGTLTAAKLIGEIAGIGRFASDAKLARLSAAAPIPASSGRTDRHRLDPGGNRQLNCALYRLALNKARHDPETPAFLDRKQAEGKTRREALRALKRHLVRRVYRLLQPPASDTPGRPPIISPAGTTIACDTPYNHFNLT

SEQ ID NO: 391843 - protein, 397 aa, unidentified
MSVVHKKHENLATFHALHRSAIGIDVHSNLIVATYQNREYGSSSLFNENRESGASKTELDAFASWCKAKEAEVLIMESTGVYWQSLYEALENVGFTNKQIVVVNARDVKNKRCSKTDLADAIHLAEVARQETYRASFVPAKEFRQLRCLWRSFFTLKISRKKFLNIMHKQLCQVGCRASSVFSDIRGKKATKIIDCLINGEHGETLYNHIIEITSCKQGKLKATPQQIYDALQADMESEVWFAIRQNMEHIKYLDVQIVEAETNLRDKLKPYEHLMKLLTSIPGIKDITAMGIICELGDDLSQFTSIRRFCKRIGLAPGNNESAGKKYSGRTTPGNKYLKALLVEAASGIGLMKNGFLHEVHQRFKERRGTKKANVALAHKMCRIIFSVLTHGTAYQ

SEQ ID NO: 391844 - protein, 446 aa, unidentified
MANKTRLVKDVQVIEADEHETVLERAGAIDVAKASGKVCVRLPHPSGNGRRLTRVWDVPAMTNAIVELAEELAGLDVQRVVLEATSDYWRPFFYLLEARGLEVWLVNAHDVKQVPGRPKSDKLDAVWLAKLNERGMLRPSFVPPAEIRAVRDYTRLRADLVAERTRHKQRIEKLLEDALIKLSSVADDLLGVSGRAMLEALISGERDPVVLAGLAKGTLRHKHADLVQALTGRFDAHHAELAKVLLDQVDTLGAKVDRLTARINELLAEIPAAAAPQGPDGGAGLGVIDRLDEVTGIGQAAAQAIVAEVGLDMAQFPSDRHLVSWAKLSPRTAQSGPRARSGPVGKGNTYLRSALSQAALSAATTNTFLGQRYRRMAKRRGKPRALVAVARSILVIVWHLLDDPTARFTDLGADYYERRTDNQRRTRDLVRQLQALGHNVTLSPAA

SEQ ID NO: 391845 - protein, 345 aa, unidentified
MKNSNIIGLDLAKNVIQICKIDTHGELISNKAISPKKLKELLAKSTVSIVAMEGCGSCHYWGRLAKSHGHDVRIISPKKVKGFLQGQKTDANDAVAICIAAMQIGMTFSPLKDEERQSLQTLDSSRQFLTKELTALNNHIRAYLYEYGITMPKGRKSLRENIVLVLDSEDERLPVCLKSSLNVLWERYQLTISQLEEVETAKDALVKQLEPCKRLMKLEGIGPVCAAMLYASLGDASEFKNGRQASVYVGLTPKQHSSGGKVYMIGINKQGGNKPLRAALYQGALAVISRLTDKPKTVKEAWLLELVKRTGIKRACIALANKTVRTAWALLATGKVYKPVLLSEC

SEQ ID NO: 391846 - protein, 343 aa, unidentified
MEKIARIGMDTSKHVFQLHGVDANELVVLRRKLRRTEMLAFFAAREPTVIGIEACAGSHHWARELSALGHEVKLLAPQLVKPYVKRSKNDAADAEALCEAMSRPSMRFVPAKTTDQQAALMLVALRDRLVRTRTQLTNAIRGHAAEFGLIAAKGLDKVEPLLVRIAMDESLPALARAIFTVHAEEYAALGARLRVVEAELIAWHRANATSRRLSAIPGIGPVIASLLVMKTPDPHAFRSGRAFAAWLGLTPKDHSTAGKTRHGGITRAGDEALRSALVVGATAVINQARRRDKATAWLAGLLARKPAKLVAVALANKMARIAWKLMVSGEIYATGRMGATTAA

SEQ ID NO: 391847 - protein, 359 aa, unidentified
MDVRDPAKRHVVGGVDTHKDLHVAAVVDERDRVLGSRSFTTTRQGYRQMLAWMGSFGEVQRIGIESTGSYGAGLLRFVQTVGIEVLEVTTPDRHDRRRRGKNDDLDAQNAAHAAFAGQRTVTPRSRDGMVESLRVLSACRKTAVAARRVALQLIQNTIVCAPDGLRDDLRSMTRMQLIRTLAAWRPDLTAYRDVEAAYRITFKSLARRYLELHDEIADLDIMIGAIVDELAPDLVARNSIGHVGAAQLLLAAGDNPDRLRSEASFAALCGTSPVPASSGKTIRHRLNRGGDRHANSALHIIAIGRLRTDPKTKIYVAKRVAEGHSKLEAIRALKRYIAREVFTLIMRRHKTINQTQIAA

SEQ ID NO: 391848 - protein, 434 aa, unidentified
MSTPVLPVEFSQLTAFAGFDWATEKHDVVVLDPQGNRLLKMRFAHTAEGWAELRVKLAPLGKVGVAIETNCGPAVEWLLDMGLAVYPLNPKAAERYRDRHAPSGVKDDAFDAWCFAEALRTEGQNWRVLEPQDPQTQLLRLLCRDEITMIEQRTALVLQLQAALHEYYPAALEAFDNWTVPSVWQFLIRFPTPQRLVQAGKKGWLKFFHTHKLYRPETTEKRIEIFMRADKFMSPSETVIDAKSMLAVALARQLDFLERQIQEYRRRIEELFDQHPSSGLFKSLPGAGVHLAPRLLVEIGVNPKTFASPEGLQCLAGTAPVTRQSGKFRSVKIRRGCNMILRTTVHLWANASRDKCAWAQAYYVQKKHEGKSHAQALRCLGQRWLKIIWRMIQTNTPYDEAKHMQSMLKHGSWVLAMMASAPPMKITILSGKKC

SEQ ID NO: 391849 - protein, 427 aa, unidentified
MKKADLLSTLFVGIDISSRENVVALLDFESSKPILSFAVANNQPGAVDLAQKLADFLNSHRDLSRLMIALESTSFYGIHIANYLSSCQLLMPFHTAVYCVNPKMIANYKKSFIDLGKNDYIDAFVIADFARVGRITIKPWRGSQFLALQRLTRHRLHLAKSLTREKAYMLANIFLKFSEFSLLDEDVQPFSNNFGATATSVLTDFLSTEEIADMPIDTLISYVCEKGHNRFPDPKKTASLLQLAARNSYRLDKCLYEPLTISIASSLNLITTYMAEMKSVNKAIEKTLKGLDPNAYQCLLSIPGIGPVMAAGILAEIGYIEAFKSQDALAKYAGLVWRENQSGQFAAENTRLSKAGNAYLRYYLIEAVSHVKNHCGEFAAFYQKKYDEVKTHQHKRALALTARKFVRLIFGLLAKHQLYSQSGVSQS

SEQ ID NO: 391850 - protein, 464 aa, unidentified
MTKLFMGCDVSKGYADFAVLDEKRQKIEKPFQLDDTRKGHDALESYVKLLLSRYPDGLLHIGVESTGSYENNWLNKMQELSRHLPVKCARINPCGVSKFRDAELIRTSTDEVSAIAIAGYMQAHSEKIIYDQDDVFYTARRQWNSIALMKKVSSQLKNSLQMQLYTSNPGLLNFCKHGIPDWVLLLLAKYPTAADLAKTRVQSIIKCAGISEKKALSVLENIRGSVTSTTDFFTSITIKHLVAQIVSIEQSVAVLESELVKKWEDNPMVKLVSSVKGIGVSSAVGLLINIKDISRFSSSKKLASYFGLHPVYGEGGDGRCGYHMSKKGRVQPRAILYMCALSAIVHNPLIKDYYSNAKRKGLSSMAAIGVCMHKMIRIVYGILKSNTPFDLEIDKRNREKAANKGDVDHQEQKLKRVRRYQPNDIFAPVSLRQAKKRRNTGSQSNKLLNAGSPGSFFKNNTVLV

SEQ ID NO: 391851 - protein, 386 aa, unidentified
MHDGTNLPVPERTGIPGDCATLFVSLELSRSTWVATSLAPGSKKMSKHTLVGDDGRKLLDLLARLKTRAEQRIATPVKVVAIHEVGLDGFWIHRLLEANGVESHVVDPASIAVPRRHRRAKTDAIDGETLLRTLMAWQRGEPRVCAMTVPPSPSEEDRRRISRERATLLRERIQHTNRIRGLLFGQGITNYNPLHKNRRECLEELRTGDGRSLPTHVKAEILREIDRLELVLRQISEVEAERDEMLRLSKASSPAALLMQLKGIGAEFATVLYLEGLFRHFENRRQLAAYAGLAPSPWKSGSIDHEQGISKAGNPRLRTTMVELAWMWVRYQPDSALSGWFRQRVGSERGRTRRISIVALARKLLIALWRYVTHGEIPAGAVMKPV

SEQ ID NO: 391852 - protein, 371 aa, unidentified
MHDAIFVGMDVHKATISVAVADGAHGGEVRHLGNFLNRPDHVGKLVERLSKTGGQRLRFCYEAGPCGYGLHRQITALGHECVVVAPSLIPMKAGDRIKTDRRDAVMLAKLHRAGELTAVWVPDAAHEAMRDLIRARATAVRVLGKARQHLQGLLLRHGRVYAGKKGWTLPYRRWLTTLRFDHPAQQVVLQDYIHSVQDAEDRIARLTKQIEDLVPTWSMAPVVEAFQAMRGVAFVAAVTVVAKVGDFARFDNPRQAMAYLGLTPSEHSSGTAIRRGGITKAGNALARRVLIEGAWTYRMQARVSRKLHDRLEGLPQIVRDIAWKAQVRLCARYRRLAATGKPKVVVTTAIAREMVGFLWAIARQTQIGSVA

SEQ ID NO: 391853 - protein, 318 aa, unidentified
MSDVSMVVAGIDIGKARLDVALHGAADRMAFDNSAAGHRQLIQWLRAAQVVRVGLESTGSYSQEVTGALREAGFEVAVLQPLQVRAFAQYRLRRAKSDPLDAALIATCAALLDKVHEASDARLVPLAEHLRLIEQLEEDVVRAKTRLEAAHLAHVRRFLRREVERLERREAAERILLMKSIAAEPDLLARLQLIQSVDGVGERTALSLLLLLPELGRLEREPIVSLAGLAPFVRQSGKWRGQSRIGGGRDRVRRALYAASLAAAFRWNPAIKALYQRLKTAGKPHRKIMIACARKMLIQVNAVVARGTPWISSRRVAA

SEQ ID NO: 391854 - protein, 313 aa, unidentified
MATETYIGIDVAKDTMDIHVLPTGKTFTAANDEKGIKSVTKLVRKISPKLIVVESTGGYERRIAIALRAEQLPLAVVNPRRVRDFARSLGKLAKTDAIDAFVLALYAEKIRPEVRPLPSEEEQAIKGLIARRRQLIRMRTAEKNRLKLTPIGTVQESIQLLIDTLDKQITQIENDLDEFINADPELKEKDTLLQSTAGIGPATSRALLADLPELGTVSNKQISSLVGLAPMNRDSGKLRGRRMICGGRACVRNALYMAALTAIRYNARIKNVYERLLTAGKAKKVAIVACMRKLLIILNAMARTKEYFSEVLA

SEQ ID NO: 391855 - protein, 354 aa, unidentified
MMDKAVVGVDVSKDWLDLCVDERAERIANTAAAVAAWLDRVRPGLVAYEPTGGHERHLVSGLRQRDIPFLRVHPNEVIAFRRSRGLKAKTDRIDAGVIRAFVGDRLARRALRPSILGDDRLRELAARRRQLVAALQAERCRLDLAAVPIVRHSLEAVIAVLRQSLDALEAEIAAAIAAEAQTAKLAGLLQTIFGIGPAVAAALIADLPELGLLSAKEIAALVGLAPQTRRSGKIRYRERTGHGRPGVRRALFNAARAAIRHPSPFKDFYDRLVTRNGRPGKVALTAVMRKILVAANAVARDGQPWAGRPDHRPAHAALGTPGRAHAKPPAHRAGRVKAAAARSAGARRASLDAA

SEQ ID NO: 391856 - protein, 344 aa, unidentified
MEYFAGIDVSLEQSSVCVVDGAGRIVRETKVASEPEALVRFFRGLGITVIRIGLEAGPLSQWLHAGLVAAGFEGVLLETRHVKAALSAMMNKTDRKDARGIAQLLRMGWFRPVHAKSPGAQEVRALLVARKLLQTKLLDVESSIRGILRGFGLKMGAVSKGRFVARVRELAAGHSMLERITEPMLRAREALRTEYARLHGEMLAIAKPDPVCRRLMTAPGVGALVALTFKSAVDDPGRFTRSRALGAYFGLTPKKYQSGEKDVTGAISRVGDPMVRVALYEAANIMLSRVTRFSSLKRWALDVAKRRGLKRAKVALARKLATVLHRIWIDGTTFHWGKQADAAV

SEQ ID NO: 391857 - protein, 406 aa, unidentified
MKLMYERCAGLDVHKDTVVACVRTGGEHEVRTFPTTTAGLLELSDWLAASGCTRAVMESTGVYWKPVWHVLSDGDVQLLLANAEHARNVPGRKTDVKDAVWLADLLAHGLVRASFVPPEEIHELRDLTRTRRQLVRQRVRHVQRIQKTLEDANIKLDSVISNVVGVSGRAMLDAIAEGETDPSKLAELAHPRLQASRDELLAALRGRITAHHRFMLRAHLEQVDAADKTIASIDAEVERVLEPFRPQVKLLKTIPGVSDQVARTLLSEIGADMTPFPSAAHLLSWAGLCPQLKESACKRQSTRLRKGAPWLKPVLVQAAWAAVRKKDAYYRAQFARLKTRRGPKKAVVAVAASMLTAAYFMLRDGTEFQDLGGNYFDQVDRPRATKNLVRRLEKLGYHVELTENAA

SEQ ID NO: 391858 - protein, 337 aa, unidentified
MLYVGLDVHSKRSSMCILNNNGKIVKQELIKGPWPQLIDRLRGIGQPMSVCYEASCGYGHLYDRIAPLASHVAVAHPGQLRLIFKSKKKHDRVDASKLAKLLYLDEVPRVHVPQMDVRSWRKLIEFRQKLLGKRVAAKNQIRAVLRGNGVTAPRGLWTQKALAWLATLELPSAGEKLALEMALEEMTELTAKIGRVEQELARIAQQHPGVTLLMTIPGVGIRTAEAFCAYVDDIKRFARNRQVGSYFGLVPCLDSSAGRDRFGHITREGPATVRKLLCEASWSCMRFNPTLRSFFQQVMHGDPDRKKIAVVATAHRLCRIMAAMLRTGEVWRERERE

SEQ ID NO: 391859 - protein, 341 aa, unidentified
MENCGIDLHQKSSQVTVVDQEGEVLERASIPTTRAGLERWFGRRERMRILVEASGSSPWVVRLLLELGHEVEVIDPRRVRLIAQSTLKTDRIDADILAELARLRTKLRTLVWQRSETTQRQRGHLRVRRALVEARAGFIVTVRGLLRSFGVRVASCRSDRFAARCQATAIPPELAEVMTPLLDAIHDLDTRIATMDAVVEQVGHLYPAVESFQDIPGVGPVVALAYVLSIEDPSRFRRSRDVPGYLGLRPTLRSSAATVRQGRITKEGDADVRRLLVQAAHAHLRSHADTALKSWAESLIPRIGKRKTIVALARKLAVLMHRLWITGEVYQPFPHDTAKAA

SEQ ID NO: 391860 - protein, 427 aa, unidentified
MHYTQNDKIRQATEGTIVVGVDIGSEKNYARAFKGNGIEITRKAFYFPNTLEGFKSFEEMVTKLTVPLAEKKIIVGVEPTGHYWFNFADYCQGKQMTVVTVAPQHVKHSKEMDDNTQRKDDRKDPRVIAKLVIEGRYCIPYRPKGIYAELRVAYNRRCEIVEAETRAKNRIRRWFDLYFPEYRTVYGSVAAITGIVILKQAPLPQDIVSLGVDGILQIWRANKLRAAGLKRAKTLFEAAQRSICPPDVGRAVRMQLWQLLEEYEYIRKQLQEADIMIGIVTADIPEVNELMKIPGIGLITAAGMISEIGDIRRFDDPRQIQKLAGLAIVVNESGKYKGQSEISRRGRKRLRRILFQAALVLVRSNKEFKTIHDYFTTREKNPLKKKQSLMAVAAKLIRVCFGMVKSGTPYDPTKVLKDIRRTEPKAA

SEQ ID NO: 391861 - protein, 375 aa, unidentified
MSKITRYVGMDVHAETIAVALVEGRQVVRSLGVIPNRAEAIQRLIGKLGDVNSLRVCYEAGPTGYVLYWQLAKLGVSCEVVAPSLVPSKPGERIKTDRRDAEKLARSYRSGDLTAVWVPNAEHEALRDLVRAREAAKKDELRAKHRLSKYLLRYGQRAPQGCRPWTLAWWRWVRALQLDHAAQNVVVLDHIMAVDYEAQRIERLEGAIDEAIKDAPPHMKAAIEALQALRGVAKITAITLTTEFGTFRRFERATQVMSYTGVVPSEHSSGARDRRGAITKTGNAHLRRVLIEAAWHYRHGPRLNLRQKQLQRTLSPRVTEIAWKAQERLHRRFWRLTNKSKPAGKVVTAVARELVGFIWAIGLQAENDAATAAAN

SEQ ID NO: 391862 - protein, 354 aa, unidentified
MTPVSYDPTTYDLFIGIDVDKRSFSFTVRAGNQKTHRKMPSNPEQFYQYIQNHHTHRKVVCAYEAGPTGFGLYDYLIQKKISCFVTSPASIPKAPNERVKTNRIDSGKIAEYLMSGDFKPIRVPTGFYRELRDLVKIRERYTYERKAAKQRIKSLLLYKNLHNAIKSVDSRWSKAYLRELERLECSPAERERLNMLLSDLTYARKNLAVIHRKLRHFCREHEEIHNYMGYLESIPGIGFIIAVTILGTIGDPAHLSNSRELAAFLGLAPSEHSTGDTVTKGSITHLGNKVLRSLLVEGAWATIRKDTQLRQFYYRIRNKHHDHAAAKIAITAVARKMTQIIYRVLKDKRPYIEI

SEQ ID NO: 391863 - protein, 386 aa, unidentified
MDNRKSTVPTVGLDVATVYVAIELSMKNWLLAVQSARQERASRHKLAQGDARGLWAVVEKERAALLGGGHAEVRVVTCYEAGRDGFWLHRFLVAHGAQSQVVDPGSVLVNRRGRRPKSDRLDVEGLLRLVIRHDAGDRHLGRMVVVPSVAQEDARRPTRERQRLLSERTAHNNRIKGLLATQGIYGYQPLRADRRVRLAALRRADGASPAPALQVELERELERLEVIEAQVAALEKARRAALAGAGADDREAQAMRLLMRLKSIAIEFASVLTREVFYRDFANRRAVGSFVGLAPSPFKSGAVDHEQGIGKAGNRRARSTMIELAWQWVRLQPDSDLTLWFKARLADNRSGRRKRQLIVALARRLLVALWRYVTTGVIPAGAQLKR

SEQ ID NO: 391864 - protein, 319 aa, unidentified
MNQSAYVGIDVSKRQLDVAIRPTGKVFGVTNDRRGISQLVKRLTKLQPVCIAIEATGGLERELAYALAAKNLPIAVVNPRQVSNFAKSLGRRAKTDAIDAAVLAHFGEVMKPEIRSLPDAAAQELTAFVTRHRQLVEMMTAESNRSEMASNPVRKLINSLLRSLKEQLLLVDREIRKAISASDLWRHKAELLRSVPGVGEVTTATLLAGLPELGELDRRQIAALVGVAPFNRESGIWKGKRMIAGGRALIRSALYMSTVVAVRRNPMLKNFYERLRAKGKPAKQALTACMRKLLVVLNAMLRHQTPWSGPSHLLSSPAS

SEQ ID NO: 391865 - protein, 427 aa, unidentified
MTQTIPASTFAATIGLDWADQKHDLWIQASTGGKPEHLILEQTPEAIHEWVAKMGARFPNQRLAIAVETSRGAIISALQAYAFIVLFPINPKMLCSYREAFCVSGAKDDRTDAMLLEEYVRFHFAKLRPLQPDTELTRKLGGLVENRRDLVDERTRLVNQLHSLLKTYYPLMEVLFDDLTTLLATQFLLKWPELASLKKAGAVALRKFFYGHNCRSAQTLEQRLQALEKAQPLTTDPALIEPAVLKVKALAGMLKVLHEAIAEIEDHTSQAMDAHPDAPLFRSFPGAGPVMAPRLLVAFGTNRDRFENAQETQQFYGIAPVKKQSGQSKVIHMRYRCPKFGRQTFHENAGHALRKEGWTKEFYDQQRERKKGHHAAVRSLSFKLIRIYFRCWKDSKPYDRARYEKALDTHGSPLSAALKNKVSKPTK

SEQ ID NO: 391866 - protein, 314 aa, unidentified
MILPLRCVGIDVSKHTLDIFDDATGKPERIANAPQPITEQVARWRCGNVFVLFEATGVYDRELAEVLHRAGVRFARINPARARDFARAHGRLAKTDAIDAKMLAGFARTMAPSCEPEPDPARNALSLLAKRRDQLVHMRAQEKNRRSETRDPLMIESIARLIDFLDDEVKAIEARIETLIKAEPAISDDARLMRSAPGIGPVACMQLIAQMPELGRVGPKQVAALAGLAPLNVDSGLYRGKRAIGGGRKRVRDALYMAALNAVRRDNLIKAFYQRLRTAGKPAKLALVAVARKLLTILNAMLRDRNTYLAPRPS

SEQ ID NO: 391867 - protein, 439 aa, unidentified
MNSKSLEAKRHFINGKTIIGIDPAKKKHQAVIIDSIGVPIGNTFKFSNSFIGFHQELFHKLNYHISDLSPDKVVFAVEISINLWQKLCCFLCNKGFTVLMVSPLFTHHERPKINNNFSRTDPKDALAVANCARQGYFNFYRLYPSEQNAMHRLSITYDKLKEHMTQTKQRIRSQVELIFPEFINALDLDTDTARYLLAKYLSPKDFLNMNVFVEAPEIMKISQRQHGEATLKTLKEAAKQSIGINLCNEEIISERITLNCWLGQYILLKEQIKYVLDQLIALAEKTVYFSIISSLKGISDITAARFIAELRDLSYFDHYKKIEAISGLNLKLSQSGQYTGYRRITHIGNHRLRAVIYSMAEETKNHIPEIRIRYLKRQMKQPRYRKNVIASCSNLLKLIVALVKEEHKYEYKEEKQKELLELELKYKEFKEKKKYKKSA

SEQ ID NO: 391868 - protein, 387 aa, unidentified
MTVYVGVDIAKELHYAAIMDDDGAVSNPFPFENNDKGFQSLLSHLTPFKKESVLVGYESTAHYQENLAYFLKQEGYRTTELNPLQTSALRKANLRNTKTDKVDAKLICLALAQHSVTAKERNASCMDDLYSLCRMRMDLVTKRTQCKIQFIAIMDRIFPELAKFFKGNLCINTSYRLIEKYPLPSQIMKTRVDVLTNLFLKASRGRYGRDKAAALKKLAAISVGIPSDVFAFQAQQLIHQIEFYSDQIAAVDQKIDSDPIVTSSLLMTIPGISSYACACILSVIKNINDFDEPCKILAYAGLDPVIRQSGNFNARCTRMSKRGNSLLRYSLIWTAGNVVLNNATFAAYYAKKTSEGKSHYRALGHCAKKLVNSIFHILKYNEAFNLA

SEQ ID NO: 391869 - protein, 350 aa, unidentified
MLIIGCDYHPGFQQIAYVDSETGELQERRLPHPEGAEKFYRDLWEGSVKVRVGMEASGHARWFERLLEELSFELWMGDAAKIRAKRVRKQRTDRLDAQHILKLMLKDDFPKIWVPNWENRDLRQLLWHRHRMVQTRTRIMNQLQAVAINEGVRYKKRLWRDAGRKQLESLRLARWASRRRQDLLEVLDRINPTIAELTQAIENEAEKCCEARRLMTHPGVGALTAVAFVLIIGEAHRFDCGKQIAAYLGLVPEEDSSGERRRLGHISKQGNSLLRFLLVEAAQATARSDGRWRNQFFHLAQRRGRKIAKVAMARRLAVRLYWMWRRGWDYEQLQSFGSHAGQPGYPHGVQ

SEQ ID NO: 391870 - protein, 410 aa, unidentified
MRYYLGVDWADQTHVVWVVDEQGAKVASRAVPHTAAGLSEWGRELDEWRAQGIELWTAIERPEGRVVDFLLDHGVVVYPVNPKALDRARDRFRPSAAKSDPFDARVLAEFLRTDHRHLQALQPSSEAAQELKYLTEDYRRHVRQQTRLVNQLTATLKAYYPRALEVSELTTALARQFLQAYPTPVAVAALTQKRWQRWARAHRLSNARAQELWGCLQRPQLPVPDHVVRAKARLMLTLVEELTAVVAAVGQYREAIDAFFAGLPAAQWIRTLPIGDHGVTAPTLWALLGDAPRRWESWQHLQGHAGTVPVTIRSGQQRVVRFRFACDKALRYVVDQVAFLSLGKSEWARAYYDQQRARGHDHHSALRALGAKWLKIIFVMWDRQIPYDEQHHLATMTRQQLRQRGQKKVA

SEQ ID NO: 391871 - protein, 423 aa, unidentified
MNEKDPSDLIPVAAFVALDWADQKHAGMLSAAGESGEPFELDHSAEAIDLWVAGLRKRFPAGRIAVGLEQSKGALIYALLKYDLFVLYPVNPKQLARFREALQPSGAKDDPSDAALLLELLTKHREHLRPWRPDDPKTRLIGQLAEDRRRLVEDRTRLVNALKSRLKQYFPLALEVLGELDTELACQFLLAWGSLEELQREKPEAIAAFYRLWKCRHPQLIDERLKKIAAAKPLVTDPAILESGRMMVQSLAGQLLSLVEPLLNYDRQLAKLMDEHSDADIFRSFPGAGAALAPRLLAAFGTDRSRLESAGQVQTYSGIAPVMVRSGKTHQVRRRWACNKFLRQTFHEFAGLSLGHSAWAKAYYDQMRARGVKHQAAVRSLAFKWIRILFRCWQTRTLYNEVHYFQQLYRKQSPLLKFMACHP

SEQ ID NO: 391872 - protein, 336 aa, unidentified
MRFIGIDLHTTQITVCYLKTSDEYRFETYGLDEMERFLAGLEEADKLAVEATGNTRWLVNLVKERVSRVVIVNPRDFEVVKQSVKKTDKRDALNLARFLAVDMLPEVRPKSDAAEQVQRMNETRTKFVRLKTSLLNKIHALAVSNGRKLKKESLSSERGLARVMDQEWTPGERLELEIIIEQIGSLKQSIKRMDMAIGEESRKLTGFENLITITGIGERSAGVLLSVIGEVEDFPDENKLASYFGIVPRVSNSNETVNHGRITKRGSKTGRTTLVQCTLVAIRYSSYLKKYYEQVKERRGHGKAKIAAARKFLSIIYNTLKNNWVFADFNNFELAE

SEQ ID NO: 391873 - protein, 349 aa, unidentified
MSLAAISVLGVDLGKNVCSVVGLDASGKVVMRRKVKRETLINLAEKLPPCVVGMEACCGAHHLGRLFAAHGHDVRLMSPEYVRPYVKAQKNDDRDAEGIAEAATRPTMRFVDLKSQDQLDVQTLHRSRDRLVGERTALINQLRAILLERGHVAPKGRRKLEAFLVDLMDERGGAELSPRMVLLVADARAQWAELDRRIAAFNDEFVRWARENEEARRLTTIPGVGAIVASALVAAIGHGETFDRGRDLASWLGLVPRQFTTGGKPKLLGISKRGNTYLRKQLIHGARAALPHVAERDTPLGRWAKALMGRTHHNVAVVAFANKLARIAWAVLRHRERFAVTSTRTPAAA

SEQ ID NO: 391874 - protein, 328 aa, unidentified
MRKSIGIDVSKEKLDLCWLRDRQTRKKKSKVFKNQRASFAQLVTWVLSNTGAEPQDIQITLEATGVYHEALVYYLHEQGFTIFMANPGKAKKYAESIGLTHKTDKSDAAMLSYYGEEQPQDIRLWQPEAPEVRELKSLMRRLSALEKDRQREHNRLESCEISDTSDRVRQSLHEMITVIEVEIEKLKQNIDEHIDRHPPLKKNRQLLESIKGIGEVMSRELTYLFAAKRFKTAKQVAAYMGLIPKMKESGKVKGYTALSKTGPSHLRAKLYMAAVTAKQHNPDIRRQYERLLAAGKTKMSALGAAMRKLVQVCFGVVKNQSEFQVQTA

SEQ ID NO: 391875 - protein, 414 aa, unidentified
MTECGQWFVGIDWGTQELRVCALDAAGAVVGRRSVRYGGAGLTELGSWLETLAGGAMAAVWIAIEVPRGAVVETLLERGCTVFAINPKQVDRLRDHFTVAGAKDDARDAAVLATALRAIPHAFRRLTVDDPAVIELREHARLAAELTAERTRLVNRLRAQLHRYYPQLLALEAELAAPWFLDLWTLAPTPADAARLRPQRLAQLFKRHRLRRFDAAAVLQQLQAPSITVAPGTIPAATMHIRSLIPRLRLVQEQLKACCARLDACCDAVPSSEDPSGQDGEQRDVTILRSLPGAGQIVVATLLAEAPQALRQRDYHTLRLEGGVGPVTKQSGKTRVVLRRHACNHRLLNALHFLAAGAVQWDPHWRAAYAKLRDRGHSRARALRTIADRLLSVLCAMLRTRRPYDPARRRPVAA

SEQ ID NO: 391876 - protein, 310 aa, unidentified
MDDTIGVDISKPTLDAFRLSTREHRQFPNDRAGCAALIRWIGASAVRVVFEPTGPYHRIFEASLVAAGIAAVKVNPRSSRRFAEATGELAKTDRIDAAILARMGAVLDLEGRPAKTETLHDLRELGVARQALVKDRIAATNREQIAVNLVIKRQLRARLKQIGIQLKEIDAAIATLVDTDPGLSRRRDVLASIPGIGTLTAMAILIEMPELGTLDNKQAASLAGLAPMTRQSGTWSGRARIRGGRRSLRTALYMPALVALRFNPDLKQKYQALKDAGKPSKVAITAIMRKLLVLANALLRDDRKWNAKAA

SEQ ID NO: 391877 - protein, 346 aa, unidentified
MGDALLNVSRKRVDVCLLDEHGERVAVTAAPPDADGLRGLAERLAGYGEPIYAALESMNGARFVHDELERYGWRVELADAQKVKGLAPLAATTDRIDAYVLAELARRDLVPAIWLPAPGVRAERERARFRLHLVRHRAALKARIHASLIAHGHPCPVSDLFGTRGRALLDAFELPEAWRTSTDASLRVIAHLDTEIDACERELRRQGAAHPYVPLLMRAPGIGWVLAYTIAAEIGEIERFSGPKKLTGYTGLCPRVYQSGQSDRRGPLAKNGPTYLRWALIEAAVHAARHPAYAAHYEATTQRLGRQRGAKVARVEVARRLAEAIWYMLMRSQTFAPQGPTPALVA

SEQ ID NO: 391878 - protein, 366 aa, unidentified
MLKNIDNQTIDGEEKSKPEVIKLGLDLHARQVTECRQLDGSTPKPAQQWDPSQLLDKVEEWVKAGSKVYSCYEAGPCGYWYHRELTKCGAINYVVAPQPLQNQRTKHQKTDRLDARALLENLESYLRGNRDAMSIVAVPSPEQEQQRSVVRYREQLVRNRRRAEARGRALALTQGILAPVGWWRPAAWKQFKTQLPEWMGSQLENWQEEALSLNVKEQKVRQELEQMVTEILPVGVGALSWITLQLEIRGWERFQNRRQVASYTGLCPGIHNSNGRGREGRINRCGNTIVRYTLIEMVWRLIRWQPDYPPIKKLRNALLSKRGKRRLIVAAARRLAIDLWRLATGRATAQELGLQLSNPTTQKSTT

SEQ ID NO: 391879 - protein, 345 aa, unidentified
MKKIVKQVLGIDVAQKELVVCLGRMYDDWSPELYGTKTFANTIKGFIALLLWVKKLTDERIGVRYVMEATGVYHEALAYFLDEKGYEVSIVLPNKISNYFRTLDVKTVTDKTASETIARFGLERKLDDWQRPKPIFKKLRQLTRERDQLIQARTAAKNQLHAEQSEAEPHESSVARIKKQIALFNKQEQEIKADILELLKQEQDVKKSVTTICTLSGVQVLTAVTVLAETNGFELVRNKRQLTSYAGLDVKEKQSGTSVKGKPRISKKGNKYLRKAMHLPALAAIRCDKRFKAVFTRLVSKHGIKMKAAVAVQRKLLEMIFIIYKTNKPYDKEHLKKLESRLAAP

SEQ ID NO: 391880 - protein, 341 aa, unidentified
MTKITTIGLDLAKRVFQVHGVDATGATVLRKRLRREDVLVFFTQLPPCRIGMEACSTAHHWARELRALGHEVLLMPPQYVKPYVKRNKNDAADAEAICEAVGRPNMRFVPVKTIEQQSVLALHRSRDLLVRQRTALANAIRAHLAEFGIIEAQGLHKLERLTQIVQDETDNRVPAEARNALTALVALVDELNTRIDAIEKQIRTWHTASKASRRLATIPGIGPIIASALTATVADASAFANGRAFAAWLGLVPRQNSSGGKDRLGRVSKQGNGQLRRLLIIGAQAALQCSKSLRAHPWVAALLARKPRLVAAVALANKIARIAWAVMSKQEDFRGLAATPA

SEQ ID NO: 391881 - protein, 361 aa, unidentified
MKKPSQHLIAEVPRKRGQVELTIGIDLGDVWSHYCTLNQQGEVIDRGRFRTTPKAINTWFTDVPHARVAMEAGVHSIWIGEQLEQLGHEVIVANVRELRAISHSDRKSDDVDAEKLARYARLDPEILRPISHRTVEQQQALTLIRARELLVRLRTASINAVRGLTKACGHRMPASSTKCFAQRGQAAMPPGLKLALGPILVQIAEMTLKIKQYDKDIQRLTQTEYVETQAMMTIHGIGHITALTFVLTLGDKSRFRCSRDVGCYLGLRPKRSQSGERDPQLGITKAGNAYLRSLLIECANHILRPHGRDSALRQWGLHLAARGGKQAKNKSVVAVARKLAVLLHHLWTTQQQYVPFYQQAA

SEQ ID NO: 391882 - protein, 328 aa, unidentified
MKAFIGIDIGKDKLDVSWLRDIAKNKKKTKVLQNNPNGFQELVKWLLKNTNLNAQDIVITTEPTGVYSEPLMYWLYEQGFTLLHVNPGKAKQYAKSLGLVHKTDKSDATMLARYGHDQQYSLKAWQPESLEARELKAMTRRLEALEQDLQREENRYEATSFSGASERVKQSILDMISVLKAEIEKLKSEIDDYIDRHPHLKKNRQLLESIKGVGEVTSRIMVCLLACKRFKSAKQLACYLGLIPKQNESGKQVGKTTLSKEGPGYIRAKLYMAAVVAGQHNPDIKEQKNRLIRHGKTKMQAIGAAMRKLAHICFGVVKNQTEYQSQVV

SEQ ID NO: 391883 - protein, 316 aa, unidentified
MAAEVYVGIDVSKAELVVAMRPSGERMTLSNDRAGIKRLVARLSELKPQLVVVEATGGLQRQVVAALWMAGIAVAAVNPSWVRNFAKGRGVMAKTDRKDAELLALFAERERPEARPPADAETQALQDLVMRREQLLEMQVAEKQRLSRAAGTLRKELRHHIAYLEGRIKQLEQDLDQTVRRSEAWRRKREIVRSVPGFGQHFSAMVLAKVPELGTLNRKQIGALIGVAPMPDDSGSRHGRRIIAGGRFEVRNKLYMCAMVAAHHNPVLKQFYERLVARGKPKKLALAAVMRKLIVTLNAMLKTNSLWRPPCPAASV

SEQ ID NO: 391884 - protein, 355 aa, unidentified
MKKRDKYMGMDVHQATTVTCVMDAEGKTVLETTVATEAGPLLRLMDGINGPLHVTFEEGTQAAWLYEVVRGYAKEVIVCDPRRNRLLEEGSKGDKPDARKLAQLLRAGLLRSVYHGHEEATRKLKQLVRAYENLSDDTQRTMVRIKAVYRSRGIACRGQEAYQPTQRKQWLEKLSEPGARQRMEWLYEELDQLAPLRRRAKQAVIREGGTHRAVALLRTIPQVGPLRSALIVATVDTPHRFRTKRQLWSYSGLAVVTHMSSEYQIQEDRVIRSRKPIATRGLNRNCNHRMKDVFIGAATGGAQIEPYRTYLERLEQTGMRAEMARLTLARKIAAVALSIWKKGEVFDPKKLNWTT

SEQ ID NO: 391885 - protein, 435 aa, unidentified
MEEVTDEPLYRDRVCGIDIGKAGLVATIRVPSDRDPSRRAAETRSFGTTKKEVLALADWLRSWQVPAVVMEATSDYWKGPFYRLEAEGFDCVLADAKQVRHLPGRPKRDPSDSRWLAACFERGAVTACFVATPEFRIIRLHTRYRRDLTEERGREKQRAEKLLESAAVKLSSVVTDLHGVTGRDIMDHLIAGERNPKVLAQLARARARRKISELEEALEGAEFFTAEHAALLAAMLARIDRVNEEIARLTAVIEQLLAPYEEQLQQAESMPGWGRRAAQDAVAETGIDMTRFRTGGHLASWAGRTPLDNQSGTRNGRSKSKKGNRYLGGLLGETAVAAGKTQTREGARYRRLSRRRGKAKALVATGNTQLKVYHKLLSNPGTRYQDLGPDYYERRREISRQISHHVGKLGALGFEVTLARIPEPGPDTPGQTQAA

SEQ ID NO: 391886 - protein, 495 aa, unidentified
MKRAHRSLKPKTSSQSKVPSPGPIAPAAQMPVVHPHAGGIDVGASEHYVCVPSDAVPAGESPVRSFGVFTRDLDQLVDWLQARKVKTVAMESTGVYWMVLYEKLERAGIEAVLVNARHLRQVPGRKTDVKDCQWLQQLHSYGLLNGSFRPSQEIGCLRALMRHRSNLVVQKGQQVQHMQRAFQQMNVLLHRVVSDVDGDTGLRIVDAILAGERDPKVLVQLRDYRIKRSTEAEMEAALSGEWRAEHLLVLRQAREAHQFFERQIRACDEAVTAQLQALPSAPPPSPPPPETQPVCRPALPAAGASVKSGKTQGQRKRRKVGGNEPAADLMPELIRICGVDLSAVSGLNMLGILILLSEVGVDMSGWRSEKAFSAWLGLAPGNKISGGRILSSRTPYVVNRVATLLRTLAVTIGRTDTWLGSFHRRMRARLGSAGAATATARKLACIVYHLLKYKEPYQDVNRVLYEERIRRHRVHKLRRQAEELGFEVLENKKAA

SEQ ID NO: 391887 - protein, 488 aa, unidentified
MAKRKMSTFERLKQVNAGEMNRKQRRELGRKVAAGDPGLTIENPNAGGIDVGNESHYAAVPPDRDPNPVREFGCWTEALIQMAEWLKACRIDTVAMQATGVYWIALYDVLEQHGIRVVLVNAQHTKNVPGRKTDVQESQWLMKLHTYGLVRDSFRLPEQIESVRTIWRLRDRHVQDAGRSIQHMQKALTKMNVQLANVISDISGVSGQAIIQGILKGERDLYKLADLKDYRIKASREEIVRSLEGNWREDVLFELQQAVDGYQFAHWQMQACDRKLEGYLASLPTRILEAPAQPEDVAVDPSKKKKKKAARKARGNEPRVELDMKAELKRICGVDLTSIDGISVMTAQTILSEVGTDMSGFKNEHHFSSWLGLTPSKDISGGKTVRRGKKKVKNRVAGALRMAATSLLESDSYLGARYRYLRRRLPTHKSAVKAMAHYLARLVYRMLTKGEAWVDRGAAQFEKRRAQWELASLTARARVNGFQLIPLA

SEQ ID NO: 391888 - protein, 337 aa, unidentified
MVFVGLDAHQGLYVATILDPANERVKQFKVKGSLDKFIVTLRKHLHDRPCRICFEASCDYGHLYDRLKEVAQQVVVAHPGKLRLIYADKRKNDKIDAFKLAKLLYAELVPQVHVPDEVVRSWRRTIELRTTLVHKRTRAKVSQRALLRGCGISMPKKLWSKAGLAWLSTVTLPTPADALHRDLLLDELEHFDGQIKRATRYLDGVGSQHPGVWLLRTIPGVGPRTSEAVMAYIDRPHRFRRNNQIGAYFGLVPCQDQSAGRNRLGHITREGPATVRALLVEAAWWGVRHDPTLKAYFEKRCGKNGARKKIAIVATAHYLARVMLAMLKSGEVWRPAA

SEQ ID NO: 391889 - protein, 408 aa, unidentified
MRLYVGDDWAEDHHDVEVMNEAGKVLAKKRLPEGAAGMSQLHGLIGRHVPEDADDAEVVIGIETDRGPWVAALIAAGYTVYPANPLLASRYRERHAVSGAKSDGGDAHMLADMVRTDSHQLRPAAGDSPEAEGIKVVARTHKTMIWDRTRTVQRLRHQLREYFPAALEAFDDLDAPDALELLAKAPDPARAAKLTRAQVAAALKRARRHHVQDRTGAILAALRGEHLGQPAALTAAYAATVRSLVAVLVTLNEQVRFLEAQVKEHFGRHPDAEIYQSQPGMAAVLGARVLAEFGDDPYRYESAKARKNYAGTSPITRASGKKKVVAARFVRNNRLIDALMAWAFTSMLASPGARAFYDEQRAKGFEHNDALRRLANRLVGILHGCLKTGTVYDEDAAWGHREELKPAA

SEQ ID NO: 391890 - protein, 437 aa, unidentified
MIQAEIERCAGIDVGKKWLAVGVLVGPLDREPRAETRRYGTNVADLEQLRDWLQQQGITHVVMESTGSYWKPVFNILEETLTVYLANPQQVKPRKGHQTDNRDGHRLAHLLRHAMIQPSFIPPRPIRELRDLTRRRKKLIAAGSSEKNRIQKVLEDANVKLGNVLSDVFGVSGQRMREALLEGHAGPEEIARLAQRRARQKIPALVAALQKHRLSEHHRRMIRFRVEHMELLERQILRLDEEIATQIRQIGLARQWELLQSIPGVREDSAATILAETGADMQAFGDAAHISSWAGVCSGNNRSAGKNKSSPTNKGNPWLRGTLTECAQGAAKTKNCFLKEKFWRITAKHGGKRAAAVMAVAHNLLRLVFQVLSTGQPYQERSAGPLEPRQRERMIRHHIRRLGRLGIAVRGPEPAPRRPRRCTTITTKGIARLPASS

SEQ ID NO: 391891 - protein, 424 aa, unidentified
MLEEDQQVEEIVARVAACDIGKAELVCCVRVPHPQHPGRRLQEVVSCSTMTRSLLAMADRLAELGVSKVVMEATSDYWKPVYYLLEAYGHGLQPELVNARDVKHLPGRPKTDRLDAVWLAKVAERGMIRPSFVPPAQIRRLRDVTRYRSDLVEARTAEKQRVEKLLEDAQIKLSVVASDIFGVSGRAMLAALIGGQRDPKVLAGLARSRLRGKLVELEEAFTGYFTDHHARLLTKMLARIDGLSADIAELDAMIEEMVVPFAAAVTKLDEVPGVGRVAASIILAEIGPDMSRFPTPAHLCAWARFAPGIKASAGKQKGTGSTGHGNRYLAKVIGEAAVGAGRTDTFLGDRYRRLARRRGRHKALVAVGRSILVIIWHLLSDPDAHFVDLGPDFHVQRSDPERRKRAHIGQLEALGYTVTLTPAA

SEQ ID NO: 391892 - protein, 387 aa, unidentified
MTKKRGRVIGLDVHPDSFAGAVVEGSDPASAKVLSTSSRVELEQLEQWALRYTRREDTLVLEASGNAFAVATRLRGIGREVEILDSHRAGKVGKVYCANDRVDAVKIARIYLSALSPIVWQPDQKTLERREVFSAYQAVVKESTRAQQQLRSMLNEHCVRLQKGFRLCHPNAIMRLLALREWTPARKMLLQQLHGSLLAARARRTLLRRHMAQEIVAEEALLRLTRLCGINLITLYGVVAAVGEVRRFTHSKKLVAYLGLNPSVSQSGNFEGSGALRRHGRGALRALLIQSGKRLLEVTNPLQKWGLAVAARRGRNKAAVAVARKLCVAVWHVMQGHLIGAIDRLDTLHTKLHKLATELGLPAIKNQGYESKEAFVQKKLYVLRSYA

SEQ ID NO: 391893 - protein, 415 aa, unidentified
MALKIVYKICCGIDVHKTFVVACIASTNDKGVTSYESHRFSTYTSGLKTLLQWLLDRNCKDVCMESTGKYWIPVYNILEKDCSIVLAHPKYVKAIRGKKTDKKDAKWIADLFKHDLVAGSFMPPADIRQLRDLMRYRFKLTCFKSSEKNRLQNCLTVSNIQLGNVVSDTFGKSAQAILDKILENPADTSFDLEPLVFKSLKKKLPELRDAIDGYITPQQAGKLKVIKAHYENLESRKAELEELILALAAPYQQELAILQTAPGISSEYTAIGIISEIGTNMEAFPSAKHLCSWAGLTPTNNESAGKKKSVRVSKAGCYIKPLLVQCANAVVKSNKHPEIRNRYLRLKKRRGHKKAIIAIARMLLTALYHMLKNGENYNAELYRKSDLPPVDREITVEQALMIARNQGYKIKSATA

SEQ ID NO: 391894 - protein, 320 aa, unidentified
MNDIAHNTILGIDISRDHLDGYVLSDGKRFRLTNTSKGHAQLIELLALYPGVIVCFEATGGQEWRLWASLDEAGIATRQLPPAQIKAFAASRGTRAKTDRIDAELIARFLAFRPDAGRQLPHEKLRFLRALCTKRGQLVEMRKRLLAQTKARQKNGTGDPFTGMDGELKTLFETQIAALEGQIGEAIAADPCMARTAQILRSITGVGPVTSWMLIAEMPELGQISGEQAAALTGLAPIAHDSGAMRGKRAIGGGRRAVRHVLFQAALVASHHNKRLKAFADRLRKREKPHKVIIIAVARKLITIANALCKSQKMWDDQPI

SEQ ID NO: 391895 - protein, 343 aa, unidentified
MTKISTIGLDLAKNVFQLHGVDASGAVVLKKQLRRGALEKFFAQLPPCLVGMEACGSAHHWARVIGRCGHEVRLMPPAYVKPYVKRNKNDGRDAEGICEAVGRPTMRFVPVKSVEQQATLAVHGTRALLVRQRTMAANALRAALSELGIVAAQGYEGLRELMAKREEPGEEIPEAMRGALLVLAKHWQALDADERLLERQIAKAARSDQDARRLMEVPSVGPIIASTVLAKVPDAKVFRSGRDFAAWIGLTGKDHGTGGKHRPGRISKQGDRMLRAMLICGASAYLRHQKARGVSDPWLRELLARRPYKVVMVALAAKTARIIWAMLAKGEAYRDRASASAAA

SEQ ID NO: 391896 - protein, 423 aa, unidentified
MGQWGARGVVSLTDRTSIDGNTKVDKAQTAWAGIDVGKTHHWVCVLDAEGNKLSSMKVANDQTEITATIAPVGALADRIVWAVDIIGAPSAMLLALLIQAGQSVRYASGRVVAAMSAAYSGEGKTDAKDAYVIAETARIRRDLTVIDPGTDLVRNLELLTGHRADLIADRVRMINRLRDVMTSVFPSLEREFDYSSCKGALVLLTGYASPERLRRVGETRLAGWLQRRRVRNYAAVAARAIAAARAQSVTLPGQEIAAAMIAELATNTLALDQRLTELDAQIAATLDEHPQAEIIQSMPGFGPILGATLLVAAGDLAAFPSAGHLAAAAGLVPVPNDSGRRTGNLHKPRRYNRPLRHVFYLSAQTSMMRDGPNRDYYLKKRDRGRTHTQAVIALARRRIDVLWALLRDERIYTAIPPTLAQAA

SEQ ID NO: 391897 - protein, 307 aa, unidentified
MDSVKYIGMDVHKEAISIAVLNSSGKLVMECVIETKAITILQFVQGLRGSLQVTFEEGTWAAWLYDLLKPHVTKIVVCNPRRNALLKEGSKSDRIDARKLAELLRSNLLRPVYHGEQGVRTLKELARSYLTISKDLGRVMSRLKAIYRSWGIPCTGKQVYAPRYRSEWLGKIAEVGVRRRAELYYQQFDALRLLRQEARRDLLAEAKKHSAWKLLREIPFIGPIRAALLIALLQTPHRFRTKRQLWTYSGFGIETHSSAEHRYVDGELQRSKKQPSIRGLNRNHNHDLKNLFKSAATIAAAKAGPFQ

SEQ ID NO: 391898 - protein, 341 aa, unidentified
MEISTIGFDTAKNVFQIHGVDSSGNVVLRRQLRRAEVLKTFGKLPPCLVGMEACASSHYWAREIGVLGHDVRLIPPRRVKAYVTWGKKNDATDAEAICEAVSRPNMQFVALKTVEQQSALMLHKVRRLLVEMRTKTENALRSHMAEFGHIAAKGDAGRTALIALVDKGGEWLPTIAQQALSALVRQIRELSDQIAALDASIKVWHQHNAQSQLLATIPQIGPVTASALVATIGDASRFKNGRQLAAWIGLVPSQNSSGGKERLGGITKCGDRYLRTLLVLSATGMIRRIRKDPSRWPWFAKTLARKPPKVAAVALANKLARTVWAMLVSGEIFSDQSAMAQ

SEQ ID NO: 391899 - protein, 311 aa, unidentified
MRFYTKFHPYYCGIDLHARLLYVCILNEWGEKVLHQKIKADPKQLLRLLKPYIGQVVVGVECMHCWYWVSDFCRELKVDFILGHALYMKAIHGGKAKNDKIDSYKIACLMRGGNFPLAYNYPSEYRTTRDLLRRRTHFMRHGASLKAHVVNTDSQYNLPSQSLNLKNVSAREGLRHHYDDPVIQRMITFEMNILDCYVKELKHVESFIEKEARDDFPVLRNIIRTFPGIGQILALTILYEIGDIGRFASVQKFASYSRLVKCKAESAGKIYGTSGNKIGNGYLKWAFSEAAVLYLRGNDKAKRYLKRYKSG

SEQ ID NO: 391900 - protein, 523 aa, unidentified
MTQITTAISSTQSANAPLAPPAMDTVPPESVDLQQRQTLLALQHQLEPNEITYRRARLRGAQRFFGLDIHKDYALTFAVDADLGPVYGPVTVTWERFDAWINKTLTPTDAVVIEMTTNAWETHDHLLPHVHSVTIVHPPSVKLITAAPVMTDKKACEALAMLLAAGLLRPVWVPDAKHREWRQLVATRYDRVVETVQAQNRLHAILHRHQLQGPAGKKLFSASQRDWWLNLPLSPVEKLAVRQALDTLAFSQKHIAEIEAVMAQELLADERMPYLLQLPGIGVVGGMTILAALGPIDRFPDDRNVVGYAGLGGRVHISGKKSWTGAITKQGRIDLRATLISAAQIAKRTHPYWKQVFGRLAPRIGKPKAVVAIARQLLVSIWHILKKHEADQHADASVVAKSFLSLAYDSVGARHLPDGQTAPEFVRRNLDVLQIGKDLQRVKRSRHEILLPPSTQPGAAPAALPKGRGQVQNTKAAQAERQKAAAAKRQALAAQREAAAKGEGKPRKPRSDKGVKRGPRAKT

SEQ ID NO: 391901 - protein, 410 aa, unidentified
MEVIHPRCAGIDVSKRDAKVCVRIAGAGRRGATSTVTTWGAFTNQVLALRDHLIEAQVTLVVMEATGDYWKPFYFLLEDGLNVMLVNARHVKNMPGRKSDVSDAAWLADLGAHGLVRGSFVPPAPIRQLRDLTRTRTAITRERGREVQRLEKLLEDAGIKLSSVASDINGVSGRAMLEAMIAGQRDPAVLADLAKRRLRSKIPALTEALTGRFSEHHAFLARVHLDLIDRHTQAIDEVTDRIEQVIEPFRGFRELICTIPGINTLVADVITAETCADMSRFPTASHLASWAGTCPGSNESAGRVKSTKTRPGNPYLKGALGVAAMSAARSKNTYLGVKYRRIASRRGPMKAIVAVEHAMLTAIWNMTATGALYDDPGPDFYTRRNPDKAKRRAIEQLRVMGYTVTLEPTG

SEQ ID NO: 391902 - protein, 391 aa, unidentified
MLYVGIDVSKDDFSVCFLRPESKNKKEKLPVFKYEQTRKGFKSFLSKLKSFGDKEPLAVMESTGTYHENLRNFMDDEGINVVVLNPASVKKHMDVLSKSKTDEIDARNLAKIAYHFMETVETSNIPQDKQLALRELVRFRQNLVEECSSYKKRLRNYLRLTMPEVLKEFSSMGSVVLLHLLKEYPTKEKMLADPEGVVELLRSHRWKEEDARDLLNNLKESIGGKKDQYGSYEKVILLCVKKISENEEEAEALKKEIEKLLKDYPDHPAGSIPGVGTISLAVIIGEAGDIFRFVTKKHFVSYTGLEPKLRESGRWRGNARISKQGNAHLRHVFYQIASRVIGRSDKYKAIYNNLRDRGKTHKKAVTAIARKMAELAYVLTINDTTFSEEHS

SEQ ID NO: 391903 - protein, 297 aa, unidentified
MAEAKRQGRVARRLRLSRPQFSEYLATRPSAEFVLEACGGAHHWARLASRHGHEVKLLPAQYVRPYRRCNKTDRADCSALLEAAKNPEILPVPVKSPEHQAIQSPHRCRSAWVETRTARINTLRGLLREFGLILPVGAATALKQIPDALDDEALPPMLRPALQSLLDEIHDLAQPIASVEHQLEAISRHHPVIEHLRDISGIGLLTATALYASANDARHFRSGRHLASWLGLTPREHSSGHIRKLGGIGKRGDRYVRMLLTHGARALLLRAGQMQRVGQTPNAPAALGAGDVPPTFE

SEQ ID NO: 391904 - protein, 411 aa, unidentified
MERIVERPGALDVHKASVTACVRIWRERELDEQIAEFATTVQGLLALRDWLEALGVRQVAMEATGVYWRPVWAVLEDNFELMLVNARHVKQCPGRKTDVLDAQWLCQLLEAGLLKPSFVPPKPIRTLRNLTRYRKTQIADRQREAARLHKILEDTGIKLGCVASDILGKSGRDMLDALVAGTTNPAVLADLSRGVLRKKIPALREALEGRFDSEHTLIVGQILAHIDFLDEAIDRLSVEIEERIRPFAAQRDLLMTIPGVKQRTAEVLIAEIGVDMTTFPTPKHLASWAGVCPGQNESGGKKRSGKTRKGSKWLRATLTEAALAATKTKDSYLAAQYQRLRGRRGHSKAVTAVGHSILTAAWHMLTNGELYNDPGGDYFSRQDPDRTTRRLVRQLEALGHNVTLQPQELAA

SEQ ID NO: 391905 - protein, 355 aa, unidentified
MSQTPNTAIAVIGIDIGKNSFHVVGHDARGAIVLRQKWSRGQVEARLANIPPCLIGMEACVGAHHLSRKLASLGHDARLMPAKYVRPYSKGQKNDFNDAEAIAEAVQRPTMKFVATKTAEQLDLQALHRVRERLVSQRTGIINQIRAFMLERGIAVRQGIGFLRTELPTILATRTDALSPRMLRVIEELAGDWRRLDQRIDGLSGEIEALARQDQACSRLMTVPGIGPIISSAMVAAIGTGDVFSKGRDFGAWLGLVPKQISTGDRTILGKISRRGNRYLRVLFVQAAWVVLVRIKNWERYGLKSWIEAAKRRLHHNVLAIALANKLARIAWAVLAKGRAFELTRTDDAGVVRPT

SEQ ID NO: 391906 - protein, 434 aa, unidentified
MLGVGIDWAEELHLVALGRPGEGVVEVARVEHTPAAVEALVARIAGLEPDPAEVRVVIETRHGLLVEALVDAGYTVLPVNPDLVARRRGPARKKDDAEDARIACLLALDQYTELRALVPHGQLAGELRAIARDDVRAARDERRLLNRLRADLAATFPAALTIAGDDLGSPVVLKLLQRWPTAGELAAAGELAAAGHDEVEALARQAKHGWPHRLADRCAQALAGDHFQARDYLVRAKADTIRLACAQLLLLREQRRAWERRMGELLLGDRRRGRAKQPGDDRGPAVPGGEIYLSFPGLGDRLAARIAGEIGDAIGQFDTPNALQCYAGKAPVTRRSGKSELVVASRLACNRYLAEAVQQWAFTSLRTSGWAREFYDTQRSRGKKHHAALRALGNRWLEVLWHCLTKGMPYDENVHVANRNRALGRVNQPTKLAA

SEQ ID NO: 391907 - protein, 436 aa, unidentified
MKLDLILKSRQKAEPVVIGVDVGKHELMAVLRWSDGCFERPWRVSNPNQIGLLRGLIVSLSQGRQLTVAMESTGTYGDALRQAMDDAQIAVHLVSGKRAHDYAEVFDGTPSQHDGKDAAVAAELCALGKSSVWKLDRGDDRSQRIELLVDQMAAAVECRTRWTLRMEGLLARHWPEASAVLGCSAGTMLKAMKHYGGPEALAKDPQARTQLRHWSSQKLSEQKLGELIESARTTTGVRLTRTDVQRIRWCAGEGLTASMEASRCRRELIDLAKDHDLIARQGEAIGVATACVLWRHLGDPRRYHCAAAYRKAMGLNLKERSSGRYQGQLKISKRGSGRVRQWLYLSALRLIRNEPRASKWYRRKLRKGGGGKRRLIMALTRKLALSMWAVSKSQQLFDVDRMLGPTGKKSVRKKAAGKQINRKQIHAKGAIKAKVH

SEQ ID NO: 391908 - protein, 451 aa, unidentified
MTKSKRRHPERDFTPTHPNAAAIDIGSRMHVAAVPPDRDPEPVRAFGTCTGDLQQLADWFACCGVRTVAMESTGVYWIPAYELLEQRGFEVVLVNARDAKHVPGRKTDVSDAQWLRRLHEYGLLRASFRPKGELAALRAYLRQRERLLDYSASHIQHMQKALMQMNVQLHHVVTDVTGETGMGIIRAVVAGERDPAVLATHRDRRCHASEEEIAAALAGNWREEHVFALGQALELYDAYHAKVVECDLRIEIVLRRLRDAAAKPTGRLPPARHRDKTANAPTFDARAALHAVLGVDLTQIHGLGPSLALKLIGECGTDLSAWPNAKHFTSWLCLAPANKISGGKVLSTRTRRSGSRAAALLRLAAVTVGRTQTALGAFYRRLSARVGKAKAVTATARKIATLFYNALRHGIDYADPGASYYEDRYRARVLANLRRRAKSLGYMLHEMPASG

SEQ ID NO: 391909 - protein, 366 aa, unidentified
MSEITRAPIVRVGVDLAKQVIQVHAVDASGRRVAARAFKRDQFLAWCAQLPAGCLVAMEACSSAHYWSRKLRALGLDARLIAAHFVTPYRMEGKNDANDAAAICEAASRPCMRFVPVKTCEQQGVMSLHRVREGLKEERTACINQIRGVLTEFGLVFGKSPKVLRAVLADVIEDASNELSTMARLVMQRAFEHWRELDEHLRWCDRQVGQHVRASPQAKRAVKVFGIGELGASALTAGVGDFKQFKSGHQFGAWLGLAPKQDSSGGKTRLGRITKRGDDYLRTLLIQGAKAAVMSADKRDDPTSRWLAQLTARAGWQKACVAMANKNARILWAVMTREEGFDPNHVSVKPRNPVAVAPSDPAACAA

SEQ ID NO: 391910 - protein, 354 aa, unidentified
MNNTKYIGIDVHQATSVIAVIDSQGRLIGETIIRTEASAIIDFLRGQRGSVQVAFEEGTYANWLYDVIKPHVSKVVVCDPRKNKIDGNKTDKIDARKLAELLRLNALSAVYHGEQSAQTLKEYARSYLSLQQDSTRIMNRVKAIYRGRGIGCRGPSLYSPGKRKEWLGKLKDKGAQCRARRLLEQLESFGKLRLEAQKDLIRESRKLKDYKTLKGIPGLGMIRIALILAFVMTPHRFRNKRQFWTYIGLSVVRRGSSEYEIINGELQRKKRKPFPRGLNNNYNRVLKDVFKGAALTASYRGCFKGLFEQRVADGAAENLALLTMARKIAAITLAIWKKGERFDIKRHQLSEQKI

SEQ ID NO: 391911 - protein, 405 aa, unidentified
MNTGVFVGLDWAVHTHAVCVIDTAGAVLDRFEIAHDREGLAELMHRLARFGQTVRIAIERPSGLIVDALVEAGHHVFPIHPNAVKASRPRYRSHGAKSDTSDAYLLADLLRTDGHRWRKLSPQSDSIRALRALVRSRDDLVATRVALGNQLQSTLEAFWPGAACIFADITSPIGLAFLKRYPSPASAARLREAALGRFCRSQHYSGRRSPAELLARLHSAAVGRAGPLTNEAAAQLVRSMVAVLQPLVEQIVHLTRRIERFVESMPDGQIIMSFPRAGHVCAAQILAELGDVRERFPSLDQLASEAGAVPVTYQSGKTRSVAFRWACNHRLRKAVTCLADNSRHANHWARGIYTAARGRGCDHPHAIRILARAWLRVIWRAWTDRQRYDPALHAGAQALATDKGG

SEQ ID NO: 391912 - protein, 312 aa, unidentified
MDAIYVGIDVSKDRLDVAVRPNGESFVVSRTGAGIDELIERLKPLSIKLVAIEATGGFETVVAAGLAGAGLPVVVVNPAQVRAFAQALGKRAKTDPIDAAVIAHFAEATKPQLRQLPDATTQLLADLVARRRQIVEMIAAESQRARHVTLPRLKKSIARLRKALEKELSELDNDISDHVRGSPVWAEKDQLLESVPGIGPTVARTLIAELPELGSLDRRQIAALAGLAPWTRQSGKWRGKSFIGGGRSSVRRALFMGAMVAARHNPTLKLFRDRLVAAGKNKLVAIVAVARKLLTILNAILRDKTPWQPKTA

SEQ ID NO: 391913 - protein, 342 aa, unidentified
MSVIIGVDPHKATHTAVAIDRAEAEPARARIRATRNQVPQLLQWAEPLGERTWAIESAGGLGYLLSQQLVAAGETVIDVPATLASRIRVLGTGRSDKNDPNDALSVAIAALRAPALREVVAADHAEVLRLLAKRNIDIGKHRTPVVCQLHNLIMELSPGGIAKELNASDAVALLEHVAPSTPAEAARRDLALEVLADVQRLDEQLKASHRRIRTAVTASGTSLTGLFGVGPIIACYLIGFTGDVTRFSSRDRYAAYNGTAPVERSSGGRVVHRVSQRGNRRLNHALHMAAICQIRQTNCDGRAYFERKVAEGKTKKDAIRSLKRHISNAVYRQLLIDADPTK

SEQ ID NO: 391914 - protein, 484 aa, unidentified
MKNRSLYGSGSQEVRACFERAGGPDGVLVVPMDLAKDEHVAMLCLGGGQCLCRPFAVRNSAEGAAYLLERIEGVRRQRGIERQNVLIGGEDPAAYTFNFIHRLRLEGLAFLRVNAAQASRLRNNRRAASDSLALDGIGQALIQQRGRMLESFDGLYCGLKSAARSRRRLVRDETAWKNRIHRNTDILFPGFLDRGLTGIVPFSQASLALMEEDFSCLKIRRCRLDTLVRQLQRHGTRKPEEAAARLKALADEVLPPAPLLIPAEAAGLAVRVRMLRAVREAIAMEENQMARCLVQTPGFYATSIPGLGVVLAGHIMAEYGRPDLWPAADNMASYGGIVPRQTQTGGPSCPARIGHLPLDANRILKDYLLQAAFQTGNTGEHRLRQHYLSVEHRDGKSRLSTAKLLVRILKQVVGSETVYLPLEILRPGPDLPQGRVVACLGDITARLLAKWKPYDLSGIDPSVNRLQQWKESFDDLAASSPSED

SEQ ID NO: 391915 - protein, 407 aa, unidentified
MLFVGDDWAEAHHDIEIQDDQGLVLACRRLPEGIAGVGALHELVADHLGEQDEPDQVLVAIETDRGPWVQALIAAGYTVYPINPLQASRYRERLSCSGAKSDPGDAHVLAELVRLDRAHHRPAAGDSELAEQVKVLTRSHQGLIWSRQRHTNTLRSMLREFYPAALAAFGDDLAGRDALAVLAVAPTPDQGRQLTRSRIQGLLKRAGRQRNLSAAAERIHTGLHSQQLTARPAVVPAYAASVAALVTVIAATASQVEVLAGQVEACFGRHPDAQIIRSQPGLGDILGARVLAEFGDDPHRYSDARARKNYSGMSPITRASGIRKVVLARYARNRRLSDALYQQAFAALTGSPGARAQYDAHRARGATHHQALRSLANRLVGILHGCLTHRTSYDEATAWSHRQPAAA

SEQ ID NO: 391916 - protein, 371 aa, unidentified
MDHYAGIDVSLEYSSVCVVEATGKIVREAKVLSEPEALIGWFGSQGLQLARIGLEAGPQSQWLYAALREAALAVELLETRHVRNALKTMPVKTDRKDARGIAELMRLGWQRPVHCKSLPAQETRALLTTRDLVQSKLHDVEMSLRGTLRGFGLKVGKTTPRRFEARILELVAGQASLQVIAEALLAVRGGLLREFNALEKRVRTMARSDTRARLLMSVPSVGPIVALTFASAIDDPARFKSSKSVGAHFGMTPKKYQSGETDISGRISKIGDRAVRTVTYQAAHVMLTRPLKGCTALKSWAMKLAKRAGMKKAKVALARKLAVIMHRMLADGTTFRQPLSLAPCSAPSRPLRAACGGGQAASLDGACARRS

SEQ ID NO: 391917 - protein, 389 aa, unidentified
MYFIGIDISKYKHDCFIVSDDGEVPFDVFSFENNKQGFELLLEKLNSLDSSKEKRIGFESTSHYTLNLKLFLENHAYTFMEFQPALISQYGKALTLRKTKTDAIDAKTIARWLMTVEYKPYPLSFYHNYSLKSLTRLRFSLIKQRTFYLIRLTDILDHIFPEFKPFFNNRFSLTALHIIEKYGSPTKIATLRSNSYDELRRISRGKFSMQKFLNLKELAKNSVGVSNNIFEMELSCILRLYRQINDEIINIETEITTLTHELNRQCLTIPGIGVLSAAVILSEYGDISKFNSPGQMLSFAGLEPGYFQSGQSEHSGHMVKRGSSHLRCAIMNCCLPLTQFNMTFAEYYAKKRAEGKPHRVAMSHVAKKLIRLIYALETTNQAFDANKLR

SEQ ID NO: 391918 - protein, 397 aa, unidentified
MYIVGIDIAKRKHEAAVIDGEGTIIIKPFSFTNNCSGYNRLLAMLAKAKLPLDEVSFAMEATGHYWLALFTRLQKEGFRVQVINPVQTNSIRSFYIRQAKTDPRDALLIAEVIRFGHFSESTLHPENIYELRELCRGRHAIVSMQADVKRKVVALLDQVFPEYETAFTNLFGDTSMAILQTCPTPKELSEMPFAELCHLIEVSSHKRFRMAKAQELQEIARNSFGFAMAGDVFSTMIRLYAKHLDFLKQQVREMDRKIAEIMDTLDTPITTITGIGPTLGAYILSEIGDISRFSSAAKLAAYAGIDPTMRQSGEYNGVRNRMSKRGSPYLRHAIWLAASSAVLHDPALKLYFQKKRDEGKPYMASVGHACRKMVSIIYAVMRDNKAYTPYIPNEISA

SEQ ID NO: 391919 - protein, 415 aa, unidentified
MFKIIRSKCCGLDVHKTWIYACIGIADSNSRVEYKQARFSSFSKGLKELSEWLAKYECTEVCMESSGKYWIPVFNVLETTCDVTLAHPKYTKPQKGNKTDRKDAMWICDLFMCGMIKRSFIPPADIRELRELIRYRTKLTNMITGEKNRALNCLTVSNLKLDDVFSDVFGKSSSSIIQFMLDNPGVYFDVKPFIDPRCKTPIEEIQAAVDGAMSPAHAVKLRECMSHIDQLESHKHMVEQDIIRLSAPYEQELELIRTVPGFDKNPMTAITILSEIGANMSVFPTAKHLVSWAGCCPRNDQSAKKIKSTRISKAGSCLKPLLVQVANALIKSKNHPEFKERYRRLKARRGHKKAIIAICRMLLTAIWNVLSKAEPYSPAGYLSDHQVSEVRRLTQKQALNLLKSRGYVITDEVSA

SEQ ID NO: 391920 - protein, 420 aa, unidentified
MELLHKRCAGLDVHKDTVVACVRLVSQTRTRREVETFPTTTEGLLKLDDWLGEHEVTHAVMESTGVYWKPVWHVLESTVELTLANANEVKNLPGRKSDVNDAQWLADLLAHGLLKRSFVPEREVEELRQLTRTRTQLVREAARHAARIDKVLQDANIKMRSVLTKVLGGTGRAILRAMIEGESDPKKLAALVKGRAKKKQPQLEKALRGFVRDHHRFLLRQHLDLVEALEKSIEAIEAQIDEVLRPFAAEEAELLVTIPGISHTAARILLAEIGKDMSRFPDAGHLVSWAGLCPRSDESAGKRRSTKLRKGNPWLKTTLIQCAWAAIRSPGYMRSKYHRIRSRAGKMKAIVAVAHAMLVAVYHMLTNKKVYRDLGENFFVQRDAERVKRVCTRQLERLGYAVELRRATVPETATAAVVTC

SEQ ID NO: 391921 - protein, 344 aa, unidentified
MEQFVGLDISQATTQICVVDSKGKKMWQGKCLTTPEDIAKTIKAKSPSAALIGMESGALSPWLWHALKQMDFPIVCIDARHAHGALSVQINKTDVNDAHGIAQMMRTSFFKQVNVKSLDSHRIRSFIGARAQLVGIRTDLKNQIRGVLKTFGVLLSQSDAKGFAGKVQDTISDQPLLRQMVHPLMEVLESVQNQVRALDKLLQNYADGDRICSHLMTIPGVGPVTAVAFTAAVDNPNRFKNSRSVGAFFGLTNKRYQSGEIDHSGRISKCGDRLVRSYLFEAAGTLLTRIKTWSSLKSWGMRIAKRSGMSKAKVAVARKLAVIMHQMWLTGEAFRWSDSDTAAA

SEQ ID NO: 391922 - protein, 343 aa, unidentified
MTIFVGMDVHRAQITYDALDTDSGEVKTGRIAPANRGTVRAFMARLSGEEAVVALEAMTGWRFIAEECVRAGVDVRLAEPAETRLRQDRKRRAKTDKLDARLLRELLMQDRLPQSWIGPAHILDLRAKVRLRKTLVSQRTEWLQRIHAVLFHHGVPVQSGRLARLDARSAHEQLADLELPAVAEQQITVALRVVEHLSDEVHALDLELERFARRQPGCRALMGHYGIGPLVATAIVAELGDARRFSSSKQAVRCAGLDITVHESDVRRRGGHLSRQGSPVLRWAVFEAAQSAARPSSPDHDYYVQVKERLGANRAALTVARKLLRRAHHTLRELGEDAIAPAY

SEQ ID NO: 391923 - protein, 315 aa, unidentified
MEVVLERCAGLDVHQASVVCCVLIGAPGRKTQKLLRSFGTTTRELETLRAWLAEHGVTHVGMESTGVYWKPVYAVLEGHFDLIVGNAHHIKNVPGRKTDVKDAEWIAQLVRHGLVAKSFVPPPAIRDLRELVRHRRTLIETRTAVRNRVLKLLEGANIKLSGVASDVFGVSGMAMLEALASGTNNASEMAGLARGRMRRKHAALEAALEGRMREHQCFLLGMQLRTLDVIDRDLEALDTRIGAQLEPFQAQHRLLMQIPGVDWVTAAAIIAEIGTDMDVFANARRLAAWAGVAPGNYESAGKQKGAGTRRGNVFL

SEQ ID NO: 391924 - protein, 355 aa, unidentified
MKYYSSTTQFNCGIDLHAHQMYVCVMDRQGKKLVHTNIRNNDFEYFLKLVAPYRHDLTVCAECMFGWYWLADACQAANIPFVLAHALYLKAIHGGKNKNDRIDSEKLAHLLRTNLIPPAYVYPADKRPLRALLRQRILYVWRRAELLARIQSHQLAYNRLQIRQTRPNREPWEQQLLAQEDNPIRQLALQNDLALIRHYDAQITALEEQLQRLTRATAARDYTLLQTVPGIGEHLGLTLLYEVGDIQRFPSVKNFLSYCRLVKGTVASAGKIKGLRGAKLGNPYLRWAFGEAAVIAKRDHAVIGPLAQRLEAKMGGNKFKANTVLAIKLARSVYFMLKNHTVFDPERLVAALTTK

SEQ ID NO: 391925 - protein, 333 aa, unidentified
MNYAGIDVSHKELVIVVSVKGKAHKAKTFENTASGHKAIIQLLSKLKGESKVCIEATGVYHFDLAVALSRAEGIEVMVINPKASHNFAKVLMKRSKTDAVDAEILAVYCERMPFEAWQRPADENIALRAIARRIAALTKLKTQTKNQLHALKATEETPVLVIEYTEELIKVVDKQIQVHRDSARKLIQQHDELAEAFALITGIKGIAVASAVQMLGELMILPKDMSAKQWVAYAGLDPRQFESGSSVTKKPRISKAGNKFVRRALYMPALVATCHEPHIKGYYTHMIQDNGLKKIQAVCAVMRKLLHAIHGMLKAKKEFDGTRFYTFPVEANS

SEQ ID NO: 391926 - protein, 423 aa, unidentified
MLGVGIDWAEEFHVVALGSPGEGVTEVVRVEHRPRAVSALVERIAGLEPDPAEVRVVIETRHGLLVEALVEAGYTVLPVNPELVSRRRGPARKKDDAEDARICCLIALDRHAGLRRLIPHGELAGELRSIARDDERACRDERRLLNRLRADLLATFPAALTIAGEDLGAPRVLRLLEHWPTAQALAAASREEIIEFGRAHHSGYLQRFADLVQQALAEDHFTAPGHLVRAKVDTIRLLARQLLLIDAQRRAWEKRMGQLLLGTPACPEDDQPGQAFPGGEIYLSFPGLGRRLAARIAGEIGEHIEQFTTPNSLQCYAGRAPVTRRSGKRDLVVAHRLACNRYLADAVHKWAFASLRRSAWAKEFYDAQRARGKNHHAALRALGNRWLEVLWHCLTTEAPYDEATHIANRNRALSKPPTTRPHT

SEQ ID NO: 391927 - protein, 354 aa, unidentified
MSQTLNTAIAVIGIDIGKNSFHVVGHDARGAIVLRQKWSRGQVEARLANMPPCLIGMEACVGAHHLSRKLASLGHDARLMPAKYVRPYSKGQKNDFNDAETIAEAVQRPTMKFVATKTVEQLDLQALHRVRERLVSQRTGIINQIRAFMLERGIAVRQGIGFLRTELPTILATRTDALSPRMLRVIEELTGDWRQLDQRIDSLSGEIEALARQDQACSRLMTVPGIGPIISSAMVAAIGTGDVFSKGRDFGAWLGLVPKQISTGDRTILGKISRRGNRYLRVLFVQAAWVVLVRIKNWERYGLRSWIEAAKKRLHHNVLAIALANKLARIAWAVLAKGRAFELTRTNDAGVRPA

SEQ ID NO: 391928 - protein, 353 aa, unidentified
MARVSVAGIRTFVEGSKGKTVHIGVDVHKRSYSVALLRSDGAYKEWTAPSSPKALESTLLPLRSRIGAVVYEAGPTGFGLARRLTRAGIPVIVAAPSRIPRPVAATSKTDRLDGRKLAEYAATGMLRPIAVPSETEEGFRALVRRRHRLTDSIRHAKQRIRGLLLQFGISEPAGIDHWGKTAVAEVEQLSLPPGADMTRDSLLRELAFLVQEREAVEENLRRTCRAPEHEERVKALKTVPGVGEIVATTFAAEVFRPGRFRRSEEGTSYLGLAPVVRQSGGGKARAQIRPVGQRRLRSLLVEAAWMWKQRDPAAETFYRRILGRTGLPQKAIVAVARKLAVHLWRLSASPAAA

SEQ ID NO: 391929 - protein, 390 aa, unidentified
MGHNRSRSRQSGGKKAKHPSLLKRINRNAAGIDCGSESHYVAVPPERDPEPVRSFKTFTADLRRLADWLGACKIKTVAMESTGVYWIPIFEILEERGFEVVLVNSRHVKNVPGRKSDVLNCQWIQELHSVGLLRGSFRPAAEIASLRAYLRHRGKLIEGAASHIRRMQKVLVQMNLQLHNVISDITGVTGMRILRDIVAGVTDPMALAAHRDYRCRASVEQIAASLTGNYRAEHLFVLRQNLELFDTFQRQIQTCDGEIESLLRTLAAKQRKPKTPVPSPRCKPKFCDNEPRFEMRDPLYRLAGADLTQIDSIGPYTALKLIAEIGTDMSRWPTPGHFTSWLTLAPKNKISGSRLISSRTQPSANRAATVLRMCAMVDLETGELLQGAVT

SEQ ID NO: 391930 - protein, 351 aa, unidentified
MPRTSTVHAVTTIGIDTGKNTLHMIGLDMRGAIVLREKVSRGRIASRLANLPSCLIGIEAGLATHYVARELAALGHDVKQVPPTYAKPFRQGHKNDFRDAHSVAEAVQRPTTRFVPAKTDEQLDLQALHRVRSRLVSERTAIINQIRGFLLERGIIVRQGLRFLRQALPDILAKRTDVLSPRMVRIVTDLASDWRQLDERIEPVTDEIESLAKSDDGCRRVMTVPGIGPIISSAMVAAIGNGAAFARGRDFSAWIGLVPKQMSTGDRTILGRITKRGNGYLRTLFVQAARVILLRPASWPKHSFGVWLARAAQRLHRNVLATALANKLARIAWTVLAQERNYEARVTKAAA

SEQ ID NO: 391931 - protein, 366 aa, unidentified
MKKTSTVRVNGNMIFKGHKLTIGLDLGDRWSNYCVLDEAGEVLLEQKLATTPEAMKQTFERIPRSLMALETGTHSPWVSRLLKELGHEVLVAHAQKVELISKSKRKDDRHDARTLARLARIDPELLGPVRHRSAKAQIHLTVIRARAELVSVRTALVNAARGLAKPHGERLPKCGTQQVSRELAVGLNAELREVLEPLLKEIESLNERIKEYDARMEKIARESYPQVALLKQVKGVGTQIALTYVLTLDDPHRFRRSRDAGCFLGLRPGRRDSGESQPQMHISKEGDRYLRTMMVQGAHYILGPFGEDSDLRRWGLRLAERGGKNAKKRAVVAVARKLAVLLHRLWVSGEVYEPLRNSHKAMRAVA

SEQ ID NO: 391932 - protein, 345 aa, unidentified
MEKNSVVAVDIAKSVFDLAGSDQPGRVTYRRRLSRGAFLTYIAQLPASTIVMEACGSAHYWARENERLGHAVVLLPPHQVRPYVTRNKTDRTDAKGILEAYRNADIRPVPVKSVAQQVLVSLHRFRSGWIAARTAQINTLRGLLRELGLVIPLGQEKVVPGVRALIEDADSSIPDALRSVLAAACAEIEALSDNIKMAERQLEALAEQTPAVERLRSIPGVGLLIATALVAFVGDIQRFPSGRHFASYLGLTPREYSSGLRRRLGRISKRGDAYIRMLLVHGARSVLCHAKKAKQHDRLRAWALALEKRAKHNKAAVALANKLARIPWAVWKHQSDYVSKLEQAA

SEQ ID NO: 391933 - protein, 489 aa, unidentified
MESIYRRCAGLDVHKRSVSACIRINETEETQKLTATFRTFTTDLERLCQWLEEHGVRQVALESTGVFWIPVWNILERSKAKFELILINPQHVHALPGRKTDQKDCERIAELLQYGLLKASFIPPPAIRELRDVTRRRTHLQGERNRVLNRIRRLLETANIKLGSVVSDINGKTARLILEQIAQGNCDPKALAKLAKASLKNKRTELIGSLNGFYSEHFRWLLSESVQELSYLDRRLEETDKRLAKRLQAHADVMLRLCTIPGVDFTTAAVILAEIGLDMSRFADAAHLASWAGLCPGNNESAGKRYSGSTRKGNRYLRRVLTQSAWSLKRKKDCYLSALFWRVSSRGGSKKAALAVAHRMLIIAYHIIRDGTVYEELGGNHYDRLHPDRSARRLIRRLEQIGFAVSVTQTLPESTPVTEDNSRSPEPPERKRSVGQQRQKKAFPTKHPKREPADPSLCRRCARWGIPCIHARNSALRSPATPATTNPTT

SEQ ID NO: 391934 - protein, 316 aa, unidentified
MNSLPKAYIGVDVSKDLLDVYIHPIMKFHQVENSNKGIADFLEVLVNYDVQQIGFESTGGYENLLLQCTQKAGYEPWPINPAQIKAFKQSEGKKAKTDQLDAKMIALFVAQKTRPYVPLKLSDEALKLKSLVKRRIDLVDACAAEKTRLKHPGQIFCAKDIEAHIEFLEQRINLLAEEIQRMIQDNDDWKNKSSKLESIPGVGKNTASVLVATLPELGTLDKKEIAALVGVAPFTKQSGQYKGASFIEGGRFEPRESLYMSILSGIRCNPVLKEFYERLCNKGKKPKVAMVGCMRKLIVIMNEMIKDNSSWDFKTA

SEQ ID NO: 391935 - protein, 434 aa, unidentified
MDILSKIYPNSAGIDIGSEKVYVSVEGQSVRNFRTFTASYKELSAYLKECSITHVAMEATGVYWITLYDILEADGFDVTLVNPSDSKNLPGRKTDVQDCQWIQQLFSYGLLRKSFVPEDIVRKLRVYTRMREDKLQMASTHVQHMQKAMILMNIRLPEVLSQTHGASGLAMIEAILAGERNPEKLLGYCTTSLIKNKGKDILLALEGNYKEEYIFELQQAYDGYMFYLNQVSKCDTETGKILEEYNSSSNKNYTDNHPIKPIRHNKPKINHLHDLLLGIHGANPTTLPGLTDYSLMRLTAELGNNINQWPSVKNFVSWLGLAPGKHQSGKMNKRSKKKPATRAGQIFKQAAQSLILSKQPGLGAFARRLKARKGSGIAIKATARKLAELYYRIFDKGMVYVETGIAKYEEKIKQQQIMFLHKKANELKMQLTEI

SEQ ID NO: 391936 - protein, 339 aa, unidentified
MAEYYAGIDLGARSSWLCVVDAKGEKQLNRKVPNDPARILDWLDPFRPSLQVVIESTFNWYWIVDLLEDHQIEVKLAHPLYLKAIAYAKVKTDQVDAHTLAQLLRLDYIPEAFIYPRDLRPTRDLLRRRHRLVSWRSDLVRVLHFQLISHNVTTFGRNAIRQLDDRQLRGLLTHPHDRQVGRSILHLIAGLDREIAELEKQVSASVFRKKPVVLLKTIPGIGKILAATIYFEVGQIHRFASDKAFASYCRLAPTVAQSGGVTRQGRNRKQGNRLLKWAFSEAAQLAIQGYPTIREQFEQLLRRKKKRILVKSILAHKLAVAAFHVLHDETPCQPGFLTN

SEQ ID NO: 391937 - protein, 388 aa, unidentified
MIYVGIDIAKLNHFAAAISSDGEILIEPFKFTNDYDGFYLLLSKLAPLDQNSIIIGLESTAHYGDNLVRFLISKDFKVCVLNPIQTSFMRKNNVRKTKTDKVDTFVIAKTLMMQDSLRFMTIDDLDYIELKELGRFRQKLVKQRTRLKIQLTSYVDQVFPELQYFFKSGLHQNSVYALLKEAPTPTAIASMHMTHLAHLLEVASHGHFGKEKARELRVLAQKSVGVNDSSLSIQITHTIEQIELLDSQLFHTELEMANLVTCLHSVIMTIPGIGFINGGMILGEIGDIHHFSEPKKLLAFAGLDPSVHQSGNFQAQRTRMSKRGSRVLRYALINAAHNVVKNNATFKAYYDAKRAEGRTHYNALGHCAGKLVRVIWKMLTDEVEFNLE

SEQ ID NO: 391938 - protein, 399 aa, unidentified
MLAVGIDISKSKSVAAILNQDGSMHTSPFEFHHTQPELDAFIKYILNSKQSATILMENTGHYHYPVLKAFQEAGLPVCMVNAYQIKKFGDMDLRKAKTDKKDAVRIARYALEKSYSLVPYTSMEQKYEDLRFLARQYNQRMLTLKTNKVFLLNLLDETMPGITNILPLTTRTPETSLSVLFINRFKSYDRIKKMGKSRFLDAFEKIARKSRNRQTKTYGLAIYEAALRNITTRGENEYTLAAQDQCLELVCESQKAADSIILKMKTLAETLPEYAVLRSMAGVGNRLGPLILAEIGDIRRFHSGKALNAYAGNDPPPYQSGTFESYNRHISKRGNAALRKYCFEVMQALKLTRPQDDPVYLFLLKKEQEGNPYNVAKMAGVDKFLRIYYARAMETLKQQ

SEQ ID NO: 391939 - protein, 424 aa, unidentified
MPAMKIVHPICCGMDIHKKLIVATIASTGPDGVTTYSQRQFSTMHPDLVRLRDWLVSENCPVACMESTGKYWIPIWSVLEEKVTLTLAHPKYTKAIRGKKTDSKDSKWIADLFKHDLVPNSFIPPAPIRAMREIFRYRYKLVCVRTGEKNRIQNSMTVSSIRIDNVVSDPFGKSARSLMDAILGSGGDFDPKACGLYLEKGLKKKEKEIRESLEGMDLRDEQSVKMQLAYGHLDYLDSMIGRTVDALDLLAKPHEAIIASLMTIPGMSRISAIGIISEIGTDMDAFADAEHLASWAGLTPACNESANKKKSVRISKAGTIIKPLLVQVANAAVRCKDEPYYAVKYERLKRRRGHKKAIIAIARMILVACYHMVRNGETFDPTDIDRKTKCPKYVKASVRSPEEMVEFLTGMGYKVEAPVQSAIC

SEQ ID NO: 391940 - protein, 354 aa, unidentified
MSQPIEVIGGIDTHTDFHQAAVIDTIGQHLATEAFPTTPAGYRDLLEWLRSHGRVLVVGMEGTGSFGAELGRYLRTNQITVIEVDRPDRRARRAVGKSDSIDAYAAATAVLAGRATGTPKHRDGAVEAIRGLRVVRASAVKARTQTINQIKSLIITAPAEVREALRSLTTTELVRRLAVTRPGTDLAAPATAVRLALKRLARRYRHLSEEIADADRDLRILIARTAPGLLALTGVGTETAGQLLVTAGDNPDRLASEASFAHLCAAAPVPASSGRTDRHRLNRGGDRQANRALHIIVLVRMRHDPRTRDYVARRTLEGLKTKDIFRCLKRFVAREVYHHLTSAVSGTAGPSPTA

SEQ ID NO: 391941 - protein, 287 aa, unidentified
MNKIIYIGMDVHSTNFTLCSFEPGYGFEADKIFGQTQIKEDIFNSTVKYINKLKSMRPDVDVVCGYEAGCLGYNLHRKLKAKEIESVILAPTTMAVSRNCSKKKNDYRDAITIAKCLASSAYKAVYIPDDKDEDVRDFIRMRDDHKTALKQIKQQLNAFCLRHGHHYDKTKWTGLHLNWLRKLELSKLQRETVEEYLATYETLTSKIAALDVLIEDIASEERYAEKVNKLKCIKGIKTHTALSFVCEIGDFNRFKSADKFAGFIGLVPGECSSHTLQFKKRNLLKFQ

SEQ ID NO: 391942 - protein, 337 aa, unidentified
MKEVSTVGLDIAKRVFQVHGVDRDGAVVVRRSLRRCELLAWFGKLAGCVVGLEACATAYYWGRELQKLGHEVRLIPPAYAKAYVRRNKTDPADAEAICEAVGRPWMRFVPIKSEAEQAMASVHRVRERLIGQRTMVQNMLRGQMAEFGIVVSKGAWHVKELLAELGDPSRLPEPLRQALLGLSQVLAELDRQIAALDGQILAWHKTNQRSQALATIPGFGPILSSAMTVRVARPERFASGRDLAAWIGLVPKQASSGDTLRLGRISKQGDVYLRRLLVNGAQSVLNSKRAKTDPWIRRLLASKPRLVVAVALANKMARIAWAVMVRQTGFRPVPAAA

SEQ ID NO: 391943 - protein, 361 aa, unidentified
MYIVGIDIGKNHHEASIVSPEGKQIGRSLRFATTHKGADSLMSFIFKNIGNSPCVFGMEATGHYWYPIYSFLKAKGYTIYVINPIQSDSLRKMYIRQTKNDSIDSFLIAEVIRFGQFGTTSMADENILAMRQLCRYRDSVISSRTEIKLRIGTIMEQIFPEYEKQFSSLWVSTSMGILEKYLTPENIENAPIDELFEITKDKSHNRLTKAKAISIKEAAADTFGIKIAQDAFSFQLKQLIDRMNFLDKQIEALDCQILEYYEKFDCYLHTIPGIGMIAAATILAEIGDINRFKSSSALVAFAGIDPTVRQSGEFSSTHNHMSKRGSPYLRHAIFLAATTCPFHNSPLMPITKRSVSRANTI

SEQ ID NO: 391944 - protein, 424 aa, unidentified
MKVTYQTCCGVDVHTSFLVATIVKTTGGIEPSYQKKRFSTFNNSILEFKQWLLDNDCHDVCMESTGKYWVPVFNLLEDDINVVIANPKWVKAVKGNKDDTKDSKWIGDLFRLGLVKGSYIPCKIVRILREYTRYRCKLVSCRSSEKNRYQNALTVCNVALDSVVSDIFGKSSTSIIDYLLEQSGTSINHEEIASKLLRSLKSKEDAVIESVEGYQMTDAQKYRMRLVRAHMDYITAEINDVDKMIENMISSNTDFENAVQFLCTIPGVKRDSAITIISEIGTDMSQFSSSKRLCCWAGLTPGSNESAGKKKSVRITRAGVYLKPALVQCAHAAVKSDKSPYYKKKYESLVKRRGKKRAIIAIARMILTAIYQMLSTGEQWNPSDLYKIDMPVALVEKQKAKAIKQAKKLLQREGLLPPDEPLAS

SEQ ID NO: 391945 - protein, 477 aa, unidentified
MAASNKKNVMGAAAPLAGPAQPGGEATEVAEERVEVVTYAAAIDVAKASGMVCTRVPGSRSDRKRQTVWQVDATYASVIALMDHLRCEGIQRLVLESTSDYWRCWYYLAEAVGLEVWLVNAKDVKHLPGRGKSDRKDCVWLCKLNERGMLRRSFVPPEEIRDLRALTRTRSRLAQDQVRHQNRVEKVLEDALLKISGVISDLFGTSGRRFLDALVAGERSPAALAALGDRRLKASPQRLADALTGRFRDVHAFEIATHLRLIDTINDEIARLDERIEQQLAAIAGVAPACTACGLIGGGHAPGCASDGTPVLSLIERLDEITGVGVRNAQVIIAELGTDMSVFPTAGHAAAWARLTPRTFQSGNTTRPGRTGKGDPYLRGALGQSVMAAARTDTRIGEQYRRTARRRGKQKGIVAVSRVICEIAWLLISDRGARFTDLGPDYYSIRSPHSQTRSRIREIERLNPGMKVTLTPAATAA

SEQ ID NO: 391946 - protein, 466 aa, unidentified
MPNETSANANKIAKKELARRLRSADPGLEVVHPNAAGIDVGNGSHYVAIRPDRDPEPVRRFACFTADLYRMAEWLRSCGVKTVAMQSTGVYWIPLYDILEEFGFEVFLVNARHTKNLPGRKSDVQESQWLLKLHTHELLNNSFQPSSDIRVLRTYWRLRAAHATGMATCIQRMQKALTQMNIQLANVISDLSGTTGQAVVRAILNGERDPQKLAELRDWRIHATKEEIAKSLQGNWRPELLFIVRQQLEMYEAYQRQIAECDQQLQEHLASFASAPSTSGDRCNPPQSKKSKRYRYMPQFPLSNELMRISGIDLTQIDGVDAMTAQTLISEVGLDMNRWKTESHFASWLGLCPDNRISGDKVLSRGTRRVINRAATALRIAASTLIRSKTYLGAQYRRLRTKLGAPKAITAMAHRLARLVYRMLKYGQKYVDKGADYYEQRSRKQQINFVRKKAAQLGLQVTIAQS

SEQ ID NO: 391947 - protein, 369 aa, unidentified
MKNNTVPSVVSTTPAAIGACGFTLGLDLGDRSHHVCVLDATGQIICEGALSNTRPALAQLLADFPRATVAMEAGTHSPWISRYLTGLGAHVLVANPRKLHAISRSERKCDRRDAQMLARLARVDPALLHPIQHGSAQAQHDLLGLKLRDALVRTRVNLINAVRFTLKSLGHSVRNPSSESFHKTVLADVPADCLPVIQPLLTVLAQVTEQIKGMERDLVQRSQKEYPATQRLQQIAGVGPLTALCFVLKIGDPQRFSRGRDVGAYLGLCPRRDQSGGTDKQLRISKCGDGLLRRLLVSAAHYVLGPFGPPCALREHGQRLAGTGSIREKKRAVIAVARKLAVLLLSLWKHGTDYEPRATASPVLAMVPA

SEQ ID NO: 391948 - protein, 345 aa, unidentified
MLYVGVDFHKNYSFITEMDKDGEVKDQQKIDNDRTILKGYLSKLPSDTKIAIEATCNWYYFYELAEEYDFDISLAHPLKTKAIASARLMNDKISSTTLAHLLRANLLPRAYIPDQETRDIREVLRTHAFLISMRTRIKNRIHAILLKNGVKCPYSDILGKKSLKWLNTLNFRVCYQEAIKSYIRLAEAFNMEIKLLKQTIESLAVDNKYARLLDTHPGISYYSGLLIASEIGDVNRFSNHGKLCSYAGLVPTMHASGGKIRRGHITKQGSKWLRWILIECSTHAVKKSSRYYSLYHRIAYKHGKGTARIAVARSMLRVMYYMLKYNTPYEERSGSKKTPVSASGS

SEQ ID NO: 391949 - protein, 412 aa, unidentified
MTAKDQFAAYVGLDWADKKHDVCVQFKNGDRIFHVIEHTPEALDIWLNELHQRAKGRIAIAVELKKGPVVYALQKYPFVSVFPVHALSLARYRQAFWPSGAKDDPQDAELALDLMLRYPHKIKAIEADNPDIRLLQQLVEQRRLLVEDKRRFVNRLINTLKQYYPQPLEWFSHRDSSLFCELIIRWPSLQQLKRARSDTVRHFMNAKGGPAVAYTEQRVASIASAIPLTTDKTVIEANALMATALASQIKLTGDLIRTYDERIESLFDTLPDAELFKSLPGMGPCMGPRMLAALGDNRDRFNSAEEIQNYAGIAPVTERSGQKSWVHWRWQCAKFVRQTFVEWTAKTVNSSYWARLYYQSQREKGKSHQSAIRALAFKWIRIIYRCWKTRTRYDEAKYLLALEARKSPLLKP

SEQ ID NO: 391950 - protein, 313 aa, unidentified
MNQPKSNVFVGVDVSKERLDVAVRPSGEHNSFANDEAGIAQMTECLCRLSPEMILFEATGGWQMNAVNALAARRLPVVIMNPRQVRDFAKATGQLAKTDAIDAAILAHFAEAVRPEIRELKPLEARKLEALNTRRRQIVEMLTAERNRLITAPEWTRPDIEDLIAFLKKRLATINLDINKLIRQSPLWREKDKILKSFPGVGPVTASTMLSDLPELGSLNPKAIAALVGVAPLNCDSGKHQGKRKIWGGRAGVRSLLFMCAKTAVRCNPVIRGFYERLLRAGKLRKVALTACMHKILIILNAMIRDQVCWKTA

SEQ ID NO: 391951 - protein, 366 aa, unidentified
MNTIYIGVDFHARQQTICYLKTETGELVTCELKHQDKQVVQAFYAQFRGQVIVGLEASGYSPWFERMLEELGCEVWLGHATEIRRRARWRQKNDRRDAELILHLMLHNEFPRLHRPAVQSREVLRMLRYRQKLIKMRTMSKNSLQAIALQAGLAKGSRLFTKAGQQELGTAEMSPVLHWQREHWLQLMEPLNQQLLETMVWFKAQSKDDVCITRLRTHPGIGLLTSLCIVHTLQPVTRFRNTRKVAAYAGFDPIERSSGERKCFLGISKAGSRLLRYLLVEAAQTAVRKDEDLKRFYKRLAERRGRPKAKVAAARKLLIRAYIMLRDEIDYAEFRHRAVAARLARRGQGPSNVPEVLIGQPASPEQ

SEQ ID NO: 391952 - protein, 409 aa, unidentified
MFFVGVDLSDETFDSSMVDASGNVVSISVFDFNDDGFYSFIDWLRKHKLSSENCLVGMENPRSRLVDFLIQRQHTVLSVNPKALSRYRESRFPSNAKSDSDDAHLIADYIREHQKVLRPICIPDEKIRELRLLLEDRDRLVRQKVRFSNQLTHALKDYFPQALDAFASIDNKCALEFLVRVDTHQQVKSMSPEDMEWLLDECRCYQRKSRKRFRDAIKQRTSEIPQEIVRAKTILKNTLVGHLILIIKNIEQYDKLIKQVMSNIPNGDIFKSLPGADYLLGAKLLVLYASRDFDSANEAQAFYGTAPYTASSGKYRAVRFRTGCNKFGRNTFQQLACASIKTSQWARRRYNRKRQEGKAANHAFRCLANLWVKVTFAMWQTKTNYEEDKHMASIATHFINQPAFVLEKD

SEQ ID NO: 391953 - protein, 327 aa, unidentified
MGSTGTTVQTHHYQKEGVPMRHVTRIGIDLAKHVFQLHGVDDRGHTVLRRRVSRTELPPFVAQLRPCLIGMEACGSAHYWARTLTALGHDVRLIAPQSVAPYRKNDKNDGNDAEAICEAVGRPHMRFVLIKTVEQQAVLTVHRARQLVLAERTALVNQARGLLAEYGLIVPTGIGALRRTLPELLATPALPALAREVFADLADRWRALDERIAAYERRVAQVAHQTETAQRLLQVPGVGPVTATALVATVGNARASKNGRQFAAWLGMVPRQHSSGGTRRLGRITKRGDVYPHLADSRRARRHAAARAAHRWDQPLGPGSQSPTRVQ

SEQ ID NO: 391954 - protein, 322 aa, unidentified
MTAYLGIDIAKKKFDVALLRPDDKYRSKTFANTAAGQAALLAWVARQHDGPIHACLEATGTYGEAVATAMADAGYVVSVVNPAVIEAYGRSQLARTKTDPTDARLIARYCARERPPRWTPLPREVRELQAIVRRLAALEGMRTQELNRLSAEPAEPVRASIQHVVDVLDDEMRVLRERLHQHFDDHPDLRHQRDLLTSIPGIGEATAAILLAEFGRLGRFRQARSSAAFAGLTPRQRESGDSVHGKARLSKLGASAIRKALFFPALAAMRFNPIARRLADRLRARGKHKMVIVGAIMRKLVYLAHGVLKNDAPFRADYAKTT

SEQ ID NO: 391955 - protein, 340 aa, unidentified
MKLYTAFDLHANNSYAAIVDEDGRKVAGRKLSNDPQVVLSFLEPHRKAIKGIVVESTFNWYWLVDKLMDSGYKVHLANTTAVQKYNGLKHCGDKEDAFWLAELLRLDVLPEGYIYPQSERPIRDLLRKRAHLVRLRTSLILSLQNIVDRNCGTRIKVNDIKRRREDRVAPFFDSSDDLSLTGRVSKEAIDFFTVKILEIEKFVEGKLELEKPYQYLLSISGIGKILGLTIMLETGPIERFAKVGNYVSYCRKVSTRWTSNDKTKGKGNKKNGNKYLAWAFSEAAEFSRRYDAKAKAYYNRKMQKTNFMVAHNALAHKLARAAYHIIRDQVPFMPDKLFTS

SEQ ID NO: 391956 - protein, 321 aa, unidentified
MQAVTTIGLDIAKSVFQVHGVDAKGSVVVRRQLKRRPVLAFFEKLPPCLVGLEGCASSHHWSRELQKLGHTVRLMPPAYVKPYVKRQKNDATDAEAICEAVSRPNMRFVPTKTPEQQSCLMLHRTRHLFIRQQTAVINAIRAHLAELGIVAPVGRRGVEELLKVVADPSDERVPDVARACVAALGAQLRMLKAQILEFDRRIMAWHRSNAASKRLDAIPGVGPVLATALAACVADPRAFRSGRDFSAWIGLVPKQHSSGGKDRLGAISKKGDRYLRGLFTAGALAVIRYAKIHGTTHRPWLTALLARRPTKVAALHRCTSA

SEQ ID NO: 391957 - protein, 314 aa, unidentified
MSQPNFVGIDVAKDTVEVACSDASTHSFTNNEAGHAKLVRWLTRKAVALVVLEATGGYEQACALALASAGLPVSVLNPRQARDFARAMGRLAKTDRIDASVLAEFAAVLHARGHQPRPLASTEQRELGALVARRRQLVTMLVSERQRLGVAHVRAKPSIEAVIALLLKQLADIDNDLQHALKERHADLSGLLQSVKGVGPTTASTLIAELPELGLLTRKQITSLVGLAPLNRDSGTFRGQRHIFGGRASVRRVLYVATLVATRFNPAIKTCYQRLVAAGKPKKVALVACMRKLLITLNAITRTKTPWRSDFGSA

SEQ ID NO: 391958 - protein, 338 aa, unidentified
METYAGIDLHSSNNFIGVINDKDKILYGKRHPNRLDDVLRALDPFKDSLQGVVVESTFNWYWLVDGLQEHGFPVHLANPSAIQQYEGLKFTDDQWDSFWLAHMYRLGILPEGYIYPKEHRAVRDLLRRRLLFVQHSTSHILSLQSMISRNLGFKMSNNEIRKLKPEDIEDMFACPNLVFMAHNSLAAIKFLKKISLDIEKKVKSQVKMRKEFEMLLTIPGVGNILGLTISLEVGDIGRFPKVGDYSSYCRCVESKRISNGKKKGENNKKNGNKYLAWAYVEAAQFSRRYCVKAQSFYQSKEAKTKPVVAIKALSNKLSKASYYIMRDQVAFDEEKLFG

SEQ ID NO: 391959 - protein, 377 aa, unidentified
MSKVRFLGLDVHAETIAVAVAEPHGEVRSLGIIPNQPESLRKLVKKLGPADELRACYEAGPTGYVVYWQLTALGVRCAVIAPTLVPVKAGDRVKTDRRDAEKLARCYRAGDLTPVWVPDAAHEALRDIVRAREAAKKDQLRARHRLSKFLLRHGRRPPVGTKAWTQKYLAWVKQAVHFEQPAQEATLLDYVHEVDHVADRVVRLDQAITEAVALAPTAMRAVIDALQALRGIALTSAVTIVAEVGTLSRFTRPRQLMGYGGLGPREASSGGRTWRGGITKTGNAHLRRIVVEAGWAYRHRPAVSPLLKKRHAGLSEPVKAIAWKAQHRLHGRYRKLLGRGKCPQQAVTAVGRELLGFIWAIGVAVEAEQRPVRSRAA

SEQ ID NO: 391960 - protein, 408 aa, unidentified
MKTLHKRCAGLDVHKAEVVACLRLISKRKVEREVRRFPTTTQGLLVLTEWLESAGCTHVAMEATGVYWKPVWHILEGHFVLILANAAHVKNVPGRKSDVNDANWLADLLAHGLIQSSFVPPPAIQELRDLTRTRKQLTREIVQHVQRIQAVLEEANIKLCSVITDIMGVSGRRMLKALIAGETDAEKLAALGHERLGCTRAELVQVLTGCVREHHRFLLEQHLRTIEQLEDSVAAFDARIETALSPFHDIVERLKEVPGLGATAIETVIAEIGIDMSQFPSAGHLLSWAGFVPRLDESAGKRRSTRIRKGAPWLKPVLVQAAWGAARKKNSYFQAQFLRLKARHGAKKAAIAVAASILTTVYHMLRDGTCYQDLGPEHFTRRNPAKAAARLANRIRNLGYHVEIRAAA

SEQ ID NO: 391961 - protein, 402 aa, unidentified
MNCVGIDVSKGKSTIAVMRPFGEVVVSPFEVCHTASELSELARLLKSLDGETRVVIESTGNYHAPVAWLLHDAGLYVSVVNAMLVHDYGNNSLRRAKTDKKDAVKLANYGLDHWLILPRYVPEEDTRLMLKTCYRQYQQYSKVQTMLKNNLISLLDTAFPDANRLFTSPPRADGSEKWVDFVAAFWHCECVCGLSEKAFTAKYQKWCKKHGYNFSKDKALDIYASSCGHFGVMPKTDTAKLLVEQAVSQLRATSAALAALKQEMQSLAASLPEYPVVMEMFGVGPTLGPQLMAEIGDVRRFHSKKALVAFAGIDAPPYQSGQMDVRSRSISKRGSASLRRTLFLVMGVILQHAPMNEPVYQFMNKKRSEGKPYRVYMIASANKFLRIYYASVKAYLDSLEHD

SEQ ID NO: 391962 - protein, 341 aa, unidentified
MDYFIGIDVSLETSHLCVVDAAGKVVKEGRAASEPEAIIAWIEDLSLEVMAIGLEAGPLSQWLYVAMTDAKLAAVLLETRQVRDAFRSMPVKTDRKDARGIAQLMRLGWYRRVHCKSQEAQENRTLLAGRKMLQTKYIDLEMCLRGLLRGYGLKIGPTSRKTFEGRVRELAASVPGMEDAIDALLKARAALFEQFRRLDGLITSRARRDERAQLLMTVPGVGALIAMTYVSAIDDPTRFRSSRTVGAHLGLTQRKYQSGETDVTGHISKCGDREVRTALYEAANIILTKPVKGSQLKSWAAKLACRAGMKKAKVALARKLAVVMHRMLSDGTCFEAGLAAA

SEQ ID NO: 391963 - protein, 355 aa, unidentified
MTASYEYHIGVDYHKSYSHLVVQDSAGKTLRSGRVKNDRQSLGGFLERYRENSHAVVEATRNWMVIYDWLDDICDDVVLAHPLKVKAIADAKIKTDKIDATVLAHLLRADLVPEAWAPSDKARELRVALRERMFYVRLRTMVKNRIVTVFDRYPEQTAQLKKLGDLFGKAGRVQLAQVKVSEIDRIQIDRGLDFIGDIDVRIKQSEATIRAMTRANGNVKLLKTIPGIGEFFARLIDAEIDDIKRFRNPKKLAAYAGLVPSTYSSGGKTFHGKIIRQGNKWLRWAFVEAVTPAIVTDPQLRAQYEHLKLRGVNKARVAIARKLLTIAFQILRDQRAYEPRGESTTEGASTISRLS

SEQ ID NO: 391964 - protein, 355 aa, unidentified
MESVKYVGLDVHQSTISVAVINGQGQLLMTSVVATKASAIMELLGGLRGTLHVTFEEGTHSAWLYDVLVRRVGRVVVCNPRKNVLLKSGSKSDQIDARKLAELLRGDLLSPVYHGESSTRALQQLVRSYTALTEDTTRVMARLKAVYRSQAIACAGKKLYAARRRAEWLGKLQEPGLQRRAERLFEELDLLQRLRRQARHDVMAESQKHAAVQWLRTVPFLGPLRAAVLVARVQTPYRFRTKRQFWSYCGLALETRSSADYRFEDGELVRRERACWVRGLNWNHNHELKNVFKSAATTASAIDGPLREFYQRRVDSGIAPELARLTLARKIAAIALVLWKKGVAFEAKQLTMQAA

SEQ ID NO: 391965 - protein, 440 aa, unidentified
MAMRKREDEVFPNAAAVDVGASSHWVAVPPHCTDAPVREVGTMTDDLNGLADWLLACGVDVVVLESTGVYWIPVYEVLEQRGLKPWLVDARQVKYVPGRKSDVQDCQWLQKLMSCGLLRAAFRPAGDVCVMRAVARQREVLLREQASWVQRMQKALVQMNIQLTEVISDVMGQTGQAIIRDIVAGQRDAKALARHRHVRIKASETDIAKALTGNWREEHLFVLKQALAMYDDIATRLRECDERLQELLAERATAAVDLGKTPRAGSKIRATFDARQALANWAGVDLTRINGLGLDSVLKILSEIGTDLSRFANVKHFCSWLGLCPATKISGGKVLSARTKRSSNRVRQALKMAAMSLSHSDSALGAFYRRLCSRMDKPRANTATAHKLARMVYFMLTRGEAFVDQGQQRYEDQQRQRSIASLKRRAAAMGFQLHPVEATA

SEQ ID NO: 391966 - protein, 344 aa, unidentified
MTTIDYIGFDLHKKTISFCAKAQDGTILEEGTIPALRNKLLAWAKARPRPWIGAMEATLFTGWIYDLLKPLAQELKVAHPPMLKAIAVAKKKNDKVDARMIADLLRCNLLPECYMAPVAIRDLRRVLRYRNLVVREATRMKNRIAGLLMETGTAYNKERLHGKAYFSELLGSLQEVPRSVVELLKLSRGQLEFFAAIQRRLLKGLSEHPDLSERVMRLQTIPGVGEILALSWALEVGEVKRFPSIGQAASYCGLTSAQHSSAGKEQREPISKQRNQHLQTILIEAAKLAPRYNPQLATVHQRELQRGNRNQATLAVARKLVAYLLAVDKSGKPFAMRASTQEAA

SEQ ID NO: 391967 - protein, 344 aa, unidentified
MLQSNIIGIDLAKNILQICHISKHGELISNKAVSRQKLKQILANQQPAVVAIEGCGSSHYWGRYAEEFGHDVRIISPKKVKGFLQGHKTDANDALAIANASLQIGLKTSKPKNEEQQTLQTLETSQLFLSRGITSLSNHLRALLYEYGIVSTVGVKGLTKAVLETLDEASLLPECLRSTVNQLWIIYLNLKTELAQLIKTKNGLVRQLQPCKALMGLESVAEVCAGMLYSSIGDGKQFKNGREASAFIGLTPKQHSSGGKVFMTGIDRAGGIKELRSALYQGALSYICRLADEPKTAKQAWLIKLVQRAGIKRSCIALANKTVRTAWAMLRYENKYKQQPLLAI

SEQ ID NO: 391968 - protein, 428 aa, unidentified
MNAEDTIRREQFCQIKDEISGSDDYLVVGIDVAKDKHHAFMGSATGKSFVRKLVFENNLEGFGKLLERSEAVKTQNALSKVVFGMEPTANYHKPLGAHLIGCGCHVVLVTGKAVKYNRELLDGRWDKNDDKDAANVADLVSRGRCLYYDYPSSSINELRQSLSLRRRLKKEEHSVRMRIRNNLLALYFPELDRFYSACESETLAIVRWCLDPGRIAGMDFESFFLMVTRSRRGIAQKRRLQKIHQLAVESVGCAMGPAAEFEAVLLVDKLKAVRGQLKQVADQMQDICLQFADYSYLLTIPGFGPYVAARVLASLANPWRFDSSNQVIKMAGYDLGANRSGRSSDQAVPVISKRGNAELRYALYQAAHVASTRNRDFIGYFTRMLRGRQRERGIKTKMKVKLAAKMLKIAWTLMKKHEAFDPDHLIVA

SEQ ID NO: 391969 - protein, 359 aa, unidentified
MASIASDPADVIVGVDTHKDQHVAVALDGLGRRLGQWSAPATPSGYADLLAWAASLGRVAAFGVEGTGSYGLGLARFLRRHGIVVLEVARPPRKGQRRRQGKSDPVDAEHAARAVLAGSGPVTPKTGEGSVEAIRLLKVARDTAVVAHSQAMITLKATLVTANDALRAELEPRTDFALVTACAALEVSGDLADPDVAMRHALRALACRWLELHEEIKAHTRHLKTLTTRTAPELVATFGIGFDSAAELLCAAGDNAGRVRSEAAYAKLCGACPIPASSGKTSRHRLNRGGNRQANAALFRIVVVRMRWHPATIAYVQRRTAEGLSKREIIRCLKRYVAREVYQLLPVPATATAEPLQAA

SEQ ID NO: 391970 - protein, 391 aa, unidentified
MINIGIDVGKFKHCASVMDDRTGEIVIKPFFFNNDQKGFNLFYSKTKQYIHRKHSVGMEDTGHYMINLTDFLLDKKFTVKFINPRSTCLRRKELGMSAKNDRKDSILIAEMLSEKKFWRSVTRTTQETDKLREITRLYHQLQEQQNEDMNRLQRALDIVFPEVNKLSWTRYSKAYMQFLAKYPTAASIASEDIRNLRNALKTDGRGRRCKLTAEDIKEAAKCSVGEDNIAVALEVQSIIAIISTRKQQIENLENKIEEFSLKLNSPIISIPGISHITGMTIIAEIGDIHDFSDAAHLISYAGMEPLVHQSGKYDAAHMPISKHGSRYLRKALYQAVFTVCKYCPTFNAYYTKKRNQGKTHRCAQGHCVRKLLRVIYKLLANNTVFDENLVR

SEQ ID NO: 391971 - protein, 408 aa, unidentified
MEPIYTSCCGLDVHKRSIQACVRRLREDGSIHQETRTFGTMTRDILEMADWLAAEEVTYVAMESTGVYWKPIYNLLEGRFTLLLVNAKHVKHVPGRKTDVKDCQWLAQLLQAGLLRGSFIPERPQRELRDLTRHRTQLVSEKTRAANRIQKVLEDANIKLASVATDILGASGRDMLRALIHGETDSQKMAELARRQLRSKIPELRPALEGKVTEHHRFMLKGFMDHLEWLEHQIEQFSRRIEEVSRPFAPALEAVASLPGFDQRSAQNVLAEIGADMAPFPSEHHLSSWAGVSPGSNESGGKRKSGKTTKGNRWLRTALVQSAWAATRKKGSYFQAQYRRLAPRRGKKRAALAVAHSLLVVIYHMLKNGSTYKDLGGDYFDKLNQKRLVPYFLKRLNDLGYQVTLKAA

SEQ ID NO: 391972 - protein, 397 aa, unidentified
MYIVGIDIAKRKHEAAVIDGEGTVIIKPFSFTNNCSGYNRLLAMLAKAKLPLDEVSFAMEATGHYWLALFTRLQKEGFRVQVINPVQTNSIRSFYIRQAKTDPRDALLIAEVIRFGHFSESTLHPENIYELRELCRGRHAIVSMQADVKRKVVALLDQVFPEYETAFTNLFGDTSMAILQTCPTPKELSEMPLEELCHLIEVSSRKRFRMAKAQELQALARNSFGFAMAGDVFSTMIRLYAKHLVFLKQQVQEMDRKIAEIMETLDTPITTITGIGLTLGAYILSEIGDISRFSSAAKLAAYAGIDPTMRQSGEYNGVRNRMSKRGSPYLRHAIWLAASSAVLHDPALKLYFQKKRDEGKPYMASVGHACRKMVSIIYAVMRDNKAYTPYIPNEISA

SEQ ID NO: 391973 - protein, 347 aa, unidentified
MNFYTTPHKHYCGVDLHARTMYVCVLSQQGVVLLHRNMRCDAQMFLLAIQPFREDLVVAVECIYSWYWLADLCAKEGISFVLGHALYMRAIHGAKAKNDRIDSHKTAALLRGGLMPRAYVYPAEMRATRDLMRRRLHFVRQRSSLLAHIQMTHHQYNLDSPGKRISYRSNRDGLGAGFEDVSVRDSIAADLALINHYEVVIAELELAVLRQARVHDPNAFRLLTTLPGTGKVLGLTLLYEIHDVRRFPSVQDFASYSRLVKCQKSSAGKSLGTSGAKIGNAHLKWAFSEAAVLFVAKCAQGKTLLSRLERKYAKPKALSILAHKLGRAVYFMLARNQAFDLERFAQS

SEQ ID NO: 391974 - protein, 317 aa, unidentified
MTKIICGVDVSSTSLDAFVGPSGPAHSFRNTAEGIGELAAFCRQQSVDLVAMEASGGYEKQAFALLWAGGVPVALLNPRAVRDFAKGMGLLEKTDCIDARVIAWFAAVKGSMSNAPASAEQQRLKALVTRLRQLTELQAAQRNQRLLVSEATVLELIAELLKVVASQMRMLEAEIAALLASDPLWQKLDQALRSIKGVADRTVARVMAEMPEIGTLSNKAVSKLAGLAPLAHDSGKREGKRLVRGGRRNVRAILFVVAGVVRRHDPDFAAFHQRLSAAGKPRKVIRIALAHKLLVRLNARARDARKAFAGARVCQSA

SEQ ID NO: 391975 - protein, 355 aa, unidentified
MKNQAIQYLALDVHQATVVATVRDEQGTIRMRATVPTEAGAILGLVRSAGPRVHIAFEEGTQAQWLHDLLTPHAERVIVCNVRGRSETSNKSDRIDADALSEMLRAGSVKSVYHGANSVLTLKELVRCYMNLVDDSTRVMLRIKALFRARGILTPGTSVYRASERAKWLAKIESRGARMRAESLLRQLDSLLELRPKAKAAMIAEARRQPGWKVLRSMPFFGPVRVALMLAIMATPFRFRTKRQLWPYIGLAVVTRSSADQEFVQGKLRRSRRAPLTRGLNRNHNPTLKNVFKGAATAAAAKPGPLKDFYDACVGRGVREELAKVTLARKISSIALRLWKKGELWNPDKLTTQTT

SEQ ID NO: 391976 - protein, 363 aa, unidentified
MFTERTSVGLDVHARSVAAAAIDGVTGELMQAKLTPSHEHIRSWVQDLPGPVAVTYEAGPTGFDLYRYLSSTGIRCEVAAPSKLQKPAGDRVKTDAKDAIHLARLLRLDEVTPVAIPTVDQEAARDLVRAREDCRGDLMRARHRLSKLLLRHGIVYSGGDAWTGKHDAWLRHEAAPQLCCTATRLTFDSDYESVLAVKARRDRLDAAIEQMAADSEFTPLVRRLGCLRGISILTGFALAVEVGDWHRFTGNTIGSFVGLVPCEYSSGASRVQGSITKTGNTHVRRLLVEAAWHHRARYRVGKTMRDRWELAPAAARIRGDEGNRRLHQRWVKFIERRKRHTVANVAIARELAGWCWSLAILEE

SEQ ID NO: 391977 - protein, 406 aa, unidentified
MISVGIDVSKGKSTVCIMKPGGEILVAPFDILHTMESVLALAHRLKAYEEEVRVVLEDTGHYHWPVVTLLTENDIFVCCVNALRMKKYCSQSLRRAKTDKIDSVKIASYGITYWSELIAVLPNENTYKELQILSRQYYQYTSLIVKAKVNLSNLLDQTMPCIETLLQDSACNHKLTDFVKRYWHFSHILEMGESKFIADYCKWAEKQGYRMNERKANDIFALSQNGIPVLSNTLSTKIVMLETVRILHELEKSRDTILTHMKQLANTLPEYSVVFDMGGVGQILAPKLIAEIGDVRRFHSRSALTAYAGIDAPPYQSGTFTATERHISKRGNKYLRKTGYEVMQSLIQHKPSEDVVYQFIEKKRSEGKCCKEAMIAGLNKFLRIYYARVSETYKEIEEQLVFSSEI

SEQ ID NO: 391978 - protein, 424 aa, unidentified
MSNQDIIRHEQFCQIVKEIHKSNEYLIVGIDVAKDKHHAFMGTTTGKLLLRKLIFGNNINGFSRLLKTVEAIKVQNGLSKIVYGLEPTGNYHKPLARHLIRYDCNVVLVAGQAVKYNRQILDGRWDKNDTKDAANVADLVSRGKCLYYDCPSQSIIDIRVLLSLRKRLKKEEHSLRMRIRNNLLAKYFPELDTFYSACESETLSIVGWCLTPDTIASMEFSKFFQLVTKTRRGTAQTLRLRKIHGLAMESIGCPMGPASEYEAELLVEKLKQVRNQIKETNDLIEDFCLKFPEYNYLLTIPGFGPYISARVLASIGDPFRFKNQKQLIKMSGYDLCANRSGKTSDTAIPVISKKGNSELRYALYQAAKVATAKVDLFRAYFTRLLTGRERERGIKTKMCVKLAAKMLVIAWTLMKKGKYLTLII

SEQ ID NO: 391979 - protein, 322 aa, unidentified
MTRIICGVDVSSAWLDASIGRTGNPQRFANTSEGIAELAALCHAHQVDLVAMEATGGYERQAFALLSERGLPVAILNPRAVRQFAQSMGRLEKTDSIDAAMIAWFAEIKRSQPNVLSQPGQQQLRALVTRLRQLTDLRTAQKNQQRLITDPRIQASFTEILALLNRQITGLAEAIAEHIHADPLWSELDLAFRSIKGVADRTVARIMAEMPEIGTLSNKAASKLAGLAPLAQDSGKHQGKRAIRGGRATVRDLLFIVASVCGRHEPDFVAFRERLAAAGKPPKVIRIALAHKLLIRLNAKARDTRHKLQTNPAHSIATAQAA

SEQ ID NO: 391980 - protein, 459 aa, unidentified
MSRAKKRKMKAARGAGELPILRPNAAGVDIGATEIFVAVPPDRDSEPVRAFPTFTEDLHRLADWLKACRIETVAMESTGVYWIPLFQILEARGFEVCLVNSRYFQNVPGRRTDVSDCQWLRYLHAVGLLRPSFRPTDQVCVLRSLARHRDSLIQTAATHILRMHKALDQMNLQIHHVISDITGLTGLKIVDAILAGERDARKLAALRDGRIKATEETIIKSLVGDYRREHLFTLRQSLAAYRNYQKLIAECDREIEGQLKTFDARVDCKAKPLPAPKVRRHKVFGNEPRFDLRSHLYRIFGVDLTEVPGMSILTAHTLLAEVGPDLSRFPDASAFSSWLGLCPDNDITGGKKVAVGTRHVNNRAAWALRMAANALRNSRSGLGDYYRRMRAKLGAPKAITAAAHKLARIIFHLLTTHEGYDETVFARRDEQTRRRTETFLRNQAKALGFQLVPVLQTQE

SEQ ID NO: 391981 - protein, 323 aa, unidentified
MQGKVMPEPSAMPEVYVGIDVCKDRLDVHLHPLNQRFAVANDAGGWRRLKRRLASHPVKRIVMEATSKFHRAAHRSLTASGYAVAITNPLRSRLFAEATGQLAKSDGVDAAMLARFAEQIAPSATLPAAESLEELRELIHARSAGVKDHTALRNRLSEATSEIVKAEVTQLLANVAAMNQRLEEAIATHIANDPVLARRCALLRSIPGIGPAVAHTLIADMSEIGTMTPKQAAALVGLAPYPRESGAKAGQRRIRSGRGTTRHALYMAALVASRFNPCLRVFYKRLVDQGKAKKVALVAVARKLVILANTIISEDRPWQPMNA

SEQ ID NO: 391982 - protein, 359 aa, unidentified
MVMLAEHYDFVIGGDPDRDTIDLAILEAGTGRVRDQTADWTDGPAYSRLLAWARQHAPGRRVWALEGTGSFAAGFVTMLAEAGEDIVEIPGQKRSRRAKNDRIDAVQAARTALAQTEQAAPRERGLREALRQVLVTRQGVLVSRTKAINELKSLIVVAPDHLRAGLRGLALIKQLDRIDHLTSPAGATIEHRVTVSTLRSITARIRFLIAQTAELDAELHVLVPHHPAGPTLLAEPGVGPVVAAQLLVSWSHRGRVRSEAAFAALAGVAPLEASSGQRTRHRLSRAGDRDLNRALHTVAITRLRCHDESRAYETRRAAQGKTHRDVRRSLKRALARRLYRRIQAATRPAAAFNGLAHAA

SEQ ID NO: 391983 - protein, 350 aa, unidentified
MPKPMSKQYVGLDVSLAETSIAVIDENDKVVWRGKVASTPEAIAEALKKHALRAERVGLEAGQLASWLYHGLKAKGWPVFCIDARHAKAALSLKVNKTDANDALGLAQIMRVGWYREVAVKGHDCQALRALLIARAQIVSQITTLKNCVRGILKVFGHVLPKKLRATFIASVRETIDGNATLEPILDPMLRTLAATMEQLQVYDRAAIRHAREDATARHLMTAPGVGTIVVLGYMTGVETPARFSRSTSVGAYFGMTPKRYQSGEVDKAGRVSKCGDGMVRGLLFEAAKVLLSRSAKPSDLQAWGRALAKRIGSKKATMAVARKLAVILHRMWTTGEPFRWTATPVPTAA

SEQ ID NO: 391984 - protein, 409 aa, unidentified
MELLIARCAGLDVHQATVVATVRVPDDQGGRQSVTQTFGTMTADLLALRDWLRAYGVTHVALESTGVYWKPVYYVLEDRYTLLLINMQELKHVPGRKTDVKDSEWLAQLLECGLLKGSFVPPPPIRELRDLTRYRVQQVRDRAQEVNRLCKVLEDAGLKLTTVVTDVMGASGRAMLQALVEGTTDPTVLADLARGKLRKKLPLLQRALQGRFRPHHAFLIEQIFAKIDFLDETLQRLTTEIDSRLAPFEGMLTALDTIPGIDRIGAISIVAETGGDMSRFPSAGHLCSWGAMCPGQNESAGKRRSGKTRKGNRYLRRTLIQAALAATRKNGSALQARYHRVKRHRGHKKAVVATGHQILEIAYYIMRDGVTYQEFGSDYFDKRHAERAVKRHVRQLEALGFHVTIQKAA

SEQ ID NO: 391985 - protein, 397 aa, unidentified
MYIVGIDIAKRKHEAAVIDGEGTVIIKPFSFTNNCSGYNRLLAMLTKAKLPLDEVSFAMEATGHYWLALFTRLQKEGFRVQVINPVQTNSIRSFYIRQAKTDPRDALLIAEVIRFGHFSESTLHPENIYELRELCRGRHAIVSMQADVKRKVVALLDQVFPEYETAFTNLFGDTSMAILQTCPTPKELSEMPLEELCHLIEVSSHKRFRMAKAQELQALARNSFGFAMAGDVFSTMIRLYAKHLVFLKQQVQEMDRKIAEIMDTLDTPITTITGIGPTLGAYILSEIGDISRFSSAAKLAAYAGIDPTMRQSGEYNGVRNRMSKRGSPYLRHAIWLAASSAVLHDPALKLYFQKKRDEGKPYMASVGHACRKMVSIIYAVMRGNKAYTPYIPNEISA

SEQ ID NO: 391986 - protein, 317 aa, unidentified
MMKTSTAVAGIDTAKDKLDIAICGQISHWCVENNLRGWKRLRAELTKAGIERVGIEATGGYERGVVRHLQEAGFTVLVLQPIQVRAFAKAHLRRAKNDALDAALIAACAAVMAKPRIEPDQRLTDLADLLTFVEQIEEDIARLKTRLEHIHEPRLRRMVLGDIARLKARRLTQIRFIAKQLRAHGDLAARLDLVLSIPGIGERTALAILIRMPELGHVSREEAAALAGLAPFDDDSGKHRGQRHIAGGRKRLRRSLFAAALPAAFRWNKALISLYTRLKAKGKAHNAALIACARKLLVYANTIVARGTPWVESPALC

SEQ ID NO: 391987 - protein, 345 aa, unidentified
MEHYVGLDVSLKLTAICIVDRTGKIEREGVVSSDPEAIAIFIKSHAPHVVRVGLETGATATWLWTELNKLGLPVICIDARHAKAALKMQINKSDRNDAVGIARIMQCGWYKEVHVKDLDSHAVKALLVSRALLVKIKRDLENQIRGLLKNLGLVIGRAKMNVFAVRAAELTEHRPELAAAVVPLLSARAAIEQQIADLDRKVMRLARKNAQARRFMTAPGVGPITALCFLATSDDPTRFKRSRSVGAYLGLTTRRYASGEIDWTGRISKCGDKMLRSYLYEAANVMLTRVARWSALKAWGIRVAKRTGLRKAKVAVARKLAVVLHRMWIDGTEFKWSKEAANQPA

SEQ ID NO: 391988 - protein, 423 aa, unidentified
MPVSTLYVGIDVSLKTNQVCPINFNQDVFFNEKFDNSPSDTERMIVKIVDILNKDKNLTKVLFCMEATNVYHIHVSSLLATDARLLAYGCKVYAENAKSIQKYKETFLDREKTDPEDAYLCADYARIGKCKDSHPVIGYQKIALQRLTRQRKHTAELLAKEKQYLSSNLFLRFSALKVNPDDNPFSNTFGKTSSVMLTDYLSNEEIVKANLSDLVTKIAEASKNRVDDPSLTAKLLQKVARDSYRLDKVASDSLSIAMASSFRLIQAYQDELKRLDKEIIRLIDGYDNQYFKILTSIKGIGSVFAAGIIAEIDNINFFKNDDKLASYCGLRWKKNDSGSKSSDHRKQPNSCNSYLRYYIVEATASVIRYNDVYASFYHKKYNEVKVNKHKRALVLTSRKFVRLVYGMLRDHKLYDNHYLTCKS

SEQ ID NO: 391989 - protein, 316 aa, unidentified
MALDVHRSYLVVAAVDGQQHIVLSPRRFGFESFAAWAPTHLSKADAVVLEASANAWVLYDQLEPLVGQVSVAHPLAVKLISAARVKTDARDTIKLARLLAANLIPAVWVPPLPVRELRALVTHRKRLVQQRIQARNRLQGVLQRRNLDAPEGKAFARGARDWWRALPLSMAEQLRVRQDLADLDALDPLAACVERHLGQLSMNPLWSQQVPFLLQLPGLGMVCAMTIVAAVGDIARFPTSKQHVGEASLGARIHASGQVQRSGGITKEGPSRLRTAMVSRCLDRRRISSVLERSLCARESLASAHTRPLLPSLASC

SEQ ID NO: 391990 - protein, 457 aa, unidentified
MGRARARGIPAQLVEDEEYQLRYEKVAGIDIAKAKGDVCTRLPPARGGGRRRSKVEEVPATARDVLALGARLLEDGVELAVMESTSDYWRLWYYLLESLGLAVRLVNSSQARQLAGRPKTDRLDAQWLARLAEMGLLRPSFVPPPEIRALRDLTRTRLQLVRDRTREWQRLEKLLEGALIKLSSAVHSLARVKTARLILEALAGGQRDPKALAALALGPLAGRRAELEQSLEGMALGAHHARLIRVHLDHVTLLDRSVAAIEDDIAAALAEIPAAQGVAADGARSPDPGPGAAVLPAGQRLAEIPGVTLDLARAIIAETGLDMSVFPTPAHLVSWAGLAPVARQSGPRARKPKKGQGDSYLKCYLTQAANGAGKTDTFLGQRLRRLAGRLGGSRAHCAVARSILIIIWHLLADPAARFTDLGADWHTRKTSRDKKIRGHIRQLQALGLDVTVTETAA

SEQ ID NO: 391991 - protein, 359 aa, unidentified
MHETSNTANRIVGGVDTHKDLHVAAVVDNHDRILGTSSFAATRQGYRQMLAWMRSLGQLQRVGIESTGSYGAGLLRFLQAAGIEVLEITAPDRQDRRRRGKNDDLDAQNAAHAALAGARTVTPRTRDGMVESLRVLKACRKTAVTARRVALQMIHNTIVCAPDILRDQLRHMTRMQLVRTLAAWRPDLTAYREVEAAYRISLKSLARRYIELHDEIADLDMMIKAIVEDLAPELVARNSIGHNGAAQLLLTAGDNPERLKSEASFAALCGASPVPASSGKTVRHRLNRGGDRAANSALHIIAIGRLRTDEKTKTYVARRIAEGHSKLEAIRSLKRYIAREVFGIIMRRQQDINRTRIAA

SEQ ID NO: 391992 - protein, 401 aa, unidentified
MVSDFRKGRYNLMKIYVGIDIAKLNHFAAAISSDGEIIIEPFKFTNDADGFQLLVSKLESFDKNSLIIGLESTAHYGDNLVRYLVTELYQVCVLNPIKTCQMRKNNIRKTKTDKVDTYVIAKTLMMQDNLRFVSFFDLDMMDLKALGRFRQKTIKQRTRLKIQLTTYVDQVFPEIQYFFKSGLHQHAVYALLKEAPSPKEIASMHMTHLANLLKVNSHGHFTKEQAKELRVLAQKSVGANDSAISIQITQTIQQIELLDSQLEKIEAEMTDIMKFNDSVIMTIPGIGYINGGMILGEIGDIHRFSNPNKLLAFAGLDPTVYQSGNFQAKTTRMSKRGSRVLRYALVNAAWNVVRNNATFKAYYDAKRAEDRSHYNALGHCSGKLVRVIWKMLTDNVEFNLK

SEQ ID NO: 391993 - protein, 420 aa, unidentified
MPNIEIGVDFMVKENFIYVGIDLHKETHTAVMIDCYNQKLGEITFPNRPADFPKLVTKVKKCNTDAKEVVYGLENAYGYGRPLAVWLIDKGYFVKDVNTAISHRQAKHRGAMYRKSDSDDAEAIALATLNMLDKLPDACPNDAYWSLGQLVHRRDNIMKQRTRLVNQLHEQLCIAYPSYKQFFNDISRPTALYFWEHYPSRKYLKGKSVEDLRTELVPVSHNRCSTKNCEKILDAVASDKVKNNAYQDARDMVTLSIVSDLQHYDSQLAEVDKMLEQMYKMLGCTLTTIPGVNVITAVKILAEIGDIKRFSNANKLAQFAGIAPLHLSSSGKGKNVATKQGNRRLQATIYFLAIQMVQVSSKGTPRNSVVRAYYEKRKAEGKTSQQALICISRRLISSIYGMLKHGTEYRMPVVESAGEK

SEQ ID NO: 391994 - protein, 414 aa, unidentified
MEPIHERVAGIDVHRMKHVVTVLISGDGGAVSSETREFGGFKRDMRALVDWLRSHRIQQVVMESTGIYWKSVFSHLETAEIPALVVNAFHVRNVPGRKTDVGDSEWLAQLARFGLLRGSFIPPKDLRELRVVSRYRQKLTATLAGEKNRLHKLLDDAGIKLGGVVSDIDGVCARKMVAGLIAGGTPEQLSALGRGKLKSTGEELEAAMDGDLSPRHRLVLSMILNHLRYLQQELARLDRYLIEAMKPYAWAWRLLQTIPGIDEIAAAMILIEIGDDVHRFGSASRLASWAALCPGNNESAGKRKSGKTRHGNPIVRYLLCEAANAARRTKTVFRAKYDSLVIRRGHKKTIIALAHKLIRTIYFVLARRKPYRDSTFDYQAASVAKNAPRWIRALKKYGYWPTASAESTTAAAAS

SEQ ID NO: 391995 - protein, 351 aa, unidentified
MDIIGLDLHQRESQLCLCDEAGTITERRIVTSRERFTAVLGNRRRTKILLEASTESEWVARHLESLGHEVLVADPNYAPMYATRSRRTKTDRRDARTLMDACQTGAYRLAHRLSDPRRHVRAELAVRDALVRTRTRYVSLAKTLVRRDGLRVASSESHLVAQRIRALSLSPALAAELQPLFTVLAPLNEQIAAADGRIARLAATDPLVARLATAPAIGPVTASAVVATVDDITRFRSAHQFEAYLGLVPGERSSGEKRHVGPITKAGNSRVRWLLVEAAWRLLRTKSAEAAALRAWARCVAGRRGKKIAVVALARRLAGILYAMWRDGVPYDARRIRGPRIAAAEVTARAG

SEQ ID NO: 391996 - protein, 340 aa, unidentified
MGEQYVGIDLHRRRSVIVRMTSGGEVLETVRVDNDPVALSLELAKAGPDPEVVLEATYGWYWAADLLQACGARVHLAHPLGVKMFGYQRVKTDARDSRNLAELLRMGRLPEAWLAPPQVRELRELVRYRAKLVALRSGLKAQVHAVLAKEGVRVPMSDLFGMAGTRLLDQVRLGRAYALRIASLRSLIAAYDQEITMLGREIASALAGDVGYLALQAIPGVGPVLAAVFVAEIGDVHRFAGAPQLCSWAGLTPRHRESDTTMHRGPITKQGPRLVRWAAVEAVQRLPGGSKQAADFHRIADRRGTGIGRVAAARKLLTLVFYGLRDGQVRCLAPTQREAM

SEQ ID NO: 391997 - protein, 318 aa, unidentified
MNQTNASLSFVGIDVSKHKLDVARRPNAEKHEFPYDTAGLKTLIETLKTWGPIFVVLEATGGLERGVVAELVSADIDVAIVNPRQVRNFARGVGKLAKTDPIDAGSLAQFAEVVRPAPSQKVSEKQRELQELVARRQQLIALRVAETNRKGTASAKLVRRSLEKTLKTINAQIAELDQAIAKLVWSDDDWRHKAELLQSVPGVGEVTGRNLLASLPELGKLNRAQIVALAGLAPYNHDSGKLKGKRSIWGGRAEVRQALYMAAFSARNDNPIIRRFAQRLEAAGKAFKVVMTACMRKLLIILNTLVKNNALWRAPVTT

SEQ ID NO: 391998 - protein, 348 aa, unidentified
MEQGEGTPRYRLFVGVDIAAATATVAWQAAGAPPIRPFTIEQSSQGFAALERRLRATKHAPAQILVVMEATGSYWLSLATALADAGFAVSVINAAQAHHFAKALLKRAKTDAIDARTLAQLAALLQPTCWTPPPAIHEELRQRLAQRDALIVVRQQVRNQLHALLQCPLIIADVRTRMDVLIATLSGQIAEVEAELAAVVAQDTGWTDAIRRLQSIPGVGLLTAAWLVVGTLNFTVCATAEQATAYAGLAPMPRESGSSIRGRATIGRGGNGRLRTALYMATLSAAQHNPAIKAFYRRLRDAGKPPKVARCAAARKLLHLAWAVGTKHLPFDPSYQQQQHDALPALAA

SEQ ID NO: 391999 - protein, 317 aa, unidentified
MRHIGVDLHKTNFVVCFLNEDDTSSLETFPLSKAGITRFTGQLKKEDALAVEVTQNIYYFYDQIKAFVSRVVLVDTYRFSVIAKSKKKTDKADALALARFLKLDHLPEVPVPSEKVRQLRHLLQARETLVGVRTKLKNLGHGALTRNGIALSRAAFASKVARERLRKRDDLSAADVVILTAALRQIDELDQEVGRLEDEIVRLGKTLKGIKRLLQLHGMNLLSAISLLAEIGSIELFETSKQLVAYSGLATSVRQSNETTRQGHITKQGRKRLRTVAIRAVLSMVNRTQTPLMSFYQKKKREKGSGKAICAGGRESC

SEQ ID NO: 392000 - protein, 345 aa, unidentified
MNKKHKTFVGADLHKNFTHFTVQDANGKEVASQRLANDGELFRAFLAGFERPVSVVVEATSNSAWFREQVEQGGHKVVIAHPGETSAKSDTRQKDDRRDARLLATLLRGGLLGRQCWPAPAEVLGGRERMRYRQMLVRQSTAHKNRIHSVLIRHNLSCPRKDPFCKSGRLWLRSLPLAEDWMFTIETSLSVIEYIEKQLAGIDEWCARLIEKDELAWLLSTIPGVNRTLAAMIRFETGDIDRFEKVEQYVSYTGLVPGVRQSAEKQTGIGITKEGSFWLRWAFVQAAQTADRSRGRLSRFYWRQFRSHGNPNKAKVATAREMARIAFHIMKRRQGYYEPLLFDKK

SEQ ID NO: 392001 - protein, 341 aa, unidentified
MKNKSFIGIDISKNVIDASIFTEGASIKDFPHAVFNNSRKGFGGMATWLKKNHVVLSNCLFGMEFTGSYSMELEKFLTARKYQFCMLSTHTVKHYPMGPKDKNDKIDSAKIADFLYRYNGTECVKPYKMPDKTMQRLKTLMNERKFLVEQRTCFMNRRQLCTTKEDTQLYDGYIKKLSRDIENIELEEQKLLATDDSLLSTYKNLLTIPGIGFVNAINVIVITRNFTAFETARQYASYVGVAPHFRTSGTSVKWRPRPSARCDGQAKADLSMAATVVVQYDAELQSFYNRKLGGKQDSDTKRKALNAVKFKLILRMFAIGKQNRKWETLDSMSNNEILAIS

SEQ ID NO: 392002 - protein, 366 aa, unidentified
MSENITAFVGLDVHKESIAIAIAEPGRAAPRFIGTTGPTLREVQKALTHFGTPAQLLVVYEAGPCGYGLARQLVSKGYRCEVVAPSKIPRKPGDRIKTDRRDAVQLAHFARAGDLTPILIPEEPDEAIRDLSRAREDALRARMSARHQLKALLLRHGVRYTGKCSWTKAHERFLATLSFPHPAQNIAFVEYRTAVKEADERLERITAALRDQVDQWRLRPVVGALMTLRGIEMVAAVTLIAELGDLKRFEHPKRLMSFLGLVPSEHSSGQSRSLGGITKAGNTHARRILIEAAWSYRYPPRIAREKQIRQEDQPRAVREIAWRAQLRLCQRYRRLSARGMHQNKTCVSIARELVGFMWDIARQVAI

SEQ ID NO: 392003 - protein, 319 aa, unidentified
MQTTAVVPTFIGVDVSKDSLVSHVYDSGARRTVPNQRHAILAWLKTLPGGSIIGVEATSTYHELLADLAYSHGMLVYVLNPKDVHRYAKGVGMRTKTDRVDAALIARYIVRERSELHPYRPASSELRQLQRLLLRRAKLSRCRAGLQQSLHGLTGLTRSLNQLLERFDAVIDQIDQRIERLINVCPQLQAANLRLRSIKGVGPVVAPALLYVLLRFAFVNADSFVAYIGYDLCADDSGKRVGRRHLSKEGPSELRRLLYTAAMSAANSRAWKPIYQRQLAKGLSPTAALVVIARKIARTAWSIYTHNTTFDPARITQQA

SEQ ID NO: 392004 - protein, 426 aa, unidentified
MKDLLEISCGLDIHKEKIVACILTGPLGKPTHSEIREFTTLIPDMLALRDWIISENCHHIAMESTGIYWITIYEILEDAFSGDITLLVVNARHMKNVPGKKTDIRDSEWISTLLRAGLLNASFIPEKRIREFRDLNRYRKSIIRDITSQKNRVEKFLQSSGFRLSSFISDIFGASGRNIILHLMEHGQIDKMSLDSYLKTKTRKRIDEILMSVNGTLSEHQKSFLKILMCHYDSMKEHLIEIETHLQEDMLPFALQIEQLNTIYGISTTASCAIIAEIGTDMKPFKTAEHICSWAGLCPGNNESAGKRKSTSITKGNPYIKSMLCEIAWVIAGKRNTYLSAWYWRIKQKKGARKAIVALARKLLVIIYTMLKQGTNFDENCFEVRRKNCEQKQLSRYIRSSIIHLLYKSYFTAGSHYYDCFIVMLS

SEQ ID NO: 392005 - protein, 345 aa, unidentified
MGPMYYIGLDVHKQKISYCVKDSGGKIHSEGWIPATRYDLDCWMKDLPQPWSAAMEATLFTGWIYDHLRPHAAAVKVAHPLMLRAIAAAKKKNDRIDANKICDCLRCDFLPESYMAPTAIRERRRTLRYRNLLVRQMVQMKIKISTLLMEAGVSYNKQKLHKAGYFRELLASNPDINESLRSLLRQCRETVVRLGKMEAALIDSLQQDRLLVERVERLMSIPAIGPITALTWVLEIGEVQRFSSIKKAISYCGLCGAEKSSSDTVRRTPISKQRNKYLQTTLIEAANMAPRYSPTLAVLYDWEKQKGNANRATLAVARKLVAYLMAVDRGQTHFLVIDRETRTAA

SEQ ID NO: 392006 - protein, 447 aa, unidentified
MTGNRRRVSNAADSFARRASLDTPAVVAFAELDHFVGFDWAEEKHDVVVVNREGKVRLTLTFPDTAAGWAELREKLAPLGQLGVAIETRRGPAVERLLEAGYAVFPMNPKAAERFRDRKAPSGVKDDTLDAWSFADALRSDGHAWRPLRPEDPQTQLLRMLCRDEIGLIEQRTALVLQLRQALREYYPAALEAFDDWTLPAAWEFVDRFPTPRALAQAGLRRWQKFMHIHRLYSPTSAEKRLEIFARATEFVSPSESVTTAKSLLAATIVKQLRVLEAQLKEYRRRIEQAFSAHPDRDIFGSLPGGGKKLAPRLLGEIGANRAVFESPESLQCYAGTAPVTKKSGKSCRVQVRRACNKTLRATLHLWANESRRRCAWAQAYYQQKKRQGARHATALRCLGQRWLKIVWRMWQNRMPYDEALHMRSLAKSGSWVLGLTPAAEPVVLPN

SEQ ID NO: 392007 - protein, 330 aa, unidentified
MQKVQHIIGADLSKKTIDLFYWSTKSHLDIKNNLEGFKTLLRSIKQQRIDRSELMIVMEHTGLYSFCFEEFLHKHQIPFCKVSALMIKRSLGLIRGKSDKIDARRIASYGFEKRDTLLPERATSKELKRLQLLYSTRERLVKQRAGLINAVQGYRSIGLSTNDPILQSQQRLIKHFEKEIGKLEAEMDMIFDSDPCLQKNQRLLESIKGVGKVVSTATIIKTKNFTRFTDPRKFACFCGTAPFEHTSGSSIRGRTRVSHLADKQMKTLMDLSAKSAIQYDKELRNYYLKRIENGKSKMSTINIVRNKILYRMFAVIKRQTPFIENYLQTA

SEQ ID NO: 392008 - protein, 396 aa, unidentified
MAAIWAGIDAGKAHHHCVAIDESGRRLLSRRVANDEPELLELLADILALGDEVTWGIDLADGGAALAIALLVNRDQPVHYISGRAIHRASESYRGEGKTDAKDAAVIADQVRVRRDLHPLRAGDDTVIDLKILTGRRMDLVADRTRTVNRLRAQFTGIFPGLERALDLTNTGPLTLLTGYQTPAAIRRIGVKRLETWLRNRHVVRPDRLAETAVQAAERQHTSLPGEKLAATLVHTLAKEVMSLNQQVAELDKAIEARFRDHHTFEVITSMPGLGVILGAEFLAATGGDMTVFGTADRLAGFGGVAPVPRDSGKLSGNLRRPQRYNRRLQRVFYTSALFGIRHCEESRRFYDRKRAEGKRHTQAVLALARRRVNVLWALLRDGRRYEPAPPARAAA

SEQ ID NO: 392009 - protein, 327 aa, unidentified
MQYIGFDIHKRYTFYTQMDGMGQIQRQGKLTNSREALAEFFGDMAEPARVVIEASMNWYHLYDLLEELEIPVTLAHPLRTRAIAEAKVKTDKIDSTILAHLLRTDLVPAAYIPPRAIRDLRELLRYRAALVKLQTMIKNRIHAILLKHGYQCPHSDAFGVKGRAWLTTLDLRAVYQQALRGLLAVLDTLHAQIQEASRTIDQQAKATPMAQQLCTLPGVGHYTALLILAEIGEVARFPDPKHLVSYAGLAPSVHGTGGRVYTGHISKQGSTWLRWILIEAAIRAATRPGRFQHLYQRIAQRKGPKLARVVVARELLTTTYWMLRHAH

SEQ ID NO: 392010 - protein, 348 aa, unidentified
MTVYIGVDFHARQQTISYLTTEEGAIQHLVLLHDNPVTVRAFYAQFAGQRVVVGFESSGYAAWFEELLEELGCELWIGHATYIRQFAKRRQKNDRRDADLILELLHTGDFPRIHRYSRTTREMLQQLRYRQRLVKMRTMAMNMLLFMASSRGVSLRTQLQSKRGQAKLQQLALPATLGTQRDELLSLLQTLNEKISTIERWLEQQTKADLAVQRLQTHPGIGLLTSICLRYTLEDAGRFANTRKVSAFAGFDPMQDQSDERNRMGAISKQGSRWLRFYLVEAGQVAIRKDADLQRVYQRIARRGGHAKAKVAVARRLLVRAFIMLRDEIDYAEFQRRGVAARSSRGTA

SEQ ID NO: 392011 - protein, 410 aa, unidentified
MQITCGIDWAEQHHDVAVLDADGSVLARARIDTGATGFSRLMSLLAEHVDDADQLASVPIGIETDKNLLVVALQAAGMTVFAINPRAVARYRERHGQSGKKSDPGDAFVLADLLRTDRHQHRPLPSISVHASAIKTLARQHQDAIWSLNQTVSRLRSLLLEFYPQALRAFPNLKHKAAMAVLSAAPTPEAGLRLTARRLATLLRRCRRRNDPSLAEHVLSALHSPALRQPTAVEAAYGVTAQTLIAIVVAMQTAVEELEQALAAELDQHPLATILRSAPGLGPVLAARVLAEIGDDPTRFTTAAGLRAFAGTAPVTRASGRSRYVKARKVRNKRLGDACHWWAFVTITKSAGARAHYDRRRAAGDHHNAALRNLANKLIGRLWWCLQHDETWNENTAWNIDIATPDPRTA

SEQ ID NO: 392012 - protein, 316 aa, unidentified
MTASLLFAGIDVAKATLDIAVRPSAQTWQVIYDDAHVEALVTQLNDLSPTLIVVEATGGLERPLVVALLTAGLPVVVINPRLARDFAKATGRLAKTDRIDARVLAHYGEAIRPSCRPLPDADMQQLRAMVDRRRQLVDMMTTEQSRLSCSPAHIQDSIECHIDWLRQQIASLDDNLESMLQNSPLWREHDAILQSVPGVGPIVSHTLMVHVPELGHLNRKQIAALVGVAPFNRDSGAYRGRRSIWGGRAAVRAVLYMGALVATRHNPAIREFYQRLLAAGKSKKVALTACMRKLLTILNAMMKHQRRWQPRGAASV

SEQ ID NO: 392013 - protein, 405 aa, unidentified
MRYYMGVDWADVQHAIWVADEQGTRVLTRAIAHTAEGFAEWGRWLDEQRTAGTELWAAIEHPDGRVVDFLLNHGVLVYPVNPKALDRARDRFRPSRTKSDPFDAHVLADFLRTDHARLHALQPSSEAAQELKLLTRDATRLVREQTRLVNQLTATLKEYYPRALEVCEHLTAHRAWAFLRAYPTPATAADLTAKQWQRFARAQGWPAAEAARLWARLQQPQLPVPPHVVRAKARLVAVLVTQLEAAVAAVTEYREAVTRFFATLPAAEWATTLPAGHGMTVPTIWAELGDAPGRWSSWQHLQGHAGTVPVTVRSGQYCGVAFRFACNKQLRTAIHQFALCSLTRSDWARAYYDRQRERGHRHHAALRALGAKWLKIIFVLWHRQVAYDETHHLATMARQHLRQAA

SEQ ID NO: 392014 - protein, 432 aa, unidentified
MTTNRLQTGIDFSQKKADFCLLFPDGRPLEQHQSFDNSLPGYSLAKALLLDALETYQFDGLDVSGEATGFLWLPFFLQLAADPDLEAYDLDLFLLNPRWVKWFKKCFAQDDKSDQKDPFYIADRTRTRRPDATWSPQLDTLPLRFYTRLRFHLIQNLAREKCYFSSFLFLKASSYRRLKPFSDVFGVTSRLVLSQYATLDELATIPVEDLALVLHEMSGHHLRDPLDNAHKLQRVAAESFPLPDALALPVHRILDLTLDHIRFLEGQVTQVDDWITTEVQPHATIMQLTTIPGVGPVFSSGNGAEIGDTQRFLQGQKWDKKHKRYRPPNLRDAEDAVAKIAGLWWPRSASGDFEAEDRRMAKTGNRYLRYYLIQAANLMRQHIPEYADFYDRKYREASKHHHKRALVLTARKSVGLVVGLLHRNEAYRPKEA

SEQ ID NO: 392015 - protein, 345 aa, unidentified
MTIVEAARTVTGGVDTHGDVHVAAALDPIGGLLGTESFPATPSGYRALVSWLERFGTVGRVGVEGTGAYGAGLARYLARAGIEVVEVDRPNRQARRKQGKSDPLDALEAARAALSGRAGGAKTRDGAVEAIRVLLVAKRSARQGRVKALVQMRHLGYTAPDQLRSTIKGLGVAQLVAVATGLRPAVSTDPVTAATKASLSSLAHRVRALDHEIEGLDALLTPLVTATAPELLEMLGVGLDTAATLLVTAGDNAERLVSEAGWAHLCGVAPLEASSGKVTRHRLDRGGDRQANAALWRIVMVRLTCDPETRAYMERRMKEGRSKREVIRILKRYVAREVYRHLPRG

SEQ ID NO: 392016 - protein, 362 aa, unidentified
MQSTTIIAFDQHAATTVAAVLLPGQRTPALHSLTSDSATLVRFVKRIARENGTVRCCYEAGPCGFELQRALTTAGIACEVIAPALIPRRPGDRIKTDRRDASQLAILYRAGALTAIHVPTDQEEAVRDLLRCREDIRADLLRARHRLSKFLLRHGRRFTATKQAWSKRHDTWLRAQTWPLPALTQTHEAYLRAVDETVARLRTVDGQLQALVTLEPLQTRVRTLRCFRGMDDLTALTIAAELGDARRFPTARGLMAYVGLIPSEHSSGTKRARGAITKTGNAHLRRVLVEAAWHYRHHPFIGKYLRRRHVDAPDAAKQHAWRAQQRLYRRYRSLAARGKPKQHVVTAIARELTGFVWASLTH

SEQ ID NO: 392017 - protein, 347 aa, unidentified
MITIGLDLHKRESQLCISHDDGTITERRIATTRERFSAVLGDLPRARILLEASTESEWVARHLESLDHEVIVADPNFAPMYATRSRKTKTDRRDAKTLMEACRLGAYRPAHRVSDARRHVRAQLAVREALVRTRTRYISIAKSLVRRDGLRVAGSESHLVAKRIEALEISDTLAIELTPLFTILAPIDEQIATADRKLALLCKEDQTVALLATAPAIGPVTAAAVVSTVDDITRFKSAHQFEAFLGLVPGERSSGEKRRIGRITKAGNSRVRYLLVEAAWRIMRSKSEETAALRAWSGRIAARRGNRVAVVALARRLAGVLYAMWRDGKSYDSSMLKIPKAELAQAS

SEQ ID NO: 392018 - protein, 312 aa, unidentified
MSEMLNVGVDVGMKRLDVAVEGGRHWRVANSPTDLSKLVAELAEQPVERLLVEASGGYEEKLVEAAEAAGLPVVVINPRAVRRYAQAAGQNAKNDRIDARVLASFAATMKPAVRPRPEPAVRQLAKLVDRREQLVQMITAEGNRRRAAGAVPDSIDRVLELLREELRRIEAAIAEQLAASPEHQERNRRLQTMPSIGPVIASSLVALLPELGHLTDGQISALAGVAPLCCDSGRHQGQRRCWGGRREVRRLLYLAACVAARHNPVIRAFHQRLIANGKAKKVALVACAHKLLTHLNAMLKKSEDWQPMPTTT

SEQ ID NO: 392019 - protein, 315 aa, unidentified
MDHNNAVYGVDVSKRNLVTAGYDEPTRVVVANLPESIAPWLAQLPRGATVAMEATGAYHQVLAHLAHAAGMQVYVLNPQTLKHYARAIGQRGKTDNCDARMIARYVVHERAKLRRWVPPAQAADRLAQLLERRHTVVTARQTLAQSLAMPMLKAPRASLLANFERILRRLDILIRHEIARLPKMAALYERLKSIVGIGPVVAAQLVAVFSTLSFAKASSFIAYTGLDPRPDDSGDRRGRRRLSKRGPPLLRCLLYNAGMAAANSRLFKPVYKQLRARGLQTTEAIVILARKIARIAFALYKSNHCFDAQKHLTTV

SEQ ID NO: 392020 - protein, 492 aa, unidentified
MVKSKRKSYKKRQHIQKVKGRRFTDEIRNLDLEKVLVVPIDGGKNSHKTLVANYFGDILHDPFEFTNSASGVKMLHAILKSISSSIKAQKVIIGLESTGHYYENLYRSLISLGYDVAIVNPTSVYSQRSGQLNWCKTDEIDLCAIGQVLIDNQATETRLPEGLYYNLKQLTRLRRDEIRKRARLKTQTRVLCDHIFPGLQKSHIFSDFWGKGSILLLENYPTPSSIIRLGAKRLARFFKKHNTKLALYTAERLVNLAKNSLCVNRVNLEAHLLNLRFKIADLKLANEKIRKLNLEIARYLVRTPGILLLSIKKINVPSAAEYLAEVGPLKQAGSAKKIIARAGLNPSRFQTSEYERANNSITKHGSNPLRNISLIISQNLVGLNPHSSRPCNPYFREFFDRLVEKGKDKRLAKVACGNKFIRVSSRMMVGRKLFSPPTSKKNKVSDDPLTKLKEFISLNEAEELSEELAKIAKEQLPSNYHSHLCKEQASSN

SEQ ID NO: 392021 - protein, 374 aa, unidentified
MRDDTSWAGLDVHQEQIVVAVLRGSDREAREFQVRHDKRGVGKLARRLRELGGSSLRCAYEAGPCGYELQRRLRAEGIECAVIAPSLTPVKPGERIKTDRRDARKLAEHLRSGLLTEVAAPSEAQEAARSLSRCREDAREDLMRARHRLSKTLLRHGLVYREGKNWTQKHRRWLLGLVWEHEAERVVFGHYLQAVEHLEERIKGLDEALEELAEQDPYREPVGWLRCFRGIDTVNAMTLVTELFDVARFRSPRQLMSYLGLVPSEHSSGGTRRQGSITKSGNRHVRRALINAAWHYRHRPAVGIALRKRRAGQPAAMVALADRAQQRLHRRFMRLQLAHNKPGQVAVVAVARELAGFVWAALATHPRQPAPTLR

SEQ ID NO: 392022 - protein, 345 aa, unidentified
MHIASIGIDLGKTTFHLVALGEGSKVVVRKKFSRTQLLAYTANLPCSLIGLEACAGAHFMGAALREQGHEVRLIPAQFVKPYRKSNKNDFIDGEAIAEAVTKQNMRFVQIKTQEQLDVQAMHRVRDRLVQRRTALINEIRGFLLERGIPFPAQPIHLRKNLPTGVEDAEQNLSPRPRWLLDRLWQEWKQTEIDIQTVTDEIERISNEDERCQRLRQIPGFGPLVSTATVAAIGNGAAFRRGRDFAAWVGVVPRQYSTAGKQRLFGMSKRGNIYLRRMLIHGARAVLFRIKYDTAGLGQWVHRLSQRAPRNKVVVAIANKLARIAGAVLSSGRDYRHQPLPQRAAA

SEQ ID NO: 392023 - protein, 348 aa, unidentified
MRTEYVITMDTHCRTTDVCVKTARGKLVRREHVSTGIPQLRELIESVPRPRRVAFEEGAMAGWLYRNLKDCADELVVCDPRRNAYVAKDGDKDDPIDADKLNDLYRSGHLRKVHQADSDEKAAVKQVIGMYHDRVIRRVAEANQLLALGRRWGLMLSRTRLSRADGRQWLEAKLAEAKAPRRIVTLADGLWQGFEQALEQEQTLYKQVCQIARTDKVMKRVTELPGYGPVRAATLIAYLDTPFRFKSKAALWKYVGIGLRREKSGNGMEYTCVEQACNRLLRNMVIGAAQNAIEQKDSVFARRHARYVAAGASRRNARRNVARDQVTAIWGMWKSDKAFDPGLVRDPS

SEQ ID NO: 392024 - protein, 337 aa, unidentified
MLLKLLHRWRREAGQAGRNIERIVVAFEAGRDGFWLARWLRARDVEAYVIHPTSIAVSREHRRAKTDRLDTELLMRVFLGWLRGEKRHCSMVAIPTIEEEDARRPNRERQNLVTEQTRIINQIKAIFARFGLRTLRPTMRKLAEGLEDLRTAEGTPLPQNTLSELRRHLARLRFVRDQIHAVEQERLRKLAVAPAAETKSPDAMVRLIARVFGAGIETADMLVNEIFSRHWRDRKAVARYAGLTGSPDESGSRRRERGLARAGNVRVRCGMIQLAWRFVRFQKNSALAQWFAARTADGRASTRKTMIVALARKLLIALWRLVTRGEVPQGIVLRPAS

SEQ ID NO: 392025 - protein, 453 aa, unidentified
MTETATNTFHEIRRNVAGIDIAGHADHYVCGPRCDDGGHDIEHFGTTTPELHRLLGWLKERNVVSVAMESTSVYWVSVADILEATGIEVVLVDTREVRMVPGRKSDVKDCQWLQKLHSCGLLRGGFRPPENIAAVRTLLRERDNLMAMRTQCLQRMQKSLDQMNIRVHHAVTDIDGKTGQLIVGAIVNGQRDPRELAKFRDPRCKKSEREIAEHLSGSWRDEHLFNLGQSYRMLQFIDEQLAAYDTKAASMFKVLAAASETPPPPTPPVGEKPTKKDLRNAAEKHDLQRIMGVDLTSLSGIGYGTAAIVVAELGPNLDRFPTERHFAAYIGLAPALGKSAGKNVRQRKRCRNTSRAGRALRMAASTLSRSQSELGAFYRSVARRTDRKTAVKATARRMAHRIYRAVRFGVVYIDAGAQACEERMRERTLRAVRHLIKSHQINELELKAAFAAA

SEQ ID NO: 392026 - protein, 323 aa, unidentified
MNKYRETFGVDISKDVFDLHGSNSGHDQFRNDEKGFRSFLKILPQDSIVVMEATGYYHYRLAQFLYKNNVVVAVVNPLSVKRFIQMKLAKVKTDKSDAKAICEYALANEVPHYNALTDVQAECLQLFRLLDSYLKKRTATKNKLHGEETLGIPSKFVYRSLRRDRKHLDKEIDGIEERLLSLVKKEQQQQLTLLTTVPGIGTKTALFLIVVTDGFSKFETTAQLCSYVGITPTVRESGSSVRGRSRISKVGNRKLRNLLFLCAFNASKYNKACRQVYERLVNKGKSKKLALIAVANKLLKQCFAIAKSGLPYDDAHVSVLKTN

SEQ ID NO: 392027 - protein, 377 aa, unidentified
MHSENIAAYIGLDVHKETLAVAIAAPERLGEVRYYGTINNEAQAVRRLFQKLQGLYGNILSCYEAGPCGFGLYHQLTAMNIKCQVIAPSRIPKSPTDRIKNDHRDAISLARLLRAGELTPVWIPDLTHEAMRDLIRARAAAKRDSRVARQRILSMLLRTDKRYAGKHWTGKHRTWLANQSFSQPSQQIAFQHYCQSLEQIEDRILQLDQEISRLLPEWSLCNLVCQLQALKGVGQLIAITLVAELGDFSRFSNPKQLMAFLGLVPGEYSSGNSIRPRGITKVGNSELRRLLYEAAWSYRTPAKVGAWLIYYRPDSVTQYSKDIAWKAQQRLCSRYRSLTAKGKKSQVAITAVARELTGFMWDIALAAQSSFSQQKQN

SEQ ID NO: 392028 - protein, 336 aa, unidentified
MPMYQLGIDVSKNTLDLCLLREGIKGRIKTRKLKNTADAAKVVAEWLKKQSCELGEVHIIMEATGVYHEPLAYGLHFAGARISLANPHRTREFARGMNILTKNDKVDAWMLACYGSLKEPEAWTPPPESVRYLRALLRRRDALVADSTREKNRLEKSVFTDSPDAVRASIENMLQELSNEIEHLDVLIQEHIKTHPELNQDFRLLTSIKSVGYLLGLNMLAILKSHSFESAEQAAAFLGVVPVERRSGTSVKGKPKLSKIGPPEIRTKLYLAALCGLRFNPVMKQMYTKLCQRGKSKMCAIGALMRKLVHWCYGVLKTQLPFDAEYNQQSHYKTTG

SEQ ID NO: 392029 - protein, 356 aa, unidentified
MRSRPAQISRDTRRRRAAGAPSQIAVIDGQGELSLSRRIVNDREPFLALLAGREGESRIAVEATYGWAWLAELLEDAGYEIHLAHPLRTRAIAAARVKTDAVDAKTLAHLLRADLLPEAYVAPRELRDLRELLRHRIALTGMRSALKNRVHAILAKHGITRQHSDLFGKGGREFLDALQLREASRRRLDSLIALIDDFDREIEATTREIEQRAKADDRVDVLTQIRGVGRYTAMLIIAEVGEIRRFPNARHLCAWAGLTPTVRSSDGKARLGRISRQGSPALRWALVEAAQKCTTGGGPLRESFERIAKRRGRKIAKVAVARQILTLSYYGLRDGEIRCLARRSRASAKEKLAVAP

SEQ ID NO: 392030 - protein, 327 aa, unidentified
MAKRTTICAGIDTGKRKLDVALDGSSEQLQIDNTAEDYKVLLDWLRRHRVKRIGIEASGGYEQAVVAELRRQRFVVVVFQPAQVRAYAKFHLLRAKNDKIDAALIAVCTAAVKTIHAPPDARLLPFAEHLTMIDQIGEDIARIKNRLESCRNPRFQQTWKEDIARLAKREKIELKALVAAIREHRDLAERLDLINSVDGIGLPTAVAILVRLPEIGRITREQAAALAGVAPYDDDSGEQFGIRHIDGGRERLRRALYTAALPASFRWNPQLIALYRRLIAAGKQHKRALIACARKLLIFANTVVARGTPWDHERPPIASISAVLQAG

SEQ ID NO: 392031 - protein, 357 aa, unidentified
MRFYTPQHPFYCGIDLHARTMYVCILNQAGETLLHRNMTATPEALLKAIAPYRGQIVLAAECMFTWYWLADLCADHGLPFVLGHALYMKAIHGGKAKNDKIDAQKIAVLLRGGMLPQAYVYPAEMRATRDLLRRRMHLARKRGELLAHVQNTNSQYNLPAIGKKIASKANRDGVAERFADPAVQKSIEVDLALITYYDELLRDLELTIVKTAKHHDANTLYLLQTVPGIGKILSLVLLYEIHDIKRFPRVQDFASYCRLVKCARESAGKRSGTSGSKIGNAHLKWAFSEAAVLFLRDNPAAQKLLARLEKKHGKGKALTILAHKLARAVYYMLQRQTAFDLDTFLHGSGRGAGELQA

SEQ ID NO: 392032 - protein, 321 aa, unidentified
MNYVGIDVSKATFVVAYSSAKGSETKTFENTTKGVHKFIQTITPEDTHCVMEATGNYSMLLVYLLSKAGITVSMENPLKIKNFARVMLSVVKTDEIDARMIAMYGEKMNPAPFKLRSDSLMVLKQKRTVLRQLKKQLNANTNLQESMEALPFIDSVCKKILDKTVKFLRKQIKEMEEELSSLANIEYKKQMDLLTSIKGIGVTLATALIVATGGFTYFDNAKQLTRYLGLSPTYQQSGTSVNRKGHINRNGDSYLRSQLYVAAFSSLRCNTECKACFDRLRANGKPGKVAVIAVANKLIRQAFAVVTQGKEYVDGFISAKK

SEQ ID NO: 392033 - protein, 327 aa, unidentified
MTVIGIDVSKNKLDCLWLKDPVDSKVKTKVFRNAASDYDALLAWAQQNTGEALAAIHFVMEATGIYHEALAYRLHEAGARVSVVNPAQIRDYAKSLGARTKTDKKDSMVIARYGASQHPRLWQPEPAEVRQLKALLSRLEAVKQDIQRELNRLEKAEITRASEQVRQSIETVRGELEKEKNRLEALIDQHIDQNPSLKQDRELLESIPGVGPVIAQQMVAVVRSRAFTSAAQCAAFLGLVPVQHESGSSVRGRSHLSKAGNAQVRAKLYMAAVVAIQHNPDIKAQYARLLRHGKTKMCALGAAMRKLVHICFGVLKHQTPYQVQVSC

SEQ ID NO: 392034 - protein, 354 aa, unidentified
MKRTTKYVALDVHQATTSASVREENGRVIARSVLPTDGAAITEFVRGMRGAVHVALEEGTQAQWLHDVLAPLVDRVVVCDRRGAPRQGNKADQVDADQLSEQLRRGGLRAVYHGSADRATLKELTRTYRNLVEDATRVMLRLKALFRARGIPASGKHVYHPRGRAQWLAQLQDPGARLRAEALYAELDVLRHLRPRAKAAMVTEARRDPAWPVLRTIPFFGSVRVALLLATMQTPWRFRTKRNLWAYAGLAVVTRSSADYALVAGQAVRRRRPPLTRGLNRNHNRVLKDVFKGAATAATARPGPLQDFYHGVIARGTREELARLTLTRKLAALTLRLWKKGERYDPTKLTTPAR

SEQ ID NO: 392035 - protein, 458 aa, unidentified
MARAPRRGKSSTKSLIPIHPNAAGLDVGATFHVVAVAPDRDDEPVRSFRSFTGDLHRLADWLKSVGITTIAMESTGVYWVPVFEILEARGFEVLLVNARDVKNVPGRKTDVNDAQWLQQLHQHGLLRGSFRPRDGVARLRALLRHRERVVDYAASHIQHMQKALMLMNVQLHHVVTDITGVTGMKIIRAIVEGTRDPKVLAGYRDLRCKASFEEIRQGLDGNYRTEHVFALRQALELYEFHHAKVAECDLEIEAALHELNDDREAPAAPMPKVRHSRGRNEPRFDVRAALYTFLGADLSQIHGFGPYTVLRLVAECGDDMTKWRTVKHFTSWLCLAPGNKISGGRVLSSKTRRSSNRAAALLRIAAVNIGKTHSALGAFYRRLGARAGKAKAVTATARKLAVLFYNALRFGRAYSDPGADHYEQDYRRRVVHQLHRRARQMGFQLVPNAAVASTEGVS

SEQ ID NO: 392036 - protein, 347 aa, unidentified
MLIIGCDFHPGFQQVAIFDNRTGEIGEKRLQHREEAEQFYRSLAGQEVLVGMEACGHYPWFERLLAELNIELWFGDAARVRASEVRRQKTDRRDAEHLLDLLRTDRFPRIWVPSLEVRDVRQLLVHRHKQVQARTRTKNQLQAMALGCGVQKKYKLWTKAGREELEQLPLLPYAAQRRKRLLEALDGLEVEISELDRRVHQEAQQRPEAVRLMTHPGVGSVTALAMVLTLGPAERFGSGKQVGSYFGLIPSEESSGGKQRLGRISKQGSSFLRFLLVEAGQTAARLDPQLKRFYRRLAARKNRSVAKVAVARKLATRLYLMLREDWTYAQLCQAVMQVSPSHSVAGA

SEQ ID NO: 392037 - protein, 322 aa, unidentified
MTMLAEVVDVVIGVDTHKHTHTAAVVVAATGAAVDEATVDTDPDGYAALVEMADRHSGLRAWSIEGTGGYGAGLTRFLTERGELVIELDRPNRPARRNGAKSDPLDAVRAGREALAREHLAQPRAAGERAALAVRLAARRSAVDASTVAQRQLLSLIVAAPETIRARFRGLKTTNTVNAAARLRMSSTWDTETRTYAEVLRDLARRIQAMKTEADAHEKAILAIVRSWRPDLLELTGVGPIVASSGLTTRHRLNRCGDRQLNRAIHVIAMQRIHHDPATRAYVERRRTDLRNPKTDREIRRCLKRYIARQLYRQLEQPLDDL

SEQ ID NO: 392038 - protein, 359 aa, unidentified
MRTITIGVDLAKQVFSVCSVDAAGRVQDRRELRREAFRQWLPSVPAGTIVAMEACSGAHHWARRCQDSGLQPRLMAAQFVTPFRKSRSAKNDRNDAEAIATAARQGNMRFVPVKTVDQQVRLSWHRVREGYKAEALATSNRLRGLLAEFGVVVAQSEAALHRALADLDALALPSALVELLRDVDAHWQQLQIRIAEADRRIQSHAKADEACTRLRAIIGVGPITADAVVATIGSAQDFKNGRQFAAWLGLVPMQHSSGGRSRLGRISCRGDGYLRTLLIQGARSSLQRAKAVPWEKASPEQRWIQDLERRLPFGKVLVAIANKHARQLWAMLARGEHYDAEAWLKHPMVQRPEKRRAAE

SEQ ID NO: 392039 - protein, 420 aa, unidentified
MPDDRCRLGSDDVVIGLDLASAEHQVVVLTAAGQRLTRFRIPHSRVGLEELLRRTAPAALGRAGGTRVFAFEATGHVWEAVAYVLRARGERYMVVNPLTTFRVREARQLSREKTDVTDAEQIGELCRTGLVTRTQLEARPYLALRRAWGEYRRLREERARLKVLVAHQLYGLFPEFLRVWADLLQPGALAVLRTGLTPAAMAALSLSEFVAQVRAHRAGRRIWRFKLAQVHRYAAQTIACPDGLDVLAREVQRAVARIDVLTAQMTAVATEIDALLADLEEVPYLRTIPGLGWASVAGLLAHVGAITKYRHGRQLIKLAGTNPSRRDTGQTVGRGQRMSRRGRSGLREVLYLATISCLQHNPRIRAHYDRLIQRADRPLPKMQALGACMNKLLLYAFAVMSRREAFQLDHNWQRTMPRVA

SEQ ID NO: 392040 - protein, 464 aa, unidentified
MAHKSLSFKKKQHFLQLIKDIPTDRILFCPIDVSKHFHVALLHDIRCQPLSDFFEFSASNIGFASFTDRLEAAFTIHSPQLVLIGMEPTSVYYEGLLHNLRRRYATFTTPKLQLCIIDPAAVKENRRQHSLRTQKTDQIDAAAIGELLTRGLYTPAYFSSPQAILIKEVARSLNDHRHQMLALWNRLLTRLDRVFPNLLINYRDEKPFAQQPLQSKLLDDLLHLCPDPYLILDLTTADLIELFHQQDRPLGPKRAEKIIQAAQRALLPPKALHQVHLQLFKAELETLDFLKAQIAKLERQLEQLIIQSPARHLPAIAGNSAKLTAELIAALEDWQRYETIQPVWAAAGFAPIAEQSGSSSAKPKISKRGSVHLRNAIYKMTCSVIWHEPTFGIPCFQRLLNHHPFVPTILHVGRKLTGTALAILKADRAFHPPIADYSLAKEKLSLLQQQYLKQKKQTASQDQK

SEQ ID NO: 392041 - protein, 387 aa, unidentified
MPQLNDLSKSLVALEQDATLIAVIEMSQSSWLVAGIVPGVERQPLKKLTTDQDALLQLLHRWRKEANEAGHVIKRITVAYEAGRDGFWLARWLRAHEIEAYVIHPSSVPVSREHRRAKTDRLDTELLKRAFLGWLRGEPKHCSMAAVPTIADEDARRPSRERENLVKEITRLVNRMKANLARLGIRGFRPHLAQAAGQLQTLQTPEGTAVPANTLAELRRDMDRLRFVKQQIKQIEAARVQRLESEPGERRHAMVYLLARVVGIGVESADMLVQEVFSRKLRDRRAVARYAGLTGAPDESGNKRRERGLAKAGNARVRRGMIQLAWTHLLHQKDSVLAQWYRARTADARGRTRKIMIIALARKLLIALWRLVTTGEAPAGLLIRPAA

SEQ ID NO: 392042 - protein, 422 aa, unidentified
MAREKDTKVLEVLHPVCCGLDVHKKMVSACLIVQSGAGERVEHREFRTFTDDLRALKEWLPENECPVVAIESTGVYWRPVFNILEGSVQVILVNERYTKHVPGRKTDMSDAKWLAGLLRHGLVKASFIPCEEIRQWRDWYRQRKIHVETLGDYKRRVHMVLEMANIKIDSVVTDIFGATGRDLMELLMNGGPIRLCDVEECLRGRLAGKQRKEKAEALLDAIQGFFGDHQRQILQPLLRIIGFLQNEITLIEARLKKLFAPYHDLIERMIGVPGIAYVAAWAILAEIGPTLEGFRSVEAFCAWCGLCPGNHESAGKRKSERSPVRRSIIRTILIEVAWAAIKTKGSYNKAKYFSLKARIGAKKAIVGIAHRIAKGLFCIIKDGAEYKELGGDYLTLLHSFTPNGGTNTLAAKPKSLDTSWFQ

SEQ ID NO: 392043 - protein, 314 aa, unidentified
MKMPVFIGVDVSKRYLDVAFPEGVERVSNEAEGLGALAERLSKTAPALVVLEATGGYETGLVLALQRANVPVAVVNPRQARDFARAQGRLAKTDAIDARVLARFGAVMRPAPLPPIDASQEALGALVSRRRQLIEAVIAERNHLEHATPAVITWIDRHIAMLRDQLAQVDAAIAATVEADRALAHRQAIVTSVEGVGPATAAVLLAELPELGHIEHKQLAALIGVAPINHDSGQFRGQRHIAGGRASVRCALYMATLSAVRHNHTLRVFYQRLRDNGKPAKVALVAAMRKLAIILNALVRDDRHWQPALVQDGC

SEQ ID NO: 392044 - protein, 448 aa, unidentified
MSTTKPTPLDTDKKSAAATLPAPSSEPPFAAFVAIDWGDEKHAVALRVADQTQTEHTILEQKPEALAEWIAGLRQRFVGGTVAVILEQKRGALLYALQPHEHLVLYPINPQMSAKFRQAFYPSGAKDDPSDAALQLDILLQHRDRLTPWRPDEAMTRQLGLLVEDRRRFVADQVRLTNRLREALKSYFPQALELVGEDLTSRMACAFLQKWPTLAALQKVKPAVLRKFYYAHRSRSAELIAQRLKLQAQAQPLTTDAAIIAAQSLLVQCLAQQLATLLPVLACYEKQIAQLFAAHGDRALWDSFPGAGPALGPRLAVAWGTQRDRFAEPQAMPCFSGIAPVKEASGKQLWIHMRWACPKFVRQTFHEMAKASLKFCVWAQCYYQMQIERGKGHHAAIRALAFKWQRIMWRCWQDRTPYDDAKYVASLKRSASELYARVSATPVKAMCE

SEQ ID NO: 392045 - protein, 412 aa, unidentified
MQIVYERCAGLDVHKKSVMACLITPEANGGRRKERQTFSTMTADLVRLRQWLTERQCSQVAMESTGVFWRPIFNILEGHVEVLVVNAQHIKAVPGRKTDLKDAEWIADLLQHGLLRPSFIPPAWQRVVRELTRSRTSLSEERSRVIARLHKGLEDANIKLAAVASDLMGKSAQQMLQALIAGELTPETMADFARGRMRSKRELLVQALTGHLQAHHRFLLAEHLKHLSELQEGIARLSAEIAERLHPYEKLLARLETIPGIKRRLAEVILAEIGTDMRRFPSAQHLASWAGMCPGNHESGGKRLSGKTRKGSQWLRTALVEAAHAASHCKDCYLSAQYHRLAFRRGKKRAAVALAHTLLIIVYHLLAHEQEYQELGGTYFDELDRDKKEKSLVRQLERLGFEVALTPAPSQE

SEQ ID NO: 392046 - protein, 418 aa, unidentified
MTVTNSTIATVLVAIDISKHRHEVLISIPGKKRRRRLTITNTLEDFERLATTLTSYDLPVRIGFEATGNYHRVLAHHLGQAGFELKLVSSVGLARTREALHNSWDKNDPKDAQVILHMLEIGAVQFFHDPLVTGTADIQELSKTHEIVSRSKTELWHRILTHYLPLYFPEAERFHRSSRTDWFLAFLEKYPSPHMITAMSREAFVADAWQVVGRKVSKERLLSDIYATAVGSVGLPVHPDSDAVRMFRLVLAEGRSLVRQRNEIEVRAVELLSDLPDYQLLTTIPGIGPINAMTILAEAGDLRRFRHHRQFLKFCGMDLATVQSGMFRGQSRISKYGNARLRRSLWMAGQTAVLKRTNSFRDKFERYISKDRHNAHLRRKAYTAIAAKMARTVHAVVKHGEPYRPFFEGVSPGGRTSL

SEQ ID NO: 392047 - protein, 369 aa, unidentified
MERIVYVGLDVHADTIAVATAEEGRDGEVRFHGVTENTGDSVLRLTKRLVAGGTHPVFCYEAGPCGYGLHRLLTKLGFDCAVVSPAMIPRRAGDRIKTDRRDAEMLARLWRAGELTPIWTPDEEQEAMRDLIRTRKQALEALKIAKQQLLSFLLRHGLRYDRPSYWTKIHWRWINELRKFRYPHQQLAFEELKRTIRQIEERIGTLDQAIEDAVKDWRFARLVDALRALRGVNTTIAATLAAEIGDISRFSNPRQLMAWFGLVPSEHSSGSTTRRGRITKTGNALARTMMVEASWSYRHPPREQHPHLKRSLHLPQEIRDIAWKAQTRLCKRYRDLSKTGKPQPRVLTAVARELAGFIWDIARKVPIRA

SEQ ID NO: 392048 - protein, 291 aa, unidentified
MDTETGDYGEQRLEHSEGAEEFYRDLAAQGKKVRVGMEASGHARWFERLLAELNCELWIGDATEIARKRERKQKTDRQDAQHILQLLMENRFPKIWVPSGENRDLRQRLWHRHRMVQMRTRIMNQLQAVALNEGLRCKKRLWRQHGREQLESFRLAPWASRRREDLLQLLDRLNPTITDLTQVIEQEVEKCPEARRLRTHPGVGALTALAFVLIIGRAERFQCGKQIAAYLGLVPLEDSSGNRRRLGHITKQGSSMLRFLLVEAAQVTARSIPEWRNKYFHLAMRRGRKRY

SEQ ID NO: 392049 - protein, 353 aa, unidentified
MDKITRIGVDLAKNVMQVHAVDSAGRVVARKAIARERFVSWFANLEPCLVAMEACGAAHYWARKLRALGHDVRLIPPQFVAPYRKGGVHVKNDALDAEATCEAASRPHMRFVPVKSPAQQSLLVLQRMHTGFVEERTALVNRLRGLLAEFGVFVPQGIRQLHQHFIDRVEDGNNELAGPARQALMHGWAQWQALDEEIAWFDRQIAEHANHDSQAQRCMDVCGVGRLTASAAVATVVDARQFKNGRQLAAWLGLVPRQKSSGGKQRLGRITRQSNDHLRTLLFQGARSAISSLPTAVMIGSRAGSSSSRLAWAATRPWSPWLTRARILWAVLARGERFDPSYAPARTRMAAGA

SEQ ID NO: 392050 - protein, 351 aa, unidentified
MQIVSALDVHRRQITFRTVELASGETGRGRISPAAREPVRAWLERFAGQDAHFALEGTTGWRFVVEEIERAGHTAHLADPAETAARRGRKRRAKTDDSDCELQLRLLLGGELPEAWIPPTHILELRTRVRLRKTLIDQRTAWLQRLQAQLFHQGAPPGLKPRTAAGRRELATLALSPAGREVAEMCLRMLDQLDRELAPIDRALHSFARRQPGCRALTGRLYGVGAVTATAILAELGDARRFKSSDDAVRHSGLDVTVWQSDRKRAAGHLSHQGPSLLRWALFEAAQCAARRSSPDHAYYLDVAKRIDHNRACLSVARKLCRRAHHILRELGDDALAPSDPPRAKLVEAAA

SEQ ID NO: 392051 - protein, 373 aa, unidentified
MNEFSKYVGLDTHADTIAVSVAEACGGKPRYYGEIPNRPASVAKLVKKLSPDGEVVSFCHEAGPCGYGVYRQLTELGHACDVVAPSLIPTKPGDRVKTDRRDALQLSRLQRAGELTPVWVPGPEQEAIRDLTRAREDLVSMERRAKQRLGAFLLRHGKVYTAGVKKWTKQYFRWLEEVKFDFPVQQIVFQEYVDTVTHLGARVEALEVEMERVLPGWSLAPVVEALMALRGIDLVSAMTLMAELGDITRFDSPRQLMAYLGLVPSEHSSGRHQRRGAITKTGNGHARRTLVESAWSYRFPARKTAHLQRRAKKTSESVQAIAWQAQKRLCGRYQHLMERGKLKVQVTVAVARELAGFIWAIACEVMGRPVAVR

SEQ ID NO: 392052 - protein, 523 aa, unidentified
MSSKRLSRRARKGAAQFIQKPRGVIHPRVQQIGPEHFGIVCVDPAKARSKWMLCDFYGNVLVPPKFVAHNRVELDAAISEVRSVCEQRELRDVLVAVERTGRYHHPVKNAFRRADFDTRLVHPYATKQFRQPADPGNKTDDRDLAAMHRATVNGFALVEAVADESWQRLQLLIRHRRNLVQKNSALCSQIRHHLEVAMPGYAACFDKLWEHPVGMALVRQFDSAAALTEAGLDGLVAFTRGQGIRCQRRSLVTVLEWARNAAVADSAADTHRRIALAYDEDRRRKMQEIQALERTCAHLLARTPYILLLSFPGVNVVSAADFAGEMGPITNYANSRAITGRAGLFPARYQSDQTDRADGPLVRRANRALRAAILGIADNLILCNHYFNAMAARWSAAGKDIRHTHVKIGSRFCRIAFHMVAGRQVFRHPGLRERSYILDKLLAFHREHDTPWPETLEDLNQAVAHVPPKEYRAEAKPLRERLEKFERRRAKGPQQLGDLLAIVLARLGVGRVQSPESGENNLT

SEQ ID NO: 392053 - protein, 422 aa, unidentified
MRILEPLQIFILEESVMLNAVGIDVSKERSTVAVLQPGGVIVHKPFDVPHKSRNLHDLAQYIGSLEGDTRVVMESTGRYHEPIRNALSKAGLFVCTVNPHLIKNYGNNTIRKVKTDSADAKKIARYTLDNWAELREYTSMDTTRTQLKTLNSQFSFFMKQKTAAKTNLIALLDTTYPGVNKLFDSPVRADGSEKWVDFAYSFWHVDCVRKAGITAFTDRYKRFCKHHGYEFQEAKANAIYKDSKELIATLPKEAVYKELIQESIRQLNLLSENVEHIRKTMNELASTLPEYNTVMSMYGVGPTFGPQLMAEIGDISKFQHREALTAYAGVDPGKNDSGQEVHNSSHASKCGPSRLRHTLFQIMTTMLQTGGKEDDAVSSFLFKKKAENKPYLVYMTAGANKFLRVYYGKVKECLRNQEQAEE

SEQ ID NO: 392054 - protein, 352 aa, unidentified
MEIISLDSHKRYSQICVQNQNGRYLCEQRVNHDRGAIREFLSGWTPGSDVAVETIGNWYWIVDEIEQAGMTPKLVHAHKAKLMLGSVNKTDKLDARGLNKLQFTGTLPTVWIAPDAIRDNRELPRTRMVFANYRTRLKNRIHSVIDKYGLHTDFSDISDIFGSKGREQMKLTIKKFPPQTAYTFRCLFRELDTIEEQIKRIEKRMKKVFKHTEKVERLMSLPGIGFILAVAIANEIGDISRFATPQRLASYCGTVPRVHSSGGHTRYGKLRSDVNHYLKWAYSEAGNSTAVNYKRLPLRHTSKLYKRLRERKGHAKAIGAVARHLAEASFWVLTRNEDYKEPKLKSFSSTAV

SEQ ID NO: 392055 - protein, 387 aa, unidentified
MPQLNDLSRSLVALDQDSTIIAVVELSQSSWLVAGVLPGIERQPQKKLEPSAERLLGLLHRWRDEAVRAGKKITRIALAFEAGRDGFWLARWLNARGVEAHVIHPSSVAVSREHRRAKTDRLDTELLKRGFLGWLRGERGHCSMARVPTIAEEDAKRPNRERECLVGERTRIVNRMKATLARLGVRNFKPTLRKAAERLATVHTPEGTPLPRNVLAELQRDMARLGFVVSQIREIEQARQKRLEQEPETGPHAMVRQVARVIGIGIETADMLVHEVLARPMRDRKAVARYAGLTGSPDESGARRREQGLARAGNARVRRGMIQLAWRFLRFQNQSALAQWYRARTADSRPGTRKTMIVALARKLLIALWRFVTTGETLDGVILRPAG

SEQ ID NO: 392056 - protein, 355 aa, unidentified
MDSKKYIGMDVHKESISIAVMNGTGKIVMECVIETKASMILQFIDGLRGDVHVTFEEGTSAAWLYDLLKPHVTKLVVCDPRKNASMREGNQNDKIDARRLAELLRLNHLNPVYHGEHGLRSLKELVRSYLTITKDLGRVMSRVKAIYRSWAIPCTGKQVYAPRHRAEWLGKIGEPGVRRRAEFYYQQLDALRTVRQEVRRELLAEGKKHQAWKRLCQIPSIGPIRSAVLLGILQTPHRFRTKRQLWTYSGFGIETQSSADHRSVNGQLERVKKQSSIRGLNRNCNHDLKNLFKGAAIVASSKPGPFQEFYTALLTKGIRPEMARLTLARKIATIALIVWKRGACFDAQHLKPQTA

SEQ ID NO: 392057 - protein, 352 aa, unidentified
MRRRKHQVTSGDDLFVGIDLHKHRWHVTIRTFDVEVFSASIPGTWESLHRVLARYPGHSLQAVYEAGYFGFRLHDRSVDHGIPCIVTPPSLVPQEYGNRVKTDRRDSSKLAHLLAKGLLKRVWVPSEEELYHRQVIRRRRQLIRDRVRTQSRIKAELRFYGVHLEEPRGGWTKIYCETLRSIKFGNRWMQESFSRLLELYEFLSAQIDKQTQLLRELSETPMYRERVEILQSIPGIGMISAMELLLELQDVSRFRRAEQLAAYVGLTPSQYSSAEKVRMGRITGIGKNTLRSLLVEASWTLIRKDHTMREKYDRIKIHSGGKRAIVAIARTLLLRMRRMLLDKQAYALQLAA

SEQ ID NO: 392058 - protein, 463 aa, unidentified
MDFLQFIRARNLIFVKAIPFANIEQSMTVCSNNITEAMLLLKIVRKICCGIDIHKKFVVATIGATNDAGVTDYQTKQFPTFTDELINLRNWLIANNCRDICMESTGKYWIPVFNVLEDECTVFVANPKYVRGIRGNKTDKRDALWLCDLHKHGLTRNSFIPPKLIRQIRDLMRYRFKLTNNASSEKNRAQNCLTVSNNMLSSVVSDTFGKSARSIIDKILSNPEDTDFDVAPLMHRHMKATPEEISRAINGTMDDSQATKLQICLDHLDDISKYKSEIEAKAIELAQPYQRQHDILLSLPGISDSLTAIAIIGEIGVDMSAFLSVRHFCSWAGVVPANNESAGKKKSVQCARAGVYIKPLMVQVAHAAIKSKKCPYFSVRYNQIARRRGKKKAIVAIAHMLLVCIYHMLARNEEFNPELYTLPENQNPKRNSTFTADEARKFLEKLGATVVMPDPVMPSAPSG

SEQ ID NO: 392059 - protein, 366 aa, unidentified
MKKISTAAAKGTRNFHEQKLTIGLDLGDRSSWYCVLDETGEVVLEQKLSTTPKAIKEGFGGMPRSRIALETGTHSPWVSRLLSELGHEVIVAHARNVRLIGESRRKDDRLDARTLARLVRIDPQLLCPVKHRSARAQADLTVIRARAGLVRARTALVNTARGLAKSYGERLRGCNVRNMNPEKAEGLSPELQTALQPLLAGIELLSEQIREYNERIEGLAQESYPQVKLLKQVKGVGTLIALTYMLTLEDPHRFRKSRDVGCYLGLQPGRRNSGQSEPQMHISKEGDPYLRTLLVQGAHHILGPFGADSDLRRWGLKLAERGGKNGKKRAIIATARKLAVLLHRLWVSGEVYEPLRASNRTMLVAA

SEQ ID NO: 392060 - protein, 412 aa, unidentified
MFKIFRNNCCGLDVHKTWIYSCIGITDPNGRTEYKQARFSSFSKGLRELAAWLAKYSCTEVCMESTGKYWIPVFNILEKSCFVTLAHPKYTKPQKGNKTDRKDAKWICDLFMCDMIKPSFIPSPEIRQLRDLMRYRFKLTNMLTGEKNRAQNCLTVSNLKLDDVFSDVFGKSSRSITNYILDHPGKTFDVSPFVDPRCKTPVSEIQAAVDGAISPEQAVKLRQCLDHIDELEAHRKEIESEILRIAEPFSAVLDLLYTLPGLNKNPMTAIAILSEIGPDMSVFPSSKHLISWAGCCPRNDQSNQKVKSRRISRAGSYLKPLLVQVANALIKSKKHPEFKERYHRIKSRRGHKKAIIAVCKMLLTAIWNMLSKLEPYNPEGFLEHRPVKQEKTLTVSQALELLRLRGYTIANQ

SEQ ID NO: 392061 - protein, 342 aa, unidentified
MQITTIGLDIAKNVFQVHGIDVTEEVVVRKQLRRRQVLEFFKALPPCLIGMEACATAHYWARELTKLGHRVRLMPAKDVKAYVKRNKNDAADAEAICEAVRRPTMRFVQIKSTEQQGRLMLHRTRDLLMRQRTQVINAMRAHLAELGIVAAQGREGIKELLKIIASEEDARLPVDAHTSLVILAAELQAMQTLIGSIEKRIMVQHRSSEASQRLESIPGIGVIGATAIAATVPDPKVFRSGRDFAAWIGLVPREDSTGGKQKLGPISKQGDRYLRRILVVGACAVLRYARQQPEKYPWLTQLLARKPFKVVAVALANKMARIAWALLAKGGTYRSPALAAAA

SEQ ID NO: 392062 - protein, 365 aa, unidentified
MGEVTTTPTTLTIGIDLGDRKSHVCVLDADGAVVEESRIATTPKALRTRFESLAPTRIALEVGGHSAWVCELLKDLGHEALVANARKLRMIFQSESKTDRLDAEQLARVARMDPRLLYPIEHRERSARADLAVMRSRDALVTTRTRLVNHIHGVLKSFGHRVKKYPAPGFHRQVAGQIPEELQPALQPLLDTLEAIAERVLHFDREIRRLSTKVYPETALLNQVGGVGPITALRYVLTIEDPERIGRSRNVGAYLGLRPRQRQSGQRDPELRITKAGDRDLRCLLVQCAQYILGPFGRDSDLRRWGLELAGRGGATAKKKAVIAVARKLSVLLHRLWLTGEVYEPLRNTNRRAAAQAPEPAALAG

SEQ ID NO: 392063 - protein, 339 aa, unidentified
MKKVFIGIDFSKLKFDAAIYSVDTKAIVSSEVFDNEQSGYADFLQWVKENTRCQKSGMLFCGEHTGYYSGNLSVFLYESGYDMWLVSGLEMKLTQGIKRTKTDRVDACKIAEHAYRYQDKAVLFQPVSKVLDQIRELLSYRERLVETRKVLTTSAQEMKRVKNNVSCDYIYRDSIEYIKTLNASVRDCEKRIEALLKQDISLNTNYKLVSSVVGIGLVNAALILVATDNFTKFDNPRKFGCYCGVVPFEHSSGTSVRGKTRVSKMANRHLKTKLTLAAQNAVRFDPDLKEYYLRKRSEGKNNWLVLNNVKNKLIHRIFAVVRDGQMYEKQYVHPLKQVA

SEQ ID NO: 392064 - protein, 370 aa, unidentified
MPSITQSAAPCHIPADAAGEVLLGVDTHKDVHAAAVITTLGATLDGRTFPATAEGYRQLVAWARSFGLLRRAGVECTGSYGAALTRHLRTEGIEVTEVNQPDRAARRRHGKTDAIDAEAAARAVLSGRATATAKTSDGPVEMLRLFKLAKGSAIKSRTQAINQLKSVLVCADVELRESLAGLSNPKLFQQCAALTESEDFGPAGAARHTLRLLARRIQSLTEEITELTGRITEAITSSTPGLLEVNGVGPDSAATLLIAAGDNPERLGNEASFAALCGTSPVEASSGKTQRRRLNRGGDRQANAALFRIILSRLRWESRTQDYMRRRLAEGKSRREIVRCLKRYVAREIYRIIVPKATVGERTEPARGAA

SEQ ID NO: 392065 - protein, 358 aa, unidentified
MKTDLDNTSFFENILLFIGIDVHKLKWVVTIRTYDLELKTFTMKPSAEELERFLIKNYPGADYRIVYECCFSGFWIYDYFSEKGYKIIVTPTNRIYKDGSTIKTDKIDSRKLAFQLSRELLREVVVPVKRVREYKYIFRIYDKQKMRQGQILRQIKAFLEQKNHPLKWSKWNKGLLEKLKGLNFEDKLFNLKFGNLLKEYEYVVEQIKDSEKIISEIKEDEQLGKRIELIEKINGIGIISAVRMSVYLFDRKDRFESSEKLNHYLGLTPSERSSGDKITRGRSGMCGNRQLRSIIIQLAWMTVRKDGSLLDKFDRVYKKSGSKQKAIVASARKLMTKIFAVIQKEEEYRINIRTGKAA

SEQ ID NO: 392066 - protein, 366 aa, unidentified
MKKISTMQVFGNEIFKEQKLTIGLDLGDQWSCYCVLDEAGKIILEQKVAMTPEAMKQTFAKIPQSLIALETGTHSPWVSRLLTELGYKVIVAHAQKVQLITKSSRKDDRHDARTLARLARIDPELLGPVRHRSAQAQIHLTVIRARAELVRARTALVNAARGLVKSYGQRLPKCGTQQVSRELGAGLPAELREVLEPLLKEVESLNERIQEYEVRVEKIAKESYPHVELLKQVKGVGTQIGLTYVLTLDDPHRFPKSREVGCFLGLCPGRRDSGESQPQMNISKEGDRYLRTMLVQGAHYILGPFGEDSDLRRWGLKLAARGGKNAKKRAVVAVARKLAVLLHRLWVSGEVYEPLRNSQKAMRTAA

SEQ ID NO: 392067 - protein, 387 aa, unidentified
MSQVSDLSRSLVPFDQNITLTVVVELSEASWLVAGLIPGVDRQPVKKQEPEPVALLRLLERWRAEAVRAGRTIGRIALAFEAGRDGFWLARWLQARDIEVHVVHSTSVAVSREHRRAKTDRLDTAMLLRVFLGWLRGERGHCRMVAIPTLEQEDAKRPSRERESLVGERTRIVNRMKAALARLGIRGFKPTLRKAPQRLDALRTPEEVSIPPNTLDEIRRDMVRLAVVREQIDVIERGRLGRLEQAPAAGPHAMVRLLARVIGVGLETADMLVQEVLSRNLRDRRAVARYVGLTGSPDESGRRRREKGLAKAGNARVRRGLIQLAWRFLRFQRDSTLAQWYRTRTGGPKGARKTTMIVALARKLLIALWRMVTIGEIPAGVALRQVI

SEQ ID NO: 392068 - protein, 394 aa, unidentified
MGKLYVGIDISKDRSSAKGIDEHGRSCFEISFDMEGAGFAELLKAIEDNSDGYKDVVAGMESTACYHINLYSFLSAKGIEAVVINPLLIANFAKLSLRKTKTDKKDASTIAQFILAHRASVKQLAVSQDQQDIRDMARERESLCHQMSAAKVEIRRLLNTTFPELESMCNPFTKVMLHFIQRFPSARLVSTAKPNIIAKTLKEKPCSCRIRFTPSELINIASKSIATVSPGKEIILSGKIDTLSHLQKRRDELTKALTKYCESSIVEDLKILTSIDGIGNNTATTFLAEIGRIDNYASHKNLIAFAGIDPTVYQSGKYEGSSKISKRGNRHLRRVIWLMTVRVINHNPTFRKYYFKKKSERQPFKKAVFATAHKLMRVIFAMLSNKTYFQEECI

SEQ ID NO: 392069 - protein, 412 aa, unidentified
MHSENIAAYIGLDVHKETLAVAIAAPERLGEVRYYGTINNEAQAVRRLFQKLQGLYGNILSCYEAGPCGFGLYHQLTAMNIKCQVIAPSRIPKSPTDRIKNDHRDAISLARLLRAGELTPVWIPDLTHEAMRDLIRARAAAKRDSRVARQRILSMLLRTDKRYAGKHWTGKHRTWLANQSFSQPSQQIAFQHYCQSLEQIEDRILQLDQEISRLLPEWSLCNLVCQLQALKGVGQLTAITLVAELGDFSRFSSPKQLMAFLGLVPGEYSSGNSIRPRGITKVGNSELRRLLYEAAWSYRTPAKVGAWLIYYRPDSVTQYSKDIAWKAQQRLCSRYRSLTAKGKKSQVAITAVARELTGFMNRPGFPGECFICELRLPDHRFRWKHNKLFLLLPEEYGPAFPAIVDCYTSPPT

SEQ ID NO: 392070 - protein, 343 aa, unidentified
MNTQQFEVIRPKCAGLDVHKKSVVAAVCTSDPVTLTASYKTKVFNTTNSDIAALRDWLLAQDCRDVCMESTGKYWIPIFNILEPHMHVVLTHPKYVKAIKGKKTDKRDAKWIANLFRFDIVKASFIPPADIRALRELSRYRLKLSYMRTAEKNRYQNSMTISRIRIDCVLTDPFCLSATRIMDYLLSDEPFDEETCRSLIDRRVKASKDEVMDAVHGYHILEEQKFKMTHAKAHMDFINRTIGEIETELFLRSRQYDCQVRRIATVPGITELSALFILSEIGADMSVFESDRHLCSWAGLTPANNESAKKKKSTRCSRAGQYLKPLLIQCAQNSAYGFILLER

SEQ ID NO: 392071 - protein, 418 aa, unidentified
MEVRNPRCSGLDIHKKSVVACVITPEGKATRTFRTMTQDLLKLKEWLKERGVTHVAMESTGVLWKPVYNVLEGSFTLLVVNAAHIKAVPGRKTDVKDAEWITELLQHGLLRGSFIPDRAQRERRELTRYRRGLTQQRGDVVNRIQKVLEGANIKLSAVATDVVGASGRAILEAMVSGVDDPQALAAMAKGRLRNKTPDLQEALNGLVGPHLRMLLDSQLRHLSFLDAEISRLDREVAERMLPFEADMERLDDIPGVGRRAVEYVLAEIGLDMSRFPTVAHIASWSRLCPGNNESAGKRRSGRTGHGNPWLRSILVQVAWAAARTRGTYLSALYHRLAARRGAKRAIIAVAHAILCIIYSMLRNKTTYHDLGEKYFDQRNRQSVVTRAVRRLQSLGYTVTVEPTPPPVQNAGPQPVFSR

SEQ ID NO: 392072 - protein, 344 aa, unidentified
MDHYAGIDVSLEQSSVCVVDATGKIMREAKVASEPDALVRFFADLGYPVVRIGLEAGPLSQWLHAGLSEAGFATVLLETRHVKAALSAMVVKTDRKDARGIAQLLRMGWFRSVHRKSADAQEVRALLVGRKLLQSKLRDVEFSIRGLLRGFGLKVGEVSKGRFAARVEELIEGHAMLEEVVGAMLTARAGLHSEFMRLHRKMLAIVRADEVCRRLMTVPGVGPLVAVTFTATVDDPARFTSSKAVGAHFGLTPKKYQSGETDVTGGVSKVGDAMVRTALYEAANVLLSRTSRFSTLKRWALEVAKRRGVKRAKVALARKLATVLHRMWVDGSEFRWGKEAPVAA

SEQ ID NO: 392073 - protein, 466 aa, unidentified
MSAGGLEMNRKRSKSKAERTLPVMHPNAAAIDVGATMHMAAVRADRATEPVRSFGTFTADLHRLVDWFTECGVETVVMESTSVYWIPIFELLDARGFTVFLVNARDAKHVPGRKTDVSDAQWLQRLHSHGLLRASFRPKGQIAELRAYVRQRERLLEYAASHIQHMQKALTEMNLQLHHVVADITGTTGLRIIRAIIAGERDPEVLARLRHYSCHSSAETIAKALTGSYRTEHLFALEQALALYDVYHEKASACDGRIEAVLKGLSIDRARSGSKELPTPRRHRTDQPNALAFDVRAALFRLLGKDITMIDGLGPYLSLKLIAECGDDLSSWPSAKHFTSWLGLAPSNKISGGKILSSRTRRSGGRAAALLRLAAVTVGRTDTALGAFYRRLSARIGKAKAVTATARKVAVLFYNAVRHGMEYVDPGASAYETRYRARIVNNLHRRAKASGFVLQPMEPTPNIVVS

SEQ ID NO: 392074 - protein, 388 aa, unidentified
MLSVYPHAMAEPTLRKEPTVMTSMTDTGLIFMGLDVHKDSISAAILEPGSDSPACDRIFHDEPSIRRLMGRYDPSRLRVCYEAGPTGYGLARLLESMCIDCTVVAPSLIPTAPGDRVKTDKRDSRRLVRLHRAGELTPIRVPSELEESVRDLCRARDDAVIERRRARQRLGGFLLRHGKVFRDGGNWTAKHEQWLNSLSFDEPAATATFGHYRSMLQMADSALRAIEADLEVWFTREPFAEAVARLAAYRGIRPLGGLVLASEVCDFRRFPAAGSFMSWTGLVPSEYSSGGSTRRGHLTKTGSQMVRNQLVESAWAYQHRPAVGVTLRNRQQGVSPATIARSWAAQQRLCGKFRTLAARKDSKSVVAAAVARELAGFVWAEMTADNDN

SEQ ID NO: 392075 - protein, 355 aa, unidentified
MNEAKYIGLDVHQATISVAVRDSDGKLVMEAILETKAETILQFVRGLRGSLHVTFEEGTCAAWLYALLKPHVTQVLVCDPRKNALLKVGNKNDRIDSRKLAELLRANLLSSVFHEDTGLRAVKELARSYLTMTKDLTRVMVRLKALYRSWAIPCATKQVYAPRHRAEWLAKIREASVHRRAELYYQQLDALRSLQQQVKKELLLEGRKHSATKLLRQIPSIGPIRAVLLLALIQTPHRFRTKRQLWSYCGLALETRTSGEYRVVHGQLQRSKKPVAIRGLNKNHNHDLKNLFKGAALRAAAVEKPFQEFYAALVAKGIKPEMARLTLARKIAAITLIVWKKGARFDAEQLKQQAA

SEQ ID NO: 392076 - protein, 343 aa, unidentified
MDYFAGLDVSVKATNVCIVDDTGKIVREVKVLSEPEALLPVLKNPAYHFKRIGLEAGPLSQWLYGALAEAELPVVCVETRHMRAALKAQINKTDRNDGRGIAQMMRVGLYRPVHVKTLRSQKLRMLLTHRKLLQSKAIAIDNDLRGTLRNFGLKVGIVGTVKFEARIEELVDNLPDLAVLVEPLLVVRRVLREQLAILHRRLLAIVRDEEVCRRLMTVPGVGPVVALTYRATVDVPARFKTSKAVGAVFGLTPAKHQSGESERTGGISRCGDEMMRMMLYEAAQVMLVRSTKWSWLKAWAMKIARHRGMKKAIVALARRLAVIMHRIWVDGTEFRWTRDLAAA

SEQ ID NO: 392077 - protein, 351 aa, unidentified
MMIIGVDYHPSFQQIAFLDQETGECGERRLSHDGGEADRFYRELQQRGIFVRVGMEATGYARWFERLLAELGFELWIGDSAEIKTRRVKKQKTDRKDAELLLKLMREDRFPRIWIPPPENRDLRQLLWHRHRLVQMRTRIVNQLWALAMNEGQRRKKKLWSEQGRAELEKLSLAPWAGRRRRELLELLDRLNPAIEELTAAAEQEAKKRPDVLRLMTHPGVGPLTALAYVLIIGTPSRFARGKQIGTYAGMIPSEESSGDKQRLGHISKQGNSLLRFLLVEAAQAATRVNPEWRRRYIHLAMRRHKSIAKVAMGRRLAVRLYWMWRNGCEYSPSLEFGSYAGQPGTGHGGK

SEQ ID NO: 392078 - protein, 387 aa, unidentified
MSMPNDLSRCLTEFDPRTTLIAVVELSLSSWLIAGLLPGIERNPLKKMEPNEAELLRLLEKWRDEAVKVGSTINRIAVAFEAGRDGFWLARWLRARGIDVHVIHSSSVAISREHRRAKTDRLDTALLMRVFAGWLRGERGHCSMVAVPTMEEEDAKRPTRERENLVGERTRIINRMKSALARLGIRGFKPELRKAPQRLASLLTPEGTTLPPNILEEIRRDMDRLKLVREQIDVIEKARLEKLATAPVSGPHAMVRLLSSVLGVGIETADMLVNEVLSRNLRDRRAVARYAGLTGAPDESGKKRREKGLAKAGNARVRRGMIQLAWRFLLFQKESALVLWFRARTEGPAAGRKTKFIVAFARKLLIALWRMVTTGEVPAGVVLRPAT

SEQ ID NO: 392079 - protein, 322 aa, unidentified
MNKYKETFGVDISKDVFDVHGSNKGHSQYKNDETGFKKYLKELPKGSLVVMEATGYYHYRLAQFLYKNGVIVSVVNPLSIKRFIQMKLAKVKTDKSDAKAICDYALINEVHLYNALTDTQSECLQLFGLLDTYLKQRTATKNKIHGEAVLGIPSKFVHRSLVRNKKQLNKEVTAIESKILSLVKEDQQEQLTLLTSIPGIGQKTALFLIVVTDGFSKFENASQLCSYVGITPTIRESGSSVRGRARISKVGNRKLRNLLFLCSFNACKHNKACKEVYERIVNKGKSKKLALIAVANKLLKQSFAIAKSGRPYDETYVSMLPR

SEQ ID NO: 392080 - protein, 417 aa, unidentified
MSQFAALVALDWADKKHDVCLYDQATGQREQRIIKHTPEALQEWALGLRTRFGGQAIAVTLEQSRGPLIYALLKYDFFVLYPVNPKTLARYREAFSPACGKDDPSDADYLLDLLQHHRDRLTPWRPDDEKTRTLRLLVEQRRRLVNDATRTTNRLTALLKSYFPQVLSWFADLRRLIVCDFLDRWPTLEAVQKARPTTVHKFLRSHHSVHPLTNQRRLAEIKAAISLTNDAAVLNSSQLIVKVLTAQLRTIIVALAELDRHIEALCLTHADYQLFAALPGSGTVYAARLTAALGSDRSRWHTADDLLRFSGMAPVIERSGKQSWIRWRYFCPKFFRQSFVEYAAASIQHSFWARAYYFMQRARGKGHNAAVRALAFKWIRIIWKCWQTRTPYNEVAYLESLRKSGSPLLKWAVENQT

SEQ ID NO: 392081 - protein, 342 aa, unidentified
MGTITTIGLDIAKSVFQVHGIDATGEVVVRRRLSRGRILAFFEKLPRCLVGMEACNTSHYWARELMALGHDLRLMPAQYVKPYVKRGKNDAADAEAICEAVARPTMRFVAVKTPEQQSTMMLHRVRLMLNRQRTQLSNAMRAHMAEFGVVGPVGRMGLERLMAVIADREDLRIPPDARVCLEMLAAQLAVVKEQILENDRRIRARARETEVGRRLMEIPGVGPLLASAFVASIADPTAFKSGRDVAAWIGLVPKQNSSGGKERLGSISRAGNRYLRQMLVVGAMAVIRHVERHGTKRRWLIQLLARRAKKVAAVALANKTARTIWALMTNGERYREPTVALP

SEQ ID NO: 392082 - protein, 342 aa, unidentified
MKHCGMDVHLQSTTVEILDPATGEIARKVVATERGALRRWLSREARMRVVLEAGQSSHWVAELAEECGHEVVVVDPNRTKAVAVAGGHKKTDRIDAATLAWLSTKDALVPSHRAPQADRQCRRTLTLRQRLVRCRGDLVRAVRAALAGEGIRIRVKRGFPAAVRLALGPDASAGVLGRVLEVIEVVEENIGECDRVVEQAAKTDPVVELLMTADGVGPIVGTAFRVAVGSPRRFRSGREVAAYFGLTPTVHNSGEARNRLGHISRHGDRLVRSLLVQAAHSVLGPRRKPSDLRAWGMRTSARVGKKKAMVALARKLCVILWAMWKHERPFIRAMTTTAALPA

SEQ ID NO: 392083 - protein, 345 aa, unidentified
MKKRIEGVTVYGIDIGKNTFHVVGLDSTGKPTLHSKFRRDRLLAHFANTPAALIGMESCPGSQWLARKLQASGHTVKIIPAQFVKPYVKSNKNDMVDAAAIAEAVTRPTMRFTQIRQPEQSARQALHRVRDRYMSQRTGLINQMRGFLLEFGIAIRQGAGVFRLDVPRVLGDEENELPPSMRTLLGDLWNDFKLLEIRIEELSKQIQRSVQYSDTARRLMTVPGIGPLAASALEASAGNGHQFVNGRFFAAWLGLTPREYSTGGKTTLLGISKRGNTYLRRILIHGARSCVQTCDRQRHPLGAWITKLEQRMHRNKVIVALANKIARVAWKILSRPEEIYRWADA

SEQ ID NO: 392084 - protein, 310 aa, unidentified
MENIIVGIDVSKDRLDVGVRPSRERFAVERNSAGLDLLVSRLKDLAPHIVALEATGGFETVVAAALAAAGLPVVIVNPANVRSFAKAIGQRAKTDPIDADVIAHFAEATKPEPRPLPDEATRLLADLTARRRQIIEMMVSERQRERRVTAPRLKKSITRLLKALQKELTSVDADIDDAVRGSPAWREKEDLLTSVPGVGQIIARTLMAELPELGQLGRKEIAALAGLAPFTRQSGQWRGRSFIGGGRTVARTAVFMGAMVAKKHNPTLKVFFDRLVAAGKPKMVALIAVARKLLTSLNAILRDNRPWQIA

SEQ ID NO: 392085 - protein, 356 aa, unidentified
MSRDIKYIGMDVHKEAIVIAVLNESGKLVMESVIETKASSILQFLHGLRGELHVTWEEGTWAAWLYDLLQPQVQHMVVCNPRRNALLKEGSKSDKVDAGKLADLLRSGMLRPVYHGENGLRTLRELGRSYQTISKDLTRVMNRLKAVYRGWGIACAGTQVYAVRCREEWLSKIPHAGVRRRAELLYQQLDGLQALRRELRPEFLAESRKHKAAKLLRQIPCIGPIRAARLIGLMQTPHRFRSKRQLWTYSGLGIETHDSAQYCFVRGQVQRSKKPQQVRGLNRNHNHEMKEIFKSAATRASCGTGPFHDFYTGLLAKGMKPEMARLTLARKIAAITLTLWKKEERFDVEQLKTQAA

SEQ ID NO: 392086 - protein, 361 aa, unidentified
MQIIGCDLHTRQQTLAMLDTTTGEVVEKTLMHEASNVRNFYSTLSGPVRVGIEATGSMQWFLNLMEKLGIECQVGHPAKIRAAEPRKQKHDRRDADLILKLLLENRFPSIWLPSKELRDLRALLRHRHQWVRMRTRVQNALQAIALANGLRRGPSLWSQAGQHTIASLPLAPHSAHRRTELQALYVKFETEIEQLNQRVEEQAYERPGAQLLLTHPGVGPVTALATDVFLGDPARFADGKALASYVGMIPSEYSSGGRQRLGGLSKQGNPLLRFLWCEAAMHAVRQDPELQRFYRRKLIHKGLGKARVAAARKLGIRLWIMLRDQIDYNEFCRRGQMRQKNGGACAGMPDTAYGAKQSPTE

SEQ ID NO: 392087 - protein, 426 aa, unidentified
MNCTQNYKIDQVTEQTLVVGIDIAKRTHYACFVDDRGRVLRKSFPIFQSKEGFQQLYKAIQGAMQAFGKSEVIVAVEPTGHYWLNLAYFLEEHGIPLVMVNPAHVCRSKELDDNLPTKHDAKDALVIARLAKDGRFLVPRLLHEIEADLRVGSTLKEKLRKEQTAVKNAIVRWTDRYFPEFWTVFRDLGKTALSVLEWTPLPADMAGRTAEELIEVYRQSEGLKCPQKAKIQALINAAKDSIGVTEGTTMARFEIAALVRRYRQLEAEIAALDAELKALVQTTMEYQWLKTVDGLGDATIIDLLAEIGSFAHYRDPRQLVKLAGLTLKENSSGQRKGQKHISKRGRKRLRSVLFRAVIPLIRHNEAFRELHEYYTTRPVNPLTGKQSIVALCRKLLNVLFAICTKKQAFDAERMKQDVLSQVQRAA

SEQ ID NO: 392088 - protein, 367 aa, unidentified
MKKVSTRAGGQSRNISQQKLIIGLDLGDRNCWYCVVDEAGQIQLEQRVGTNTKALREVFGAIPRSRIALEIGTHSPWISRLLSELGHEVIVANARKVRLIGESRKKDDRLDAQTLARLARIDPELLYPVKHRSVQAQADLTLIRARAGLVRARTGLVNSARGLAKSYGERLRGCNVRNMNPEKAESLSPELQAALEPLLNAMESLSERIVEYNERIENLAQQSYPQVALLKQIKGVGTLIALTYMLTLEDPHRFGKSRDVGSYLGLQPGRRNSGQSELQMHISKEGDPYLRTLLVQGAQHILGPFGGDCDLRRWGLKLAERGGKSGKKRAIIATARKLAVLLHHLWVSGEAYEPLHNSKQKAMPTAA

SEQ ID NO: 392089 - protein, 387 aa, unidentified
MSDTSLRPMYVGLDVHKDTIAVAVADGDGREARTFGTIDNNTAALERLLRRLTAAHPGRRWIFCYEAGPCGYPLARRLRRLGHVCHVIAPSLIPRRAGDRVKTDRRDALQLARLLRAGELTAVCVPDEELEALRDLSRAREDLLRNERRLRQNLSGLLLRHEHVYRDGDAWTLKHGLWLDRQHFDQAHTQLAFQGYRQSLALAEHQRRELERQLLEAAAGCLYADLQISLAALRGIDELASSMLLAELGELTRFPRPTQLSAFVGLIPSEASSGSRRRLGAITKTGNAHVRRLLIECAQSYQYPAKLTPRIRRRYERCSPQVQAIAWKAQTRLCPRFRRLLQKGRPRNLVVTAIARELCGFIWAIGQAVAQARDRPGALADAIANAA

SEQ ID NO: 392090 - protein, 428 aa, unidentified
MLASFQLYVGIDWAKDDYQVCAIDPDAAIVSRRKVLHDGKAMQDFADWLAALSDAGPAATAIAIEMPRGAIVELLLERGFAVFSINPKQMERFRDRHSAGGVKDDPLDAFVAADSLRTDLKLFHQLRLDDPDTIRLRELSRTDDEVRQELNRALNQVREQLHRYYPQLLSLCPSAEDAWLWDLWQIVPLPAQGARISTSRLEKLLKRHRIRKIKATDAIEKLRSKALPVAPGVAEAAAEHIAVLLPRLRLLSKQRDDLRLRMAQILEALSRPASSEQPSQSSDPTPDSQPQEHRDAAILLSLPGIGTTIGATMLAEASQALRDRDYHALRGYSGTAPITKKSGRKRSVLMRRACNTRLRNAIHHWAFVSLTLDERSFTHYRQLRAAGHTHGRALRGVADRWLNVLVAMLRNGTLFDATRWQPTHLPLS

SEQ ID NO: 392091 - protein, 409 aa, unidentified
MEIVITRCAGLDVHKATVVATVRVPGEDGRRRVVTETFGTMTPDLIALREWLQAFGVTHVALESTGVYWKPVYYVLEDACELLLINMQALKHVPGKKTDVKDSEWLAQLLECGLLRSSFVPPPPIRELRDITRYRVQQTRDRSQEVNRLHKVLEDAGVKVTSVLTEVMGVSGRAMVEALVAGTTDPVVLADLARGKLRKKLPALQRALVGRFRPVHAFLLEQILAKIDYLDEALDRLTAEIDRRVAPFEPMLTALDTIPGINRVSAISLVAETGGDMAHFPSAAHLCSWAGMCPGHNESAGKRRSGKTRNANPYLRTTLIQAGLAASHKKDSALRARYIRVKSHRGHKKAVVATGHQILEIAYYVMRDGVTYRELGADYFQQRNRERAVRRHVRQLEALGYLVTVQPAA

SEQ ID NO: 392092 - protein, 347 aa, unidentified
MNITQVGVDLAKAVFQVHGIDARGKVGLRKQLRRSQVIAFFTQAPRCVIGMEACAGAHFWARKLTELGHTVKLIAPQFVKPYVKTNKNDAADAEAICEAVGRPNMRFVPIKNTEQQALLGLHRARQSFVIARTAQANQMRGLLAEFGLVMAVGIRSIERKLPEILEDAENGLSGVSRALFVRLFEHFHALDRQVEELEREINAWHREDIRSQRLQAIPGIDPLTASALVASVGDAKVFNNSRQFAAWLGLIPRQNSSGGKTNLLSISKRGDTYLRTMLIHGARSVLLHLNRRPDRAEGWLGRVAARRNPNIAAVALANKNARIVWALLAHGREYQAGYRPANKMAAA

SEQ ID NO: 392093 - protein, 473 aa, unidentified
MAKSRRPKSRPPQPAPAPTPGASVPTPALPASTLDRTPASTSRASPAAYAWADYAALIGLDWADQKHDVCLLDTTQAIPTAPEYEVLAHTPEALMQWLNGLRARFGGRPIAVCLELSRGPLIQVLRQYDFIVLYPVNPQTLAKFRQTFTPSGAKADASDAAFLVRLLSHHHDVLRPFFPDDATTRALATLVLDRRKAVDARTALTNRLQSVLKSYFPQALTLCGDKLHQPLAMDFLDRYPTLAAAQRAKPKTVAAFYRQRHCRSDELIAARLQVLAEALPLTTDWAVIRPAVLTVKMLVLQLRQLQAALGEYDRLIEELFTTHPDAALFDSLPGAGPALAPRLLVAFGTQRERFPSASAMQQYSGVAPVTKTSGKSRQVQSRWCCPHFLRQSLHEFARCSIGCCGWAHAYYTQQRARGNDHHAAVRALAYKWVRIIWRLWQDGALYVDATYVQALRRHGSPLVAALDLPTVPA

SEQ ID NO: 392094 - protein, 366 aa, unidentified
MASMPTRAHTRQPHPDDGEVVLGVDTHKDTHVAAVLTPLGEVLATDDFPATSAGYRELLDWARSFGRLARAGVEGTGSYGAALTRHLLAHGIQVFDVNRPDKTARRQQGKTDIVDAQAAARAVLSGRATAQAKAGNGPVQIARMYKLAKDSAIKARTQAINQLKAVVVSADPALREHLAPLTNPALIRTCADMASGGDHLGRDDVLDATLITLQLLAERIQQLTAQVNELKRRLAALVQSHAPQLLEPIGVGPDSAVTLLITAGDNPDRLADEASFAALCGASPVERSSGKQQRRRLNRGGDRQANAALYRIVQSRLRWDPRTQAYLKRRTSEGKTRREVIRCLKRYVAREIFSLLPRAEPTPTPT

SEQ ID NO: 392095 - protein, 438 aa, unidentified
MSNKVFFNLDDLFISVGIDIGADFSWMSIALPNQQFVGKPYKILHNSIDSLTTAVSKIKEAEELYSLESRIFLESTGIYHYPLFCYLRDKGFNCSVINPIITKNSTNINIRKVHNDRFDSKKAALVGLKPDLKVSLMPSDLALNCRNLCREYYDLMDNRSAYVNKLQGELRIAFPQYLGIFSKVTINTSLTLLETYTSPSAFLKADKQEIIDIIKSTARFGLTYAQNKYNAIIQAATDANQFGYIIDSNIKRIRLYISFIRKYDEEINSILESLHELVDANEDSDFVKQIHLIETFKGAGFLSAVSIMGEIGDFSAFSKPKQLFAYFGLDPAVKQSGKFEGTKVQMSKRGSAIARRVIHTLTLQSISISRNGEAKNPVLREYYLKKCDSKPKLVAMGAVSHKVCNMIFAILRDNKPFKIIAPQEHIKQYNAAKCDIAA

SEQ ID NO: 392096 - protein, 411 aa, unidentified
MDIVVKTRYVCGIDLHSRNLSVCVMDKNGKIMLQKAIRCDLERLLETLSPYSDHITVGVESTYNWYWLLDGLKRAKIPCFLGHALFIKYRCGNKHKNDTVDAKSIADLLRTNKFPQAYDYPEEMRETRDLLRRRHFFVRKRAGTYTHIQNTLNSHGFFQSFHADVHRKSDRRSLVNLPKHRDVKANISSDFDYIESLDLLIDKLEKTITESACTHNRKHYKLLHTIPGAGQITALTILYETHTIDRFKSPQCYSSYCRVIKADNQSGGTNYGHTTNDKIGNPYLKWAFSEIGSRMINQSPLIRQWYEKQVTLHGKGGTHARLRHKIALAVYYMLKNDTVFDEYRFLGIEQSRTVSPAQTGKDGSGKKAKPSVKQGDRPAVSKKKAVKKPVVKKKIKVPKRVSLRLTGKAIS

SEQ ID NO: 392097 - protein, 409 aa, unidentified
MEVLYPRCAGLDVHKETVVACVRLAASGPAETQVQTFATTTKGLLALADWLTASACTHVAMESTGVYWKPVWHVLAADFELVLVNAAHLRHVPGRKSDVADAVWLADLLAHGLVRGSFVPPPAVQALRDLTRTRKQLVREKGRHVQRLHKVLEDANIKLTAVITDLMGMSGRAILNALLAGERDPAALAALGSVRLKCSPEELLEALRGHVTEHHVFLLRQHLLMIDSLDARLTAFEAQIGATLEPFRRAAEELTNIPGVSGIAAHVIVAEVGIDMTRFPTVGHLISWAGLCPRLDESAGKHRSTRIRKGAPWLKTVLVQCAWAAARTKGTYLQAQYRRLKSRRGARKAAVAVAASILTAAYHMLRDGVPYRDLGPDHFDRRDKTKAAQRLARRLRDLGYDVELKLAAA

SEQ ID NO: 392098 - protein, 346 aa, unidentified
MENDTLVAVDIAKEVFELGVSDRPGRVVRRRRLARYEFLEFFAQLPSATVVMEACGSAHYWGRRIEELGHVVVLLPPQYVRPYVVRNKTDRTDVNGLLEAFRNDQIRPVPIKTVTQQVFGTLHRLRSGWLADRTRAINSLRGLLRELGFFIPEGRKHVLPDAWEIIHDPKRGLPDALKPSLSSLCQEILSLSTRIEETEAQLEALAKQVPVVARLRSVPGIGLLTATALYAFIGDVSRFPSGRHMASFLGLTPREYSSGLRRRLGRISKRGDIYLRMLLIHGARSILWHAKRMKNPDRLRAWALRLERKLGHNKAAVALANKLARITWAVWKNDRSFEPVPELQAA

SEQ ID NO: 392099 - protein, 371 aa, unidentified
MGESSKTLYVGLDVHKDSIAVAYAPEDRGAEVASLGSIGTRQCDIDKLIRKLQSKGATLVFVYEAGPCGYWLYRYLTRTGLSCHVVAPSLIPKKPGDRVKTDRRDAITLARSMRSGDLTAVYVPQIEDEAIRDLSRGREDAMRDLKATKHRLTAFLLRQDIRYEGRANWNAAHLRWLSEVVCPTRAQQIVFQEYVRAVTEQHERLQRLETALHEEVKGWRLYPVVEAIQALRGVQLTGAVIVIAELGDLTRFDTPRKLMSYLGLTPSEYSSGERRRQGGITKAGNSHARRALVEGAWAYRYPAKVSRHLQLRLEKLPAEVQAISWKAQVRLCKRYRQLTARGKHVNQVVVAIAREMAAFAWAIARTVPLAP

SEQ ID NO: 392100 - protein, 341 aa, unidentified
MKVSTLGIDLAKNVFQLHGVDHEGHTILRKKLTRAKFVQFVIQLEPCLIGMEACSSSHYFARLFTRYGHEVKLIPPQYVKPYVKTNKTDAADAEAICEAVTRPNMRFVQIKTEEPQAVLALHTERGILIRERIACANSLRATLAEFGITIAAGQSHLTRELPAILEDGENGLSPFVRTSIYRQSKHIRELEEQVKQVEEALASWYRTQEACQRMAKIPGVGMLTATYVVAAVGNARQFSTAKQFASWLGLTPKEHSSGGKQQLGGISKRGDGYFRYLLVHGARALTAWVNRNGAVEENSWLQGLLERKHYNVAVVAMAAKTARIMWSMLSHNTEYQPRQLA

SEQ ID NO: 392101 - protein, 450 aa, unidentified
MIKIETQTKGMQLAVIQPHTAAIDVGSMLMMVAYSDAEGRQMLLQADGFTESLDAIAQTLKEAGVKKVAMEATGVYWMSLYEVLEQKGLQVTLINPRHFKNVDAQKTDVKDCQWIQQLHAHGLLRASHIAPEIYRELKSYLHERNVLQKQKSDTLNRVHRMLTLMNIKVQHLISDIEGVSGMKMLRAIAAGIQEPEKLLSLIDTSKLKAGKEELLKSLKGIYKQEYVAILRYTLEAYDFFKDHMKEYEKLIEEVLIKMLPPDDQGNKPVIEKKKSYVRKNQYSINLKSYLQHITGVDITQVDGIDEISILEIISVTGTDMNKWRTAEHFTSWLKLSPSPKISGGKTLGHQKRFTNNKATQAFRLAAQTMWKHKGALGNLYRRLAAQKGSKKAIKAIARKLAVIFYNMIKHKTQYDKNRLEVNADKQKARRIAYLQKEAKKYGYVMENIRA

SEQ ID NO: 392102 - protein, 322 aa, unidentified
MNKNKHFIGIDISKNVFDAWSPKLGHNQFKNNPEGFSKFLLLPDSDCWCIMEYTASYYQQLACFLYENQVPVSVINPLVIKRFIQMKLQHNKTDKSDAKMIVQYAQEQPVSLWTPQPEYIEECKDLQTTTSLYHKQKTALNNKLISLLDKGVKGRVITSLKRQIRQLESEIKLLEKEQEQLVKDHEQVLLSNISSIPGIGKKTAILLIICTNGFRSFENAKQLSAFFGLSPVLTMSGTSVRGKTRISKKGNPLVRNHLFMCSFTACNSNPQCKALFERIVNKGKSKKLALIAVTNKLLAQCLAIAKSGIRYEPNYNAIPVFK

SEQ ID NO: 392103 - protein, 462 aa, unidentified
MPGREDSETGESSRRQLQGLPVIRRNVAGIDLGSERHWVCAPTRDGSGREIASFGATTAELLRLAGWLKARQVESVAMESTGVYWIAPHEVLEAQALQVLLVDTRQLARVPGRDKKSDPSDCEWIQRLHSCGLLRGSFRPEEAVCMLRTLVRDKANLVAESGDWLRRMQKSLDQMNVRVHRAVSDIDGVTGMAMLRAIAAGERDAQKLAQLRDRRCSKTQQEIAEQLTGHWREDHLFSLQQALKMYDAVQQRIAAYEQEILRQLGEMEEPGQQGQTAPPLHNANKTKAIKKRGQESKRQALYRMSGVDITQIDALGVETVEVVLSEYGPDLSRFPTEKEFVAHVTLAPRVPSSGGKPLKKKKRNSASTRVAAALRMAALSLRHSQTALGAYYRKLAQRLGGDVAVFATARKLATLIYRLLRWGQPYVDEGAAAYENRYLQQRIKSLTAKAKQLGYELTAVNA

SEQ ID NO: 392104 - protein, 353 aa, unidentified
MKKLFIGIDFAKEKFDAAIIEACGLKEFGNREYGTFTNDKKGYRQFFKWVKTNADKSVENEWLFCGEDTGSCSLGLSKWLYGKGLDIWIENAYSIKHSSGIQRVKSDKADSSMIAEYAWRHQDKAVLFEPLSESLSQLREVFLYRHKLVQQHIAMDVRKQDKEAAEPSKAISFIKRKSKHLMSEIDNAIKECDLMIDRIIESDAELKENYAIITSIKGVARQNGACLLIFTNNFRRFDLDARKIACYYGVAPFGKDSGTSIHSPAKTNHFANKLIKSLLGQAAHCAKKFNPEIREYYNRLIGRGKKPQVALNNVKNKLIRIIVALVRKKVYYDPKTYMFYNAKFTDVKKMLNS

SEQ ID NO: 392105 - protein, 421 aa, unidentified
MENTAARKRKQVPEGYLIIGVDPHKKRHAAVAITQDFTIRDKFKFDNTREGLEVLVRRVRMEMVKAGCRGVMFAIETGGHYWRNIAYFLDDQGIPFRFINQYTLKRRREGKDLNHKKNDYRDSEVAAQLLCTGEFTESTIPQGVYAELRTAHNAYRRLVKERTRITNLVKGLLDGLFPEFTEVFKDPCGLTALSVLSTCAIPGAIAGMTEDEFVAAIEAKHLRRLMRKKLGALHNAAMTSIGIVAGARSVSAEISFLVEKHELIRRHICIIERTLVNLVDEAEEGKYLLSIRGLNYVAAAGLLAELGSFKLYRTAKQMIKMAGSNPTESESAGKRGPHTPMSKQGRPVLRYCAWTAVIPMLRFNSDFRAWAKQRRERPAHANPLNGREVVGAALNRLLRLAFAMVKNQTYYLSPQLVQVTG

SEQ ID NO: 392106 - protein, 316 aa, unidentified
MSVPVFVGIDVSKDTLDIAVLPSGERWQTPYAEASFPLLVDRLLSLAPQLVLVEATGGLQDLLVAALAQAGLVIQVVNPRQVRDFARALGQLAKTDAIDAYVLALFAQRVPLDPRPLPDTQTQALAALVARRRQLMEMRTMEKNRTARAPGGVRKNIQRHIDWLPKEIGRVEGELEDFLRLSPIWREKEDLLKSVPGIGDILAATLIANLPELGTLGRKQVAKLVGVAPFNHDSGTHKGKRAIGGGRAHVRAALYMAALVAVRHNPLMQALYQRILDAKKPKKVALVACMRKLLTILNAMLKHKTPWHLSPKVIYA

SEQ ID NO: 392107 - protein, 424 aa, unidentified
MNLTQNDRLKQVTSDTLIVGVDVGSQTHFCRAFDWRGFELSRRVFKFSNTGMGFLTFLRWTEELMNKTEMKKVIVGCEPTGCYWFTFQKFLQDHDVQLVTVNPFTVNRSMELDDNSPEKSDLKDPKTIALLVKDGRFSTSYLPSGVYAEIREASVCRDQIMKQHVRLSNQIQGWLQKFFPEYFECYADWDSTSGLMLLREAPLPQDILKIGAGGINQIWRDAKVRAAGIKRAQTLVEAAQNSVGLEAGEAARLEIWVLVNDYILKAEQLKRLDEYLEEKVKEVPNVEKLLAIKGVGMSTVIGFIAEVGDIGRFTDPKQIQKLAGLEIVKKSSGKKKGQPRISKRGRRKLRRTMYESARALMTWNPAFQDVFLYYRNRTKKPLGGMQAKIAVACKAIRIFYVVLKTGCDFDEEKFRKDIIRPEAA

SEQ ID NO: 392108 - protein, 496 aa, unidentified
MTAGTGRQKDGAGRGAAAAAGEAGGDGAEVAEERVEVVTYAAAIDVAKGSGMVCTRVPGSRPDRKRQKVWQVDATYGSVVALMDHLRCEGIQRLVLESTSDYWRIWYYLAEAAGLEVWLVNAKDVKHLPGRGKSDREDSVWLCKLNERGMLRRSFVPPEGIRDLRSLTRTRSRLAQDQVRHQNRIEKILEDALLKISVVISGLFGASGRRFLDALVAGERSPRALAALGDTRLKATRQQLADALTGQFREVHAFEIATHLRLIDAINDEITRLDARIEQQLTSIPGVAPACGSCGLIGGGHSPGCASDGTPVLGLVERLDEVTGAGVRNAQVTIAELGTGMSVFPTPGHAAAWARLTSRTLQSGNTARPGRTGKGNPYLRGALGQSVMAAARTDTRLGEQYRRIARRRGKQKAIVAVSRVICEISCILIAGPAARFTDPGADYYSRANPARQTRSRIREIERLNPGMKVTLMGATGSHRAGRQSGAGDLVPVAAGG

SEQ ID NO: 392109 - protein, 394 aa, unidentified
MKLVGIDVGKNSHHFCVMDKETGEFNVAPSSFSNNKEGFDFLINSLKPYSKKSILLGMEDTGHYHVALLKFLLSNGYTVALINPKTTDLTRKMEGGITKNDKLDTITICDVLDTPERKKQYRITKVDRFDLYEQRQLTRHHHNLKEELNVYCNRLQKSIDLVFPEFNTLFSSKYSIVYMNLLKTFGSAEAIASTDIRTIRKCFEIKGRGNRISLTPEKLKECAKNSIGISSEVETIQIKHLVSQITLIKEQIAEIDKKIEEFSITNNSPILSIPGISHFSGTSILAELGDIGNYSKPSQIIKFAGVAPYHYESSQYNAQHTGITKKGSKYLRKTLYQIILTVINNNPVFKKYYRLKISQGKGHRCAQGHCIRKLLRIIYHLLETGQSFDPALLR

SEQ ID NO: 392110 - protein, 322 aa, unidentified
MLFIGIDVSKLTFDAAYLMNQRSAHKEFPNNTKGFSDFSLWIDKGDEETFICLEATGIYSFDLAQYLSQHKNNVMVVNPIITHAFFKMELNRNKTDKADAKLIARYCEHAVLKGDFAKKTYEPKGVDYEAIQRLVTRCDQLEKSKTQESNRLEACANKLVSRSIKRLQKTINDEITRVKKTIAEIVQNNECLHQQVELLVSINGIGERTAWSILAYIGDINFFSNSKQVASYAGLTPKLIQSGTSINKSSLSKLGHKRLRKSLYMPALVAIRFNPVLKNVYERLVSNGKPKKVAIVAVMRKLLILSYGVLKSEKAFDVNYQP

SEQ ID NO: 392111 - protein, 457 aa, unidentified
MRKKKKRTPGVEEAHPFSGMSSIHPHAAGVDIGAIEIVACVPGDETTQIVKAFGNYTVDLQAVAQWLKSYDIQTVAMESTGVYWIPLFEELERQGFECLLISSRSLRRVAGRKSDISDAQWIQTLHTYGLLEGSFRPQGDLVALRTLLRHRSQLVEHRSPHIQHMQKALLQMNMQLSQAVTDVTGLTGQKIIRAILAGERDPQTLAAMREPGCKKSAEEIGKALTGTWREEHLFVLKQSMMMYDVYTQTIQACDEEIERVYGATRPDWESGEVALVTKRKRNSHSKNLPHHSEEIRKHLKRISGVDLSAVDGFGVSLAQTVLMEVGTDMSKFPDEKHFCSWLGLAPKHEISGGRVLKNNTLKTKNRAGQAFRMAAQSVKQAECVFGVFYRRLRARLGPSQATVATAHAIARVVYRMLKYQVEYEPLNVNEYQRQYEAQQIKYIKKRAEKFGFQLVPV

SEQ ID NO: 392112 - protein, 355 aa, unidentified
MGITKNMIKLDPSQAVFVGLDVHKTTWSISVIHQSHLIFRATIPSDWEGLVKLLKRYKNHPIYSVYEAGFSGFHLHRRLCEAGIKNIITPPNKIPVLSGNRVKTDKIDSLKLATFLSQGLLSAIYIPCEKQSAMRQLLRTREQLKYQRTATINQLKGLLIQYNIQVKTPGLTQKSLRQLQHEKLPEEIQMVIQSYGTLWSTLSTQMRELRKRAELLASESIYQETYQRLQSAPGVGSLIAAAFALEIGDWNRFSNEKQISAFFGLTPAEYSSGEHTHRGRITGQGNPWLRGLLIQAAWRMIRIDFDMLKIYERLSQQTGSKKKAIVGIARKLICRLYAMEKSKQEYRRSAPRAAA

SEQ ID NO: 392113 - protein, 343 aa, unidentified
MPHSVGLDVSQKTTAICVVDAEGRRVWRGTSPTDPGSISRLISKHAGASAKLGVETGAMTPWLVHGLRAAGLDVAVLDARRVKAALQMRLNKTDQNDAEGLAQVVRTGWYRAVHVKSLDAHQARSLLGARAQLVGMRTRLSNMVRGVLKTFGLLPGADRGLRFDRRVEAMIEDTPDVALIVRPLLATWRQLREQIAVFDAAVQRRVKADATCRLLMTVPGIGALSALAFVSTIEDPARFSRSRSVGAHLGLTPRRYQSGETDRSGRISGCGDVLARTLMYEAAIVILHRVKRPLHLKDWGLAIAERAGPGKARVALARKLSVILHSVWRSGEPFRWEPVASAA

SEQ ID NO: 392114 - protein, 337 aa, unidentified
MQYVGLDIHKNRSSLCILDNDGKVVKEELIKGRWATVLQRLRSIEGPWSVCYEASCGYGYLYERLSPMAHHVAVAHPGQLRLIFRSKKKHDRVDSQKLAKLLYLGEVPQVHVPNVDVRQWRKLIEFRQRLLGRRTAVKNQVRAILRGNDVESKRWQWTKKAMKWLGELELPTGEKLAMDMALEEVGQLNGRISRVEEELARMAEAHPGIQLLRTIPGVGIRTAEAFLAYVDDIKRFARNRQVGAYFGLVPCLDSSAGRDRLGHITADGPGTVRKLLTEAAWQGVRRDPTIRAYFERVMRGEADRKKIALVATAHYLCRVMAAMLRTGEIWRGSKEKD

SEQ ID NO: 392115 - protein, 370 aa, unidentified
MGNRSMFVGLDVHKETIDVSIAEGQREGEVRHYGVIASDLEPLDKVVRALRAPDRRLHFVYEAGPCGFGIYRHLTKRGEDCVVVSPSMIPKRSGDRVKTDRRDSQMLARLHRAGELRAIYVPDDTDEAMRDLVRAREDAVVVGTQAKCRLKAFLLRQGRRYPGREGWTLPYRRWLADLSFPTAAQHITLQEYRDTIDETERRVERVTEQLRDLAPTWRWAPMVAALQALRGVSFITAVALVAELGDLTRFGHPHELMAYLGLVPSEYSSGPSVRRGAITKAGNPHARRLLAEAAWAYQGIPRIGRQHAYRQEALPKVVCDIAWKAQLRLTTRFRRLVARGKAKPKVATAIARELTGFIWAIAQEVSPASS

SEQ ID NO: 392116 - protein, 378 aa, unidentified
MKKELYLGLDVHKDCIAMAVAEEGRRGEVRDTGVISNDLQAVEKWIGRLRKGHGHDTLLRACYEAGPCGFGLARRLRQIGVDCEVVAPSLTPTRPGDRVKTDRRDARKLARLLRAGELKAVYIPEPADEAIRDLCRARTDAVDDRRRSRHRLKGFLLRHGYRYQGKTSWSAAHERYLRELVLAHPAMKVILEEYLISIRAAGERIARCELAMRDLLEKWRLAPAVQALMAMKGFQTVAAMILVSELGAIARFSHPRQVMAYLGLIPSENTSSDKRRQGVITKCGNAHARWLLVECAQHYVAPPKVSKELSRRQEGQSREVRAISWRAQNRLHGRFMRLSARRLQRNKALVAIARELCGFIWELLRTQRCYEDQPPVSV

SEQ ID NO: 392117 - protein, 344 aa, unidentified
MAAQEPSPVYRLFVGVDIAAATATVAWRLPGAPITRPITIEQTPSGIAQLLSRLQATGIAQDATLVVLEATGSYWITLATTVHQAGYAVSVINPMQAHHFAKALLKRAKTDAIDAQTLTQLAAQLQPARWTPPPAIYYELQQRLAQRDALLDLRQQVKNQLHALVQGPVVSAAVRTRMEQLIATLTDQLTAVEAEIAPALQQDAAWAAAASRLQTIKGIGRLTAAWLVVTTVNFRVCPSADAAVGYAGLAPLPYDSGTSVRGRRRIGHRGNGRLRSALYMASLSAAQHNPIIREFYERLRAAGKLKKVARCAAARKLLRIAWAVVTKEQDFDPTYAQRQQARAS

SEQ ID NO: 392118 - protein, 461 aa, unidentified
MAKKAKKVKTAKGAELRIVNPDAAGIDIADGIMQVCVPADRSKDNNRAFGAYTSDLHAISAWLRECGIKTVAMESTGVYWIPLFCRLQEDGLDVVLTNARDVKNITERKTDESDAEWLMLLHQYGLLKASFQPHNDAKRMRTLTRHRDTLSREASSIVLRMQKAMQQMNIKLTLVLSDITGKSGIRIIEAILAGERDPKRLADLADIQCKTPKEEIAKALEGNWEEDLMFVLRQNYDTFKHYCTQLGECDAELEKLMENYRAEVAKVEDTSYSPAKKRRDYKKTRHTVGFDVERKAYEMWGVNVFEIPGISHLTALELMSELGHDFTRKFPSSKQFCCWCNISPNTKISGGKRISSHVPHRRNNVGLIFRSIASSLANAKNQLGNFYRRIRSRAGGKAAVIATAHKVAEIFFAMVANQTTYNPERVGIDEKVLLEKRITRYKRELERITGTHIEIGNACVP

SEQ ID NO: 392119 - protein, 327 aa, unidentified
MIEVNEPFVYVGIDVSKALLDVQVGDQFFHVSNSSSGWERLIKKLLRTVSGEDRALLRVICEHTGGYERGLRHALHEARIFCSCINPKRARDFAKARGILAKTDQVDARVLALFGAAIGPDATPLPSKACQRLGALEQRRQQLIKMRIAENNRLEHVADADIRRDIKSLIRVLEGRIEKMEQLQAELIQSEATLKTRYEAMNAIIGIGPRTAIVLLACLPELGQLTAKEAGALAGLAPYACDSGLMRGKRCIYGGRPVPRKALYMAALSASQSNPLLKAFYRRLVEKGKPKKVALTAVARKLLVATNAHIKKLSLDDQFDLDLQHSC

SEQ ID NO: 392120 - protein, 314 aa, unidentified
MADPATVPLAFIGCDVGKAEIVVFDSRDKRIRSIPNRAENLAAFAQTLDVDCFVVCEATGGHEQALLAAMVAAGIPCHRADARKVKAFIRSYGTLGKTDAIDAAALHRYGEERHSSLIRWRTRDTWRDTHQTLILARQDLVATRVAYANRLGAPSDAAVRPFFEALLASLEGQIAAIEAAIRTLVDDNAPLKQAVTLLTGVVGIGFKTASSLFALMPELGGLTGAQAGALGGLAPHPNQSGAREGYRRTKGGRPEVRKVLFMAAMSAARHHKTLRPFYERLIAKGKKKLVALVAVMRKLLVICNAVLRDGAVAA

SEQ ID NO: 392121 - protein, 424 aa, unidentified
MEVMHKRVAGLDVHKASLVACVRLQAGRKVRRECRTFESTTDGLLALLTWLTECRCTHVAMEATGVYWLPVWKILSDGDFDLIVANAAHIKNVPGRKSDLNDAMWLADLTACGLIRASFVPEEQMQELRSLLRTRKQLGREQTRHVQRIQKTLTEANIKLDAVLSDIMGASGRRIIEAMIAGVRQPRKLADLASKQIKATSKELYDALHGRLTEHHRFLLKLHLQQWDGLDATIREIDREVEARLAQLDKEVKPDTAPFRDLVRLLCTIPGVAKLSATIILAEIGRNMSRFATAGHLVAWAGLCPGQNESAGKRKTTRLRKGAPWLKTTLVQCAWAAKRKNNSYYKAQFFRLQSKRGPQKAICAVAASILTAIYHMLKDGTQHHDLGADHFNRRHSAQTQAKRLVARLSKLGFAVQLQPATQAA

SEQ ID NO: 392122 - protein, 367 aa, unidentified
MAFKIFRKNCCGLDVHKTWIYACMGITDTNGRTEYKQARFSSFTKGLQELADWLAKYDCNDVCMESTGKFWIPVFNILEKTCWVTLAYPKYTKPQKGNKTDHKDAKWICDLYMCDMVNPSFIPPPDIRQLRDLMRYRSKLTNIMTSEKNRALNCLTVSNLKLDDVFSDVFGKSSRSVIRYILEHPGETFQVAPFIDRRCKHPVEEIQAVIDGTISHQQAVKLRECLQHLDELEVHKTNVEKEILCLVQQYPYQLELLQTVLGFSGNIMTAIALISEIGADMSVFPSAKHLVSWAGCCPRNDQSSKKVKSTRISRAGVYLKPLLVQVAIQPFTANADKLSAAGAVEMRCQICDGGFLSMWAALFIFLS

SEQ ID NO: 392123 - protein, 317 aa, unidentified
MTSTAIFVGIDIAKADFVVACRPDGTTWTATNDAAGISVTLERVRMMSPALIVLEATGGYETPLVAALAAAGLPVVVANPRQVRDFAKATGQLAKTDRLDAHLLALFAERVQPTPRPLPDAERQQLNALVTRRRQLLDMLAAERNRLEHAGRLIRRNIAEHIRWLERRVAAVDRDLDDTIQKSPVWRAQEHLLRTVPGVGPVVSRTLLADLPELGQLNRKQVAALVGVAPLARDSGTLRGKRLVWGGRAPVRAVLYMGALVATRRNVVIRAFYLRLIVAGKPQKVALTACMRTLLTILNAMMRTNTGWQQITQPEIA

SEQ ID NO: 392124 - protein, 330 aa, unidentified
MKCHYVGVDVGAKELVVSIDRNGSRESGMVFTNDAGGHRKLIRWATKQGATAQVVLESTGVYGLDLAFALHRAKRVEVMVANPRAIAAFAKASLQRSKTDALDSATILEFSMRMPFVPWVPPDPSILELRALSRRIEAMSKTATQEKNRLHANDQSEELSDFVKEDIRELAELLEDRIERLRKQALLVIEQSPELANTFGHLTSIKGIADAAGIQLLAELGTLPQDMTTRQWVAHAGLDPRQHQSGTSVHKPARISKTGNAHLRRALFLPAMVASRWEPNVKAFYEKLLAKGKTKMQALVAVMRKILHAIHGMLRHDQDFDGEKFFAVRG

SEQ ID NO: 392125 - protein, 461 aa, unidentified
MVKKAKKVKSAKGAELRIVNPDAAGIDIADGIMQVCIPADRSKDNNRAFGAYTSDLHAISAWLRECGIKTVAMESTGVYWIPLFCRLQEDGLDVVLTNARDVKNITERKTDESDAEWLMLLHQYGLLKASFQPHNDAKRMRTLTRHRDTLSREASSMVLRMQKAMQQMNIKLTLVLSDITGKSGIRIIEAILAGERDPKKLAELADIQCKTPKEEIAKALEGNWEEDLMFVLRQNYDTFKHYCTQLGECDAELEKLMENYRAEVAKVEDTSYSPAKKRRDYKKTRHTVSFDVERKAYEMWGVNVFEIPGISHLTALELMSELGHDFTRKFPSSKQFCCWCNISPNTKISGGKRISSHVPHRRNNVGLIFRSIASSLANAKNQLGNFYRRIRSRAGGKAAVIATAHKVAEIFFAMVANQTTYNPERVGIDEKVLLEKRITRYKRELERITGTHIEIGNACVP

SEQ ID NO: 392126 - protein, 327 aa, unidentified
MSQVTLGIDVSKDKLDVALLEGDKLRCHTFTNDASGYARLVRWLGRVQPGDVHACLEATGQYGDGVAAYLFEHGHGVSVVNPARIKAYAASKLRRFKTDRGDAELIAIYCQKECPALWSPPEEHVRELQALVRHLDDLKGMRQQERNRLQSGVSSPRVRQDLTEHLAFLDQQIRALTHDIQDLIDQHPDLKEQRELLKSIPGIGELTAAVLLGEIRDIRSFESARQLAAYAGLVPEPRESGTSVHRKPHLAKKGNAHLRKALYMPAVVARTRNPLMADLSERMTRSGHCAMEIIGAIMRKLLHLAYGVIKTGKPFDAQHAQHHALAV

SEQ ID NO: 392127 - protein, 411 aa, unidentified
MEHQNHVFVGVDTHKNQHTACVLNCFHQKMGLTQTPNNPANFESFIQNINSFKSPDKKLVFGLEDTQGLGHSLAQWLLDQGYTVKEVNPALTKRERHHNANPDKSDKIDAEAIANVLLADLNELPDAIYDANFKAIRQLNNQRQTLVKEQTKLKNRFHNLIHQQYPEYQKFFSSPFGKTAMAFYEKFPHPADLNYYAEDRLQKFLNDQVKSIGNDKAATILALVNKDKKKTADAEARNTIIRGIIKQLRLLAKSLEKINNQLKKAVEKSQYQLTTMPGIDFKLAALFISNIKNIDRFESASKLARYAGLAPVEHSSGTSKNLSYKKYGCRDLNHAFYMLAVQQIGSTINGKIKNPASYNYYQKKLQEGKSQKVALTCLERRLTDIIYAMMRDRSAYKLPENIDYEVLDKAG

SEQ ID NO: 392128 - protein, 449 aa, unidentified
MNMNNAAIKNTVAKTNSVARPYYAAVIGIDWADRKHDLATLPLSVTQQPARPPELSTLEHKTEALIEWISSVQERFSGGRIAIAIEQRKGALIHFLSGFDFIDLYPIEPLSLNSYRKALYPSGAQSDPVDAALLAEFLLKHQDRLRCYRPQSAPVRQCAQYCEHRRRFVDERAQALQCLKASLKLYFPLALELFADLSTDLVRAFLGRWSTLEQLQRANRATLRSFFYRHGSRSKKVITRRLELIAAARPLTSDPGVIEPQRLRVKCLLEQIGTLSRSIAAYEERIEGLIQLLDCDGVFASLPGAGACLVPRLAVLFGQDRSRFESAAEVQMLTGTAPVTRQSGKKKLVSMRWACSTFQRQSLVEYALSSLRFSQWARAFYASHMPEDPNADKPTYTVLRKLAFKWLRIIYRCWQTRTPYDESRYLESLRRSGSPLWRHLQQANAPASS

SEQ ID NO: 392129 - protein, 419 aa, unidentified
MRNGNTKKLKRLSEKTLLATIDMGKATHTGYIRFSGGSDIKPFEFTNSKKGYEEFWWRICGARKQYNLDEVVVGFESTGPYAEPFLHFLQRRQVRLVQVNPMHTKRLKELQGNSPNKTDRKDPKVIADIIELGHSLTVIIPEGVTADLRRLTQARERSIYRMTVIMNQLQDLTYLIFPEFMNIMKDITTRSTQYLLKNCPRPEDILEKGMESLSKSLKEVSRGHFGKERAEELCRAAAESVGISEGNESIALEIQESVYMIEKIELFVKEIERRMSQLLTEVPYSHFMLSIKGVGKITVAGLIGEFGDFQKYRTIGEVIKHAGLDLYEISSGAHKGRRRISKRGRPLLRKLLFFASINVVRSTGILHNQYQNHLKKGMPKVKALIAISRKLLGILFALVRDHKMYVNDYCKIQNLKEAA

SEQ ID NO: 392130 - protein, 411 aa, unidentified
MNAVGIDVSKRKSTVTIRQPGDKVILAPRDYQHTQSSINELIATIKNLDGETKVCMEHTGRYYEAVASWLSAAGIFVSAVNPWLIKDFGNDSIRAPKTDKADAKKIARFTLDRWANLRQYSRMDELRNQLKTMNRQFGFYMDQKTAMKNNLIALLDQTFPGANSFFDSPARPDGSQKWVDFVYTYWHVDCVRGKSLAAFTEHYKSWCKRKGYNFSASKAEEVYRAASDLIAVFPKDDNTKMLVRQAVSVLNVTSETVEALRVKMDQTASQMPEYDVVLSMDGVGPTLGPQLIAEIGDVTRFEHRGALTAFAGVDPRKKESGDYERRSNPTTKKGSPHLRKTLFQIMDGLIQRSPQDNPVYAFMDKKRAEGKPYYVYMTAGANKFLRIYYGKVNAFLAPKEDVEAEADESDS

SEQ ID NO: 392131 - protein, 350 aa, unidentified
MQYLGIDWGTRKAAWCAIDERGATLEGAISADEGGLAKLVHGLGPDVRGCVEMMSGAVWVRDRLAACGWEIQIAEPRKVKALAPLACKTDRVDARVLAELVRRELVPEVWVPALSERELRERLRRRAHLVRLRTSATNRAFGLLTQWGLRVSLTSLRKPGALELLLERGVPTVWLQSISTLLSVIDDLDRQIAPIERELRPLAHSNEQVRLLMTIPGVAELLGLTLLAEIADVSRFPSARRLVGYSGLAPTIKQSGQSSRTGPISKAGPSTLRWAAIEAAQGAWRPTNPWHRLYTDTKQRHGKSNPAKAAVARKVLIACWHVLARNEPFKRSASSAPTDVPASSSIRLAD

SEQ ID NO: 392132 - protein, 342 aa, unidentified
MTLYIGVDIHARQQTVSYLDTSDGTTGVVALSHERDDIKAYYSQFEGEVIIGIEACGYTNWFEELIERLGHKLLVGDAAEIRRLARRRQKNDRRDAQLILELLVHGEFPTLFRYSKESREVLRQLRYRHKLVKLRTMVVNSLHALAINAGLSLRAKLLTRDGRQQLRGLSLSAISQQQRDELVTLADELTRRIGTVEQWLKGQAKQDVRVRRLQTHPGVGLLTSLCLVHTLGDVSRFSSLRKVAAYAGFDPMEDSSAERKTYGGISKAGSKLLRYLLVEAAQTAAKDDEQLKHFYRRLLPRRGKARAKVAVARKLLIRCFIMDRSEIDYAEFLRRGKQKETE

SEQ ID NO: 392133 - protein, 411 aa, unidentified
MTDQRQWYAGVDWASESHHVFLTDRDGRKIGERLFKHGGEGLAEMAAWLMATSGAVEPSQILVAIEVPHGPVVETLIERGFKVHALNPKQMDRFRDRFTLSGAKDDSRDAEVMASALRTDPHCFRLLALADPTIIELREWSRITEDLGAERNRLTNRLREQLWRYFPAVLELEDDLGAPWLLDLCEIVPTPDKAVRVRAATIAKLLKRNRIRRFDAAHVLDVLRRPPVVVAAGTTEAASAHVAALIARIRFVNRQLKEAHGRLDTLTARLIPAEQAEPGQKKQHDVEILASSPGVGRIILATLLAEAFDALQRRDYAALRSLTGVAPVTKRSGKSCIVVRRQACNDRLANAAYHWARVAVQIDPTSRAKYAVLRSRGYSHGRAPRSVADRLLNITCAMLKTGTLFNPSMAA

SEQ ID NO: 392134 - protein, 242 aa, unidentified
MGELWVGIDVSKRRLDVALRPDGGTVICDNDTAAIKKLAGMLALKSPRLIVMEATGGHEYAAAVILSKAGLPVAIANPRQVRAFARAKGKLAKTDPIDAETLAHFGEAMEPPVRAVRDQQLEEIGQLVTRHRQLIEMLVAERNRRLSCVGTAQRDVDATIRFLEGRLDKVDRQIKALIAEHPDWCSKAELLDSVPGVGPVLISSLVAELPELGTLNRKQIAALVGVAPFNNDSGQSRGRRRI

SEQ ID NO: 392135 - protein, 427 aa, unidentified
MKNSEVLSTLFVGIDVSSRSNVVCALDFFSNKLLTFSVSNNQPGALDMAQRFYDFLTINRQFKTVIFALESTSIYSVHIANFLSSHEQLLAFQPYVYCLNPKMIANYRKSFIALDKTDPIDAFIIADFARVGRINSKPWRGSQFLALQRLTRHRLHLVNCLTREKTYMASNMFLKFSELTILDDSERPFATNYGATASSVLTEFLSTEDIITMPIESLVAFLCEKSKNRFVDPNHTASLLQQAARNSYRLDKCLYEPLTIALASSFNCISAYDTEIKTIDKAIKRSINGLTQSEYQCLLSIPGIGPVYAGGILAEIGTITAFTSQDAVAKYAGLFWKQSQSGNYKADDTNLSKAGNKYLRYYLIEAANSVKNHVPEYTAFYHKKYGEVKTHQHKRALALTSRKLIRLIFGLLANNQLYSATRVNQIS

SEQ ID NO: 392136 - protein, 401 aa, unidentified
MIGVGIDVAKSKSMVAILSDDGEIIKEPFEIANTESGLEYLCSIIGELTDKVYCVVESTSVYHIPVVSYLQENDIFVSVINPLIIKKYASMDIRKVKTDKVDSLKLASYVLDNYRHLVNYSTDDELYSELRILSRQYLHYVKVLANAKVNLTDLLDRTLPGIKPLLKSHIRTTGKNKLCDFVERFWHCDVITSMSEGKFVSEYIKWAKKKGYHPNETKAKSLYANALECIPTLPSNSPSTKMLVLEAAKAVENIETTLTTILSQMSELAKTLPEFSVVREMSGVGDVLAPRIIAEIGDVRRFHSASALIAYAGIDAPPYQSGSFYGSNRKISKRGSASLRKTGYEIMQALKIVQPQNDNAVYQYLVKKETEGKPLKVAKIAALNKFLRIYYSRVKEVYSKF

SEQ ID NO: 392137 - protein, 347 aa, unidentified
MKVTTIGLDIAKRVFALYWVEADSGEIKRRTLRRSQMLLWFARRERCVVAMEACGSAHYWGRELSKLGHEVRLLAPKFVRAFVKTNKTDAADAQAIWECSQRPGMHTVALKSETQQSVLALHRVREQQVKMRSMYVNQLRGLMAEYGVELPLGRVAGLKQAGALLTEPGAVPELLRPILYAQLEQVRALDARIEDIERALGNWAKAQPGCVRVDKVPGVGELTATAALASMGEPKGYGSGRGFAASLGLVPAQSGTGGKVHLLKISKRGDPYLRKLLIHGARSVVSAHRRKTNKGAEPQSQWLDRLLERRPFNVVVVAVANKMARTIWALVAHECEYDPNHRSVRRA

SEQ ID NO: 392138 - protein, 366 aa, unidentified
MKEQKKVVPRYVGIDLGKRTYQMAIVGKNGKVTMSSGRTTIEGRQKLYKKLTLEDKVALEACSLAFTMAKEMEGAVGCEIKVLNPYHLPLIYGTMKKTDKEDALKLAHILEDYKDERLPVVSVPSDQEMKRRKLLAGYRREQRTRVQALNRLHGLFLSCGITDVVKSELATNEERAERVKVLTGLEREEADHLLGCLRLYEKRIELLERQMQEEAEGDEVIERLQSVPGVGPKVSFAFVAHVASERFENASQVSNFLGLVPRVYMSGDTVRYGRITKRGNGYLRALLVQASWALVRSKSGGALKERYKYMTEEKGKSKKKAIVAVARRLSELLYTLMRHGTGYEVRQFRPEKKVEVEQLAQLALSA

SEQ ID NO: 392139 - protein, 329 aa, unidentified
MVLLGMDVAKASLDCAVLTSAGGKPLGRRSFPNSPEGVDRAARWVAQVSGAEVADTHLIVEATAAYHELAAHRLAAAGMRVSIVNPARVRSFAKALGILGKTDRIDAHLLARYGLLVRPKLWSPPAKALLDLQSLIARLDDLEADLRREENRLEQARTRRCPDLVERSLLTSIAGLKAQAAEIKQGIAAHIAADPDLQSGLERLMTIPAVGPKTATRMLLMLRARTFDSARQAAAFLGLVPVERTSGTSVRGRPSLSRAGNPRLRAALYMAAVVGIRKNPDIKAQYERLLGRGKCKMAALGAAMRKLVHLCFGVLKDEGGYRPGAATRA

SEQ ID NO: 392140 - protein, 405 aa, unidentified
MTSPRRVVVGVDTHLDTIHVAAITDTGQLLGDAEFRTNPTGYYVALRWAQSFGEVFIAGVEGTSSYGAGFTQALQDNAIHVVEVNRPDRAARRRQGKSDPLDAYSAARAVLAGHGLAVPKDPHTSALKALLIARRGAVKARSAAIQQIKDLLVTAPADLRERYRRYTTTLRLVQALARCQPNADPDPTTIAVLIACKAMAQRIEFLQRQPDELTAEIDALTTALNPALRAAYGVGPDTAAQLLITAGTNSHRLRSEAAFAMLSGAAPIPASSGKTTRHRLSRGGDRAANNALHRIALVRMSHDPGTRDYVARQLVAGRTKKDILRLLKRAIAREVFKHLTTPCPIDDYTDLRPTRQAKNITLTSAAEHFGVWPNDISRLERGLKRDDTLAANYRHWLNTQLIDAA

SEQ ID NO: 392141 - protein, 387 aa, unidentified
MTVPGQVFKIIPRHYDIFGGLDVAKKNMAVTFTDHEALMRSLRLPYSSAHLLHYVRKHFPDQRVAFVYEAGPTGFGLHDELVTAGYRCLVVAPSMVPTAPGDKVKTNRLDSKKLSVQLRGGELRSIHVPAPRYRELRHLVQLRDTQVGQLTATKCRIKSLLLCEGLAFPPAPESSQWSARVLSELFELPCSPAVRFELDQLIGTLHFHFNSAAAAQKQIRYFCQNDPELRQSIRLLASLPGIGVIVATHLVARLGDWREISNVRQIAAFLGIVSSEHSTGEKENRGRITRAGDSRLRNKLIQSAWTAIRKDAELRAFYLRIYHRHPKKIAARKAIVAVARKLTTRIYAVLKEQRPYVLRPENLPAPLTAEETVGPRGRLVGPQNEPP

SEQ ID NO: 392142 - protein, 404 aa, unidentified
MKFCGIDWANDHHDALSIDEQGRQLGSIHVSHTPEGLSQLDAYLERMASPGGREQIACIVETTHGLLIAHLLEQGWPVYPVNPRTVERRRAPSGAKTDTIDAYLLAKTGRADFADLRRLNPDSEQIQELKTLTRDQDALIQMQTRLVNQLTACLKAYYPVVLDLFGKLHQPSTLKFLRAYPTLQAARAATVEELAAVLRQARYPGAKLAAQRMVAQLQQPCLQANEVTTRTKSRLMLALIDQLEPLLKQIADYDKEIERLFLMHEDHELFQSLPGAGERLAPRMLAELGDDRDRYESAGSLQALAGTSPVLFQSGTYQKAHRRLGCIKPWRNALQQFAWQSTHQEDWAREYYQRKRAEGKSHTVALRALANIWARILSAVWKTKELYHTTTFEHARQAHALRSA

SEQ ID NO: 392143 - protein, 318 aa, unidentified
MNTNTLQNINVGVDTGKAQLDIYIRPLDIYFNVTNDEKGIKQAIRTIAKFHPERIVIEATGRLEMPFILACENANLPYVIANPLHIKKFSGALGNKAKNDRLDAALIAHYAEAIKPKLTQLKSENIRLMSDLVTRRNQLLSMQTMEKNRLQILPRTLASSIKPILTALKNQITKVENRIEKLIETCPDYQAKNEILQSVPGIGKIAAASLISNVPELGYITNKQAASLIGVAPITRESGSFKGKRMINGGRMQVRTVLYMAMMSAMQCNPVFKETYQRLLAAGKPKKVALIACVRKMVVILNSMLRDGCMWNADSAKN

SEQ ID NO: 392144 - protein, 362 aa, unidentified
MILGLDTHLDFHVAVAVDDLGRRLGKSSAPTTVKGYEGLLCWAEGFGSVRCAGVEGTSGYGAGLARHLRARGIEVLEVERPERQQRSSRRNLKKSDSSDAEAAARAVLAGEASGVPKSSDGRVEMIRTLRAARRSAIKARTQAANQLQGLRVTAPEELRRRLRRLSTKELVSVAARFRLRDDLRDVPSATKFALRSVARRYEALSREIVELEAHLDRLVAQAAPELVSLAGIGTDSAATLLIVAGDNPQRLRSEASFASLCGVSPIEASSGKVVRHRLNRGGNREANRALYMICLARMRRDLRTKEYVSRRTQEGKSKREIIRCLKRYIAREVYRVLISCGARSSPTVPMDEAHIATGSGAA

SEQ ID NO: 392145 - protein, 355 aa, unidentified
MECKKYIGMDVHQASISIAVRDVTGKVVAESVIETKAATILAFIRGIQGSLWITFEEGTSAAWLYDLLKPHVTKVIVCDPRKNALLNAGNKNDRVDARKLSDLLRAGLVTPVYHGESGVRTLRELCRGYLTINKDLTRVMNRLKALYRSWAIPCAGDKVYSPRHRNAWLEKLSEAGVRRRAEQLYQQLDALVPIRREARRQLLAESQKHPATQLLRQIPRLGPIRVALLIALIQTPHRFRTKRQLWAYCGLALQTRASGEYRFTGGELQHSKRSPALRGLNVNHNHDLKNVFKSAATHVSISTDPLGDFYRSLLDKGMKPTMARLTLARKMASIVLSIWKKGARFDPGELKRQAA

SEQ ID NO: 392146 - protein, 357 aa, unidentified
MDTHRDAHVASVLSLTGAVLATYEFPATAAGYRDLLKWARKSGAVRRVGVEGTGSYGASLTRYLLSQGVDVFDVNWMDRADRRRRGKSDPLDARNAARAVLSGRACARAKSGDGPVQIARMHKLTKASAVKARTQAINQLKAVLITADPAMREELAGLGNAELFRVCARFADASSCEEAGEESVLQATRITLSWLAHRIGQLSEQIRDVETRLARLVECHAPQLLDVVGIGPDTAVTLLITVGDNPERLDSEASFAALCGVSPVERSSGRRQVRRLNRGGDRQANAALHRIVFTRLRVDPRTQDYYERRIKEGKTRREVVRCLIGEALMVRPNPRGRDSLGGCWGTASLPCRARRPV

SEQ ID NO: 392147 - protein, 343 aa, unidentified
MKLTRVGVDLAKDIFQLHGVDRAERPVWCKRLKRNRWIEEIEQNVEPGVEIGMEACGGAHHWARLLQSKGYRVRLIAPQFVKPYVKSNKTDANDAQAVCEAMSRPSMRYVAVKSIEQQDIQAVHRVRASLISERCAKANQLRGLAYEYGLVAPREIAALRIAVPAWLEDASNGLTVRLRALLSGLYADLRALDERVRELDKEIRAIGGENEAVGRVQQIRGIGPLIASALVAMIGDARQFKNGRQVAVALGLTPRQHSSGNKERILGISKRGDSYVRTLLIHGARSALRTAPGKNDRMSRWALALAKRSHVNVAVTALANKMARVAWAMLRHGTTYEPNGLAA

SEQ ID NO: 392148 - protein, 331 aa, unidentified
MYFSQFIGVDISKDTLDAAVYPAKDKKMDFLHFDNTQKGLMLMMSWLKRRGIKATEMVICAEHTGVYTNPLIEFADKKGLALSLNSPLDIKRSMGIARGKNDAVDAGRIAEYAHSHKDKLRLYEKPSDNIRKLQYLLTERRQYMRQRTALINLDCAMGKYGTSETRSRSESAIHHCEKLVKKVEDQMLAIIYSDPDVKRNYDLISSVKGIGLINAINTIVYTNNFKAFETPRRYACYIGVAPFDHTSGTSVKGRTQVSKICRTQQKAELSMAARSAIVSDPGLRKYYLRKMKEKGGAKEAHGVVLNAVKFKIILRMFAVVRSGEPYKVLNY

SEQ ID NO: 392149 - protein, 349 aa, unidentified
MTDQRIPYCGRIVYVGIDVHKETYTVTCVCNKQIVKTVTMQADPAALAASLPRWFPGATLYAVYEAGFSAFVLHRVLTKADITNIIVNPASVAVAANDKVKTDRRDSKKLAIDLADGRLRGISVPTEAEELARLLPRTRAQIVKHRATIARQIKAKLHQFGLIAPASRRLISSRYLREIAAWSLPQELSVSLTLLAEQWRFATRQLIEMRRLLRDQAQAQEEIEKVYRSVPGIGEVVARTLATELGDMTRFANERALFSSTGLTPSEYASGASVRRGHISRQGSSRVRHVLVETAWRALPRDGVLKERFDRIAATRGKKRAIVAMARRLTGRIRACFRQGTTYAVGTYA

SEQ ID NO: 392150 - protein, 376 aa, unidentified
MSQVSKFVGLDVHKETIAVAVAKQGREPAESLGVIANDPDAVVRLVRRLGPVEEALWCYEAGPCGYGLQRQLTEMGAACAVVAPSLIPTKPGDRVKTDRRDAEKLARLLRSGDLTPVWVPDADHEALRDLTRARQAAQEELTRARHRLTKLLLRLGIAAPAAAWSKVYREWLQGLRLAQPLQQMVLEEERLAVAQAEQRSERLSATIEEVARTGPQAILIGALETLRGVAAVTATTLVAELGDLTRFRTPRELMAYAGVVPSEHSSGGSRRRGHITKTGNAHVRRVLVEAAWHARHAPHLSKVLKARQAGQPAQVLAIANKAQRRLYQRYWRLLRRNKTKGQVVIAVARELLGFIWAIAQETTVRVEPSMRFSEAA

SEQ ID NO: 392151 - protein, 410 aa, unidentified
MAERFVGIDVALHEHRVAVLDRDGEAVGPSFTIAASTDGVATLLRTLAARAATAAQTLIGLEASGHLWENLEAALVGAGYRVIVLNPLQTRRYRDVVRRKAKTDDIDAHVIAGLLRSGAAQASYVPDEPIQSLRELARLRARLMADRQDYLRRLVAQLDVVLPEHHAVLGDLLTARARGILAQFPTAQHLATATPRAIRRAAADAGARGFALDDATGVRDSARRSLYSGKAAAARAHVVRTLVGQLERLTTAIDEVDRAATTLLPPSDPGTGPSDAELLQTIPGIGPQTAATLLGELGTLTRFTDARALVAYVGFYPVINQSGDRAATPRLSRVGSRLARHSLYLAAVNAVRRSGEWRTIYLRKKAQGKTGKQALVVVAVKLLHAVYAMLKHRQPYNPSRLLVASATIGT

SEQ ID NO: 392152 - protein, 346 aa, unidentified
MTYYAGLDVSLKEVSICVIDDDGEVVAQGTAPADPEGVAGWFKNRSLTPKRIVHESGQLSIWLQRGMIQLGLPAICIDARKAHKSLSARLNKSDKADAEGLAQLARMNWFTPVHIRSEESDRLRALVGGRERMIRLRKDLEGHIRGVLKAFGIRMTGVGQAQQRQGFRDQLAAAGETDPVLRTIADGFISAHTTLCKATADFDRALKAKSKSHPITRRLMTIPGVGPIVSLSFVALVDDPDRFSKTSDVGAFLGLTPRRHQSGEMDWSGRVSKCGDPTMRGLLFEAGSCVIRQVKRFSTLKSWAVRLAGRRGFRKAAVATARKIAVLMLTLWKSETDYRWTQEATA

SEQ ID NO: 392153 - protein, 309 aa, unidentified
MNKAVVYIGVDVAKASLDVAWAEHSRRFANNKSGLGALSKWVKQSPLAVHLICEASGGYERGLLDAAEVNGIKVSLVQANRVRQYARAAGILAKTDKVDARMLCSFGSAMQPEPTPPLSAQQKQLRELETQRRHLSRMLVAEQNRLAQLNDKELQRLTRSLLATLKRQMAAIDARIASLIAQDQSLKEKAQKLTAIAGVGTRTAVLLLAQIPELGTLNRAQAAALAGLAPFNRDSGTLRGKRTIFGGRRALRCGLYMAALVAARHNLILRNFYQRLRSKGKPHKVALTAVMRKLLLALNHTLKPAASFA

SEQ ID NO: 392154 - protein, 351 aa, unidentified
MKYYTTTTEYNCGIDLHTRCMYICVMDLDGNILVHRNIKHNDFDFFLKLVEPYRHDLTVTCESCFVCFWLADACEDAGIHFVLAHAYYVKSIAANKHKNDKEDARELAECLRTNRIPPAYVCPRDLRPVRRLLRRRNKYVKNRSELSGHSTCEVMAAGHRPLAISANSKERWREGIRSSFDHPVDTFTTEAELFMIESYDRIILQMEQRIEQHARDFRHQDYRLLRTVPGIGKILALTILYETIDIKRFASEKDFVSYSRLVYGTNQSGGKDFGGKGRKMGNPYLKWAFMQAAVLCKRADPQLNAYIERLTRQKGKHTANAIIAAKFARAVYFMLDRKVGFSRELLMKGRR

SEQ ID NO: 392155 - protein, 346 aa, unidentified
MTMLEATRAVVGGIDTHGEAHVAAALDEVGGLLGTESFGANGPGYEDLVRWLEGFGTVSKVGVEGTGSYGAGISRFLTRSGIEVVEVDRPNRQTRRRAGKSDPLDALAAARAALSGEASGRAKSRDGWVEALRVLLVAKRSARTARVKALTQMRQVVYSAPEELRAKLRGLPISTFVPKCQGLRPSRSVDPVGAATKASLSSLAHRVSDLEAELEELDALITPLVKTNATTLLAIRGVGIDTAASLLVAAGDNPERLRSEAAWAHMCGVSPLEASSGKVTRHRFNPGGNRQANSALWHIVITRLACDPTTQAYMERRLKEGRSKREVIRILKRYVARAVYRQLPRH

SEQ ID NO: 392156 - protein, 422 aa, unidentified
MLEETQEREEIIERVAALDIGKAELVCCVRVPGPPGKSKRVQEVTTYKTMTRVLLVMVDRLHELGVTRVVMEATSDYWKPPFYLLEAAGFETWLVNAKDVKHLPGRPKTDRLDAVWLCKIAERQMLRPSFVPPPPIRVLRDLTRYRSDQVAVRTAEKQRVEKLLEDAQIKLSVVASDIFGVSGRDMLAALIAGQRDPKVLAQFARGRMRGKITILEDAFTGRFDDHHAFLLAKMLARIDTVSADIADLDEAIDAEIAPFAEAVARLDEIPGIGLTAAAVIIAEVGVDMSRFPTAAHLCSWARFAPGVKESAGRKKGNGATGHGNRYLARVLGEAAVSAGRTDTFLGERYRRIARRRGKKKAIVAVGRSILVIVWHLLSAPDAKFVDLGSDFYDTHLNTSNKKHNHIRQLEALGYRVTLEPAA

SEQ ID NO: 392157 - protein, 441 aa, unidentified
MAKLKNQISVVNNNTAGIDIGSRKIFIGIAEKPVVSFDTFTDDFLTAVTYLKKNNITSVAMEATGVYWISLYDLLDQSGFDVVLVKADQAKNIPGRKTDVADCQWIQQLHSYGLLRSSFIPPQHIRTLRTFVRQRRTNLQIASDHIRRAHKALELMNIKLQNVITQINGKSGLAILTAIINGNHNPENLAVLCEDSILKKKKEAVIKSLKGNFSEEHIFLLKQAVEAYLFYLKQVDDCDKQIENHLSLITQELPQPEKLNKPKPIRHHKPNINDLHVKLMQLTGGKDASRITGLTDSTLLQIISEVGTDLSRFPTEKHFTSWLGLAPNSHQSGLTNKKKKFKRHTSAGQIFRLAAQAIAQSKHLALTSFYHRIKARKGSLGAIKATARKIAVIFYNVMIMGIEFVEQGIIQYEQKIKERQMKYLQKQAHRFGLTLTPQLPV

SEQ ID NO: 392158 - protein, 367 aa, unidentified
MKNHSSIDQSVSSSDWSACTTLAVDLAKQVFQVAGEDVLGQVLYEQRIKSREAFYDFLRQLPPHVVVLMETGPGAQAWARQLQDQGNPVRILPAGLVATHRSGPKNDRNDALAILRANRDEKICAVPVKSVAALAMQALHRARQGYVRRRTALSNQMRGLLLEHGVALAQGDVAISQKIPRVLEDATQPVPGLLRELIDELLAEWRHLGERISVLTGRLEVAANADMTAKRLMTVRGIGPVTATALVAKETKPERFPNARKFAAYFGMVPDQYSSGETVRLGDMTKRGDAYLRSLMIQGAHAVLQQLRADSQQPDDRRLLHWMSRLGRKEAAIRLANRNLRIVWVLLQNDQTYRRHAGDGQPATMGH

SEQ ID NO: 392159 - protein, 424 aa, unidentified
MKSLTDGEFAAFIGIDWADAKHDICLQVANTEKREFAVLPHRPDAIDEWACSLRQRFQSRPVAVCLELRKGPIVYALQKYDFLILFPVNPATLAKYREAFTPSHAKDDPTDAEYQLELLVKHRDKLKALRPQSAPMRTLESLVEQRRCLVDDSKRITNRLTSALKQYYPQAVQWFEEKDTALFCDFLSRWPTFKQVKQARRATLEGFFHERHVRSAKLVEERLAAIKSATSLTDDIAVITPHRLLAQALVDQLRVTLQAIERFDAEISAISQTLPDYLLFRALPGAGAALAPRLLTAFGEQRERYESAAGVQKYTGIAPVTERSGKQRWVHWRLQCPTFLRQTFVEWAAETITRSFWAGAYYRQQRDKGCTHQAAVRALAFKWIRILYRCWQNRTPYDESKYLNALKRRGSPLLNAIAEVAKNT

SEQ ID NO: 392160 - protein, 342 aa, unidentified
MYYIGLDVHKKTISFCVKDAAGHVHREGKIGSTRRELDAWIGTLPQPRMIAMEATIFTGWIYDHLLPHASAIKVAHPLMLRAIALAKKLSDRIDASKIADCLRCDFLPECHMASTEIRNRRRVLRYRHLLVRQMVQTKNRVSGLLLETGVEHNKSRLHKVGYFRRLLATNSDIDDSIRPLLRLSRETIERCQKTEYALVSSLERDPFLKERIKRLRTVPGVGPITALNWALEMGDISRFRTIKQAVSYCGLCGDERSSADKVMRMPLSKQRNKHIQHVLVEAAKLAPRQSAELALIHHKAMEKGNRNRATLAVARKIVAWLLAVDRENREFIPAQQRETRAA

SEQ ID NO: 392161 - protein, 416 aa, unidentified
MKYARTVLPTEPANGLTCGIDWARDDHAVSVVDSRGKEVLRSTIDHSAMGLQTLLSILTRTGVEEVAIERPDGPVVDVLLDAGITVVVISPNQLKNLRSRYGSAGNKDDRFDAYVLADTLRTDRIRWRPLVPDGPATVALRTSCRARKELIGHRVSMANQLREHLNRAFPGAVGMFAELDSPISLAFLTRFDCQDRADWLTPKRLGTWLAKVGYTGGKSPAILHARLTAAPRGVTGEHGTAHAHITHALVATLSALVEQIKALSEQIADQLATHADAHIFTSLPRSGKIRAAKLLAEVGDCRGRFPTPEALACLAGVAPSTRQSGTMRSVGFRWSCDKHLRDAVTDFAADSRRANPWAQDLYRRARARGHDHPHAVRILARAWLYVIWHCWQHGVGYDPAQHRALQALLHDEQPAA

SEQ ID NO: 392162 - protein, 400 aa, unidentified
MRAVFGIDVSKVSSEVAILVNGEKVHGYTISNDALGFAWLLGDLRTVHKPEIIFEATGVYSRRLQTFLEDNGYAYTRLNPLEAKKQLDSLRVRKTDQIDAEKLAQSQFVLNRKPTYVQEEVYQNLRDLSRFYQNLTEDIVRAKNRLHKVLQVTFPELETILSTPSGEQYWNLVIAFPCKDFVLDLSKDELSESIRQSTSKRISDKRVAYLAEKLIALANQSYCAVKKTSPILEEVRYYGKELLRLSEQRQTVLDQMVELAQPLPEYDILLSIPGIAETTATSIIGELGDIRRFQSANQINAFIGIDLRHYESGNFLAKEHITKRGNPYARKILFKCIHNIASASHTNPCHIADFYEKRKRQSQTTSTKPHTIASIHRLIRTMYYLIMHNKLYDYTLTQNQ

SEQ ID NO: 392163 - protein, 402 aa, unidentified
MKYYTSTTEYNCGIDLHARQMYVCLMDRSGKKLLHTNIKDNDFNHFLQLIAPYRHDLTICCECMFGWYWLADACQAAGLTFVLAHALYLKAIHGGKNKNDRIDSEKLAHLLRANLIPPSYVYPSAQRPLRALLRQRLFFVWQRADLLSRIQSVQLAHNRPPLRQTRSNREPWLKQLLAHEDHPVRQLALKNEMAMIAHFDSQISALEEQLHRLTKDNHSRDYALLQTVPGIGEHLGMTILYEIGDIHRFPTVKDFVSYCRLVKGTVASAGKFKGLRGAKMGNPYLRWAFGEAAVIAKRDHQIIGPLAQGLENRFGANKFKANTVVAIKLARAVYFMLKNKTVFDPDRLVAVLSRKSFGPAHPQPGRSNWRPSKDQAPTRRSSRSLVLESPDTALGRSALRPI

SEQ ID NO: 392164 - protein, 379 aa, unidentified
MKDVTTYVGIDAHKKDLFIAMLVGTQATPLTWTVANEPNAIRRLVRKLEREAPGPVRSCYEAGPCGYALQRRMTTTRVVCQVIAPALIPRKPGERIKTNPRDARKLAELLRAGLLTEVRPPTPEEEAVRDLCRARDDAREDLQRSHHRLGKLLLRRGLHYSGRNWTRAHRQWIDSLEWAHAAERVVVDDYRLAIDHLEARLIELDARLTAIAATEPYREPVAWLRCFRGIDTLTAILILAELHDFRRFQSPRALMAYLGLVPGEDSSGEKHRRGRITRTGNALVRRLLVEAAWHYHHRPGVGASLTRRRKGQPGRVIAIADKAQQRLCRRFRRLAEQHKPAPKIAVAVARELAGFLWAALQPTPVPAAHGTTRARDRAA

SEQ ID NO: 392165 - protein, 348 aa, unidentified
MLADQLDYVVGVDPHRDVHALAIVEVRTGGVVFETSVAASSGGYARALQLADEHAPGRRAFAIEGTGSFGAGLTRFLSGEGERVLEVGRLRRERRSGGKSDALDAIRAARSVLGQKRAAEPRAGGEREALRALMAAREGAVNARRAGLCQLRDLLITTPEPLRSELRPLTRAQLLHRLRAMRPQRQRDVELRGALQALRTVAGRVQHLTAEERELAGEIETLTRKLAPQLLDQPGVGPLAAAQILISWSHQGRIRSEAAFARLAGCAPIPASSGQTIRYRLDRSGDRRLNRALHMILVTRRRAHPPTIAYIDRRVQEGKSRREASRCLKRYLARNLYRLLEHGAPLAT

SEQ ID NO: 392166 - protein, 385 aa, unidentified
MRRTSQRRGPGPSHLLLTPDHAGNVVGVDPHKRTLTATVVDTRGGILASEHFRVSGDGHRALEAWARQFGPIVRWGIEGASAWGRHTAIFLVRRGHDVRDVCPNRTGRQDRARQRGKSDELDSERVARETLAHPLLPRAFKRAGDEAGPDEQAELLAVWWQARCALMKRRQHLLSEAEALLHELPLVLIERLPDTKAVHPRLWALKQATYRRRLDPATCLRVRLLSEYRDQIAKLDQEEKAITRELAALVHASGSTMHQLCGLSTVSVAELLVEVGDPRRFTIGGFARFNGTAPLVASTGEGPGEPIRHRYNPGGNRRINAVLHRMAITQLRFEPRAQRIYTQARGDGHTKKEARRILKRHLSDVIYRRMIRDAAAAPAQPLVAA

SEQ ID NO: 392167 - protein, 351 aa, unidentified
MLLIGVDYHPSFQQIAFLNQDSGECGELRLNHGDGEAERFYRELQQRGVRVRVGMEATGFARWFERLLAELGFELWIGDPAEIKAKRVKKQKTDRKDADLLLKLMREDRFPKIWIPTPENRDLRQLLWHRHRLVQMRTRIVNQLWALAMNEGQHRKKKLWSEQGRAELEKLSLAPWANRRRRELLELLDRLNPTIEELTAAAEQEAKKRPDVLRLMTHPGVGPLTALAYVLIIGTPSRFARGKQIGTYAGMIPSEESSGDKQRLGHISKQGNALLRFLLVEAAQAAARVNPEWRRRYIHLAMRRHKSIAKVAMGRRLAVRLYWMWRNGCPYSPSLEFGSYAGQPGIVHGVK

SEQ ID NO: 392168 - protein, 339 aa, unidentified
MEKAATIGLDIAKQVFQVHGADKAGRAVLRRKLSRNDVIRFFSEQPPCLVGVEASGSAHHWARVLSGLGHTVRLMAPQFVKPYVKSQKNDANDAEAICEAVGRPSMRFVPQKSVEQQDLQCLHRVRSRLVANRTQLINQVRGLLAEYGIVLPQHPGQVRSGLPAVLEDAESQLTGFGRVLFRSLYEELAQLDEKIAAADKRIQIAFQSIPDCRRIAAVEGVGPLIATAIVAAISNGHAFENGRQFSAWLGLVPRQNSSGGKSRLLGISKRGDPYLRTLLIHGARSVVYRAKAKTDQRSLWINDKQQRLGTSKACVAVANKNARIIWSLIAREQEYRRAA

SEQ ID NO: 392169 - protein, 326 aa, unidentified
MQSILGIDVSKDKLDVMLISDQYQRHKIFSNDPAGFRQLQRWLTTQQAGQVHACLEATGQYGDGVAEYLYEQGHLVSVTNPARIKHYGESKLHRNKTDKADAALIAEFCLKEKPPYWKPLSPELKHLRALVRRLSDLQTNYQQESNRLKSGEKDSRVLADLADHVDYLNTRIKAIEKEIQEFIDQTPDLKSQQDLLRSIPGIGNITASRLLAEIGDISDFEDAPQLAAYAGLNPKNSRSGSSVHKKTRISKQGKSSLRCCLYMPAIVAMSYNPVIRSLCVRLSERQLPKMAIVAASMRKLLHLVYGVLKNQVPFDPNYGAQFNFAS

SEQ ID NO: 392170 - protein, 426 aa, unidentified
MRVLYDRVAAIDVHKDMVKVAIRVPGAKRGTRKTDVLEFRTFYGVFQAMARELRGRGVTHVVMEASGVYTDPVYYALRELDFTEVMVINPAHAKALKGHKTDAKDAIRLLDLYECGLLSGSYIPDPDLREVRDLARYRMKTVQARTSEIQRLQKTLETAGIKLSSVVSDVTGTSATAMIEALISGERRGTVMAGLAQTRLRAAGKMADLSMALTGRFTEHHALMCRLHRDRITIFDDAVKDLDAKIAPLVARYAREAELLNTLPGFGDVIVAGWLGAIGPAPHQHFATASRLASWATLCPGNYMSARKSKGGRTGDGGAYIKPLLIQAAWAAVRVPGRLQARFGRLVRKFGGPRNKGAQKRAITAIAHTLLKIAYGVLKTGTPYADLGADFYTRRESPDARQDYLMRQLQKLNPGCVITITPTEAA

SEQ ID NO: 392171 - protein, 386 aa, unidentified
MNVPRYIGLDLHKMYVHGCEWTPTAPDRHKARHFRFPNTEAGWASLLNEVDCTCLVALEVTGSAFEAYDRLSPHVGRVLLANARELKRLGSKRHSDRVDAARLAKALAMDLVPAVWVPPLPMREVRRLLHYREGMSRHRRQCISQAKRVFQRHGILLPPHSDIHHAAATYDLSLIPAGDRVILASALRRAADLEAEILTIESAIAARLEMVPEVRNLLTITNVGLIAAATIWASVGDPCRFTDPKQLGRYAGLDPSFVQSGETLCPGRISKNGNTLLRTVLVEVALGLARHDTGALGQFYERKKTKIGPKKAAIALARKVLIVAWRMLLTGEAYRATKPLQLARKYRLLERLAHYVAPCGVAPTPDIPDAHQRFTRLRHARTRVPA

SEQ ID NO: 392172 - protein, 410 aa, unidentified
MSPLYVGIDVSSKSNVAYLMKPDGSKHSSFSVPNSRDGSRQLVKRILSAITSQSLTDVVIGLEATSVYGDNLVCFLREDGSLAPYNKKIHVLNPKQVNKFKLSYNDLPKNDYVDSFVIADCLRFGRINKEVYLDDYRYAALKNLTRARFFAVQNLTKEKQRFMNHLFKKYSTMAQEKVFSDTFSTTALAVYESFESAEALANMDLHQLTEFIIEKGKNRFPDPDSVAKAIQKAARSSYRLPKTVNDSVNQVLSISISSMRAMESQIKAFDKVIAEQMALIPNTLTSVNGIGPVYSAGIIAEIGDINRFPNQASLAKYAGLAWSQHQSGDFEAQNTRLIHSGNRYLKYYLCEAAMSLVRCDAEYRSFYYRKYNEVNKYQHKRALALTARKLVRLVFRLLKDNCLYKAPESK

SEQ ID NO: 392173 - protein, 351 aa, unidentified
MKDLMAGIDLHSNNIMVGIVDREGKRLAQQKLPCELKRIGEFLSPYKDRLEKLAVESTYNWYWLVDGLQGQGYPVVLANPARITQYSGIKHADDKNDAFFLAELLRLGILPTGYVYDAERRPVRDLLRRRMSLVHQRTALMLSFKSLFTRTTGEQMSLSRLKALDVKEAQKLYEHPANQLIAGLQIQHIEQLNASIDRLEKAVLSVARHLPCYPKLKTLPGVGIILGLTITMEIGDIKRFAGPGQFASYCRTVAAQCTSNGKLKGENNRKCGNKYLAWAFVEAANFARRYDEPCRKWYERKAAKTSKVIATKALACKLAKAAWYLAAEETDYEPGRVFPQMATTKNQIMKT

SEQ ID NO: 392174 - protein, 294 aa, unidentified
MNLDIDRSILGIDVSKRTFDIWLLHKGKDKRKKFDNNADGFRQLSEFLDKNNVLKVHACLEATGRYYESLAQYLFEKELLVSVVNPLKIKGYAISELQRSKTDELDAGVIAHFCRAICPPAWKPQPKEISDLQQAERYLENLKVNRQQELNRLESGITCTAIKSIIEKHIEELDLKIKEVETWLKQHVKKHEKLNKHYELIVSIIGIGNVTAFTYLGELGYTDSFNHTRQAESFCGLTVRKYESGSSILKKGRMTKVGNWYLRKALYMPALSAIQHNPIIREFAEHLKLVNHQK

SEQ ID NO: 392175 - protein, 361 aa, unidentified
MVYIGVDLHRKTTQVAAVNGGGELLVNRKVPTSGPDILRVFGEVAAEATPTAVAFEATFGWGWFADLLRDAGIEVHMAHPLATKAIANARVKNDAVDAKTLAHLLRAGMLPEAWAAPLEVREARRLVRMRTSLVRMRSRIRAQVHAVLAEHGVATPMSDLFGKEGRRLLEELRLPELSQGRLEACLRLIDDLGKEIEIADTEILARFETDPRTRRLLPIPGIGPTIAAILLAEVWDVSRFPSAEHLCAWAGLTPTERSSADHTRRGHISKQGSRWLRWVMVEAAVRALGNPQLGVFYTSIEKRRGSKIARVALARRLLTLAYYALRDEGGCRAFPVPTEIPRGRARSLIDMASRGTAAIAD

SEQ ID NO: 392176 - protein, 401 aa, unidentified
MEGPIVSIDVSNGNSHYMCFIKNNKCFGKVKKIDHDIEGFKRLLEDIQKLEAETNEKVCAVFEATGVYTKPLERFLSKNSIKTYMINPLESARKRKEEIHNKKTDKLDPISISKVYYDKEEMMELKKKDETYNWLRKKNRLYEDQLNHLRKYKVTFQNQLSICFPGYLDLFKDGYSDIPMTILKKYPHPDLLKNKKAETVARYLEKNTCHTHKVSLEYALKIIEFAKKTYPGCEKDDVEVEIFKILLDKVIETQRECEKTLNEMITVASTLEEYRYILSIDGIGTNLAARIIAEIGDIEEFESREALVAYAGLDPHIYQSGDQDGKHLKISKKGNKYLRCLLFLAVGCSIRGAKDNPVNRFYQKKKQQSNPLNSKAAKTACTAKLLKIIYGICKNKTTYER

SEQ ID NO: 392177 - protein, 350 aa, unidentified
MIIIGCDYHPGFQQVAFVDTETGELQERRLQHREEAEKFYRELATQGMKVRVGMEASGHARWFERLLSELQVELWIGDAAEIRTKRVRKQKTDRQDAQLILKLMLKDDFPRIWVPSWENRDLRQLLWHRHRMVQARTRIMNQLQAVALNEGLRYKKRLWREAGREQLEAFRLGPWASQRRRDLLDLLDRLNPTIAKLTQAIEQEVENCPEAQRLRTHPGVGALTALTFVLIIGRADRFQCGKQIACYLGLVPEEESSGERRRLGHITKQGNSLMRFFLVEAAQVTVRSDQEWRNKYYHLMMRRGRKIAKVAMARRLAVRMYWMMRKGWDYEQLKKFGSHAGQPGTGDGVK

SEQ ID NO: 392178 - protein, 429 aa, unidentified
MNYNTQNAKIASITEKTLIIGIDVGSETHYARAFNWRNYEYSKKPFAFSNDEAGFSSFKDWMDDIAEKHGMKVVIPGMEPTGHYWLNLGAYLQEQGMKPVHVNPHHVKKSKELDDNNPSKNDRKDPKTIAGLVNEGRFSYPYIPTGIYAEIRNLSNLRIQTQEEITRIKNRMARWFSIYFPEIKDVYRNPDAVSGLMVIKQAPLPCDIKELGVDGVNKIWRDARLKGAGIKRATTLVTAAEHSIGNTEAPRSARKEIRNLLNDYEIYKNRMDELMEEIEETLSEIPYIDKLMEINGIGIKTVSCVIAEVGDIGRFDNPKQVQKLAGYAIVADSSGKHNGESRISHRGRKRLRYALYEAAISVIGKNKEFKEIHSYYRTREKNPLKKMQSVIAVACKLIRIFYTILTKGVDYDGQRMLADIVRPEMQLAA

SEQ ID NO: 392179 - protein, 324 aa, unidentified
MKYIGIDIAKSSFVAAFPKGKGYTTATYKNDPNGIAIFLSKLDKCLDHCVLEATGNYGCLLVKMLLEADLSVSVINPKQIKHFTKVVNHITKTDKVDAELISLYGSKMEPKPYKMPLASIQALKQQKTLFAQLKKQLTMCYNLLESFSVLPKPDTVSLTMVKQTISYLEEQIVILEQQMLSITQETYQDLYKRISSIKGIGDRTTMELIVSTGGGNHFESAKQFSKYVGLAPIYEHSGSSVRKKGHINRHGNPQLRSLLYIASWSAIRFNKSCKDFYERLKERGKPGKVALIAVANKLIRQVFAIMRDHTFYVDGHLSKLKANP

SEQ ID NO: 392180 - protein, 331 aa, unidentified
MNYSHFVGLDVGKKTFDASLMSADEKELSHKSFDNTSEGIQSLLDWIAGYHLSLSKLLFCAENMGSYVTELSVSSASMGFSLALVCPLTIKKSIGLQRGKNDRIDAKRIANYAVLHYRKLELYKLPDKDLVRLRGWIIIRDNLVKQKVSSIKLLETFSQMAKLADVTDSISFLEEQLKSIKEKILQVEEAMEQLIAASCSLCTNYLLLRSIKGVGIINAIVLLCVTNNFQRFDNPRKFACYCGVAPFEHTSGISIRGKTQTSPLANKEVKVYLTQAAITAISWDPQMKAYYKRKIAEGKHKASVINAVRAKIIARSFAVIRRQTPFVTLVV

SEQ ID NO: 392181 - protein, 435 aa, unidentified
MNINFGGKHQRMEQEVKFTQIVRCGCGIDVHQKQITATVRRSDQEFETREFDTFTSSLTELREWCKAEGVTHVAMESTGIYWKSVFNVLEEDFEIILVNARHVKNVPGHKTDKKDSRWLSKLLLSGLLKGSFIPPRDIRELRDLVRYKKKLTNQASSEKNHLIKVLEDCNIKLSSVVTDVNDGVSATKIINDIIEGRTDVDRMMLHLHGRIKASREDIRKALEGKVTDHHRRLMQLIKHRIKDTEELIAMVDQQIDIAVQQYRVEVELLETIPGVGRDSAISIISEIGTDMSKFPDEHHLSSWAGLSPGSNESAGKKKSTRTTHGNKYLRTTLVECGWGATRKKDSFLKRKYESLVGRRGKKKALVAVGHQILVSAFFILRNIEPYKEPELHESPKRRNRKIKNYLSKLRELGVNIEIPAFEETKKVGSLLENHL

SEQ ID NO: 392182 - protein, 409 aa, unidentified
MIYCGIDWGEKTHAVALVDDDGQLLAKRQVTDDAAGYQILIDLLAEHGDTEAEPIPVAIETSRGLLVAAMRTGMRQVYAVNPMAAARYRDRHAVTRKKSDPGDALVLANILRTDRHAHRPLPADSELARAIAVLARAQQDAVWNRQQLSNQLRSLLREYYPAALAAYLERWQNGLCRPEARILLELAPTPAKASRLSLAQIRSALKRAGRQRRIDTEAESIREVLRSDYAHQPVLIEEAMGKQMLALLQQLDAACTAADQLAEAVDEAFPHHPDAEIILSFPGLGTQLGARVLAEIGDDKNRFSTARGLKAYAGASPVTRASGKKSSITRRWVKNDRLNHAGYLWAFAALTASPGAKAHYKRRREAGDWHAAAQRNLFNKMIGQLYHCLTKHILFDESQAFPAELPAAA

SEQ ID NO: 392183 - protein, 355 aa, unidentified
MMQSQIIATPKLFIGMDIHKKSWSVHLRTDLFDHKGFSMPPEPEKLADYVANHFADHEVSLSYEAGCCGFSAARYFLNLGWAVKVVNPNDIPHSDKQLYQKTDKIDCRNLCKQLQRDQLHGIYIPTESEEQLKSLLRQRNQVVKQLRKAKSHIKGLLLFHGIAIPDRFDNPNWSHDFVGWLKTIQWAHITGTACINSKLRILEMLKNEYLQTSNELRAYCRKYHNKDYYLLKSIPGIGGLLAAAILAELGDIRRFNNQKEFSSCIGLVPGIHQSSETDLKMGLTPRCKSLLRSYLIESSWVAIRTDPEIQAYYRKHVGKNQKNVVVKVAHKMCCRILSVIKNETPYQINYKGMKK

SEQ ID NO: 392184 - protein, 373 aa, unidentified
MPKYSTAFGMDVHLRSTTVCALDADTGEAVTRRFPGNPWGEIAGWMGGFPGPSLAAYESGYPGFAPQRELAGLGVECVVAAVSKIPRSAADSASKNDRNDAARMAKAILAHDISPVWVPSPEVEGIRDLAGAYDGATARLATAKQRLLAFLAKRGFAYGGTTPAGNPRKYWTYDFLRWLDKVRPEDDGGVRTLAALRSEVEAAAEARADLLSEYRAAVDASPIAAEVAALQSIKGCAFALAAAFSAEVGDFTRFRSGRQVTAYFGLAPSQRSSGDSVRLGGISGAGNALVRKLAVEGSWRYAAARHQPKLMPRDTGVPLEIRMHGRKGSERLLRRREEMLARGMPAAKANAATAAELVRWLWALGMMCREGAE

SEQ ID NO: 392185 - protein, 345 aa, unidentified
MDVAYDGRQVVGMDLHRRRSVLVRMTMDGRKLETARIENSPAALRRELARAGKSPLVVLEATYGWYWAADVLAEAGAEVHLAHPLGVKAFSYRRVKNDERDASDLADLARMGRLPEAWIAPPAVRALREVVRYRHKLVQQRTSCKDQVHAVLAKLGIPVTHSDVFGTGGGLWLDQLVLPAPYAAKVASLRALIAVLDGQVTELGAEAASMLAADRGYAALRELPGIGPVLAAVIISEIGDVTRFRKAAQLCSWAGLTPRHYESDTKVIRGHVSKQGSRMLRWALCEAIQHQPAGTRPRAARDAIIARRGNQARNIAKTAAARVLLTQVFYILRDGHLRRAWDPAA

SEQ ID NO: 392186 - protein, 321 aa, unidentified
MDATGRVVREAKIASDPEALTAWLKNLGLEIVRIGLEAGPLSQWLYAGMQQAGLPAELLETRHVRTAFKIMPVKTDRKDARGIAQLMRLGWFRPVHCKSLAAQETRAVLGARKLLQIKLHDIEMSLRGTLRGFGLKVGKTTPKTFESLVAEHPTLPAVCDALLRARTVLAEQFKRLDNQAHRAARADKRARLLTTAPGVGSIVALTYVAAIDDPSRFKSSKSVGPLFGLTPRRYQSGETDVTGRISKVGDATVRTALYEAANAILTRMAGDSPLRSWALAVARRTGMRKAKVALARKLAVILHRMLVDGTPFDATKAAAAA

SEQ ID NO: 392187 - protein, 359 aa, unidentified
MTSVALKARPQIVVGVDTHKDFHVASAKDQLGRSIGNIKAATTELGYRKLLAWAQRLGVIESFGIEGPNSYGAGLARYLSEHGESVLEIGRPNRQRRARQGKTDFIDADMAAAAVLAGETVGVPKSGNGNVESLRMLRVTRASAVKAKGVAIVELQHLVITAPIEVREALAGLSARKKVRTCAQMTPVHEPKTPEEAAIFTLAFLARRYEFLEQEAKELERQIERMVHTSCPELLELPGVGPDVAATLLTALGDNGGRIRSEAAFAKLCGVSPLDASSGRQVRHRLNRGGNRQANRALHTLIVVRLRIHQPSKDYIERRLAEGKTKKEVMRCLKRYAVREVYRTIRDTSSGDQHLLKVA

SEQ ID NO: 392188 - protein, 370 aa, unidentified
MATTPAEVTVIGGVDTHKHTHYAAVIDDQGRLLGHQEFAAADAGYLELLAWMRSFGDIASIGVESTGSFGATLTRFLTKAGQQVIEVNRPNRLARRMDGKSDQLDAEQIARAVLGRTSTAIPKAKSGIVEVIRTLRVTRGGAVKARTQAFNTLWGVMIGAPSPLRDELVVLTKRTLVNRCLRLRPETDDVISLVDDPSRMLIAGVKTALRDLARRWKALDDEIKKLNRQIAGLVQHAAPELVELHGVGIEIAGQFLVTAGDNSERIHSEAAFAKLCGVAPQPASSGRTTGRHRLSRSGDRAANSALYIITIVRMRHHQPTRDYVQRRTAEGLTKREIIRCVKRYIAREIYKNLPTLERTVPHAGGLQPAA

SEQ ID NO: 392189 - protein, 347 aa, unidentified
MDQQCHYVGLDVSLETTSICVIDDAGAIIWRGKCSSDPDTITAIVRHRAPGAVRVGLETGQLSNWLTLSLRRRGVPVVCMDARHAKAALSLQINKTDANDAFGLAQVVRTGWYREVAVKSMDAHTLRMLLVARSRLVSQRQATANTIRGLLKTFGLVVARGSKGLFPVRVREQIAGNPAVIAIIEPLLAVWHAIRDQVAMLDRQMLARARNDQVARRLMTIPGVGVVIALAYTAVIDDPARFRRSVSVGAYLGLTPRRYQSGEVDTTGHISKCGDSLLRGYLYEAAAVLLCRDARASILKSWGLGLAKRIGMRRAKVAVARKLAVIMHRIWSDHSEYRWTAIPPTAA

SEQ ID NO: 392190 - protein, 375 aa, unidentified
MEHHSEVFVALDTAKLRNAVAIADAGRNGEIRYLGEFDNTEASTRKLVARLASKHARLTFCYEAGPTGYGLYRLIKSLGHHCMVVAPSLIPSKPGDRVKTNRRDAVNLVKLLRAGELTAVWVPDERHEAMRDLVRARDAATKDYRIKRQNVSSLLLRLGRHYPGKKTWGRAHINWLTSLKLEHREQRIAFEEMLLAVRQVRERIERLEQAMREAVADWTLAPVVDAVQALRGIDMVGAVAFLAELGDLSRFENPRQLMAYLGLTPSERSTGESVKRGGITKAGNARARRLLIEAAWSYRFPPRVSKDMQTRIGAAPRTAREIAWKAQMRLCGRFRILTRKGKRPTIVVTAIARELSAFIWAISREVGGSHATANQ

SEQ ID NO: 392191 - protein, 344 aa, unidentified
MEHYAGLDVSLELSSVCIVDERGTIISEVKVASEPEALIGFLRTQEVKIGRVGLEAGPLSQWLHAGLADAGFEAVLLETRHVKAALSAMTVKTDRRDARGIAQLLRLGWYRPVHAKSASAQEVRALLTARKLIQAKLLDIESGIRGVLRGFGLKVGPISRGRFEARILELVDGHATLEEVIGAMLSARAALETEFKRLHRALLALVRDDPVCRQLMSVPGVGAIVAITFKSGVDDPSRFRRSRDVGPHFGLAPRKYQSGELDVTGSISKVGDRMVRTALYEAASVMLTRSVRFSALKAWAMAVAKRRGTKKARVALARKLAVILHRMWSDGTSFRWTNEETAIA

SEQ ID NO: 392192 - protein, 316 aa, unidentified
MNTIQSAVHIGVDVGKSELDFHFHESCEHFSVNNSSAGIRQAFTQLPGGITRLVVEATGRHEQLLVQAAQRQGVPVVIAQPIAIRRFAGALGILAKTDKLDSQVIARYAAVLEPEERELPDKTTRQLKDLTVRRKQVINMLTMEKSRLHVMPAFLRADIRRSIGSLQRQQQKLDERIRHLSEQVAEWRQRRAIMESMPGIGVTLSTTLLADLQALGSLNHKQIAALVGVAPMNRDSGKMRGKRRIRGGRVHVRTVLFMATLSAIQHNPVIKVFYPRLVGNGKNKKVAVVACMRKMIVLLNAMVRDQTYWGELKSMA

SEQ ID NO: 392193 - protein, 321 aa, unidentified
MTYVGIDVSKVTFVVAYSSVKTNKTRTFKNTVNGVHEFVQTISASEHNCVLEATGNYSALLVYLLSEAGITISLENPLKIKNFARVMLTVTKTDEIDARLIALYGEKMQPAPYKLRSDAILVLKQKRTVLRQLKKQLVATRNLKGSMEVIPFFDPKCKKTIEKTITFLEKQIKEMEEELASLAQGEYKKQMDLLTSIKGIGVTLAAALIVATGRFSYFDNAKQLTRYLGLSPTYQQSGTSVNVKGHINRNGDSSLRSQLYVAAFSSLRCNTECKACFDRLRSNGKPGKVVVIAVANKLVRQAFAVVTQGKPYVDGFKSEKP

SEQ ID NO: 392194 - protein, 343 aa, unidentified
MKLTRVGVDLAKQVFQVHGVDRAERPVWCKRLKRNRWIAELERAAEPGAEIGMEACGSAHYWARVLQGKGYRVKLIAPQFVKPYVKTNKSDANDAEAICEAMSRPCMRFVGVKTVEQQDLQAVHRVRSSLIRERTAKANQMRGLLYEHGLVAPRELISLRRAVPQWLEDAENGLTARFRSLLAGLYRDLLQYDERVRELDQEIAAIAREHEAVGRLEQLRGIGPLTASALYALVGDARQYRNGREMAVSLGLTPRQHSSGGKERLLGISKRGDKYVRTLLIHGARSALRAAPGKTDRLSRWALALAERSHPNVAATALANKMARVAWAMLRHGTNYEPERMVA

SEQ ID NO: 392195 - protein, 414 aa, unidentified
MDVLHPRCAGLDVSKRDAKVCVRIQAEGRARAKSTVTTWSSMTGQILALGEHLVAEGVTLVVMEATGDYWKPFFYALEGGPFEIMLVNARHAKGVPGRKTDVNDAQWLAELGAHGLVRASFVPPEPIRQLRDLTRTRSSIVHERTREFQRLEKLLEDAGIKLTSVATDISGLSGRAMLEAMVAGERDPSVLADLAKRRLRNKIPELTEAMQGRFNEHHAFLIRLHLDLIDHLAAAIDELTARIEEAMSPFRGARDLICTIPGISILVADVIIAETGGDMSRFPSAAHLASWGGTTPGSNESAGRVKSTSTRPGNPYLKAALGIAAMAAARTKGSYFGAKYRRIAARRGPMKALVAVEHAILVAIWHMLGDGSLYTDPGADYLTRRTPDTTRSRAVHQLERLGYRVTLEPLLELG

SEQ ID NO: 392196 - protein, 455 aa, unidentified
MIPAAIERCAGIDVGKKYLSVTIMVGPLTGEPRVEKRTFGTIREELVKLREWFEKEKITHAVMESTGSYWKPVWNELEGSVKVFIANPIEVKIRKGHKTDDKDGWFLAHLLRHAMIQPSFIPPRAQRELRDLTRYRKKLIGNGTAEKNRVQKVLEDANVKLGNVLEDVFGVSGQLMLDALLKGEEVPQEIAQHAQRRAKSKIPDIIKSLEGHQMNDHHRRMINHHLDHMQVLEGYVDKLDREIEEQIKKAGMEEQWQLLQSVPGVKQTSAATILAEIGPDMTVFPSHRHISSWSGVCPGNNRSAGKSKGSQTTKGNKFVKSALTECAWGAARKKGCFLKDKFWRVKTKSKGKDGPAVVAVGHTLLILIYHVLTTGEPYQERGVPELDEQQKDRAIRHHIRRLGKLGIDVGTRVAKGPSGPRFCGGTRPKPRKAAKKSSSEETTVRRKTKSPRKTS

SEQ ID NO: 392197 - protein, 362 aa, unidentified
MRIIGCDFHTRQQTVAMLDTETGELVKMTLKHEGNNVLEFYSKLPRPLLVGIEATGSMQWFVNLIEELRIDCQVGHPAEIRAAEPRKQNHDRRDADLILKLLMENRFPAIWLPSKELQDLRALLRHRHQWVRLRTRIQNALQSIALANGLRRGPSLWSQDGQNTIASLPLAPHTAYRRNELQAIYAKFETEIEKLNQRVEEQACKRTGARLLMTHPGVGPVTALATEVFLGDPARFADSKALASYVGIIPREYSSGGRQRLGGLTKQGNPLLRFLWGEAGAHAVRRDPELQRFYRRKLIQKGLGKASVAVARKLGIRLWIMLRDQIEYHEFCRRGQKQQKSSDACAGMPQTRYGAKSHRPVD

SEQ ID NO: 392198 - protein, 434 aa, unidentified
MDADYANRLGWFRQFKEHVNASANTLIVGIDIGKDTHHAFMGTPAGRTIYRRLIFENSIYGFDRLLFLIKSQMSDKQLTEVVIGVEPTSVYHKPLAEYLIGLGYRVVYVTNTAIKKNRAILDGRWDKNDTKDAANVADLVSRGRCHFYDLPDMNLRDIRNLLSLRKRLKKQEHRVMTRIRNNLVAQYFPELDGAWYRCRQENLAIVRFCLEPEKIAALSFDDFCRMVTRRRRGIRQYQRLRHIHEVAEDSIGCRVGSSVAFEAQLLVENLQRAREQIAEVEEQLHLICGSYKEYELLQTIPGFGPFVSAVVLGAIGYAQRFENSRQLLRLAGLDLNASRSGKTSQSAVPVISKVGKADLRYALYQAAKVATSLTAEFKAYFKRLLKGRQKEKGIKTKMRVKVSAKMLVIAWTLMKTQQPYKAGLLVIDEPVQPR

SEQ ID NO: 392199 - protein, 311 aa, unidentified
MQELFIGVDVAKGWLDIHQPGAGARRIDNTPGAARSFAKACIKDGAWVIFEASGGYDRVLREALETANVPFSRVNPRQARDFARAMGVIGKTDRVDARMLSELGARLRPAATEPLAAARRALQAQATRRRQLVAMRKQEATRLQQTADAEARADIRSLLVVLDRRIAKIEERMTALVAADPEMAVIDRRLRTIPGVGAVVAATLIAELPELGQLDRRRIASLVGLAPVARDSGKRSAPRAIAGGRPIVRTVLYIAALHASRWCQAFKEFRARLQTAGKPVKAALIATARKLLVTLNAMIATGTDYEPPEAA

SEQ ID NO: 392200 - protein, 398 aa, unidentified
MRFAGIDIGGERHAVAVVNEGGAVVVKSTFFGEDAAGYQRVRDLLGDPHDCVVAMEATGHYWGNLFAFLVGQGFKVALLNPLRTRRFAEEELERTKTDSVDALGIARFAAQKRPVPTPVADEVTAELRELVRLRSRYVDEHSDRMRQLHRAVDLGFPEFTCHVRMNTVLATAILARYPTARSYSGVSVRKLARLAYDGRHQVGEILARALIETAKISVGSHHSEAYGLQVKYTCSDMELLRNRVKQLDQEIEGKLQTHEVGKLLTTIDGIGSRTAACLIAELGDPSRFRDAAALASYVGVVPRLRQSGKRAFSGARGLPLGNARLRHRLWMPTLVAVRKNPWLRAHYDRLLAAGKRPKVAIVACMRKLLGAIYSVARNRRPFVPRLATAGHEQPMTAS

SEQ ID NO: 392201 - protein, 371 aa, unidentified
MRVISKAPDSVVIAIDPHKASWTAAAVDASLQPVETIRVPVSRDGYRALRRFASRWPDPLWAIEGATGLGAPLTARLRADGMDVVDVPAKLAARVRMLSTGHGRKNDDADAVSVGIAARSARTLTSVTVEGTVTALRAIVEHRDDLVKTRTQTVNRLHVVLTNLIPAGAQRDLTADQAAELLRGTRPRDVAGKTLRGLAADLVTEIRHLDRRIAKATADIETAVTASGTTLTELRGICALTAGTILGRVGSISRFRSAAAFATYTGTAPIDVSSGDVVRHRLSRAGDRQLNRCLHVMALTQIRFVSAGSRSCLGCRADGKGHKEAMRCLKRRLSDVVYRQLRSDANRLEAGPGGHSGAALESSAASSNPTD

SEQ ID NO: 392202 - protein, 361 aa, unidentified
MRRVCGLDVHKDSIYMCILYENGSKIESVFGVLTPELDKLRDLLVSHHVCEVALESTSIYWIPIWNILSVDFSLKLVNPYFIKQLPGRKSDVKDAEWIATVLQKGLIRGSYVPDRMIQCLRQYERRNHELSKNIVHAEQRMDMILQRCNIRISNYVSCISCKGYQKVVNAIISGESNPKVLVTLIHKRTLNKHGRQVVEDSLNGFVSDTDRDILRQYRDERMQMEQHKSENKAKMQAICEAHYCEELELLQTLPGIKEESAANIIAEIGVDMKMFLTASAIVGWAGLKPRNDQSAGKIKSRKITHGNKYLRKILVEAAWSAARTKDSRFMKMYQRLLARGKSKQKALIAVARKLLVLIWNM

SEQ ID NO: 392203 - protein, 343 aa, unidentified
MYYIGLDVHKKTISYCVKDAAGQVHREGKIGATRLDLDNWIKTLPQPRMIAMEATIFTGWIYDYLLPHAEKVKVAHPLMLRAIAAAKKKNDRIDARKISDLLRCDLLPECHMASTEIRDRRRTLRYRSLVLRQTVQMKNRVSGLLMESGVTYDKQRLHKMGYFTKLFSTNEEIADSIRPLLRLGREHIQRGQRLDRALISSLERDPLLSERLRRLRTIPGVGPITALTWALEIGDYTRFRSVKEAISYCGLCSAEKSSADKAMRTPISKQRNKHIQHVLVEAAKLAPRYSHELALVREKELQRGNKNRATLAVARKLVAYMLAVDRRGQDFVPAETLADKAVA

SEQ ID NO: 392204 - protein, 381 aa, unidentified
MSKIIRIGMDTSKSVFQLHGVDATEKPVLRKKLRRSQMLEFFGRLEPTRVGLEACAGAHYWARELKALGHEVVLLPPQYVKPYVKRNKNDAADAEAICEAMSRPTMRFVPVKTAEQQAALMLEGMRDSLISRRTQLCNMMRGYAAEFGLAAAKGLDKMEPLLARIASEQALPALAKELFATHRKEYERLKVEIAKIEAKLLAWHKDNELSRRLVKIPGIGPIGASVMAMKVVDPRAFRCGRDFSAWVGLTPKDHSTAGRKRLGVITRAGDERLRSVLVAGATAVIQQARRGKGQASPWLIALLKRKPPKLAAVALANKNARVAWKLMVSGEHYNPARYGAVAGPAGVAREGRGAALAGGSAPRPSLARRGKSREMTAMPNP

SEQ ID NO: 392205 - protein, 447 aa, unidentified
MRIVYQRCCGMDVHKDSITACVLLIDEEGEFRTESRRFGTMTRSLKEMSGWLASLGVEAIAMEATGVYWKPVWNILEAEKKFALLLVNAQHVKRVPGRKTDQKDSEWIGELLQHGLLRASFVPPVEIRQLRDLTRMRARIRQTLASFANRIQKVLEDANLKLGSVASDVLGVSGRHMRKALMAGEQDPQKLANLAQGHLRKKIEPLQLALQGHFTDHHRLQLKLLLEFVEFGEQQLSHLDSEIQLLLSKVQGEPGLPGPAEGTVAEAEASPPQVTSPLQTAVELWDSIPGIDQLAATTLVAEIGANMDQFPSAHDLASWAGLCPGNDESAGKRRSGKTRKGSVWLRRALCQAAWSASRTKNTYLAAQYHRLIVRKGKKRTIVAVAHSMLIIAYYLLKRRCTYQDLGPDYFNLLNEEAITQRLVKKLTGLGYHVTLQPARTQAVSQAA

SEQ ID NO: 392206 - protein, 450 aa, unidentified
MPQRYYLSLDIGYKEHVAVVIDLQTFVRGDDRWKRARCLHFPSTRVGLKKFQKYVDRFCPDPAAFLGLCEPTGGFYGATVLQYLLDGGYQMLLVENATTRHMREKIFPNLPKTDEMDARVMARIGYLHEAVGEEFTLRPLELPDPDDADLMALCRDSWKLSTLITRARNQFTQLIAVTFPELKTFFTSSVSTVVPVSLITAYPTPALLAEAPAEEVHQVLWEARDYQHARRVDGLQALARNSSGLLPDPGRVWRLNWLTCFLLTNSRHQAALDKRIKELLEQREDYELIVHVPYSGPATLGVILAVTGDVGRFSNYRQYVAYTGYFAGLEKSQTIDRTRMSKRGNRDLKRALFQIAAPLVWFDQGDNPYKALYERKMAEGRAWYEAMPFVCAALARHIYHCLKFKDPYDVERAFRGSSPIPASEQALVDLRADLDERFEVMDVHLCQIEG

SEQ ID NO: 392207 - protein, 348 aa, unidentified
MSNIPVFVGLDYHQDSVQVCVLDQQGQVLLNRSSGNDWREVQRIVQPLGVVQRVGIEACCGAADFAEELVERAGWNVSLAHPAYVAKIKNSPDKSDFGDGRLLADLTRVGYLPRVWLAPAKIRELRQLVYHRQRLVDQRRALKLRIGGLLREQRVKIDGRVGSRWTKAWVASVKDNAQFSAHVLWIVGELLEEIEHVSRKIALGEGRLRAATAADGVVEKLLKQEGIGVVTAWTLRAFVGDFRRFKTGKQLSRYCGLSPCNASSGKKQADAGLIDGCNKLLRQTIVQAAHRLINTRPRWSTLAQSMRKRGKEANVIVAAVGNRWLRKLHHAMKPAAMQPPTTVQDKAN

SEQ ID NO: 392208 - protein, 323 aa, unidentified
MYTLGVDVAKNKLDVCLLSPEHDQRRAKTVPNTPEGFTELQDWLIRQKVPDLSQVHLILEATGVYHEAAALWFVEAGAVVSVVNPAQVKALGQGVAVRTKTDARNRQVLACYGALVNPPPWQPPSPEIRELQALMARLDAVEADLRREQNRLEKTEAVPAPATVLSSLQQHIAFLQQEQTRVQTAIHEHIDRHPRLKQDPDLLCSIPAVGEKTAQRWLAVLHGHDFTSADQVPAFLGLVPIECQSGSSLHRRPRLSKAGAPQIRAALYMAAVVATRHNPHIQALYQRLLARGKAKMAALGAAMRKLVQLAFGVLKHQQPYPAN

SEQ ID NO: 392209 - protein, 338 aa, unidentified
MYQLGIDVSKKTLDICLMLEGIRGQLKTKRIKNDFRAVHTINAWLQKHDCALCDVHIIMEATGVYHELLATGLHLAGGKVSLANPHRTREFARGMDILTKTDKVDAWMLACYGALKKPDAWTPPAEEIRHLSALLKRRDLLVTDATREKNRLEKYRATHTPHVVIVSAENMLRRLNDELSEIELMLKQHVERHVFLKEDYALLTSIKSVGPQLGLNMLVILRSHDFRTAEQVAAFLGVAPVEKRSGTSVRGRSRMSKIGPPEIRAKLYLAALCGLRFNKAMKSMYERLCLNGKAKMVAIGALMRKLIHWCFGVLKSRQPFDIDFINVGRMQASIAALG

SEQ ID NO: 392210 - protein, 355 aa, unidentified
MNSIKYIGMDLHSATISAAVVNDAGKLNMEATMATEASAVVDFIAGVQGTLHVAFEEGIHAPWLYDLLLPHVAQVLVCNPRQLPRHRGENKNDKIDAQQLAQWLRLGVLKPVYHNPTGLRTLKELVRSYLSLVRDTARVMNRLKALYRARAIPAPGTRVYSPRFREAWLQQLREAGVHYRAQLLYRQLDLLLPLRQEAKRAMIAESRQHGAQKILLSIPTLGPVRVAVLMAVMQTPHRFRRNRKLWTYAGLGLVSRSSANYRIVEGQLTRAGKPALILGLNLNHNHVLKALFKDAAATAVSRPGPLREFYARQLAAGREAEIARVTVARKLATIVLTLWKKGERFNAEHLKPQAA

SEQ ID NO: 392211 - protein, 387 aa, unidentified
MSIVDARGREVRRATIEHNAAGLRELLELLSRAGAREVAIERPDGPVVDTLLEAGITVVVISPNQLKNLRGRYGSAGNKDDRFDAFVLADTLRTDRSRLRPLLPDTPATATLRRTCRPRKDLVAHRVALANQLRAHLRVVFPGVVGLFADLDSPISLAFLTFCPVSTARTARTGCRSSAWPAGWPPLATAAVLHDRLTGAPRGATGDEGAANAHITRAMVAALTSVATQIKTLDAQIAEQLSLHADAHIFTSLPRSGTVRAARLLAEIGDCRARFPTPESLACLAGVAPSTRQSGKVKHVGFRWAADKQLRDAVCDFASDSRRANLWAADRYNRAIARGHDHPHAVRILARAWLYAIWHCWQDGAAYHPANHRALQALLNQDQDRAA

SEQ ID NO: 392212 - protein, 329 aa, unidentified
MTTKNIEMDLTSFTPIGIDISKLTFDACIGEQTYNYDNTKSGFKKFASKLPDNSWCVMESTSTYCYRLADFLHEYGYRVSVVNPLSVKRLAQSGMIRTKTDAMDARLIKKYAKKAQLPIYNPLSPDIIELRDLSSLLDAEIKNRTAIKNKIEAMIQMTQPSKKALKRARQTVKYHDKAIQEIEKDMDAIVKRSCSEAYEKALSVNGIGKRTATLLLAITRGFTMFESPKQLIAYIGTCPRQYESGTSVKGKSHICKMGMKNIRSTLYMCSHSAVRYNNTCKALYQRLLAKGKAKKVALMAVINKLIHQLFACISKNEFFDNNHQISLGI

SEQ ID NO: 392213 - protein, 315 aa, unidentified
MHLGIDVSKQTLDCCLISDGIFYERKFANDSGGIDKLQIWLHEHGADHTMHCCCEATGTYYEESARALARRYKMSVVNPRTIKGFGTAVMNRSKTDRQDAKLIARYCQAMKPEQWQSATPEHRQLQELVRYIARTKRQRAAEQIKRQTAPDYLKPHIQSTIEHLTELLNRLEQDLKAHYRSHPEQDSRIKRLKTIDGIGENAAAVLCSIITERFTHAKQLVAYLGLDPKEHQSGTSVKGRTRISKIGKSETRAALYMPALVAYRMGAFPGFTARLEAKGKPPKVIIVAIMRKLAVIAFHLLKNGEEFDRSRYRKI

SEQ ID NO: 392214 - protein, 356 aa, unidentified
MSRDVKYIGMDVHKEAIVIAVLNDGGKLVMESIIETKASSILQFIHGLRGELHVTWEEGTWAAWLYDLLQPHVHQVLVCDPRRNALLKEGNKSDKIDAHKLADLLRRGMLRPVYHGEHGLRTLRELARSYQTISQDLNRVMNRIKALYRGWGIACGGTQVYAARYREEWLHKIEHAGVRRRAELLYQQLDGLQVLRRTLRSELLAESRKHKAAKLLRQIPCIGPIRAARLLALMQTPHRFRSKRQLWTYSGLGIETRDSAQYCFVRGQLQRAKKPQQIRGLNRNHNHEMKDIFKGAATRASCGVGPLRDFYVALLDKGMKPEMARLTLARKMAAIALTLWKKEERFDAEQLKTQAA

SEQ ID NO: 392215 - protein, 373 aa, unidentified
MSQSTTKLFVGLDVHKDSIAVAYAPQVRGAEIISIGSFGTRQCDINKFLKKLLAHSRNIVFAYEAGPCGYWLYRYLTKKGHTCLVVAPSLIPKRPGDRVKTDRRDAIMLARTLRAGDLTTVYVPNVVDEAIRDLSRAREDAKKDLKSAKHRLKSFLLRQDIRFEGKARWGLKYLRWLGNVACETPAQQIVFQEYVRAITERHERVERLEAELRDQVDGWRLKPVVIAIQALRGIQFITAATLIAELGDITRFDNPKQLMGFLGLTPSEYSSGRKRKLGGITKAGNSHARRVLVEGAWSYRFPARVSRHLQYRLERVPQEIQDISWKAQVRLCKRYHRMIAGGKNKNKVVVAIAREMAAFVWSIAMRTPLEDVN

SEQ ID NO: 392216 - protein, 421 aa, unidentified
MEQPTTIIAGVDTHTGIHTLALLDMNGRVLSTNTFGADPDGYGHLIAMLGDPARCAGIGVEGTNSFSAALARRLQAAGFPVYEVLRPKRGVRRKDGKSDPIDAIAAARSVLAGDGTSLPKSSDGWVEALRHLNAERSQPVTAMTTPANSTGGLPAAAPEPIREKYRGLRTETRMNRLASCRPSGGLVAHSVLTALKGAAKAWRALKEQADPLEERMRSILDTNARPLLDIYRAGTITAATIAIVAGDNPERIRDEAAFAKLCGACPIPASSGKTNRHRLNRGGNRQGNMALHRIAIVRLGYHQPTRDYVAKKTREGKSKLEIIRCLKRHIAREAYKALIAIRNGGAGRQTPQERGALLRRLRTSHGTTQQQIGEALAVPSSRISEIERGTRDLPELEQRATQWIHSITTPTTRHSQPLDDE

SEQ ID NO: 392217 - protein, 360 aa, unidentified
MTGTMTWAAMDVHARSTHCASMDVATGELSRRRFDTGAVEPVVEWLAGLPGPIRAVYEAGPTGYGLYRAARREGVCCEVIAPSKTPRASGDKVKNDRKDTEHLLRQLMAGALTPIAIPSATAEAARDLARAREQVRGDLMRCRHRLSKLLLRHGRVWDQTTWTVAHRRWLGAQQFEHVNTELAYLDAVAACAGLETRRGALDERLSQVARDPEFWPTVSRLRAFRGIDTLSALVLVLEVGDFQRFPRATQLGSWLGLVPSRQQSGETDTHGPITKTGSKYARRILVEAAWHYLREPRIGVTLKSRHDGLPDHILQIAWRAQHRLHRVHRRLRAHRKPPNVVNVAVARELACFIWGAATAP

SEQ ID NO: 392218 - protein, 427 aa, unidentified
MKYAPIQVLPDDPSGGVVAGIDWATADHEVCVVDMAGRVSGRFSAAHDKAGIGALILRLRESGVAEVAIERGDGALVEALLAAGLTVVVITSRQVKNLRSRYRSAGAKDDRFDAFVLADTLRTDRARLRPLIPDTPATAALRAAVRARKDLVSHRVAACNQLRAHLAVAFPAAIGLFFDLGSPVSLAFLARFGSQDAAGQLDEQAIDGWLKTIPARGNTAPASVLCARLRAAPDGATGQDGAAHARITAALTATVTMLAAQIKLLETGIGIQLAAHPDAHIFTSLPRAGTLRAARLLAEIGDCRSRFPDPQSLAALAGVAAVTRQSGTRISHGFRWAVSRQLRDAVCDFADDSRHASAWAAATYDAARARGKDHPHAVRILARAWIYIIWRCWQAGTGYNPAKHGALQRILHQQAAHAAAAESGDTR

SEQ ID NO: 392219 - protein, 342 aa, unidentified
MAEGEVPTTPSGLKELRDRQASPSGTPVALETGPTAFFVARQLSALGVAPLVVAAHEVRRKAHRPTQKSDRRDARELCEGLRRGIYRVIVHVPSGAVASLRDTLSRRRHFVRVQTAEINAAKRLLRSAGLGQASRDLRSERGWPTVLQAVAAFGDLRAYLEQHRALWRGAGEQIQALEALLAAHQRPFAADLQRLQTIPGVGPVVAATGVAVFAEVQRFPDAKHAASYAGLTPSTYQSGSRDVHARITKRGSAELRAMLCEAAHHAARPQHPLHPYFAPPCAKHGDKRVVVAVAHRLCRIMFAMLRHGHDFEVRKLGIEIGPFEHTSAIAQLTASTRGPEAM

SEQ ID NO: 392220 - protein, 462 aa, unidentified
MTISKNKGNRTNETPVPTSLPAIRPRVAGLDVGSSEHWVCGPARDDGKPNVRVFGTTTDQLNELAGWLSAQGVESAAMESTYVYWIPIYELLEARGIEVVLVNARQLHNVPGRKTDFSDCQWLQLLHSCGLLRGSFRPGEAITRLRALQRQLANLVAERTRCVQWMQKSLDQMNVQVHRAVTDLTGLTGMAIVRAIVGGERDPARLAMHRDRRCRKSADEIARYLTGNWRDEHLFNLASALRLFDTLESEIAAYEAQLLKEIASLQPPDRQEEPVPPHPNPAKEKAIKARGEQPARTTLWRFAGVDLTRIDGISAGAAQVVLTEVGPNLAAFPSEDHFVSWLRLCPRTPISGGKPLKKRRNGLGANRISAVLRMAALSLERSKTALGASFRRIARHKGGAVAVFATARRLARLIYRMLRYGHDYVDIGEQAYDHQFQIRRLAALTETAKSLGYALVPNVAAG

SEQ ID NO: 392221 - protein, 427 aa, unidentified
MATYKQVVGYWMPRLTHKAVDDSRTSGDSPSFEPVREVPIVIAVGIDIAKRTHEACFMGHDGQQLRKARRFRNTRLGVRALLDDLQHLREPATIGLEATGHYWLALHDHLVQAGHTVQVLNPLQTHAYRKTTIRKVKSDRKDAWLIADVVRIGRGRPAYVPDETILQLRELTRFRWGLVDQIGDAKRRALTILDRVFPEYESLFSDVFIKSSRALLQRATTAAEFADADLDELAAVLKKTSRGRLGQARAEAVQAAARDSLGLSKLGGVASFELRALLDQMVFVEQQVAAVEQQIEVQLGSLEQHVTDIKGIGPVLAASLIAEIGDVHRFQRFESLVAYSGIDPTVFASGEFTATETHMSKRGSPHLRRALWLAAVSASTCNPDLAAYLQRRLEQGKPWGTAMGAVARKLLSRIYVVLRDNRPYEVR

SEQ ID NO: 392222 - protein, 410 aa, unidentified
MDVILGCCAGLDVHKDSVEACVRRMSAGGKVEHEVRHWGTTTRELVAMAEWLAAMSVTHVAMESTGVYWKPIFNILEAQFEILLVNARHMKNVPGRKTDIRDCQWIAQLLQHGLLKGSFIPPRWQRELRDLTRQRTQLIDEASRISNRIQKVLEDANVKLGSVASNVLGASGRSMLEAMVAGEDDPAQLADLARRRLRSKIPQLQQALYGKLTGHHRWMLKLLLDQFEATEQFIARLDERVAELTRPQKPVLEKLDAIPGIDQRVAEVLMAEIGPDMTPFPSHAHLASWAGISPGNNESAGKKRSGKTTKGSRWLRQALVQAAWAASHKKDSYFQAHARNLMHRRGRKRGLVAVAHSLLTVIYHMLKEGTAYRDLGPQFLDRLRATQLIRFHVRRLQSLGLQVAITPVAA

SEQ ID NO: 392223 - protein, 374 aa, unidentified
MKQQKKSSDITIGLDLGDRRHRFCVLDKSGGLLEEGSVRNERVFLAQLSERYPGALAVVEAGCHSPWISRYLQEQGCRVLIANPRKLRTIYQHERKSDRRDAQMLARIGRLDPALLYPVRHGTAEAQQDLLCIKLRDSLVRARVAVINSVRFTLKSLGYTVRNPSSERFHKVAMEGLPAALCQMIAPSVAALEELTGRIKALEAQINSLARSKYPQARQLQQIPGVGPITALYFVLKIEDPTRFQNVRDVGAYAGLCPKRDQSGRSDPQLRISKCGDAYLRRLLVSAAHYILGPFGPQSALRAYGLMLAEDGTARAKKRATVAVARKLAVLLLSLWKHQRPYQPFPLAGSRLNLQQTKEDRRFGTIALHRLEAL

SEQ ID NO: 392224 - protein, 345 aa, unidentified
MPIVGGLDIHRKQITFDYLDTATGEVKRGQIAPADREQVRAWLARFAGRGDAAFALEGCTGWRYIAEELVAAGLEAHLGEPADTAAARGRKRHAKTDKTDARHLRTLLAEGRLPECWIPPAQILEYRALLETYHDLRAEHTAWVQRIHAVFFHQGAPPLGEGALRTEQGLAGLRAAAAAHLSAAGQLQVATALDMLAAAEARLGPLRRQLRDAARHLTGARVLAARLYGAGPITALALTCWLGGAGRFSSSRQAVRFTGLDITVWSSDRKGPPGRLSRQGPPVLRWAVYEAGMTHARTSAPDHGYYAAVKDRKNGKRAALSEARKIVRQACHILAELGDDALTVA

SEQ ID NO: 392225 - protein, 398 aa, unidentified
MEAIVQRSAGLDVHKKVIMVTVLLEQPDKTLKEETREYGTHYQACEDLADWLSSQEIELSVMESTGIFWKNIYAALEKKGLRVSVVNARHVKQVPGRKTDVKDSQWLARLARYGLVKGSFIPPKDLRELRIIARYRTKLKGMLASEKNRLHKTLDDAGVRLGNVVSDIGGVTSTEIIAGLIEGKSMDELLACTRGQLRNKKDDLRAELSGKLSARHLFLLKKLQAHIAYIEKELSDIDDYLFNAMQSYQIQWEILQTIPGIDAVGSALLIIEMGVDMDQFGSREQCCSWAGMCPGNNESAGKRKSGKTPKGSKQLRYLLCEAANAASKTECQFKHKYKSLMIRRGHKKAIVAVGHKILRVIFSLLKTGEVYQDPQINYEELVVKKNAPRWIRMIRKYS

SEQ ID NO: 392226 - protein, 343 aa, unidentified
MNGATTIGVDLAKNVFQVHGVDEEGNVVFRRQLRRRQMLPFFKKQPPCLVGMEACATSHYRARQLIELGHQVKVMPPHYVKPYVKRNKNDATDAAANCEAVTRPTMRFVSVKSTEQQSVLILHRTRDLLVRQRTMLINAIRAHMAEFGIVAPVGVPQVKKLLAIIADTDDTRLPPIARTCLESLARLFLSLHDEIYATEKHIHTWHRSNEVSRRLESIPWIGPIIASALAASITDSEVFKNGRELAAWIGLVPRQNSTGGKQRLGKISKQGDQYLRWLLVAGAMSVILHAKRWGTNQPWLANMIARKPTKVAAVAVANKNARIVWALLRHGGTYQKPVAVPVA

SEQ ID NO: 392227 - protein, 411 aa, unidentified
MTDAPIVTYERYLALDLHKHYLVVGGVNHLQEIILSPRRVDYQQWEGWMKANLKSTDAIVLEATTNAWQIYDQVVPYVGRAVVAHSGLVKLIAYARVKTDNRDVLNLARLLAAGLIPEVWVPPQEVRDLRALLAHRLHMVKRRTMLRNRLQSVIHRYNLIPPVGDLYGSTNRDWWEQMSVSTVEHLRIRQDLVTLDHLEPQIDECEAELEQLSAQEPWCDQIVYLLQFSGIGLLTGMTVLAAIGNIERFPTAKYLVGYAGLGAGVHSSGETHHTGRITKQGRKDLRWALVEAAWSAVRWDPYWKAQFERLAKRRGENKAIVAIARKLLTVIWHVLTKKVANRQANPEKVANKLFRWTWKLEASQRRGLQSRQFVRYQLHKLDIGHDLQMIHLGGKRRSLPPSDELRDLLPN

SEQ ID NO: 392228 - protein, 378 aa, unidentified
MSKVRFVGLDVHAETIAVAVAESGSSEVRSWGTIPNRPESVRKLIRKIGEGSKLKCCYEAGPTGYVLYWQLTRLGVECEVIAPSLIPTKAGDRVKTDRRDAERLARCYRAGELTPVWVPDEAHEALRDLVRAREAAKQDQLRHRHQLGKFLLRHGKRPFDAGPAWSAKYLNWIRIHARFDQPALEAALADYLHEVEHAAERIVRLEQCIEEAVANAAPEVRAVIDALQALRGVALTTAATVVSELGSLARFENPRQLMGYSGLVSREHSSGNRTQRGAITKTGNAHLRRVLVEAAWAYQYRPAVNGRLLRRQRALALSEEVRRISWKAQQRLHRRYATLTARGKHKGQIATALAREMLGFLWAIAVHTEAQFKSVKAA

SEQ ID NO: 392229 - protein, 410 aa, unidentified
MEVMHQHCAGLDVHKKTVVACVRLASEGKVVTEVKTFATTTQGLLTLSDWLSENGCTHIAMEATGVYWKPVWHVLSDGEVELVLANAAHVKNVPGRKTDVSDAAWLAELLAHGLIRASFVPDGQTQELRALLRTRKQLVRERTRHAQRIHKTLEDANIKLDAELSDVLGKSGRAMLNALVAGETDPVRLAALAHPNVKSPQAQLREALRGRVTSHHRFLLQLHLGQIDSLDAAIGTIDREVEDSLAPFRAAVDLVRTIPGVSTLGAEVIVSEIGTDMSRFPTVGHLLSWAGLCPRNDESAGKRRSSRQRKGAQWHKTTLVQCSWAAKNKKGSYLQAQFLRLKSRRGPQKAICAVAASILTAVYHMLKDGTEYQDLGPDHFNRRSKITQTQRLIRRLEHMGYAVDIKPIAA

SEQ ID NO: 392230 - protein, 417 aa, unidentified
MKLIVGLDVSSTELDVCFLTDDDNFPVLKEASFENDQISATQIKNFILHYVEELNIDQIVIGMEATSLYSFHPAMFFHEDPELSALNTSVFVEQPNKIKKYREVFEESKDDRIDAFYIADYFRVNRNGVSILKEEQYVALQHLTRTRLQLVEGLVRTKQHFTENIYYKCNTLSKELKSDDQNTSIFSATIMELMTADYTLDDLKALSLEEFSSLVNQLGRGRFKDPEKVAKSISKAIRGSYRLGKTHEESVDQVLSVLVRQIRSFEKSIKEIDKAIEDIVETLPEYQCLTSVPGIGKVYAGGIIAEIGQIERFDNQAQIAKFAGLFWPHKQSGKMKSDNTYLAKRGNRYLRYYLVEAANSVRRYESDYRAYYQKKYDETPKHKHKRAIVLTARKLVRLVDVLLRNHQLYAPPKERIK

SEQ ID NO: 392231 - protein, 361 aa, unidentified
MSSVFQSFVGVDLHKCTVTLTAVDAAGEVTRLKISTKSTGKIEAWLRALPAPVWMAVEACPFVEWFIDRFRTCVQQIDIADATELSNRRGKRRKTDWNDSLDIAQRLSRGQCPLGFIADEELMQLRKLGRHWRHLSRLLSRTKHSMKSMLNAANIRGPKFDGAAAQRWLLANRDLLKPVQQQTFADFIDVLMLTERQRERLRREIIFATRSARFAPIVSLLLSVPGIGEIWAAIIAAEIGPFDRFPNADTLEFWAGMTADMKESAGRTQSGNITKAGSVTLRWALCQAAVTLCQCDARQEAIRQRLVKRLGKPKTNVAMGRRLLRVLYAMVRDGKTFERGPARDRTAAANRARLGRKKQVA

SEQ ID NO: 392232 - protein, 335 aa, unidentified
MQKFNYYVGIDVSKKTLDVTILYECENITETGYYKIENNEKSIDQFVKKTLGKYDLKQILFCFETTGVYSLPLSYYFSNNKLAYWQVPAMEIKRSKGITRGKSDKIDSKDIAFYAYTHTHKFRPSSISSQSIQQLRLLFTEREKILKALALFESTAENKDFMPKEVFNIVVPENRSTINQLHKNLKSTENKMLAIIDSEDKLKQQYELTTSIPGIGKQTAIYIIIATKGFESFENWRQLACYAGVAPFPHQSGTSIRGKTKVHPLADKKLKSLLNLCAMAAIRHDKELKTYYERKVKEGKSKMLVINNVRCKLLARVFAVINRNTPFINTFKFAS

SEQ ID NO: 392233 - protein, 412 aa, unidentified
MSQLDGPLYFVGIDWAAAEHAVCVLDQAGRKVAAFTIEHTAAGFTRLAARLDKLGGAEQVPVAIERPDGRLVDALLAAGHPVLPVKPTAIKVWRESEILSGAKSDPGDAHVIADYLRVRIHRLRPAAPMSGHTKAIRTVTRTRGDLVDARVAAINQLAALLDAHWPGAKAIFADIESAIALAFLTRYPTAASAASLTVKRLAAFCAKQGYSGKKPAAVLLARLRSAPAGTSDPALTEGVRDAVLAQVSVLSALNTAIKTLERSISETMDTHPDGALFRSFPRAGTINAAQILAEWGDAREVFDHPDAVAALAGITPVTKASGKQRGVSFRWACNKRLRLAITTFAANSRFSSPWAADIYNRARASGKDHPHATRILARAWIRVIWRCWQNGRTYDPALHGGARDRVEHQTAA

SEQ ID NO: 392234 - protein, 394 aa, unidentified
MKLIGIDIGKNKHFFCVMDQQTGEIISQPVSFSNDKEGFDFLVQEIKSYPKDSILIGMEDTGHYHFALLKYLLDLQYTVALINPKTTDFNRKMQGGITKNDKLDTINICDVLDTPERKKQYRITKVNKFDLYEQKQLTRQHHNLKEELNVYKNRLQKSIDIVFPEFNSLFKSKYGTVYINILKTFGSAENIANTDIRTIRKCFEIDGRGNRISLTPERLKERARSSIGISSLAEVIQIKHLSAQIDLIEEQLSEIDKKIEEFSIQNNSPILSIPGISHFSGTSILAELGDISNYSKPSQIIKFAGVAPLHYESSQFNAQHTAITKKGSKYLRKTLYQIILPVIRHNPVFNKYYQLKISQGKGHRCAQGHCVRKLLRIIYHLLKTNQQFDPQLLR

SEQ ID NO: 392235 - protein, 345 aa, unidentified
MSNNTVIGIDLAKTSFAVIELGRGGDVKRRKTFRRDGLKRFLAKHEPATVALEACGSAHFWGRWLEAHGHKPMLLPPQHVKGYLRGQKNDYNDAQAIAEACLHGAIRPVAVKGIEQQDEQAFHAIRRSLKVESTRLVNQMRGLLAEYGLTVPKSVSAFRRQVPELLEDAENGLSARFRMLLNRQWNRLQALLEEQTWYDQQLQQQAKEDETCRRLTGIPGVGPVVASAVKSWMGDGQQFRRGRDASAALGLVPTQYSTGGKQSLYGITKRGDAYLRSLVVHGARAVVRTAKTKEDALSRWALEVEARRGHNRAVVAVANKIIRMAWVVVARQENYRPAESQMAMA

SEQ ID NO: 392236 - protein, 356 aa, unidentified
MSIVAHTHPFVVGVDTHARNHVYTILRAATGAVIDTQDFPTTTAGINRAIAWAARRTDADADTLWVIEGAASYGAILTGTLASHGYPVAEAPRMDAKQRYGVGKSDTLDAHRIAAAALPVSVDKLRRPRLNDGIRQAIQILVTARNAITKDRTRSINALTALLRSNNLGLDARKALNKAQVAQVSKWRARNEELSVAVGRAEAVRLAQHIVELEQQLADNERHLTELVQISEAAPLLDEKGFQAISAAKCLAAWSHHGRVRTEAEFASLAGVNPIPASSGNTVRHRLNRGGDRALNSALHIVTVSKMTHDEQTRAYVERRRAQDKTDRDIRRCLKRYIARRVFRILNAQQKVLQLA

SEQ ID NO: 392237 - protein, 343 aa, unidentified
MHKSSAEEFLACGIDVSAAQLVVALRSENGGYGQRIFPNRASGHRTLILWLQKADSKVRVCLEATGLYSLDLALALHAACGIEVAVLNPKLVNRFAATLCRSKTDPADAQVLAEYARRMPFQLWQPPRAPALELRAITRHIAALTQQHTRESNRLHAASASSAGARCVQHDLQRSLRDLQHRIDKLRAQALALVQQDPELRSCLALLLSMPGIGEVSALNLLGELALLAPGLTVRQWVAHSGLDPVHHQSGTSVHQRSRISRAGNRYLRRALYMPALVAVRHDAHLRAFYPTLLQRHKAKLQALIAVARKMLHAIFGMLRWHTVYDGSRLLPNIKLPAADAVA

SEQ ID NO: 392238 - protein, 411 aa, unidentified
MPKIVYPICCGIDVHQQFVVACIASTDEKLVTTYQRKHFSTYTGELRRLAKWLARNNCQDVCMESTGKYWIPVWNILEPTCRLVLTHPKYVKAIKGKKSDKRDAKWIADIFKHDLINGSFIPPSDIRQLRDLVRYHTKLTSYMTGEKNRAQNCLTVSNIKLDAVFSDVFGKAASAITQRLLESNEPFDVKPYLTKGIKASPEDIQAAVDGSMCANQAEKLRIIRSHMDSLELCKANLESEILSVAEKYLPQINLLLTVPGIQSFSAIAMIGEIGVDMSVFETSRRLCSWAGLTPQNDQSAGKKKTTRISRAGAYIKPLLVQCANAAIRSKNNPEIANRYNAIKKRRGHKKAIIAIARMLLTAIYNILKKNKPYNAELYRLSDKPPVQREVTVEQAIYILQRQGYLVTPSTG

SEQ ID NO: 392239 - protein, 373 aa, unidentified
MNYSTVYVGMDVHKETFSVCCYTNEKEEAEYCQTMDAHYSKVLNYIEAMKFHYGNDVLFICGYEAGCLGYTLYHQLTDHGITCVILAPTTMLKPGSGKRIKTDKRDAALIARCLAHNDYKAVHIPTDKDEQIKEFIRMRNDHNLALKKIKQQILAFCLRHGYKYDTGKNYWTQRHLEWLHTLEIDGLYKEILDEYLLTYHTLRDKIDRLDRRIEELASDEEYKEKVDKLVCFIGIKTHTALAVIAETGDFNRFKNARSYSAYLGLIPGEDSSGQKRNGLSITKAGNSHLRRLLVEAAQGYTRGQVGNKSRDLKARQGSNPPEIITYADKANERLRRKYYNMTLRNSKRCNVAKTAIARELSCFIWGMMTANYY

SEQ ID NO: 392240 - protein, 391 aa, unidentified
MILVGIDVAKDKHDCFITNSDGEVIFDPFTIANNKAGFNDLLKKIQSVSKDPSKVKVGLEATGHYSYNILGFVLDKGFPTYVINPLHTNLFRKGQSLRKTKTDRIDARTIANMLLWDQSLQPYSLESYHNEELKSLTRYRFSKVQERSKLKTSVARLVNILFPELEHLVPTLFTVSALALLSELPGASYVADCHLTRLTHLLQEASKGHYGREKAIEIRDAAKNSIGSVMPAKSLELKHTIALIRILDDEICEIESEIKTLMDKTNSTITSIPGINYRMGSMILAEIGDFKKFKSPDQILAYAGLSPSTYQSGQLTSSYAHMEKRGSKYLRYALFNAAIYVCHWDPVFKAYLDKKQKEGKHYYVAISHAAKKLVRLIYAMEISGRPYFKVA

SEQ ID NO: 392241 - protein, 430 aa, unidentified
MKSNTQNAKIEAITEKTLVLGIDVGSEMHYARAFDYRGIEYSKKPFKFSNTEAGFVIFKEWILDLKEKHEKDKVVPGMEPTGHYWFNLGKFLQDNEMKPVLVNPHHVKKSKELDDNNPTKNDRKDPKVIAGLVREGRYMIPYLPDGVYADLRTASNIRFQLQAELTRIQNRISRWFNIYFPEYKTVYGKPDAKSGMLILKQAPLPEDILTLGIDGVNQIWRDAKMRAVGKARAKTLIEAAEHSVGSKEGAISARMEIRMLLEDYESRNIRLQEIMTLIEELVNQIPMAEKLLEIKGVGIKTVSGFLAEVGDISRFNNPKELQKLAGLALVENSSGKHKGRTTISRRGRKRLRYLLFEVAMSLVAKNPEFRELHTYYTTRRLNPLKKMQSLMAVAAKLIRVFYVMLTKGVDYDPKKMVGDIKRPAVYLQAA

SEQ ID NO: 392242 - protein, 395 aa, unidentified
MDVVYPRCAGIDISKKDAKVSVRIQGSGRKRAASTVTTWGSTTNQVLALREFLLDNNVTVVVMEATGDYWRPFYYPLDERLEVLLVNAQAVKTVPGRKSDVSDAAWLADLGAHGLVRGSFVPPRPIRALRVLTRTRTMITRERSREVLRLEKLLEDSGIKLSSVASDLTGVSSRLMLDALNAGESDPAVLADLATAGLRKKIPALTEALTGEFTDHHRFMARLLLDRIDAISGDIARLDARIGEAMEPFRGAHDLLVTIPGFSNKVADVFIAETGGDMGVFPSAGHLASWAGTSPGMHESAGRSRSSKTRPGNAYLKGALGVVAMSSTRSKGTYFSAKYRRIAARRGASRALVAVEHAMLVAAWNMLTNGDLYRDPGADYFANRTPTKTKDRAIR

SEQ ID NO: 392243 - protein, 317 aa, unidentified
MEIVPVFVGIDVSKARLDVAIRPTAQVLSVVNDPTGIEAVVKRLSELSPTLIVLEATGGLERSITGALGSAQLPVVVVNPRQVRDFARATGQLAKTDLIDAEILAHFAEAVRPPLRALPDKLSLELRALIARRRELVEMIVAEKNRLSAAPTKAVRKQIEAHLGWLEADLDKIDQDLDQSIRQSPIWQEHQDLLRSVPGIGPVVSRTLLAQLPELGTLNRKQIAALVGVAPLNRDSGTFRGRRTIWGGRAPVRAVLYMAALVASRRNLAIRAFYKRLRDKGKAPKVALVACMRKLLTILNAMIKHKTRWSENIFQTA

SEQ ID NO: 392244 - protein, 323 aa, unidentified
MSTKTTKKRRSFIGIDISKKLLEVGVHQSDYHFRCPNDPKNFPALITELISLRPARILLEATGGLERALLQALHAAGLPVAVVNPRQVRDFAKALGRLAKTDRLDARVLAHFAAATQPAIRAVKAQQETELDALMGRRTQLSDMLAQEKNRRGSAATKGTRDDIEAHIEWLEERLQELDEKLKEQLKCSAVWQQKDKILQSVKGIGFVTSMSLLADCPELGELNRHQIAKLVGVAPLNRDSGQQRGARHIWGGRAQVRGKLYMATLAATRFNPVLKSFYQRLLAKNKLKKVAIVACMRKLLTIINVMVRENKLWNVKAQPVSA

SEQ ID NO: 392245 - protein, 458 aa, unidentified
MSRKRVPKRKNAFVPILNPDAAGIDIGASEIYVAVPADRDPEPVRMFLTFTADLRSLADWLQQCQVRTVAMESTGVYWIPLMQLLEDRGLEVYLVNAKHVKNVPGRRTDVSDCQWLQYLHSVGLLRASFRPAQEVCAVRSLLRHRDSLIEMATCHVQHMQKALDQMNLQIHHVISDITGTTGLAIIDAILSGERNAEKLAQLRDPRIRATSETIAKSLVGDYRREHLFTLRQAVALYREYQRKIVDCEAEMQELMKNLDSKADPSSLPAPKESVKKCKVMNPARALALRGEAYRILGVDLTTIPGVSVLHVQTILAELGPDFSKFRSGAAFSSWMGLCPDNDISGGKVLWSGTRRVKNRIALTLRLAAQSLQHSQSALGEFYRRMRAKLGAPKAITAAAHKLARIVYHLLTTRQSYDDSIFTKAEERYRRRAEFRLKAQARLLGFTLTPATISGKEVP

SEQ ID NO: 392246 - protein, 401 aa, unidentified
MKSASTTLIAQLPDDPPNGVTGGLDWARDDHAVSVVDARGRELVRHSVEHSAAGLAELVDVLARADVGEVAIERPDGPVVEALLEAGLTVVVISPNQVKNLRGRYGSAGRKDDRFDAFVLADTLRTDRARLRPLTPDSDAAVANQLRAHLRNAFPGAVGLFAEIDSPISLAFLTRFDTQDRADWLSPKRMAAWLTSVGYCGRVEPAVLHARLTAAPRGVLGEHGTAQAHVTRALLAVLSTLVEQIKTLSTQISEQLALHTDQHVFTSLPRSGRVRAARLLAEIGDCRARFPTPEALTCLAGAAPSTRQSGKIRAVGFRWACDKQLRDAVTDFAADSRKTNPWAADLYNRARARGHDHPHAVRILARAWLLVIWRCWQDRTAYDPARHRALQRLLQDQQQAA

SEQ ID NO: 392247 - protein, 402 aa, unidentified
MTAGQVCAGVDVGKEHHWVCVVDDNGSVMLSRRLANDEQPIRELVAEIEQLADEVSWTVDLTTVYAALLLTVLADAGKPVRYLAGRAVWQASAVYRGGEGKTDAKDARVIADQSRMRGADLPVLHPDDNLVTELRMLTSHRADLVADRTRTINRLRQQITAVCPALERAAQPTQDRGWVVLLTRYQRPKAIRQSGVSRLTKMLDDAGVRNAATIATAAVAAAKSQTVRLPGEEVAAGLVAELAGEVIALDDRIKTTDADIEGRFRNHPLAEVITSMPGMGFRLGAEFLAAVGDPALIGSPDQLASWAGLAPVSRDSGKRTGRLHRPQRYSRRLRRVMYMSALTAVRCDPASKAYYQRKRDEGKRPIPATICLARRRINVLYALIRDNRTWQPDSPPIAKSAA

SEQ ID NO: 392248 - protein, 439 aa, unidentified
MTAQVLLKTNQVRLQKAVLCANCEIISEGRNGHCACCGSQSLLSLSRVLGKTIEQELSYGFATSAHAVCDDVCVSSLSAAVSHYPSFQQIAFVDTDTGELSERRLGHREHAEQFYQELKPRNLVVRVGMEASGHSRWFERLLRELQFELWIGDAAEIRTKRVRKQKTDRRDAQLLLQLMMEDRFPRIWVPDAANRDLRQLLWHRHRLVQMRTRVMNQLHVVALNEGLRRKKALWQPAGRTELESIVLAPWARRRRQDLLDLLDQLTAKIQELTQALEAEVEQRPVTRRLMTHPGVGPLTALAYELVIGTPERFHCGKQIASYLGLVSEEESSGERRRLGHISKQGNVLLRFLLVEAAQVTVRSQPEWRSKFFHLAMRRGRKIAKVAMARKLAVHLYWMWRQGCDYGQTQKLGSHAGEPGNRDGVHSITDVMIGHPAPSK

SEQ ID NO: 392249 - protein, 335 aa, unidentified
MALYCGIDLHSTNHLVVIIDDKDRRVLEKRLANDVALTVDTLGPYRDQLAGIAVESTFNWYWLIDGLEDAGFVPCLANPAAIKHYEGLKHTDDPYDAFFLAHLMRLGILPTGYIYPREQRGVRDLLRRRLSMVQMATRLLLAVQSQVWRSTGINVSSNRIRRPDFELPLPPGPVYEGAAAQWRLFQQVQAEIHGLEKLALDRYQGEDNYQLLQTVKGIGKILGLTIGLETGPISRFHKAGNYASYCRCVSSQRISNGKKKGENNRKAGNRYLSWAFSEAAHFAVRFEPKVQRFYERKRQKRNGILAIRAVAHKLARAVFHMLKHQQPFDVDRAFS

SEQ ID NO: 392250 - protein, 372 aa, unidentified
MNYNTVYVGMDVHKESFTLCSYTIDEEKGSHFQRTEADYKNVLKYLEFLRTVYGNDANFICGYEAGCLGYTLYHQLTEHHVNCVILAPTTMLEQRSKRRIKTDRRDAEIIAKCLAQHNYSPVHIPTATDEETKEFLRMRDDHKLALKKIKQQILAFCLRHNYRYDGNSHWTAAHIKWLKSLKPEALYKEILDEYLLTYTPLSDKLERLDKRIEELASKDEYRELVKKLCCFIGIKTHTALSVLVEVGDFQRFASAQKFASYIGLVPGEDSSGDEQTRLGITKAGNRHIRMLLTEASQCYARGQIGFKSKELKSRQSGNSSQVIAYADKANERLRRRYYKMVLGKSKKHNVAKTAIARELACFMWGMMTDHIA

SEQ ID NO: 392251 - protein, 401 aa, unidentified
MSNFSYFLGIDVSKRSFDACLIDAKEFVLMNDKYEMDSDGFEKLMLRLQKFDLDEVLVVLESTSIYHVNLFFHLEEKGFAVAVVNPLLIHNFNKSVTLRKSKTDKIDAFRIACFTLHNQDKINLNKTPIASIRSLSRERDRLSKETAKLKTEIKNHLQILFPELVNNYNVFTKTMLLLLLKAPGAFPIKKMRPVQIERIFSKTSGNKVQLSPRELVRMARKSFGIDDKHLQTVLIMKIETLLFIQKQKGEMDKVLKDYVEENLKKDFEIITSINGIGQTTAEKFLIEIGDISKYKSHNQLRAYIGTDPSIKQSGSSINVQGKISKRGNSHLRRTIWQMAVSVINYSDNFAAYFEKKMTEGKKYKQAVIAVANKLIKTLYAILKNKSKFCENYRNQSKFIYS

SEQ ID NO: 392252 - protein, 356 aa, unidentified
MISSTKYIGMDVHTQSISSAVMNSVGKVVMESVIETKASTILEFIDGLRGDLRVTFEEGTWAAWLYDLLKPHVTEVVVCNPRKAALLKDGSKGDRIDARKLAELLYMNRIKSVYHGENGLRTLKELARSYLTITKDLTRIMNRLKALYRSWGVPCAGKDVYAPRHRAEWLGKISEAGVRRRAEHYYQQLDVLRLLRQEVRRDLLAEAKKHKPWKLLRQIPGIGPIRAAVLIAVIQTPHRFRTKRQLWKYSGLGLETHDSGQYHTEEGQLQRSKKPATVRGLNKDHNHDLKDIFKGAATTVSSSRGPLRDFYENLLAKGRKPTMARLTLARKIAAITLIVWKKEVRFDANYLKQQAA

SEQ ID NO: 392253 - protein, 329 aa, unidentified
MNFKWFVGIDISKKTLDLVLYKKELQKKSPHCKIPNNQSGFKAITKWLKEQNAKLQDTLFCMEHTGIYGLEIANFLSKNGNYCIESSLHIKRSLGLIRGKNDKIDAFQIARFCYLHREELTPGKLPTKSMLLLKSLINERERLVKVRAIDKTIIKELNYKENIDCITRAEDRIIILTKHIHQIEKEIEAVVMGDQKIEQSYKLAKSVTGIGLVNAIMFILFTNNFTSITDARKYACYSGIAPFEHTSGSSIRGKTRISHLANKRIKVNLTNGARSAIINDPELRLYYERKKGEGKEHGTIMNAVKFKLITRVFATVKRGTPYVRLRQAG

SEQ ID NO: 392254 - protein, 339 aa, unidentified
MVLYGGMDLHGDNVFCTVMDREYRPVFERRLPNDLAVVLEALEPYRERLAGLAVESTYNWYWLVDGLQAQKYPMHLANPARMQENIGLKSANDKTDARFLAKQMAMGVLPEGYIYPKEDRFVRDLLRRRMRLVHMRTGEWLSLEGLVARHSGKDLGIQALNGLEDGELGKLLGNDPLVLQAAQISFRHIAFLDREIRQIEKAVEPRVKLTDGYERLLGVPGIGRILTMTIMLETGPIARFPGPGNYASYSRAVKTEHTSNERKKGEGNGKSGNRYLAWAYIEAANFAVRYSPELRAWYQRKAARTKRVVALKALANKLAKACYFILRDGVEFDVKKLVG

SEQ ID NO: 392255 - protein, 401 aa, unidentified
MPFTAGLDWGANDHAVCVLDQGGAVVARIDCPHSAAGLADLLGKLRRIAAPAALPVAIERPSGLLVETLLAAGHPVIPIHPNVVKACRPRYRAAAGKSDPGDAYMLADILRTDGHRFRPLVPVTDEIKALRALVRGRDDLVATRVRLANQLRSLLDGFWPGAATIFAAIDSPIALAFLARYPSPDTARRLGPKRMQAFMAQHRYCGRRSASDLLERLHAAPVGRAGDAETDAKGELVRALTASLRRIVGAIAELSSRIEHTVADLPDGRIVMSFPHAGRINAAQILAELGDVRGRFQTEDQLAAEAGVCPVTHASGKSRGVVFRWACNHRLRAAVTCFADNSRHGSVWAAGHYRRARSRGCDHPHAVRILARAWIRILWKAWQNRQPYDPDRHTAATNAPA

SEQ ID NO: 392256 - protein, 348 aa, unidentified
MTLVGCDLHARDQQVAVLDTATGEIQERRLTHEGSSVEQFYAALPGPVTVGVESTGYALWFHALLHRLGHEVVVGDAAKIRAMVVRKTKTDRRDAAHLLDLLRHDRFPTVWLPDPAVRDQRTLLAHRMRLVRMRTMVKNGVHAIALNYRLALGPSLFTRAGVAQLQALSLPPHTSCRRSESLELLSWLNTRIKGLDDQIEAAAHAHPEAQRLMTHPGVGPLSALATVLVLGAVTRFPTSKHVVSYVGLAPAIESSAGKHRLGRITKQGNALLRYVLGQAGQAAIKRDPDLKRLYYAVLHRRGRSRAKIAVARKLLVRLYVMLRDQIDYQTFLHRAPAAARRQEMTPTS

SEQ ID NO: 392257 - protein, 424 aa, unidentified
MKSEQAEQIEFAAFVGLDWADQEHAVCLQESDSAKVETSVLKQTAQSLGEWANQLRARFGGRKVAVCLEQSKGALIYALMSYDFLVLYPVNPQTLAKYRKAFRTSGAKDDPDDASLLRELVKLHRDRLRALVPDDVQTRMLQMLVEGRRRIVGERTRLTNRLTSLLKAYYPQALEWAGELKSLRACDFLKKWPTLEDVKRAKASELKKFYRQHGSRNEEVIEERIKQIRASDPLTRDQAVIRSSAMVVAAIVSQLPCVIGAVDEFDQEIARVFEQHPDHEVFNSFPGAGSTLAPRLLAAMGSDRTRYESAEEVQQFSGIAPVTQRSGKSKWVHRRFACPKFVRQTFHEFAKQSIIWSKWAHAYYDQQRQRGKHHHAAIRALAYKWIRIIFRCWMDRTIYNEQAYVEALRRRGSTLIPSPASSDS

SEQ ID NO: 392258 - protein, 423 aa, unidentified
MKTSKDNTPLQTSPAAWVGLDWGDKEHAFAIQDTTGKSEDGTLPHSAENLHSWLQSLHDRYGARPVALAIEASRGAVIHALLEYPWLMIYPINPITSTRYRSAFTPSGAKDDLPDAKVLLELVRDHAAKLRALEPQDPATVKLAGLVEARRKLVDRRTQLILQVQSLLKTYYPQALEVAGDLKSDVAPAFLNRWPDLISLKAAKPATIKRFFYQHQVRSQDLIEQRLALIAKAKALTTDDARVGVAVLHLHALLDQLKVFRQHIPRLDDAIKQAFAEHADRYLFANLPGAGRQLAPRLCVAFGTLRSLYPDPASLQKYAGVAPVREKSGSQIWTHWRWQASTFLRQTFIEWAGQTVHYSPWAKVYYQRMIKNGKKHAMILRALAFKWIRVLWKCWQDRNPYDEARYLKQLIHRKSPNAAPAKI

SEQ ID NO: 392259 - protein, 384 aa, unidentified
MQKPNDLNQSRIVLKQDCTLIAVIEMSLSSWLIAGIVPGVERQPLKKLAVDESALLKLLNRWREEAEKAGRRIERITVAFEAGRDGFWLARWLRARGIEAHVIHASSVAVSREHRRAKTDRLDTELLKRAFLGWLRGERDHCKMVAIPTTKDEDAKRPNRERQSLVGEQTRIVNRMKAALIRLGIRGFNPKLKKAAGRLEDLRTPEGEPIPPNTLAELHRDMERRRLVSDQIRQIEKARLERMEQAPGDGAHAMVRLIARVIGVGIETADMLVHEVLSRKLRDRRAVARYAGLTGAPDESGSKRREKGLAKAGNARVRGGMIQLAWRFLLFQKDSALAQWYRTRTEGGRNRKTIIVALARKLLIALWRLVTTGEVPAGVVLRAA

SEQ ID NO: 392260 - protein, 420 aa, unidentified
MITAVIERCAGIDVGRKNIDVCLMVGEAQAEPTQQTRRFSTLNEDLERMRQWLKENHCTHVAMESTGSYWRPIYNVLDDGQMEVVLANSQHVKNLRGHKTDRNDARWLAHLLRHGMIRPSFIPNRETRELRDLTRRRKQMVGCAADERNRVQRVLQEANVQLGTVLSDVFGQSGLNMLDALMNPDATPEEIADLAVRQARKKIPLLKKALEGHRMTDHHRKLIRHSMEHLAFLEEEIAELDKEISEHVKAHAALSKATDLAQSVTGIKETAAASIIAETGADITQFPDGGKLSSWVGTCPGNNITGGKRKSAPARKGNPWARRVLVECAWSATRKKDSEAQRRYEHLKHRHKHKPSLVATAHLLTLQLYETLATGKPYVENPQAELPEGKAQRLVRHHSRRLKKLKHWLSNHRQRCGQTT

SEQ ID NO: 392261 - protein, 344 aa, unidentified
MGEVSTIGLDIAKSVFQVHGVDVAGAVVIRKRVSRAKVLEYFGELSPCLVGIEACPSAHHWGRELQALGHAVRLIPPSYVKAYLKRGKNDANDAAAICEAVTRPSMRFVPLKTKEQQSALMLHRTRQLLVRQRTMLSNALRGHLAELGIVSAKGRNGTAELLRIIADDRDSRVSAAVRGILNVLARQYGAIGAEIASIDKSIMALHRGCEASRRLAEIPGIGPVGATALVAEIGDWNTFSSGRSLAAWIGLVPKQHSTGGKERLGSITKQGNRYLRWLLVVGAMAVIRYARKHGTARRPWLGRLIERRPTKVAAVALANKMARMAWAIMVRGERYKEPRLSLAA

SEQ ID NO: 392262 - protein, 409 aa, unidentified
MEVVHKKCAGLDVHKKVVVAAVLVEGRPKEIRSFGTMTADLLELSDWLIDCGVAHVAMESTGEYWKPIFNILEDNFEVMLVNAQHISKVPGRKTDVSDAEWIADLLRHGLLTASFIPPVGQRELRELTRFRSTFVKERATLVNRVQKVLESANIKLASVASNVMGVSGRAILESIVAGTATPEVMAELSKGRLRNKREELSRALEGRVKPHHRFVLTELLSQIDSLEETIARFNQEIEEYCRPFEEVVVLLDTIPGVARETAENIVAEIGTDMSRFPTANHLASWAGVAPGNNESAGKKHSGKAKKGNKPLGVTLTQAAHAATHTKNTYLSAQYHRLAGRRGKKRALKAVAHSILVISYYMIQRHVPYFELGGDYFDKRRPEATAKRLITRLEHLGYQVSAQQMAIPVS

SEQ ID NO: 392263 - protein, 348 aa, unidentified
MIIVDAPRPVTGGVDTHLDLNVAAALDPVGGLLAVAEFPATSGGHRRLLGWLAGFGPVARVGVEGTGSYGAGLARCLRAAGVEVVEVDRPNRQARRRSGKSDPLDAIEAARAALSGRASGVAKTRDGNVEAIRALVVAKRSARSAKIMTLNQIRHLSFTAPEELRKRLKDVSRHQLAARAAALRPSQREGADPVMAATKTALRILGRRVLALDEEKARIDALLAGLVTQTAPQLLTMFGVGVDTAASLLVTAGDNPGRLRSEAAWAHLCGTAPIPASSGKVTRYRLNRGGDRQANAALWGIVITRLRNDPRTQAYMTRRLAEGRSKPEVIRILKRYAAREVYRHLPRP

SEQ ID NO: 392264 - protein, 348 aa, unidentified
MTQHKIIAIDLAKNIFFLFEINHKGNNIGRKKLQRTKLLNYIAMQTPSTIAMEACSGAHYWAREFEKFGHEVLLYPPQHVKNQRRKQKNDYNDAEAIAELALYQRAHPVPHKSIEKQDIQSLIRMRRLCVTERTRLINQVRGLIAEYGIVLPKGKASFRQAIPEVLEDAENQLSPILRELLSHQYERYLYIEEQIQWFEEKLNQTVKQFDNAKRLMSIPGFGPLTSQAVAVWLGSGLQFKTGRDASAAMGLVPKQDTTGGNVILLGITKRGNTYIRSLLVHGARAALRRAKFKSDKLSKWMLELQERRGPNRAAVALANKLMRITLKCFVSCVLPMLAEWKPHLAHRT

SEQ ID NO: 392265 - protein, 336 aa, unidentified
MESCGIDLAVRSSAICVMRDGGVIVTERGVPTEEEGLQAAVAGRARMVCVLEASPLAEWAAGVLEKAGHDVVVIDPRKAKGVITSKRKTDKLDARNLARMGLTGWYTEVHRKSPEARAMRTFLKARYGLVQTALAQGARIRGLLRAHGIRLGQVAESQFASRVRQVTKQQAPGLWPMLEPLVKVWRQALEGAERMKKQLERRASAESVPSQLMTAPGVGPLVASAYVATIDDPRRFRSGSQVAAYLGLVPSVEQSGQHEVHGRITREGDGLLRSYLIEAAQVLLTRSRRGCALKRWGLRLWRKKGFKKARVAVARKLAILLHHLWITGENFDPARA

SEQ ID NO: 392266 - protein, 344 aa, unidentified
MLTKNVIAIDLAKNVLQACHINVHGELLSNKPLSRQKMKVFLVKAKPSIVAMEGCCGSHYWGRLAESFGHEVRIINPKKVKGYLEGHKTDHNDALAIANAALQIGIKYSQPKSLEQQSMQSLESSRRFLSRSVVALGQHIRGTILSYGIANPKGEKGLKASVQTVLDGDTSIPANVVSVLSMLWEQYKELKAKLIAFEKEKNALTRQIEPCQRLMDIEGVGETTAAMLYSTLGDGKQFKNGRQASAFVGLTPKQHSSGGKVFMIGIDKCGGVKELRSLLYLGAMSYVGRLPEKPKTQKDAWLKSIIERIGFKKACIALANKVVRTAWAMLRYETEYKPVLLNDK

SEQ ID NO: 392267 - protein, 416 aa, unidentified
MKYAQILVLAETPPGGLTAGIDWGSADHAVCVVDTAGQVRARFTVAHDRAGIGKLIAGLRAAGVSEAAIERSDGVLVEALLEAGLTVVVVTSRQMRNLRSRYGSAGAKDDRFDAFVLADALRTDRARLRPLVVDTPATAALRAAVRARRDLVAHRIAACNQLRAHLAVAFPGAVGLFASLDSPISLAFLARFGSHDAAGQLTEDDLAAWLHTVPHRGKAARPGQLRARLQAAPRGATGPDGAALVPVTGALVATLATVSAQVQALEAEIAVQLAAHPDAHIFTCLPRAGTVRAARLLAEIGDCRARFPDPESLAGLAGVAPVTRRSGKHISIGFRWAVNRQLRDAVCDFAGDSRHASPWAAAIYDAARARGKDHPHAVRILARAWTYVIWRCWQSGSAYDPAKHAALQRVLEQRKS

SEQ ID NO: 392268 - protein, 388 aa, unidentified
MTHVGVDLHERFCYMTALDATGRKLKAGAVNNRPAELRGWLRGLPGPVEVAVEACSFWPAFQEAIADQVQRICLVHPQRVKAIASARLKNDRVDSATLAHLLRCDLLPEAWMADAATRERRQQVRLRISLGQHRAALKNQVHAILHQHGKHAPVTDTFGRRGRQWLGKLTLPPVAREALDSYVELIEQVGQHIQRQEQQLKKMAGEDRRAQWLTSIPGVGAYSAMVILSEIGELQRFRDKKALFSYAGLVPAVRESAGHKSHGGISRCGSPRLRWVMVEAAHTAAVLAGSPGIFRATASAQARPCGPGGTGPQAARSGLRHAARRGVFRRNDFCGGVRSCRQLGVILVPRGPSSDGAATVRTKPYVPRARIEACRIAANPYGQARLFS

SEQ ID NO: 392269 - protein, 368 aa, unidentified
MSRNKRLLVNAIDVEQEYKIIGLDLAKDDTSCVCIAESGEIIAIDRLSYADLLEAAEQLSPTIFAMEPCNGMHWLVNQLQDCGHECRVISGSAVQQYVELHFGKQKTDLNDAQAIAYLALDEMLRFIRAKTPSEMSIQALQTIRTQLTKQKVASIVCFKSLCQGYGISIGKNEGSVAKFISLLKETNKIPEEIKEALRMLIANYKVLRTRINKIDKVIDTIVSHNPIGQNLKSIPALGVQCAARLLTIAPNIEDFKGPKDLVAYCGLVPRNLTTGHHQKTAGITKRGDRLMRRNVVLAANCLYRMNKHGDLQNCKLKRWMDKKFLIMPYQKFIIQLAAKLLRIAYAVMKYGTDFDYARAGVARSAMKA

SEQ ID NO: 392270 - protein, 353 aa, unidentified
MSELAEEREVILGVDTHLDVHVAVLIDVVGRVVATTSVPTTAVGYEHLIEWACGFGRLTRAGIEGTGTYGAALARRVQELGVAVLEINRPDRSRRRLRGKNDPTDAENAARAVLAGEANAIPKAQSGVVEAMRAVSMARRSAVKAKTQAINQLRALLVTAPASIRATLWKVKPEQCVARCARLQSLGDTPLLKALTSTLRLLARRWLSLAKELHELDAALEELTKRAGRRLLARFGVGPQTAATLLVTAGDNPDRLRSEAALAALCGASPLEASSGKTTRHRLNRGGDRAANNALWTISMVRMRSDPRTRAYVTRRTAEGLSTKEIQRCLKRYIVRELYPLILADLADSIRES

SEQ ID NO: 392271 - protein, 475 aa, unidentified
MNLKGTKKKNQVITANFFEQQEIIAKVEAIKSNLKASTWHELETKGKFTKNEKLTFISDDMLILGCDIGSETHYVRAIDTRGRELSKSAFPFSNTLEGFQCAKDWAVKIAVANDKKQIVLGLEPTGHYWFCLATWMITNGISVVQVNPYAVKQTKELEDNSQLKDDTKDPKLIANLVKDGNFGMPYLPEKLYADLRRLSMFREQLNEDRIRFLNRLHREMKIYFPEYKDALGKVDGAFSLELLKKAPFPEDLLLLGNDGIRQIWHNAKLRGRGYSRSEEILKYARESVGMKDGADASKTAVKWFVERIIELDEQLSEIENQLNQKCKEIPHTENILEISGIGENTLSGILAEMGDISRFDDVKEIQKLSGLGLVSCSSGKHKGETKISHRGRKRLRYWLFQAAKSVVAHAEEFKELHVYYTTRTENPLKKMQSLIVIACKLLRVIYTILTRGTVYDPKKMLMDIKRPSKQESVAA

SEQ ID NO: 392272 - protein, 402 aa, unidentified
MRLAYSEGLGFFCERIDIRKISLESSAVEKIGNSEFQQKAPNYYNFDVIISISLSDEMTIKATTKAVIKYLEAIKKKHKEGILFACGYEAGPTGYGLCRGLQKAGYGCVVMAPTTMSNPEGKKRVKTDRIDARAIARILAYKSYSQVHLPSEEMEALKEYTRARDEKKRMFKKAKQELLSFLLRNGKSYPESGNYWTEKFFKWVKTVQFSEKWMQEAFNEYLAEVYSLKAKIELMDMKIREIAGLEIIKDKVDKLDKLVCFSGIDIITAVETVVEIHDFTRFATAAQFVSYLGLCPGEDSSGKTKNMLSLTKAGNCRVRALFCESAKAIKRTNSYGQKSKRILEMQKNASPEIVAYADKATKRIRTKMRHLEERGKNYNVSSAAGARELVCFVWGMMNGKIA

SEQ ID NO: 392273 - protein, 347 aa, unidentified
MNAVGIDVSKGKSMVAIMRPFGEIVSAPFEIKHTASDIHSLVELINSVEGESRIVMEHTGRYYEVLAHQLSEANLFVSAINPKLIKDFDNDSLRKVKSDKADAVKIARYALDKWQNLKQYNVMDELRNQLKTMNRQFGFYMKHKTAMKNNLIGILDQTYPGVNTYFDSPARSDGSQKWVDFASTYWHVDCVRKMSLNAFIDHYQNWCKRKKYNFSQSKAEEIYGKAKELVPVLPKDAITKLIIKQAVYQLNSASTTVESLRTLMNETASKLPEYPVVMAMKGVGTSLGSQLMAEIGDVSRFTHKSAITAFAGVDPGVNESGSYEQKSVPTSKRGSSDLRNDSEPHIF

SEQ ID NO: 392274 - protein, 441 aa, unidentified
MKVLCFCHPDDDAVLWAEQLSTVGRLWHAARRNRLEFLLEVIPSKVGPIDDTTTERIIEKVYAAGIYPDWWKIDGVDAPSHSGIAMCQTGFVRSQFNRKEASMTEISILAIDLAKHNFQVCATTFEGEVIYNRKYTRGRLAKLLAAQDPCIVAMEACGTSNYWGRLAVSYGHDVKIIPPIYVKPFVRRGAKNDANDALAIATAVRQPGMRFVPVKTAEKQSYALLFRTHQTLMRQRAQLICSLRGHLSEYGVIVAQGNSALFAFEDQIEERLAELPPAVLDATRIFYHHFDQLNQSLKALEKQMAAATNADEDTRRLRTMPGIGPINAAAFLAFAPPMESFKRGRDFSAWLGLVPKQMSSGGKTKLGRVRKMGQADLRRLLVTGATVCIRWAKWKGIRPESWLARMPGKKAAIALANKMARILWAMVTRKEEYRGGLVEYV

SEQ ID NO: 392275 - protein, 399 aa, unidentified
MNAVGIDVSKGKSIVAIMRPFGEIVSPPFEIKHTASDIKSLVSFINSVEGESRIVMEHTGHYYEVLAHQLSEANLFVSAINPKLIKDFDNDSLRKVKSDKADAVKIARYALDKWHNLKQYSVMDELRNQLKTMNRQFSFYMKHKTAMKNNLIGILDQTYPGVNAYFDSPARSDGSQKWVDFASTYWHVDCVCKMSLNAFTCHYQNWCKRKKYNFSQSKAEEIYGKAKELVPVLPKDDITKLIIKQAVNQLHSASATVESLRTLMNETASQLPESPIVMAMKGVGSSLGPQLMAEIGDVSRFTHKGAITAFAGVDPGVNESGIYEQKSVPTSKRGSSNLRKTLFQIMDALIKTRPQDDPVYQFLDKKRAQGKPYYVYMTAGANKFLRIYYGRVKEYLAES

SEQ ID NO: 392276 - protein, 309 aa, unidentified
MDNTIVGIDVAKDRLDVAVRPSGELFLVERNAGGLELLVERLKPLAPALVVLEATGGFETVVAAALGAAGLPVVVVNPAQVRAFAKAIGQRAKTDPIDAAVIAHFAQATRPEPRPLPDEATRQLADLVARRRQIVEMIGAERQREKRATARIKKSIARLIKALEKELASVNGDIDDAVRGSPAWRDKENLLASVPGIGPIIARTLIADLPELGALDRKKIAALAGLAPFTRQSGQWKGRSFIGGGRSKVRTALFMGAMTARRHNPILKAFFGRLVAAGKPRMVALIAVARKLLTILNAVLRDQKPWQTA

SEQ ID NO: 392277 - protein, 427 aa, unidentified
MNYTQNRKIAQVTETTLVVGVDIGSQWHYARAFDWRGIEITKKAFRFSNDLDGYTAFEKWVHETAENSAKMEVLIGCEPTGHYWYTFARYVGLHGMKLAFVNPYHVKQSKEMDDNSPRKTDEKDPKTIAKLVTEGRYSFPYLPEGIYAELREAMSVRDQIVKAMNAAANRIQRWLTIYFPEYLKVYKVFDSVSGLAVLWQAPLPEDIVKLGIDGIVALWHEKKIRAVGKKRAQTLIEAAKSSIGMPGGNCARMDLHLLLEDYFTKKEQLERITAVLQEELLKVPNAKKLLAVKGIGIITAAGFLAEVGDIGRFTSPKQIQKLAGLEPKENSSGKHKGRTSISKRGRRKLRRLLFQAVLPLIRSNEDFREVYTYYTSRKDNPLKGTQAVIAVGCKLIRIFYVLLSHGTDYSSTRFRADILRPEQAKAA

SEQ ID NO: 392278 - protein, 338 aa, unidentified
MSAIKVIGIDLGKSVFHLIGHDYSGHEVCRHKLTRVKLIQFISLQESTTIAMEACCGAHWLARKCQEYGHKVKLIPAQYVKPYVKSHKNDFIDADAIAEAATRPKMRFVSPKSEQAQISTVIRKIRTGYIRERTSCMNRVGSILLEFGISFPRGHANMKKLFQWLADKEAIVPPQLILELRDLLDYYNQLNEKVAAQNQKLIELNKENELYALLQTIPGIGPMTASCCLSSVGDPKDFANGRNFAAWIGLVPFQYTTGGKPRLLGISKRGNKELRELFVHAARAVMWRDASAERYFGSWLIDLKCRKPFNVAVVALANKLARIAWSVMNARKAFEVKA

SEQ ID NO: 392279 - protein, 335 aa, unidentified
MKVFYLGVDVSKKKLDLCLRSNGKDILYDVIPNDLSSIKSWLTRTFEKFFLSEDSLVVCAEHTGQYTYPLVCATKSIGVYLCLEDAAKIKYCHGIPRGKNDKIDACRIAMYAERYNDCLQPYTASELIIQKLKNLSTERSMLVADRAKYQSQLKDQVDYMEHSIYIAKCNRVEGIINTFTDYIAQIDLEIKELINQAPVIAHQMDLLMSVDGVGERVALKMIMETDAFTSFTDPRKFCCHAGVVPFVYVSGSSQRSKKRVSNRADKSIKHLLHMAALSVSQVKNSPLKKYYDRKVEEGKNKMSVLNAVRAKLVTIMFAVIRADAFFSRNYQNSLA

SEQ ID NO: 392280 - protein, 426 aa, unidentified
MLVPVCNAIVGIDLADNKQMVVVTDHDSKVLARRTFRCRAWDLGLALDWAGQHASKAGFAGVTVACEPTGHRWRVLGQLAADRGMAFVCVQTLLTSWARRSEDLTFDKTDEKDAVLIARLTAQLRCYVPEPLDERWGRLRHLGARRERLLAETVSQVQQVRDLLECVWPASLDTAKHPFRSRTWLAGMSVILGRTGGDPTRLRRLGPARFEAAVRREIVARQGKKPCLRIVRLLFAAATDPRGVTTHRPGALERVQFLLDDFRDTGRRQTETEARMVEVLDELQLTELVCSIVGLSALGAATILAETGDLTRFASARAVVKHSGLAPREKSSGTYTGRTRLTGQGRPGLRRAAWRAVWGAQKANPVYAAKFTHLTTRTENKLNRGQAHAALAAAILRQLYAVVSTGQRWDAAIAAGGRCEVIEPAA

SEQ ID NO: 392281 - protein, 416 aa, unidentified
MNAVGIDVSSRKSTVAVLRPLGEVVCLPFDVSHDADGLASLAEKLKALDGETRVVMEHTGRYYEAVAKALHEAGFFVCAVNPLLIKEYGANSLRRVKTDKADAVKIARYALDNWADLRDFTPMDAIRYDLKTLNRQFQLASKQRTASANNLIALLEQSFPGIRKCFDSPVRSDGTQKWVDFAHSFWHVDCVRKQPFAAFCERYRKWCKRHAYLFKLSNAEEVYALAKRAVVLTPKSKVVKVLVQEAANQLSSISRSVEVYRAEMDRLAAMLPEYPVVMAMYGVGKSYGPQLMAEIGDVRRFERKQALVAFAGIDPMPNQSGDKNVRSNKSSKRGSPYLRKTLFNVIRTYLQCAPQDEPVFQFLNRKRAEGKPFYVYMLAAANKFLRRYYAKLRDYFASLDTLQPVAPIPTILKATL

SEQ ID NO: 392282 - protein, 421 aa, unidentified
MNQLTDTEYTAYVGIDWAAEKHDICVQAADGERREFACISSQPEGIDAWAQALHRRFGGLIAVALELSKGPIVSALQKYDFFELYPINPSTLARYREAFTPSGAKDDPTDAELAVDLITRHPERFSPLKPQSVGMRKLIGLVEQRDKFVSDQGRLVNRLGHALRQYYPQVLEWFSEHNTVVFCDFLSQWATLTQVKRARKTSLERFFRSHHVHSAELIERRITAIKAAMPLTLDAAVIDPHRLQVEVLIEQLRITIKALKRFDAEIAVTAQKLPDYDLLFRPLPGAAKVLAPRLLAAFGEDRQRYPQADALQKYSGIAPVTKRSGKTTWVHWRWQCPTFVRQTFVDWSAQTINKSAWAGAYYRQQRAKGCSYQVAVRALAFKWIRILHRCWQDRTPYDESKYLDALRRKGSPLLKYLAETA

SEQ ID NO: 392283 - protein, 325 aa, unidentified
MEKLSGGIDIHKEKLVGCIMDENGNITRDHIFPYSKEAIERFLCGISSSEITIALEACGMWRGVYMILSELGYNVKLANPKKTHDIACNKKTDKVDAKILADLLRTNYLPEVWIPDERVIRLRDLARHKSNLTRLRTMVQLKIKSYLLRKGIKYGKLWNEKALSKLAEEDLDMRNLVNVYLCLIKEEKEVMNRIGKTVRGMKEATLLMSMTGIGAFSSMMILAEIGDIKRFKTPKALVSYSGLCPGIYQSGSTERNVRNNAVNKWLKWIIYECSGRATMLDPRFQECYYKVKQRKGFQTARRVVARKMLTIIWYMLTNEEPYRAS

SEQ ID NO: 392284 - protein, 354 aa, unidentified
MVASQIAPEQGAVVVGVDTHKHVHHAAVLAVTGQLLADAAFPTSTAGYQALIVWAAGFGTVIRVGVELTGSYGAGLTRHLTAAGLAVVEVNTTDKATRARRGKDDRIDAIAAAQKVLASMATATPKDTTGPVESIRMLLLTRNSAIRDRTAAINQLRNLVITAPAALRARLETPRRAALLNAVEAHPVNRARLADPAEATVFALQQLVRRIRDLDTEIRDLDKAMTELVTDTAPTLLSQPQIGVQTAAQLLVTAAANIDRFGSEAQFAHLTGTAPIPVSSGKTTRMRLHRGGDRQANRAIHLIAIGRLKNHPPTKAYVAKKLAEGKSKKDAIRSLKRYIARGCYQALKTDLNPT

SEQ ID NO: 392285 - protein, 346 aa, unidentified
MNQIIRIGMDTSKHIFQLHGVDAAERPVLRKRLRRKQVLAFFAKLPPTVIGMEACGASHYWARELGRLGHEVRLIAPQHVKPYVTRNKNDGRDAEGTCEAMSRPTMRFVPVKTAEQQAALMLAGIREQLIARRTQLSNTIRGYGAEFGVTAAKGLDKIEPLLAQIAQDENLPALARELFATEGREYARLQAELKAIDARLMAWHRANACSRRLAQIPGVGPIGATALVMKTPDPRAFSSGRHFAAWLGLTPKDHSTAGKTRLGKITRAGDEVLRRLLVAGATAVIQQVRNGRGRPSPWLLAVLKRKPPKLAAVALANKIARIAWKLMTTGESYDGARMPGASAVAA

SEQ ID NO: 392286 - protein, 474 aa, unidentified
MSDPKQESTPKSKPKPARSKRASRSKQMVRPVFEPNAAGIDIGAREIFVAVPPERDTDPVRKCETFTGDLHRMAEWLIGCGITTAAMESTGVYWIPVYDVLEQHGIQPCLVNPRNMKNVPGKRTDFHECQWIQHLHSLGLLQSAFRPDGEVCAVRSLMRHRNDLVAMASQHILHIKKALVQMNVQFQHVIDDITGLTGLTILDAILAGERDPAVLAQLRDPRIKASEETIRKSLEGNWRAEHILALKQRLSLYRTYRDQISDCDKEIEKLLAAFTPRVDPNDRPMPEDRKQKQRKRKKKSGNPDFNLRAEAYKLFGVDLTQIPGLMTLVFMLFSEVGRDMSRWPTAAHFVSWLGLCPDNDISGGKVLWRGARRTKNRAGTLFRLAAHALHRDQTPMGDYLRRMKAKLGPAAATTATAHKIAIIFYTMVNKQVEYDASLWAHRDHMREKRLEARLHKQAAQRGYRLVPMEEKPAA

SEQ ID NO: 392287 - protein, 408 aa, unidentified
MRQLLERCCGLDVHKKSISACARVPDEQGEVAELYATFGTTTPDLLELSDWMMGLGVTHVAMEATGDFWKPVYYILEADFELLLVNPAHIKHVPGRKTDAIDAAWIAELLSYGLLRKSFVPPPPIRRLRDLTRYRKALIRDRSREVNRVHKVLEDAGVKLSAVATDVMGVSGRAIMEALIGGTSNPDALASLAKGRLRAKIPELHKALTARFKDHHGSMLQRMLAHIDDLDADIAAISGRIEAEIGPFAEKAKLLPSITGVGPRAAEAIIGEIGVDMSVFPTSGHLASWAGLCPGQRESAGKRKSSRTRKGSELLRTTLIECAHSASPTKDTYLAEFFWQVTRRQGKDKAIVAVAHEILIACWRVLSTGTAYCDPGPGALRARSEEQIRRRAIRQLESLGLRVTLDAA

SEQ ID NO: 392288 - protein, 357 aa, unidentified
MPSSNVKYVGLDVHKEAIVVAVRDGAGKLVMESIVETKASTLLDFLHGLRGELHVTLEEGTWATWLYDVLKPHVHEIVVCNPRRNALLKEGSKNDKVDARKLSELLRAGLLRAVYHGENGLRSLQELARSYEVVSKDTMRVMNRIKALYRSWGVTCAGTQVYSRRHREQWLNKITQPGVRRRAELFYQQLDGLQALRRTVRGEFLAESRKHQAVKVLRQIPFIGPLRAAQLVALMQTPHRFRSKRQLWTYSGLAVETHDSAQYCYVGGQLQRSKKPQQVRGLNQNHNHALKDIFKSAAVSATRCAGPFQHLYEGLLAKGMKPELARITIARKIASVTLTLWKKGERFDAGYLKSQAA

SEQ ID NO: 392289 - protein, 311 aa, unidentified
MTDHTIGVDISKSHLDVFHLDEQRAQRFGNTQAGLRAFQKWLGARPLVRVVYEPTGPYHRLFEETLAGQLPLVKVTPLQARRFAEACGTRAKTDALDACGLARMGVALTLQPDAPTSQNARVLRDLQVARAALIKEQTRLRNCAHVHTNAVLKRQTKTRLALVEKQIAELDTEIANLIDTDERSARQRDILRSIPGLGQVATAAILTFLPEIGTLDRRQVSSLAGLVPHSRESGQWKGRSFISGGRKPLRDALYMPALVAMRFNPDLKAKYTALRDAGKPAKLAIVAIMRKLIETANALVKADRIWVKKTA

SEQ ID NO: 392290 - protein, 355 aa, unidentified
MSEEKYIGMDVHQATISVAVMDGSGKLIMECLLETKAATIVEFIQGLHGTLSLTFEEGTSAAWLHDLLKPHVSRLVVCDARKAALLKEGNKSDRVDARKLAEMLRTNQLHSVYHGEHGVRTLKELGRSYLTVTKDVTRVMNRIKALYRSWAVPCSGTTVYASRHRAEWLAKIVEPGVRVRAVHLYQQLDSLQPLRLEARRELLQESHKHAAVKRLRQIPSIGPIRAALLVALLQTPHRFRTKRQLWAYSGFAVETHDSGEYRYVRGKPQRNRERITVRGLNDNYNKDLKNLFKGAAISASTSPGPLHDFYVARVEKGMWPTMARLTLARKIAAISLTLWKKGVKFDPKQLHQQAA

SEQ ID NO: 392291 - protein, 403 aa, unidentified
MNSVGIDISKGRSTIAVMRPFGEVVISPFEVRHTGSELSKLAKQLKSLDGETRVVMEATGNYHASVAKLLHDAGLYVSVVNAKLVHDYGNNELRRVKTDRKDAVKLANYGLDRWLTLPRYIPEEDTRLLLKNCYRQYRQYSKVQTVLKNNLISLLDTVFPNANRLFSSPIRGDRSEKWVDFVAEFWHCRCVSEKSERAFTSKYLRWCRKHGYNFREAKAHTIYAEASGHIGVMPKSETTKLLVEQAVAQLRATSTALAALKHEMQSLASQLPEYPVVMDLFGVGPTLGPQLIAEIGDVRRFYSKKALVAYAGLDAPPNDSGDVTGRHKSMSKIGASSLRRTLFLVMSVYLQTAPLDEPVYQFMDRKRAEGKPYRVYMMASANKFLRIYYATVKAYLESLEHTA

SEQ ID NO: 392292 - protein, 349 aa, unidentified
MDFYAGLDVSLEATNICVVDGDGKVVREAKLATDPDAIELFLAEWGIQLKRVGLEAFSYSAWLFAALAEKGLPVICIETRHAKAALNAMLNKTDRNDARGIAQMMRTGWFRAVHVKSEGAQTLRALLVGRKAMLGKVLDMENMIRGLLRPFGLKVGEISVGRFDARVRDLLAGKKELEAIVAPLLDARNAMRLQLAKLHRLALTAARGDSAVRRLMTVPGVGALVALTFRATVDDPARFKKSTNVGAHFGLTPRRYQSGQTDRIGSISKCGDELTRAMLYEAAIAILTRIPKNFKLRLWGLRLARKKGLKRAATAVARALAVLLHKIWIEGTTFRFGAGGKRGRVAAAM

SEQ ID NO: 392293 - protein, 410 aa, unidentified
MPFFVGLDWASREHAVCVVDERGRVSSQFTVSHGASGLGDLVMRLKKLSARGELRIAIERPSGLLVDTLVDAGFAVVPINPAAIKACRTRYSVAKAKSDPGDAYVLADVLRTDGHRFRTLTPLSDQTKTLRALTRLRDDLVAQRVALANQLRSLLEEYWPGPTKLFTDLDCFTSLAFIAQYPTPQSAEGITEKQMRLFLHAHSYTGRRTAAELVERLRAAPRPVAGERECEAKGQCARALVAVLQSMIAQIASLTAACEQALATHEDAEVVTPLFREGRLCAALLLSELGDDRGRFVSADHLAAEGGVAPVTRASGKHRAVAFRFACNKRLRGALTTLADTTRHTMPWARAIYERARERGCKYAHAIRILARAWCRVLWHVWQQRVAYDPNKHRAARELAQASPNLGAAA

SEQ ID NO: 392294 - protein, 402 aa, unidentified
MNCVGIDVSKGKSMIAVMRPFGEVVVSPFEVRHTANELSELAGLLKSLDGETRVVMESTGNYHAPVAWLLHDAGLYVSVVNAMLVHDYGNNSLRRAKTDKKDAVKLANYGLDHWLTLPRYIPEEDTRLMLKTCYRQYQQYSKVQTMLKNNLISLLDTAFPDANRLFTSPPRTDGSEKWVDFVATFWHCECVCGLSKKAFTAKYQKWCRKHGYNFSQDKALDIYASACGRFGVMPKTNTAKLLVEQAISQLQTTSAALAALKQEMQSLAASLPEYPVVMGMFGIGPTLGPQLIAEIGDVRRFHSKKALVAFAGIDAPPYQSGQIDVRSRSISKRGSASLRRTLFLVMGVLLQCAPMDEPVYQFMNKKRSEGKPYRVYMMASANKFLRIYYASVKAYLDSLEHD

SEQ ID NO: 392295 - protein, 417 aa, unidentified
MDTLFVKVAGLDVHLKQISCAVRCRQESGKLLTQVRSFGTMTRDLRALADYLQTLGVTHVALEATGVLWKPVWNILEGRFTLLLINPRHLKKVPGRKTDVSDAEWIAQLLQHGLLRGSFVPPRPIRDLRDLTRHRAQLAGEHTRVANRIHKLLEDANIKLGAVASDILGKSGRLMLRALLRGEKDLDKLAELAHGVLRKKIPQLKLALEGNCTEHHRFVLDRLLSHVGYLETQTREFSVRIARRLEEVLGYWLFDRLDSIPGVNRKTIENVIAEIGVNMEVFPDEHHLSSWCGMCPGNEESAGRRLRSRTRKGNRWLRRALTEAAWAASHVKNSYFAAQYRRLAARRGKKRALVAVAHSVLVVIYHVLKNNVEYKDLGPDYFDRLEPERMKRYLVRRLQKLGFDVTLATRTPDESAA

SEQ ID NO: 392296 - protein, 411 aa, unidentified
MDVVYARCAGLDVHKATVVACVRSPGLRAETRHAETQTFATTLRGLAALAAWLTAHAVTHVAMESTGVYWRPVFAVLEGTVQVQLVNARHVKMLPGRKTDVRDGEWLAQLLECGLLRGSFIPPAAVRDLRDLTRLRKTLIRERGHHVNRIAKTLELANIKLGSVVTDIMGKTGRAILQALSIGRDDPEYLAACAQGRLRKKQAALREAVEGRLTPHYAFLLQQHLARIDTLDAHIATLDTRIEAARVPFAETAALMQTMPGVATRAAEASLAETGVDMSPFPTAAHFASWARLCPGNHESAGKRRSTRTGKGATWLRATLQEAAWAAVHTKKSYYRALYYRLKARGGPKKAIVAVQHAMLVALWHMLKRRVSHQDLGADYFAQRNTERTLRHHVRRLEQLGYHVLLAKEAA

SEQ ID NO: 392297 - protein, 415 aa, unidentified
MNNTISDLDTDLTAVSKAEGNAAQTEAQPAQNESDETYAQAVQEQLALARSSANCRYIGIDLHSNNIWLSVIVNEQRPSGPVGKVIFSRSIGTQRVDGTLPEDLIKPVLERFCKDQPHIACVEATYNWYWLADLFEKNGWNLVLADPSTVSEAKTKAADDRKDAEYLADRLRYNALRYAVIMPKQLREIRDLVRTRGVAVEQRAREKIIVINKLTNLIGRKITGKELRELIKEHAESGTEAPMLLNWGLTKEVRTTLDYHLAMATHINQGIQKLEEHINAVGKNLRYTKALQKMPGCGPVISSILASEIGSIKRFATAANFVSYCRLASTSKLSNGKSKGLGNAKNGNAYLSWAFTELATLMVRYSEAAKRHFEKLMRKYGQLRVKAIRVLAAKLARSVYQCLSKNEPFDVLRCF

SEQ ID NO: 392298 - protein, 414 aa, unidentified
MERVYERCCALDVHKAQVTACVHVPDQQGERAELRAEFQTMTADLLALRDWLLGLGVTHVAMEATGVYWKPVYYLLEDDFELLLVNAQHVKNVPGRKTDVKDAQWLCQLLEHGLLSSSFVPPKPIRELRDLTRYRKSLVWERAREANRLQKVLEDANIKLAVVASRPLGASGRAMLKELCEGNNDPVALADLAKGKLRAKLPLLRQALEGRFRDHHALLVSHLLAHIEYLDETIGSLSLEVEERMRPFARQRELLCTIPGVAERTAEVIIAELGPDMDRFPTHRHAASWAAVCPGHDESAGKRRSGKTRKGDSWLRTALIEAAQSAAGRTKDTYLHSQYMRVKRRRGHRKAIVAVAHSILVAAYYILKDQCPYEELGGDYFINREDQERLTRRLVRQLERLGQSVTLEPALEAR

SEQ ID NO: 392299 - protein, 343 aa, unidentified
MQTITTIGLDIAKSVFQVHGVDAGGQVIVRRQLKRRYVLTYFQKLSPCLVGIEACASSHHWSRELQALGHTVRLMPPAYVKPYVKRHKNDSTDAEAICEAVTRPNMRFVATKTPEQQSCLTLHRTRHLFIRQQTSVINAIRAHLAEFGIVAPIGRHGVEQLLGVVSDAGDTRLPEVARACLAALGAQLRTLKAQILQFDRMITAWHRSSEASRRLDDIPGVGPVLATALVASVADPKAFRSGRDFSAWIGLVPKQNSSGGKDRLGNISKRGDRYLRSLFTTGALAVIRYAKIHGTRHRPWLTALLARRPTKVTAIALANKIARMAWAMMAKGERYKEPVAQAA

SEQ ID NO: 392300 - protein, 395 aa, unidentified
MGGIIALDVSMSKSYVVAYLGKTLIVEKEIKHTKAGFLELQDIVNAFQEAPKIIFEATGVYSKPVERFCELNSLDYHLLNPLEVKMRTSKLRRNKTDKTDAHQMAKAYLGVETKKPPKIERAYVDLKILARMYFEIDFDMNIKRSYLHTALQETFPEIANVQTKMTSILALELVDRFPHPDYVLQLSEIELKNYILRVCPNIGSKRADEKALTLISKAENSYPSCSVDSYLVEKVRYYNLKLKKIVLEKKKILKKLIEKASLLPDFKLIVSIPGIGEKTAALMVAEMGNIHRFKTNKQLNAFVGIDIQRYQSGKYLAKEHINKRGNKQLRKILFYSIENMLRCQKFYRSHIVDYYYYLRRKEGCPKMHKVAVIACINKLLKCIHSMVINGTLYKY

SEQ ID NO: 392301 - protein, 463 aa, unidentified
MQMTLGIDVACRAAHQCSLADESGRFAWSGRRFRTTVADLNRLWGQIPQPVALTVVMEPTRNAWVPLAAWFRRRGATVVMVPPEQSADLRDYYSKHAKSDRLDSRMLARLPLLHPEGLQAAEGLGPADALRRASRLRSSLVKRRNVILARLDSYLELLGPSWHAAFGGDLANITPLRFLAAGYADPHAVRRLGLARLTRFIWRYSHGAFGEHYAAGILAAAAETLQLWDGELSYPDLAEDIATEARLALALTAEIRDLERKLASLLHQLDPAGILTSVPGVGAIGAAQILARLGDPARFRSLAGARSFSGLVPSLTASGVNGRHGPPTKSGDAALREALFMAANQARRIDPVLAARYHRLMVSCGKHHNSALCHISTALLTRIIACWRAGTPYQIRDTDGTPLTTAQGRAIITQRYRVSDELRALRRTSHRKTGASRRHQESPGAPTPARPPATLRPGHRQTA

SEQ ID NO: 392302 - protein, 377 aa, unidentified
MDAKRKLNAGNEVKAMFFGVDLHKDQLTYHCIVRLADGANVHSRGMVLTSRIAEDFIPLLDRNACYVIVEASCSSFFFSGLIEGHCTRVITINPTAFKELYSTGKKTDKIDAKKLVNRLQYFIESGDEAGDFPIVTVPDEEAQKVRRLVSTYDFLVKQITKLKNHIKAVFRAKIIDFPDDVFDCEIESLLNHPSLDDADRIMLTSFKTMYDAAIAEKDTIKKAVLRIGTRRFSEEVRILASYTGISVLGAVVFMSDILCVERFRSYRHMTSYLASVGKVDASGNSTRNGGLNKRGRRTSYRFILQGLEHIVKGNENLQRFKERHKAKKGNKVRGAMVRKTFVTMFYMLKNKETYRFAKKSLYEKKLKEVEGLLSKAA

SEQ ID NO: 392303 - protein, 340 aa, unidentified
MSLVLQPLLPFPDGCQGMSPHQQGRGTKMTEHCYGGIDVSKDRLDVMVLPDRKSFSVDNNAAGYSELVKRLRGLSIAAIGIEPSGGYERAVIRALLAADLSVRRINPNKLRQFGRARGVLAKNDRLDARLIAEYVAIMPTRVVQRDPATEQLAEVVTMRRQLCDEHVAVENQTAHLEDAMLRRLNKRRLARLAADILLLDRRMAQIVAGNANLTRRYELLTSMQGVGPTLAFTLVALLPELGQMSRKQIAALVGLAPYDFDSGRLKGHRCIYGGRLPVRNVLYMAALSACRYNPALKVFHHRLAATNKKPKVIIVAVMRKMITTLNAMLRDNVVWQPKSA

SEQ ID NO: 392304 - protein, 346 aa, unidentified
MDHYAGIDVSLECSSVCIVDPTGKIVREAKPASEPEALIAWFQSLGFELARIGLEAGPLSQWLYAAMKKAGLAVELLETRHVSDAFKAMPVKSDRNDARNIAQLMRLGWFRPVHCKSMSAQETRAMLTARKLIQSKLQDVENSLRGILRGFGLKVGKTTKRGFAARINELVAGHPALEAIATATLAVHTVLLREFNGFEKRMRAMSLLDAKAKLLMSIPAVGPIISLTYASAIDDPGRFTSSKRAGPLFGLTPKKHQSGETDYSGRISKNGDASVREALYEAAHIILTKPIKGCAQLKSWAMRIARRAGINKAKVALARKLAVIMLRMLKDNVPFNATAKATAMAT

SEQ ID NO: 392305 - protein, 367 aa, unidentified
MKKVSTRAAVQSRNISQQKLTIGLDLGDRNCWYCVVDEAGQIQREQRVRTNAKALQEVFGAMSRSRIALEIGTHSPWISRLLSELGHEVIVANARKVRLIGESRKKDDRLDAQTLARLARIDPELLYPVKHRSVQAQADLMLIRARAGLVRARTGLVNSARGLAKSYGERLRGCNVRNMNPEKAEGLSPELQTAMEPLLNAIEALSERIVEYNERIENLAQQSYPQVALLKQIKGVGTLIALTFLLTLEDPHRFGKSRDVGCYLGLQPGRRNSGRSEPQLHISKEGDPYLRTLLVQGAQHILGPFGIDCDLRRWGLKLAERGGKSGKKRAIVATARKLAVLLHHLWVSGEVYEPLHNSSRTTVAAAA

SEQ ID NO: 392306 - protein, 482 aa, unidentified
MKKRNIYQNQSQELLSLFGSAGSSAKVMCVPMDYAKRDHLVMFCNGHGDILRKPFSVKNSLEGIEYLIDQMTRSCRRCGIKKEHVFLGGEDANSFAENFINTLRVKGWLVAGVNAHDAKKQRMNLQASTDRIDLMGIATMLLNCRANCCPAASGIYRNLRSLVRHRRKLVVMLTEVKNRAHGIVDRLFPGFLDENKSGIVAFTQSSLFLMENRFSPKQIRRRRRQKLIEILKRFGTSKAEEAACKLQQYAATVLHTPDEYIDTLQISLAQHVKHIRCLKESIVVLEKEIAVNLAQTQGAFLTSVRGIGIVLAAGVTAEIGDPNEQKPLNNLVSYSGIIPRVKQTGGLEGKTYTGSVAKRCNRILKDYVVKSGFHLGLHGPEELKIDYKRRDASGQHADFGIGRRYLRMAMSLMRTSQVYLPPRLRKADSTLEERAGYYLMIWPYLREKWKKYGVLEAAFTKDRPLGMWRQIVQELYDIKLKL

SEQ ID NO: 392307 - protein, 372 aa, unidentified
MNYNTVYVGMDVHKESFTLCSCKYEDEKASHYQRTPASYKNVLRYLAFLRTIYGEYTRFVCGYEAGCLGYSLYHQLENFNVECVILAPTTMLEQRSKRRIKTDKRDAEIIARSLAQHNYSPVHIPTETDNQTKEFIRMRDDHKAELKKIKQQILAFCLRQGYQYDGSGNWTAKHVKWLRSLKPTGLYKEILDEYLLTYTILTDKLNRLDQRIEELASKEEYKESVSKLTCFLGIKTHTALSVIVEVGDFQRFVSARKFAGYLGLVPGQHSSGDDRNGLGITKAGNTHVRRLLVESAQSYTRGKIGYKSRVLRSRQAGNSPQVINYADRANERLRRRYYKMVLKDGKKYNIAKTAIARELACFIWGMMTDNIY

SEQ ID NO: 392308 - protein, 421 aa, unidentified
MAAATADKEIASEVPVEIWFQMLWRRAEPILFGSPNQSDGAAVMQPNDINSPTILLAIELSASTWLVAARVPGSEKPHLQRIDGGDTVALLALISSLQARVACRHAATINVVCCFEAGRDGFWLQRFLTAQGVDTHVLEPTSILINRRARRAKTDRLDAVGMLRVLAAFLRGDRQSCSMVRVPTPDEEDAKRTHRERESLVQERVRIENRIEALLFTQGIRKRPSLRSWDRDLAVLRTGDGRRLPIHLRSELDRLRRRLVMTLELIGEVESERDEAAEATPQDQTCLKIAALGRIRGVGDNFAAVLTREVFYRSFDNRRQIASYVGITPMPYQSGSMDRDRRISRAGNPRARTTMIQLAWLWLRYQPGSELAKWFRNRVGTLAGRTRRIAIVAMARKLLIALWRYVETGVVPAGAEIRAEA

SEQ ID NO: 392309 - protein, 458 aa, unidentified
MTTLLYWRRNVKSAGAKMNTQQDQTMNPLPPYDLIIGLDRSDQTADLCLIQTHSGQRRTQTIDTAPEALAEWLAQLRQQFPNARVGVCLEQPAVQLISFLEAYDWIGLHPVNPITLQKFREAFITSRAKDDTRDAEFLAQLLLTHHDKLPLWAPEDAQTRALQQLVAHRRAVVDERTALTNRLIALLKQYFPQALTLCGDDLWRPLATRFLLKWPSLSAVKKAKTNSLKQFYHLNGSRSQSLLQARLDLVAKAVPITDDAALINSFVLRVPLICRQLGLLTKTIADFDQQIADTYAAHPDHDLFASFPGAGPVLGARLLAALGSCRDRFPDARALQSHSGIAPVTKKSGGSCYIHRRYRCPTFKKQSFHEYAKESLLWCRWAAAYYLQQRTKGASHHTAVRALAYKWQRILLRCWQNRTPYQDHIYVASLRQHHSPIVALFDKVEPGKSPFKNPVKIS

SEQ ID NO: 392310 - protein, 416 aa, unidentified
MTDQRHCYAGVDWASESHHVFLTDGDGRKIGERVFRHGGEGLAEMAAWLMATSGAIEGDEIQVAIEVPHGPVVETLMERGFKVHAINPKQMDRFRDRFTLAGAKDDSRDAEVMASALRTDPRCFRLLAVADPVVIELREWSRIAEDLSAERNRLTNRMREQLWRYFPALLELENDLGAEWLLDLWETVPTPDKVARIREATIAKLLKRHRIRRFDAARVLDILRQPPLKVAAGTTESASAHVTTLIARIRLVNRQLKQAHHRLDGLTASLVAAAETEPGQKKQHDVEILASLPGVGRIVLATLLAEAFDALQRRDYAALRSLTGVAPVTKRSGKSCIVVRRQACHDRLANAMYHWARVAVQRDLRSRLKYAALRSRGHSHGRALRSVADRLLAVACAMLKTGTTFDPSLAAQKSAC

SEQ ID NO: 392311 - protein, 370 aa, unidentified
MLDTTTFVGLDVHARSIKAVSLDVMTGEVRCATFGYDAGAVAEWVRSVDPKARCVYESGVTGFDLQKRLSGLGVDCVVGAVSKMIKPSADRRRKNDRNDAEFLARMLSVGNVVEVWVPDDECEAARDLTRALEDARDDLSRSKQRLSKFLLRHGLVFDERTPTGRRKGNWTRAHWSWIESIRFAEGADNEVLAYYVDAVRRAAEEKARLEGLVEAEARKPRWRKRVDSLRCLKGVDTASAADLVFEAGEFSRFRNARSFAAWVGLTPSEHSSGESDRRGAITKAGNKHLRKALVEAAWHYLTCSGRPKGLAKGQAPDRVARRHAAKGVRRLVERREALLARGVHNNKANVATARELACWVWAVGLMAEEA

SEQ ID NO: 392312 - protein, 345 aa, unidentified
MNITTVGIDLAKNLFQVHGVDVRGKAVLKRQLRRDQMASFFANLPACVIGMEACASAHHWARKLQGLGHTVRLMAPQFVKPYVKTNKNDIADAEAICEAVARPNMRFVAVKSVEQQAVLSLHRVRQGFVKARTAQANQIRGLLGEFGLVIPKGIVNVAKRVPDLIDKAGDQLPATLRQLIARLLCHMKELDRQVGELEAQIKAWHRNSALSQAVAKIPGIGPLGASALVASIADARSFDNGRQTSAWLGLVPRQNSSGGKSKLLGMSKRGDTYLRTLLIHGARSAILSAQRRTKVDPWLAGLLHRRHPNIAAVALANKNVRTVWALLAHDREFRPNYIPAPPAAA

SEQ ID NO: 392313 - protein, 331 aa, unidentified
MKNCELAVGIDVSKKTLDVFIHNHSKHRVFDNTKSGYISLIKWVGKFCDNEKSVLYCFEHTGNYSLKLAIFMQTNGLVYVQENPIVVKRSSGLVRMKTDRVDAELIARYAWLHREELECSSIRDEALLELGRLLSLRDQLVRNRSGLMGTLEELSGLLSSPSTDVSCKSLKHTIAYLSKQILKLEKQIDQLLKREEDLGKNYKLLTSLKGVGRILACQLLYHTCNFERFSSWRQFSSYCGTAPFEHSSGTSVFKRAKGHPLSDRKMKSLLSMASVSAIQHDGELRAYYQRKVAEGKPKMIALNNVRNKLLSRVFAVIKRGTPYVDLCKYAA

SEQ ID NO: 392314 - protein, 386 aa, unidentified
MKSIIQGGAESVMDAAKAIYVSVELSQSTWLVTSFAPAIDTKMARKGLPVGGVGQLLTLVADLRSKVLSKTGLSFPVIIIQEAGLDGFWVHRVLVDEGLESYVVDATSIAVPRKARRAKTDRIDGELLVRALMAFKRGEPRACAMVRVPSHDEEDRRRLLRERKALVVERLRHANRIEGLLFAQGISNYRPLNRDRRPRLEDLRTGDGRPLPPFMKAQISRELDRLELVIEQIRTIEAERDKLLMCERKEANSAVSMLENVRGIGPEFASLLWAEGFYRHFDNRRQIAAYAGLAPTPWQSGSIDRDQGVSKAGNPRLRTTMIQAAWLWLRHQPDSALSDWFRQRAASSGAAQRKKIVVALARKLLVALWKYVTAGIVIDGARLKNA

SEQ ID NO: 392315 - protein, 375 aa, unidentified
MKEKLRFLGMDVHAETIAAAIAEPDGEVRSLGTIPNRMESVRKLIKKLGQVDKLRVCYEAGPTGYVLYWQLAELGVPCEVIAPSLVPVRAGDRVKTDRRDAEKLARSYRSGDLTAVWVPDEGSEALRDLVRAREAAKQDELRARHRLGKFLLRSGRRPPTGVRAWTHLHLIWVSQIRFTQVAQESTRLDYLHEVEHMRERVLRLEQAIAEAVKLASPALREVITDLQALRGIAHISAVMIAAELGQVSRFAGARELMGYCGTVPSENSSGQRTRRGGITKTGNAHLRRIVVEAAWSYHRPPAIWAGLRKRQQSASEEAKEIAWKAQHRLHKRYARLAATGKDKRKIVTAVGRELLGFIWAIGTKAEATVSQRIAA

SEQ ID NO: 392316 - protein, 344 aa, unidentified
MEQLYYVGLDIHKKIIAYCIKLADGTIVMEGKIEATRLALKQWAQTIPGPWIGAMEATIFTGWIYDFLKPFARQLQVGNPLMMKAISSAKKKNDKLDARTIADLVRCNLLPRCYMASQEIRDLRRVLRYRKLLVQQTVRMKNRTATLLMETGVEYNKSKLHYVGYFKGLLEQLRDEPESLLEVLRMSRGGIELFTGFQKKLLKGLANNEALCQRVQRLMSIEGIGEVTALTWALEIGDAHRFSSIRKAISYCGLCSGQVESAGKTMRMPLSKQRNKHLQCVLIEAAKLAPQHNPLLRQIYEKERQLGSNHNQATISVARKLVAFLLAVDKSEKPFIKRTAKKAA

SEQ ID NO: 392317 - protein, 345 aa, unidentified
MEIRTIGIDLGKTVFHFVAVNARGQVVVRKKGSRTQLLRFTANLPQCLIGMEACGGSHFLGRALREQGHDARLMPAQYVKPYVKTNKNDYIDAEACAEAVTRPTMRFVPIKTDDQLDLQTLHRVRERWVVRRTAVINQMRGMLLERGITIRKGRHHIEESLPGILEDADNKLSGALRVLLTQLRMEMQYLHGQIEETDKLIARICGELEQCRRLVAIPGIGPITATATVAAIGNGAAFKKGRGFSAWLGVVPGEHSTGGKQKLTGTSRRGNKYLRKLFVQGAHTVLLQKTKQSSGLSTWLVNLTSRKRPQVATVALANKMARLAWAVLFKGEAYRPPTAPQAIAA

SEQ ID NO: 392318 - protein, 311 aa, unidentified
MTETAIGIDISKATLDVHRLSDGAAAQFGNDKAGFRALKFWLKGHDLARVVYEPTGPYHRDFEIALEADYPLVKVNPLQARRFARSLGTKAKTDAVDARMLAVTGAAFSLLPQQRISAKQRDLKELHVTRLALVKDRGRILNRQRSLTIALLKRQAEARLKPVIAQIAQVDAEIQELLQNAPDTARASEIICSVPGLSKVSPAAILTEMPEIGALGKKQVASLAGLAPMTRQSGQWRGKSFIQGGRKPLRDSLYMPAPVAMRHNPDLKAKYAALIKAGKPAKVALVALMRRLIILVNTLIREDRKWEKNRA

SEQ ID NO: 392319 - protein, 439 aa, unidentified
MTIKVVYQTCCGVDVHKSFLVATIIKTTSGVHPSYQKKRFSTFNNSILQFKDWLIKNECRDICMESTGKYWVPVFNLLEDEMNVTIANPKWVKAVKGNKDDTKDSKWIGDLFRLGLVPGSYIPCKPIRILREFTRYRYKLTSCRSSEKNRFQNALTVCNVALDSVVSDIFGKSATSVIDYLIEQSDNSIKHEEIASRLLRSLKKKSDRVIESIEGYQMTDSPKYRIRLVRAHMDYITSTMKDIDTMLDSLIAPYENAVQLLCTIPGVDRNSAITVISEIGTDMTPFSNSKRLCCWAGLTPGNNESASKKKSVRITRAGVYLNPALVQVAHAAVKSDKSPYYKQKYERIKKRRGKKRAIIAIARMVLTAIYQILSTGEVWNPTDLYKIDMPELLKERHCPLLSFTVTSSLLWVCEKIVLWLILLWVKPDRDKNRYVLAGA

SEQ ID NO: 392320 - protein, 422 aa, unidentified
MKNTAARKLKQVPEGYLIIGVDPHKKKHAAVVITQDLTIRDRFKLDNTREGLEFLLQRVKIEMVKSDCRGIMFAIETGGHYWRNIAYYLDEKGIPFRFINQYTLKRRREGKDLNKRKNDYRDSEVAAQLLCTGEFVESGIPQGVYAELRTAHNAYRRLVKERTRITNLVKGLLDSLFPEFVRVFKDPCGLTALSVLSTCVIPGVIAGMMEDEFVTAIEAQHHGRRLMRRKLRELRGIAETTIGIEAGAWSLSAEISFLVEKLELIRRHITIIERSLINLVDETEEGKYLLSIRGLHYIAVAGLLAELGCFKSYPSAKQMIKMAGSNPTESESAGKKRARTPMSKQGRPVLRYCAWTSVIPMLRLNLDFRAWAKERRERPAHANPLNGREVVGAALNRLLRLCFAMVKNQTYYRSPHLVQVSS

SEQ ID NO: 392321 - protein, 416 aa, unidentified
MNEVKCWFVGVDWASESHRVRIADCCGKRLGERDFAHGGAGLAEMAAWLTSVAGAEPSAIHVAIEIPHGPIVETLLERGFNVYAINPKQLDRFRDRFSPAGAKDDSRDAEVLCDALRTDMRAFRRLALAEPLVIELREWSRMTDDLNGERNRLCNRLREQLWRYFPAMLELEQDLGAEWFLDLWELVPTPDKAMRIRETSIARILKSRRIRRVSAPEVLTVLRKPPVTVAPGTIEAASAHIRVLSERLRVVNRQLKDAHRQLDRLCGLLAEPTESEPGPANEQRDAAILASLPGNGRIVLATLLAEGWEALQRRDYHALRTLCGAAPVTKRSGKSCIVTRRLACNPRLQNALYHWARVAVQHDPRSRAKYAALRLRGHGHARALRSVGDRLLNVACAMLRNGTQFNPSLESQKSAC

SEQ ID NO: 392322 - protein, 355 aa, unidentified
MDRIYIGVDFHARQQTICYLTTEDGQVLTHRLEHQDKNEVRAFYAQFTGCVIIGLEASGYSPWFERLIEELGHEVWMGDAAEIRRRARWRQKNDRRDAELILDLMIHDEFPRLYRPCPQSREVMRMLRYRQKLIKIRTMGKNSLQALALQSGLAKRSHLFTKAGRRELCTAPMSPAMQWQREQWFQLLEPLNDRLLETMMWLRQQTKDDRRISLLRTHPGIGLLTSLCVVHSLEPVSRFRNQRKVAAYGGFDPMERSSAEKKHFLGISKAGSRVLRYLLVEAAHAAVKKDDDLKRFYQRLVARRGKPKAKTAVARKLLIRSYIMLRDEIDYAEFRRRAVAARLARQSTRPLVPVA

SEQ ID NO: 392323 - protein, 347 aa, unidentified
MNQVSTLSIDLAKNVFQLLAVDKHGKPCFSRRVNRQKLKETIQNMPPCKVVMEACGCAHYWGRMCIKAGHKAHLVPAQHVTPFVRGNKNDKNDCLAIYEASQRPYIRFVPVKSESQQAVLLLHRMRESLVKARTACLNQTRSFLLEFGIETPKSYRAFCSHIQTLLDQQLQPVILLLIHETCAELKAFERQLRQLDSLFRDTNQRSQAAEIMQSLPGVGPIIASAFSASIDKGQAFNSAKEFGVWLGLTPKQYASADKSVLSHITKRGDRYLRKQLIHGARTVVTHAHKKDDDLNRWISSLKERIGINKTIVATAHRLARLMWILLQKNEPYQPQYTQSGATQCIKG

SEQ ID NO: 392324 - protein, 364 aa, unidentified
MTKERYYIGMDVHKDSVQMAVFEGAGEEPIYERKLYNDPALLIKEVKRFKDRGETEAAYEAGCLGYVIQRAFEKAGITCHVLPANKVAKKRDDRIKTDRRDARLIGRELRSHSIKPISVPDETDEAARDLLRCREDLSEDLRRTKQRLLKFLIRHGHIYSGGGNHWTMKHLQWMGKIQFSQEHERQVYEEYKSHIDSLEERLERMNLKIQEVAESPEYKEAVRRLRAFKGIDYIIALALVCEIGDFRRFANAKSFMSYLGFVPSENSSGGKRRQGGITKAGNGHLRKLLIEGAWHYAKGGQTGKRLQQRRIGCPLGVIDTADRAMHRLHKKYIRLLMKGKHTNTAVTAVARELAGFIWAVQVSA

SEQ ID NO: 392325 - protein, 482 aa, unidentified
MKKRNIYQNQSQELLSLFEVAGSSAKVMCVPMDYAKKDHLVMFCNGHGDILRKPFSVKNSPEGLEYLVDQVTRSCRQRGIKKQHVFFGGEDANSFAENFVSTLRFKGWLIAGVNARDAKKQRTNLQASTDRIDLMGIATMLLNCRANCCPAQSGIYRNLRTLVRHRRKLVVMLTEVKNRVHGIVDRLFPGFLNENKSGIIPFTQSSLYLMEDRFSPKQVRRRKREKLIEILKRFGTSKAEETAFNLQQYAAQVLHTPVEYVDTLQLSLAQHVKHIRCLQEGVAQLEKEIAVNLTQTQGAFLTSVRGIGIVLAAGVTAEIGDPNEQKPLNNLVSYSGIIPRVKQTGGPDGKTYIYSVAKRCNRILKDYVVKSALHLGLHGPEDLMIDYKRRDASGQHADFGIGRRYLRMAMSLMRTSQIYIPPRLRKTDSTLEERAGYYLMSWPYLREKWKKYGALEAAFAKDRPLGLWRQIVQELYDIKLKL

SEQ ID NO: 392326 - protein, 346 aa, unidentified
MTIVESARLVTGGVDTHLDVHVAAAVDGNGGVLGVESFATTTVGFAELCDWFAGFGPLARVGVEGTGAYGAGVARHLRSRGVEVIEVDRPNRQLRRRAGKSDTIDAIEAARAALSGRASGIAKTADGDVEAIRALLVARRSGRNVRIKYLNQIRHLGFTAPDDLREQLRGVHRDHLARTAAALRPNRQADIVTYATKLAIATLGRRVLALEADTRRLDQLLDQLVRRTAPTLVEVYGVGIHTAAILLAAAGDNPHRLTSEAAFAHLCGVAPIPASSGKTNRYRLNPGGNRQANHALWRIVFTRMSSDERTRKYVARRLAEGKTIREIMRVLKRYVAREIYPHLATR

SEQ ID NO: 392327 - protein, 345 aa, unidentified
MHIASGGIDLGKTTFHLVALGERNKILLRKKFSRAQLLAYTANLPASLIGLEACAGAHFVGTALREQGHQVRLIPAQFVKPYRKSNKNDFLDAEAIAEAVTKQNMRFAQLKTQEQLDWQAMHRVRDRLVQRRTALINEIRGFLLERGITFAAQPIHLRKNLPTVIEDAEQNLSPRLRWLLDRLWQEWKQIESEVQAITDEIERISNEDARCRQLRQIPGFGPLISTATVAAIGNGAAFRRGRDFAAWVGVVPRQYSTGGKQKLYGISKRGNVYLRRMLIHGARAVLFRVKYDTAGFGQWVQRLAQRAPHNKVVVAIANKLARIAWAVLSSGKDYRHQPLQQLAAA

SEQ ID NO: 392328 - protein, 408 aa, unidentified
MFIVGIDIAKKTHVAAITDDIGKCIGKAFKVSNSVEGFNTLLQKLAEISTDISQFVFGMEATGHYWLNLYTWLGDKGFTIHVINPLQSDALRRLQIRRTKTDPIDAQLIAECIRLGKYCKTNLADDDMLALRDLTRQRFYLVDMAGDIKRKVISMMDRIFPEYESLFSDMFGRTSCQLLKECTTPEEILAVDTERLCEILRKSSKGRFKQQKADQVRESARNSFAVILSSQSLSLLVKQMIEQLELLESQIGQIESLIEQLYAKFNCKLTKIHGVGITLAAVILSEIGDISRFQTPKQLTAFAGLDPVIKQSGSFSATTVHISKRGSPYLRRALWLAANTVKQWDPVFAFAYQKKINSGKNKTQALAFITHKLLNVVFTILKNNIDYLPLFPPDFDSNQLPQNFHFTP

SEQ ID NO: 392329 - protein, 429 aa, unidentified
MKKIRSHCAVIDIGAKRVFTNVEGEQVVSHFTFTEDFYKLRDYLLQHKVETVAMEATGVYWIILYDILEDAGLDVWLVDGRQTKQVPGRKTDVKDCQWICELHSFGLLNRCLVVDSDIKELRTYVRIREGHIEYGSKHINQMQKALVIMNIRLKEVLSQIHGVSGMAIIEAILNGERNRDKLVSLCHINVLNKKKDLVYKALEGKYTEAGLFALRQAYDGYYFYQNQISECDKKISDVLNRLGNSGVGQDKKRRKPIRHNKPNVDKLDSNLLNLFDNNDATKISGISDYTWMQLLSEIGTDLTRWPSEKHFTSWLGLSPGQKNSGKTNRNARKKGKPRAGQIFKIIAQGLINSKNIAIGAFGRRLRGRKGPAIAIKAMARKLAEIYWRMMVKGVDYVEQGVKIYEKQIATNKLKTLMKLANELNLEISG

SEQ ID NO: 392330 - protein, 355 aa, unidentified
MTSTKYIGMDVHKESISIAVRNSVGKVVMESVIETKASMILQFIDGLRGDLQVTFEEGTSAAWLYDLLKPHVTKLVVCDPRKNKSMREGNQNDKIDACRLAELLRVDHLAPVYHGEHGLRTLKELVRSYLTIAKDLARVKSRVKAIYRSWAIPCTGKQVYARCHRAEWLGKINEPGVHRRAEFYYQQLDALRVLRQEARRDLLAESKKHKAWKRLCEIPSIGPIRAAVLLGILQTPHRFRTKRPLWNYGGLAIEMHSSADHRRVDGQLQRSRKNVLVRGLNRNCNHDLKNLFKGAAAVASSKPGPFQEFYAGLVANGMRPEMARLTLARKIATIVLIVWKKGVCFDASHLKPQTA

SEQ ID NO: 392331 - protein, 343 aa, unidentified
MHVNTIGVDLAKNVFQVHGVDSAGKVVITRQLRRKQVLDFFSKLPGCLVGMEACGTGHHWAREISKLGHTVRLMPPSYVKGYVKRSKSDAADAAAICEAVTRPSMRFVPIKSTDQQALLMLHRTRDLLIRQRTQLINALRAHLAEFGLVAEKGREGLAELSAIIADEMNREALPSAMKQALQTIVDQLAALELQIGTLDRAIHAHHRANDMSCRLETVPGIGVIGATALASTVTDPSGFKTGRDFAAWIGLVPRQHSTGGKERLGGISKQGDRYLRRLLVIGATAVVRQARQHPQKHPWIMKLLAKKPAKLVAVAVANKMARIAWAIMAKGGYYRAPALAAAT

SEQ ID NO: 392332 - protein, 459 aa, unidentified
MNRKRPAGKGSVKRKVDWKALDIVHPDAAGIDVGGSEHWVAVSPDRDDEPVRCFGTFTADLHDMARWLVEKGVRSVAMQSTGVYWMPVFEILEQNGLEVFLVNARHTKNVPGRKSDVQECQWLLKLHAFGLLNHSFQPSDEIRIARALWRHRGNLVAAASSTIQRMQKALIEMNMQLSNVLSDLSGVSGMAIINAILNGERDTSKLATLAEPEVKASTRTIALSLEGNWREELLFVLGQEVQLYRTYQEHIADCDLQLHRHLKSFDSRVDLSAQPIGPRPKGKKPSKNAPKFDLRSELYRITGIDWSQVNGMDVLTAQTVIAEAGVDLSAFPSEKQFTSWLGLCPTNETSGGKILKRQTRKVVSRATAAFRMAATALFKSQSYLGAQYRRLRTRLGAPRAITAMARKLACLYYRLIKHGQQYVDKGTEYYETKYREQQIWSLQKRAKKLGLQLVIPTPA

SEQ ID NO: 392333 - protein, 352 aa, unidentified
MEVTTIGLDLAKSIFRVHGVDATGQVVVRRPLRRAQMLPFFARLPSCLVGMEACGTSHYWARELIKLGHEVRLMPPAYVKPYVKRGKTDAADAEAVCEAVRRPTMRFVPVKSPEQQAVLSMHRARDLLVKQRTQLVNMIRSLLAEFGLNIPKGLERALLMARRIVDGKAPDVPMEVAKIVSTLSQQALDIHVRLRQIDRDLLVWQRGNDVARRLMTIPGIGPVGATALAASVTDPRQFRSGRQFAAWLGLTPLQKSSGGKERLGRITKMGDKYLRKLLIVGMTSLVCRAKHNPETIEPRLANLLARKPVRVATVAMANKTARTIWAIMTRGETYRAGHQPALAHKNNVTRIS

SEQ ID NO: 392334 - protein, 326 aa, unidentified
MKYHIGIDVAKDKFDCLWLKDASSLKIKTKVLPNSQAGFKKLKLWLEKNVSTELESIFVCLEATGIYHEALSYALFDMGVKVSVVNPAFIRDFAKGLGIRGKTDKKDSMVLARYSVLVEPRLWQPEPEDVRTLKALLSRLAGLDKDLQRECNRLEKASVSQASRAVIESHELMIEQLEKEIARIKNQIDEHIDQNPTLKKDRKILKSIPAVGDVLSREMLALLNSRNFERASQAAAFVGVVPKLWESGKMKGRTTLCKNGSGRIRAILYMAAIVATQHNPDIKRQYERLLKAGKTKMQALGAAMRKLVQICFGVLKHQCEYRPQMN

SEQ ID NO: 392335 - protein, 344 aa, unidentified
MHITTLGIDLAKHVFQLHGVDARGHVVLSRRVKRDQLVHTVASLPPCVIGMEACGSAHHWGRAFEQLGHTVKLMHPKYVKPYVKTNKNDSRDAEAICEAVSRPTMRGVSIKTVEQADLQAVHRTRSLFVKHRTAVINQIRGLLAEYGLVIALSPGKVRPALVRFLDDAASGLTPFARETFAELYAQLTELDSRIERVTHRVECLFRAHPVCQKLAAVPGIGPLTATALVATVGRPQAFHNGRHLAAWLGLVPRQYSSGGKERLGGISKRGSRYVRTLLIHGARAVVQRAERRTDPQGRWLCALKHRKGTNVAAVALANKNARVIWAMLAHDAAYRPPTSAPAGS

SEQ ID NO: 392336 - protein, 403 aa, unidentified
MFYLGIDIARASHCCCLLNNEREQVGKTFDLPSSQNSFNALIAKINTFKIDQGELLIGMEATGNLWENLYDFLNTKGFKVFLLNPFQTRKYRDLIGKKAKTDAIDSFVIAGLLRSGESTKSFVPDDQIQSLRDLVRLKNSLFETLKTYKRKAYALLNLIFPEYLTLVKNPFGVVSLAILKQFPSAKDVAGAKPRQILKIARHFQGNNFDEELAKRMISSAQSSIFSGRANQARGLALRVMLSQIEQLQNHIEQIEQAVEEILEPTEFSQSLGGNLLSIPGVGPKTVATLLAEVGDMQRFSSVKQLIGYVGLYPQISESGNSKKIPVLTKRGSPLLKHALYLAAVACVKHNPYLRKLYHQKVSQGKCAKQALIVVARKLLCIFYSMLKYNTEFDPIRLNLAVAV

SEQ ID NO: 392337 - protein, 375 aa, unidentified
MLRGASGPAAAGPDAADGIVRPSGASPADELGPSVLGSCPEQMMGRSSRMQGKELSEQATAAKSSVGIDVSKSWLDIHVLPSAQTLRVPNTGEGIRKLKRWLARFEVNLVVVEATGKWHRQVHRSLIAGGIAVAATDPFRVRAFAKAKGILAKTDRIDARVLALFAALMAPDIRPPASQALEELAELVAARDSAVAEQTALKNQLTAACGSFLKRQLERRCARIAKDIEVIEGEIARHIAADEGLARRYVVLTSIPGFGPIVAATLIACLAELGACNRKQIALLAGAAPIADQSGKREGVRVVWGGRPAVRRALYLAALSAAAHNPGMKAFYQRLIAKGKTAKQALIAVARKLIVLANTLIAEDRTWQPSPPKQA

SEQ ID NO: 392338 - protein, 411 aa, unidentified
MNPVIGLDVAKGESQVQAYLERKKPYKKSFKIKHDLDGLGSLLDFIKEIEDISGERPPLVMESTGHYHSPVVQYFEDKGYLIIIVNPLISYKAKSSSLRKVKTDIIDANHLCELFYKEDLEPYKKRGIQLMNLRHLTRQHDNITGMFVQTKLQFQAVLDQVFPEYSKVFGDLYSDVSLKTLQAFPTSEEVLIVDTETLATKIKEFCNTRSLKWANQQAEKLMIAAAQNPFQKVLYSSLALSLDMYINMLFEYKKHLSMLENEIDALAKSIEESKIIRSIPGIGEKIAATIVSEIGEIERFNHPKKLVAFAGLDPSVFESGTFKGTYNRITKRGCSRLRQALYMGVKCAIRDCRKQKTTDEILPRNKKLRAFYDKKREEGKPFRVAVIACANKLLHWIYALLKNKTSFQDLA

SEQ ID NO: 392339 - protein, 346 aa, unidentified
MDYHPSDQYIAFVDTETGDYGERQLKHSDREAEKFYRELAARGVSVRVGMEATGYSRWFERLLAELGIEVWIGDAAEIKTKRVRKQKTDREDARLMLRLMRENNFPRIWVPSPENRDLRQLLWHRHRLVQMRTRIMNQLQALAMNEGQRRKKKLWSEQGRAQLEKLPLATWASRRRKDLLELLDRMNPTVEELTRAIDQEVKKWPEVLRLMTHPGVGPLTALAFVLIIGTPKRFKCGKQIGSYVGLIPSEDSSAGHQRLGHITKQGSSLLRFLLGEAAQAAARWDSDWRRRYVHLAMRRQRNIAKVAMARRLAVRMYWMWRNGWEYAEWVKFGSHAGQLGTRQGVN

SEQ ID NO: 392340 - protein, 313 aa, unidentified
MSESFVGIDVSKDVLDVAFSDGRVLQVSNDEAGFVALRQELAGKVPGLVLMEATGGLERSIAAELSAAGIPLRIMNARHVRHFAKATGALAKTDRLDAQALVQFAQALRPEPRSIQPEHMQALQALIVRRRQLLEMLMMEKNRLHTAHRGVRADLRSSIRGLEKRLKGVDEDIDGALQGCGALREKIELLESVPGIARVTAMNLVATLPELGTLNRREISALAGVAPFTRDSGQSHGRRSIWGGRALARSALYMAALVGARHNPVLRTFYQRLRQAGKPGKVALVACMRKLLVILNTMLKQQRPWSPQFTHPA

SEQ ID NO: 392341 - protein, 337 aa, unidentified
MDNYIGIDVSKATLQIYIPKNNIDLEIENSFDGLKKLYAKLKKQYKKEINKIIFVYESTGSYSTILEHYCQTKEIKCFKVGAYQSASFSKVLKNRNKTDIVDARMLSQMHILAQKKDIKIPSRDEKAHQIRSYIKYYQSLVKEHIRQKNYLEAATYNLEDSFVLKQVTKKLSSIKKEQEMIIAKVMSIINANPDYLKAYENITSIKGIGEKSAIILLYLFLRYPNASRQHITALCGLDPIQRSSGTSVQHKERISKQGLSLVRTILFMPTMASIQHNKEMKLIYNRLIQRGKPKMLAQIAVMRKIILLAHSLYKNNQQYDEKKYLQYTQVKEVDMVE

SEQ ID NO: 392342 - protein, 397 aa, unidentified
MYIVGIDIAKRKHEAAVIDGEGAVIIKPFSFTNNCSGYNRLLAMLAKAKLPLDEVSFAMEATGHYWLALFTRLQKEGFRVQVINPVQTNSIRSFYIRQAKTDPRDALLIAEVIRFGHFSESTLHPENIYELRELCRGRHAIVSMQADVKRKVVALLDQVFPEYETAFTNMFSDTSMAILQTCPTPKELSEMPLEEFCHLIEVSSHKRFRMAKARELQELARNSFGFAMAGDVFSTMIRLYAKHLDFLKQQVREMDRKIAEIMDTLDTPITTITGIGPTLGAYILSEIGDISRFSSAAKLAAYAGIDPTMWQSGEYNGVRNRMSKRGSPYLRHAIWLAASSAVLHDPALKLYFQKKRDEGKPYMASVGHACRKMVSIIYAVMRDNKAYTPYIPNEISA

SEQ ID NO: 392343 - protein, 416 aa, unidentified
MRRVRAFCGIDWASDHHDIAIVDETGSLLARARIDDSAEGLGQLLQMLAEHDDSPQGPIPVAIETSRGLLVACLRATDRPVYAINPMAAGRYRDRHTVSRKKSDHLDAMVLANILRTDAAAHRMLPADSEVAQAVAVLARAQQDAVWDRTQAGNKLTSHLREYFPSYLAAVGHRREGIYHPIARALLAAAPTPLQAAKLTRPQMRAVLKKAGRKNTIDREVERLHSALRASQMRHLPLVEEAMGRQALALLRQLEAACTSTDDLAEAAVQAFEAHADAEIITSFPGLGPLSGARVLAEIGDDRTRFADARGLKAYAGSAPVTRASGKSVFVAARRVKNQRLAGVGYMWAFSAMAHSEGARAHYDRRREAGDRHTAAQRNLFNRMIGCLHHCLTHRVPFNEAVAFPTSREPRLALAA

SEQ ID NO: 392344 - protein, 462 aa, unidentified
MATPGEKGRKKTKVPLPTSLPAIRPMVAGIDVGSTQHWVCGPARQDGKPNVRVFSTTTDQLNELADWLVGQGVESVVMESTHVYWIPIYELLESRGIEVLLVNARQIHNVPGRKTDFKDCQWLQLLHSCGLLKGSFRPGEAITRLRALQRQLANLVAERTRCVQWMQKALDQMNVQVHRAVTDLTGSTGMAIVRAIVGGERDPARLAAHRHPRCRKSAAQIVQHLTGTWREEHLFNLASALRLFDLLEGEIGSYDARLMEELAALEAPQRQGQSVPPHPNPAKEKDIRTRGEQHARTILWRFAGVDLTRLDGIRVDAARVVLTEAGPDLAAFPSENHFVSWLRLCPRTPISGGKPLKKRRNGLGANRIAGVLRMAALSLQRSKSALGAYFRRIARHKGGAVAVFATARLLARLIYRMLRYGQDYADIGERAYEHQFEIRRLAAITEAARNLGYALVPKVAEG

SEQ ID NO: 392345 - protein, 354 aa, unidentified
MSNKSTATVATMGIDIGKNSFHVVGLDERGAIVLRQKWSRAQVEVRLANLPACLVGMEACVGAHHLSRKLKALGHDARLMPAKYVRPYSKGQKNDFRDAEAIAEAVQRPTMKFVATKTAEQLDLQALHRVRARLVSQRTGIINQIRAFMLERGIAVRAGLRFLRAELPGILASRTEVLSPRMASVIEGLAEDWRRLDTRIEELSAEIEAVARKDAGCERLMSVPGIGPIISSATVAAIGTGDVFAKGRDFAAWLGLVPRQISTGDRTILGKISKRGNCYLRALFVQAAWVVLIKPQSWERHGLKSWIEARKKRLHHNVLAIALANKLARIAWAVLATGRGFEMTRIGDAVVRPV

SEQ ID NO: 392346 - protein, 406 aa, unidentified
MKLPANQEKNQPVPVVKPSSTLEKINQNAAGIDLGSGEHWVCVPTDRTDQNVRRFGCFTPDLIAMADWLKECHIDTVAMEATGVYWIPVFQILEAKSFEVKLVNAHHVKTVPGRKTDVLDCQWLPKLHTYGLLSGSFRPEDQICVLRNYIRQRDSLIKSASTHVQRMQKALIQMSLHLHKVISDVTGLTGMKIIKAIVAGERDPQVLATLKDPHIKSSTADIAASLTGDYRHEHLFVLKQELTLYEVYQQQIIAVDAQIEKCLASFEPKTLDQPPTTGKKRRKKPTANHPNFDLHKYLYRIAGVDFTLIDGLDALTVQTILSEVGLNPKRFPTVKHFTSWLGLCPGQKVTGGKVKSSQTRTVVNRTANAFRMAAFSLTHSTFCTRCILSPLTFSLGCTQSYYGYCS

SEQ ID NO: 392347 - protein, 441 aa, unidentified
MPDMAAGPPEPVWAAFVALDWGSQKHAWILQPVGGGKPEPGFVDNTPEAIAVWAAELNRRFGGQPIAVALEQKRGSVVNLLLPYAYLVLFPVPASMSASYRKTFVPSGAKDDPSDAAWILDLLLRHRDRLRRLEPDDANTRLLLMLVEDRRQLVDDKTRWALRLQDCLKQYFPQLVQWFEVDTALVADLLKRWPDLQHLQRCHDGTLRTFFAQHHCGQELTGQRIDAIRAAIAATSDPAVLEACSRKARNLTESIAVLRDHITELERRRDELVASHPDNAIFASFPGAGRATVPRLIAAFGTRRERYQSAFEVECQSGIAPVHIASGKTDRVSVRRACQKFTRQTFHEFAGQTIPRCAWAKTYYLAHCHKPQQHHAAVRALAFKWIRILFRCWKDRLPYDEQLYLTSLRRRSGLLGPALTSVTSVGWKTVAGFSKLSEKSS

SEQ ID NO: 392348 - protein, 349 aa, unidentified
MNIKRIGIDLAKTVFQLHGVDSREQPVLRKKLKREQMLSFFRTIAPCLIGMEACSGAHYWARELQKLGHTVKLMAPQFVKPYVKANKNDAKDAEAICEAVSRPTMRFVTIKTIAQQDLQASHRIRKELVGQRTAKVNQIRGLLAEYGIVVGQAIEVLRKALPCLLEDAENGLSADFRILLKGLQEDLLALDERVAELDKRIHTLAHTHEDAKRLLQIPGVGPLTATAIISAVGDGSQFKRGRDLAAWIGLTPRQNSSGGKEQLLGISKRGDHYLRTLLIHGGRSVLRMAGSKDDPRSRWLKGISERRHKNIAAVALANKNARIIWALLTKKTDYEQKAGELSSGESVCA

SEQ ID NO: 392349 - protein, 349 aa, unidentified
MERFCLGIDISAKTVVIAHRGAKGRVERHEFANDAAGRRALIHYLKKRAKLIRAVMESTGVYGLDLALALNKSGIELMVANPRATAHFAKAVLQRSKTDALDAEMLLLFAESMPFKQWTAPSATQLELRGISRRVQALLETVRAEKNRMHAAMHVEGTTIVRKSIQSTLKALAKQIESLRGEALKLIKSDPSLTRRFEQLLTVKGIGQISAISIIAELSVLPADMTDRQWVAHAGLDPRLFESGTSVEKVPRISKRGNSHLRAVLYLPARVACRFDPGARRFAARLKANGKKPLQIHVAVMRKLLHGIHAMFENNVPYDTNNLFPVAGAVGTSGIAPSAISEVSIALSC

SEQ ID NO: 392350 - protein, 339 aa, unidentified
MKLYAGIDLHSNNNYLAIIDEQDQRVYQKRLPNEPDIVLAELAPFQEKLVGATVESTFNWYWLVDALMDNGYTTHLANPAAIQKYKGLKYSNDSHAAFWLAHLLRLGILPEGYIYPKEDRPIRDLLRKRGHLVQLRTSLINSLQGIISRNCGHSLSGNKIKRFKENHIAPLLAGQEDLELSGEVSKDAIDFLSKQIVKVENTVLNKVKLRKSFLGLQTIPGLGRVLPLTIMLETGDIERFAKVGNFSSYCRKVPSEWKSNDIKKGKGNVKNGNKYLAWAFSEAAEFARRYNESAKAFFNRKASKTNRMIAHAALAHKLARAAYYIMRDNVEFDQQKLFT

SEQ ID NO: 392351 - protein, 344 aa, unidentified
MSNITVIGIDLAKTVFQVCGLNQANKRQFNISVKRAKLISTVLQHPNATIAMEACGSSHHWGRVFTQLGYEVKLIPPQFVKSFCRGNKNDALDALAIAEASMRPDMHCVTIKTIEQQDYQTLLRGRTRLIEQRTATINQARGTLAEYGLILPTSVAAFKRGIPEVLEDANNDLTPIMRAFIHSLYEDYQTLTARIDAFGRQLAAIANNHPIMRSLLRLRGIGPISAVAIYASIGNGSQFTNARQLAAWIGLVPKQHGTGGITRLGSISKRGNRYLRLLLIHGARTVMNWMKNKTDDLSLWAKQLIERRGRHKAIVALANKTARMIWVVLNRGIDNVPVQHLSTL

SEQ ID NO: 392352 - protein, 391 aa, unidentified
MSMYFVGIDISKYKHDCCIISAVDQQIVSKFTITNDKDGFEQLLISLNSLSNPEDIKIGFESTAHYALNLELFLENAHHSFMEVNPVLIKEYKKSTTLRRTKTDSVDCESIARWLITVEYKPHSKGFYHAYSLKSLTRLRDRLIRQRSFYLVKITNVLDHTFPEFKPFFNERLSKTALYLLENYGSAEKMARMNSASYDKLRCISRGKFSIQQFLRLKELAANTVGVNNSIFDLELNTLLTLYKSLSDEINTLETEIIKLIEEVHPHYMSIPGIGPISSAVIYAEYGDISNFSNPGQMLAFAGIEPGINDSGTESHGGRMVKHGSSQLRYVLLNACLPLIRFDLTFATYYEKKRAEGKKHRVAITHVAKKLIRVIYALERQDVDFNAQKIR

SEQ ID NO: 392353 - protein, 353 aa, unidentified
MDKYIGFDIDSKKVSVCVIESGKKDIYAAIGPDIASMRRFLFSQKKDGYRLHLAYEVSGYSGYIHDQLCECVDRIAVANPVKTTWIFRTAKKTDRVDARKLAVLLSIGELPTVHVPNKEVRQWRQMILHRRNIVRDICRVKNRIRAILKSAGFFKALHKGGWWKQVNIMWLRQISTGIEFWQVQLVQLMDEYEFLDKQLLKATNHLDGYLTAKAGAVLLMSIPGIGPRTAEAVLAYTDGVERFGGSREYCSYFGVVPKLDESGDSRRVGHITKHGPSVVRWLLCESSWKSIRKSVALKCFYERVKNGDNKRKKIAIVAVCRKLLSIMRAMLTTGELFNEELVLKHCTELDKAA

SEQ ID NO: 392354 - protein, 428 aa, unidentified
MANQADRTPTCVLVAIDIAKQWNAALIEYPDGKRQRFQFKHEQEDYDRLVRLLHSTGSSCRIAFEPTGVYHRTLAYRLLQEGFHVCQVSSVAGARYRDAMFNSWDKNDPKDAQVILELLKQGVTQQYHDPLVKGTHDLEEISKTYELISRARTRLRHGIITHYLPLHFPEIERFWYSSRNDWFVRFLIQFPTAAAVSALTREEFVAAAWEVVGRKVDKRRQLDEIHELAKKSIALPLAADSIAVETFRLQLSRYDALNQQRNALEARAHALLKDRHDYQRLCEIPGIGPIIALVILAEGGDLRRFSHHKQFLKYCGLDLAKVQSGVSRGHERLSKRGNARLRCALWQASISAIRMRENAFRDKYTRYIAADPENRDRRRKARTAVTAKLARVAYSLVKFDRPYRGRFEVGLPSGSISLNAALEASRTS

SEQ ID NO: 392355 - protein, 338 aa, unidentified
MKNCNKQNEKIELVDEKTLVIGVDIGSYDEYARAFTCRKQELSKKPLHFYNTAEGFKTFKDWAVNIMKANGLEKIIVGMEPTSIYWEALATYCKDNGMILVHVNPAAVHKSKELDDNDPSKNDRKDPKVIAGLVADGRYQFPYMPEEEYEELRELSNLRIRTQESLTQWKNRLSRWYSRYFPEFKGAYKNVVSKTAMMILDLYPLPEDIVTLGVEGILQIWRNKKVRAAGESRAKKLYEAAKNSIGRKEAAAVARLEFQSIKEDLDRYQERLEAIDKEVDEILPKIKNADKLFGIKGVGKATVLTFLSEVGDISRFENPKEIQKLAGYAIVTNDSCKH

SEQ ID NO: 392356 - protein, 350 aa, unidentified
MLYTGVDYHRSFSYLTTMNDKGEIVTQRKLPSNGEIVDFLKSFRESMEVAIEATPSWYWLYDHLEDEGFEVKLSHPLKTKAIAYAKVKTDKVDSATLAHLLRSNLLPLSYVPEKLVRLNRELLRYRASLVRIQTGVKKRIHTILAKNNVSHGYSDLFGKQGMAFLHALALPENYKIALEGYIAVLDVVRQEIWAASKKVRQLAEGDHGALLLMTIPGMGYYSALLTKSEIGDVRRFRSAKQLCSYAGLVPSTHASGNTCYHGHITKQGSRWLRWILIEAAIHAVKRPGVLRRFYFKIERKKGGQIAKVATARKLLEWIYHILRDGRTYQEVEKIADLLGRGEPGKNFGHA

SEQ ID NO: 392357 - protein, 317 aa, unidentified
MEISTTDVAGIDVSKAHLDAALHGQDARLRVANTQAGCARLATWLSHFGVSRVGMEASGGYERLPVDELRKAGFEVALLQPRQVRAFAVYRLKWAKNDQIDAALIARCTAELDTVQAPRDARLAAMDEHLRLIEQIEADLSRQKTRSEAYRDRRLKRWITQEVARLERRLKAEIALLMATIARHQDLISRLRLIQTVEGVGERTALTLLILMPELGQLSREQAASLAGLAPFDDDTGMQRGHRHIAGGRFRVRRAIYAAALAASFRWNPRLINLYQRLRAKGKSHKQALVACARKLLIFVNAVVARGSAWQKQLNDA

SEQ ID NO: 392358 - protein, 311 aa, unidentified
MDEIIIDKGCGLDVHKETVVGCVMGSGIKKEIRTFSTMTEDLFRLKSWLSEKGITHVAMESTGPYWKPVFNVLEDSFEVILANARHIKNVPGRKTDVKDSEWICKLLRSGLLAASFVPPRSIRELRDLTRYRRKLTQAISSEKNRVQKVLEDANVKLSSVVSDTFGVSAGRMIEAIMAGNLDTEAISDLAVGKLKGKKEALKKALAGNFQDHHRFMIQASLDHIQSLEKIIAGLDQEIKRKLKDYHKEYELLQTIPGVKEQGAASILAEIGADMDRFPSAGHLSTWAGMSPGNNESGGKKKAERRPTAIRT

SEQ ID NO: 392359 - protein, 315 aa, unidentified
MEQPSTAPSFVGIDVSKDRLDVHVRPVGQTLSVTRDSKGLEQLTDQLRDLAPALIVLEATGGFEITVAAALAGASLPLAVVNPRQIRDFARATGRLAKTDTLDAQVIALFAERIRPEPRPLANADSQSLAELIARRRQVVEMIGMETNRLHQARNTRAQRMLRTTLRTLTGQLAQLDRDIDDTIRRSPIWRATDDLLTSVPGVGDVTAHTLIADLPELGQLDRRRVAALVGVAPVNRDSGQMRGKRTITGGRAGVRGALYMATLSAIRWNPVISKHYGSLVERGRPKKVALVACMRRLLGILNAIIRTQTPWQCV

SEQ ID NO: 392360 - protein, 338 aa, unidentified
MTIVMGLDQHRAQITAEWLDTETGEIARKRIAPADRAAVGRFAAGFSGLELEVALEATTGWRFVVEELQAVGAQVHLAEPAETAARRGTKKRAKSDRADARHLRELLMVGRLPESWIPPEHLLELRARVRLRHTLVDQRREWQQRIQAVLYHHGVPPRAWLLGAEARAWLASLELPPAAREQITIALALIDAHDAQLAPLDAELRAYAKRQPGCRALMRHYGIGPLTAVTILAELGDARRFSSSREAVRYSGLDITVHQSDARRAPGRLSRQGPSALRWALFEAAQCARRPGSPDHDYYLKTAERLGGNRACLAVARKLLKRSYHTLRELGEEALQPA

SEQ ID NO: 392361 - protein, 370 aa, unidentified
MNDGSKYVGLDVHKETIAVSIAGADGGEVRYFGEIKNTPEAIHKLCDKIKPKQGGLFFCYEAGPCGFGIHRQLIDLGWDCMVVATTLIPRKSGDRVKTDRRDSEMLARLLRAGELTGAWVPDDAQEAMRDLTRGREDMKRLQKQSKQVLLAFLLRRGPRYSGKSHWTKMHYAWLEDQTFANASQQIVFQEYINTIKSLNLRVEAFDRQIEKVAVESVFKEVIEGLMSLRGINLLTAVTIVAELGDLRRFESAPQLMAYLGLVPSEYSSGGSRNRGGITKTGNGHVRRVLVESAWTYRHPARKTRHLERRAKEASEAVQEISWKAQVRLCGKYKTLDSKGKLKVQTCTAVARELAGFIWAVGQEYPSPKAA

SEQ ID NO: 392362 - protein, 390 aa, unidentified
MDVMHPVCCGIDVHQKSIVCCILDGPLTSNEPKKYQTSFGTTTKELKAALDWLLEHQVTHVFFESTGQYWIPLFNIFSDSDLELILANPQHIKNVPGRKTDVKDAEWIAQLGRCGLINQSYIPSQEVLQLRYLTRYRISVKQRLTQIKNHIHVILQRGNIKITSYLADIFCKTGQALLTLFINGEVINEDNVESCIHGRIKASTRQLIEAMEGKLSTVDRFLIKECMEEYKLQKKISDELNKEINEYILDHFPEEYQLLLTIPGISDNCCATILAEIGPNVDAFKTDKKLASWSGMCPGSNESAGVKRSSHTTQGNKYLKQALVMSVLSVQRAKEVTFSLFYQRISSRGSKMKAIIACGHKMLRIIYKILQSHQPYNSQKALGLRQQTNA

SEQ ID NO: 392363 - protein, 408 aa, unidentified
MNTLYVGIDVSSKSNVVYLMLPNGDKHSNFSVANSHEGSTLLVKKIYSALTSHSLDTVLIGLEATSVYGDNLVYFLREDATLAPFNRKIHVLNPKQVKKFHDTYNDLPKNDYVDSFVIADCLRFGRINKEVYMGDYRYKALQNLTRARFFAVQNLVKEKQRFMNVLFKKYSTMTQEKVFSDAFSTTALAVYDEFESAEALANMDLHELTDFIIEKGKNRFPDPDAVAKAIQKAARSSYRLPKTVNDSVNQVLSISITSMKALESQIKKFDKAIKALMELLPNVLISIPGIGPVYSAGIMAEIGDINRFDNQASLAKYAGLAWKQHQSGGFEAEVTRLIPSGNRFLKYYLCEAAFSLVRCDKKYSDFYHLKYKEVNRCQHKRALALTARKFVRLVFRLLKDNRLYCPAK

SEQ ID NO: 392364 - protein, 400 aa, unidentified
MISVGIDVSKGKSTVCLLKPYGEIICKPFEVQHTEKDLEELANLLQKLDGEIKMVMEATGIYHLPILTFLLEEGFFISVINPFMMKRFARDNSLRGAKNDRLDSVMIASYGIEKWHKLKKYEVNDGIYPELRFLGRQYHRFMQTHVKHVQELTHLLDHTAPGLKAMFNSWNEHSNRDKLSDFVERFWHFDLITSLSREEFVEQYLLWAKEKKYHQSRSKAEKIYDLASNGIPTLSSRTPSTQMIIQEAINVLRIVNNSLYRILSRMKELAKSLPEYATVRSMGGVGDALAPQLIAEIGDVRRLHNGHALVALAGIDPPPYESGQFVGTHRKISKRGSPILRKIGFEVMRMLKSHKEPEDNAVYNYILKKEAEGKNKKLSKIAGLNKFLRIYYARVMEVYR

SEQ ID NO: 392365 - protein, 343 aa, unidentified
MEYYVGLDVSLKQTSICVVNQTGSVVREGVVDSDPEAIAAFVRSNAPGAVRIGLETGPTSTWLWTELKRLGLPVICIDARHAKAVLKMQINKSDRNDAAGIARIMQTGWFKEVRVKDLDSHSVRALLASRALLVKIKRDLENQIRGLLKNLGLVIGRAKFNVFAARAEELIADRPELVAAVKPLLEARKAIEQQVGELDRKVLKLARNDVQVRRFMTAPGVGPITALCFKATIDDPTRFKRSRSVGAYVGLTTRRHSSGEVDWTGRISKCGDAMLRTYLFEAANVLLTRVPKWSALKVWGIRLAKRNGLRKAKVAVARKLAVILHRMWIDGTEFNWSTKKAAA

SEQ ID NO: 392366 - protein, 324 aa, unidentified
MPSTRDQFQSTAGPAVLGLDVGKSTICLHDARSGRSRRIRNTAQDLLEALQAYAGYDLAICEATGGYEDVLLATLLAVGIPAHRADGVRVKAFLRSHGTLAKTDAIDACGLARYGHDRFDKLTRWTPAQAAHEEFVVLVERRRDLVDIRVSEKNRLQAPRAVRVAADIASLIDELSRRIGEIEDRIAALVESNQRLRQLNEVLLGISGVGPTIAAVMIAGLPELGRLSRREIASLAGLAPHPRDSGTMRGHRSTRGGRRFLRPALFLAALTASRGSGPLADAYERLVAAGKSKRLALVAIARKIVVIANARVRDTLREPMLATA

SEQ ID NO: 392367 - protein, 341 aa, unidentified
MKITTIGIDLAKSVFAVHGVNEHGRAVLKKVLKRDQMLPFFANLPACVIGIEACGSAHYWARKLQGMGHTVRLIAPQFVKPYVKTNKNDAADAEAICEAVARPNMRFVPIKNVEQQSVLSLHRVRQGFVKARTAQANQIRGLLSEFGLVVPQGIAHIARRVPALVEDAANDLTGSFRLLIQRLMEHLKELDRQVRDLEAQIQRWHRDNDASLKLAQVPGIGPITATALVASVGDAKGFTSGRQLAAWLGLVPKQNSSGGKNILLGISKRGDTYLRTLLIHGARAVIRAVQRRNDQEGWLPRLLQRRNPNVVAVALANKNARIVWALLAHGRSYQLGYQAAG

SEQ ID NO: 392368 - protein, 338 aa, unidentified
MAIMTIGIDLAKSVFAVHGINEFGKPELVRPEVPRVKLMELIANVPPCLIGMEACSGAHHWAREFARFGHTVRLMAPKFVAPYRMSGKRGKNDAADAAAIAEAVTRPNMRFVPLKSIEQQSRLFVHRARQGYVEQRTALINRIRGLLSELGIVLPLKAATVRREAHKHLEDLPGWCNTVVGDALSELTHLDERIGQYDKYIAQAAAEDPQSRQLMHLSGIGPTTASAIVATVGKGHDFSCGRQFCAWLGLVPGQYSSGGKQRLGRITKAGDSYLRTLLVLGARAALATAKNKTDPVSRWAISVQERRGYWKAVVAIAAKNARMCWAMLQRGEAFKMPA

SEQ ID NO: 392369 - protein, 424 aa, unidentified
MIPQPETEFAAFVGIDWADTKHDICLQPAGIDKLEFAVLPHRSDAIEQWACSLRKRFQGRPVAVCLEIAKGPLVYALQKYDFLILFPINPVTLAKYREAFTPSNAKADPSDAEIALELLLCHRDKLTALSPQSASMRTLERLVEQRRRLVGDRNRITNRIMAALKQYYPEVLNCFEEKDTLLFCDFLARWPTPGDAKHARKVTLAAFFRAHHVRSAGLIEERLRVMKSVTPLTEDVAVITPNRLLVQALVEQLRVALRAIARFDAEINTVSKTLTDYPLFSGLPGAGTALAPRLLVAFGEQRERYVSAAEFQKYTGIAPVTESSGKKHWVHWRLRCSTFMRQTFVEWAAETITRSFWAGAYYRQQRAKGSSRQAALRALAFKWIRILYRCWQNRTPYDESTYLNALKRRGSPLLTSFEGIPKTT

SEQ ID NO: 392370 - protein, 409 aa, unidentified
MSYFVGLDWAQDEHAVWILDDRGGTVGKFTVAHTAAGLTELAARLAKIAPTSDMRLAIERPTGLLVDTLVEQGFTVVPIHPNAVKASRPRYSAAQGKTDLGDAYMLADVLRTDGHRFRALTPLSDETKALRGLVRVREDLVAQRVALSNQLRCLLEQFWPGASALFADIESSIALDFLERYPTPSSAAALGVKRMAAFLARNGYSGRRSAAELVERLRAAPPAVAGDAEAEAKGECVRALVAVIRPLVAQVATLTAAVEHAVEAHPDGKIVTSLFRSGRVCAAQLLAEIGDDRARFVSADHLAAEGGVAPVTRESGKHRAVTFRWACNTRLRTALATLADTSRHTSPWARALYQGARDRGCEHAHAIRILARAWCRVLWSCWQERVAYDPAKHAAARAFTIRTVEPEAA

SEQ ID NO: 392371 - protein, 432 aa, unidentified
MKYKMKQKQNQRITRITEKTLVVGADIAKKTHVARAVDFRGIELGKDCVFHNDQEGLMRLTAWIKELSRIHEKTEILFGIEPTGHYWFPLAAFLKEQGIKLVIVNPYHVNRSKELEDNSQTKSDYKDAKVIANLVKDGKYSEPNLPSKEYTELRVLMNFREKVMVSLNQVKTRITNWLDRYFPEYSQVFKDWEGKASLMTLRQFPIPSEIVSIGARGILTHWKMEVKRGVGIKRAEQLHAAATASIGLTEGLIAARIELTALLEQYDLYCKQEESLMVSALQILENIPGTKQMLSIPGIGVLTVAGFLAEVGDLSNYDHGQQIIRLAGLNLTENSSGFRKGMTGISRRGRSRLRGMLFRAVLPMVAKNEEFKAMHEYYTTRTQNPLKKKQSLIALCGKLIRVLYTLGTKQKEYNAKNVLGPVRQAQLRESAA

SEQ ID NO: 392372 - protein, 323 aa, unidentified
MSSFVGVDVAKNTFDIATHLPNGKHKTKAKLANDAKGFKEFEAWLHRQVEPSALIVMEATSVYHLELAEFVYNKGYRVCVVNPATTHAYAGSELRRIKTDKSDAKLIADFAREKAEKLQLWAPEPLKYRQLKAMVRRLDDLQEMEQMERNRLEVSDEKVKDSINSVLRHIEKEIAETHKAIKNHIDDDPDMREMRDLIVTIDGIGQKTIERLLAELGDLRKYDDPRKLVAAAGLNPKLQDSGLLKGRTVISKIGSARVRAGLYMPGLVALKHNEAIIAMKDRLKANGKAPKQIICAAMRKLLHFVYGVLKSGQPFDPKLALAR

SEQ ID NO: 392373 - protein, 369 aa, unidentified
MRKAKPPLRKDSAMRILALDLGKSKSVFVDYAFGGGGEAFRGERKFGKIGSNAHELRKLLERCAPDQLVIEACPAAGWVCDLAESMKVPVQVANGNDERWRWKTVKEKSDRKDALKLAQLFEMGSLPTVHVPKAAVRQWRSLIHYRHELVDRRTAMKNSIRSIHERQGLALPSARRAWTKPAVQELKKEAWAAKAEELWLFQVRCELQQLEMVEQQIEQVEGRLEELAKEKESVRLLKTAPCVGPRLSEAVAAILDDPHRFKNGRQVGCYVGLTPRRWQSGQSDRQGRISKAGNPLLRELLVEIAWLGVRNKTWMREVYERVRRGSDKRKKIAIVAVARRLLVKLWAMLRDCTEWKEPACKPVAALAVG

SEQ ID NO: 392374 - protein, 391 aa, unidentified
MIYVGIDVSKDKHDCYIVNSDGVVLADVFSVENNLDGFDLLLQRLKSVAPDLLNVKVGLEATGHYSYNILGFLLDKGLATFVLNPLHTNLFRKSTSLRRTKTDRVDARTIAAMMSSGIVLKSYTAISYHNEELKSLSRYRFDKVRQRAKLKQAVSRLVTILFPELEKLVPSLHIASVYALLAELPGAKQVASCHLTHLTNLLSAASKGHYDRSKAVELRNAARRSIGSAMPAKSLELQHTIRLIRELDAEISEIEAAIKQIMDQIASPILTIPGISYRMGAMILAEIGDFARFDSPDKILAYAGLSPSTYQSGKLDNAYAHMEKRGSRYLRYALYNAAKYVCHWDASFCAYLAKKRAEGKHYNVALSHAAKKLVRLIFALQRSGQPYCPTA

SEQ ID NO: 392375 - protein, 359 aa, unidentified
MTEIEYFCGIDVSKHSFSVAIKNGKFIVKDKVFTMNKEGFNGLENMLKEFKENLLIGMESTGIYHNNLFNFLRENGYNSRIVNPYMVFQFFKFSRNKPTRTDKKDAQTIANFLEFNKKALIKENYLGEEEKERIRYLVREKERTTHLIAQTKTEIRRILSVVFPEMEKEPGIFSQEILDLLSEFSSSQKIRTLSKEEFLSKTKEFREKGKGNHSKLSFERIYELANNSIAFEYPYYEELLKLKIKRLKDLLKEKDYINKIIEENANKIFKREIEILTSIPGIGRESAIYLMAELINIKRFENYRKLIGFCGLDPVIKQSGKFKASFRISKRGNAHARRIVWIMAGCVKKSCPYFREYYL

SEQ ID NO: 392376 - protein, 400 aa, unidentified
MSGLTGKFDCIVGIDVSKDKFDACGITGEEAKLFQISTSMDRKGFEKLKRHLGAFSISSVLIGMESTASYHVNLFSYLVAEGYKVILINPLLISNYVKMELRKTKTDKKDAVVIAQFLLAKGDTLMQRATPYLISDLRDLSRQRESLVDEMTSLKIEIKQLLNITFPELEHMVGIFTKSILKLLQQYPSAVALREADIDQLSQSLITDSYGHKREEFAKALIKAARFSIGTNSPAKEIIIKQKIRFLLHQEEALQEITDMLMEMARKLMEDDINIITSIKGIGDKTAANFLVEMGGDIHKFECSGKIIAMAGLDPAVYQSGKHEGKGRITKRGNRHLRRIIWMMTTSVIQYTDIFHAYYQKRRKEGLPYKKAVLATAHKLIRVIYAMLTQRKTFCLQGNS

SEQ ID NO: 392377 - protein, 424 aa, unidentified
MLGVGVDWAESFHDVALGRPGTGVIEQFRIDHGPAGVTRLVARCLELEPDPAEVRVVLETRHGLLVEALVDAGFTVLPVNPDLVARRRGPAKKKDDAADARICCLLALDQYAELRRLVPHGQIGAELRAIARDDERAARDERRIGNRLRAGLLAVFPAAIDIAGGDLGAAVFLKLLQRWPSAAELAAATCEELEAFARSARHGWPGRFTGQVIAAMAAPQLPVRPELARAKAGSIRLAAAQLLLLREQRRAWERRMGELLLGAPRCGRDKTPKDPDPGKAFPGGEIYLSMPGLGDRLAARVAGEIGEHHQQFTTPNALQCYAGRAPVTRRSGRSEFTVARRLAYNRHLGEAVQQWAFCSLSRSAWAREFYDQKITAGKSHHAALRTLGNRWLEVLWHCLHKGVLYDEATHTANRLRSRPLKPAA

SEQ ID NO: 392378 - protein, 388 aa, unidentified
MDSAGRRLAKARLPEGVAGIARLHAMIGAQLGDAEATEVAVGIETDRGPWVAALIAAGYTVYAVNPLQAARYRERHSVSGAKSDAADAHILADMVRTDAHQLRPVAGDSPDAEAVKVVARAHKTLIWERTRHTQRLRHSLREYFPAALEAFEDLDAADTLELLGKAPDPTSAAKLTLGQIRAALKRARRRDIDAKATRIQAVLRGEQLGRAAVITTAYAVTTRSAVVVLATLDEQVKILEKQVDAHFGRHPDAEIILSQPGIGVVLGARVLAEFGDAPGRYADAKARKNYAATSPITRASGKKKVVLARFVHNDRLVDALMSQAFSSLQASPGARAYYDQLRAREVGHPAALRQLANRLVGILHGCLKTRTLYNEATAWSHRTEKVAA

SEQ ID NO: 392379 - protein, 341 aa, unidentified
MLTVSLDVHAGASQMAVVDETGEVIREQRIATTPEALARAVDAVPGPKRVVFEQGPMARLIRDALTGRCEEIICADPAHNALIARAEDASDERDARRLATLAQVKSVRAVYVPGEPYRSLRALQVYGHQVERAMTAVKNRITALLRSQGVRYRGRQPYGERGRTALRRELTSPAIRWQLDSLYRRLESLAAEKKRCRREVSKISRGLPVLRRLRQIPGVGPVTALVLVAWIADPHRFRSPSALSSYAGLGIGQGSTNWKPVGRARASKRGNRELKRILFLAARAAGRSQSALGRRHRARLDAGWDISKVRRDIARTILKTAVSMWRNQTDYDEGRITVPCA

SEQ ID NO: 392380 - protein, 345 aa, unidentified
MDKIIRIGIDTSKHVFQLHGVNAEEKPVLRKKMRRKEMVDFFTTCSPTVIAIEACGGSHHWARLLTSLGHEVKLIAPQLVKPYVKRSKNDAADAEALCEAMSRPTMRFVPVKSVDEQAALMLIGVRDRLIRNRTQLANAIRGYATEFGIAAAKGLTHVPLLLERIQSEETVPELARELFASQADEYARLEEKIADVDAKLKAWQRTDERSKRLNTIPGIGPIGAALLIMKTPAPELFQSGRQFAAWIGLTPKDHSTGGKLRLGGITRAGDEALRAALVVGATSVIQHARRTGKASAWLTELLRRKPSKLAAIALANKMARIAWKIMVSSETYMAKSAPAVMADVG

SEQ ID NO: 392381 - protein, 338 aa, unidentified
MKLYGGIDLHSNNSMIALLDEQDQVVYRRRLPNDLATILGELAPYQGAIEGVVVESTYNWYWLVDGLMAAGYRVHLANTAAIVQYAGLKYTDDDSDARWLAKLLRLKLLPEGYIYPKAERAVRDLLRKRGQLVRQRTSNLLAVQNLLARNRGESLSANAVKRLSSETVDQLLPEPYLALAVNSNLGVINALDEQITVLEKTIKAHIKPSATFQFLLSVSGIGDILGLTILLETGEIRRFASVGQYASYCRCVGSERISNGKRKGRGNRKNGNRYLAWAYVEAAHFAVRYNAQIKRYYQRKCSRSNTVVAIKTVAHKLARACYYILRDQVPFDVNKAFA

SEQ ID NO: 392382 - protein, 415 aa, unidentified
MKKHSNSPKKSESRSKRAKLRGPVQQDTKEVLAELVGKLREKLDPKVGAASAGEEHQQGRPRPNLDRLTVGVDLGDQWSQYCILGLEGETLAEGQLRTTKQDVSEFFEALNAARVVLEVGTHSAWVREVIHSHGHEVLVANPRLMEGSKRRKRKNDRIDANKLARLGRVDPQSLHPMQHRSAEVRQDLVMLRARDALVAARTELINATRGLVKSMGTRLPKCSSPSFAQKVEEAVPAEIREALLPLVRMTAELSDCIKGYDEKIEKLASEKYGHTALLRQVKGVGPITALAYVLTLESPERFVKSRDVGPYLGLVPKQEDSGESQPQLGISKAGDTMVRRLLVGSAQYILGPFGPDTDLRRYGLRLCERGGKNAKKRAAIAVARKLAVLLHRLWASGEVYEPLRPALSTPITAAA

SEQ ID NO: 392383 - protein, 313 aa, unidentified
MMIKTIGLDLAKSIFQAHGVDERGATVLVKKLHRKQMLPFFSKLPPCLIGVEACGTAHHWARTLSAMGHEVRLIPPSYVKAFVKRGKSDALDAQAICEAVQRPTMQFVPVKTVAQQGILMTHRARSLLVRQRTSAANALRAHLAELGLVANPGVANLAKLAEQALAEDALPSFARAALVIMHRQIVVLGQEISELDRQIAAWHAESEASRRLAAIPGLGVVTATAIAATVTDPDQFRSGRQFAAWLGLTPQQQSTGGKTRLGGISKQGDRYLRRLLVVGATAVIRHTKDKPTPMASWIMSGATTNCPPDAMRN

SEQ ID NO: 392384 - protein, 337 aa, unidentified
MVIKTFFMKGYKYFFGVDISKKTIDVALSKQGQLTHRQFDNDPPGMEQLMQWFRELNLQFDDVLFCMEATGLYCFPLTSFLTSHCIDIWIEHAAQIKRANAFNRGKNDKIDAQRIAAYAEKNLDRLRLWRPMSKTLEKIKHLSSLRERLVETKKRLITPIKEFEEVGDFAIARLLTKTIKSSLTAIDRDLNNIEGKIMDIVNDDDNLKQLYKLITSVVGIGFVTAINLLIHTNGFTVMKDARKLACYCGVAPFEYSSGSSVRGRTKVHFMANRKLKCNLHMASLSAVKLDADLKHYYERKVAEGKSKLSVLNAVKNKLLARVVAVVNKQELYVKKTA

SEQ ID NO: 392385 - protein, 418 aa, unidentified
MEPNRFRHYIGIDWATEAHRICLLDHNGQLCAKVSIPHSGAGLDQLLEWLASHGVEPAFAAVAIETPHGALVETLVERHFAVFAINPKQLAHFRDRYTSAGAKDDDRDAWVAASALRTDEKAFQRVTVDAPELIQLRELYRTVDELREEVQRLTSRLREQLNRYYPQMLALYSSPDQPVIWDLLELAPLPATAHQLTVTQVEAVLRKCRIRRFTAAQVWEQLCAKPLTVAEGAAAAASQHALVLVAQLRVISELRQQTLKRLASMVKRMRQTTTGSGAPSDAAIIASLPGAGILTTAALLSESSRAVAQRDVPALRAYGGVAPVTQQSGKSLKVSMRYACNNRLRNALYHFAMGSLRDPVARRHYDRLRGEGHSHARALRGVADRWVTVLMAMLRSGTLYDATRRKAWQAADAAGATA

SEQ ID NO: 392386 - protein, 336 aa, unidentified
MSKSFMGIDVHKKVCVFTDIDSEGRIIHRGKFNNNLAEVSEFASMLSPNVHLVLEPVLNYLWLLDQFEPYVGSVHVAVPHKVRVIAESKCKTDRYDSRVLADLLRTNFLPESWVPPHEIRLLRNLVRQRYHLVKTVIMNKNRIRHLLFLNGSKLAVFDIASPTARRQMQQLCLSPTIRQIIDQCLEIIAGLKQSIKEIDKQLQEQTEGNETVALLQTIPGIGHVRSVVILAEVGQIDRFRSRRAFANYTGLTPTVRASGDSVWTGGITRFGSRPLRHVLVEASINVIRESPALSRMFHRILYRGNIQKARVAVARKLAIIIYAMLRNREPFRVQPA

SEQ ID NO: 392387 - protein, 497 aa, unidentified
MPSTDVAAKATIVDAMKRKSIFKNNSQNIDAAFIEAGLPEKVLLVPLDFAKSTHYACFCDGLGRYLRQAFTVKNTKEGLDYLVERIEATRKSRAIGNKRHVIIGGEDSASYTRNFMQRLNELGYLAVRLSSCEVHRQAESVDSSTDRTALRAIAKTMLNRDARPIDGHDVYTELRGLTRQRRRIVHLSTAVKNRIHTHADRLFPGFLAKDSVLTPFSRASLELMSKPAFGAVSISRKNEKALGQLLKRAGTARSAEIAPALKQQARDSIPADKDAARLSAYILAGELQLFRSLASNLEALDQGCARLLARTPEAFIASIKGIGITLAASICAESGSLTQITRTDGLNAYAGIVPKVKQTGGPESEAKIRGRRRSFNRVLKDYTMQAGNHLYLHGPEELMQDAVRRKLAGKAVDTAMARRFLRIARALCKNHLTYLPSHLRGQNASSRERAQYILDTWPALLVKWKRLGLHEEAFAAENPLGQWRLIMQEIHDIDLPL

SEQ ID NO: 392388 - protein, 347 aa, unidentified
MDYFAGLDVSLETVSICIVNAAGDILLEKKIEAEPAAIIGVLKHFGHPLKRIGLEAGPTSSWLYSELRGIGYPAICLECRHVKAGLSAMRNKTDRNDARGIAQLVRLGWFRQVHVKSEEAQRIRMLLVNRQQLLSKAMDLENSVRGSLKVFGLRVGAVTRRTFEARVRELVMQDRSLLAITEPMLRVRQVLIEQFERLDRLCRQLARRDPVCHRLMTVPGVGTIVALTYRTGIDAPERFAKSRDVGAHFGLTPRRYSSGQTDYDGHISRCGDAMVRTALYQAANVLLHHGRWSSLRSWAMRIAKRGSVKAAKVALARRLAVVMHRMWVDGTDFRWSAAVAAAPAVCE

SEQ ID NO: 392389 - protein, 346 aa, unidentified
MTISVVGVDLSKSVFQISLADAKQHVIDRKRLSRTQFHRFLAQTEPVRLVMEACGTSNHWGRTAQSLGHEVKLLHANYVKAYVRRTKTDAADADALILADSDKSLHPIPVKPEEQQALQGLHKIREQWKRARVARICEARALLAEFGISTPAGVRGIGRKLTLVTEQAPMLIQPTLLDLIQEIGELEQRLKRVDQALAAYANSNPDVQALLGIQGIGITIATAFVARVSSIHMFKRGRSFSSWLGLTCREYSSGQTRRLGRITRQGDRYLRTMLIHGARAALMAARRKAANGKELTRLETWAVNTQARVGHNKATVALANKMARIMWAVWTRHDTFNGNDALRFAA

SEQ ID NO: 392390 - protein, 442 aa, unidentified
MTTYLYLGIDVSKGYADFTILNDKKEIVEDNFQLDDTFEGHHQLFKILTNLYDHHPDGKLFAAVESTGGYENNWFNTLHKLQSMMELSVARLNPFGVSHSSKASMNRIITDKQSARYIAEYLISYPEIVNYKVEDYFASARRQWTSIKMFTKQKTQLLNQLNSLLYIANPEILPFCRDGMRLWTLLLLEKYPTALKISRAKVTSLSKIPYLSKIRAEEIIENAKLSVASANDKITEETIIAVVKQIISLRKIIARQINLLENNVNLPDEVKLLKSFNGIGTYSAVGLMIEIISVERFQSSKKLASFFGIHPVFKVSGDGKSGFRMSKRGRKEPRNILFNITRYSIAHNPFIKEIYKNHLKKGMTKLSAMGAIMHKILRIIYGMLKNNTPFDSQIDLDNRNKDKVNNQLNKIILERRFQKHDNMAPISRRHNKVRKENEPIPK

SEQ ID NO: 392391 - protein, 447 aa, unidentified
MDKSTKEGSKKKIGHLPIINAYAAGIDVSDNEMAVALPINDYIEVVYFKCFTSDLHSLAALLKEHGVQTIAMESTGVYWVSLFEILQDHGFEVYLVNAKHVKNVTGRKSDEGDAVWIQKLHSCGLLSASFQPDNQVRALRSMARHRKNLVRTCSTYVNRIQKAMELMNIKLHTVISDIDGKTGKLIIEAILAGERDAKTLSKLRDPGIKASEEDIIKSLEGNWHQEHLFELRQCYEMYQFHQKMIRECDVQAKKLLDGMIASKSDGELPVIEPSKKRKRQYKNRISFDMTAYLKELVGVDLTEITGISELSALTIISEIGTDMSRWPTEHHFTSWLGLAPNTKISGGKTISSRIMKKKQNAGETFRTAANSLYNSKAPLANFYKRIKAKAGPGKATVATARKIAIIVYKMIQTQTPFEPQMLEKYQEQHKMYQIKQLRKRLEILEAA

SEQ ID NO: 392392 - protein, 342 aa, unidentified
MTIMIGIDPHKASHTAVAIDNSECVLDELRVRACAKQTDQLRSWAVPFPDRVWAIESARGLGYLLAQQLVAAGETVVDVPAVLSTRTRLLGSGKAQKNDPNDARSVAIAALRTDGLARVSVDEHAQVLKLLAKRHRDLGRLRGQAACRLHALLMELSPGGMAKRMNVTRANELLDRVMVDTEMAAHRVGVAREFVADLAHYEAQMKTSKARLRRAVAATSTSLTDIRGIGVVTAAMIIGHVGDVARFKSAAHFASYNGTAPIEASSGERRRHRLNPRGNRQLNYAIHVAVITQLRYPCEGREYYDRKRAEGKSAKEAIRALKRQISNVVYRSLVADARRVSS

SEQ ID NO: 392393 - protein, 401 aa, unidentified
MTATHTMNSTVANAPVLYLALDLGMREWKLAFTVGLGQKPRLKTIAARSTSSLVLEIKAAKRRFGLPEDAAVICCYEAGRDGFWLHRFLLAHGVQNHVVDSSSIEVNRRKRRAKSDRLDAVKLVQMLIRWHNGEKRVWSIVHPPSVEQEDARQLHREMIKLKAERTAQGNSINGLLAGLGLCVKVDETLPTQLERLRQWDGAKLPPGLHQRLLREFQRWQLIDRQLGELETERMAKIRDDRTPHIEKVRRLLNLTGIGDNGAWLLVYEFFAWRTFRNRRELGSLAGLTPTPYSSGQSEREQGISKAGNRRVRWMMTELAWGWLRYQPTSELSQWYQRRFGRGNKRLRKVGIMALARKLLIALWKYLEGGEAPAGAVEVGWDNKPRFRAVKRRRQKEFSQTG

SEQ ID NO: 392394 - protein, 341 aa, unidentified
MTKITTIGLDLAKRVFQVHGVDATGAVVLRKRLRREDVLVFFTQLPACRVGMEACSTAHHWARELQALGHEVRLMPPQDVKPYVTRNKNDAADAEAICEAVGRPSMRFVPVKTIEQQSVLALHRSRDLLVRQRTALANAIRAHLAEFGIIEAQGLHKLERLTQIIEDETDNRVPVEARDALSALVALVNELNTRIDAIEKRIRTWHTASKASRRLATIPGIGPIIASALTATVVDASAFANGRAFAAWLGLVPRQNSSGGKDRLGRVSKQGNGQLRRLLIIGAQAALQCSKSLRAHPWVAALLARKPRLVAAVALANKIARIAWAVMSKQEDFRGLAATPA

SEQ ID NO: 392395 - protein, 420 aa, unidentified
MTTSNSTPADVVLVAIDIAKLRNEVLIEAPGHKRRRRLLVLNTRAEHDHLIEVLQAYGRPVVCAFEATGNYHRPIGWRLAEAGFEVRLVSSLALARTREALHNSWDKNDPKDAQVILHMLRIQATQLYHDPLRAGINDVQELSKTHEAIARAKTEIQHRILTHYLPLYFPEIDRFRGNSRSDWFFAFLHAFPTPASVTALTKEEFVAAAWDVVGRKVSKTQILMDIYETARSSIGLPLPLDAPAIRMFRMVIDEARSLIRQRNEIEAQADELLRHSQDYQLLRQIPGIGPINALTIIAEAGDLRRFGHHRQFLKFCGLDLSTQQSGQYRGQTRLSKFGNARPRRTLWIAGQVAIRQRENGFRHKFERYIAKDRDNPDLRRKAMTAITAKMARVVHAVVKGGSDYRPFVEGRVPGGRTSVS

SEQ ID NO: 392396 - protein, 369 aa, unidentified
MDKVIRAYVGLDVHKESIAVAVGDAAGGVARFVGTISHDVAQLLKVLGRLGQQGDLEVVYEAGPTGYGLQRALVAAGHACQVIAPSLIPRRPGDRVKTDRRDCVRLAELARAGELKPIWVPSPEDESIRDLARAREDAVNARTQVRHQLKGYLLRHGLRYPAKTAWSKGFYRWLGTLSFDGRPAQIAFAEYQQAVQAADERVARLTEALSSSIEGWRFAPVVVALRALRGIDTVSAIGLVAEIGDIGRFAPPRQLMGYLGLVPTESSSGERIRKGSITKTGNAHARRLLTEAAWSYRFKPRIGYRAQVRQERLDEPLRQLAWKAQLRLTARFARLQARGLQINKICVAVARELAGFIWALARASAPARA

SEQ ID NO: 392397 - protein, 401 aa, unidentified
MTSVGIDVSKGKSTVCILKPYGEVIVSPYEVQHTEPDLRVLISRIKSIEGEVRIVMEATGAYHLPLLSSFKDAGFFVSVINPLAMKRYASTAIRKGKTDKMDAVRIANYGIDNWFKLVDYTLPDEVYAQLRLLGRQYTHYITIRIESKLALTDLLDRTMPGIKSLLSGKRSEEPTKDKLSDFVAEYWHFDNITKKSESQFIRSYCTWAKKKGYHASESKAKSIYALACNGIPTLPASTASTKMLILEAVRVLKEVNKTLESILTQMQELATTLPEYNTVRAMNGVGDVLAPRLIAEIGDVRRFHSGSALIAFAGIDSPPFQSGSFTGTQRKISKRGSSLLRKTGYEVMKCLKTVKPSQDNAVYLYMLKKEAEGKPKKVAKIAALNKFLRIYYARVSEVYSG

SEQ ID NO: 392398 - protein, 409 aa, unidentified
MTSNLETLHKRVAGIDVHRMKHVITVLIEDDAGNISKETREFGGFKRDLKALAAWLQGSRVELVILESTGIYWKSVYSHLENAGLMTWVVNAHHVKNVPGHKTDVGDSEWLAQLGRYGLVHGSFIPPKDLRELRQVSRYRTKESNMLAAEKNRLHKVLDDAGIKLGGLVADINGQAAQAMIDGLIDGQAPEELIKLTGRLKAPKESLLASLEGDLSARHILLLKEIRAHIHELENHLERLNAYLIEAMAPYDWAYKLLQTLPGLDEIGAAMVLIEIGDDLSHFGSADRLASWGALCPGNNESAGKRKSGKTRKGNTMLRYLLCEAANSARRTMTVFRSKYLGLVVRRGHKKAIVALAHKMIRTIYFMLTRHQPYRDSGFDYAAANVKKNAPRWLRALKQFGYWPETATA

SEQ ID NO: 392399 - protein, 307 aa, unidentified
MSEKIYFGVDVCKESLAFCGPGIAGQVANNAPGQRRLLARLPKGAHLIIEASGGYERELVRVAQQSAVQLSVVNPRQVRDFARGVGRLAKTDPIDAEMLARFGAAVNPPPDAVPTAAELVLQELVSARQQLVEQRTVLLQQQTQHLSSIVQRLDRARLKLLQRQIAQLELAIGSILEEQSALKQKVERLQQVKGVGLITAVTCVALCPELGSLSRGQTAALVGVAPYDDDSGARKGWRHIAGGRPKLRRALYMAAISAIRSNPVLRRFYQQLRQRNKPPKVALVAVIRKLAILLNHLLRNPSFLPAS

SEQ ID NO: 392400 - protein, 342 aa, unidentified
MFGARRKLALLDKETGEVQEHKLVNGDGEAERFYRALPVPARIGLEACGNSQWFIHRLQEIGHEVWIGDAAQIRASYVRKQKTDKRDALPILKLLLEDRFPRLWTPTAAMRNERQLVMHRHKLVRLRAQVKNELQHLAMNQGMQRKRKLWTAVGQQQLRELPLAGWAASRRAHLLTLLKMMDQQIAELDRAVLAAAEANPQARLLMTQPGVGPITALAFVLTIGDASRFPRGKQVASYLGLIPREHSSGGRQKLGAISKQGNRFMRQLLVEAATVAIRFDEGMRRQYQHRCHAKPKAVAKVAAAHKLAVRLYWMLRTNTGYPEVVHIESSSRVPVVGNRPKD

SEQ ID NO: 392401 - protein, 338 aa, unidentified
MIVIGVDVHKQSLTAVAVDEAGRMLDERTVVGADDGLVTWASQVSSERLWAIEDCRQLTRALERELIAAGEELVRVPPKLMAPQRRAGRLRGKSDPIDALAVARAALREPRLGRPRPDEQPFRELKLLVDHRDDLVDERRRIQQRLRWHLHQLDPTFVIVTKGLDRPVHLDRVGRWLNRRPAEVQVRVARELVARCRSLTKTIVELDHELEQHTARLAPALLEVPGCGAITAAKLLAEIGPIGRFDTDAQLARHSGVAPLEASSGRVQRHRLDRGGNRQLNAALYRIAITQARYHPAARAYLERKQTEGKSRREAIRCLKRTLVRVVFNTLKASPALT

SEQ ID NO: 392402 - protein, 311 aa, unidentified
MTLPYRYVGCDVSKHWLDVFDPAEGVPRRIANTAEATSALAGQLASSRAFLVFEATGAYDSTLRTALHQAGVPCARLNPTLVRRYAQARGRKAKTDALDAVVLADLGERLRPDPDPVPCPHRARLAALATRRDQLVTMRAMEKNRIAEAEDPLVRQDIEATIAYFDAAISRLEAEIQRHIQSHDSLRRQARLLTSAPGIGPVAAQVLLALMPELGHTNPKRLAALAGLAPFNHDSGQLKGKRCISGGRARVRKALYMAALMAARTCPNLKAFADRITQSAKARKVALIAVARKLLIRLNAMLRDEAIYQAP

SEQ ID NO: 392403 - protein, 331 aa, unidentified
MSTQNYAGIDIAKRHFVIGIHGRDKTKTETNNPKGFTHTIDYLHKHNVGLVVMESTGGLEIPLAKTLHRAGFQVVIANPRCTKNYANGFSLAKTDHLDAKMLADYAQALEIKGLVANMLYIPPSEAEEKLEALVKRRSQLVDIRAAEKNRLEQIHESQQQSVKDLIAHLDKLIAELDKDIDSNADAFGGKGQVLTAIKGIGSTTSATLLSMLPELGTVPHKRIAMLAGVVPPPNQSGDTDKKTGCIGGRMAVRNILYMAALTASRFEPTIKAFYERLRAKGKPFKVAINACMHKLLRILNARMRDYLASLQTKSERQSEQQSEQQPAPQCA

SEQ ID NO: 392404 - protein, 421 aa, unidentified
MKSTVARKLRQVPQGYLVMGVDPHKKKHAAVAITQDFTTLVKFKFDNSRGGFEMMLQRSRVEMAKTGCRGVIFAIETGGHYWRNLAYFLDERGIPFRFINQFTLKRRREGKDLNRRKNDYRDSEVAAQLLCTGEFTDSKLPQGVYAELRAAHNAYRRLVKERTRIINLIKGLLDSLFPEFTEVFKDPCALTAMSVLSTCPIPGVISGMTEEEFVAAIRAGHQGRLMRRKLRALHHIARTSIGIEASARSVSMEISFLVEKFSLIKQHIRIIERTMVRLVDETEEGKYLLSIRGLNYIAVAGLLAELGSFKQYRSAKQLIKMAGSNPTESESAGKRGSHTPMSKQGRPVLRYCAWTSVIPMLRFNSDFRAWARKRRERPVHANPLNGREVVGAALNRLLRLSFALVRKQTFYRVPEPARIAR

SEQ ID NO: 392405 - protein, 347 aa, unidentified
MSFYNNMHPYYCGIDLHARLLYVCILDQDGNTLIHKEISADPTKLHELLKPYIGDIVVGVECTHCWYWVSDYCDKIGVDFILGHALYMKAIHGGKAKNDRIDSFKIANLIRGGNFPLAYVYLKNMRATRDLLRRRMKIVQHGADLKAHVVNITSQYNLPPNKVNLKNVCARELLKSAFPEPSVQRNINLDMVILDCYAEQLSKVEWYIQAQAKQHKPVHFYLLKSISGIGPILALTIIYEIGNIDRFNSVQNFASYARLVKCKAESAGKSYGTQGNKIGNAHLKWAFSEAAVLYLRGNDNATKYLAKLQKRMSKAKALSALAHKLGRCVYFMLKHETVFDESKFLKG

SEQ ID NO: 392406 - protein, 417 aa, unidentified
MNTENYAALVALDWGESEHAFAAQADGSPVETGSMPATPECLHGWLEELHKRVGGRPVALALEGGKSAVIHALTAHPWLVVYPVHPATSERFRKAFTPSGAKDDIPDAVVLLTILTQHRSQLRPLKLDSPETRKVAGLVAARRQAVDRRTRLACELGSMLKTYYPQALELCGREPATDLALDFLSRWPELKSLKAARPATLRAFYAAHNSRHSDVVDDRLALIAHARALTEDRAVIEPAILQVKMLVDILRPLQRNIELIEKHIAEAFDAHPEAALFQGLPGAGPATAPRLLAAFGTDRSRYPEACSLQKYAGIAPVKQKSGHSIWIHWRWNAPKFLRQTFVEWAGQSVPKCAWAKAYYRQQRAAGKHHQATLRALAFKWIRILWRCWQDRVPYNEARYLASLQRQKSPLAARLAVT

SEQ ID NO: 392407 - protein, 417 aa, unidentified
MKGEKTVEVVHVRCAGLDISKKDAKVCVRVAGAGRRKTVETVTTWSSMTSQILALREHLIAERITCAVMEATSDYWKPFYYLLEDAGFDVLLVNSRHVKNLPVRKTDVADATWLAQLGAHGLVRASFVPPEPIRQLRDLTRTRTAITRERSREVQRLEKLLEDAGIKLSAVASDIVGVSGRAMLESLIAGNSDPAALADLAKRRLRSKIPALTEALSGRFTDHHAFLARVHLDLIDQHTAAIDEITIRIEQLIAPFHGFRDLICTIPGISTLTADVIIAETGADMTRFPTAAQLASWAGTTPGNNASAGKVKSSRTRPGNPYLQGALGAAAMSCAQNPRTYLGARYRRIASRRGPQKANVAIQHSILIAIWHMGTNGCLYDDPGADYFNRLHPDRAKKRAINQLEAMGYQVTLTHAS

SEQ ID NO: 392408 - protein, 425 aa, unidentified
MGKTIPVCCGVDVHKKFLIATILTGDYLIPQCKQKHFGTSYRSLLAFRQWLLENGCKDVCMESTGKYWVPVWNVLEGFVRVVIANPKWVSAVKGNKDDKKDSKWIGNLFRMGLVPVSYIPGKDIRILREFTRYRSKLVSMRSSEKCRFQNAFTVCNLTLDAVVSDMFGKSATDIENYLLNTDSVDPEHCVSLLQRSLKKKADAVVEAVEGFHMTLEQKERIRIIQGHFADIDKRIGQIDEIVSHLVAEYESQISLLCTVPGIDRRLAITIISEIGADMSEFGSSRKLCAWAGLAPGSNQSAGKKKSVKITRAGVYLKPALVEAAHAAVKSTEKQPYFRMKYERIMKRRGKKRAIIAIARMILTSIYAMLSSGEVFNPSDLQKYDMPDELKKKMTLASAKDAVKLLVSLGVVAEGSISLDSLALAG

SEQ ID NO: 392409 - protein, 354 aa, unidentified
MDKITTVGLDLAKQVMTVHAVGPDGRRVLRKTLRRDQLLAWSAALAPCVVAMEACGGAHHWARELTRQGHTVRIIAAEYVQPFRLGGKNDGNDAEAICTAAQQANMRLVAIKSVEQQAALCVHRLRQGLVEERTALLNRLRGLLTEFGVVAPLSPEKLRRELARCQDPDDPRLPPTVRQLVSEQVGALDQVEERITTYAEHIAAQARGSTVAQRLQTIVGVGPTTAAALVATVSAPQEFSNGRQFSAWLGLTPKQHSTGGKTRLGRITKRGDAYLRTLLILGAKSALQAALRKPPALRYQLQRWIVATLDRIGYHKTLVAITNKHARIIWALLVKGEDFDVQRMTPKAVVVAVA

SEQ ID NO: 392410 - protein, 379 aa, unidentified
MLADQLDYIVGVDPHRDTHALAIVHVVSGVVVAEATVLANSDGYAEALRLVEEHAPGRRAFAIEGTGSYGLGLTRFLSGRAERVLEVGRLRRERRSGGKTDSLDAVRAARSVLASERPSTPRAGGERQALQALVAAREGAVNAKRAGLCQLRDLLITTPEPLRSELRLLTRARLLQRLAAARPHGRGDAELRGSLLALRSIARRVLALTVEERELAREIETITRRLAPQLLEQPGVGPHAAAQLVLSWSHQGRITSEAAFARLAGAAPIPASSGQTVRYRLDRSGDRKLNRALHMILVTRKRTHPATIAYIERRLQEGKTDARQTAASSATSPATSTDSSNTDRPWPLDRHRSIVGPGVAPCARGRKLRRCPSCDGCNK

SEQ ID NO: 392411 - protein, 389 aa, unidentified
MSKVIMVGCDLHDRTLVIRFAIGRGKPKQASFANDSRGRGKMIQRLHEVARQHRAERIVFVYEASAQGYGLCDLMFDNQIECYVLSPTHLPKSVKSAKNKTDSKDAQMLLEQVRGFVMAGNALPTVWTPPQRVRDDREIVRARIDAAEELTRVKTQVLSMLKRRGIEKPAWYHCKWSKRFAQWLRDLASTLDAMVAPVLEGLVDRYELYRAEILRLDKAVRELARTDRYRVAHKELRKMPGIGLLTAMSFLTEMGDLQRFGNRRQVAAYLGTCPSSFESGEASDRKGRITRQGPSRLRKLLCQASWVAQRYCAETKQTYTRIRGGKSNRTKKAIVAVMRRLGIKMWHRALSCGVSSELRGRGGPEEFEQSQTGAVDSRTATPALLLAGR

SEQ ID NO: 392412 - protein, 357 aa, unidentified
MAQKISSYNSTDYEIYAGIDVDTKSFAVTFKDRENNSWSKKMPSEPKHLYNYIRNNYPDKKVICVYEAGPTGYHLYDYMRKKNQPCLIVSPLSIPKAPNQKVKTNRIDSVKLAQELKSGNIKAIRVPEGPYRDLRYLVESRENYAKMQRIAKQRIKSLLLHTNLNTQLIDADKHWSNRYIKQISDLECSYGVRTRLNMLLVDLEYARVQTLNILNNLKKFFKEHKTLNNYRRYLESIPGIGFKTASSILGRIGDPRNLNNPREIGSFFGLVPKEDSTGDSINRGSITHMGNGILRSLLIESSWIAIRKDKELEQFYHRIRSRNNPKVGSRIAITAVARKLTHRIYCVLKEERNYNVH

SEQ ID NO: 392413 - protein, 330 aa, unidentified
MNGKLYGGLDIHKESITGCVLDEQGTLVREHTFPPTKKAVESFVTGLSNATTTFAIEACGLWQGAYKLFSDLGFTVKLANPKKTHDIASNKKTDKVDARTLADLLRTRYLPEVWIPTDEIIELRDITRHKSRLTRMRVQIQLKIKSTLLRRGIPYSKNIWTKTALKELEKLDPQLKSLIHLYQVLLDEENVVKKRIEVIARNKKETALLLSLHGIGALSALIIYAEIGDVHRFDSPKALVSYAGLCPGIYQTGGTQRTVKNTMVNKWLKWILYECSGRAKMIDPRFQRYFSQMEQKTSYQIARRATARKMLTIIWYMLMKNEPYRYSISS

SEQ ID NO: 392414 - protein, 391 aa, unidentified
MIYVGIDVSKDKHDCFITNSDGEVLFKAFTITNNLDGFNELYQKIESVMEDVTKVKVGLEATGHYSYNLLGYLIDKGLAAYVINPLHTNLYRKSLSLRQTKTDKVDARTIASMLMSDVNLKSYSDTSYHNEELKSLTRYRFDKVKERAKLKSSVSRLVCILFPELEKLVPTLHMASIYAMLSEFPDAKHVANAHLTRLTNLLSEASKGRYGKDTAITFREAARASIGSSMPAKSLELKHTIKLIQELDSEIDEIENEIKIIMDEINSPILSIPGINYRMGAMIIAEIGDFSRFDSPDKILAYAGFSPSTYQSGQLDGAYAHMEKRGSRYLRYALYNAVKYVCHWDPTFAAYLAKKRAEGKHYNVAISHAVKKLVRVIYHLEKSNQQYIKTA

SEQ ID NO: 392415 - protein, 414 aa, unidentified
MLKIVYPICCGMDVHKSFVVACIATTNERGVTTYKSKRFSTFTGDLRRCAAWLAENNCKDVCMESTGKYWIPLYNILERTCNIVLAHPKYVKAIRGKKTDKRDAKWIADIFKHDLVAGSFIPPADIRQLRDLVRYRWKLTSFTTGEKNRAQNCLTVSNFKLDDVFSDVFGKAAFAITTRILNNPAEKITDVSNFRTKGMKATDEQVLAAVDGAMCEEQAEKLRIIRSHMDSLELCKANLESLILTTAEKYLPQLNLVMTVPGIQSFAAIGIISEIGVDMSVFPTSKHLCSWAGLTPQNNESAGKKKTTRISRAGAYIKPLLVQCALNAVRAKKFPEVRNRYLALKKRRGHKKAIIAIARMLLTAIYNILKKNESYNPELYRQTDRPPAHREVSVAEAIFILQRQGYLVAAPPTP

SEQ ID NO: 392416 - protein, 423 aa, unidentified
MKVVYPICCGVDIHKTFFVATLITTEGIQPKYQKKRFSTFNNQILAFKAWLLENNCRDVCMESTGKYYIPVYNLLEDSINVTVANPKWVRAVKGCKDDEKDSKWIGDLFRLGLVPGSFIPKKDVRILREYTRYRFKLMSCKSSEKNRYQNVFTVCNVALDAVVSDMFGKSASSITDYIVNSDTFDSDYCISLLQKSLKKKANEVVESIDGFQMTDSQKYRAKMVRGHYDYLVGQIEDLDNALDVLAKPFESSINLLCTIPGIRRLSAIMALSEIGDDMSQFGSSKRLCSWAGLTPGNNQSAGKKKSVRINRAGVYLKPTLVQVAHAAVKDNKNTYYKVKYEKLSKRRGKKRSIIAIARMILTAIYHMLSTGEVWNPCDLNRVDMPDDLREKELQKSLRRAVKLLTSHGVVEPDSILIPVLSSA

SEQ ID NO: 392417 - protein, 347 aa, unidentified
MEQIIRIGMDTSKHFFQLHGVNAAEQPVLRKKLRRKEMVAFFEKLPPTVVGIEACGGSHHWARLLGSLGHEVKLLPPQYVKPYVKRGKNDAADAEAVCEAMSRPTMRFVPIKGAESQATLMLFGMRDRLIRNRTQLANAIRGYAAEFGLTAAKGMYKVESLLERIAADENLPELARALFALHAKEYAQLQAELETIEAKLMAWHRENECSRRLAQIPAVGPIVASLLTMKTPAPELFRSGRDFAAWIGLTPRDHSTAGKTRLGVITRAGDETLRSAMVVGATSLLRQVRAGRGKNALPWLVNLLKRKPPKLAAVALANKIARIAWKMMVTGENYRKPAVQPDLACAA

SEQ ID NO: 392418 - protein, 417 aa, unidentified
MSLLDPRTKFERYVAVDLHKDYVVVGGVNARLEVILVPRRIELVAWPRWAKANLNRQDALVVESTSNAWDFYDQVAPGVGQAVVANPRLVKLIAAGRVKTDKVDTLALAKLLATGFIPTVWVPPLDVREARGLLAHRRRLVRNRTMVINRLQSVLQRHNLAGPEGEPFSQANRAWWDALSVSPTEQLRVRQDLATLEHLAQQITEVDAEVVRLSTQAPWADQVTYVMQLPGFSVLLTMTVLAAIGDVKRFAHAKPLVGYAGLGASVHDSGQTHRTGHITKTGRRELRWALVEAAWSAVRYHPHWKAEFERLARRMPHNKAIVAIARKLLVALWQVLTGHLADEHAEVKMVATKLMRWSWQLTDEQRGGLTSRQFIRYHLMRLQLGDNLTHIRYGNMPRRIAPVEEVLALNPERRPAG

SEQ ID NO: 392419 - protein, 432 aa, unidentified
MNPISVSSPPSKVAAWVGLDWADQQHLVCLYDVGTGQTELSCLEQKPEALQSWLGQLRQRFGGQPVAVVLEQARGAVIYALLSADFLVLYPVNPQSLASYRKAYVTSGAKSDSADAVLLMEMVRNSPQRFRSWTPDDADTRSLQLLTQNRRQLVDQCTAFTNQLTGWLKSYYPQALELAGELDSLQACDFLEKWPTLEALQQARPAQIRKLYLDYGKPRPESLEQRLEQIRRARPLTTDLAAVLSGTMMVRALIEQIRPLRATLERFDQQIAALFRKHPDRLLFESFPGAGAVLAPRLVAAFGTDRDRFESAQQIQQLSGIAPVTEQSGKQRWVHWRWACSKFLRQSFHEFADHSRKWCGWAKALHQRLRRAGKGHHAAVRVLAFKWIRILFHCWKTRTGYDEQIYLKSLEKRNRTLWAEAQALPPRKKKAA

SEQ ID NO: 392420 - protein, 341 aa, unidentified
MKVMAGIDLHSNNAMCGLMDMQGKRLAHRKVGCKLEEVLEVFEPYRRRIDTVAVESTYNWYWLVDGLMDQGYKVALANPAQIDQYDGLKHTDDKSDVFFLTELLRLGILPTGYIYDRQTRPVRDLLRRRLNLVRQRTALILSFKNLHVRNTGTDLGLSRVKSLGVLEGKNLFEHPCDRLIAEEQLTVMRQLDRSIERIEKAVLKVVKELPCYRRLQTIPGIGMILGLTITLETGEIKRFATAGDYASYCRCVKSQRWSNQKSKGKNNRKCGNKYLAWAFVEAANGALRSDGQCRKFYERKKAQRNGIVGIKALACKLSKAAWHIMSRGVDFEPERVFGGRT

SEQ ID NO: 392421 - protein, 384 aa, unidentified
MKDATRFLGLDVHADTIAAAYADDGRDGEVRALGIIPNEPAAIRRLVQKLGVHRLRVCYVAGPTGYALYWQLAQLGIACDVVAPTLIPMKAGERVKTDRRDAVKLARCHRAGELTAVWVPDQAHEALRDLVRAREAATEDRHRARQRLGKFLLRLGRRPSKAHASWGTAYVEWIRGQQFEHGAQQATFVDYLSEVDHASERIKRLELAIDDAVAQAAPTVKAVIEGLQALRGVAKLTATTIAVEIGCFSRFESAKQLMAFCGVVPSEHSSGNERRQGALTKAGNAHVRRVLFEAAWCCRHRPTLCVALKRRQRLVSEATRQVAWKAQHRLYRRYVALAGRRKPTQKIVGALGRELLGFIWAIATHIERERQLAIHSSTQEQAAA

SEQ ID NO: 392422 - protein, 319 aa, unidentified
MMEQPRFVGLDVAKATLDVAVRPTGACWQVANDEAGVAALTARMRALQPALLVCEVTGGFERAVVAALAAAGVPVVVANPRQVRDFAKSTGQLAKTDRLDAGIRALFAERVRPTPRPLGDATTQLLDALLTRRRQVLEMLVAEKNRLGFAPRPLHRGIQRHIRWLERQLDDVTGELTAQIEGSPVWRAKDDLLRSVPGVGPVVSCTLLGELPELGTLSHKQIATLVGVAPLARDSGKLRGRRMVYGGRAPVRTALFLAALCGRRWNPQLKVFYERLIAAGKPKKVALIACARKLVTILNAMVRDNARWRAPDLAVQHSC

SEQ ID NO: 392423 - protein, 341 aa, unidentified
MSDLALVGIDLGKHTFHLHGQDKSGRELFRKKLSRQQMMRFFANLSACTVVMEACAGAHFVARELTAVGHQAKLISPQFVKPFVKGNKNDFIDAQAICEAASRPTMRFVSPKTEAQQTLSVLHRLRESLIRDRTKAVNQMHGFLLEFGISLPQGLAVMKRLSDVLAEHELPVRLTMLLQRLHDHFVYLDEQVKGLDKELAGQLADDDLGSRLLSMPCVGPITASLLAVEMGDGQQYGCSRDFAASVGLVPRQYSTGGRANLLGISKRGDKNLRRLLVQCARVYMQRLEHQKGALADWVRSLLMRRHSNVVACALANKLARIAWAIAAHHTQYKAGPDALNT

SEQ ID NO: 392424 - protein, 373 aa, unidentified
MASILYIGMDVHTTNFSVCAYRIGNEEVFGETNFTASSENIAAYLDTLRYNEEDPEKIKFICGYEAGCLGYSLYRELKAKGIDCRILAPSTMATSPLDSRKKNDRMDAQRIAKCLAFGTYRPVYVPDEQDDAVKEYIRMRDDANAELKRVKQQITTFCIRHSKLYDGVKHKWTKEHRTWLKKLKFENAVLREVLDEYLLRLQQIEEKIATYAKRIEEFANTERYAETVKKMGCLKGIATHTALSMAAEIGDFRRFPTAQHFSSYLGLTPGEHSSGNSQHTLGITKAGNSHLRSLLVEAAQCYNRGAVGQKSAALKARQAGNSEAIIQYADRANERLRRKYVRMTMRSSSNVAKTAIARELACFIWGIMTDHIS

SEQ ID NO: 392425 - protein, 332 aa, unidentified
MENFYFIGVDVSKKKLDFCVMFEGKVVHEEETANHQNAIMALLHQFEEDYGIAGGQMLVCAEHTGQYTFPLACACKAVECRLWLENPAEIKYSSGVQRGKNDKVDAKRIAIYAKRFQDRVQYYERPTEDIERLKQLESERTLYVTDLAKYKGQMKDQKEYMPKSLYERKMKRLQALMDDLEEAIQSITDEMDEVIASCPVLFRQRELLMSIDGVGRVVATNMIIATEAFTRFDDPRKFNCYAGVAPFSYSSGSSQHSKARVSHRADKVMKRLLHLAAVAVTHRIGGELKKYYERKVAEGKNKMSVINALRAKIVARMFAVIKRNERYKPILS

SEQ ID NO: 392426 - protein, 344 aa, unidentified
MTYYTGIDVSLRSVSICVVNDKGKVCLEAKVAAEIDAIVDRLRRFSSDVKSVGFEAGTLTQYLTYGLQAAGFEVICLEARQVSVTLAAMRNKTDRNDARGLAQILRTGWYSRVHVKSVHSHQVRALLASRKAILKKCVDLENELRGLLKVFGIRLPSRVGHGSFDTELRDTVSGDEMLACALVPLLDARTVLYKTYLKLDNAVKGLVRVDPICRRLMSIPGVGPVTALTFKAAVDDPSRFKSSRTVAAHFGLTPRRFQSGELDNPVHISRAGDADVRSALYVAAHSLLTRNAQWSTLKAWGVGIAKVRGHRRAVVAVARKLAVILHRMWIDGSEFRWGPAPASA

SEQ ID NO: 392427 - protein, 419 aa, unidentified
MDNNLNKVCGIDVHKKFLVATMLCRDGTSTTERFSSSPQELFRFRDWVIENGCQRVAMESTGRLWIPIYVVLEGSTEVILANPYKIKHTPGKKTDTKDSEWIAQLCLNDMIDPSRIFPKGDRELRDLTRARESYVRDLTKLKNRVHQILDSGFIPISSVISDLFGKTGMYILHCLVMGKTTDEIIEHLPATRLLKKSDQIREALLCKLTEAQLLLLKGILEIMASIEKRIADIEKEIVSRIRHRRSHLKIIMSVPGIGFIAAVTILAEIGNFMDFKKPEQLAAWAGLVPSVYQSADKLVTGKITKHGSRHLRWILVQVAQSIAHLNNSYLKTFFLRIRGRKGYNVAIVAVARKLICILHHLLVNNEPYIENGVSPERKISFQGSIMTLDDFLNQMDTIVNMNRCKFSIGWMDMGGSNVD

SEQ ID NO: 392428 - protein, 365 aa, unidentified
MNAIHYIGFDVHKKSISFCVKTAAGQIVEEGTLVAERTALRSWAAARKRGWHGAMEATLFSAWIYDTLKPYAKQLSMGHPAKMKAVSAGKNKSDRIDARMIADLLRCNLLPASYVLPPQLRDLRRLLRYRNLVVQQSVRMQNKMAGLLMESGTAFNKQKLHQKKYFADLMKSLEEVPESVKDLLRMSRGSMEMFQSTQKQLVERLLSEPALQQRVERLMSIRSVGPITALTWALEIADPHRFASIADAVSYCGLSAAFRSSAGKQQRGPISKQRNAWLQPVLIEAAKLAPRWNPQLAALHAHALQRGHPNRATLQVARKLVAYLLAVDKSGQPFQVHTPPPPASTKTKRKTARKNKKAVALTPAA

SEQ ID NO: 392429 - protein, 457 aa, unidentified
MARKRKNNKKISAPVLHCLNPNAAGVDVGATEIYIAVPVDRDPQSVRHFSTFTEDLHAAADWLKACNIETVAMESTGVYWIPLFQILEARGLQVFLVNARHVKNVPGRKSDVSDCQWLQYLHSVGLLRGSFRPEQAVCTVRSILRHRDSLVQMASSHVQHMQKALDQMNLQLHHVISDITGVTGMTILEAILAGERNPHTLAALRDGRVKATADTIAKSLVGDYRREHLFTLGQSLAAFRHYQELIGACDKEIEQYLETLESKADPPEGSLPESQEEQKPSGGEPRFDLQSHLYRIFGVDLTLIPGINVLTTQTLLAEIGPDLSHFPCAPAFTSWLGLCPDNRVSGGKVLSAKTRKVKNRAATALRMAAQSLHRSQSYLGHFYRRMRAKLGAPKAITATAHKLARIIYHMVSTRQAYDETICVQNEVQNRKRLEARLRKQARDLGLEIISAKTGAVG

SEQ ID NO: 392430 - protein, 373 aa, unidentified
MPKYSTAFGMDVHLRSTTVCALDADTGEAVTRRFPGNPWGEIAGWMDGFPGPSLAAYESGYPGFAPQRELAGLGVECVVAAVSKIPRSAADSASKNDRNDAARMAKAILAHDISPVWVPSPEVEGIRDLAGAYDGATARLVAAKQRLLAFLAKRGFAYGGTTPAGNPRKYWTYDFLRWLDKVRPEDDGGVRTLAALRNEVEAAAEARADLLSEYRAAVDASPIAAEVAALQSIKGCAFALAAAFSAEVGDFTRFRSGRQVTAYFGLAPSQRSSGDSVRLGGISGAGNALVRKLAVEGSWCYAAARHQPKLMPRDTGVPLEIRMHGRKGSERLLRRREEMLARGMPAAKANAATAAELVRWLWALGMMCREGAE

SEQ ID NO: 392431 - protein, 352 aa, unidentified
MSEKVIPEIAVVGIDIGKTSFHVIGLDRRGAVVLRQRWSRGQVEIRFANMPPCLVGMEACVGAHHLSRMLRALGHDARLMPAKYVRPYSKGQKNDFRDAEAIAEAVQRPTMKFVATKTAEQLDLQALHRVRERLVSQRTGIINQIRAFLLERGIAVRQGRLFLRGELPRILAAPSDVLSPRMTRMIEDLVADWRQLDERIERLSNEIELLARNDAGCERLMSVPGIGPVISSAMVAAIGTGDAFSKGRDFAAWLGLVPRQMSTGDRTILGSISKRGNRYLRALFVQAAWVVLIRQKNWERHGLKPWIEAARKRLHHNVLAIALANKLARIAWSVLAHGRGFEATFAAQAKAI

SEQ ID NO: 392432 - protein, 338 aa, unidentified
MKLYGGIDLHSNNSVLVLIDDEDRVVVEKRLKNDLGLMLGELAPYRKKLTGLVVESTYNWYWLVDGLMESGYRVHLANTAAIKHYEGLKHTDDRHDARWLAHLLRLDILPEGYIYPREARAVRDLLRRRHRLVRERVSNLLSIQNQFARLGMSGFSAERLKRLQDADLEGLIIDVNVRSALAANLALVRCLNLQIERLEREVLAQVKLAAQFAPLMSVTGIGKILALTIMLETGEIGRFAKVGHFASYARCVDAKRLSNEKKKGSNNAKCGNPYLAWAFVEAANFAIRYSPRVKRFFQRKCAKTNKIVAFKACAHKLARAAFHVMRDRVAFDEARAFA

SEQ ID NO: 392433 - protein, 346 aa, unidentified
MKILALDLGKYKTVGCTYESESGAHQFQRTFTTPADLRRLVQEVRPDRVVIEVCSIAGWVCDLMGQLGTEVQVANTSDDAWRWRKVKQKDDRRDALKAARLSAVNQLREVYIPQTEVRQWRALITYRQHLVGRRTKIKNHIRDLLVREGQLLPRAGKCWTKLGQDRLNSMARPLEEVGATELWRGELWEELQQLQMIQERVASVEEKLNALGAADKRVQLLRTIPGVGPRLSEAIVALLDQPQRFRKASQVSGYIGMVPKAFDSGESERRGRITRQGNRLVRSLLVEVAWVGLRHNRWLRQTYLRLSGGKKARKKIAIVAVGRKLLVRCWAMLRDNRPWSWQPQIT

SEQ ID NO: 392434 - protein, 343 aa, unidentified
MDQYVALDVSLQKTAVCVLNASGSVVIEAELPSEPAALTAFIQTHAPRAARVGLESGPTSPWLWHSLKAAGLPVVCMDARHAHAALSVRPSKSDRNDARGLAEMVRMGWYREVQVKSLAAHERMALLGVRRRLVDMRVEIDGQIRGILKTFGLVVGSGNKGAFAQRARMLVQDHPVLSALVDKLIEVRAVAVAKVAALDKEIRGFVRDDPTLRRFMTVPGVGPVTALAFRSTIDEPDRFKRARDVGPYLGLTPRRYQSGETDRQGRISKCGDRFTRTCLYEAANVLLTKVQRWSPLKAWGTRLARRIGSKKARVAIARKIAVILQCIWTDGTEFWWTKEPATA

SEQ ID NO: 392435 - protein, 343 aa, unidentified
MYYIGLDVHKKTISYCVKDAAGCVHGEGKINSTRRELDAWVRTLPWPRTIAMEATIFTGWIYDHLLPHAEKVKVAHPLMLRAIAAAKRKNDRMDAAKIADCLRCDFLPECHMASTAIRDRRRTLRYRNLVVKQMVQMKNRVSGLLMETGVSYSKPRLHKVGYFADLMATNQEIHDCIRPLLRLSREHIQRAQKLDYALVSSLERDPLLKERLRRLRTVPGVGSITALTWALEIGDFTRFRSIKEVISYCGLCGDENSSAEKVMRMPLSKQRNKHIQRVLVEAAKLAPRECHELAVVRQRELERGNPNRATLAVARKIVCYLLAVERGQRDFVPAEEFSRTAAA

SEQ ID NO: 392436 - protein, 316 aa, unidentified
MNTEPVYVGIDVAKASLEVAVHQSADRWTVEYTDPAVATLVARLTALTPSLIVLEATGGLEVPLVGVLAAGGLPVVVVNPRQVRDFAKATGRLAKTDTLDAAVLAHFAAAVRPPVRPLPDAATQGLAALVTRRRQLVDMLTAERNRLSCAPKVLYKELQAHLRWLERRITGVDADLDQAVRTSPVWRAQEDLLRSAPGVGPVVARTLLAQLPELGTLSHKTTAALVGVAPLNRDSGRFRGRRQVWGGRAAVRAVLYMGTLAAVRCNPVLRAFYLRLRAAGKLPKVALTACMHKLLTILNAMMKHQQRWDPNYAPTT

SEQ ID NO: 392437 - protein, 381 aa, unidentified
MHPEITRTLNDTPQSQYLYMAIELSNAKWKLGFTIGFGQAPRLREVHARDLMALIQEVSLAKRRFGLSENALVRSCYEAGRDGFWLHRFLHAQGVSNLVVDSASIEVNRRKRRAKTDRLDVGKLLTMLLRYYQGEEKVWSIVHPPSPEDEDQRQLHRELNSLKTERTHYINQIKGLLASQGVAFQVQKDFLTRLERVRIWDGSPLPAALQARLKRDHERYELVQRQIHQLAGERAEDIRTSTAPAVEQVRQLLRLKGIGNESAWLYVMEFFAWRDFHNPREIGSLAGLTPTPFASGESSREQGISKAGNRYIRAMAIEIAWAWLRYQPQSTLSLWYQERFARGNSRTRRIGIVALARRLLVALWKYLDQGTLPQGACLKSA

SEQ ID NO: 392438 - protein, 365 aa, unidentified
MKDLLEISCGLDIHKEKIVACILTGPLGKPTHSEIREFTTLIPDMLALRDWIISENCHHIAMESTGIYWIPIYEILEDAFSGDITLLVVNARHMKNVPGKKTDIRDSEWISTLLRAGLLNASFIPEKRIREFRDLNRYRKSIIRDITSQKNRVEKFLQSSGFRLSSFISDIFGASGRNIILHLMEHGQIDKISLDSYLKTKTRKRIDEILMSVNGTLSEHQKSFLKILMCHYDSMKEHLIEIETHLQEDMLPFALQIEQLNTIYGISTTASCAIIAEIGTDMKPFKTAEHICSWAGLCPGNNESAGKRKSTSITKGNPYIKSMLCEIAWVIAGKRNTYLSAWYWRIKQKKGARKAIVAASAAEDE

SEQ ID NO: 392439 - protein, 341 aa, unidentified
MEKHFYFIGLDIAKETFVASIYHTPDRPVLTKENFSNNPQGYKELIVWLQDNQINTTNCHICLEATGVYSDGVAYYLSAQGYRVTVEPPLRVKRAFHPAGHKTDPVDSRQIAEYAYRFSDRLIPWQPKAELLEKIRQLLSVREQFTKQKVALKNARDAYQRQKVQVELIQKAHQETLAQLEKQITRIDQELDRLMKENPDLSQKFHHLKSIPGFGLLLSAHLLVMTENFTSINDYQRLAAFVGIVPYQHQSGTSILKKARIRHYGPRACRKLLRLAAQSVATHNMTFRKYYLRKLAEGKAKALVLNNIANKLLKLACALIRDNSRYIKEYHSFHPMYVKGT

SEQ ID NO: 392440 - protein, 312 aa, unidentified
MGDKPIVGVDVSKEWLDLCLAGQTKVERIANERAAIAGWLRRHEPGLLACEPTGGYERTLLTVARDLGITILRAHPNRVIAFRTSQGIKAKTDALDARLIAAFAQDQVARGKACPQIAGNEALRALAARRRQLIAMLQAERCRLALAMPGEVRESLEVLIGALKQNLELIEAKLAQAIAADPQAQRLSQLLRTIYGIGPVSAATLISDLPELGKLNAKAIAALVGLAPQTRDSGKARYRAPTGYGRPHIRQVLFNAARAAIRCPSPFKTFYERLVTQNKRPGKVALLAVMRKLLVTANAVARDQQPWKHYTA

SEQ ID NO: 392441 - protein, 337 aa, unidentified
MKFSGIDLHSNNSVVVVSDEEDRIVYQKRLPNNLEQIVAALAPYREELVGVVVESTYNWYFLVDGLMDAGYRVHLANTTAIKKYEGLKYSGDFADAAYLAQLLRLGLLPEGYIYPREERAGRDLGRKRMQLVRCQTMQILAIENILARQMGGRMSGNQVKRLTAKQVEGLGFVPDVALAVEANRAVSETLQEQIEVLEKRLKERVKLRPEYRLLKTVPGIGETLATTIMLETGTITRFASVGNFSSYCRCVDSRRESNGKKKGEGNAKNGNKYLAWAFVEAANFALRYCPEAKRFYERKKRKSNRIVAIKATAHKLARACYHMLREQKPFDVQRCFV

SEQ ID NO: 392442 - protein, 463 aa, unidentified
MARINKGKMHKKPIHSLKAIQPDAAGIDLGSREHWVAGPPLKDNTPNVQRFGTTTPELLRLADWLKEQKVKTVAMESTGVYWIPLFEILDSRGFEVILANARQVSHVPGRKTDMLDCQWLQLLHACGLLRGSFRPSDDICRLRALIRERNTMIDQRSDWVRRIQKSLDQMNVCVHHAVSDITGVTGMAMIRAIVDGERDPRTLARMRDRRCQKSEEQIAEELTGNWRPEHLFNLRQALKMYDQFCQTVTEYEAEVLAYIKTLQPGVDDDQSAPPPVSTSKARNIAKKGQEPMRQALYLLTGFDLATIDGIGVDTAAVVISELGLDFSTFPDEGHFVSYLRLAPNLSISAGKKVPSKLKGTTTSRVATALRMAALALRNSKTALGAFYRRISRRKGASVAVFATARKLAQIIYRLVCHGQAYIDIGAKAYEAQFNNRRLKYYTKALKDMGYKVKPLAAADPHAA

SEQ ID NO: 392443 - protein, 466 aa, unidentified
MSTLQPRPKTLRVEGLSTIHPNAAGIDIGADEIVVAIPPDRGDDPVRAFCTFTPDLHALVDWLLACGIDTVALESTGVYWVPIYELLEQHGIVPYLVNARHVKTVPGRKSDWNDAQWLQKLHALGLLAASFRPDGEIVALRTLVRYRSELIQHRAPHILHMQKALQQMNIQLERVLSDIMGVTGQAIVRAIVAGERDPLTLAQMRNAACKSSEETIARALTGSWKAEQVFVLTQALVIYDVYTAQIAVCDEQIEQYVQQMESRHTPDAPLPDLPAAKKKSKTKNAPAATTRAQCARIVGVDLVAVMGLSASGVQTILSEIGTDMSRWPTVKHFCAWLGLAPRNDISGGKVLRSRTQKVVNRATQAFRQAAQSVSRSDSALGAYYRTMRARKGPQQATVATAHKIARVVYHLLKYGEAYEGESAEQFEQQRQERERRQLERRAQKLGFTLTPAATSQSEPIIEPGPH

SEQ ID NO: 392444 - protein, 589 aa, unidentified
MKYTQNEKILQVTEDTLIAGVDIAKESHYARAFDYRGVEYGKYLRFENNREGMTEFLNWAKDLMERHKKNKLIVGMEPTGQYWLCFAQYLKDNNIKVVLVNPFHVKRSKELDDNSPTKSDKKDPKTIAMLVKDGRYVEPIIPEGVYAELRVAMDIKDRLNKQIGMIRNQITRWIDIYFPEFNTVFSDWEGKAALITLKEIPTPEKIAEKSAGEILSIWKKEVQRGVGKKRAIKLIETAKESVGKKQGIKMAEYEIKTLIEQYEFLKKQIEEVEKKIEELIVEIPGVKELLEIKGIGINTVAGFIAEVGDIEKYEHPKQIQKLGGLNLVENSSGKHKGETTISKRGREGETTGSIITVKTASGAINNFKIIGVIKFDNGFLSGIVNSDDFPVTLFIPLTTLQNISGTGNKVDVLYFSTTKKENLKQISDKIIKILELNHNNKDKYIAQTMKDIQNIINNVLSVVSSVLLVIAAITLIVGGIGIVNILLVSVTERTREIGIKKALGAQKKDIIMQFLAESIILTGIGGVIGIIFGILAGMIISHLIKIPPTVNFKVVIMAFLGSIVLGIIFGVYPAKKAADLDPIEALRYE

SEQ ID NO: 392445 - protein, 381 aa, unidentified
MKPTIHATERNPQPTLYLAFELSDQDWKLGFTIGLGQPPRQRKIAAGDTTTLKQEIALAKQRFGLPAAAPVVSCYEAGRDGFWLHRFLESEHITNLVVDSASIEVSRRGKHAKTDRLDVEKLVTMLLRYHGGESRVWSVVQVPSLAAEDQRHLHRQLVALKGERTRYVNRIKGLLVGQGIHLSVDGEFLTHLPELRLWDGAPLPAGLQARLQREFTCWEFVHRQILELEAERRTAIRESQEPCMAQVRQLLQLKGIGENSAWLYVMEFFGWRDFHNRREIGALAGLTPTPFQSGGEDHEQGISKAGNTLIRAMAIEIAWGWLRHQPDSTLSKWYQERFGAGSTRLHKIGIVALARKLLIALWHYLESGELPEGAALKPTAA

SEQ ID NO: 392446 - protein, 321 aa, unidentified
MKSAPKPIHVGIDVAKESFEVGLGAGGEVCSFANEDKGFDALLLRLKEFDVSLVVMEATGGYEAQLACALQAAGYQVAVVNPRQARDFAKSMGYLAKTDRIDAAALSEFAQAIDGHPQRARFVHPLPDPEREQLAALVTRRRQLVEMRTAERNRLCLGHRSARKSIEAVIKVLQRQLDDIEAQMARHVKEHHADLAALLSSAKGIGDSSVATLIGELPELGRLTNRQIAKLVGVAPLNRDSGAQRGKRTIFGGRAALRSALYMPTWAAIRYNPAIRAFYQRLIAAGKPKKVALVACMRKLLVILNAMVKSGKHWDNSIYNA

SEQ ID NO: 392447 - protein, 412 aa, unidentified
MTATNQFAAHVGLDWADKKHDVCVQFKNGERTFHVIEHTPEALDVWLTELHQKVKGRIAIAVELKKGPVVYALQKYPFITVFPVHALSLARYRQAFSPSGAKDDPQDAELALELMLRYPQKIKAIEPDNADIRLLQQLVEQRRQLVEDKRRFVNRIINTLKQYYPQPLEWFSHRGSLLLCELIIRWPSLQQLKRARRDTIRNFLNAKGGRAMALTEQRVASIDNAIPLTTDPSVIEANALMATALATQIKVVSEIIKTYDERIETLFDTLPDAELFKSLPGMGPCMGPRMLAALGDNRDRFNSAEEIQNYAGIAPVTERSGQKSWVHWRWQCAKFVRQTFVEWAAKTVNSSYWARLYYQGLREKGKSHQSAIRALAFKWIRIIYRCWKARTQYDEAKYLLALEARHSPLLKP

SEQ ID NO: 392448 - protein, 345 aa, unidentified
MDYYAGIDVSLDQCSVCVVDGSGRIVRELKVSSDPDALVAVFTAAEVSLTRVGLEAGPLSQWLHAGLVKAGIPAVLIETRHVKAALSAMTVKTDRNDARGIAQLIRMGWFRPVHAKALPAQEVRALLTARKQLQSKLLDVESSLRGILRGFGLRIGTVGKTGFAARVRELVHGQLTLERVVEPMLRAREALRIEFAKLHRELLRLVRSDETCRRLMTVPGVGPVVAITFTSAVGDPTRFAKSKMLGAHFGLTPKKYQSSEVDRTGRISKVGDAMVRTALFEAATVLLTRTTRFSALKAWALRVASSQGLKKAWVALARKLAVVLHRMWIDGTTFRWSAAPRAVAM

SEQ ID NO: 392449 - protein, 400 aa, unidentified
MLSIGIDVSKGKSTVCGMKPGGEIVYTPFEVQHTREGMSELVSLLRGSGEEVRVVLESTGSYHCPVVAALLENGIFVSVVNSLRMKRFCSQSIRKVKTDRIDAMQIALYGLAFWQELQPTRLPEDTYRELQLLARQYYQMTSILIKAKVDFNALCDQALPGMQELMSDHAGRHKLSDFVLRYRHTTHILEMGETRFRKDYCKWAEKKGYRNCERMAVLIFATAQNGIPVLPDAPSTQIVITEAIRVLHTVEASRDAILTQMQALAKTLPEYSLVREMPCIGDTLAPRLIAEIGDVRRFHSKRALIAYAGIDAPPYQSGKFCANNRHISKRGNRYLRKTGYEVMQSYVMHKPANDPIFTFIEKKRGEGKSGKLAMVAGLNKFLRVYYGKVTELYRSLPTIE

SEQ ID NO: 392450 - protein, 365 aa, unidentified
MDTHKKQHKVALHYPCQEEVFEFTIANTVRDINKMVKKVTKEAPGKVEFCYEAGVCGFTLKHRIEQFDCKCSVIAPSLIPRKPGERVKTDRRDAKKLLMLFKAGLLTEVHTPDEKQEAARELTRLRETAKDNLKRVRHQLLKFSTRYGYVYREGRHWTQKHISWLRAIEFPDPILTKVFENYFNQMIYCIGRLENLDKEVELLANSEPYKQIVGLLCCFHGISTLTAITVITEIFEFGRFESPRHLMSYLGLTPSESSSGEKQKKGAITKAGNKRIRRLLNETAWHYRHKYVPSKVLKKRREDQPQWAIEIADAAGRRLSRRHRHLINNGKIPCKANIAVARELAGFIWFLVTQYNARKNSEVAA

SEQ ID NO: 392451 - protein, 350 aa, unidentified
MFIIGCDYHPSVQQIAWVDTESGECGELRLKHCEAAEQFYRELKKKGVSVRVGIEATGHSRWFERLLGELNYELWVGDPAQIRAKRVRKQRNDRFDAQHILKLMLENNFPRIWVPTPENRDVRQLVLHRHRLVGMRTRAMNQLQAIAMNEGIRRKRGLWTEKGRAQLESLRLPPWTTRRRQELLELLDRFDPSIDQLSQAIEQEAERMPEVQRLQTHPGVGPITALAFVLVLGTPDRFGCGKQVASYLGLIPCEDSSSDSWRLGHISKQGNALLRYLLGQAAQSVARCDEQWRHQYAHLARRRNKAIAKVAMARKLAVRLYWMWRRQWDYQQLKKFGSHVGQPVTGHGVQ

SEQ ID NO: 392452 - protein, 358 aa, unidentified
MQPMLAGQVDYVIGVDTHRDTNTTAIVEAATGGVVDDLQCPTDAMGYKRTYAFATKHAPGRRVWAIEGTGSYGSGLTTFLLERGEWVVEIDRPSRPARRNGAKSDELDAVRAAREALSREHLAAPRARGDREALRVLLTARQGAVVSRTKAIGQLKALIVNAPQALRDQLRRGTTDEQLERCSRLRTSPAQSVEHRTTIRAIRAVARRALFLEAEAAEHESDIEELVMTICPSLLDLPGVGPVTAAQFIISWSHARRVRNEAAFASLAGAAPIPASSGNTVRHRLNRAGDRQLNRALHTVALSRLQHHPATKAYAARRTQEGKTPREIKRCLKRAIARQIYRHLESHAAAQRELSLAA

SEQ ID NO: 392453 - protein, 320 aa, unidentified
MVCGVDVSKDHLDLCFNDKKNIIRNSKVENNARGHAALIKKLGIHRTYVMESSGPYCVRLAFKLRKMGADVRVESALVVKRFIQMHMERNKSDKKDAAWPYRFGQEREATKWRMPSREQTHCAQMLSSIELMKRQTTMLSNHLHSLDQLPVYNRDVKLGLQRAQKKLANEIAKLEDRLVKTLDEWQSEQRRNLITIPGLGNRAAALLIVHTDGFKNVTNHRQLSALAGLVPREYTSGSSVRGKKGICKMGNARLRNVLYMCSMSAIKYNKACRELYDRLRAAGKNGKVALIAVCNKLLKQAFAIATKGIAYQDEYRSTTR

SEQ ID NO: 392454 - protein, 373 aa, unidentified
MNYTTVYVGMDVHKENFSLCCYTNEKEEAEYCQKVKAHYSKVLNYLDAMRFHYGDDAIFICGYEAGCLGFTLYHQLTQHHVKCIILAPTSMAKPAGKKKVKTDKLDAALIARCMAHHDYSPVHIPTDKDEQVKEYIRMRSDHKAALKKVKQQISAFCLRHNYRYETTRSHWTQAHLNWLRSLKPEGLYEEILSEYLSTYDQLTDKLERLDKRIEELASDTDYQEKVRKLSCFLGIKTHTALTTIVEVGDFKRFPSAQKFAGYLGLVPGEDSSGGSHNGLGITKAGNSHVRMLLVEAAQSYTRGRAGCKSQTLKARQYGNTAQVITYADKANERLRRKYYRMVLTQNKKPNVAKTAIARELSCFIWGMMTGNMG

SEQ ID NO: 392455 - protein, 337 aa, unidentified
MSVYVGIDVHRKRSQVAVVTEDGQVQLNKNVVNGSEPFLRLIGDLPAGTPVAFEAAFGWGWLIELLEDYGFEAHLVHPLRCKAIASARLKNDKVDAAILAQLLRADLLPEAWIAPAKVRQLRALLRHRISLVRLGTQLRNRIHAVAADHGYDRSASYWTGPGRGWLAELDLPAASREIVTDCLAVIDGLAPVIERLDGELHAHAKADPRVKGLRTLPGVGEFTALVMLAEIGDITRFPSARKLASWAGLTPTVRGSDLKVRHGHISKQGSAWLRWAMNQAAQTAKRSPEFAATYSAIAKRRGKKIATIAIARKLLTRAWHLLSEMEPADASTPLRRP

SEQ ID NO: 392456 - protein, 339 aa, unidentified
MNVRTLGIDLAKNVFRVHGVDENGKILIARQLRRRQLLPFIAQLKPCLVGMEACGGAHYFAREIAKHGHEVRLMSPRFVRPYVKSNKNDARDAEAICEAVTRPSMRFVVVKSRAQQDVLALHRVRELLIRERTALMNQRRGLLAESGIVIPQGSATLRRAVAELQDNENGPTPILREILVEMSERLRLFEERLKGYDTRITGLARNDQQVARLMAVEGVGPITATALVATVGDARQFRTGRELSAWLGLTPRQHSSGERTVLLGISKRGDRYLRTLLIHGARSALYYAARRHTRRSEWLEGVRKRRGNNIAAVALANKNARILWALLRRGEDYRVRLAA

SEQ ID NO: 392457 - protein, 373 aa, unidentified
MKKVRFVGLDVHAETIAIAVAEPEGDVRPLGVIPNRPESIRKLVKKLGPAEQLRVCYEAGPTGYVLYWQLSALGVKCEVVAPTLVPAKAGDRVKTDRRDALKLARSYRAGDLTAVWVPDAAHEALRDLVRAREAAKKDQLRARHRLSKFLLRHGRRPSTTMNPWTQAHLTWVKTVHFDHAAQEVTLVDYLHEVEHAADRIEHAIDDAVKTAPERMRAVIEALQALRGIAHVAAVTIVTEVGELSRFPKARQLMGYSGAVAREDSTGERIRRGGITKTGNAHLRRVIIEAAWAYRYRPAVGAALRKRQAFVSPEVREIAWKAQHRLHARYHRLTMKGKCKQEVVTAVGRELLGFVWAIGVNVEAQRSCEQSAAA

SEQ ID NO: 392458 - protein, 417 aa, unidentified
MEYAAPVLPTEPVNGLTCGIDWARDDHAVAIVDQRGTLVHRCTVEHSAAGLRELVAVLACSGAAEAAIERPDGPVVDALLGAGITVVVISPNQLKNLRGRYGAAGNKDDRFDAFVLADTLRTDRARLRPLVPDTEATAALRAVCRARRDLVAHRVALANQLREHLKRVFPGAIGLFSHLDAAISLKFLTRFDCQDRADWLTAKRLGAWLASVGYPGRTDPADMHARLIAAPRGATGDEGAAHVHVTRALVATLITVVEQIKILSEQIDEQLAIHADAHIFTSLPRSGTVRAARLLAEIGDCRARFPTPEALACLAGVAPSTRQSGKMRSVGFRWACDKQLRDAVCDFAGDSRRANPWAADLYDRAVARGHDHPHATRILARAWLYVIWRCWQTNSAYDPDKHRALQAVLQQHQQPAA

SEQ ID NO: 392459 - protein, 389 aa, unidentified
MAKEIHVAQATNFRGIVLAKRHLTFKNAIEGYEKLQRWMDELQQKHRLKTVIIGMEPTGHYWWNLANWLANKGLNVVMVNPATTKRNKENRDNSPSKSDPKDALVIADVVCRGYYYDYTRQANVFQRLRTVMSDREFWVTHSVRLQNRIIRWLDIRFPEYTSVFKDWTCPRSLATLKEFPSPLDLKSRSVSEVITGWREHMQRAGGSTGMEKAAQLIAQAKQDLERLLEEYERIVETLEKMEQELLALLGEIPMAKQLRSVKGLGTIFIAAILSGAGDLKQYAHGRQLLRKAGLNLAESMSGKRKGQIVLSKRGDAKLRKYMYLATITLVGTNPVFRQMHENNVQVKKMKKQQSIFKLLGKLARILIGIVGRGETFSPEKASAVFTDAA

SEQ ID NO: 392460 - protein, 343 aa, unidentified
MQAITTIGLDIAKSVFQVHGVDPDGHVVVRRQLKRRYVLAFFEKLAPCLIGIEACASSHHWSRQLQALGHDVRLMPPSYVKPYVKRQKNDATDAEAICEAVSRANMRFVPTKTPEQQSGLVLHRTRHLFIRQQTSVINAIRAHCAEFGIVAPVGRRGIEELLNVIANANDEQVPEIARACLSALGDQLHRIKAQILAFDRMIGAWHRSCAASKRLDEIPGVGPALATALVASIADPRTFRSGRDFSAWIGLVPKQSSSGGKPRLGSISKQGDRYLRGLFTAGALAVIRYAKIHRIGHRPWLTALLARRPTKVAAIALANKIARMAWAMMARGERYREPAALAA

SEQ ID NO: 392461 - protein, 371 aa, unidentified
MQIVGCDFHPSFQQVSILDISTGEVVELKLVHATGEAERFYRGLEAPVLIGMESTGNTLWFERLMEELGHELWIGDASQIRASYVRRQKTDRRDAGHILTLLLEKRFPRIWVPSHLERDQRQLLLHRHRLVQMRTRVKTELQHLAMNQGLQQKRSLWSVRGRADLEKLPLEGWTARRRADLLQVLGMLEAQVADLDEAVGKVAFSNASARLLMRQPGVGPITALAFVVTIGDVGRFKRGKQVASYLGLIPSERSSGQKRRLGAISKQGNVFLRTMLVEAAQSAVRHDDEFKKEYAHRCHSKPKGVAKVAAARKLAVRLYWMLRTQTPHAHAVHNEGSPSHSLVGESQTVLLSGHPRIRHWLDVRKKNHGRS

SEQ ID NO: 392462 - protein, 361 aa, unidentified
MSNSTTWIGMDVHKESIVVAAVNGAGTVAARWETPNTSKGKDRLATRLSEFGTVRCAYEAGPCGYDLRRFLEGKGIPCDVIAPSLIPKKSGDRVKTDKKDAEKIARAHRMGDLTAIHVPTPAQEALRDLLRAREDANEDLVRRRHRLQKFLLRQGRRHEGKNWTRDHWRWIRAQKFDDRNSETVLSEYIAAIDQEIERIGRLDAQIEQESINPDIVPAIARLKALRGVDTLTAMTILSELIDLNRFPSARKLMDFVGLVPGEYSSGGKQWRGSITKSGNVHVRRVLVEAAWHYRHSPRSTGAAIKKRREGQPPEVIETARKAELRLYKKFTRMVMRGKKTTVAAIAVARELAGFVWAIGRI

SEQ ID NO: 392463 - protein, 414 aa, unidentified
MVEVMIERCAGLDVHKRTVVACVRSPGLGRQKRVSEVRTFGTFEHELVELRVWLVSCGVTSVAMEATGVFWKPVWHVLDEGQLFELLLVNPAHIKAVPGRKTDVNDATWIGQLLECGLLRGSFVPPTAIRELRDVTRYRRQLTEERVREVQRLQKVLEDANVKLSSVASDTLGVTGRLIIDAMCAGERDPVVLAEMAKRKLRNKIGDLRHAVPGRFNDHHAAMTRELLAHIDYLDAAVARLDSRVDEMMAPFVDTRDRLVTIPGVGTKTAQIIVAEIGVDMSRFPTPGHLASWAGVCPGNNESAGKHRSTHTRSGNQWLTSALVEAAWAAVHTKNCYLAVRFWRIARRRGQQRALIAIAHTILIISWHLLNDHTTYEELGTDYLARNDNPDRRRRQLVDQLQRLGYQVELTPAA

SEQ ID NO: 392464 - protein, 322 aa, unidentified
MLHLKCESSIQSDPEAIAAFIRANTTNVVRIGLESGSTSTWLWTELDRMGLPVICIDARHAKAALKMQINKSDRNDAAGIARIMQTGWYREVRVKALDSHAIKALLVSRALLVKIKRDLENQIRGLLKNLGLVIGRAKMNTFTSRAKELIKDKPALVAVVGPLLKAREVIEQQVADLDRKVMRLARNDDQVRRFMTTPGIGPITALCYLATIDDPTRFGKSRNVGAYVGLTTRRYASGEIDWTGRISKCGDKLLRSYLYEAANVLLTRVAKWSTLKAWGMRIAKRSGIRKAKVAVARKLAVILHRMWIDGTEFQWSSKEAAA

SEQ ID NO: 392465 - protein, 313 aa, unidentified
MDDFTFVGIDVSKTTLDVALSAEAKPFVVANDRQGVQNLLAKLPAPGTCLVTLEGSGGYERLVIAELLDHGHRVAMVNPRQVRDFAKALGILAKTDPLDARVLAKFGEVAAPRCLEKPAGPQAELQQLVDRRRQLIDLRTAETNRLHQATSKVTRRSIQAVLKTLDKQILALETGIAALVDKHEDWKHKTEILTSVPGVGDVTAMSLLADLPELGQLNRQQIAALAGLAPFNHDSGQLRGQRCIWGGRASVRTTLYMAALTAIRCNPTLKTFAERLRNSGKEFKKLITACMRKLLVILNTLLKNNTPWTAPNA

SEQ ID NO: 392466 - protein, 318 aa, unidentified
MYCIGVDVSKQHLATYDGERQRTFPNTRDLKELDAFLEGKGDEVTVVFEPTSTYSRSLELLCRSRKLRCLRLNPRVLPHLREVVQGRSKTDRTDAELLWQYGQDHGPGDLLKEDRLGHILKVYLSCYAQAQKARIACQQLREALAHDPDIPAEILEELGREIGRLKAREEKMLTRAQVHIEGDEEARRDYVLLLTIPGVGRVTATVLVVLFRRYSGANRGEIVALVGMDPLEYRSGSSVHKKSRISKRGDGFVRKVLFEATLAAVRFNPAVRKTYRRLKENGKPEKVARIAAARKLLLIAHAMYRSGQPYRDPKASGG

SEQ ID NO: 392467 - protein, 386 aa, unidentified
MNTITASTTTIVAIDLGKYKSVACVHNEATGEFRFTSFETTRSELHRLLAKEQPAVVVIEACLLAGWVHDLCGQLGIRCLVANTASEAWKFKHLKRKTDKDDALRLAQLYLLDQLPTVTLPPAAVRQWRSLIACRQALVGRRIAVQNRIRALFVARGLPAPRGAKAWAAAGLAGIASWAQPLADCAADELWRGLLELSLTEYRQVCELIDRTETKLDTLGKQHADVVLLQTAPGLGPRTAETVAAYLHDAPRFRTGKQVSAYGGLVPRQHQSGEVDRRGRITKRGPALLRKMLVECAWCMVRYNAWARGHYRRLTGGGQRRKKQAIVALARKILVRCWAMLRDQKPWHDPQTGPKPALPPSKQRRQAEAQQRRRAKQPAALAAATE

SEQ ID NO: 392468 - protein, 317 aa, unidentified
MCNSFIGIDVSKEKLDICILRNNKLTTKIYDNNVGGYELLISFIKSKKLSPHICMESTGKYSLGSATHLHEAGYKVSILNPLRIRAYRNTQLLRNKTDKYDAQIIAEFCKLYIPEQWYPATSEFSELKELFRCMQSYQEDKIRYQNKLELVSKDSKMRKLMQKSIKHTENQIKELEEIIDSHIASHCEMQKNCKNLQTIPGIGKKTAIAILAEIPDLRNYKSARKLASHAGLTPMHNQSGSSVKGRAKISKIGSSNLRKALYFPAITAINFNKTMITFSKRLEERGKRKMVIIAAVMRKLIHVIFAILKNGVEFKEI

SEQ ID NO: 392469 - protein, 451 aa, unidentified
MSKIKTKKQGVKKISKLTVINPKVAGIDVSDKEMMVAFPVNSEQLEIRAFECFTQDLHSIAKTLKEHDITSVAMESTGVYWVCLFLLLQDYGFEVYLVNAKHAKNVTGRKDDESDAEWLQKLHSCGLLRSSFQPDNMTRTLRSLVRHRKNLVRSSTTYLNRIQKALELMNLKLHTVISDIDGKTGRMIIEAILAGERNPEVLADMRDKRIKASREIIIKSVEGYWTTEHLFELKQCYSLFCQHQQHIKDCDLEIENQLLVQITAASNNDVISEVEVKKIKRKPSGKNRVSFNLTAYLNELSGVNVTEIMGINELSALTIMSEVGLDMSKWKTEHHFTSWLGLAPNTKISGGKEISSRIGKKKHYAGQAFRIAANSLHSSKSPLGDHFRRLKARAGAGKAVVATARKLSIIYYKMIINQQSFNPNALLEFQQKYKQKKINQLRMKLAKLEAA

SEQ ID NO: 392470 - protein, 400 aa, unidentified
MLSIGIDVSKGKSTVCGMKPGGEIVYTPFEIQHTREGMSELLSLLRGSGEEVRVVLESTGSYHCPVVAALLENGIFVSVVNSLRMKRFCSQSIRRVKTDQIDAMQIALYGLAYWQELQPTRLPENTYRELQLLARQYYQMTSILIKAKVDFNALCDQVLPGMQELMNDHAGRHKLSDFVLRYHHTAHILKMGETRFRKDYCKWAEKRGYRYRERMAALIFATAQNGIPVLPNAPSTQIVITEAIRVLHTVEASRDAILTQMQALAKTLPEYSLVREMPCIGDTLAPRLIAEIGDVRRFHSKRALIAYAGIDAPPYQSGKFCANNRHISKRGNRYLRKTGYEVMQSYVMHKPANDPIFTFIEKKRGEGKSGKLAMVAGLNKFLRVYYGKVTELYRSLPAIK

SEQ ID NO: 392471 - protein, 357 aa, unidentified
MRKRLNAEKVNVNGKTVNVGIDVHKVSWHVTALVEGIVVESATIQPSYRVLKKLLAQYKGARIRIAYEAGFSGFNLYDELTADGIECIVVSPSLIPVESGNRVKTDKRDSRKLAQYLENNLLKRVYVLSKQERAHRQYVRTRRQLSNHRTDVMRQIKSLLLFHGLPSFDGKRGFWTRPVLRALRSITPDEYLSYSLNKLIDLYEYLTQQVKHLTREVRRLARTEKYARKVELLTSIPGVGVLSAMEILTELQDVSRFATADQIAAFLGLTPSQYSSGQHVRMGKITHAGNHRLRTRMVECSWIAIRKDPGLYKTYQAIKMRRGGKRAIVAVSRKLIIRIRRILLDGVTYRTEFATAA

SEQ ID NO: 392472 - protein, 426 aa, unidentified
MRVMHDRVAAIDVHKDMVKVAVRVPGDKGGKRRTDVLEFRTFYGVLQEMGRELRRRGVTHVAMEASGVYTDPVYYALAELDFTEVMVINPSHLKALKGHKTDAKDAVRLLEVYECGLLSGSYLPAPELKEVRDLVRYRVKTVQARTSEVQRLQKTLETAGIKLSSVVSDVTGASATAMIEALIDGERRSGVLAGLAQGRLRSAGKIADLSMALAGRFTEHHAMMCRLHLDRIKVFDAAVADLDFRITPRVARYCREAELLKTLPGFGEVVVAGWLGAIGPAPHQHFATAGRLASWATICPGNYISARKSKGGRTGDGGAYIKPLLVQAAWAAVRVPGRLQAKFNRLVRRFGGARNKGAVKRAIIAIAHALLKIAYQVLKTGTPYTDLGADFYTSRESPQARQDYLIRQLQKLNPGSVITIIPAEAA

SEQ ID NO: 392473 - protein, 373 aa, unidentified
MNACLTPKSTVVGVDVHKYSHTAVAMDCFGQEKARLDFSNERLNDYVLWLRELGDKEDIIVALEDVNGYGFHIVERLSKEKISMRYVPAILTERERKKSIHREKSDYEDAKRVGKVILTKFDETLPAKESIADDQERELSANLDLLTAERRILVQEKTILKNQLHAMLHQIYGDHYGEGFPKVFHKKAIKSFRQKLTKTKFDNPIRVALAGSSIRRFDRLALVEKQLKEIDGSINNIGQKSEAVMALSDNIHGCGIITAASIIAEVTTISRFCDKSRFARYSGIAPIDKSSGRHQRLYTSPFGNRKMNRALHTIALCQIACKGDDRGKIYFKKKLSEGKTKLWALRCLKRQISNKVFQALKEQKRRERTIQNG

SEQ ID NO: 392474 - protein, 464 aa, unidentified
MKRKSVKMKIVNPDCAGIDVGSRSHFVAIGQGAEEVREFGVYAVDLQELSKWLMQNSITSVAMESTGNYWQNLYIELISKEIKVVLANGKFTKSMNRKKTDVMDCQWIQKLHSLGLLNSSFLPDNKTEILRTLCRHRQNMIELKADTSNKMQKFLKLLNFRLDVVVRDVTGLTGIKIIEQICKGNLDPESLAEFRHYNCRKSKEEIAKALVSNKREDYLFGLKQEYERYLFYLHKIEQCDKRIARYLKNITKNSKGKPQEKPFKRINKNGIKGIDLNIVSYHYFGGIDLFQIPGVSHSTILALMSEIGIDGFKKFPTAKHFASWLRLAPNNKISGGKTLSHRVPKGSNRLKIALRNAANAVGNLKDTHLSRFFKKIAFKKGRQKAITATARKIAIIIYNMIVKKQPYNPPEQYLFLDQKRKQIAHLRSKIAKFGINPDELGLFSRPEYEAKYRRKMSIVNQTVT

SEQ ID NO: 392475 - protein, 318 aa, unidentified
MTRIICGVDVSSKSLEARIGQQGAAGSFPNNPEGIAALGAFCQAHQADLVAMEATGGYERQAFAQLSEQGLAVAILNPRAVRQFAQSMGRLEKTDGIDAAMIAWYAEVKKSPPACVAPRSQQHLRALVTRLRQLTGIRTAQLNQQRLVADRAVQASFKKLLAVLARQIREIEQRIATLLDQDPLWRELDRAFRTVKGVADRTVARLMAEMPEIGVLSNKTISKLAGVAPLANDSGQRQGKRSVRGGRAPVREILFIVASVVGRYEQDFIAFRQRLLAAGKPPKVIRIALAHKLLVRLNAKARDVRTQLAVANQPLPQS

SEQ ID NO: 392476 - protein, 393 aa, unidentified
MICVGIDVAKDKHDCFILSSEGEVLADVFTIPNNAEGFDTLLQTIRRCARPEDKIKVGLEATGHYSYNILGFLLNEGLDTYVINPLHTNLYRKSLSLRKTKTDRVDARTIAAMLMSDVDLKSYTDTAYHNEELKSLTRYRFDKVRERAKLKQSVSRLVTILFPELEKLVSTLHMASVYALLSEFPGAKQVSEAHLTHLKAVLYDASKGRYGSDMATTLRDAARCSVGSVMPAKSLELRHTIRLIHELDAEIEDIEAAIQSMMGEIQSPITTIPGMGVRMGAMILAEIGDFSRFDSPDKILAYAGMSPSTYQSGQLSLSGAYSHMEKRGSRYLRYALYNATKYVCLWNPTFAAYLAKKRAEGKHYNVALSHAIKKLVRLIYALEKSKRPYSTAA

SEQ ID NO: 392477 - protein, 411 aa, unidentified
MENIFLCCAGLDIHKESVEACVRRMEPGGRLHRQTRHWATMSRDILLMADWMAAQGVTHVAMESTGVFWKPIFNILEGRFQVLLVNARHLKQVPGRKSDIRDCQWIAQLLQCGLLKGSFIPPRPQRELRDLTRHRVQLVEEKTRTSNRIEKVLEDANIKLGSVASEVMGVSGRAMIEALIEGTKEPAQIADLARRQLRGKIPQLEKALQGHLTEHHRFLLRLLWKELMQQEALIAELEVKIEEVTRPLAGDVERLDEVPGLDRRVAEVMLAEVGADISPFPTHQKLAAWAGMCPGNEESAGKRRKRRITPGNRWLKRSLVQAAWAASHTKNSYLASQYRRLVGRRGKKRALIAVAHSILVIVYHLLKDGTRYRDLGVDFFDRLEPQRLTRYYLKRLEKLGHKVILESCVTT

SEQ ID NO: 392478 - protein, 340 aa, unidentified
MEKRYIGIDLHRNRFTCCIRLENERTYVTEWELEDLGKFVKKLRANDEIAVEITGNTRLFFDAVARHVARVVVVNTNQFKVIRHSVKKTDPHDARALALYLSKNMLPEVRMKDKEHGQLASLTQTRDTLVKLRTALKNKINNILSARGLNLAKEALSSEKKLNEVVALPFDEIARIELRVIVEQIRSLNKSIAELEKTIGEEGSKLEGHKSLSSIKGIGKITGAILLSVIGDVNDFADEGHLASYFGIVPRVSNSNETEHSGRIHKRGTKLGRTALVQSALIAANYSSYLKRFYEQVKARRGAGKAIIALARKFLGIIYRTLKNKWVFQDFPNFVLAEAS

SEQ ID NO: 392479 - protein, 409 aa, unidentified
MGIDIAKRTHYACIVDDRGRVLQKSFSVPQAGNGFELFYQRVLAAMKEHEKSEVIVGIEPTGHYWLNLAYFLEERGIPLVMVNPMHVKRSKELDDNLPTKHDRKDALVIARLVKDGRFSYPRILKGMEAELRVGSTFRSKLTEELGAVKNMIIRWLDRYFPEFVQVFPSFGKMALAALECTPFPSDLYQKQPDEVLSLFRKVEGLKSPQRPKTVRLIEVAAGSIGVTEGLEMARIEIATLVRRYHQLEQDIESITGQLIELVKISAEYEWLSTVPGLGDTTIVDLLAEIGSFSHYQDPRQLIKLAGLTLRENSSGLHKGQKRISKRGRRKLRALLFRVMMPMIRHNEAFRKLHEYYTYTNRQVNPLRKKQSIVVLCGKLLKVLHGISTKHKPFDAQRMMRDIPGLAEAE

SEQ ID NO: 392480 - protein, 343 aa, unidentified
MDKTLYCGVDLHSSNGMYVITDEQDRQLFKKRLPNVLSVVLGHLEPFRTQLRVVVVESTYNWYWLVDGLQEHGYPVVLANPAKIDQYDGIKEADDLTDAAFLTRLARLQILPTGYIYPKQERPVRDLLRRRMLLVHHRTALKQSLQGLGVRQSGRSLAWRAVRALSDRQRTELLGDHDCIAFVAAQQVELIELLNERIRRFEQKVLEHSCLRPAYADLLTIPGVGVILALTIMLETGEIGRFKRVGDYTSYCRCVRATHSSNGKVKGRHNRRNGNPYLAWAFVEAVHHAIRTCPAAKRFYDRKLAQRNGALATKALASKWSKAAYYMIKRQESFDVTRVFGGA

SEQ ID NO: 392481 - protein, 397 aa, unidentified
MIAVGIDVSKSKSTVAILNGDGSIRAKPFNVRHTADELLALVNYIKGTSEVPTILMEPTSHYHYPLLKAFQEANLPVCLINPYQMKKYGDTALRKAKTDKRDSIRIAQYALEKSYSLIPYTPSDQKYEDLRFLSRQYSQRISILTVNKVQLLALLDQTMPGITSLLPLKSRDPDNCVLLRFIKRFKSFEMIRKMGKTRFLESFQLLVRKTKDRCAGTKGLRIYELALNSVTTRGDNPLMAMTQEQCVALISTSQKAADEINLQMRTIAETLPEYKVLRAMAGVGDRLGPVILAEIGDVRRFHSGKALNAYAGNDAPPYQSGQFESRNRHISKRGNPALRKACFEVMQALKLTKPQDDPVYLFLAKKEQEGKPYNVAKMAAVNKFLRIYYARVMELYK

SEQ ID NO: 392482 - protein, 322 aa, unidentified
MEMLSFGGIDVSKDRLDITVLPDEQCSSVSNDAAGWAELIEQLRGSLITAIGVEASGGYERGVVRALLAAGMSVRQINPDKLRQFAKASGILAKNDRLDARMIASFVAIMPTRPAQRQTPMIEQLAAMLTVRRQLSDHKVATENASRLLEDAMLQRLSRRRVARLTADIDLLDQRLVEIVTADPALAHRFRLLTSMPGVGAVLACTLIALLPELGQMSRKQVAALVGLAPYDFDSGKLKGRRCIWGGRARVRHVLYMAALSASNWNPALKAFHDRLEATGKKPKVVIVAVMRKMITTLNAMLRDGTAWVDRYSGRRSASTAR

SEQ ID NO: 392483 - protein, 415 aa, unidentified
MALKIVYKICCGIDVHKTFVVACIASTDSHGITTYKSRRFSTYTKGLKELLQWLLDYNCKDVCMESTGKYWIPVYNVLEKDCSIVLAHPKYVKAIRGKKTDKKDAKWIADLFKHNLVAGSFMPPADIRQLRDLMRYRYKLTCFSSSEKNRLQNCLTVSNIQLGNIVSDTFGKSAQNILNKILENPLDTSFDIEPLIHGSMKKKLPELELAVDGYITPEQAGKLKIIKRHYEDLEARKADLEKLILSLAATYAEQINLILTAPGFRNIYSSIGIISEIGVDMDAFPSAKHLCSWAGLTPTNNESAGKKKSVRVSKAGCYIKPLLVQIANAVVKSDKHPEIRNRYLRLKKRRGHKKAIIAIARMLLTALYNMLKKNEPYNSEIYKKSDVIPVNREITVEQAILMAQFHGYKIKSATA

SEQ ID NO: 392484 - protein, 409 aa, unidentified
MRYYLGVDWADQTHAVWVVDEGGTKVAMRTVPHTAEGLTEWGRELDEWRAQGIELWAAIERPEGRVVDFLLDHGVVVYAVNPKTLDRARDRFRQSAAKSDPFDARVLADFLRTDHAHLRAVQPSSEAAQELKLLTDDYQRQIRQQTRLVNQLTTTLKAYYPRGLEVTELTTALAREFLQAYPTPATLSALTERQWQRWARAHRLSETRTQELWAVLQRPQLPVPPHVVRAKARLMQSLVAQLTVVMEGVGAYREAIEDFFARLPAAQWIRTLPIGDHGITAPTLWARLGDAPGRWESFRHLQAQAGTVPVTIRSGKQQVVRFRFACDKSLRYIIDHVAFLSLRWSEWARAYYAEQRARGHSYRQALRALSAKWLKIIFVMWERRVPYDEQYHLAMMTRQQLRQRQKKVA

SEQ ID NO: 392485 - protein, 412 aa, unidentified
MLKIVYPICCGMDVHKGFIVACIASTNEQGVTTYQSKRFSTFTNDLRRCAVWLAKNHCKDVCMESTGKYWIPVYNILEATCTIVLAHPKYVKAIRGKKTDKKDAKWIADIFKHDLVSGSFIPSADIRQLRDLMRYYWKLTSFTVGEKNRAQNCLTVSNIKLDDVFSDVFGKAASAITTRLLESSEPFDVTPYLTKNIKTPVEKIQAAVDGEMCAEQAEKLRIIRSHMDALELCKLNLQSLILTTAEKYLPQLNIVATAPGIQAFSAIGIVSEIGVDMSVFPSSKHLCSWAGLTPQNNESAGKKKTTRISRAGTYIKPLLVQCALCAIRAKQFPEVRRRYLALKKRRGHKKAIIAIARMLLTAIYNMFKKNEPYNPELYRIPDRPPAHRMVSLEEAIYIIQRQGYLVTPPPAS

SEQ ID NO: 392486 - protein, 374 aa, unidentified
MKHYSTLYVGMDVHRDSFTLAHYALDMKQPTGIVKTDNDYRRIVAYVHRLREKYGKETRIVCGYEAGCLGYTLYHQLTKAKIESIILAPTTLPSPRGGKRVKTDGRDAANIAQCLAYGTYSPVHVPSAEDEQVKEFIRMRNDHCQMLKKLKQQILSFCLRHGYQYSGTRSNWTQAHMKWLDALQPEGLLGDTLEEYLTSFRYHQNKLERLDRRIEEISREETYREPVGKLCCLIGVKPLTALSVVSEVSDMHRFPTAEKFAAYLGLVPGEHSSGNSVRRSSITKAGNVHVRALLTEAAQSYTRGKVGYKSSALKKRQSGQSETVIAYADRANERLRRRYYQMTLQNGKRGNVAKTAIARELACFMWGLLTDHVV

SEQ ID NO: 392487 - protein, 428 aa, unidentified
MTTDRVPCRKFILGGAIMDKIYDNCCGIDVHKKLIVACLRKGNRQEVREFGATTRELLELADWLKESGCEMVAMESTASYWKPLYNILESSDLNAMVVNARHMKAVPGRKTDVKDAEWIADLLQHGLLQPSYIPDKDQRELRELVRYRKSLVGERTRELNRLQKMLEGANIKLSGTVSDINGKSARSILEYLLTGECIDGAKYDEMYEQKIIAHNLKATKEQIIDDLNGVMTPLQRRMMKELLSHLDELNTHIKNLDDEIDNFMKPEEKQASQAIQDVTGIGNTSAQAIISVIGTDMERFFTDRHISSWAGLCPGDNESAKKRKSGKTRKGNSLLRTTLITCAHAAVKNKKSYFYAQFMRISAHRGKKRAYVAVAHSMLIAIYHILKDGVIFKDLGADYYNQFNKERKINAYLKKLKALGWEAPVVAA

SEQ ID NO: 392488 - protein, 341 aa, unidentified
MDSIGIDLHKRESQLCIITDDGELIERRIATSRERFTAVLGERPRARILLEAATESEWVARHLEALGHTVIVADPSFAAMYATRSKRVKTDKRDARTLCEALQLGAYRAIHRASDAQRQVRAHLAVRDALVRTRPRYVAIIKAAVRREGLRIPSGDAEHTVTKLQALPLPAHVLEALAPLIALWGPLQAELEAADERLLALAKENAAVTRLRTMPSIGPVTALAFVASLDDVTRFHSAHQVQAYLGLVPSEYSSGDRRLRGRITKRGDARMRWLLVETAWRILRSPNPELAALKAWGQQIAERRGKRIATVAVARRVAGILYAMWRDDVDYAARTPQAVAA

SEQ ID NO: 392489 - protein, 313 aa, unidentified
MEAVLECCVGLDVHQETVVACIVFGPLEHRPKKEIKTFGTTTPELLTLADWLEERKCSHVAMESTGIYWKPVWNILETGSFQLILANAQRIKNVPGRKTDVKDAEWIGQLLRSGLIEGSFVPPVEIRNLRDLTRYRKKLLQDTTQEKNRIHKVLQDANIKMTTYISDIFGVSGRNILECLLNGEVITAENITKMVKGKIRSKVPGLVDALNNRLHRHHREMIRFSWEHLKYLERTILDVEVIIEQCLTPYRQDIDLLDSIPGVGHTAAAVMIAELGNDMSVFPTDRHVSSWAGVSPGNNESAGKKKSWHHIRE

SEQ ID NO: 392490 - protein, 290 aa, unidentified
MKFYTKTHPYYCGIDLHAKNLYVCILDSEGTICIHKNINANPDALAKLIQPFRDDLVIGVECMFTWYWVADFCKEQGIEFVLGHALYMKAIHGGKAKNDKIDSHKIAVLLRGGMFPEGYVYPSEWRGTRDLLRRRMHLMRKRAELLSHVQNTNSQYNLPEIGKNLRYGFNREGVTERFADDSVQKSIALDLALIGFYDEQLGKVEWHCQKTAKVLDYQGLMLLRSVPGIGEILSLVILYEIHDIDRFSRVQDFVSYCRLVKCKKESAGKSYGTSGGKTCPELTEGSAMLT

SEQ ID NO: 392491 - protein, 496 aa, unidentified
MNSNNKSRSTKRSLYRGQHPVLAAVFESVATPRDLLLVPVDYAKGTHMALIADGTGRELRQAFEVENSAAGVEFLLKAIRKTAKRRKIPLARVIVSGEDLPAYCENFARHIALAGPLMTRVSARLAAKERENLGTTTDKLALDCIAKVLISRRAMPVPASADENGIYRELRDIVRERSDMVDATTATGNRIHTRVDVLLPGFLDSSRSLLSSFTGASLELMEERFSGAQVARRRRAALEKLLRRHHVHEVPETAEAILALAQEALPADPVRLPSLQRSLTALVRLRRNLSVTSRAMESEAALLLATTPYALLTSIGGVGFVLASGTAAELGSPASLPSTDSMCAYAGIVPGTLQSGGPQGEAFHTSPSRACNHHLKNWTVQAAQKIRLYGQPELKDRMIRWEANGQHAAFAGARRYLRLTRSLVTWGVPYLDPEGRPGRKGVTTADKARAAEAAFDTMVRKWKKIPGGIDAAFAEDAPIGRWAETARQLFGAHLEL

SEQ ID NO: 392492 - protein, 404 aa, unidentified
MDILIERACGMDVHKDSITACTMTPAGKEIQTFSTKTVFLLQLIDWIKKHGYTHVAMESTGVFWKPIVNLLEAEDIEFLVVNAQHMKALPGRKTDVKDAEWIAQLLRHGLLTASFIPNRIQRELRELVRYRRSIIEERARQHNRIQKVLEGANIKLGSVVSDIMGVSSKDMLHAIAEDEDDQKKLASLARRSMKKNDELELSLRGYVNPHQRMMLKTILAQIDFLTEQIEMLDQEVWQRVISNQEDIERLDSIPAIATRMAEQILAEIGTNIEKQFPSAAHLCSWAALIPGHNESAGKRKSSKGKKGNKYLKSALTEAAHSVGASKNYLGAMYRRTSARKGRKRAAIVVAHAMLRIAYYLLTRKEMYVDLGEDYFDNQKLGSIVRNSVRRLETLGYNVTISEVS

SEQ ID NO: 392493 - protein, 390 aa, unidentified
MRFIGIDIASEVHVVAGVDEQGATLLKPTRFGEDAQGYAKLIELLGQSKDVLIAMEATGHYWRNLFAALAVQGFAIALLNPLRTRRFAGEDLERTKTDEVDALQIARFAAQKRPAVTALPDSAQDELREMVRLRDRMVQDFTDRVRDLHRLVDLGFPEFTRHVRSLDSELASAILHEYPTAQAFRDVTAKRLAKLCYDGRHKVGLELATALIEAAKVSVGAHHGTAYRIQVRYACEDLDLLRRRLRDIEADIERKLAEHEVGTLLTSIDGIGPQTAARLVAELGDPSRFRDVKALAAYVGVVPATRQSGKSRGRRAGLTSYGNAALRAALWMPTLTAVRKNPPIKAYYERLLAGGKLPKVALVAAMHKLLRVVYSVAKNRKPFVPQIGHA

SEQ ID NO: 392494 - protein, 347 aa, unidentified
MPRTSSVHAVTTIGMDMGKNTLHMIGLAIVLREKVSRGRITSRLANLPPCLIGIEAGMATHYVARDLATLGHDVKQVPPTYAKPFRQGHKNDFRDAHAVAEAVQRPTTRFVPAKTDEQLDLQALHRVRSRLVSERTAVINQIRGFLLERGIIVRQGLRFLRQALPDILAKRTDVLSPRMVRVVADLATEWRQLDERIKPVTDEIETLAKSDDGCRRVMTVPGIGPIISSAMVAAIGSGAAFAKGRDFSAWIGLVPKQMSTGDRTILGRITKRGNGYLRTLFVQAARVILLRPASWPKHSFGVWLARAAQRLHRNVLAAALANKLARIAWTVLAQERSYEARIMKAAA

SEQ ID NO: 392495 - protein, 356 aa, unidentified
MQPQVTKKIDFSGKDLFIGLDVHKKSWSVTIVIDGMEHRTFTQPPDPRALYNYLNRMFPGGTYNSAYEAGFCGYGIHRELKSLGINNIVISAADTPTSQKDKLHKRDPTDSRKIARELEKSSLHGINVFDRELEELRSLNRTRFYLMRDLRRSKNRIKSFLMYYGVPLPAEFDNNQWTLKFVTWLKQVRMKTPGGQDAFSHLIESYEHHRQQLLILSRIVRLRISHYDKELYSLLNTISGIGPLTSSALITELGDINRFTHINHLGSYVGLIPRVRESGETTHTGGITFRCNTFLRTLLIESSWQAIRMDPALMQYYHKHVINSKGHKVIIKVARKLLNRIRYVMKYRQPYVTGVA

SEQ ID NO: 392496 - protein, 420 aa, unidentified
MAGTVDIVYPVCCGMDVHKDFLVACIATTDERGHTTHKVKRFSTYTGDLRRLADWLWANHCCDVCMESSGKYWIPVFNTLEKTCNVCLTHPKYVKAIKGKKTDKKDAKWISELFKCDLVRSSFIPPPDIRQLRDLCRYYMKLTYLCSSEKNRAQNCLTMCNFKLDNVFSDVFGKSATRIIDALLESGNSDFDVAPLIDGKCKATVDDIRAALDGELDPAQKEKLKFIRRHMKNLNLLKDELQKLILILASKYQPLIDLLMTVPGIGETLTAIRILAEIGANMSVFETSKLLCSWAGLTPQNKESAGKKKTTRISRAGGWLKPLLVQIALAAVKSDKFPELKNKFLALKKRRGGKKAVIAIARKLLTAIWHMLSKKQSYNAELYRKADKPPVKRELSLEQAFILLSKQGFSVRDWVVTAPT

SEQ ID NO: 392497 - protein, 477 aa, unidentified
MVATGLHGLNRKQRKELARRMRAQDPGLDIVHPHAAGIDIGNSSHYVAVRPDQDPDSVRRFECFTGDLHRLADWLQQCGVTTVAMQSTGVYWIPLYEILDARGLEVYLVNARHTKNLPGRKTDVQESQWLLKLHTYGLLRNSFHPSADIRIVRTYWRQRGGHVQAVSTCIQRMQKVLTQMNVQLANVISDLSGWTGQRIVRAILAGERDPQTLAALSHPGIHATRDQIARSLEGTWQSDLLFVLQQEVTMYDAYLQRIAECDHALEHHLKTFANKAIPDAPSNAGPSSPVAPRQTRVKHRRKAGSHTPQFNLGHELHRISGVDLTRIDGIDVGVAQTVISEVGVDMTRWKTDAHFASWLGLCPDNRITGGKVIRKGTRHVINRAATALRLAATTLLRSQSYLGAQYRRLRARLGAPKAITAMAHKLARLVYRMLKWGHEYVDKGLQYYEERHRDQQVQLLKKRAAKLGLQIVDPDAA

SEQ ID NO: 392498 - protein, 337 aa, unidentified
MENVALIGIDLGKHSFHIHCQDRFGNVLLRKKFNRTKLIEFLATFPACTIVMEACAGAHHMARRLAELGHESKLISPQFVRPFVKSNKNDFIDAEAICEAACRPSMRFVTPKTESQQMLGALHRVRESFVRDRVKASNQIHGFLLEFGISLPIGHAAIKRLPSVIAEHELPARLISVLERLHAHFKYLDQQIAEIDKELANQLDEDDLGHRLMTIPGVGPITASLLVTELGDGKHYRCSRDFAASVGLVPRQYSTGGRANLKGISKRGDKNLRRLLVQCARAYMQHLEQKTGRLADWVRDLLTRRHTNVVACALANKLARTAWALAARHTEFRVMPA

SEQ ID NO: 392499 - protein, 320 aa, unidentified
MQTRMPVGIDVASGKFDVAVWKGDTSYKTKVFPNTPKGFIALKKWLEPFGCCHICMEATGAYSEPLATFLHDEGYDVSVENPARIRRFGQAELSRNKTDKDDARMIARYCKLHGPSLWQPAPLNERRLKALVKRLTNLQEMRQMEENRLEVSDAVVQPSIRVVIAALDAQIDETKRAINDHIDNDPGLKKNRELLESIPGIAGVLSSTMLAYLGDMSRFSSSKALVAWVGLNPMRQESGEWKGKSRISKMGNSAMRKALYMPAIVAMKWNPAVSALKKRLDAGKKTGKVVMCAAMKKLLQLAYGVLKSGRPFDAEICLAR

SEQ ID NO: 392500 - protein, 370 aa, unidentified
MKSIVYIGMDVHKENYTLCSYTFEKDELEYKQTMQPDYKMVLKYIEQIRKRYDEEIDVICGYEAGCLGYTLYHQLKDHGINCVILAPTTMGITNTNGIKNDKRDAGNIAKCLAFHSYSPVHVPTLEDESVKEYIRMRDSMKKQLKITKQQILALILRQGKRFEEGSNWTQKHIKWLNSLDLGGVLQESLTEYMIMFEYLSNKIERLDKRIEELAEGERYAESVKKLSCLIGVKTHTALAVITEIGDFARFENPGKMASYLGLVPGENSSGGTQRRGPITKAGNSHVRKLLVEAAQSYTRGKIGHKSVELKRRQEGVNPQVVEYADKANERLRRRFYHMILKNKTKRNVAATAIARELACFMWGLMTGKTA

SEQ ID NO: 392501 - protein, 418 aa, unidentified
MSETFEWFVGIDWGSAEHELCLVNAQGVIVGTRTVPHTAGAVHEAVQWLRDQTGADPAAIAVGIETPRGVLVDTLIEQGFAIFALNPKQLDRFRDRFTVAGAKDDGRDAHVLGDSLRTDRRAFRRVRPDDPQIIQLRELCRIVEELQVEELRLANRVRDQLYRVDAAWLTLCPAADEPWLWAILTETPDPVAWATLPRRRIALALRTHRIRRMTADQIVTALHQPRLTVAAGVTDAVALRIASLVPQLRLVHEQRTTTERRIDRVVEQLATAAGTDGEPREHRDVEILRSLPGVGRIVTATMLTEATGPLADRDYATLRAYTGAAPVTKRSGKRTFLVHMRYACKRRLRDALYHWSRISIQHDQAAREYYDALRKRGHAHARALRSVADRWLRILVAMLKTGTLYDAARFAQSVAVPA

SEQ ID NO: 392502 - protein, 496 aa, unidentified
MKKRVYSATDIMHVDWQRILTSRGAAGQEAVVGVDVGKLEMRAVLRWADGTFERPWSVANPDQIGALVDRVGELARRGGHRVRVAMESTGTYGDALRQALADAKVEAHLVSGKRAHDYAEVFDGVPSQHDGKDAAVVAELCALGKSLAWPWPAAPDEQVGQLMFLVDQLEVATRAKTQWVLRLEAMLARHWPEASRVLKPGGGTMLRALVHYGGPAALAADPDAAATLQRWGTRWLDGDKVTRIVASAGATAGVRQGATDVARVQWCAQRGLEAHREAGRCQAKLKRLGAAHAAIAAQGAVIGIPTACVLWRHLGDPRRYHCAAAYRKAMGLNLKERSSGKYQGKVKITKRGPGACRRWLHLAALRQIRDDHDVRAWYARQCGRLGKGKGKGKGQGKGKGKGKGKGDDNAGSSSSSSSSSSSGRLRVVTALVRKLALAMWVVGAGRGTFEVERLLGLPPRHRGKQRAGQAAAAAAAAAAAAACGKGGIAAIAVATR

SEQ ID NO: 392503 - protein, 294 aa, unidentified
MPTLLKHSVGIDVSKKDLDACFSTINNDLEVKIKSTKKLKNTNSGHKELIAWVEKHRKEKVHVVFILEATGIYYERLAISLYNEGYEVAVTLPSKSKKYMQSLGLKSKNDKIDAKGLSRMGAEQKLDAWIPFSKNIYELRSLTRQNEDLQKQKTAAINRLESQNQGHRPDKFVCRQLNCLIKLIDKQIDQVKEQISKCIDKDPLLKEKVENVMTIKGLGIITVATVVAETNGFLLFKNQKQLVSFSGYDIIENQSGKRVGKTRISKQGNSHIRRAMHMPAFIYSVNFKIFKPLF

SEQ ID NO: 392504 - protein, 420 aa, unidentified
MKAYNVDDFAVLIGIDWADKKHDVCEHVLDSQKYHYSIIKSKPEALHDWAMSLKQRYPSQKIAVACELKKGPLIYALSKYNHLTLFTINPSSVANYRKAFTPSNAKDDPSDALLQVEILTLHMEKLCVIEPESAAMRSLAQLVEYRRSLVQDSVNLSNKITATLKNYYPQALEWFKEKDTFIFCDFISKWSSLTKVKRAKKQTLLDFFNSHNSHYAHVNDARILSIKSAMPLTEDIGVIEPNQLLVEVLIAQFRILLKGIESLDKTIKLAYKSHDDNVIFDSFPGAGPQLAPRLLVAFGSNRDRYNDASELQKYAGIAPVIERSGKKMWTHWRYSCPTFLRQTFVEWAGFSIRYSFWAKAYYDQQKSKGKPHNSIIRSLAFKWIRIVFRCWKTSTPYNESKYLEALKRRGSPLLTFAVNS

SEQ ID NO: 392505 - protein, 352 aa, unidentified
MVKGNSGMTVGIDIGDRYSHLCVLDEHGELAERARVATTRTAMEGWFSRRARCRVVLEACCHSPWLSRLLDSLGYEVVVANPRQLKLIFKSKRKNDPIDSERLARLGRVDTELLSPIRHRSEDVQRDLHVLKSRDVLVGSRTRLVSHIRSVVKSLGGRVPLKVRAETFYAKASEHVPTGLLPSVKPLLRVLGCIDAEIKELDKQIHRLCLESYPETAILRQVTGVGEIVALTFVLVIEDPKRFENSRDVPAYLGLVPRQWQSGAVDRNLHITKAGDRFLRKLLVQSANYILGPFGPDCDLRRWGQQLAERGGRGGSKRARVGVARKLSVLLHHLWATGQVYKPVLSPSAVAA

SEQ ID NO: 392506 - protein, 490 aa, unidentified
MHPRITNTPTKHSMFWDSASNPRMRLRSSTNTQGMPIDRLTILPSQNSSMHVSSINFSLRENGMNSSTNTFTAFIGIDWEDTKHDVCLQASNNDKREFAVIPHQADRIEQWAHAVHERFGGTIAIALELAKGPIVYALQKHDFFVLFPINPSTLAKYREAFKPSRAKNDPTDAELALDLIMRHPERFKPLKPQSVAMRTLAAMVEQRRALTEDETRFTNRLGDTLKQYYPQALEWFDHRDTILFCDFVTRWPTQMHARKARKSVLEAFFKAHNLRSATLIATRIEAIKASKPLTQDVAVITSHRLLALVLVEQIRIMLQAIDRFDQEIAALPPTLPDYVLFSNLPGAGQALAPRLLAAFGEQRERYATAGELQMYSGIAPVLERSGQKSWVHWRLRCPKFVRQTFVEWAAQTVNKSFWAGAFYQQQRGKGSSHQAALRAPAFKWIRILFRCWKNRTPYDESRYLDALKKRSSPLLALLGPENTELKFAKA

SEQ ID NO: 392507 - protein, 364 aa, unidentified
MTISQIEPGLEGQKEQLMKHYIGLDISLKTTAICIIDETGKVVMQATTDTTPEAIESSILRAGKIHIEQICLETGSLCHYLVENLSNRGLPVICVDARQAATFLSLKINKTDKNDARGLAEGLRLGFFKKISTKTSAELAIPTLLRSRKLLVDQRKQIQLAIKGHLKTYGIRLKSSDGISFCNEVSRTIEGLHEVMVEALKELLDNYMRLVESVKKLDKKVKSLCKEKEDLLMTIPGIGAITALTFTSEIGNEKRFSSSRQVGAYIGMTPKQYSSGETEKMGRISKTGPTNLRSLLVEAGMVVLTRSEKWSTLKAWGMKIARKHGTKKAAVAVGRKLAVIMHRMLITGEAFRYTNKTDEIKVVA

SEQ ID NO: 392508 - protein, 316 aa, unidentified
MTANSAEIFVGIDVSKARLDIAIWGSNEYWQVANEEKGFVELIEKLRNLHPTLIVLEATGGMELPVVAEVAQAGLPIAVVNPKRIRDFARSVGQLAKTDKLDARIIAHFAQAVRPEIRHLHTEEEEHLTALLTRRVQIIEMLTAEKNRSHSIRKVMRGRLQGHIKWLNTELKELDEEIASFIKLSPIWKEKEKILRSVPGVGPVTGATLLASLPELGILNRQKIAALVGVAPVNKDSGRKRGKRRVFGGRAVVRRTLYMAALSATRCNPKIKPFYESLIRRGKERKVALTACMRKLLVILNAMVKNNEFWLYETTS

SEQ ID NO: 392509 - protein, 401 aa, unidentified
MQTVRTNLILFYLFEFEQNVRSPALQGIQNDQPGDKTKGDFSLYFLIQKLVMKKIVKQVAGIDVSQDELVVQLASMYDDWTPEFGSSKTFANTQKGFDCFVEWVKDRTVSDVPVRYVMEATGVYHECLSYYLDQNNYEVSIVLPNKISNYVRTLQTKTVTDRTASQAIALFGIERKLERWSRPLGLYKKLRQLTRERAQIVELSTVSKNQLHAEQSEAEPHKSSIKRLQKRIELLKKQEKEIKAELALLIKADGEMQRLVLLLCSIPGIGLLTAATVLGETNGFELIRNKRQLTSYAGLDVQEKQSGTSVKGKPRISKKGNKNLRKAMHFPALSAIRHDERFKAVYVRLVSKHGIKMKAAVAVQRKLLEMTFTVFKKQEKYDSDYFKTQHQEAEQIVVTNN

SEQ ID NO: 392510 - protein, 403 aa, unidentified
MTRYHVGVDVGKLRHYICIKDLVNGTYGRTFSVSNDQEGLTHLVAFLNDQSPDHEDFLIGVESCPYGLNISYFLMSAGFHLVEVNTFRAGQFRKAKGKKAKTDQIDARCIADILSLGDHKPMCIHEPVLDNLRELTRLRADLSNEKSMAIIHLKESLSILFPEFEKVFRHLDSAGSLALLVAFPGPEKIIAAGEGRVGKVLSAASPRRMGKGMARRIIEAAESTVGVIQKQPALGIKISILAKRILDLRSTMRQLDQQITTLFNTLPSKPEGFPVGRAPSLAAIMSEIGDIRCFPTLKKFLSHLGWCPQSFQTGDYRMEHPRMSHAGNKYIRRLIWMLSVSAAHYVPRYREYFQLRVSEGKAKMHILVAVGRKLLSLLYAMLRTGTAYDQDWEKNRRFALARR

SEQ ID NO: 392511 - protein, 405 aa, unidentified
MWYAGIDWADDHHDAMVIDEQGQRVASCRVSHTPEGLAQLVTFLQGTVAAAPTPHELACLIETTHGLLITALLDAGLAVYPVNPKTVDRRRKPSGAKTDAIDAYLLAKTGRSDLADLRRLAPDSPLVQELKALTRDQDGLIQSQTRLVNQLTACLKAYYPVALDLFTKLQQPLTLAFLQAYPTVEIAQHASVEELSAFLRQHHHRTPDATAQAVWERVHQPQLLADAITIRTKSRLLLALVSQLGPLLEQIKQYDTEITRLFLSHPDRAIFSSLPRAGKRLAPRLLAGWGDDRERYLSAASVQALAGTSPVAYQSGNYAKAHRRYACVKPFRNVLYQFAWQSTFQEPWAQAYYQRKRQEGKSHSMAVRALANGWVRIIHAMWLKQGRYNEAVFSAARQAHGSHAA

SEQ ID NO: 392512 - protein, 415 aa, unidentified
MHTFEQLTHFAGFDWAKEHHDAVIVDRQGATVQSVTFAHTAEGWAQWREMIKACPALGVAIETNQGAAVEQLLQSQVTVYPMAPKAAERYRDRHVPSGSKTDQTDAWCFADALRVDGQHWRSLAPEDPLTEELRLLCRDEVELITQRTALVNQLQQALYEYYPAALEAFGDWTAPYAWEFVLAYPTAEQLVKAGQRKWEKFLHTHKLWRPDTAPKRLEIFGRADRFCGSEAVTRAKSRLALSTAQVLRTLEKQLEEYRSAIEKLFAQHPDHDLFGSLPGAGARLAPRLLSEIGSNREQYPDAQGLQCVAGTAPVSFESGKIRRAKIRWHCNRHLRHAVHLWADCSRKFCAWAGTYYQAQRDKGKSHACALRCLGQRWLKILWKMWQGRQSYDETVHALNQQRHGSWVLQLQPKTT

SEQ ID NO: 392513 - protein, 367 aa, unidentified
MKKISTVTAEKVEKNASQKLTIGLDLGDRFSWYCVLNEAGEVVLEQKVATTPKAMKEVFGGMPRSRIALETGTHSPWVSRVLSELGHEVIVAHARNVRLIGESRKKDDRLDARILARLVRIDPQLLAPVKHRSAQAQADLMAIRARAGLVRARTSLINTARGVTKSYGERLRGCNPRNMNPEKAQELSPELQAALGPLLGEIESLSERIGEYNERIEQIGKESYPEVARLKQVKGVGTLIALTYVLTLEDAHRFGKSRDVGCYVGLQPGRRNSGQSEPQLHISKEGDRYLRTLLVQGAHHILGPFGADSDLRRWGLKLAERGGKNGKKRAVIAVARKLAVLLHRLWVSGEAYEPLRNQRQVALPAAA

SEQ ID NO: 392514 - protein, 334 aa, unidentified
MPQSTLYVGMDVHKESMAVAYVAQDHGAEVVFLGSIGTRQCDIDQRIRPLQSKSKELVFVYAAGPCGYWLYRSLTKQGQVCWVVAPSLIPKQASDRVKTNRRDAVQLARLMRSGDLTPVSVPPVEDEALRDLRLARAATLHALKTAKHRLKAVFLRHDIRSSGRATWGPTHLRWLSEVVCPAPAQQLGFQEYVNAVTEHTQCLQRLEQERHEHVQSWRLRPVVDALQALRGVQCTVAVTVSSELGDLARFDKPSQLMRYLGLTPAEYSPGDHRRQGAITKTGNAHAVSCSKAPGPTGSRPKSAGISKCGSNSYPNPSRLSVGRLRCGCANAIDT

SEQ ID NO: 392515 - protein, 350 aa, unidentified
MKKSTPPAADAAHDVAVVGIDLAKNVFAVHGINSAGKPCLVRPHVRRDQLLEMLAQLPPCVIGMEACSGAHHWARTVIHLGHTPKLMAPKFVAPYRMQGARGKNDANDAAAICEAVTRPNMRFVPVKSVDAQVTLTLHRVRSGFVSERTATINRLRGLMSEFGVVLPLKASTVRRQARAASEALPTWMQRVVADLLAHIATLDERIDEYEEQIKRIAVTDTASKQLMKLDGIGPVTASALVASVGNGHDFKNGRQLAAWLGLVPGMHGSGGKTRLGRITKAGDHYLRSLLVMGARSLLSLAHNKCDHLSRWAISLQERIGYGKAVVAIAAKNARLAWAMLAKGEQFKPLT

SEQ ID NO: 392516 - protein, 350 aa, unidentified
MQQFIGCDAHKRFSVFVAVDERGTATKPVRIEHVREDYAHFLSQLPERSEIAIESTGHWYWLVDEMERAGHHVHLANPMEAKKRMGKTNKTDALDAKGLAILLRNGTLPESWIPPGPLRDQRELLRTRMALRDLRSSLKHRIHAAVDRYGLHTDAITDLFGIKGREYLASRLPEFPPETARMVKVQLSALDELAAHIETIEQRIHAEIAPTAEVHLLRSVPGVGEILAPVIGLEIGDVNRFPRAENLASYSGLVPRVFSSGGHTRLGGISRFVNQYLKWAFVEAANSAVRLKAHRQSHVGCLYQRLLAKRGHGRAIVAVARHLAEASYWILRKQEIYRAPHQNKISSRNG

SEQ ID NO: 392517 - protein, 341 aa, unidentified
MEHIAIDLGGRESQVCVRTADGQIVEERRVPTRSLGSWVGHRAPGRVVVEACAEAFFVADEARKYGHEVRVVAATLVRSLGVGARRTKTDKRDARTLSEVSCRIDLPSVHVPSAESRQLKTQLGMRHALLRSRTMLINTVRGWLRGQAVGIRKSAEAFTQRVRETAGPSLPPYVERQLSMIDELSEQIEAADKELAKLAKASTVCPRLMSVPGVGPVTSLQFVAIIDELSRFQSAHRVEAYLGLTPGEHSSSDKVRRTSITKAGSTAMRWCLVQAAWAARRARGQHAMIDWSIEVQKRRGKKVAIVALARKLAGILFAIWRDGTVYNPQNASRAVPSQTAA

SEQ ID NO: 392518 - protein, 485 aa, unidentified
MAKESVYERLTGGDLKQRKDLQRRLYSDNPGLDVVHANAAGIDIGNESHFVAVPPATDAQPVREFGSWTADLERMAAWLKSCGIETVAMQSTGVYWFAVYDVLEKHGLKVFLVNASHTKNLPGRKSDVQESQWLMKLHTYGLLRNSFRPPEEIRPVRAVWRLRDRHVQDAGRSVQHMQKALTSMNVQLANVISDISGKSGQAIIRSILAGERDPRKLARLRDQRIRASEEEVARSLEGNWQEDQLFELQHAVDEYDFRLKQITECDSRLQTYLAVLPTRPSPGADTGATPPAPAGVIGKKKRHAKKAQGYAPSSFNLAAELIRVSGVDALRVDGINLITFQTVVAELGTDLANWFPTEYHFASWLGLTPRRDISGGKVIRHTRQKSQNHVAGVLRMAANALLRSDSYLGARYRHLRTRLGSPKAIKAMARYLACIVYRLFTKGQAWVDRGAEHFERNRQTRELARLQAQAGSRGFRLVPVTGEQA

SEQ ID NO: 392519 - protein, 468 aa, unidentified
MRTAKTLWQNRKEKKEWTRRLQSEDPGLEAVHPQAAGIDVGNSAHYVAVRPDRDPEPVRRFECFTADLYRLSDWLKSCGVNTVALQSTGVYWIPLYDILEERGFEVYLVNARHTKNLPGRKSDVQESQWLLKLHTYGLLNNSFYPPSAIRTLRTYWRQRAEHVEGAATCILRMQKALTQMNLQLANVISDLSGVTGQKIVRAIVAGERDPRKLAELRDARIHASQEEIAKSLEGNWRPELVFVLKQEVDMYDTYQQRIAECDQQLQKHLATFANNATPGQPPSPKGESKKKKKKPTQNAPAFDLSHELERISGVDLTRIDGIEVMVAQTILSEVGLDMGRWKTEAHFSSWLGLCPDNRISGDRVLRRGTRRVINRAATALRMAATTLIRSRSYLGAQYRRLRTKLGAPKAITAMAHRLARLVYRMLKYGQQYVDKGMECHDERYRNQQIQLLLKKAAKLGLQLVPALA

SEQ ID NO: 392520 - protein, 400 aa, unidentified
MISVGIDVSKEKSTVCILKPYGEIVSKPFEVYHVEQELSELATMLLRLNDEVRIIMEATGIYHLPVLSYFKERGFFVAVINPFEMKEYRCQGLRRVKTDKQDAIAISHYGIDHWYRLKEYEAQENIYTELKLLGRQYCHYMRMRVESVLELTHLLDYTMPGIKTLLQGWNERNGKDKLGDFAEEYWHYDNITKKSEKQFIDSYLKWAKKKGYHQNQDKAIKIYALAKEGIPTVSSNTPSTKMLVQEAVRVLREVDHTLMTILTQMRSLAKSLPEYPIVRAMGGVGDVLAPKLIAEIGDVRRFHSGKALIAYAGIDAPPYQSGRLVGTERKISKRGSSNLRKIGYEVMRSLKTHKAPEDAAVYEFILKKEREGKSKRAAKIAGLNKFLRIYYARVMEVYRK

SEQ ID NO: 392521 - protein, 306 aa, unidentified
MLTAEADKRKTKVVVNTAAGVQALLAWCAKHGAQPAQLHAILEPTGLYHEQAATALPQVRVSLVNPAQARDFAKSLALRSKNDALDSYVLARYGQTLSPALWHPAPLHARQLRALLTRREALSKDLLRELNRKEKSQFSPSAPLVDGSIDKAIAFLREQIKQIERAIDQHIDNHPDLKQDCELLNSIPAIGPQAGNAILAVMHNRHIDSAQSLAAYLGVVPVQRQSGSSLNSCARLSKAGPSQVRATLYMAALVGTRHNPHIRALYQRLLKAGKSKKAALGAAMRKRCICASGSSKTASPTSPITP

SEQ ID NO: 392522 - protein, 340 aa, unidentified
MTVIIGIDPHKATHTAVAIGCDEGELATVTVRATRQQVDKLLGWATSFEERTWAIESAGGLGYLLAQQLVAAGEHVLDVPATLASRVRVLGTGKSDKNDPNDARSVAIAALRSPGLRSVQPADHAEVLRLLAKRNQDIGDLRTKLVCRLHALIASLAAGGIAKELNASDADGLLGAFEPCSPVEATRHQLALELLEDIRRLDSQLKESHKRMKIAVRASGTSLIEVFGIGPVLACALIGYTGDVTRFTGRDQFASYNGTAPIEVSSGGRVAHRLSRRGNRQLNHAIHMVAICQIRQTHSEGRGYFEKKVAEGKTKREAIRSLKRQISNTVFRHLVLDTKR

SEQ ID NO: 392523 - protein, 322 aa, unidentified
MNKYRETFGVDISKDVFDVYGSTSGHSQYKNDEKGFKNFLKNLPDDILVVMEATGYYHYRLAQFLYKSEITVSVVNPLSIKRFIQMKLAKVKTDKSDAKAICEYGLVNRVPLYTALTDVQSECLQLFRTLDNYIKHRTATKNKMHGEEALGIPSPFTYRSLRRNKKHYDIEIKAIETKILSLVKKDQQHQLTLLTSIPGIGEKTALFLIVVTDGFSKFENASQLCSYVGITPTIRESGSSVRGRARISKVGNRKLRNLLFLCSFNACKHNKACRELYERIVSKGKSKKLALIAVSNKLLKQCFAIAKSGRPYDETYVSVLMR

SEQ ID NO: 392524 - protein, 341 aa, unidentified
MNIKRIGIDLAKQVFQIHGVDGQEKVVLRKQLRRAQLLDYFKKLPPCLIGMEACGSAHYWARELQKLGHTVKLMAPLFVKPYVKSNKNDANDAEAICEAVARPTMRFVAIKSIAQQDIQAVHRIRSELVQQRTAKVNQIRGLLAEYGTVVGRRIDVLEHALPLILEDAENGLTADFRVLLEGLQQDLATLNGRVDDLDKTIKSLATSNTDAKRLQQIPGIGPIIATALICAIGDGKQFKRGRDMAAWLGLTPRQHSSGGKDRLLGISKHGDAYLRTLLIHGARSVLKVASQKDDPRSRWLQNLCSRRNKNIAAVALANKNARIAWALLSKKTDFLPEGEPV

SEQ ID NO: 392525 - protein, 345 aa, unidentified
MVEISTIGLDIAKSVFQVHGVDGSGSVVVRRQLRRGEVLKFFSGLSPCVVGMEACGSGHYWARQVAALGHQVRLLPPAQVKPYVKRGKKNDAADAAAICEAASRPHLQAVPVRSAENQAVLLLHRTRDLLVRQRTMLICAVRSHLAEFGVVAGQGKGNFGKLVARLESAEGEALPALARAALRALAAQIADQEARIEALEKQIVAWHRGDPASRRLASIPGIGPITASAIAATVPDLSIFKSGRQFSGWLGIVPGQNSSGGKQRLGRITKTGNRYIRRLLVIGATGLIRYRRTNIPGGAPWVNQLLARKPVRLVTVALANKMARIAWAVLCRGQTYRQAAAMPAA

SEQ ID NO: 392526 - protein, 346 aa, unidentified
MENIALDVHKHYTWAGVENQEGQQLYASRLAHSRGCIKNFVQRWSAGSPVAVETVGNWYWVVDEIEAGGGKPQLVNARLAKLMMGSVNKSDKLDAKGMNMLQRAGTLPTVWIAPSGVRDARELPRTRMVFSRQRTQLKNRVHATLSKYGYVVDEVSDAFGKRGRQIIEELSSKLPPHTKQALDHVLDQLDEVMGNLKAVEADMIKAFAPCAQTTWLESLPGVGQILAVVAWTEIGSIERFDRAEQLASYSGLVAREHSSGGKFHYGAIRRDVNVYLKWAFVEAANSAIVHRDHCGYQHVSQLYQRIQPRRGYNRAKVAVARHLAEASFWMLKKGEPYREPRLSTQR

SEQ ID NO: 392527 - protein, 330 aa, unidentified
MNYSHFVGLDVGKKSFDASLVSLDQELSHHTFPNTPEGIEELLHWIKQHGVEVETALFCAENMGSYVIDLCLSSYQYHFPLALECPLTIKKSIGLQRGKNDRIDARRIAQYASLHYRKLRLYELPDKDLVRLRNWLVIRDNLVKQKVSSLKLLELPRETSRLADLMVPMTFLENQICQIKEKISYVEEEMEKIITEHITLSTNYRLLTSIKGIGPVNAIVLLCVTDNFQRFSDPRKFACYSGVAPFEYSSGTSIRGKTKTSHLANREVKVYLTRAAITAIAWDPQIKAYYKRKIAEGKHKASVINAVRAKIIARCFAVIKRKTPFVTLSA

SEQ ID NO: 392528 - protein, 327 aa, unidentified
MNATLDLLFVGLDVAKGKADVCLLQPDGRPLEESFENSRPGHEKLLAWLDRHRADRPIHAGLESTGPYSRPWCELLYASGHAVSLLNPARPKAYGQACGQRNKTDRVDARLLAQFVAEQQPSRWVPPAQEMEELKELTRRREELLALAQAEKNRVESALCKSVRDSLARSIKALEKELGRVEDELEQLIGRHPSLRAKEKLLCSIPGIGQVTARKILAELPDVSCFQNARQAAAYAGLSPRRHESGKTVHKKGRLSKIGNAGLRKALYMPAIVAIKHNPVVQEFAQRLRANGKCESVIIGAAMRKLLHIAFGVLKHKKPFDPAYAKP

SEQ ID NO: 392529 - protein, 472 aa, unidentified
MQFIGGGSQQEYVERTRGLDPSHCLAAGVDVGKYEALCLIADHRGEVVGEALTFSLTEPGVRSLEAMLAAATQSRGAVSVRIGVETAGHYHRTVVARLVAAGHDVVELNPAHVKAARTQQGSRRLKTDLRDAAAIVDLVISGSGRAPQQRSDALIEQLVWAGVRRRRVRSRTALSNQLLGTLDLIFPGLDGCFDDLLGSKVGPVLLHDIADPGRLHRLGVEGLQAFTARRGVRLQRRKAEQLHRAAADALRLPVVERACRAAVLTADLAVLDMLNNQIDQAEEHLTRVLLNTPAGVLTSLPGVGVVRASNYGAALGDPARFANADRAYRASGLVPASYESAGRARGGQGISREGNAELRAAIIELGRGLAQRDPNFAAYRASVSERMKPLMAAIAVGHRAHRLAFALMRSGESYDPARLAESVATNGERRTKEAGRPVKKNSREATCRHDVTYPPVTTVPRTTATSKTLART

SEQ ID NO: 392530 - protein, 342 aa, unidentified
MEELYYIGLDLHKKIIAYCIKTVSGVTVSQGTVAATRSALLKWIESLPKPWVAAMEATLFTGWVYDFLKPHAKDLVVAHPAMLKAITAAKKKNDRADAEKICDLLRVDLLPQCYMAPAEMRELRRVLRYRNFIVRMATTVKNKMSGLLMEVGAEYSKKRLHGRSYFGNLLETVEDVPSSVKELLKLSRAGLEMFAAVQKKLLAALRENELIRERVRRLMTIPGIGEVTALTWVLEIGDPQRFSARQATSYCGLCSAQRESAGKETRGPISKKRNKHLQSVLIEAAKLAPNWNPQLALVHERELKKGNRNRATLAVARKLVTYMLAVDKTGIDFVLAHEADAA

SEQ ID NO: 392531 - protein, 428 aa, unidentified
MNKDELTRVEQFNQFKNGIRGSNKHLIIGIDVAKDKHHAFMGSATGKSLLRRLIFENNISGFGKVLTQSEAIRVQNALQYSVFGFEPTGNYHKPLAEYLIRCMHNVVLVSGLATKRNRELLDGRWDKHDTKCAANIADLISQGKCLFYETPLPQIRQLRELMSLRRRLKKEQHSLKMRIRNNLLAKYFPELDRFYNQCESQCLDIIRECLNPSEIAGMEFDQFYKALPVRKGKIVQLRRLIKIHHLACESVGCEMGEAGEFEAHMLVDKLRAVCKRIEETKDLIEDISLDFTEYSWLLTIPGFGPYISALVLATISNPYRFTNRKQVLKMAGYDLNAVRSGKKSDMVVPKISKRGNAALRYALYQAAFVASTRNLAFVQYYTRLLQGREREQGIKTKMRVKIAAKMLVIAWTLMKNKIPFNPDYLKDE

SEQ ID NO: 392532 - protein, 383 aa, unidentified
MIKYSLGIDISAQSFDCCISTIDKLQKVSVKNTRKFNNNKQGFISLKDWITKHYKQKEISLSIIMEATGVYYESCALFLYENDFSVSVVLPTKAKRYLQALGLKSKNDKIDAKGLARMGAEQCLETWTPADEFYYQLKRLTRQHQALQELKTNVKNQLHAIHNSMYLNDLVVNQLENTIVHLISQIKEIEKAITEHIKSDSSIADKVAGICQIKGVSTLSAAVIIAETNGFHLFKNAKQLVSFAGYDVVENQSGKHNGRTKISKKGNSRIRRILLMPAFNVVKYKQTPFVNLFERTYSKHKIKMKSYTAVQKKILVIAFYLFKKDCAYDNGYYTRNLEQETFSLLNFGEVLNEESSTNNSIDATQGRNTVKSSQYDSSLLSQK

SEQ ID NO: 392533 - protein, 416 aa, unidentified
MNERGTVAAGIDTHKDTHALCVIDLVGRVVATGSYAADGEGYDRIAAAIGDPRDCVVVGVEGTGSYGAGISRRLAELGYDVVEAVRPKRERRMAGRDKNDPADAERAARDALAGKASGTPKAGGGWAEALRFRMVARDAAVSESTRAANSAHALIVTAPAPIRGELGGMKTPALMKALSRRRRARDVVESSLWESLRSLSLSWIGAKKAAAAHEEAMREILLANAPALPGIHCCGTISAARLAVTAGDNPERVSGESAFASLCGASPVEASSGKAKRHRLNRGGDRQANRALHTIARQRMRRDSRTKLYVDKRTKEGKSRREIERILVRYIAREVYGALVRPTDAACEPYRASARAAKSERLRAGATQAQASRALGVASARISEMERGRLVDAPLLQRHRSWLESLSAGERWGNPE

SEQ ID NO: 392534 - protein, 391 aa, unidentified
MAHYFVGIDISKYKHDCCIISAADQQVVAKFSFRNDRDGFDTFADTLQSIAEPKDIRIGFESTSHYALNLELFLENALLTFMEVNPVLISEYRKSQTLRKTKTDSVDCELIARWLLSVDYKPHPKGFYHSYSLKSLTRLRNRLIRQRSLYLVKLTNVLDHTFPEFKPFFDGRFSKTALYLLENYGTAEKMSHMNSASYENLRSISRGKFSPQKFMKLKELAKNTVGVSNDIFDIELYCLLDLYKNLSERISDLEEQIIRLINDVHPHFMTIPGIGQLSAAVIYAEFGDISNFDSPTKMLAFAGLEPKIDESGTESHGGRMVKRGSSQLRYVLLNCTLPLIRFDMTFAQYYAKKRKEGKPHRVALTHVAKKLVRVIFALERQNIDFDPEAVR

SEQ ID NO: 392535 - protein, 380 aa, unidentified
MPDVSSIAPAEVDQWIVFDVHKNSLVAGVLPAAGGSPEVTRLENTERAVRRFLGRFGDPGALAVAYEAGPCGYELFRLLSGMGVACDVIAPSLVPVRAGDRVKTDRRDAKRLVRLYRAGELFFVEVPSPAHEGLRDLVRARDDLRGARTAARHRVVKALLRHGHVYREGRHAWTRRHAAWLSRQHLADPLAHRALCHTRSHLAAIDAQIAAIDSELEAVASSEPWCDPVRWLRSFRGIGLVTALGLLAEIGDFRRFSHPRELMSYLGLTPSEYSSGDQQHRGHITKMGNRHARRLLVEAAWHYRHPPRHSARARALEPHVPDVVRSRAWQAQVRLNQRHRTLIGHGKRSTVANVAVARELCGFLWAAMTHQPLREETLAA

SEQ ID NO: 392536 - protein, 405 aa, unidentified
MTSVGIDISKGKSMVVAITMTKEVTVKPREFEHTELGLEQLLDVLAPLTLEGETRVIMEATGRYHEIVASTLYEAGIYVSVVNPLLIHDYGNNSIRCVKTDRKDALRIARYGVDNWGELKEYAPVDSARQLLKLFSRQYNQYMKVLVSQQSNLIALLEKTFPGVNDLFKSPRRDDGHQKWVDFVQAFWHSDCVIRLKEREFSLRYHKWCKRKGYNFSEAKAFDIYVYAACCGYTLPKNSSTKVIISIAVEQVIACSKSVAAIKAEMLKISAQMPEHKVVLGMFGVGDITAAQLIAEIGDVRRFNNRGALVAFAGVDPSTYQSGKYASKSGKATKRGSAHLRKTLFQVVGAYLKRSPADEAVFQFLNRKRAEGKHFYVYMTAAANKFLRIYYARVKAFMESIDCNN

SEQ ID NO: 392537 - protein, 304 aa, unidentified
MFGIGIDVSGENLDVAVHEQAFRQFKNNKRGWASLIRWLQRWPAKQVVLEASGGYEQKALDALHEAGLPMVRINPGRGRSFASATGKQAKTDRIDAMVLAHMADVLKLTRYVPPAAWQRRLGELCQRRRHLVQMRVSEHQRMRAFSEPSLISMLNQHLREIQKTIKQLDTTIAALLAEQEGWHDFAKLKGAGPVLMATLACELPELGRLSGKAIAALVGVAPMNRESGNWKGRRSITGGRAVVREALYMAALTAKRYEPRLKEFFESLVNQGKPGKVALVAVMRKMLVILNARKRDAEAQMASA

SEQ ID NO: 392538 - protein, 438 aa, unidentified
MSNKVIFNLDELFISVGIDVGADFSWMSIALPNQQFVGKPYKILHNSIDSLTTAVSKIKEAEELYSLESRIFLESTGIYHYPLFCYLRDKGFNCSVINPIITKNSTNINIRKVHNDRFDSKKAALVGLKPDLKVSLMPSDLALNCRNLCREYYDLIDNRSAYVNKLQGELRMAFPQYLGIFSKVTINTSLTLLETYTSPSAFLKVDKQEIIDIIKSTARFGLTYAQNKYNAIIQAATDANQFGYIIESNIKRIRLYISFIRKYDEEINSILESLHELVDANEDSDFVKQIHLIETFKGAGFLSAVSIMGEIGDFSAFSKPKQLFAYFGLDPSVKQSGKFEGTKVQMSKRGSAIARRVIHTLTLQSISISRNREAKNPVLREYYLKKCDSKPKLVAMGAVSHKVCNMIFAILRDNKPFKIIAPQEHIKQYNSAKCDIAA

SEQ ID NO: 392539 - protein, 460 aa, unidentified
MSRAQKGSQGAPSVKPVAEVDTLTTIHPNAAGVDIGMDETWVSVRADRDAVPLRRFGMNTPDLIAMAEWLQGCGVETVAMESTGVYWIPLYEILGARSFEVYLVNARHAKNLPGRKKDEADAQWLRRLHTFGLLNNSFRPESEICALRAYMRHRADLIEHRAAHIQHMQKALQQMNVRLSPTVKDITGVTGMAIIRAILAGVRDPLQLAQLRQPTCAKPEAEFVKALTGNYREEHLFTLKQALALYEAYTQQIRECDQELERKFSTLKPVHDHDLPPLDTSDKPNTHSKNAPAYDGRTLLYQLLGVDLVAVHGLNQVTAQIIVTEVGTDMSRWKDEKHFCSWLGLAPHNDISGGKVLRSRTLKTHNRAAQAFRLAAQAVSKTETAYGAFFRRMRAMHGPKKAIVATAHKIARAVYFMLRDHKPFHSPNAEEYTRREREREIVRLSKKATKLGFTLAPISP

SEQ ID NO: 392540 - protein, 417 aa, unidentified
MKEEFFFYVGVDWGVEFHQACILDANGETICQRRIEHSGAGMLEFCDFLQALTNGKASALAVAIEVPRGPVVEALLEHNYAVFSINPKQLDRFRDRHPVAGAKDDRRDAFVAADSLRTDQHCFRRVRPDHPDVIRIRELSRTEENVGIDLRRCVNQLSQLLLRYFPQLLRLCSTPDEPWLWALLELAPTPQRAAKLTEKRLQQLLAKHRIRRWTAEKVGEILTAPPLPLAGGSAEAISEHALLLLPQLRLLHLQRKQVADRTQQLLDRMAASTNDFPMSQEHRDIPVLLSLPGVGRIITATMLAEGAHILSLRNYHALRAHAGIAPVTKQSGKSRQVLMRYRCNQRLRNAFYHWARTSIQHDPHSKHHYARLRQVGHNHGRALRGVADRLLAMLIAMLKSGQTYDPNRRSTANLTVA

SEQ ID NO: 392541 - protein, 392 aa, unidentified
MYIIGIDIGKNHHEASIVSPEGKQIGHSLRFATTHKGADSLMSFIFNNIGNSSCIFGMEATGHYWYPIYSFLKARGYTIYVINPIQSDSLRKMYIRQTKNDSIDSFLIAEVIRFGQFTTTSMADENILAMRQLCRYRDSVISSRTEIKLRISTIMEQIFPEYEKQFSSLWLSTSMGILEKYLTPENIENAPIDELFEIIKDKSHNKLTMKKAISIREAASDTFGIKIAQDAFSFQLKQLIDRMNFLDKQIEALDCQILEYYEKFDCYLHTIPGIGMIAAATILAEIGDINRFKSSSALVAFAGIDPTVRQSGEFSSTHNHMSKRGSPYLRHAIFLAATTCSFHNSPLNAYYKKKRDQGKHHLTATGAVARKLTTVIYAVLRDSKPYEPKKFC

SEQ ID NO: 392542 - protein, 349 aa, unidentified
MPKVKHQNAAVYGIDLGKSTFHVVGMDKVGTPVQRAKFSRKTIFKFFEEAPSALIGMEACPGSQWLARKLLAMGHRVRIIPAQFVKPFVKSNKNDTIDAEAIAEAVIRPTMRFVKIRNEDQVDMQALHRVRSRLVSSRTQLINQMRALCVEYGVAIRNGAGVFKVDLPRVVADDSNDLSVGMRRILTDLFEDLKALEIRTAQVTREIESHAAQDDVARRLMTIPGIGPLGATALLAAVGDGKQFAKARDLASWLGLVPRQHSTGGKPTLLGISKRGNPYVRSLMIHGARACMIHLKAVRDRFGAWIEKLKLRMHPNKVVVALANKIARIAWVILTKPSALYERVDPAYS

SEQ ID NO: 392543 - protein, 343 aa, unidentified
MEYYAGIDVSLKESSVCVVDAAGKVVREVKVASEPEALVRYFDELGLPVSRIGLEAGPLSQWLHAELIAAGRDAVLLETRHVKAALSAMTVKTDRKDARGIAQLLRMGWYRPVHAKSAPCKDTRALLAGRKLLQAKLLDVELSIRGILRGYGLKVGEVSRGRFEARIRELTAGHAILETVIGAMLAAWMALWNEFTRLHREMLKIARADRVCRRLMSAPGVGALVALTYRSAVDDPSRFEKSSAIGAYFGLTPKKYQSGETDRDGGVSKVGDGMVRTALFEAAHIMLTRAVRFSSLKRWALGVAQRRGMKRAKVALARKLGVVLHRMWVEATEFRWSNAVPAA

SEQ ID NO: 392544 - protein, 418 aa, unidentified
MKTIAWNERRYFGGLDWASDHHDVIVVDDQGAVVCELRFEHTATGWAELRKKLRAYEPLAVAVETNQGLAVEQLLAAGYTVYPVNPKSASRYRERKAPSGVKDDRLDAWSMGDALRVDGQGWKALAPDDPLIVELRLLTRDEVALIEQRTALVNQLQCALREYYPAALQAFSDWTCPATWAFIEAFPTPEVLAKAGKRRWEKFLHTHQLWREATAEKRLATFAAATDLQGSAAAVAAKSLLAVALAKLLRTLEAQLRLYRERIAETFRNHPDHDLFGSLPGAGPKLAPRLCAEIGAQRARFETAESLQSYAGTAPVTYQSGQIEKHLVRRACAPALRAAVHHWAEHSRHKCAWAETYYQAHREKGQSHACALRCLGQRWLKIFWKMWQTNTPYDEALHQRNQHKHGSWVLQLKPAETD

SEQ ID NO: 392545 - protein, 341 aa, unidentified
MTEYIGLDVSMKETAVSIRRGGERIWRGKCASDPNIIAELVRKRAPAAKRVVFETGPLSVWFYHALRAEGLPAICIDARHAKAALDMAANKTDANDADGLAHLAEAGFFREVRVKGFDSMLTRTLVAARTRLVRITVELSNQIRGIMKTFGLVVPAGKGTTFEKNVRSLLIDQNELVPIVIPMLEAWRSIRIRAAELGRQLVADARQSQACRTLMSIPGIGVITATSFVSAIEDPNNFKKSPSVAAWIGLTTRRYQSGEVDYDGHISRRGDRHLRGLLYEAAAVILTRCSTESSLRTWGLKLRERIGFKRAAVAVARKLAVIMHTMLKTGELFNPSAGAIA

SEQ ID NO: 392546 - protein, 414 aa, unidentified
MLYVGIDWATNSHTVTLLAGPGDVLAVMTIENTLKGFLRLLEAIREHLGEGQPAAESKDVLFAIEDRNQHLVDFLMANDFTGYLIEPNRMKGYRLRYGSSGNKTDPADSFILADVLYRDQDQLAPIVPDSETVRALKVLLRDRESFVRDQTRLINRLTICLRQYYPEALEFFSDVSGKTSLAFLEAYPDFAAARRLSHKRIEQFLAEHRCSRTAVLERIAAVLNRRPMPVPAVVVRVKRQQALHIIRQLRALQDAVVEYDVEIQRLGAENDEIRRFRGLPGGGTIISAGLHTLFGDDRTRFASAMEVQSLVGTAPKTIQSGNWRGVCFRFSCNRFYRSLAQRLALSATRLSGWAKRYYKGKRAEGKTHQHALRCLANLLLKVAFAMWRDRTEYSEDRHLAQIARHHMRLTSNSV

SEQ ID NO: 392547 - protein, 402 aa, unidentified
MTFPFDQQIRVAVDVGCHRHRVAVADPENRILEEFDIEHNAQGIGAFFRRVEAHERRLELPVAVAMEGFNGWARPLDTQILVRGWRLFNVNNLKLARFKEIFPGPAKSDPIDTQKMLELFELRAHLPLAKDVLQEIAVAPVENEKLKRITRRRRQLVNERGRVINRLQSDLQAVSPGLGSITAKVDNLWFLRFLTCREQLDQLMRVQRRTVLNIQGIGQRYADIIQKWQKQAHFSAEVDYVGPMIVADARRILELKDQINVLETAIEGLLMQSAIARLVDTIPGYGVVCSAELAGEIGTIERFTSEASLALYLGMAPLDNKSGQYHGSKSPRQVNSRAKAAMMIGADRHRKQVPESQRYYEKKRAEGKLHNQAIRALGRHLVRVIWSMIANNRDYQLKTKTD

SEQ ID NO: 392548 - protein, 354 aa, unidentified
MIIGCDFHPRFQQIAFVDQETGECGERRLSHPEEAERFYRSLAGRQVRLGAEATGNFRWFRLLMQELGHEFLLGDATAIRAACPRKQKTDKRDARHILKLLVEDRSPDVWQPPEENENLRELLMHRCRMVRMRTRIKNQLDSMAKNEGLLSKRVWCPMRRNQIEALPLAGWDVERRKDLIALLEEMNRRIEPLDKAVIKAAEQSPEACVLMTHPGVGPVVSLAYVLTIGNWERFPRGKQVGSYLPPQRRRPVAGDPGLGLIPAEESSSDKRRLGHISKQGNTTLRWLLVEAAATAQRYDPSWHRQYVRLSMTKHHGVAKVAIAHKLAVRLYWMWRSGEEYSKVMERGSHVGQPE

SEQ ID NO: 392549 - protein, 321 aa, unidentified
MTYVGIDVSKATFVVAYSSAKGSRTNSFKNTIKGIHEFIQTISVAEHHCVLEATGNYSSLLVYLLSEAGIAVSLENPLKIKNFARVMLSVTKTDEIDARLIAMYGEKMQPAPYKLRSDTILVLKQKRTVIRQLKKQFVATRNLKGSMEALPFFDPKCKKTIEKTITFLEKQIKELEEELASLAQSEYKKQMDLLTSIKGIGVTLAAALIMATGGFTYFDNAKQLTRYLGLSPTYQQSGTSVNVKGHINRNGDSSLRSQLYVAAFASLRCNVECKACFDRLRSKGKPGKVALIAVANKLVRQAFAIVTQEKLYVDGVKSAKP

SEQ ID NO: 392550 - protein, 339 aa, unidentified
MDTKILYVGIDVSKLTLDIALTVDAKTTIASTKVNNNKDGFKSSARWIKRYGQINQCEEVLCCIESTGIYSDGIIEYLQENTAFKVSVVNPAQAKAYSSTVLLRTKTDKVDAGLLSKYAAGVKPDVTTPMPKEVKELRVLIRHLDYLITRRAQEKTHLESTADKVIEKSIKDIINHYDGQIKKLQKRIKEYLNNHHGLKERIDLLKTIPGIGELTATILVCELHAEDGRGKITAKAQVAHAGLAPKHKQSGTSIRGKSNICKTGNSRLRRCLYFPAIVATRKNPIIKEFYQRLLAKGKLKKVAIIAAMRKLLTIAIGVLNNKAVFDPEWSAKMTKVLYA

SEQ ID NO: 392551 - protein, 421 aa, unidentified
MNKRNYRATHVKQVNWRNVIQNTAGKALVLAIDVAKEEQFAMLMDADSQSHLLVKWTHPVETPVLLRHLATLLSQQLEVAMEPTGIYGDTLRGQLALAGYRTHQVSAKRVSDAKEIYDGVPSLHDAKAAYLIGRLYWSGVAQPWRESSTQQRELKALCNRYELHSTHYGRNRNRLEAMLQRHWPEALVYLALDSVTLEYLLIRYGCPQALARDSATAATLMRKVSCGKLAEAKIQGLLEDSRNSIGIPCVEEERRYLQQLGEELRRSRLHQKAVRKQLQVLIDADEQLQAMSAVVGPLTTAMLLSNRLDPRHYGNAGAYRKGMGLNLKEKSSGKFKGQLKLTKRGPGQARKYLFFSILRLINHDPIVQRWYQAKVRANGDRDKLKYVVALMRKLACALWHVGHGEAFDARKLFTVKPVVSA

SEQ ID NO: 392552 - protein, 340 aa, unidentified
MHATMIGLDIAKTVFQVYGEDSEARAVLRKRLSGTALAGLFAKLPPTVVGIEACGTAHHWARTLTAMGHTVRLIPAAYVRPFVKRNKTDARDAEAICEAMQRPSMRQVPVKTVEQQAGRGLETARDLLVRQHTQLMNSVRGLLAELGIVAAQGRRGFAVLCIRIEAGDPAIHPVLLPALQTMLEQWHGAGRAITELEARLVARAKADATMRRLMTVPGIGPLSAHAIVAAIGDGRQFSAARDFAAWVGLTPRQHESGNRRHSGRISRQGDQGVRRLLTLGASAVMRQARAKSQRATAWQRGIPARRPVKVAVVAQAAKTARIAWAMLRSSHSYRAAGAAA

SEQ ID NO: 392553 - protein, 484 aa, unidentified
MCPRMTNHQWGADDAFSFSFASAGALAFANECSGSAVLPAHYMAFAERQLGLSRLIRLISLEVSMAHPPTQEFAAFVGIDWADTSHAVCLQAAGSDTRESSVLAHTPEAISAWAAALRHRFGGQPLAVCLELTKGPLVSALRAHDFLVLFPVNALTVAKYREAFTPSRAKDDPSDAELQLELLVKHRDKLQKLSPQSATMRTLDQLVEFRRRLVEDKVRLTNRLTSALKNYFPQVLHWFADKDTTIFCDFLPQWPTLKAVHLARRATLERFFRQHHVQTRIIAQRLEAIQTAVPLTTDEGVVTPHVCLVRALVAQLRATLQAIEDFDRAIAQLAPTHPDFALFQALPGAGPVFAPRLLVAFGEQRERYTSATDLQQYAGIAPVTERSGNTCWVHWRLQCPKFLRQTFVEWASESIRHSFWARAYDAQQRARGKTHQAATRALAFKWIRILYRCWQTSTPYDESTYLNALVRRGSPLIRHLASAS

SEQ ID NO: 392554 - protein, 322 aa, unidentified
MAMLSFCGIDVSKDRLDVMVLPEQQCSSVRNDVVGWSELIERLRGFSIAAIGLEASGGYERGVMRALLAAGMSVRQINPFKLRQFAKASGVLAKNDRLDARMIASFVAIMPTHPAQRRSPAVEQLAEMVTVRRQLSDAKISVENASRMLENAMLQRLSRHRIARLAADIAAIDERLVEIVVSDAALAHRYRLLTSMPGVGAVLACSLIAFLPELGQLSRTKIAALVGVAPYDFDSGKLKGMRCIWGGRTSVRNVLYMAALSASNWNPTLKAFHDRLAATGKKPKVVIVAVMRKMITVLNAMVRDGIVWVDRQNGRHSVPTAR

SEQ ID NO: 392555 - protein, 368 aa, unidentified
MLLPRQRLKLARGAKDKEYAMSWNLSAAVAVIGIDIGKNSFHIVGLDGRGAIVLRQKWSRGQVEARLVNMPPCLIGMEACVGAHHLSRKLKAFGHDARLMPAKYVRPYSKGQKNDFRDAEAIAEAVQRPTMKFVATKTADQLDLQALHRVRERLVSQRTGIINQIRAFLLERGVAVRQGLRFLRAELPRILAAPPDVLSPRMVRVIEGLAEDWRRLDERVDHLSGEITALARQDVGCERLMSVPGIGPIISSAMVAAIGTGDAFSKGRDFAAWLGLVPKQISTGDRTILGKISKRGNRYLRVLFVQAAWVVLIKPKSWERHGLKHWIEAAKKRLHRNVLAIALANKLARIAWSVLANGRIFEARLQAA

SEQ ID NO: 392556 - protein, 368 aa, unidentified
MNTVKFIGMDVHKKTIAIAIADSGREDQPRSYGTIANDLNALDKLCRKLISTSTQAHFVYEAGPCGYGIYRHLTQKGFDCTVAAPSMIPKKSGDRIKNDRRDAINLARLHRSGELTAVFVPNEQDEAMRDLTRAREDAVIATRKAKQRLKAFLLRNRLMFNGGSKWTKAFFRWLTDIAMSHPAQQIVLQEYIDTVIECQNRVDRLSDQIRQLVPEWRLAPMVSALQAARGVSIITAVTVLAELGDLTRFKKPTQLMAYLGLIPSENSSGPRIKRGGITKTGNSHVRKKLIEAAWSYRMQARVSRVLLKRQQDLPDQVCQIAWKAQLRLCARYRRLVAKGKTKQKVVTAIARELCAFLWAIAKQVPAVA

SEQ ID NO: 392557 - protein, 330 aa, unidentified
MKYKEFIGIDVSKSVIDVVIYTNRLHSKFGNDEQGFDKMIAWLEKHIATGLEGVLFALEHTGLYSLWLSLFLDDGKYDFTMLSGLAIKRSMGLVRGKSDKVDAYRIAEHAYEKKDKLRLYQMPSKTILTLKKLLSYRERLVKERTAFLGRDKEYKTFLTKEENNVLFESHQRMIEHLNQEIQIVEKELYQLIKDDEVLHKQYSLINTIKGVGPQTAMMMIVLTNGFKSFPTWRKFATYAGIAPFPNESGTSIKRTKVSHLANKRIKALLSCCASTSIQHNPEMRLYYQKRIEEGKNEMSTLNVVRNKLLSRIFAVVQRQTPYVDTLKYAA

SEQ ID NO: 392558 - protein, 346 aa, unidentified
MAYYVGLDVSVKETSICIMDDKGVVAARTDISTDPDLIADFIFRHAPKVERVVHESGILAIWLTRELEKRGVPIICIDARLAHKALSGRINKSDQGDAEGLAQLARTGWFTQVHIRSEASERVRVLIGARERLIRMRKDLEGHVRGVLKVFGICMKSVGTGKLRRDFRDQLAAAADADPAIEMMSETFIPLHKTLCIARDALDDEVRMMARESDLARRLMTVPGVGPIVALAYIATLDDEKRFRKSVDVGAFLGLTPKRHQSGEVDWSGKISKCGDCDMRRLLYSAASTLISCTRKPSRLKDWATKLAERKGHKKAAVAASRKIAVILHCLWRNETVFEPGMEGAS

SEQ ID NO: 392559 - protein, 367 aa, unidentified
MKQVTTFVGIDAHKKDLFIAMLSGDQSTPVTWQLANEPNAVRRLVRKLEREAPGPVRACYEAGPCGYALQRQMTTTRVRCQVIAPALVPRKPGERVKTNRRDARKLVELLRAGLLTEVRPPTPEEEAVRDLCRARDDARTDLQRCRHRLGKLLLRRGLHYSGRNWTRAHRQWMASLTWTHAAERVVVEDYLLAIDQVEARLRELDAHLTETAQTDPYREPVAWLRCFRGIDTLTAIVILAELHDFRRFQSPRAFMAYLGLVPGEDSSGEKHRRGRITRTGNTLVRRLLVETAWHYQHRPTVGIALTRRRKGQPGRVIAIADKAQQRLCRRFRKLAAEHKPAPKIAVAIARELAGFLWAALQPPVVAN

SEQ ID NO: 392560 - protein, 347 aa, unidentified
MLIIGCDFHTRSQHIAMLDTETGEVVERRLEHENGEARRFYESLKEPALVGMESTGYALWFAGLLAELGHQLVVGEAGKIRAMEPRKQKHDRRDAAHLLNLVVRGDFPRIWLPSVEDRDVRVLIEHRHQLVQLRTRVKNGLQAVALNYRLARRAKLWTARGRKELAALPLREGMARRRSDLLPLLAQLDNWIEELDQRLEREAEQRTAARLLMTHPGVGPLTALGTVLILGPVERFPDARHVTSYVGLIPSEESSGGRQRFGRLTKQGNHLLRFLVVEAAQTASRSDPGLKRVYRRLTFRKGKPSAKVAVARKLIIRLYIMLRDQIDYAEFCRRGSHAGMLGQVALA

SEQ ID NO: 392561 - protein, 347 aa, unidentified
MVTIGIDPHKSSHTAAALDSGGEPLGQLRLPANGATLSRLLAWAGGWPQRVWAIEGAGGLGRLLAQQLIAAGETVIDVPSALTAQVRVLHRGHGRKSDGIDARSVAIVAQHRNDLATVSADDHSALMRLLSDRRDELTGERRRTVNRLHRLLRELHPGGAPRQLSAQHAARLLATVKPVGLVDTERKAMARDLLTDIRRVDRALLENRRRCAEAVAASGSTLTEIFGISEVLAAKLIGHTGDITRFASADHYASYSGTAPIEVSSGEQTRHRLSRAGNRSLNHALHLAARVQTMHPGPGRDHYQRKQAEHKSSAEALRSLKRQLAKVVYRQLRADHLLQTSPSPKLT

SEQ ID NO: 392562 - protein, 316 aa, unidentified
MSSPSVFVGIDVAQAELVIALRPTEDSWTVGNDEPGIAALIRRLRPLAVTLIVLEATGGYERALVAALATAGFPLVVANPRHVRDFARGTGQLAKTDHVDAEILALFAERVHPTPRPLPDAATQALEALLARRRQLLDMLTAERNRLAHAGPPIARDLRRHIRWLERRLGKLDDDLDQQIQRSPVWRTQDDLLQSAPGVGPVLSRTLLAALPELGHLTHKQIAALVGVAPLARDSGTRRGHRRVWGGRAAIRAVLYMGALAAAHHNPVIRAFYQRLVTAGKPKKVALTACMHKLLTILNAMVRSNTVWRANVAQTT

SEQ ID NO: 392563 - protein, 386 aa, unidentified
MPQLNDLSRSLVILEQDATLIAVIEMGQSNWLVAGIVPGVERSPLKKLAVDESALLKLLNRWREEAEKAGHRIERIAIAFEAGRDGFWLARWLRARGIEAHVIHASSVAVSREHRRAKTDRLDTELLKRAFLGWLRGERDHCKMVAIPTLAQEDAKRPNRERESLVGEQSRIVNRMKAALARLGIRGFNPKLKKAVERLDGLRTPEGEPIPPNTLAELKHDMERRRLVRSQIRDIEGTRLERLKQAPGDGPHVMVRLLARVIGVGVETADMLVQEVLSRNLRDRRAVARYGGLTGSPDESGKKRREKGLARSGNARVRRGMIQLAWRFLMFQKDSALAHWFYARTKNAPQTRKTMIVALARKLLIALWRLAREGAIPEGIVLRPAL

SEQ ID NO: 392564 - protein, 342 aa, unidentified
MQQSIFVGLDLGSSRCHQTIINADGLVIRSRSVPTSEQHLRNAFADLQGDVHVHAEASELSVWVRSIINPLVSRFVISHPRSLAWIAKDSVKDDAVDARKLAELLRLNRVHEVYYEECASRRSFKLLVVHQENLSREQARLKSKIKARLRTLGIIRKDARLFSEAGQIELFASITDPLIKQMFRQSFAVLNQILISLMDAKTAMIEFSRRLPEVRLLQSAPGVGQITACRFVAYVQTPQRFSNKRKLWRYARLGITRRESNGKRLSHPHLDTAGVGSLKDCSRKIFEAARRTKTDNSFKRFFEQSLDTTKNAVHARLSTQRKILATLRAMWQANQSYRDDGG

SEQ ID NO: 392565 - protein, 469 aa, unidentified
MSRLASPKGTFRITSEIAGIEPFFKTFFLSFHRHTFTCVDDHQPLNPMSNNSLPRKSKPKANIVIVDHRNIVGIDIGKRKHAATAVTPKGAVIASLNAFENNKAGVDLLERQVLVPATGRSKPMIALEATGMYWCALHDELQRRGYDCVALNPIQTNVRGLKKIRRTKTDRIDSETIARTVLAGDAQSTIVPEEPMYELRLLVRHRWRLIRSQNTILLYAISLVDRVFPESEGIFSKPFLKSIRTLIREIGFTPNVLYKNKINVREVLEKASRKRLTPETINDLLQRAKDSIGTRQGERVVNDQLRMIVDYLDFMDGQIEQINKELKCRMELLKSPVMSIGIGPEIAATILAESGAVERFAGPREYAAFCGLDPSVRDSGDSIRGVSHISKRGSPLLRWAFYTAAIAVYKKHRDFAKVYARQTKQQPKGRRQKGHCYALIAVAHKVARVVWRLMKDGRKFSKNPPKREN

SEQ ID NO: 392566 - protein, 484 aa, unidentified
MKSKAYRAASVKDVKISEIISRLAEGPTWAGLDVGKGHTMVVIRDSQGTTLRPWKVLQPDEIRVIAELLKELKQHRPLVVAMEPTGTYGDALRQALHDAGLAVHRVSPKFTSDYAETYDGVPSQHDGKDAAVVAELAAFGKSRLWPMGPPAYGDLLQDVQWMDTQQDILQLWLGRLEGLLARHWPELTNLLELNSATLLRILAEYGGPQALCADAQASDNLKRWGRALLKPEKIEAVRESARSTQGVRMEPAECDFMQRCARAAQAARKEIQQVQNVLEKRAAGDEKLQRVGQAVGMVTACVLFATVGDPTEYSCGEAYRKAMGLNLKERSSGKHVGHLKITKRGPSMSRRWLYFSALRMIQHPAVKPWYEHKKSKHQDHGGQGVVGVMRKLSLAVYAVARGATFDAARLFPGRKPTAKPGPSETLGALPPDPRNLPPSHQSRTKNGTAGASDREPAARSASVTETALGSVSTGALSSVAAKQA

SEQ ID NO: 392567 - protein, 425 aa, unidentified
MNLLVLKGVPMALKIVYKICCGIDVHKTFVVACIASTNDKGVTSYESHRFSTYTSGLKTLLQWLLDRDCKDVCMESTGKYWIPVYNILESDCSIILAHPKYVKAIRGKKTDKKDAKWIADLFKHDLVAGSFMPPADIRQLRDLMRYRFKLTCFKSSEKNRLQNCLTVSNIQLGNVVSDTFGKSAQAILDKLLENPADTSFDLEPLVYKSLKKKLPELRDAIDGYITTEQAGKLKVIKAHYENLESRKAELEELILALAAPYQQELTILQTAPGISSPFTAIGIISEIGTNMEAFPSAKHLCSWAGLTPTNNESAGKKKSVRVSKAGCYIKPLLVQCANAVVASKKHPEIRNRYLRLKKRRGHKKAIIAIARMLLTALYHMLKNGENYNAELYQKSDLLPVDREITVEQALMIARNQGYKIKSATA

SEQ ID NO: 392568 - protein, 528 aa, unidentified
MAAFRNGGMRGVQSDETFSSDELKSVTLDDGTRIVTSPVTDIKRPICAGIDVHKSILMAAICKTNPVTLSAVFYVRQFTTANSDIRRMADWLKSHGVQDVCMESTGKYWIPVYDILEQNGLKPILTHPKYVKQARGRKTDFRDAIHIANLFRMDLVAASFIPPSDIRDLRELCRYRLKLTFMRTSEKNRYQNSMTVSKVRLDSVFSDPFGKSAGGIMSYLIHTEPDRVRDDEILRLVDPRVKASAEEILDSIHGYEFIGVQRDKLEVIQIHMDNINACIGMIDAKLLYYRQKYAGVISHLETMIGISTESALYIIGEIGADMSVWRDSDSLASWAGLAPANNESAGKKKSTKVGKGGHYLKPLLVQCALAAVKSTRKDPYFYYKYQTLKKRRGHKKAVIAIARKMLVAIYHMIRDNADFLPVDYDDTITRNNKHAELNLENVIAFLGAHGADAEIIRMVEAQCTENTPEVEMETGAGDKSRKKKQPQSDTEPSTLPGQKTVRSKRSKKSPQTKDHDSSKQPASATATA

SEQ ID NO: 392569 - protein, 341 aa, unidentified
MTKLYAGLDVSLEMTSVCVVDEDGRICLEARVPSEPNALIETLSALDGAFVRVGLEAGPLSQWLFFGLTDAGLPAVCVETRHLKGAIGAMAANKTDRNDARAIAQVVRSGWFKAVHVKSTESQELRVLLSAREFLVNKVRDHENEIRGLLRPFGLKVGRIGAAGFEARVRELVAERPVLVLCMEALLTAREVLRRELNRLHLALLRVVKNDELCRRFMTIPGVGPVTALAFKTTIDRPERFRRSADVGAHLGLTPRQYQSGEIDRRGRITRCGDTFTRTALFAAANVMLSRTTQWTALKAWGTRLAARSSLKKAKVAVARKLAVIMHRMWRDETPFRWTAA

SEQ ID NO: 392570 - protein, 369 aa, unidentified
MPHVTSIGLDVHARSVAAAAFNPFTGEVVHRDFGTDAAEIAEWALGFEEPRACYESGPTGFRMARELRALGLDCAVAAVSRMQRPAADARRKNDRRDAEFIARMLATHNIVEVPLPDAAAEAARDLDRALDDATADYLRARQRLNMFLIRIGRVWDERNADGTRQKAWTRAHWRWISETRLEGPQRDVLEHYVTAARCAESDKRQLERKVVALAGTDRWRPAVEALSCIKGIDTLTAFRLAAEAGSFSRFRSAPAFASWCGLTPSERSSGEAERRGGITKAGNRLVRTALIESAWHYSMCTPRPKAPAPGADVPAAIRSRADECTARLCRRREALSAAGKNACKANAAVARELACWVWEIGRRAEGTLG

SEQ ID NO: 392571 - protein, 316 aa, unidentified
MDDKQTVHGVDVAKAELMIGYAESEALLHIANTPQGIAAWLAQLAPGSWVAMEASGHYHQMLAHMAHAAGMVVYVLNPQLIKHYGRAVGNRGKTDRLDAQLIARYVLREHSKLRTWVPPAPGADALSRLLVRRQTLVNARQMLAQSLSGLAELKAPRQALMASFKRMLTQVELLIRIEIARVPAMAALHKRLIGIVGIGNIVAAQLVASLTALRFTRADSFIAYTGLDPRPDDSGQRRGRRRLSKRGHGLLRCLLYNAGMAAARSKLFKPIYLQLRDRGLQSTEAIVILARKLARIAFALYQSGTTFDAQRHVKPA

SEQ ID NO: 392572 - protein, 299 aa, unidentified
MQHHAGLDVSLEETSVCIVDGAGKIIRETQVASEPEALVGYFSALEIKVVCIGLEAGPLSQWLHAALTEAGFEVVLLETRHVKAALSAMTVKTDRRDARGIAQLLRMGWYRPVHCKTLPSQEVRAIITARKTLLGKLIDIELSMRGILRGFGLKVGAVTRKSFEIRVRELIEGQSTLTAIMEGMLNTRGTLIAEVSKLHKAILRIARADGVCIRLMTAPGVGALTALTFKTAIDDPRRIAKSRDVGPLFGLTPGRYQSGETDIIGRITKVGDVMVRTALFEAATVMLTRSTKKSRLPRG

SEQ ID NO: 392573 - protein, 485 aa, unidentified
MVIFTVNALAQIVWPRASGLPMMIRFLVVIGSLSIRLMRFGFFYPYNAVHWDVGYFLLIFDNLSIIIEGDVFMNHRKMKYTYVGVDSHKGSHTAVFMDCFFEKLGEITFQNLPVKFESFMVNAEKFMVHGTEFLFGLEDTAVYGRGLAAFLRENGLKVKHVNAFLVARERKNRSVTQKTDSIDAECAARVLLSKFDEMPDVEVEDKYFVLRSLVVRRAGIVKNNIAMQNRLHGMLPDHYPNYREFFKDIDCTTALDFFLKYPSPGTLAGVTVEELARYFISKSRGRTGIEKARLILESARSADSEHQMIADMNLQSAIRQIQFNRQEIVGIEKNMVQFLKQFDCTLTTMTGIDTVCAAQMLSCIGDIRRFSSSAKLARYAGIAPVTYASGKKDMQFANQRGNRELNSVFYMLSLRVIMATGPKSRVLNHFFRDYYRRKISEGKTKKQALKCVQRRLVSIVWRMLTHKEEYKNPDMYDLPEEEENA

SEQ ID NO: 392574 - protein, 410 aa, unidentified
MNAAGIDVSKGKSMVSVMRPFGEVVAKPFTVRHTGSELKELADYLKSLDGETRIIMEHTGRYYEPVAQFLHDAGLYVSAVNPKLIKDYGNNSLRKVKTDKADSRKIAKYGLDNWVELRQYVSMDKIRYQLKTLNRQCNLYGKTKTMMKNNLIALLDQTYPGVNDLFDSPVREDGTQKWVDFAASFWHLECVKNMSLDAFTGRYRKWCKRNKYNFSSDKAAEIYAGVQDQIAMLPKDALTKLMIRQAINALNAVSATLEKLKAEMLELSSQLPEYPAVMEMRGVGDSLGPQLMAEIGDVMRFARRSAITSFAGVDPGADQSGGHEAKSVPTSKSGPPELRKALFLVMDHLIQTKPLDDPVYQFMDKKRAEGKPYLVYMTAGANKFLRIYYGRVKEYLTKLEQPLAPNPEQH

SEQ ID NO: 392575 - protein, 402 aa, unidentified
MNCVGIDVSKGKSMIAVMRPFGEVVVSPFEVLHTDSELSELARLLKSLDGETRVVMEATGNYHAPVAWLLHDAGLYVSVVNAMLVHDYGNNSLRRAKTDKKDAVKLANYGLDHWLTLPRYVPDEDTRLMLKTCYRQYQQYSKVQTMLKNNLISLLDTTFPDANRLFASPPRADGSEKWVDFVDAFWHCECVCGLSEKTFITRYQKWCRKHGYNFNENKALDIYASACGHFGVMPKTDTTKLLVEQAISQLRATSAALAALKQEMQSLAASLPEYPVVMGMFGVGPSLGPQLMAEIGDVRRFHSKKALVAFAGIDAPPYQSGQMDVRSRSISKRGSASLRRTLFLVMSVILQRAPMDEPVYQFMSKKHSEGKPYRVYMMASANKFLRIYYASVKAYLDSMEYD

SEQ ID NO: 392576 - protein, 408 aa, unidentified
MQVLYTRCAGLDVHKDTIVACVRCVSPPMHQEVRSFGTTTAELLKLADWLAEHDCTHVAMEATGVYWKPVWHVLEAEFELVLANAAHIRNVPGRKTDVNDAMWIAVLLAHGLIRSSFVPPQAIQQLRDLTRTRKQLVREVSQHSLRIQKVLEDANLKLGSVLSDVLGKSGRAMLDAIVAGQTDPACLAALAQGTARNKTAELREALRGRITDHHRTMLRLHLQVVDALQRTLAQLDAAVGKALAPIQQRARLLTTMPGISDLTASVVVAEIGVDMSRFPTAGHLVSWAGLCPRSDESAGKRRSTRVRKSGTWIKTTLVTAAWAAVRVKTSYLRAQFLRIKARRGAKKAILAVAASMLTAAFHMLRDGTEYNDLGGEHFDRQEKSKTIRRLLKRLQDLGCDVPIELHTA

SEQ ID NO: 392577 - protein, 462 aa, unidentified
MKRHARRQPKKPRVSPSILERINPNVAGIDCGSAEHLVAVPPDRDPEPVRTFTTFTADLQRLAEWLIACHVTSVAMEATGVYWIPVYEILEARGLEVLLVNARHVKHVPGRKTDVPDAEWLRELPSVGLLRGSFRPPDRIVALRAYVRHRQTLVETAGTHIHRMQKALVQMNLQLPLVVSDLAGLRILRDIVAGRRDPQQLARHRDCRCKASEADIVAALTGNYRAEVLFVLEQNLALFDACQAQLAACDVAIHTHIQTLTPTAATPTSPLPAPRVTRKPRDNEPRFEVRVPLHQVTGVALSQIDGLTPYTALKLVSESGTDMSRWPTEKHFTSWMTLAPRNKVSGGRHLSSRTQPSANRAAATLRMTAMSLGRTRTALGAFYRRLVARIGKPQAITAIARKLAVLVYRALKRALVSRDPGADTCSAQQRTRVLRRLRQRAANLGFALVNVETGELLQPAVS

SEQ ID NO: 392578 - protein, 427 aa, unidentified
MNSTSDKDPRPDYAAFVAIDWADQKHSFSLQVAGQKSRETGTLEHKPEVIGAWVAKLCERFGARPVAVALEQSRGALIHALLSYDFLVLYPIHSTTVARFREAFKFSGAKSDPLDTDQILEILTKHLELLKPLNPDTEQTRLLARLVEDRRKAVDLRTSHVQGAKAGLKEYFPQALDLCSDNVTSRLAADLLKKWPTLAQFQQAKASTIKRFFYGHNIRSPEVLQKALDLATTAKALTGDAAIVESCSRVCQMHLQVIQTLNPIIDDYEQRIEAVFNAHPEAFLFRGLPGAGPALAPRLLSFFGTDRSRYETAGNAQSFCGIAPVTKSSGKTKVVFFRQACPKFARQTFHEFARLSIVSCQWASNYVDHYKAKGKDFHAIIRALAFKWIRILFRCWKDRTPYNETTYMEALRKRGSRFATPLSEQKA

SEQ ID NO: 392579 - protein, 360 aa, unidentified
MKTLRNSEAKTIPSRTTVGLDVGDRHSWFCILDEAGEVVAEGRVRTTSEALNEHFTRWARSRLVLEAGTSSAWISRLAMTAGHEVIVANPRELRKIHQSDRKNDRSDALVLARMARFDPQLLAPITHRSAAMQNDLAVVRARDVLVRARTQCVNAVRGLVKTAGGRLTTCGTECFARKAVAQLPSGLESALGPMLKTIESLTEQIRAYDRVIDELASRYPVTEVLRQVTGVGALTAVTYALTLADSSRFGSSRDIGAYLGLVPRQHDSGNHVSQLSITKAGNTLLRRLLVGSAHYILGVHGPDCDLRRYGERLMTRGGKNAKKRALVAVARKLAVLLHRLWVNGEVYDPLHSEQRSLQAA

SEQ ID NO: 392580 - protein, 376 aa, unidentified
MEVTEETTELVERVAALDIGKAVLTVCIRIPHEKATGRRRQEVAEYATTTTALLHLADRLRELGVDRVAMEATSDYWKPVFYLLEAEGFECWLLNATHVKNIPGRSKTDKLDAVWLAKVVERGMCAPSFVPPKPIRRLRDLTRYRRSLIRDRTREKQRLEKLLEDAQIKLSVVASDTFGVSGRAILAALIAGQRDPQVLAEMARGRLRAKIPQLREALTGHFADHHGLLCTKMLERIDALTADIADLSTAIDDAISPFAAQVAQLDEVTGIGISCAQELIAELGVDMHVFPTAAHLASWARFAPRTKQSARQNQAGDHRQGESLAGQHPRRDHRGAGPQRHVPRRTLSTTLATPRQTTCDRRHRQLDPHRRLAPTR

SEQ ID NO: 392581 - protein, 342 aa, unidentified
MEKVSIIGLDIAKSVFQAHGADASGGVVFRKKISRARLLEFFASLPPCTVAMEACGGAHHWAREMAKLGHEVKLIAPKYVKPFVKRQKNDAADAEAICEAASRPTMRFVAVKSETTQASGLVFRTRDILVRQRTQIINAVRGHLAEYGLVVPQGAGHFKKLVAYLEDPASPLPGEVRSTLSLLAKTASGLEEKISLLDKEITRRTREDEVARRLMTIPGVGPITATAIAALAPPAASFRRGRDFAAWVGLTPLQKSTGGKQKLGATSKMGERTLRRLLIIGAAAAVQQAVRRGAPPTTWLGRMLARKPRMLVTVAQANKTARIVWALLVKGEDYKSPEVAAA

SEQ ID NO: 392582 - protein, 344 aa, unidentified
MSVVTIGLDIAKSVFQVHGVDAAAHTVLRRRLGRADLLPFFAKLPACVVGMEACSSAHHWARELSRLGHHVRLIPPQYVKPYVKRNKTDAADAEAICEAVDRPNMRFVPIKSIEQQSILSLHRVRALLVRQRTSAVNAMRGLLSEFGIVAAKGIRRVEELRQRMSRTEPGLLPDEAREAIGVLFDHLDGLQERVDKIDARILAWHKASEVSRRLASAPGVGPLTATAIVAAVGDGRQFKSARHFAAWLGLTPRIQASGGKEHIGRISKGGDRYLRTMLIHGARAVVSTAFRADIRPKPWLRELLRRRPVNVAATAVAHKTARSLWAMLTRTELYRPRAAVMAAA

SEQ ID NO: 392583 - protein, 412 aa, unidentified
MRVMVERSAGLDVHQASVVACVLTGRSDGRLRKAVRSFGTTTAELVSLRDWLKAEGVTHVGMESTGIYWRPVYAVLEGEFELIVGNARHIRNVPGRKTDVKDAEWLAELVCHGLIRPSFVPPKPLRELRDLLRYRRKLVEGEAAERNRLQKLLETANIKLASVASDVLGVSGQAILRALIAGTASPEEMADLARGRLRRKRRELALALDGRFEEHHRFLLAMQLHRVEAAEQDIAQIDARVAEKLAPYDTEMALLMQIPGVDWLVAAVLIAEIGTDMSVFVSAYHLAAWAGVCPGNNESAGKRRHGPARKGNVHLRTILVGAAICASRAKGTYLRDKYYRLKARRGGLRAALAIAHKILIAAYHILSQRVPYRELGASYLDHIDQTRTATNLKRRLERLGYVVNLRPKELAA

SEQ ID NO: 392584 - protein, 404 aa, unidentified
MRFIGLDVHRDFCEVAISEGSKARSAGRVATTPQALTKLGRRLSSQDKVILESTGNALKIARCLEPFVAEVVIANPMHVRAISHAKVKNDQFDARTLAELLAADLVPRVWIGDEHTRMLRRLTSRRAQLVRARTRPKNEITAVLVRNLKGRCPASDLFGKQGRAWLTALPLPADEQDTVQACLRQVDFLASEIRHVDRQLAAHALSSPEIRRLMTIPGIGVTTAATLIAAIGDIDRFPSAKKLVGYLGIDPRVRQSGIAPARQGRISKQGPSACRHVLVEAAWSAIKTPGPLRAFYQRTRARRGAQVAIVATARKLAALCWQLLTKREDYAFKRQTVVERKLRALELLAGAPTRNGAQHQPGAPTVKQRALIERQLTEQAELAYQRLIQDWTATNNTHSPEPNP

SEQ ID NO: 392585 - protein, 465 aa, unidentified
MRTVGIDLSARDEHKAVIVDEAGHFVSLVFRFGTTPASLRRLLEMAQENNPDQQIQAVMEPTGMAWFPVAVFLIRNGVTIYLVNSQQVADLRKYFKKHAKSDRIDARVLAKLPFVDEEKLHRLELSDAQTLACQRGCKQLERLMKQRTACQNRLIALDRFAWPGLEEVVFPDLFCRAALWFREHWYSPLRVWQAGAEAIRQEWLSSGLDSTDSGEWIRYLVQLAEQILEIYDKDCAYLDYELLQAEAIREQGYFAFVHEMHHRLLLKTVRPLYRQLHPSRNLETIPGVGQDGAAVYLSFIGNPKRFHGLRELRGWSGMVPNSKQSAASQASGLKITQAGPGLVKKFAFLDANAARQCDPQIAAIYYDQMVHHGKHHVQALCTCSAHLLDRVGVVLREERPYQLQDVDGTPITPERARQIIAERYTVSEEVRKRNSKARRRERMEAHAEKKYKRGKAAPGDSGARA

SEQ ID NO: 392586 - protein, 419 aa, unidentified
MTRKDYSKIIRIVHPICCGLDVHKESVSACVIFPDDKGEEQYEVKVFGTFTDDLTRLREWLLEHDCPVVAMESTGVYWRPVHNVLEETVQVVLVNARDMRNVSGRKTDIGDSRWIAGLLRHGLLKGSFIPPKTVRQWRDLTRLRKKYVQSAGDYRKRTHKLFESANIKIDSVVSDLFGVTGRNLMQLLVTDRKLTLSDIQTCVRGKLKGKEAELFRSIQGFFTDHHRFVLKTILKTIAMLEAQIEALDHEIHRVMKGHEPLLDRMKEAPGISDVSSCDILAEIGPTLDSFPTDTALVSWSGLCPGNNESAGKRKSGRSPVRKHHLKAIMLEVAWAAVKKKGSYFKDKYYRLKARRGAKKAIVAIAHRILLGIYHVIKDGVVFRDLGEDYLTRRNKSQKVFHLRKQALALGFDIVPQTAQ

SEQ ID NO: 392587 - protein, 355 aa, unidentified
MRKMQDWKLRGKRVFVGLEDAKRTWRLCVRSEKMLVDELGVPAQTENLLAYLRHQYPECEVTVIYEAGFHGFWLHDELVAAGYRCVVTPPHLVREAKVNKVKTDKGDARRLAQMLESGDYQACHIPSRERREDRQLSRTLSDVQEDIVRTKNRVRRFLEFHGLDQGLKAGAWNKSNYEQVWLMLPTLSEPLQKSLEVYQHILTSLEESQKALLAQLKALKECSRYRRAVELKASCPGVGWLSAIRFTLEWGDLSRFASGKPLARYLGLTPGEYSSGETRAVGHITGQGSPQVRAWLIQCAWRAIRLDPVLLAKFLAVSAHSKSKKKAIVAVARKLALRLRAVELSGQPYEIGVVQ

SEQ ID NO: 392588 - protein, 389 aa, unidentified
MDEAGKVLVKRRLPEGAAGMTQLHALIGRFLPEDADGAEVVTGIETDQGPWVAALVAAGYVVFPVNPLQASRYRERHGVSGAKSDGGDAHMLADMVRTDSHQLRPAAGDSPEGQGIKVVARAHKTMIWDRTRATQRLRSQLREYFPAALAAFEDLDAPDVLELLGKAPDPDRARRLTRAQVAAALKRARRRDIAGKTDAILAALRGEHLGQPAALTAAYAATARSLIAVITTLNAQVKILEDQVRDHFGRHPDAEIYLSQPGIGAILGARVPGEFGDDPCRYVSAKARKNYGGTSPITRASGKKKVVAARFIHNDRLIDALMSWAFASLNASPGARAFYDEQRAKGLDHNDALRRLANRLVGILHGCLKTRTPYDEATAWSHRESSLAA

SEQ ID NO: 392589 - protein, 437 aa, unidentified
MLGRPLVGGTRVLARTFESVTQDQPAGAKMELKPMHRRVIALDVHQAKISACAIVEHDDGRVEMIQREFGAFKRDRRELAQWALQIAPEVLVMESTGVYWKSPFAALEAVGIVAWVVNARHVKAVPGRKTDLCDAQWLATLARAGLLRASFIPCAQFRQLRLVARQRHKLVGACSAEKNRLHKVLVDAGVRLNVLVDDIHGQSARAMVKALIEDRPIDQVLDRKGRLRASREELFEALCTEQLSPTHRFVADQIMQHIEQLEQRIARMDQYLLEGLQPWQAQLNLLQTIPGIDQIGAAMLLVEIGADMAAFGSAERLASWVGICPGNNESAGKRKSGRTRRGNAWVRRLLCEFAQAAARTRCAFKDKFQALAIRKGHKKSVVALAHKILRTIYAMLASGTYYQDRVVDYEALTVARNAPRWIKMLRKHGYIASPAAA

SEQ ID NO: 392590 - protein, 355 aa, unidentified
MTSTKYIGMDVHKESISIAVLNSAGKVVMECFIETKASTILQFIHGLRGDLQVTFEEGTWAGWLYDLLKPHVTELVVCNPRKIALLKDGSKSDRIDAHKLADLLYMNKIRPVYHGEHGLRMLKELSRGYLTISKDLGRVMNRIKALYRSWAIPCAGTQVYAPRYRSEWLSKITEAGVRRRAELYYQQLDALRLVRQQARKELLVEARKHRATKLLRQIPGIGPLRAAHLVAVMQTPHRFRTKRQLWTYSGLGLETHDSAQYRVVEQQLQRSKKPVTLRGLNDNHNHDLKDIFKGAAMRASTAAGPLRDFYEALLAKGRKPTMARLTLARKIAAITLIVWKKEVRFDANYLKQQAA

SEQ ID NO: 392591 - protein, 460 aa, unidentified
MIQNNMTCDNDSELHRPYDNEDTVVDRFCGLDIHKSSITACIKGSILKEPSKDGFSTKTLCIDKNESKDCDLGTCNPTEIIRTFGTTTTDLEELRDWLYENKITHLAMESTGSYWKPVFNILDQDDKIKLMLVNAKQLKFVPGRKSDVKDCQWLCHLLQLGLLKGSFVPPEDIRNLRDLTRYEVKLQHQLTGHKNRVHKILHECNIKLCDVLTDIFGKTGFKILKDLCEGKTDAEELSKYFLQFAVLKKKYDKAKIALNGKVSDHYQFMLRSVLNQIESTLKEIDDVNARIKDEIKAKFSKEQSLLKTIPGVDEKTSQTIIAELGVDMEIFPSENHAASWAGTCPSKNKSGENIKHIKNNGNKHLKSALNQSSWSTIKCKDSFLKGKYYYLAGKIGAKRAVSAIANKLLKSAYHVLSTGKSYIDKGTDYLGNNEKINLVKNYVRDLNKDGYKTVFEISDN

SEQ ID NO: 392592 - protein, 418 aa, unidentified
MAEVMIGIDPHKASHTAVAIDPAEVPLGQLRVRACAAQAERLLGWAQAWPQRTWAVEGAGGVGHLLAQQLAAAGERVLDVPPKLAARVRLLQAGDTNKNDPNDAFSVAVAALRSTAKRPVIAEDHAVVLKVWAKRHRDLARARNQACCRLHAVLCDLVPGGIRKEISAGQAARILEQVRPADAVTTARCELAAEFLTDIRRLDAQLRTTNKKLAAAVKASGTSLTGLFGVGPVIAGTVIGDVRQVFRFPSRDHFAAYDGTAPVEVSSGGRKVYRLSLRGNRRLNHAIHMAAITQLRYKHSQGRAYYEKKLAEGKTHKEALRSLKRRISDAIYAALVADARQAAAACSKGPGGQPGNLSVSRAAGSHPAHTSSSDKPLPGLPPPYGPALRQDPPPVSPTERVGTGLGTPRPAEEIRHNH

SEQ ID NO: 392593 - protein, 353 aa, unidentified
MERVSYKGKPIYIGIDVHKKQWSVSIYTQEVHHKTFSQPPQPESLKNYLDHHFPEAVVHCAYEASKFGFWIHRVFETYGYNSLVVNPADIPTTNKETTEKTDPIDSRKIAKSLRGGLLTGIHIPSEETEGMRQLFRYRKKLWADFVRIKNRIKDKLLFSGITIPSQWDNPYWSKAFLNWLAEVDFPSSSTRLTLDFLLEQYEFTYRHFLKVSIEVRKLQKRTALKKKANLLRGIPGIGPLTTIELLTEIEDIDRFPSFKHFNSYIGLRPRTHSSGERDYKGRMTYRTHGHLRASLIECAWTSIQRDPAMTLAYEEFRKRLTPKRSIVKIARKLLSRIYHVLKTEEEYELGVVR

SEQ ID NO: 392594 - protein, 457 aa, unidentified
MTQRKRKPRKSKINVNNLPKHLRHINLNAAGIDVGSDRHMVAVPEGSDEVSVRQFGTFTSDLHEIADWLHKCGVTTVAMESTGVYWIPLFEVLEERGFEVKLVDARHVKNVSGRKSDVLDCQWLQQLHTYGLLQGAFRPPDEICVLRSYARQKEMLTQASSMHIQHMQKALQQMNLLLHNVVSDITGVTGMKIIKAILAGERDPNVLALNRQEECRNSKETIAKSLVGNFRADHMFALKQAVELYETYQAKIAECEQALINHLGTQPDVTDDPPPDSGKRVRARERMRAGVDVREKLFKMTEVDLFAIPGLAADTLLTLASEVGFDMSPWKSVKHFTSWLGLCPGTKFSGGKALDRRTKRIANRATQAFRMAASSLARSQTALGAFYRRIRSRTDGRRAITATAHKIARIYYSMLTKGTGYVEAGQQAYEQMYKERRIKALKKQAASLGFQLLPCVS

SEQ ID NO: 392595 - protein, 344 aa, unidentified
MNQISRIGMDTSKHIFQLYGVNSVEAPVLRKKLRRKEMVSFFEKLAPTVIAIEACGASHHWARLLQSFGHSVKLIAPQLVKPYVKRGKNDAADAEALCEAMSRPTMRFVPVKTAEQQAALMLVSVRDRLIRNRTQLANAIRGYAAEFGLTAAKGIAHLGPLLERIQADESLPSLARELFAIQAEDLMQLQAQIGELNAKLMTWHRADECSRRLAKIPSVGPIGAVLLKMKTPDPQLFRSGRQFAAWIGLTPKDHSTAGKVKLGGITRAGDEGLRSVLVAGATAVIQHAQRGGKPSPWLAGILKRKSPKLAAVALANKTARIAWKMMVTGETYTAKSAPAQAGAV

SEQ ID NO: 392596 - protein, 472 aa, unidentified
MGTLTLGIDVACRTSHQASLADAQGRFRFVGRRFVTASVDLEALWHDATRGGDDITVVLEPTRNAWVPLAAWFRRRGACVVLVPPEQSADLRAYYSKHTKSDRLDSKILARLPMLHPDGLHSENGLGPGDPLRRLVKIRSSLVRNRSTHLARIDAQLEILGPDWFAALGGDLARTTALRFLAAGYADPNTVKRLGAARLGRFIYRRSRGRLGDKEARMLVEAAEESIRLWSTDLDFSDLADDIALHARLILQINDEIKDIDDRVRVLMEKLDPTGIITSAPGVAQVTGAAILGRLGDPSRFRSLAGVRSYTGLTPSLDSSGLTSRHGAPTKQGDAVLREAIFMAADHARRVDPQLAAKYHRLMVKAGKHHTSALCHVAMTLLTRIVATWRREEKYVIRDCDGRAISMEEGRAIVLERFTVPSDLRREAALLEQRRYNAHGRRASRRGKESTFAPSSGSPRSHATPKLGLDMH

SEQ ID NO: 392597 - protein, 442 aa, unidentified
MVRRRCIGLDVHRDFAQVAIWEDGKIRHAGQVAVCGEALWVFADSLGPEDEVAIEATCNTHAIVRAIEPRVKRVVVSNPMKTRAIAEAKVKTDKVDAAVLAELLAADYLPSVWVADEQTQALRRQVARRTQIVRQRTRLKNQVQAILHRNLVARCPFADLFGVKGRCWLSDQHLPPDEHHAVEALLRQLDFHGQELRIIDAALGRIALERPEVKRLMTIPGIDATVALSLLAAVGDFRRFRTPEQLVSYLGLNPRVKQSGGKTATHGRITKNGRAHARGMLVEAAFTASKIPGPLRAFYQRVRARRGIQIAIVATARKLVCLCWTMIERGEDYAFARQSLTEKKLRALELRAGLPAHRGKKGTATNYSLKDVRRQELELAEQAEHAYRQQVADWQARGPGKPGVAAANGTRLKRPSVGQAARQASVPEPALRSGVDHALSKA

SEQ ID NO: 392598 - protein, 421 aa, unidentified
MTRLPTDDFAAFVGLDWADAKHDVCLQAAGSKTREFSVLAHTPETIDEWVSTLHKRFNGQPIAICLELNKGPIVYALRKYDFLVLFPVNPLTLARYREAFAPSHAKDDPTDAELQLELLLKHREKLTPLKPQSPAMRALEQLLEHRRRLVGDKVRLTNRLTSTLKNYFPHVLPWFHDKDTATFCDFLTQWPTLKAVQLARRSTLERFFRDHHVRYVDVIAQRLHAIKSATPLTTDEGIITPNALLVQALVAQLRVTLQAIEAFDKAIAQRAHSHPDCPLFGALPGAGAVFAPRLLVAFGEQRDRYAAAEELQKYAGIAPVTERSGNKSWVHWRLQCPKFLRQTFVEWAAESTRHSFWARAYYQPQRDKGASHQAAVRALAFRWIRILFRCWQNRTRYEEAVYLNALKRRGAPLLHSLANGS

SEQ ID NO: 392599 - protein, 352 aa, unidentified
MDVSKDSISVGILHPEEESPVVEKIFHDETSIRRLIRQFPSPAGLAVCYEAGPTGYELYRLLASMKVRCDVVAPSLIPKKSGDKVKTDKRDAKRLARLHRAGELTPIRVPALEEEAVRDASRARADMVDDLARARKRLQAFLLRHAEVYRDGTAWTFKHHAWLRARHFEDRALGLTFGRYLAVVEAREAELDAMEAELRPYLEHPLFSDQIARLCAYRGIAALGALTLSSEVCDWRRFPGAGAFMAFCGLTVSEYSSGASVSRGHLTKTGNSHIRVQLVESAWAYQHRAGIGAELRKRQAGLDAATVVRSWTAQQRLCGRFQRPQARKNNKPVVVAAIARELAGFLWAEMVA

SEQ ID NO: 392600 - protein, 402 aa, unidentified
MRRCIGLDVHREFAQVAIWEDGVVWQAGRIQTTPEALRLFADSLCATDEVALEATGNTYAIARLLERQVGRVVVSNPQKTRAIAEAKVKTDKVDAAVLAGLLAADYLPSVWLPDDQTHALRRQVTRRAHIVRQRTRLKNQVQSILHRNLVPRCPAADLFGNKGRAWLATQDLPADEHQAVGALLRQLDFHGQELRIVDAELGRVGLERAEVRRLLTIPGVDATVALAIVAAVGDFGRFSSPQRLVSYLGLNPRVRQSGGQPAQHGRITKQGRAHARGMLVEAAWAAAKTPGPLRAFYERVRARRGMQVAVVATARKLATLCWHLVVGEQDYAFQRPSLTDKKLRALELRAGMPPRRGRKGTAAAYSLKEVRRRERALTEQAEVAYRQLIADWQPKRPAAKSR

SEQ ID NO: 392601 - protein, 345 aa, unidentified
MEPMYYIGLDVHKRKISYCVKDSSGQVYAEGSLPATRFDLDRWMKALPQPWSAAMEATMFTGWIYDHLKPHAAALKVAHPLMLRAIAVAKRKNDRIDANKICDCLRCDFLPECYMAPTAIRERRRTLRYRNLLVRQMVQMKIKISSLLMEAGVSYNKQRLHRAGYFRELLATNPDIDEGLRSLLRQCRETVVRLSKTESALIRSLEDDRLLAERVERLMSIPAIGPITALTWALEVGEVQRFSSIKKAISYCGLCGAEKSSGNTVQRTPLSKQRNKHLQTTLIEAAKMAPRYSPTLALLYDREKQKGNANRATLAVARKLVAYLMSVDRGRCHFLVLEQETSTAA

SEQ ID NO: 392602 - protein, 409 aa, unidentified
MDVVISRCAGLDVHQATVVATVRVPSPTGGRDVVTATFGTMTPDLIALREWLQAYGVTQVALESTGVYWKPVYYVLEDGFTLLLINMQELKRVPGRKTDVKDSEWLAQLLECGLLRASFVPPPPIRELRDLTRYRVQQVRDRAQEVNRLCKVLEDAGVKLSTVATNVIGVSGRAMLQALVEGTTDPAVLADLARGKLRKKLPDLRRALTGRFRPHHAFLLEQVLAKIDFLDEALDRLMAEIESRLGPFASMLTALDTIPGINRVGAISLLAETGGDMTRFATAGHLCSWGAMCPGQNESAGKRHSGKTRKGNRYLRAALIQAALAASRAKGTALQAQYLRIRRHRGHKKAVVAVGHQILEIAYYLMRDGGSYHELGPSYFDQRNKQRTIRRHLKQLEALGVHVTIQEAA

SEQ ID NO: 392603 - protein, 427 aa, unidentified
MSYRIAANDVHKRMVAVVVTDIAGEGEYRFERRKFGATPAELHVMAQWLDQLEVEEVVMESTAQYWKPVWGALERYWKPARQRREGAPKMAGTLHLCQAKSNRGPRGRKNDFADGERMIKRLVAQELVLSFVPEADQRLCQTVTRRKHQLTDAKVAFRHQLECLLEQAHIKLSSLVADLLGVSARRMLKALAEGETDPAVLAALADCRLQATPEQLRDALGACAELNSVYRRLIKMMLEELQLIDTHIGQLEREAMDLMREHQEAVRRVAEVPGFGVDSALQMIAEVGPSAASFRSEKALSSWVGVCPGTEESAGQSASTRSPKGNRHMRRLLNQAAQSAVKVKGSIFEITFQRMLPRMGYKQAIWAIAHRLCRLLWLILHKGVRYEERGPVVNAQSKRRRAARMIKELKKLGYRVEGGPLPASQQV

SEQ ID NO: 392604 - protein, 348 aa, unidentified
MLIIGCDFHSRFQQIAMLDAETGEVVDRRLEHESGEAAAFYASLHGKARVGVEATGSLAWFERLLRRHGHELWVGDAAQIQARRIRQQKTDARDARHILELLTSDRFPRIWMPSAEQRDLRQLLRHRGKLVGMRTAVKNQLHALAMGQGVCRRRKLWSAVGRQELEGLELDPWAGRRRRELLGMLDQLSASIGELDQAVQQEAHRCAAAVELMQQPGVGPVTALAFVLTIGPVERFRRSKQVVSYLGLNPREHSSGGRQRLGSISKQGNSMMRYLLSEAAQTASRKDEELRRDYQRLKFRRGSGVAKIAIARKLAVRLYWRLRQAAAAPARMQGSPARPLVRSAEPFC

SEQ ID NO: 392605 - protein, 380 aa, unidentified
MASMHDSVRFKTTVYAAIELSKKSWVVAIARPDRDRPSIHRIAGGNLADLIGRLRKAAGEKQRIVVCYEAGYDGFWLARSLAKIGIDCRVLDPASIQVNRRARRVKTDRIDSLALLRALIAIDRGERHVCAVVRVSTVEEEDARRSHRERQRLVRERTGHINRIKGLLFAQGIRGIEPKRRRTRIDFGKLTTAEGRPLAERLRRELEREYQRLELVQSQLRIVEKERDTADAQDPAVERKRELLCALQGVGGASAAILAREVFARPFASRRQLGSYLGLTPSDYDSGSTTRCQGISKAGNSWARRVLNEVAWLWRKYQPGSPLSHWYARKTADQSPRIRRIMLIALARKLAISLWRYVETGLVPDGAVMAKTTPHMAAAT

SEQ ID NO: 392606 - protein, 343 aa, unidentified
MQTITTIGLDIAKSVFQVHGVDADGNVVLRRQLKRRYVLAFFQKLPPCLVGIEACASSHHWSRELQALGHTVRLMPPAYVKPYVKRQKNDTADAEAICEAVTRPNMRFVPTKSPEQQSCLTLHRTRHLFIRQQTAIINSIRAHLAEFGIVAPVGRRGVERLLEIVADPDDNRLPEVARACVAALGSQLLALKAQILAFDRRILAWHRSNETSRRLDAIPGVGPALATALVASIADPKVFRSGRDFSAWIGLVPKQNSSGGKDRLGSISKQGDRYLRSLFTTGALAVIRYAKLHGTKHRPWLAALLARRPTKVAAVALANKIARMVWAMMTRGERYKEPVALAA

SEQ ID NO: 392607 - protein, 376 aa, unidentified
MEHNSEAFIGIDTSKLKNAIAIAEGGRDGEVRYLGEIDSTDGATRKLVAKLATKYRKVTFCYEAGPTGYGLYRLIKSLGHECSVVAPSLIPKKPGDRVKTNRRDAVGLAKNLRAGELTAVWVPDMRHEAMRDLSRAREAAVDDLKSKRQQISSLLLRLGLHYPGEKTWGKSHRNWLASLKLDQREQRIVLEELFGAERQAQERVDRLASAIIDAVPEWSLAKIVTALKAVRGIDLVAAVTIMAELGDLSRFASPRELMAFLGLVPSESSTGDSVKRGGITKAGNRRARRILVESAWSYRYPPRISRDKLAKVAAAPEPVRAIAWKAQTRLSSRFRALSKKGKRPTIVATAIARELCGFIWAIHRAVTAPGGRQLVS

SEQ ID NO: 392608 - protein, 316 aa, unidentified
MTPQECYVGIDVSKKHLDIAVRPGDEHWTVANDEDGIDELANRLKSIGPRLVVLEATGGIELAATGRLAGAGLLVAVVNPRQVRDFARAIGKLAKTDRLDAQVIARFAEVVQPTPRPMRDAEAQALSALLSRRRQLVGMLTQEKNRLHAAQPSVQHDIRQYIVYMEKRLAKLDDDLGGTLRKSPLWRERDDLLRSVPGVGQVLSVTLLAGLPELGTLNRKQIAALVGVAPLNRDSGLLRGRRTVWGGRARVRATLYMATLTATRYNPVIRAFYERLCASGKAKKVAITACMRKMLTILNSMLRHHAAWQPDYALNA

SEQ ID NO: 392609 - protein, 455 aa, unidentified
MVKQKRQMKIKVKVNALEQINPNAAGIDIGAEEIYVAVPPDRDTESVRSFPTFTADLRRLVEWLKACRIETVAMEATGEYWIPLYELMEEEGFEVCLVNARHLKNVSGRKTDVLDCQWIQQLHTYGLLNPSFRPPEQIVAIRCLVRHREMLVQYRTAHIQHMQKALTLMNVRLTNVLSDITGVTGLKIIRSILGGEHNPLCLAALREPGCKKSAAEIAKSLEGHYKREHLFALKQALELYEFYDQKLMACDAELEAMYQEFDPPDNPGTPPPTPRTQKRRKNQAHFDLAPALFRLTGVDLTRIDGVDELTVQKVLAEIGTDMSKWPTVKHFTSWLHLCPNNKITGGKVFQTGVQPTKNRASAALRVAAASLKTSDSALGAYFRRMCARLGTPAAITATAHKLARIIYFMLKYRKPFHDLGANYYEQQFRARVLRNLTRRAAVLGFRLEPAAQSVS

SEQ ID NO: 392610 - protein, 401 aa, unidentified
MKYGIGIDVSKGKSTVAIISIEGEVIDMPFEITHDKFGLNLLEEKISKFTKENIKIVMEETGTYHLPVLGYLIDKGYFVIAENALKIKKYLDRGLRKVKTDNKDSLKLAEYCCDNWFKLNKVRENNEVYENLRFLSRQYLNQTAIKIEEKVAFSNLTDLLFPGYYQLLNENNFILGLKIFEIYNHPNLIVNKKQSQFVTEIDKIAKKLGHKSAGITLANKVYNLAQITISPRPNNEYTQLAVDSCVAALILSIEATNKIISKMNELASVLPEYDVVKEMAGVGNKLAPRIIAEIGDIRRFKDAGSIIAYGGLDAPPYQSGKFEATNRHISKRGNKYLRKTGYEIMKAIKTSCKPGIEIYDYIIKKEEEGKCKKVAKIAGLNKFLRMYYGIVKRKYKELKIC

SEQ ID NO: 392611 - protein, 331 aa, unidentified
MKKLEIIGIDVSKEKIDVWLHHAKSHQVFDNTKKGFDKMLSWIAQGNGFSLKQIAFCFENTGLYSMPLCFYLTNKNACYYLVSGLRVKRSLGLVRGKNDKVDAQNLARFAYQQGEELKPYQLPENNIIQLKQLYSLRSRLVKQRGGYKAHIRELRQVLGCSNDDTLVQTSQNMIQALNSNIKSIEKKMLDIINESQVLKTTFDNINTVNGVGLIVGVAMIAYTNNFESFTQWRKFACYSGIAPFDHRSGTSYRGKTRISNLGHREMKTLLSRSAATCIRYNPEMRLYFQKRLSEGKPKMVILNIIRNKILSRIFAVALRKSPYVDIHKFAA

SEQ ID NO: 392612 - protein, 361 aa, unidentified
MAKARSLVGLDVHAAKIVAAVLDAETGELRFFRIGGDVGEAAGLCAGLPRPVRAAYEAGPTGYGLARELARRGVECVVAAPSKIPRASGERVKTDRRDAEHLVRLLLAGKLHPVRVPGVEEEALRDLVRARDAVRQDLMRCRHRLSKLLLRHGIRFDDGRAWTERHRVWLADVALGWPAAQSTLADAIGAVDALVHRREALEREIVALLPVSPWQVQVGRLRCLRGIDTLTAAGLCAEIGDFERFARAEQLMSYVGLVPSENTTGEQRRLGAITKTGSGHARRLLVEAAWHYRKRPTIGKTLTARHDGQPAEAIAVSWSAQQRLHRTWTRLEQRAKRRTIIAVAAARELAGFCWAITTRIE

SEQ ID NO: 392613 - protein, 376 aa, unidentified
MTKIIRIGVDTSKSVFVLHGVDATERVVLRKRLRRRQVLELFAQLEPTKVGLEACGAAHYWARELQGLGHEVVLLPPQYVKPYVKRNKNDAADAEAICEAMSRPTMRFVPVKTAEQQAALMLVGTRDALVRRRTQLTNAIRGYAAEFGLIAAKGLDKIEPLLARIAAHAPLPGLAQELFAAHAKEYARLQAQIREIEAKLRAWHKHNELSRRLAEVPGIGPIGATLAVMKVPNPKAFRCGRDFSAWIGLTPKDHSTAGKTRLGVITRAGDEALRSALVAGATAVIQHVKQGKGHPSPWLIELVRRKPAKLAAVALANKNARIAWKLMVSTERYNPAHSRAVAASGGRGPALRGGSAPRPPLAPHNKSREITATTRA

SEQ ID NO: 392614 - protein, 346 aa, unidentified
MFVGVDVHKDTHTAVGISPFGEKLFETTIGNYKKDFEELAKSVEKHRGMLSPFFGLEDCSGYGERLSSFLVDRYPVVHVHSTLVDRARKRQAHPEKSDSLDALGVAKVMMTSIDTLPVYTVSEEAQKAKQLKELSHDREYLVEERTRLKNQLHTILHRIWNSEYKELFKDPFALKALRYWLENIPECNPFLKKTMERKAKRLIDLFHEINELEKDMTALLDERYTIHTASGCGPVIAAAIIGEIGDIARFKSPASLAKYAGCAPRECSSGKTTKWRKTRSGNRRLNCAFHRMALSQISRMGNDKARAYFQKKVSEGKSKNQALVCLRRQMVSIVWMMLKHQTTYRV

SEQ ID NO: 392615 - protein, 407 aa, unidentified
MKLIHERCAGLDVHKNTVVACVRIYRSEPEVRTFATTTAGLLQLGDWLTETHCTHVVMESTGVYWKPVWHILSDGDLKLMLANAEHVRNVPGRKTDVKDAVWLADLLAHGLVSGSFVPPAEIQELRDLTRTRRQLVRQRVQHVQRVQKTLEDANIKLDSVISDIVGTSGRAMLEALVAGETDSDKLADLAHPRLQASRASLVSALHGRVTDHHRFMIRTHLEQVDGADKTIGALDAEVERVLAPFRGQVELLKTIPGVSDQVARTLVAEIGIDMTAFPTAAHLISWAGLCPQLRESAGKRQSTRLRKGAPWLKPVLVQAAWAASRKKDSYLRSQFGRLKARRGPKKAVVAVAASMLTAAYFMLRDGTAYQDLGGHYFDQVDRPRATKTLVRRLEKLGYHVELRDHAA

SEQ ID NO: 392616 - protein, 334 aa, unidentified
MEKISVFVGLDYHQESVQVCVLDSGGRVLGNRTCANDPRLVAEYVATHGGVRGAAMESCEGTADFAEGLIAAADWSVDLAHPGYVHRLRQNPDKTDYSDARLLADLERVGYVPKVWLAPQAIRELRRLVRYRRQLVNERRNVKLRVRALLRARRRGCAAPRWGVAWFQWMRDVDLPEQSRWILDRHLERLRQLNGDIQGVEGRLGVVTKDDAVVQKLLTLPGVGSVTAWVLRAEVGRFDRFRSGKQLARFCGLTPWNASSGSRQADAGLIRACNDDLRSVLIEAGHRLKRCDPRWSALANQLRQAGKPGSVIAAAVANRWMRWLYHEMTATQVA

SEQ ID NO: 392617 - protein, 463 aa, unidentified
MSRSSRASPAPSELAASARAGPGEAVGFLGLDVSQAEVVACLLLPDGQEAVPRWAVPNSQPGARDLAERLARLAQQHGLRRVRIGLEATNLYWWHLACFLKDTPLLAGLEREVYALNPKLVHGFKKAYADTGKTDRLDAFFVAERLRLGRLPAPFQVDALYAPLQRLTRFRAHLAQTLAREKNYFLSFLFLKFSGFCQAEPFGDPFGATSCAVLTEFTTEELAQTPLEELAAFVAARGRGRFADPRAVATTLTRAARDSFRLDRVLDEPVTLVLGTTMATIRTLQAQLKAVDRTVARELDALPPDRRTLRSVPGLGPVWTAGLVAEIGDVHRFRNDAALAKYAGLVWTPRESGTFQAEDTALSQTGNAYLRYYLVEAANSVRLDCAEYREYYTAKLAQSPKHAHKRALVLTARKLVRLVDHLLRASAVYRPPESRRDLKEDRTRPHAARPRPQRRSRLASSAF

SEQ ID NO: 392618 - protein, 346 aa, unidentified
MNYIGMDCHITTLDFAVVNEGGRLIKANSVATSVKGFMEFVKTVPSPRTIYMEEGTLASWVLETCVRFKENLVITDPKKNRWIGSSGQKEDPLDALKLAQLARGGYIKEIHHPVGQRRRFRELMTAYHDTVRSTTRIKNKIKAKFRQNGIQCTGKTVYLEVYREEWKRKLPQEATVFLILTGLWSQLEQSEQTEKDLLAVARAQAKQYPEIKHFEALPGIGFISAATISAILETPYRFADKRKVWMYAGLGIMTRSSGGKTYSEKLGIDYNRLLKYTMKQAVEVAIQAKDNPFRRKYLDMTLSQGIAPHRAKLTVARDMLATMWAMWRKGEKYTQEIRDRAAYKQG

SEQ ID NO: 392619 - protein, 339 aa, unidentified
MNATPVGIDIAKSVFQVHYVDQETGEILNRPIKRAKFLEHFANRARCLIGMEACGGAHHWARQLMRLGHEVRLMPAEFVKAFNIRNKNDAADAKAIWLAVQQPSRPVAVKTEMQQAMLALHRMREQLVKFRTMQINGLRGLLTEYGEVMSRGREKLNNEVPAVLGRLTERLPSALIDTLREQWNGLARLDEQITGIERRMREWKKDDRAVKAISEIPGVGLLTATAAVAMMGDAKAFRSGREFAAWAGLVPRQTGSGGKVNLHGISKRGDTYLRTLLIHGARSVLSHAKDPGPWVEQMKKRRPANVVVVALANKMARTIWAVLAHDRQYQKGYVSVKPA

SEQ ID NO: 392620 - protein, 415 aa, unidentified
MKTYSELKYYGGLDWAKDHHQVCILDGQGQRVEGFRFEHSGPGWKALRERIQGYPALGMAMETSSGAVVDQLLASGVTIFAVHPKAAKSYRQRQAPSGVKDDDLDAWSLADALGLDGGQWRALSEQDPLVEELRLLCRDEEELIEQRTALVNQLQQALAEYYPAALEAFDDWTAPYTWAFVKKFPTPQQLVAAKPYRQREFLHVHKLWRSDTAPQRLEIFGRADQFCGSPALVRAKSRLALALCQSLQTLQEQLVEYRAAIEELFAQHPDHNIFGSLPGVGPKLGPRLLGSVGAQRQEYPQAQGLQCVAGTGPVSFKSGQMRVVQIRWHCDRFLRHTVDLWANTSRKTCAWAQAYYLAKREQGKSHSCALRCLGQRWLKILWKMWQTHSRYDPEYHARNQQRHGSWVLQFQPTQA

SEQ ID NO: 392621 - protein, 339 aa, unidentified
MKLYGGIDLHSNNSYIVLMDSGGTVVQRNRVGNEIGLVLRTLAPYREQIDSLVVESTYNWYWLVDGLKAAGYAVKLANPSAMQQYQGLKYSDDRSDARWLAEMLRLGIVPTGYIYPEAQRPLRDLLRQRSFLVRQGTGQLLHTGNILSRNQGRKSSRQQIRQMTVADAQQLFPDRERTLAVESSLRVIEVLEQQIASIEKQVLGRIKPEAGFQNLQTVYGIGPILAMTIWLETGDISRFHQVGDYASYCRCVASTRISNAKKKGENNSHNGNPYLAWAYVEAATYAARFYQQASRFVERKTAQVNRTLAIKALAHKLARACYYVLRDGVVFEPTRLLGS

SEQ ID NO: 392622 - protein, 354 aa, unidentified
MSNVKYVGMDVHKKITVIVVLNALGHMESHSKVKTTAENICDFFRGLSGKVEVVFEEGTHSAWLHKLIKPLVASVTVCDPRHNKLIEDGNKSDDDDAETLALLLRIGAVKAVYKGDDEQRQLKEFCRAYENLVSDATRVKNRLQAIYRGRGLDPGRAIYRADQRQESLAKLDDEAMRFRAESLLDQLAALQELRKQAKRRFVLQVRQHPDYRILSGLPGFGPVRVGQMIATVGTPHRFRTKRQFWPYCGLAVVTRSSADYQIVEGKIIKSQKNVSTRGLNRNHNPRLKQVFKSAALTSLRQEECKAYYQRLVAHGTRPELARVSVARNWLPPLLPFGNARRNTTRRNFSPQPES

SEQ ID NO: 392623 - protein, 347 aa, unidentified
MKFYTQQHRYYCGIDLHARTMYLCVLNQQGEILLHRNMPCSPDFFLKAIAPYREDMAVAVECIFTWYWLADLCAQENIVFVLGHALYMKAIHGGKAKNDKIDAHKIAALLRGGMLPMAYVYPALMRSTRDLLRRRMHLMHKRSELLTHIQNTNSQYCLPQFGKKIAYKKNRQGVAEHFADSSVRKSIEMALSLIDHYDKLLTEVELYITQNAKIHDVNAFNRLRSVHGIGKILALVILYEIHEIDRFPTVQDFVSYARLVKCSKESAGKRHGSSGAKIGNVHLKWAFSEASVLFLRANPAGQRYADKLTSKHGKAKALSILAHKLGRAVYYMLKRDKAFDMNKFLNS

SEQ ID NO: 392624 - protein, 349 aa, unidentified
MYFAGLDAHLKYVAVAVLDRMGQVALEATVSTKEPERLLATLAPYRPLDVVVETCPFWPWLYDLLVPAGIGFHLAHAKQLRAIAAAPQKNDAVDARLLGRMLLSGLIPEAYPRSADQRELLRLLRHRTTLVRYRTRLAGRIHSQLHQQRLSLPREQLLRQATRVWLQETAWPQLTVEQRAIVATHLELIDRLAPLIEALERRIATAAAGHTTARLLATIPGIGPYRSLLLAAELEPITRFRRAEHLVSYAGLAPVPRSSGGHTHHASIPKGANRWVRGALVSAIPTHARWAPTSAVSCAYATLTTRLGWRVARVAAARKLARVVYVMLTRRTPWHGAPAAGDVRDEVLR

SEQ ID NO: 392625 - protein, 341 aa, unidentified
MKKLFVGIDFSKEKVDVTIIFADALTELYPRVTSEFKNTVSGFKQLIKWVEQNANGIDSSLWLFCGENTGDYSKPLCNYLYGKGYDMWLENAKCIKDSSGIRRLKSDRADASMIAEYAMRNYDRAVMYEPLSEALTQLRELFLYRQMVVRHRCSFQVRRGEKKLTMEKSSVKTMISQSGRHIVSELNKEIEKIDKRIASLIDSNAELAQVFNIVTSIPGIGTQNAVCLMVYTDNFRKFNYDSRKIACYYGIAPFGKDSGTSVHTDPHVHYMANRQIKAMLTQAALAAVNFNQDIASYYSRLIARGKKKQVALNNVKNKLVHIATAMVKNKQVFDKNYMISA

SEQ ID NO: 392626 - protein, 359 aa, unidentified
MQSQNQGLDFNGKDIYAGIDAHLKSWRVSILTNGIICKTFSQNAKAEDLKKYLENNYPNGTYYSAYEAGFCGFGPHRKLREMGITNIVVNPADIPTTDKEKKQKEDSRDSKKIVRSLYNRELEAIYVPNMEMEGLRSLVRYRRTLVKEISRYKNRTKSFLYYHNIEIPTELATGSTHWSKRYSNWLDSLELGTIHGRETLTHIKHTVEHLRAKLLEINRSLRGLEQDSEHSAMIALLRTVPGIGLITAMTILTELDNIGRFKSIDGLCSYVGLVPRTNSSGENEKIGRITPRSNRQLRSMLIESAWIAIRHDPALMMKYGELVKRMDAPKAIVNIAKKLLSRIKHVLVNKTPYVKGVVK

SEQ ID NO: 392627 - protein, 342 aa, unidentified
MYEVSIVGVDLAKLVFQVHGAARDGSVLFRKKLTRPQFVRFMTSLPACIVAMEACGTAHYWGREMERLGHDVRLIPPIYVKPFVKRQKNDMADAEAIAEAAMRPTMRTVPVKSPDQQARAMLFRTRELLVGQRTQLVNALRAHLAEHGVIVPKGLGNIERLATIIRADSNRLPDLVRRMSDVYLDQIGRVTNEVRALELQISAEAKESPVVRRLRDMPGIGPICAIALEAFAPPMQIFRRGRDFAAWLGLVPRQHSSGGKQKLGRTSKMGQRDIRRLLILGAMSVVRWRGRNGGQPGTWLAAMLARKPKMLVAIALANKMARMIWAMLIRDEEYRVPKGAVC

SEQ ID NO: 392628 - protein, 345 aa, unidentified
MPIVGGLDIHRKQITFDYLDTATGEVRRGQIAPADRAHLRAWLARFAGRDDAAFALEGCTGWRYVAEELAAAGVTAHVAEPADTAFARGRKRHAKTDKTDSRHLRVLLEQGRLPECWIPPAQILECRALLEAYHDLRREHTAWIERIHAVFFHQGAPRLGEGALRTDRGLAALREAAAIHLSPAGQLQVATALDMLAAIEARMDTLRQQLLHAARHLAGARALQARLYGVGPLAGLAMTCWLGGAGRFSSSRKAVRFAGLDVTVYSSDGKRSPGHLSRQGPEILRWVAYEAGKTHGRASAPGHDYYAAVKDRTGGKIAALSQARKLIRQACHILAELGDDALTAA

SEQ ID NO: 392629 - protein, 368 aa, unidentified
MTTVKFIGMDVHKKTITIAIADQGRQSQPRTYGAIANDLDALDKFCRKMVSTASRLYFVYEAGPCGYGIYRHLTSNGFDCTVAAPSLIPKKSGDRVKNDRRDAANLARLHRAGELTAVYVPDAQDEAMRDLTRAREDAVMAAKKAKQRLKAFLLRNSIVFTGRSQWSKAYFRWLADIAMDYPAQQVALQEYIDAVHESLRRVERLTDQIRQLVPNWRLAPIVSALQAARGVSLIVAVTLLAELGDLSRFQRPSQLMGHLGLVPSEHSSGDSTKRGAITKTGNAHARRALVEAAWAYRLPARVSRLLLKRQQDLPEQVCRIAWKAQLRLCTRFRRLVARGKLKQKVVTAIARELSAFLWAMAKQVQPVT

SEQ ID NO: 392630 - protein, 333 aa, unidentified
MLPPNCGTATPYILRNVVGLDISKLTFDASAMVGKTEHSAKFDNDSKGLDQFSDRLKSLGCQNLHICMEATGNYYEEVADYFAQYYSVYVVNPLKISKYAESRFKRTKTDKQDAKLIAQYCRSAQESELVKRQKPTDEQYRLLRMTAAYAQIKSECAAMKNRHHAAKDEEAAKAYAQIIKAMNEQLEVLKEKIKEQTEKPNCKEGVKRLETIPAIGRMTAAVLFHHLTSSKFETSNKFAAFAGLSPQQKESGTSVRGKGKLTKFGNRKLRAVLFMPAMVAYRIRAFPDFIKRLEEKKKPKKVIIAALMRKLAVIAYHVHKKGGDYDPSRYKSA

SEQ ID NO: 392631 - protein, 353 aa, unidentified
MKPETESKTAPFAVIGIDIGKEVFHLVGLGVDGKTAFRRRIRRLGLKDAFEKLPPCIIGMEACLSAHFVSRTLRALGHEPRIIPAIYVRPFVKGQKNDYNDAEAIAEAALRPNLRVVQEKSQDQLDLQACHRVRSRLVARRTATINQIRAFLIEQGIAVRTGPRVLRNSLFAILENRKEEISPRTATLIRGLYEDWCCLDKRIEAVTGEIEQLSEAEARCRRLMSVPGVGPLISTAVVAAINTGEAFERGRDFAAWLGLVPRQHSTGGRTVLGRISKRGSRYLRMLFIQAAKVLLMRPHNWVRYSFGTWLKTASERLHRNKLAVALANKLARIAWSVLRHDKAFDTHLDAAAI

SEQ ID NO: 392632 - protein, 364 aa, unidentified
MFVERTSVGLDVHARSIAAAAIDGVTGELFQARLTPSYEHIKSWIGELPGPVAVAYEAGPTGFGLCRALTAAGLRCAVVAPSKLQRPAGDRVKTDAKDAIHLARLMRLDEITPVSIPSVDQEAARDLVRAREDCRGDLMRARHRLSKLLLRHGIVYYGGKAWTGKHDMWLRHEALPQLTSRATRLTFDSDHDAVLTVQARRDRLDAAIEEMAADSEFTPIVRRLGCLRGISTLTGFALAVEIGDWDRFTGATIGSFVGLVPAEHSSGASRVQGSITKTGNGHVRRLLVEAAWHHRARYHVGKTMRDRWDLAPAAARIRGDEGNRRLHQRWVRFIDRRKRHTVANVAIARELAGWCWSLATLEDA

SEQ ID NO: 392633 - protein, 341 aa, unidentified
MAVAGGLDLHRGQLTFDYVDTGTGESWRGRICPADRESLRGWLRRFHGVPDVEFAVEGCTGWRYVAEELQRAGITAHLAEPAETAGLRGRKRRAKTDWADARHLRDLLLDGRIPESWIPPGHVLEARALVRLYKDLLEERTSWQQRVHATLFHQGIPVVPKLGTADGQQRLEAAELSAAGRRAVQAGLRQIERLTQEMASLRRELARLSSRQPGCRALRRAHYGIGGLLSVAVWAELGDCRRFSSSDDAVRHTGLDVTIYDSDGRRARGHIARQGPPVLRWALYEAALYASRPASPDYAYYCGVRDRIDGQRALLSVARKLARRCYHTLRDLGEDALAPAA

SEQ ID NO: 392634 - protein, 342 aa, unidentified
MKKSLFIGIDFSKKSFDVSVIHCNNLQAVDYQQFENSKEGCVSLLKWLKALTKQPYESWLFCGEHTGLYSLCLSEFLIKKGLFLWLENPLQIKQSSGIRREKNDRVDSREIAFYAYRFSDKARAYRLPETALKSLALLLSFRARLLSNKHTLVVSSAEIRRVISRDATARYIYEQSQKDIERINKEIKEAERRMLQAIESDESLQENYKLLSSIKGVALINTVAILIATQNFTRFENSRQFACYAGVAPFRKQSGTSIDKKAKVSHLADKRIKALLTQAVKSAIVHDANIRRYYLRKTAEGKNKWLVENNVKNKLIHRMFALVKSKQLYQIDYLNPLDKAVA

SEQ ID NO: 392635 - protein, 417 aa, unidentified
MEVISTMDVVYRCCAGLDVHKQTVECAVRRLTENGTVQVEIRQFGTMTDDLLEMVNWLKAQGVTHVAMESTGVFWKPIYNILEGHCSVLLVNARHVKQVPGRKTDARDCQWLAQLLQYGLLRGSFIAPRWQRDLRDLTRERTQLTDEQTRVANRIHKVLEDANIKLGSVATDILGVSGRDILERLMAGEEDVDALAERARGRLRGKIPELRRALRGRLSEHHRFQLRLNWDHLQRLQELIERLDERIRESSQPYHPQIEQLDKVVGIDQTTAESIVAEVGVDMKVFPSDGHLSAWAGICSGNNESAGKRRSGRTPKGNRWLRRTLTLAAQAAGHAKDSFLAARFRRLAARRGKKRACVAVAHSILKIVYHLLKDGRSYQDLGGSYFDRLDPQRLTRYLVRRLERLGLKVTLEPATAP

SEQ ID NO: 392636 - protein, 314 aa, unidentified
MKAFRTRVAGVDVHKEIIVVTALVGPADEDPKEEHFECSTMTDDLIAMGRILLDREIREVAMESTGIYWKPLYNVWTPMGITVTVGNAHHMKNVPGRKTDSKDAQWIAHLHRMGFIKPSFIPEPIFQRLRQLSRHRTNMVGDLARMKNRVQKVLEDGNIKWSSIVSDTFGVAGVKILRAIADGERAARVLASYATTNIKRKEDAEKALKNYLTEEHCFVIKSLMNQYDFLTKEIQSIENEMTEKMVPYTHLIKELDKIPGIDKVLAMAILSEATTKVNAFADERKFAAWAGVAPGNNESAGKKKDQNAAEEIHI

SEQ ID NO: 392637 - protein, 415 aa, unidentified
MNRYCGIDWAEGHHDVAVIDNEGTLIRKKRINEDPAGLTELLELLADVGDTDEDPIPVAIETPRGLLVAALRAAGRPVFALNPTAVARYRERYSVARAKSDHADAMILANILRVDSHLHRRLPADTDLAQAVAVLARAQQDAVWRRIRAGNELRSLLREYYPAMLNAFAAKSATNLARPEARAVLAIAPTPAQAMKLTKARVAAALRRAGRRRGIDQLAGSIVEKLRTPGLRQPPLVEKAMGRQALALLAALDAACAGADDLEQASAEEFRKHPDHAVITSFPGLADLTGARILAELGDDRSRFSDARALKAYAGSAPVTRASGKTIAITHRRIKNDRLAAVGWVWGTTLVVHTGPAQQHYRRRRLHGDAHAPAVRHLFNRMLGQLYHCLQTDQTYDAVKAFGNPETAPQDPAAA

SEQ ID NO: 392638 - protein, 414 aa, unidentified
MSDLKDKFSISVGLDWANKKHDVCVQIGDSDKRSFEVISHTPESIDSWLNELHKKAKGNIAIAVELTKGPIVYALQKYSFVTVFPIHGLTLARYRQAMFPSGAKDDPMDAKLALDMMLKYPNKVKPLRPSSDQSRTLALLVEQRRSLVEDRRRNTNRLINALKKYYPQPLEWFCHRDTELFCDFLIKWPTLHAVKRAKTTSIVKFFHARGGNAVSNTAKRVKAINEAIPLTKDNSVILPHKLLVVALCKQMLTLIENIRIYDKQISKLFNSMPDAELFNPLPGTGLCLAPRLLAALGEDRSRFNSAQEIQNYAGLSPVTERSGQKSWVHWRWQCSKFVRQSFIEWSAKSVKQSYWAGLYYEQQRAKGKSHQSAVRALAYKWVRIVYRCWKTRTPYDESTYLKALKERNSPLLAA

SEQ ID NO: 392639 - protein, 315 aa, unidentified
MNETLLFVGIDVAKAECVVAVRPTGATWTAPQTEGGWAALTRRLQALAPTLVLLEATGGLELPVTSVLAAAGLPVAVVNPRQVRDFAKATGTLAKTDAVDAAVLAHFAEAIRPVPRPIPDATTQTLGALVTRRRQLVEMLTAEENRFGSAPPSLRAGLRAHIRWLQRQLAGLDTDLDQAIRSHPGWRVQDDLLRSAPGVGPVLSATLLGGLPELGTLSRRAIAALVGVAPWARDSGRRRGSRRCWGGRADIRAVLYMATLAAVRWNPVLRAFYQRLVAAGKLKKVALVACMRKLLTILNAMVKSQTPWAPCIGEV

SEQ ID NO: 392640 - protein, 324 aa, unidentified
MIDGILGIDVCKNTLDVSISSYAKVRTKSFTNSPDGWRHLLDWLIAQKIQRVHACLESTGRYSLGIACALYEADHVVSIINPAQIRDFVRTKLGRNKTDGVDASHIREYCELFKPSPWAPPSEAHRRLGELQTIRSGIIAGLTEWKNRKNSGIVDAEAQALADATISHFTSQLGAVDKAIALTIDNDCDLQSKRDLLLSISGVGETLAGVVLAELPGPDVLRSSAEVVAYAGLNPRRHQSGTCIDRATRISKIGNAVLRAALYMPALSAMRYNSAIVALVTRLKSRGRLKPKQIVVAAMRKLLVLCFGVLKTGRPFDAAIAMGV

SEQ ID NO: 392641 - protein, 414 aa, unidentified
MEVLYPRCAGLDVHKDTVVACVRIAADGAVHSEVRTFDTMTPGLLALADWLSEQGCTHVAMEATGVYWKPVWHILSGGDLALILANAAHVRNVPGRKTDVADATWLADLLAHGLIRASFVPEADTQAMRALLRTRKQLIREQASHIQRLQKTLEDANLKLSSVLTNIMGLTGRAILEALIAGQDDVEHLLTLVDRRVKAPPEKLRAALQGRINDRHRFLLRLHLRQIDALAGAVAEIDQEVDRDLAPFRDAVRQLRTIHGVSDLSAQVIVSEIGIDMSRFPTAGHLVSWAGLCPRNDESAGKRRSNRLRKGAPWLKTTLVQCAWAGVRTKGSYLQAQFRRLSHRRGPKKAICAVAASILTAVYHMLKDGTFYRDLGANHFQTSPEAHAKKLAIQIEKLGYTCTLTQRTEQLVSV

SEQ ID NO: 392642 - protein, 392 aa, unidentified
MTEQPRVVIGMDPHKRSVTIEVMTADEEVVGGGRFDTTVEGFDAMLAHVAAWPERVWAVEGCDGIGRHVAARLTAIGEPVVDVPAKYSARVRAFATGQGRKTDATDAHSVALIGTRVAGLRPVVNDAQLTVLRVLVDRRRSLGEEHTRKVNQLHALLLELIPAGAKKYLSGRQARLLLEQVNPTDPAGQALKRVAVEYAADLEQIYARSKEADKELKALVAQTGTGLIDLHGIGPSGAARLLVAVGQITRFPTKAHFASWTGTAPIDASSGDHVRHRLSRGGNREINRVLHTMAIVQLRTRTTLGRSYYDRKRADGKTAMEALRCLKRRLSDVVYRTMLTDYTKGAGAGPGGHQGASTGSSAAGSQPHASTSEKSLPEPAAPNPRTRLPLAS

SEQ ID NO: 392643 - protein, 342 aa, unidentified
MFIIQTIGIDLAKNVFSIHGVDAYGKCVLRKTVKRNKLLETFAKLPPCLIGMEACSGAHHWARELLKLGHNPKIMASKFVIPYRQNEKNDANDAEAICEAVSRPKTRFVSIKSEEQQAMLCLHRIRQGLIKTRTATINQLRGLLSEFGIVMPQGRYSAQNTIGSVLEDAENGLPILARELLQDLSNKIQNLNLEVLHYDRRVSALVREMPSAKALMDIPGVGEHSASAIVATVNDAKQFGSSRQFAAWIGLVPRQYSTGGHVHLGRISKRGEKHIRTLLIHGARAVIARCKEKTDRNSIWLNQLVERRGYKRAAVALAAKNARIIWALLTTGKEYKINYVNG

SEQ ID NO: 392644 - protein, 344 aa, unidentified
MNSTTIAVDVAKSVFEVAVSEQPGEVRERQRLSRERFRRFLAERPPATVLMEACGSAHHWARQAQALGHRAVLVPPHVVRPYVLRNKTDRTDTKGLLEAFRNEDVRPVPVKSETQQALAALHRLRSMWLAARTVRINTVRGLLREFGLIMPIGAHHVVPHVATLLEDADSAVPGLLRPALADATTDIREIEARLRAIEHQLESVASENVVVRQLRTIPGIGLLTATALVATVGDVARFPSGRHFASYLGLTPREASTALRRRLGAISKRGDTYVRMLLIHGARSVLCHAKTKTAPPPDRLRAWALQIERLRGHNKAAVALANKLARIVWAVWRHGKDYVGTPAV

SEQ ID NO: 392645 - protein, 343 aa, unidentified
MDCFAGLDVSVKETSVCIVDDAGKIVREARVASEPEALLQVLTNTIYRFKRVGLEAGPLSQWLYSVLAEAGLPVICVETRHMRAVLKAQINKTDRNDARGMAQMMRAGLYRPVHVKTLRSQKLRVLLTHRKLLQSKAIAIENELRASLRNFGLKVGMIGTMKFEARIRELVERLPDLAVLVEPLLIVRRVIREQLGILHRRLLAIVRDDDVCRRLMTIPGVGPVVALTYRVTVDAPARFRKSKAVGAVFGLTPAKYQSGENDRTGAISRCGDEMMRIMLYEAAQSMLVRTAKWSWLKAWAMKIARHRGMKKAIVALARRLAVIMHRMWVDGTEFRWTRELPVA

SEQ ID NO: 392646 - protein, 347 aa, unidentified
MRYVGIDIGKWKCNAAVMDPEGVIVEEFAFANDHAGLEELASRLTPEDRVVMESTGSVWSTLYNLLDEKHVPVVLANPLKTRVIASARIKTDKVDARILAHLLRSNLVAECYVPPRSLRELRALVRHRASLVRVRTTVKNRVHALLDGRGIRCEYSDLFGKRGSEWLRKLDLGPLDGLMLSNHLEHLESLNRQVDETDEMIRGRASVDEDVRLLLSLTGVDVYTALLIRSEIGGISRFPDYKRLVSWAGLAPSLHQSGSVEYSGRITKQGSKMLRWAMVESARVAVRHDERMRGFYERVKRRRGDGKAIVAVACKMLKIIWFMLTRREAYQSRNEGRYGVKLKSLRT

SEQ ID NO: 392647 - protein, 315 aa, unidentified
MAMLVAQTKPVVGVDVAKNELVIYQDQSDRLEAIPNTKASISKWLRTLAGTASIAVEATNTYHVLFADMAYEVGCTIYMIDGYQLSHYRKGVNVRAKTDALDARLLARYLKKEADELHPWIPPCPLYRQLLSLFRRRAALVQARTGLVQSWSNEPLLKTAFAAQINSMKRLEALVEKKIKDVLQRAELMGQVSRCMKVEGIGFLTAARLVTTFQRGEFSNANAFIAFLGLDLRVSKSGQSDGPRRLTKRGDPEARRLLHNAAMSGSRTAAWKPFYEEQRKRGFSTTQALVMLARKMARVVFALLKTQSEYQSKAA

SEQ ID NO: 392648 - protein, 352 aa, unidentified
MTVTIVETRTQARAITGGVDTHADVHVAAALDPLGGLLGVQEFRANPAGYARLVEWLGGFGTVCLVGIEGTGSYGAGLARHIAAAGIRVVEVDRSDRQDRRRRGKSDPLDAVSAARAAQSGRAAGAPKGRDGQVEAIRALMVAKRTARSERIQTINQARSLIVTGPDDLRARFTGHSADDLVAELASLRPRPGSMIRYHTLLSLRELGRRAEFLDGQLQRLDALIVPLVTARAPGLLALYGVGHDTAAKLLIAAGDHPERLRSEAAWAHLCATAPIPASSGKVTRHRHCPGGDRQANHALYRIVITRMSSHPATRAYVARRSKEGLSKKEIIRCLKRYVAREVYPHLRPAAG

SEQ ID NO: 392649 - protein, 349 aa, unidentified
MKYFAGLDVSLEETAICVVDENGGIVREVRAASEPDALVEALRGIGLTLERVGLEACSLTAWLHEGLTRAGLPAICIETRQANAAMKTMPNKTDRNDARALAQIMRTGWFRQVHVKSRQCRLWRSLLVARRTVLNEMRSIENVVRAILREAGVKLGTPSRAAFADRVGELAGGDTLVMPLVEPLLAILATMLRELTRLTKQVLDIVRKEMVCRRLMSVPGVGPITALAFRATIDRPDRFRSSRQVGAHLGLTPARYQSGETDIQGRVSRCGDELARTALYEAANTLLVRSRKWSSLRAWGIKIARHRGMARARVAVARKLAVVLHRMWSDNTEFRYGKEPGATQRLAAV

SEQ ID NO: 392650 - protein, 337 aa, unidentified
MQFCGIDLHSNNSVVVITDETGNVLYGKRLPNDLKAILEVLAPHQRDLNAVVVESTYNWYWLVDGLMDAGFNVKLANTGAIRQYDGLKHSGDFSDARHLAHLLRLGILPEGHIMPKVARAVRDLSRKRMQLTRSRTAHVLAVENLFSRNTGSRPSANAVKRMTHDEVDKLGFSEDIALAIKANLAVIATLNHQINDLEAHLLQRVKDRPEFKLLKSVPGIGDILAITIWLELGSISRFAGVGNFASYCRCVDSKRISNDKKKGTGNTKNGNPYLAWAFIEAGHYAVRFNAQAKRFYERKKAKTNIMVAAKAVAHKIARACYHMLREGKPFAIERCFS

SEQ ID NO: 392651 - protein, 351 aa, unidentified
MMIIGVDYHPSFQTIAFLMEETGEGGEQELNHSDGQAEKFYRDLKQRGIGVRVGMEATGYSRWFERLLAELGFQVWMGDPAEIKAKRVKKRKTDREDARLLLRLMLENNFPQIWVPGPENRDLRQLLWHRHRLVQMRTRIMNQLQALAMNEGYRWKKKLFSEQGRVQLEKLALAPWASRRRQELLELLDRMNPTIEELTAAVEGEARKRPEALRLMTHPGVGPLTALAYVLIIGTPTRFQRGKQIGTYVGMIPCEESSARKQRLGHVSKQGNSLLRFLLVEAAQAATRIHPDWRRRYIHLAMRRHKSIAKVAMGRRLAVRLYWMWRNGCEYSPALEFGSYAGQLGTGHGVK

SEQ ID NO: 392652 - protein, 424 aa, unidentified
MHKAKGNRMKSWQEITHYAGFDWAKDHHVVVVVNRQGDLLTDFAFEHSLEGWQSFVAKTSGWPHLAVAIETSQGTAVDQLLQRHYALYPVNPVAAQRYRERKAPSGTKTDHVDAWALADALRVDGHGWKELQPLDPLTQQLRLLCRDEVSLIEQRTALVNQLQQALLEYYPAALAAFEDWTDRFTWDFVLQFPTPDALAKAGQRCWEKFLHTHKLWRPETASKRLAIFAQADQFQASDPIVRAKSQLAVSLCQLLRTLGQQLELYRQQIAALFREHPDHHLFGSLPGAKEVLAPRLLAAIGSDPTRYGSQEVLQCLAGTAPVSYQSGKINKVHVRWSCDKFLRHTIHLWADCFRRASAWGQTYYQQKRDQGMSHACALRCLGQRLLKIIFRMISDKKPYDAEFHARNQQKHGSWVLQLMNKPAA

SEQ ID NO: 392653 - protein, 384 aa, unidentified
MIKYSLGIDISMKSFYVCLSSIDALQHVNVVSSGNFTNNVSGFKLLHQWLEKHCKQKEVWLSIVMEATGVYYEQCAMFLFKEGYNIAVVLPNKAKKYLQSLGLKSKNDKIDAKGLSRMGAEQSLQLWQPMDDFFYQLRTLTRQHQNLQELKTSISNQQHAHEHSGTINKFVIKQLKQLIANIDKQIDAIGKAIEEHIISNVFIAKKVTDICVIKGLGILTVAVIIAETNGFILFKNARQLVSYAGYDVIENQSGNHIGKTKISKKGNSKIRRALHLPAFNVVRYKETPFVNLYKRTLSKHNIKMKSYVAVQKKLLIMIYSLWKKNEAYNSKVNQGESTRDIEQEATSRHGFEKTETKTEKRTQKNSADLKPALHKVINRRHVAV

SEQ ID NO: 392654 - protein, 450 aa, unidentified
MTKRTKKQTKGKTIKRVFHEVKADAAGIDIGASEIFVAVPDDRDKKPIRKYLTFTQDLNDCAKWLVECGIKTVAMESTGVYWIPVYDILESYGLEVYLVNARHVKNVPGRKTDVVDCQWLQYLHSVGLLRSSFRPDGEIVAIRSLYRHRENLIRQNGSSIQHIQKSLTQMNVFIHNVISDIVGITGLAIIEAIVKGQTNPQELLKFKNYRIKASDEDIVKSLTGNYKEEHIFTLKQALKTFHYFKDLIDDTDKEIEKLLLKFNSQTTNTLPPHKPSTAKNNNEPKFDLANHLYRILGTDLTAINGVSSHTANTIFTEIGFNLDKFKTVNHFTSWLGLSPNNKISGGKILSVKTLNSSNPIAKALRISAMTLSNSKSYLGNYYRKMRARLGAPKAITAAAHKLARIIYSMLLNKTPYDESVFAVQELKRQEKKKKAIINQAQALGLQVLET

SEQ ID NO: 392655 - protein, 355 aa, unidentified
MSGEKYIGLDVHQATISVAVMDSQGKLIMESILETKASTILEFLAGLRGTLFVTFEEGTWAAWLYDLLKPHVAKVLVCNPRKNALLKQGNKSDKIDARKLAERLRLNDLKPVYHGETGVRMLRELARSYLTIVKDLTRVMSRVKALYRSWAIPCAGRDVYYTRHRSQWLDKIPEAGTHRRAEQLYQQLDMLQHLRQQARRELLAESRKHTITAKLRQIPALGPIRSALAVALIQTPHRFRTKRQLWTYSGLGLETRDSGEYHYVRGQVRRRKKQVFIRGLNKDYNHDLKGLFKAAATRASVLPGPFQDFYQRSLAKGIKPTMVRLTLARKIAAITLTLWKKGENFDAEKLKSQAA

SEQ ID NO: 392656 - protein, 345 aa, unidentified
MKKVMAGIDLHSNNLVVGIMDQDGKRIGQQKLPCELEAVEKFLAPFKKRLEQVAVESTYNWYWLVDGLQALGYPVVLANPAAMEQYRGIKNAGDTNDAFFLAEQLRLKILPTGYIYDVELRPVRDLLRRRMLLVHQRTALMLSFKSLYSRTTGQEMTLRELKGLAIKKAQALYDHPANQMIAGLQIKHIEHLRESIEKIEKAVLASACELPLYRHLTSLPGVGKILGMTITMEVGDIKRFADAGRFASYCRTVEAKRTSNTKQKGKNNSKCGNKYLAWAFVEAANFARRGDEQCRKWHDRKAAKTFNVLATKALACKLAKAAWYLMAEGVDYNAQRMFGQPATTK

SEQ ID NO: 392657 - protein, 342 aa, unidentified
MDTIGLDLHKRESQLCIGADDGRMEERRIATSRERFASVLGARAGARILLEASTESEWVARHLESLGHEVIVADPNFAAMYATRARRTKTDRRDARTLMEACRLGAYRPAHRLSDARRHVRAELAVREALVRTRTRYIALAKALVRRDGLRVPASEAHLVARRIAALELSTTLAAELAPLFALLAPLNEQIAAADQRITALMQADAAVALLTSAPSVGPITAAAIVATIDDVTRFRSAHQFEAFLGLVPGERSSGEQRRIGRITKAGNVRARYLLVEAGWRILRSRDAALQALRGWALSIAARRGKRIAVVALARRLAGILYAMWRDGRPYDATRLRVPRAA

SEQ ID NO: 392658 - protein, 406 aa, unidentified
MKALPVLDSKAAAIDVGSERLHVSIAGDMPKVFGTLTGELETLREWFQQQEVRTVAMEATGVYWLYLYEVLEAAGLEVVVVNGRHVQNVPGRKTDMADCQWLATLHAHGLLRGGFVPPSEIRELQDYQRLRADHIIGAASQVQKMQQALERMNIKLHDVISDLTGVSGLKVVRAIVKGERRPGELLSLCDEQIRKKKSEAVRESLRGCWKKEQLFALRQGLELWEAYQQKISDCDREIQMLLQQLADANGSPGGSGLIGPVQLAPLKVTGKNAPLIEQFQELLARICGGRDATRIPGLGTYSVLQLISEVGTDMTAWKTEKHFVSWLGLAGGRKQSGKRKGSIKAYRNRAGRMFCAAARSLAKTVDKALGGFYRRLRGRVGGLVANVALARKLALLFYRLLRHGAD

SEQ ID NO: 392659 - protein, 434 aa, unidentified
MEEVEDEPLFAERVAGIDIAKAEVMVTIRVPGRGRRRQQETRAFKTTRKDLLALADWLRTWQVTQAGMEATGDYWKPVFFLLEQQGIDCELYHASQVKALPGRPKTDKVDSVWLAKITERGNLPSSFVPPEPIRRLRTHTRYRRHLTRMRTAEEQRAEKLLEDAHLKLSSVISDIHGVSGRAMLDAIVAGERDPKALAQLARGRMRVKLRELEEALDCSFFTEQHAFVLAMMLANIDHLTRQIQELSQRIDVLCEPYQHQISQLDAVPGTGIITAQDVIGEIGVDMTVFPAAAHLVSWARRCPQVTASGGRRKGSNASGKGNPYLGAALGEAAITAGRTQTFTGEKHRRLCKRMPKRKAQQATTRTLLVIYYELLSDPAASYTDLGTDYHERRVNIRREVRNHARAIERRGYRVILEPIHPDAEPIDPPVSKAS

SEQ ID NO: 392660 - protein, 345 aa, unidentified
MESMYYIGLDVHKKTINYCVKDGSGRIHAEGKIPATRFDLDLWMKTLPRPWMVAMEATIFTGWIYDHLRPHAAAVKVAHPLMLRAIAAAKKKNDRIDANKIADGLRCDFLPECYMASTQIRERRRTLRYRNLLVRQTVQLKNRISGLLMEAGVSYNKQKLHKVGYFRELLKTNPDIDESLRPLLQLCRETLVRLQKTESALIRSLARDRFLVERVERLMTIPAVGPITALTWALEVGEVSRFSSIKKAVSYCGLCGAERSSANITKRTPLSKQRNKHLQCVLVEAAKMAPRLSPELALLYDREKQKGNANRATLAVARKLVAYLVAIDRSQRDFLVVEKKNQAAA

SEQ ID NO: 392661 - protein, 341 aa, unidentified
MKVSTLGIDLAKNVFQLHGVDHEGHTILRKKLTRAKFVQFVIQLEPCLIGMEACSSSHYFARLFTRYGHEVKLIPPQYVKPYVKTNKTDAADAEAICEAVTRPNMRFVQIKTEEQQAVLALHTERGILIRERIACANSLRATLAEFGITIAAGQSHLTRELPAILEDGENGLSPFVRTSIYRQSKHIRELEEQVKQVEEALASWYRTQEACQRMAKIPGVGMLTATYVVAAVGNARQFSTAKQFASWLGLTPKEHSSGGKQQLGGISKRGDGYFRYLLVHGASALTAWVNRNGAVEENSWLQGLLERKHYNVAVVAMAAKTARIMWSMLSHNTEYQPRQLA

SEQ ID NO: 392662 - protein, 344 aa, unidentified
MQHYVGLDLSVKETSVCIIDKAGKVIREVKVATKPVPILAVLTEEALAIERIGLEAGPLSQWLYSALAEAGLPVICVETRHMKAALSAQINKSDRNDARGIAQMMRVGLYRPVHVKTLASQKRRMLLTSRQLLQAKALDIENDLRGTLRNFGLKVGMVGTIKFEARIRELVADHPDLAAIVEPLLIARRVLREQLDVLHHQLLEIVRHDEVCRRLMTTPGVGPVVALTFRATVDVPSRFSNSKAVGAAFGLTPCRQQSGEIDRMGGISKCGDALMRETLFEAALVLMTHSRKWSWLKAWGMKIARHRGMKRAIVAVARRLAVIMHRMWVDGTEFRWTRKEAAAT

SEQ ID NO: 392663 - protein, 373 aa, unidentified
MKKVTTIGLDLAKAVFQVHGVDASGVVMLRRALRRSRVLAFFAKLPPCLVGMEACATAHYWAREIAKLGHDVRLIPPAYAKAYVRRNKNDPADAEAICEAVSRPSMRFVAIKTEVQQAATGIHKVREMLIKQRTMLINALRGLMAEFGIVVAQGPRHVGELVAILVDPADRRIPTPLHEGLLAIVETLRGLERRIEIVEKQIVGWGRGNQTCRRLITIPGYGPILSSAMAAFTIDPTAFGNGRHFSASLGLAPRQDGTGGKIKLGPISKRGNGYLRRLLVNGAMSVLCSKQAKQDPWLVKLLDTKERKVVACALANKMARIGWAVMMRQEDFHSRRHDQRCPELRERDAVLPAVKTAARPPSAVAPRSVRGQS

SEQ ID NO: 392664 - protein, 356 aa, unidentified
MSQKLETSPAPAVIGIDIGKNSFHVVGQNLRGAIVLRQRWSRGQVEARLANLPPCRIGMEACVGAHHLSRRLQMLGHDARLMPAKYVRPYSKGQKNDFRDAEAIAEAVQRPTMKFVATKTADQLDLQALHRVRDRLVGQRTGVINQIRAFLLERGIAVRQGLHSLRSELPGILATRTDVLLPRMLRIIEDLAGDWRRLDARIEGLSSEIETLARQDKACERLMTVPGIGPIISSAMVAAIGTGDMFSKGRDFGAWLGLVPKQISTGDRTILGSISRRGNRYLRALFVQAAWVVLVRIKCWERYGLKSWIEAAKKRLHHNVLAIALANKLARIAWAVLNKGRAFECVKTEEVASRPA

SEQ ID NO: 392665 - protein, 387 aa, unidentified
MTQVDDLSRSLVPFDQNSSVIVVVEMSESSWLAAGQVPGIERLPLKKLEPDPIALLRLVERWRDEAVKVGNAIERIALAFEAGRDGFWLARWLERRGIEVHVVHSTSVAVSREHRRAKTDRLDTAMLMRVFLGWLRGERGHCGMVAVPTLEEEDARRPSRERESLVSERTRIINRMKAILAWLGIRSFNPKLRKAVQRLDGLRTPDGLPLLPNTIDELRRDMARLAMVCEQIKAIEKARLARLEQEPAAGPHAMVRLIASIIGIGIETADMLAQEVLSRNLRDRRAVARYAGLTGAPDESGSKRRQKGLAKAGNARVRRGLIQLAWRFLRFQKDSALAQWYRARTEGPTAARKTKMIVALARKLLIALWRLSTVGEIPDGVMLRQPA

SEQ ID NO: 392666 - protein, 345 aa, unidentified
MKTTTVGLDLAKNVFQVHGIDEAGEIIVRKALRRRQMLPFFEGLEPCLIGMEACGTSHYWARELSGLGHEVKLMPPAYVKPYVKRGKTDAGDAEAICEAVTRPTMRFVAIKSPEQQSLLALHRVRDLLIRQRTQLVNMIRGQLAEFGIVLAKGIQHALRLVEGLLDGEALDLPALAARVVITLAEQLRDLQGRIGVIDRDLKIWSRDDQVVKRLQTIPGIGIITASALVASVTDPHQFTSGRQFAAWLGLTPRANSSGGKERSGHISKMGDRYLRRLLINGMTSQLQSVRRHPDSHPWTIDLLRRKPAKLVAVAMANKTARIVWAVMTRDEDYRAPRPAIHQAAA

SEQ ID NO: 392667 - protein, 418 aa, unidentified
MLVVGIDIGAESHHVAVVDRAEAVVVKATAFAENVAGYQELFALLARAGARGGEDLPLAAASAEQDRTLVVMEATGHYWQNLFAALVAQGYAVALVNPLRTHRFAGEELARTKTDSIDCLQLARFGAQKRPAVTCLPEAAVGELRELVRLRARLMQDVVDRVNQLHRLVDLGFPEFTRYLKNLNTQLATAILRQYPTAAAVRGLSCKRLAKLNYDGRHRVGEELARQLIAAAAVSVGSQHTTAHQTGVRYACEDLETLRQRLKQLDGDITARLQQHQVGKLLTTIAGIGDNTAAMLIAELGDPARFRSAASLAAYVGLCPGHRHSGKHQPKSSSLTPIGNRRLRQALWMPTLSAATCSNPWLMAFYRRLVERGKPHKLALIAAMRKLLAAIYSVAKHRRPFVPFLHSQPLDNEVPARL

SEQ ID NO: 392668 - protein, 357 aa, unidentified
MLALGDSAPREGADAMTFVGCDLHTRMQQVAVLDTQTGEVSERQLPHDGMAVERFYAALPRPVTVGIESTGYAVWFHTLMQRLGHTLLVGDAAKMRAMVVRKTKTDRRDALHSLDLLRHDRFPAIWVPDPATRDLRALLTHRMRLVRIRTMVKNGLHAIALNSRLACGSKLLRQAGLAQLQALALPPHTARRRDQSLELLAGLTTQIRELDDAITTAALGHPDAPRLITHPGVGALTALTTIVVLGPVSRFHDSKHVVSYVGLAPALHASADKYHLGRITKQGSPLLRFVLGQAAAHAARMDPDLKRTYGALVHRRGRPKAKVAVARKLLVRLFIMLRDQIDYDEFCRRGRTAPAAA

SEQ ID NO: 392669 - protein, 408 aa, unidentified
MEKTLRYCIGIDVDKKEFKVNLRSLDSSGKQKTLASRTFSNSKKGFSEFEIWIAKNRKDSQPALSITMEATGVYHENLAWYLHGKGFKINIVLALKAKRYLQSLGHRSKNDQIDAQGLATMGLEQQLDVWMPGSVDLLRLRSLTRQYEAIQTAKNTFSNQLEAVFHSAVSDPLVSKSLNSIIKKMDAELEKLKIQICNVVDKNADLSHKWSLMEPIKGLGKLTFAVIIAETGGFALFNNIKQLVCYSGYDVIENQSGNRVGKTKISKKGNAHIRRAMFLPAFNVVRLKEGAFPDLYQRVFERTKIKMKGYVAVQRKLLCLIYTLWKTDQAYICKTNDEHSREEEAEVPLSGIAPKGAKNENVEAFEEHVNIKKSSPAVHRATQDGLSGKLSTASPLSGNAKILEKSYS

SEQ ID NO: 392670 - protein, 402 aa, unidentified
MIFVGDDWAEDHHDIHVMDADGTRLASRRLPEGLPGISRFHELVAAHVAEPSQVVIGIETDRGLWVQALGAAGYQVYAVNPLAVARYRDRHQVSGAKSDAGDAKLLADLVRTDRHNHRLMAGDSSEAEAIKVLARGHQNLIWARTRHTNALRSALREYYPAALEAFDDLADRDALAVLGRAPTPTEAAHLSLAKIRSALKRAGRQRNLDARAQEIAAALGTEQLAAPAAITAAFAATTRAAVAIIIELNRQISDLEISLAAHFETHPDADIYLSLPGLGDVLGARVLGEFGDDPNRYTDATSRKNYAGTSPLTIASGKKRAVLARHVRNRRLYDAIDQWAFCALSNSPGARAFYDHRRDAKQSHHQALRALGNRLVGILHGCLRHHTPYDEHTAWAHRAAAA

SEQ ID NO: 392671 - protein, 383 aa, unidentified
MTKIIRIGVDTSKSVFQLHGVDAAEQPVLRKRLRRRQVLEFFAGLEPTKVGLEACGASHYWARELIALGHQAVLLPPQYVKAYVKRNKNDAADAEAICEAMSRPTMRFVPVKTAQQQADLMLVGMREALIRRRTQLTNTIRGYAAEFGLIAAKGLDKIGPLLARIASEERLPVGARELFAALGDEYDRLKSQLRAIESKLMAWHRCNELSRRLAEVPSIGPIGATLAVMKVPDPWAFRRGRDFAAWLGVTPKDHSTAGKTRLGVITRAGDETLRSILICGAMAEIKQVGRPGSKPRAPWLVELVRRKEPKLAAVALANKNARVLWKLMVSGERYNAARYNPPRRLAEATTREGRGAALRKAPRRAPRSPRGKSQPTAAMTSNP

SEQ ID NO: 392672 - protein, 357 aa, unidentified
MKDLTINTTSVTIGIDLGDRYCRLCILDISGEIIEEGRITTTETALRRRFQNTERVRIVMEVGTHSPWVSRLLADLGHEVIVANPRKLRLIYENDSKNDQVDAEYLARIGRLDPGLLAPIQHRQLDTQADLAMIRSRDMLVRTRARLVNHVRGSVKAVGGRIPKCSTESFAEKASSSIPEEIEAPLSAILDLIEIISQQIEGYDDRISKLADEKYPETELLHQVSGVGPITALTYMLTIEDPYRFRKSREVGSYLGLRPRQGDSGDMQPQLRITKSGDRMTRWLLVQSAHFILGRFGPDSDLRRWGLALAERGGKNAKKRAVVAVARKLAVLLHHLWITGEVYEPLFNAQRKADKAA

SEQ ID NO: 392673 - protein, 358 aa, unidentified
MQSNKINFKGQNIFIGIDVHLNSWSVTTITPSGYKRQTSHRADAVELYAYLTKNFPGGIYHAVYESGFCGYSCCYELRELGIDCVIVHAADVPSTQKSRLSKTDSNDSMRLAMSLRNGELNTIYIPPKEVLGDRDILRYRSIVQKGMSRTRSRIKHLLHTNGVSYPQEFREPYRHWTRRFIKWLREDVRLLSGKRLELDFLLEDLEHQRSQLLKATGKVRELSRTSRYAEDYGNLISIPGIGLITAMTMLTEVTDIHRFSSQKKFMSYVGLIPVMKDSGETIRQNEITPRGNQRIRRMLIESAWSAVRYDAQMAAAFGAFCRRMKKNRAIVRIARILASRTYHILKTRTKYHTALCTA

SEQ ID NO: 392674 - protein, 311 aa, unidentified
MTEHITIGIDIAKDTFDVFISPDGLFLHLENTPHGHQQLLDALASRAVTRIVMEATGRYHNLLAATLELAGLPVAVVNPAQVKHFARALGTLFKTDPNDARIICEFGRRMTPDIRPAPDEQTQRLAMIVSRRRQLVDNRTMEQNRYGSCSDELIRTGIKRHIDWLNAEIKDTDDDIDQQIKVMPLWQEKVKLLEDVKGIGRTTLAVLLSMLPELGQLNRRKISALVGVCPYAHDSGKMKGKRCIWGGRSAVRAALYMAAMSAVRYNPTIQTFFERLRSKGKAFKVAMTACVRKLVTILNAMVRDNKKWVAG

SEQ ID NO: 392675 - protein, 478 aa, unidentified
MENNAFLGVDVAKGSADFLLVNARKETLEEGFMLDDCAEGRKVLCRLIEKWFASGITHLYCAVESTGGYENNWFTLLCSLSASYDQKNKTLRVARVNPRPVKACGKAGMLRTQTDQTSALAIASYLIGFPENVRYSPHTGQSDDPVWLAARGQAGLIRMLIKQKTQLSSQLEKLLYTRLGETMIYCRNGIPGWLLRLVSRYPSREHLQRAGAGKLAKIKGLSPDKAKSLLGKLNGDQPATPVIACHTIKATARGILHLQKQIDTQQTFLIDQFSEHPDVRLLESITGIAVTSAVRLIVEIEDVSRFDSSKAFCAYFGVHPSWRESGDGHWKTGMSKQGRAQVRGMLYMSSLTAIRWDPDLKKLYHRFRKENRMNHYQAMGVLMHKLLRIIYGVLKNQTPYDRQVDRENRRQSKEKQQAYQKKIAQNKAVQKTTRQRFMSNRADSTEDAPISRRAYKKRKQEASQSSLVEEYAGSPPAD

SEQ ID NO: 392676 - protein, 343 aa, unidentified
MKLMRIGVDLAKNVFQIHGVDRHEQPVWRQRLPRDRWLQTVLEKTEPGCEIGMESCGGAHHWARQLQARGFRVRLIAPQFVKPYVKSNKNDANDAEAICEAMSRPSMRFVAVKTIEQQDIQATHRIRAGLIEQRTAKANQIRGLIAEYGLVAPKELLMLRRAIPCWLEDADNGLTARFRRLLNGLWDDLRALDERVSELDGEISAIAASEPSAVRLQQLRGVGPMIATALVAAIGDANQFANGRQLAASLGLTPKQHSSGGKDRLLGISKRGDAYLRTLMIHGARSALRTAKSKDDRLSQWVVRLAERSHPNVAAIALANKTARMAWAMLRNGTDYQPDRAAA

SEQ ID NO: 392677 - protein, 346 aa, unidentified
MVLIGCDFHPSWQQVSWLDRATGEAGDEKLVHAAGAVEKFYRQFPAGSRVGMEATGNCQWFVEAIRRIGHELWVGDAAKIRASDARQQKHDKRDARLLVQLLAEERFPRIWIPSREEKDLRQLLIHRHKLVRIRVQLKNGLQNLAMNQGLLKKRKLWSAVGQRALCELPLAPWASQRRADLLKMMSELDDKIDVLDRAVVDAAESNEKAKLLMTQPGVGPITAMAFVLTLGDASRFPRGKQVASYLGLIPREYSSGGKQRLGSISKQGSSFLRMLLVEAAQVAVRCDPQMRSEYLHRCHRMAKGVAKVAAARKLAIRLYWMLRTNTAYPEVVRVESSSRVALAGAS

SEQ ID NO: 392678 - protein, 336 aa, unidentified
MPEIPRARTVDRVNQTRIVQGRDKGRKMSEVYAGIDVSKEFLDVAVLPSGEKKRYSNDETGIGKLVVRLKKIKVQLVVMEPTGGLEAPLAAAATLEGIKVAVVNARQVRDYARATGKLAKTDKLDALIMAEFASVIKPPVREMRDEETQEIKAIVSRRRQLLEMLTAEKNRLAIAPKDLKPKILSHIEYLKKEIADWDRDLRQRIEDSPVWRVKDDLLQSIPGVGKVLSATLLAELPELGKLNRRQIAALVGVAPYNRDSGTMRGKRSIWGGRASVRSALYMATLVSTRFNPVISNFYQRLLEKGKAKKVALVACMRRLLTIMNAILKTQKAWQYA

SEQ ID NO: 392679 - protein, 315 aa, unidentified
MEQSPGSPNFVGIDVSKDRLDVHLRPSAKAFAVARNGEGLDRLVTELRRVVPTLVVLEATGGFELTVAAALAGASLPVAVVNPRQIRDFARATGRLAKTDTLDAETIALFAERVRPEPRPIADADAQALAELVARRRQVVEMIGMEANRRRQARSPRVQRSIEATLKTLETQLAELDREIDDNVRGSPVWRVADELLTSVPGIGDITARTLIAELPELGQLDRRRIAALVGVAPINRDSGQMRGHRAIAGGRSSVRNVLFMATLSAIRWNPVIKAHYTQLIERGRPKKVAVIACLRRLLAILNAILRTAEPWQTA

SEQ ID NO: 392680 - protein, 403 aa, unidentified
MNAVGIDVSKGKSMVAILRPFGEIVYSPFEIKHTSHDINSLVDLIHSVYGESRVVMEHTGRYYEVLAHQLSEADIFVSTINPKLIKDFDNDSLRKVKSDKADAVKIARYALDKWQNLKQYSLMDELRNQLKTMNRQFGFYMKHKTAMKNNLIGILDQTYPGVNTYFDSPARSDGSQKWVDFASIYWHVDCVRKMSLNAFTDHYQKWCKRKKYNFSKSKAEEIYGKAKELVPVLPKDEITKRIIKQAVEQLNSASSTVEELRTLMNDTASKLPEYPIVMAMNGVGPSLGPQLIAEIGDVTRFTHKGAITAFAGVDPGVNESGTFSQKSVPTSKRGSADLRKTLFLVMDVLIKTMPQDDPVYQFLDKKRSQGKPYYVYITAGANKFLRIYYGRVKEYLASLPQSE

SEQ ID NO: 392681 - protein, 410 aa, unidentified
MVKENFIYVGIDLHKETHTVVMIDCYNQKLGEITFPNRPAAFPKLVTKVKKCNTDGKEVVYGLENAYGYGRALAVWLIDKGYLVKDVNTAISHRQAKHRGAMYRKSDSDDAKAIALATLNMLDKLPDACPNDAYWSLGQLVHRRDNIMKQRTRLVNQLHEQLCIAYPSYKQFFNDISRPTALYFWEHYPSRKYLKGKSVEDLRAELVPVSHNKCSTKTCEKILDAVASDKVKNNNFQDARDMVTLSIVSDIQHYDKQLVEVDKMLEQMYKMLGCTLTTIPGVNVITAVKILAEIGDIKRFSNANKLAQFAGIAPLHLSSSGKGKDVATKQGNRRLQATIYFLAIQMVQVSSNGTPRNSVVRAYYEKRKAEGKTSQQALICISRRLISIIYGMLKHGTEYRMPVVERAGEK

SEQ ID NO: 392682 - protein, 411 aa, unidentified
MSESDNPAAPTYAVFCGVDVGKAEHHACALDPSGAKLHNKALPNDEAALTAVLSGLTAHGRVLVIIDQPASIGALTIAVARNLSIDVAYLPGLAMRRIADLHPGEGKTDARDAYIIADAARTMPHALRRVGTDDETLAGLGVLVGYDDDLAAQSTRLSNRLRDALLHVHPALERLLGKHIERGGVIDLLVDAPTPAALRALGEDGIRTVMATRSPRLAKTLPATILAALDAQTVVVPGTTEFGRVIAGVATQLRQVRTERTALAADVEVRLATHPLAEVLTSMPGLGVRTALKILTIVGDGAAFPTAGHLAAYAGLAPVTRRSGSSIRGETRSQRGNHALKSALFLSAFASLADPTSRAYYDRKRAQGKRHNAALICLARRRVDVLFAMLRDAKPYQPPITTSPAPDTLAA

SEQ ID NO: 392683 - protein, 400 aa, unidentified
MNAVGIDVSKGKSTVAVIQPFGVVIAEPFDVFHTDSSLKELVRFIKSLSGETKVVMEYTGTYYEPVANALHNAGIFVSVVNPLLIDDYDTNRVRKVKTDKLDALKIASYALDKWIKLRKYEPAETVRKTLQIMNRQCIKLNKILVMQKNSLIALLDCCFPNANTLFTSPRRVSDGHEKWVDFAMKFPHVDSVAKLSLSAFRAKYQSWCKKEHYNYSESKADQIHAYARTIVSTLPMTESVRKMVSDAAKRLNSTLEALGTLHSEMDALASQLPAYETVMNLYGVGKVFCSQLIAEIGDVTRLKSNKSLKALAGIDPPPNQSGKDDPKSRRISKRGSPALRRTLFLIMTIYLQHQPADEPVYQFLDKKRAEGKPYKVYMIAAAHKFLRIYYARVKELMPKE

SEQ ID NO: 392684 - protein, 352 aa, unidentified
MSILALDLGRFNRPTHAVWFDPSTGETKRHRFTTNRAGLEEAVRLFPGSRVVFEIQPGAGAAVDVLRPLGVGYRVGNTNEDSFRWKNRKSKTDARDALKLAKLEAVGDLHPVHVPEKSVREHASLQTERDGLVHDRTRVKNRIHALLESHWIEAPSRESLWSVTGLARLEVIKTEAIARGSDLGGQLDRALRHLAHLNGLINEVTKRLDALAPARPEIERLQTLPGVGPRTAEALVVAIDQPKRFRNGKQVGAYLGFVPRVYQSGDTLRHGRITKAGNRRLRALLVQAAWIAVDHDEHWKALFERFGGATKPRRRIAIVAVARRLGIAAWALMRHGTNYQPERLTTATTATT

SEQ ID NO: 392685 - protein, 392 aa, unidentified
MYYVGLDVHAKRSSMCILDANGKLVKRLEVKGAWPRLLEVVDQQVPKPFTICYEASCGYGYLYDQLAKRAERVSVGHPGQIRLIFRSKKKHDRVDAGKLAKLLYLDEVPVVHVPGVDVRAWRGLINYRRKLVARRAAVKTQVRALLRGLGVVVGVKGGLWTKRGIKWLTTELALASAADRVRRDVLGDDLAHLEAKVATVEKELDRIARGHPGVTLLRTIPGVGPRTAEAFVAHVDDVSRFARVKQVGSYFGLVPCQDASADRNRLGHITKDGPAQARWLVAEAAWQGRRRSPKIRGYFDRVMRGDPQRKKIALVATAHHLTRVMAAMLRSGEVWRDEAADETAPQAPQAPQAPQAPQAPQAPQAPQALATQDKPAAAAAKTKKKTKTADKE

SEQ ID NO: 392686 - protein, 361 aa, unidentified
MNEITTVGVDLAKEVIVVCAADGAGRVVYFKQLSFQGFATWAANLPPCSFGMEACSSAHHWARWLTTHDHRARLMAAEFVKPFRKSQAAKNDRNDAQAIRIALCQPEMRFVTVKSVEQQAMLAWHRMRSGYNEDRTALLNRTRGLLAEFGVWLGRSAAALLRALPRLAEEEQLPARLRPLLRQAHEQLLVLEERITACDREIQAHARQSEAAQRISALTGVGPLTSSAVIATVANARDFRNGRQMAAWTGLVPKQSSSGGKQRLGSISKRGDTYLRGLLTQGARSTLQSALGRSPDQRSHLQHWIVALHARVGYHKTLVAIANKHVRIIWAILAKGEHYDPNAWQRHAPQRAAHRSCLQPS

SEQ ID NO: 392687 - protein, 344 aa, unidentified
MQIVGCDFHPSFQQVAILDVCSGEVRELKLMHADGEAERFYRGLESPVLIGMESMGNSLWFEQLMEQLGHELQIGDAAQIRASYVRRQKTDKRDAGHILTLLLEKRFPRIWVPSRLERDQRQLLLHRHRLVQMRTRVKTELQHLALNQGLQKQRGLWSVRGRADLEKLPLEGWTKRRRMDLLKVLDMLEDQVAGLDEAVGKAAFSNQQARLLMTQPGVGPITALAFVVTMGDVARFKRGKQVASYLGLIPSERSSGKRRRLGAISKQGNVFLRTMLVEAAQSAVRHDEQFKKEYAHRCHHKPKGVAKVAAARKLAVRLYWMLRTQTPYPHAVHNGGGPSHPVVG

SEQ ID NO: 392688 - protein, 339 aa, unidentified
MQVTTVVLDLAKNIFQVHGVTENGEVAFNQALRRAQLFAFFEKLPPCLVGMEACGSSHYWARQLRKLGHDVRLIPAMYVKPYVKRGKSDAVDAAAICEAVTRPIMRFVAIKSEEQQGVLFLHRARDLIVRQRTQLSNMLRGLLGEFGIVIVQGIGSAIKFAKGVPDGDKPGIPEVAIDVLDNLSNQLVALHLRVRRYEMRIRLQAKQDLRVTLLRSIPGVGPVTASAIVATAGDASQFKNGREFAAWLGLTPLNRSSGGKEKLGLITKMGDRYIRRLLVTGITSRLRQMKTHPERVDPWSRALLDRKPTRLATVAMANKTARIIWAVLSKNEYYRPHTI

SEQ ID NO: 392689 - protein, 403 aa, unidentified
MQYLGIDLHRKQMTVSLRNHNGDVLLRRQVSTRWPKLEEFRNQLHQTLADGEKYVAVVEVCGFHDWLVQWLNRDERCLQVLVVQPLGRSASKTDRRDAHGLSELLWVNRERLLRGERVHGVRTVQVPTESEQADRCLTQTRERLVRRRTQTLNQIHKILRRQNLEWERPTETFQTVKVRRWLKTLQLAPIDRLAMDHLLVQWALWDEQLVAADGWIRERFLANRNAQLLATMPGVSRFIGLAIACRIAPMERFPQGRSLANFLGLTPGCRSSGDTERVGSITKIGSRMVRYLLAQAIQHLLRRDGSIRAWYQRLKRRRGSKVARVAVMRRTATIMWRMLSTGEPWRCGGARSEMPEADEPRQTPVPQDGPAEQLAQSGDPELAGFRTGSSSLLAGEEVAPCPA

SEQ ID NO: 392690 - protein, 387 aa, unidentified
MPQLNDLSRSLVALDQDSTIIAVVELSQSSWLVAGVLPGIERQPQKKLEPSAERLLGLLHRWRDEAVRAGKKITRIALAFEAGRDGFWLARWLNARGVEAHVIHPSSVAVSREHRRAKTDRLDTELLKRGFLGWRRGERGHCSMARVPTIAEEDAKRPNRERECLVGERTRIVNRMKATLARLGVRNFKPTLRKAAERLATVHTPEGMPLPPNVLAELQRDMARLGFVVSQIREIEDTRQKRLEQEPETGHHAMVRQVARVIGIGIETADMLVNEVLSRPMRDRKAVARYAGLTGSPDESGARRREQGLARAGNARVRRGMIQLAWRFLRFQKQSALAQWYRARTADSRLGTRKTMIVALARKLLIALWRFVTTGETLDGVILRPAG

SEQ ID NO: 392691 - protein, 346 aa, unidentified
MTYYVGLDVSVKETSICIMDDKGVVAARTDVSTDPDLISNFISKHASDVERVVHESGILAIWLTRELEKRGVPIICIDARLAHKALSGRINKSDQGDAEGLAQLARTGWFTQVHIRSEASERVRVLIGARERLIRMRKDLEGHVRGVLKVFGICMKPVGTGKLRGGFRDQLAAATDADPAIELLAEVFLPLHKTLCIARDALDDEVRIIARESDLACRLMTVPGVGPIVALAYIATLDDEKRFRKSIDVGAFLGLTPKRHQSGEVDWSGKISKCGDCDMRRLLYSAASTLISCTRKPSRLKEWATKLAERKGHKKAAVAASRKIAVILHCLWRNETVFEPGMEAIN

SEQ ID NO: 392692 - protein, 334 aa, unidentified
MKKRYFMGIDVAKATFDFCLLSSTEACLWRGQFSNDARGIARFLAQLPAASRKPAQIHFALEATGVYGKALVAALHQAELAVSVLNPAQVKYFAFSVLRRTKNDTVDAEIIARFCRERKPLATRPLRPIEEQLKVLVHERESRVGEQTRERNRAKKDPFQIELPTLIRRQRQQRLQQLAKEIAQLDAAIASLIASDECLRTQSQLLCSIPGIAALTAAKILSELAGKEFQSARQLAAYAGLTPAEFRSGYFLYGKTHLSKIGNAFLRKALYLPAAVARRWCKPLKPWIAILESRKLHDLAIRGAIMRKLLQLAFGVLKHQKPFNPLLVSFAKTL

SEQ ID NO: 392693 - protein, 412 aa, unidentified
MELQKNKVCGIDVHKRFLIATILFRDGKKDTQRFSVTLEDLLKFRDWVIENGCEQVAIESTGIYWHPVHSVLEGKIDLIVANSYKIKHTPGRKTDVGDSEWIAELCLNGMIEPSRIFPKDDRELRRLTRAREGYVKQMTQEKNKIHQSLDSACIKLASVISDIFGKSGMYLLNCVLEGRDIDEIIEGIPSGRLKKKADQIKESIKSRLEISQVILIRGSLSLMKSIQERIDELDGEISARIQYRKNDLAIAMSIPGTGFVSATAILAEIGNCTDFKKPEQLAAWCGLVPSLYQSAEKTILGGITKQGSKHIRRMLIQVAYAISRTKDSKLKKFFLRIQAKKGSKVAAVALARKVLCILHHLLMNQEMYLEDRDKKNMRQKVLTPPSPIKMSMQEMIDCIVRAGYVVTKSDSR

SEQ ID NO: 392694 - protein, 353 aa, unidentified
MLDTTTFVGLDVHARSIKAVSLDVMTGEVRAATFGYDAGAVAEWIRSVGPGARCVYESGVTGFDLQKRLSGLGVDCVVGAVSKMIKPSADRRRKNDRNDAEFLARMLSVGNVVEVWVPDDECEAARDLTRALEDARDDLSRSKQRLSKFLLRHGLVFDERTPTGRRKGNWTRAHWSWIESIRFAEGADNDALAYYVDAVRRAAEEKARLEGLVEAEARKPRWRKRVDSLRCLKGVDTASAADLVFEAGEFSRFRNARSFAAWVGLTPSEHSSGESDRRGAITKAGNKHLRKTLVLASIYFSPFSPTYFRQSRQRGCAGFANADAPLSASRLPPPSRPHRRWIRPSGGTTVPLS

SEQ ID NO: 392695 - protein, 400 aa, unidentified
MRSVFGIDVSKASSEVAILVNGEKVHSYTMSNDAIGFSRLLGDLKTVHKPEIIFEATGVYSRRLQAFLDEHSYAYTRLNPLEAKKQLDSLRVRKTDQIDAEKLAQSQSVLNRKPTYVQEEVYQNLRDLSRFYQNLTEDIVRAKNRLHKVLQVTFPELENILSTPTGEQYWNLVIAFPCKDFVLELSKDELSKSIRLSTSKRISDKRVAYLAEKLTALANQSYCTVKKTSPMLEEVRYYAKELLRLSEQRQAVLGEMVELAQPLPEYDILLSIPGIAETTATSIIGELGNIRRFQSANQINAFIGIDLRHYESGNFIAKEHITKRGNPYARKILFKCIHNIASASHTNPCHIADFYEKRKRQSQTTSTKPHTIASIHRLIRTIYYLITHNKLYDYTLTQNQ

SEQ ID NO: 392696 - protein, 318 aa, unidentified
MTTKAKSKKAVNIGIDVGKSQLDFFIYERDIHFTVENTTDGIRKALGRLGRYNVARIVLEATGRYERPFVEAALLKEMPVIIANPIHVRRYAGAIGQLAKTDHIDAWLIAKYAAVVQPQVRKHQSKSVIKIKDLLVRRRQLIEMMTMEKNRHHIMPDFLKTDIKRNITQLQKQLEKVDQHLDKLIEAEDEWREKRAILQSMPGIGPAVVNTLLGDMPELGALTQKQVAALTGVAPYNRDSGKLRGKRRIRGGRHNVRTILFMAALTSIQHNPVIRSFYQHLVAQGKHKKVALTACMRKMITILNAMVRDGTTWQEKYA

SEQ ID NO: 392697 - protein, 433 aa, unidentified
MHDAVLSIDVSLDQLDVALRTDDAGWQWPHRAYPNNRPGFEKLKTELLTELSPLTAARLTVVAESTGPYWWPAFYQVVHDPELASYQPHLAVLNPQHVKGFRKALPEQDKNDLLDPQLIDRYYQAFGVKHFYQFNDRYLQLRFLSRAYTRLIHTLAAEKAYLRSLLFILASDYQRLEPFSDLFGATSLGVLDEYDDIQSLADMPLDNLTDQLRLLSANTLPDPQSNAQKLQQVADHSYRLPQALSATLHLILQHSIAHIRFLSDNQKSMRQLIEQQLQHLPEAKLALAHAGLGPILVAGCLSEIQDTTRFISGTKFDRKLKRLRPRTYRDGQAAVAKLAGLWWPQRDSGRFQADERHLARERNPYLRYWLVQAAYTLQRYQPEYTAFYWRKFHQVQKHQHKRALILTARKAVRLIFALLHKGQQACLKEVTRA

SEQ ID NO: 392698 - protein, 387 aa, unidentified
MPASGPRPGQVAVQVSLAAIFVSLELSRSTWLITSLIPGGADKMSKHSVRSGDITELMTHLAKLRDKAQARAEVSFSIIAIQEAGLDGFWVHRVLERAGIESHIVDAASILTSRRWRRAKTDRIDGEALLRTLLAYKRGEPRVCAMVRVPSPEEEDRRRLCRERRTLVAERVAHVNRIKGLLFAQGIADYEPLHGNRRQRLEALRTGDGRPLPLYLKAQIGRELDRLELLLEQLKTVEAERNALLEPTNDVAPVAVKALAGLRGIGPEFTAMLWSECLFRSFRNRRQIAAYAGLAPTPWQSGSVRHEQGVSKSGNPRLRSTMIQLAWLWLRHQPTSELSLWFRERVKRHGGRGKKTAIVALARKLLVALWKFSSSGVVIEGATMKAA

SEQ ID NO: 392699 - protein, 353 aa, unidentified
MNYIIGCDAHKHYSQFAVYEGNNLRGKQVRVEHERGAIREFLSEFPEGTPVALESIGNWYWIVDEIEQAGCKALLAHPAKAKVMMGNVNKTDKLDARGLATLLRNETLPTVWMAPSAVRDERELPRTRMALCKIRVALKNRIHATLAKYNLSLPTESDIFAPKWSSQLNQVIEQLPPETQKCLQQELELLDKVQEQIRTMEERMKERISLTPDMQLLKTIPGVGDILAIVIGTEIGLVERFSRAEQLASYAGTVPAVKSSGGKVRYGHTPKESNHYLKWAFVEAANAPAQYRMHPRWQHRHVTRLYERVKLRKGHSVAVGAVARHLAEATFWILSKQEPYREPIRQKVLPKQA

SEQ ID NO: 392700 - protein, 423 aa, unidentified
MMLHPKMQHVYVGIDVHKHQHTAVVVDCFSEKLGELTFPNKKQDFPKLLSFAKKHIHQGITPVWGLEDVLGNGRELAIFLLEKNYKVKYVNPSLSQSERKNQASINKSDSIDSQCVANVLLNKLDSLPDAAPNDLHWALNELVTKRNTLVKNNVVLKNQIHTYLSHHYPNYKSFFFSLDSKTALEFFKEFPSPSKLKEVTLQELTAFLSQKSHHNCSEKKARQILDCVEKDGDTTNEFQELRDFIVTSSIKQINDNLAIIASIEENMKKLIPQFRYKLESMKGINTVTAAGIIAEIGDISRFPNADALAAYAGISPMRYSTGQTNKNFSNKLGNRNLYQIFFQIAVSVLSNPMGKPTNDYFYEYYKKKLSEGKTKKQAIKCIMRKLVNIIYKMMRDKTEYRARLTHVCNYMECKFVKQLKSLK

SEQ ID NO: 392701 - protein, 409 aa, unidentified
MERMIERGCGLDVHKKTVAACVRVPGPNGARTQHVQTFGTTAGELLTLRDWLEAHGVTHVAMESTGVYWKPVFYVLEEAFNCLLANAAHIAQVPGRKTDVQDCQWIAQLLEHGLIRGSFVPPAPIRELRDLTRYRKALIQDRTREANRLHKVLQDAGIKLASVATDVLGVSGRAMLEALIGGTTDPNVLAELARGRLRTKLPALRQALAGRFRPHHAFLVTQLLAHLDHLDELIATVSGQVDDVIAPFAEDLARLDALPGVNKRTAEVILAEIGVDMGVFPSAGHLASWAGLCPGNNESAGKHRSGKTRKGNRWLRSALTEAALASTRASHTAFAARYRRITRHRGHKKAVVAVAHALLTTAYHLLARQTSYRDLGTDYYDRRHAERVRNRAIHTLERQGYRVILEPAA

SEQ ID NO: 392702 - protein, 338 aa, unidentified
MGTYAGIDLHSSNSYIGIIDEQDRRQFGKRLPNSLTQILVALEPFKKNLEAVVVESTYNWYWLVDGLQEEGYKVHLANPSAIKQSEGLKHTDDKWDSFWLAHMKRLNILPEGYIYPKEERPVRDILRRRLLFVQQRTAQILSLQSAISRNLSLRMSGNAIKKLKEEDAEDLFDSPFLVLTAKSNIAVIQFLAKRITAIEKAVKSEAKLREEFQLLKTIPGIGNILALTIMLEVGDIGRFPKVGNYSSYCRCVKSEKISNKKKKGENNRKNGNKYLSWAYVEAENFAIRFSPEAQKFYQRKMAKMDKIVAIKALGNKLARASYYIMRDRVDYDSSKLFG

SEQ ID NO: 392703 - protein, 372 aa, unidentified
MKQSTTTYVAMDTHKKTISVAVAESGRRGATRFIGEIPSRPEAVAKMVDRLARKHDSLAFCYEAGPCGYGLYRQITSLGHECVVVAPSLVPTRPGDRVKTDRRDAVAQASLFRSGELTPVWVPDDAHEAMRDLCRARQAAMEALRRARQQVASFFLRHGRVYANGAHWTKKHRLWLAAQRFEHPARQIAFEELVQAVEEAQARRDRLAKQMQELLPSWSLARVVTAIQALRGVALIAAITLVAEIGDFKRFANPRQLMAYLGLTPGERSSGAKTMRGAITKAGNTRARRMLVESAWTYRLPARIGAAILKRNEILPQPLKDIAWKAQVRLCARYRRLVRAGKPTNVVCVAIARELAAFVWAIATNGAIGAVV

SEQ ID NO: 392704 - protein, 392 aa, unidentified
MIYVGIDVAKDKHDCFITNSDGEVLFKSFTISNNRDGFETLFQKIESVSDDLNKVKVGLEATGHYSYNLLGFLLDKGLTTFVINPLHTNLYRKSLSLRKTKTDKVDSRTIATMIMSDMNLKSYSDISYHNEELKSLTRYRFDKVKERAKLKTSVSRLVNILFPELEKLVPSLHLSSVYALLSEFPGAAQIAASHLTKLSNLLSQASKGHYGKETAILFRETARSSIGSVMPAKSLELKHTIKLIQELTAEIDEIEAAIKQIMDEEIHSPILTIPGISYRMGAMILAEIGDFSRFDSADQILAYAGMSPSTYQSGQLDNCHSHMEKRGSRYLRYALYNATKYVCHWDNSFGAYLQKKRSEGKHYNVALSHAAKKLVRLIFAMEKSGRTYQPAA

SEQ ID NO: 392705 - protein, 402 aa, unidentified
MNAVGIDVSKGKSMVAVMRPFGEIVFSPFEVSHTDKDLTNLVRKLKSLPGETRVVMEHTGHYHAPIAAALHEAGIYVSAVNAMLVHDYGNNSLRKAKTDKKDAVKLANYALDRWLSLPQYHPAGDTRLMLKTCCRQYEQFSKISVMQKNSFISLLDNVFPDVNRLFTSPPRSDGSEKWVDFVAQYWHCECVSGMSVKAFTRSYEKWCYKHGYHFSEDKALDIYASACGHICLMPKCEATRQLVQQAVSQIRASSAALATLKQQMQELASTLPEYPIVMQMYGVGKSLGPQLMAEIGDVRRFHSKSALVAFAGIDAPPYQSGTINVRSRSISKRGSPRLRRTLFLVMAAILKSSPPDEPIYQYMNKKRSEGKPYLVYMMASANKFLRRYYATVKAYLDGLDFA

SEQ ID NO: 392706 - protein, 410 aa, unidentified
MEVLYQRCAGLDVHKKTVVAAVRLVEGNKVVTEVRTFATTTVGLLALSDWLAETGCTHVAMEATGVYWKPVWHVLSDGEIELVLANAAHVKNVPGRKTDVSDAAWLAELLAHGLIRASFVPDGQTQELRALLRTRKQLVRERSRHVQRIHKTLEDANIKLDAELSDVLGKSGRAMLDAMVAGETDPVRLAALAHPNVKCPQAKLREALRGRVTSHHRFLLQLHLGQIDRLDAAIATIDREVEANLVPFRTAVELVSTIPGVSTLSAEVIVSEIGLDMSRFPTAGHLLSWAGLCPRNDQSAGKRRSSRLRKGAQWLKTTLVQCGWAAKNKKGSYLQAQFLRLRSRRGPQKAVCAVAASILTAAYHMLKDGTLYSDLGADHFNRRSKTTQAQRFVNRLKHLGYAVELKPLAA

SEQ ID NO: 392707 - protein, 451 aa, unidentified
MSKTVKSKVKTNLQLAVIHPHTAAVDIGSMLLTIAYTDCGGQQQLLETDSFTESLDQLVQQLKKADVTHVAMEATGVYWMALYELMEEQGLKVTLINPKHFKNVDAQKTDVKDAQWLHQLHAHGLLRASHIAPELYRELRSYVHERNVLQKQKSDTLNRIQKLLTKMNIKVQHLISDIEGVSGMRLLRGMVSGISDAEQLLSRIDVGRLKASREDLLKSLKGVYKEQYIVILKNSLKAFDFFKQQMKEYELLIEDVLQKMLPADDQNNKPRIAAKTSYRRKNQYSINLKEYLRHITGVDLTKVDGLDEISVLEIISVTGIDMSKWKSAEHFASWLNLSPRPKITGGKLIGYTRRFTHNNATQALRMAAQTMWKNKGALGKLYRRLAAQKGSAKAVKALARKLAVIIYHMIKNKKEFDPTQIVNDTNKQKAKRIEWLEKEAARYGLTLQKVA

SEQ ID NO: 392708 - protein, 339 aa, unidentified
MGLYTAFDLHSNNAYLGIIDETGKRIFNKKLRNDMEMIKATLLLFKADIEGIVVESTYNWYWLVDMLMEEGYQVHLANPAKIQQYSGLKYSNDKHDAFWLADMLRLKILPEGYIYPKESRPIRDLLRKRSHLVKLRTSLIISLQNIITRNIGNNLKANDIKALTTDRVQPLLEYNDDLALAGKVSKNAIDALSQQIKAIEKNIEGRIHLTSPYDHLLSIPGVGAIIGATIMLETGPISRFPKVGNYVSYCRKVATGRFSNDKKKGSGNRKNGNRYLACVYSEASDYAKRYDEAARKFFNRKLKSTNAPIAHNALANKLARAAYYIMRDGVDFMSDKAFS

SEQ ID NO: 392709 - protein, 423 aa, unidentified
MNASYAAFVGLDWADAQHAACVQVGDQIERCDLPQEAGAIEDWATALRARFPGQRLAVCLEASRGPLVYALMKYDFLVLFPLNPKQLASYRAAFRPSGGKNDPTDAELLARFLREHHAQLRAWQPDDVATRTLRFLGEARRNWVDQRTAAGNRLLQVLKEAYPLALQFLGKHVYGTRFLDLLVKFPSQRELQRAAPKLLLQWLSKLRRVTDDPAPQPANDPRVLAIRQAPRLVTDEAVLCANRLAVYHLAKLLQQFNRTIEEYEEQLDELVQQHPDAELFRSFPGAGEALTPRLIAAFGSQRERYASAADLQQLSGIAPIQLQSGKSCVVKKRRACPAYLRQTFHEQARCSLVSCGWAQAYWRMLKARGVSFHAAVRSLAFKWLRIMFRCWQTRQPYDDAKYVAQLHRKQSPIVKFLPTNPSP

SEQ ID NO: 392710 - protein, 430 aa, unidentified
MTKLSSTPADAVLVAIDMSKHRQEVLIERPECGRRRRMTVMATKTDYDRLASDLADIGRPIVVGFEATGNYHRTLAHRLLTAGFELRLISSVALARTREALHNGWDKNDSKDAQVILHMLRIGATQRYVDPLAAGINDLQEMSKTHEAISKAKTQTWHRILTHYLPLYFPEIERFAGNSRSDWFLALLERFPTPASMTALGQEAFTSEAWSLVGRKVSKARLINDIYETACASVALPVDEDSVAIVMFRMVIAQARSLIRQRDEIERTAHAMLSENRDYQLLRMIPGIGPINALTILAEAGDLRRFAHHRQFLKFCGLDLATCQSGTFRGRTKLSKYGNARLRRTFWMAAQVAARQRDNSFRDKLGRYMEGHASDPDRRRKAMTALTAKMARVAHAVIKTGTEYRPFLERADTRWKDPSLLCREGATATL

SEQ ID NO: 392711 - protein, 447 aa, unidentified
MFAGIDWAADEHAVCVIDDTGRVVDRFTIGHTAEGFEHLIRRLARHGPPADLPIAIERPDGRLVDRLLAAGHPVVAVKTTAIKAWREAEVGSGAKSDPGDAKVIADYLRLRRADLRELHPFSEQTRALRAVVRTRGDLVDARIAASNQLAALLAAFWPGAGGLFADIWSEIALAFLERYPTPTAAAHLGEGRMAAFLRKHGYSGRRSAAELLERLRSAPAGLPDGLESEARRDALLAMVRVLRVLNGSIRDLDRAVVAHLDEHPDAVVFRSLPRAGQVNAARMLAEWGDCREAYDGPEAVVALSGMAPVTRRSGKHLAVGFRWACNTRFRNALATFADNKAAPGKRVRLGGMVKMGSLERGDNLQVRFEVTDGNKDIRVNYRGIVPDLFREGQGVIAEGHVEPGGTFLAETVLAKHDENYMPREVVETLKKQGHWQETAAPVKQSRK

SEQ ID NO: 392712 - protein, 420 aa, unidentified
MSKHRYRTTECKQVDWAKLGETVMGQRVVLSIDVAKEDFVSAFMVEDKVAIRIKWRHPNETLDWLSGVKQVAAISTLEAVMEPSGTYGDAVRHQLTARGIEVYLVSPKRVHDGAEVYDGVPSLHDAKAVEIIGYLHREGFSRPWPDMSADRRAVEAQLSQLRICKQRFQANLNRLEAQLSRYWPESLGILGQKSLTLQHVLASYGGPGSINAHEEEAQALMRRVGGPGLSQDKIKQLLRSTGETLGVACLREENELLQWLAKDLLATHEQVRCFERKIEQQVSDNDLLLGMAEVVGKVTSAILLTTLGDPRSYPDAASYCKGMGLNLKERSSGKHKGQLKITKRGPSVTRFYLYFAALRLIGKDPLVKRWFEAKAKRPGAIKTKTVIELMRKLAKGLWHSARGESFEVDKLFNLKLVENA

SEQ ID NO: 392713 - protein, 403 aa, unidentified
MIYVGIDWAKAHHDVCVEDGEGQMLAKGRVPDGIEGVERIHEIVGVHAEDPSEVVIGIELDRGLLVEALVVAGYEVHAVNPLAVSRYRDRLAPAGAKSDPGDARVLAEVMRTDRHLHREVAGDSDLAEAVKVLARAHQNFIWTRQRIGNQLRSVLQEFYPGALHTFADLASADAIAVLQIAPTPTAGRALTKSIVRKALAAGGRKLRLDSRATEIVEGLRVPQLGAPALVEEAFGHQVASLVAVLRTLRTEIEELRSELAASFEGHPDAEIITSLPGLSSVLGARVLAEFGDDRTRYADARARRSYAGTAPITKASGTRKVVLARVARNKRLADACYGWAFSSLQASQGARAFYDRQRASGKTHHQALRALANRWVGILHGCLEHRKTYREDVGWGAGLETAA

SEQ ID NO: 392714 - protein, 326 aa, unidentified
MTASQASDNSFIGIDVGGASFDVSWHRGDCAHYANRPDGVAALLAKLKAGPAISRIVVEPTGGYEKPLVKTLRRAGLPVEIVHTSRFSAYRVMVGARAKSDSSDARLLAAYAAAPDDVRGRKPHHVEVPEDAIREELAELASRRDQLKHMIHGETCRLTTVRSAKLRQAITAHLDVLKAEDAQTHQTMLALVRARVDLKKAQGLLKTIKGLGDKSALACIALVPELGHVGNRAASALVGVAPFTRQSGTITAPARIHGGRAAVRNILYMAAVSASRHNPVLRPFYQRLLAQGKKVKVALIAVLRRLVVFANAVLRSGQPWKGATAS

SEQ ID NO: 392715 - protein, 342 aa, unidentified
MDSTTIAVDVAKAVFEVAVSAHPGQVRERHRFSRERFRRYLREQPPATVLIEACGSAHYWGRQAHARPPRRPVAPHAVRPYVLRNKTDRSDAKGLLEAVRNDEVRPVPVKSETQQAVAALHRLRSTGLATRTARINTVRGLLREFGVVIPIGARHVVPSVGAVLEDADSGVPSVLRPALAEATQEIREIEARLRAIEHQLDAVAEQMPLVSGLRSIPGIGLLTATALVATVGDMTRFPSARHFASYLGLTPREHSTGQQGRLGAISKRGDRYVRMLLIHGARAVLCHAKTKTAPAPDRLRAWALQLERTRGHNKAAVALANKLARIAWAVSKAGRPYTPAPG

SEQ ID NO: 392716 - protein, 473 aa, unidentified
MKIPTNIMAVGIDPAKQVHQAVAIVYPEVVLLNCRFENNYEAISSIDEKVMKIAKRNDLKVIYGLEDSGAYGRTIKEVLTSRYREVREVNPLKTNRQKDFYGGDKSDEIDAKCIAQILLRSYENLPKIEEDNQVYISIREAERFRETLVKAKTQNVNRLHFYLTKTWGGSYKKFFSNLQNKIALDFFSTYPIPQTLKEIKAKELAKFLYEASSHRLGKGNPWKLAHEKVKFILSSIKTVKDLPLNWEREIKAEIIRQLIANISQAKDSIKAIERKLEKDLLPQTGQRLTSLKSISTVTASVLLGETLNPDRFNTRDKFARYNGTAPQEMSSGGKIKHRARKGCNHRLKKTLRQISITAILREPLTKEYYQRCLSRGLSKSQALKRVDRKISDIVYKMMRTKQPYDRELAVRNIIERRQRTNNLGRARWQSRNLRIKKSSDEMKSLVLPPLDIISELREIEKKNHRSVNEKILT

SEQ ID NO: 392717 - protein, 347 aa, unidentified
MTEAYDGRQVVGMDLHRRRSVLVRMTEDGRKLETVRIENSPQALRAVLGRAGRNPRVVVEATYGWYWAVDVLEEAGAEVHLAHPLGVKAFTYRRVKDDERDAADLADLLRMGRLPEAWIAPPEIRELRELTRYRHKLVGLRTSCRDQVHAVLAKLGIPVTCTDIFGTWGNTWLDGLDLPQPYAGKVASLRQLNGELSGEIALLEQVIGDLLAGHEGYRAIRALPGIGPVLGAVIVAEIGDIRRFPGPGQLCSWAGLTPRHRESDTKVSRGHVTKQGSRMLRWAVTEAVQRQPAGTRPRQVKDGIIARRGTQAKNTAKVAAARELLTLVFYGMRDGHIRRASRPGQAA

SEQ ID NO: 392718 - protein, 348 aa, unidentified
MIIIGVDFHPEFQQIASVDTDTGEIQEKRLTHREDAETFYRALAGQKVRVGMEASGHARWFERLLAELNFELWIGDAAVIRTKRVRRQKTDRQDARLILQLMLEDRFPQIWVPSWENRDLRQLLWHRHRMVQARTRIMNQLQAVALNEGLRCKKRLWREHGREQLESFRLAPWASQRRRDLLELMDRLNPTIAELSQAIEQEVEKCPEAQRLRTHPGVGALTALAFVLIIGQAERFQCGKQVASYLGLVPLEDSSGNRRRLGHITKQGSSILRFLLVEAAQVTVRSLPEWRSKYLHLMMRRGRKIAKVAMARKLAVRLYWMMRQGWDYQQWVKFGSHAGQPGHRHGAQ

SEQ ID NO: 392719 - protein, 356 aa, unidentified
MSIVAHSYPFVVGVDTHAKKHVYAIVNASTSELIQTRDFPTTSAGINRAIAWVARLTGADLTVLWVIEGAASYGALLSGAVGAAGYPVVEAARMNAKAHHGVGKSDRMDAHRIAAAVLPLEEQRLRRPRLNEGVRAALRILVCARESMTTDRTRATNALTALLRVNDLGLDARKPLTAKQIEEVSRWRDREEPLAESVARSEAIRLAKHISKLGTDIKSNNDHISELVEISEAAPLLRETGFGPVTAAVCLIAWSHYGRVRSEAAFASLAGVNPIPASSGNTVRHRLNRGGDRTLNKALHMVALSRMTFDAQTIEYAGKRQADGKTKKEIRRCVKRYLARRIYRTLNAANPTRCNG

SEQ ID NO: 392720 - protein, 341 aa, unidentified
MEEYVGLDVSMKETSVSIRRAGERIWRGKCASDPRIIAELIRKRAPAVRRVVFETGPLSIWFYHSLRTEGLPAICIDARHAKAALDMATNKTDANDADGLAQLAEVGFFREVRVKGFDSMLTRTLVGARTRLVRITTELSNQIRGVMKTFGLLVPAGKGSIFEKNVRSLLTDQDGLASIVLPMLEAWRGIRIRAAELGRQLVRDARQNQACRILMSIPGIGAITATAFTTAIERPDNFKKSRSVGAWIGLTTRRYQSGEVDYDGHISRRGDAHLRGLLYEAAAVILTRSSTDSTLRTWGLKLRERIGFKRAAVAVARKLAVIMHTMLKTGELFNPNAGAIA

SEQ ID NO: 392721 - protein, 453 aa, unidentified
MCLEDRPLSEPNAAGIDIGAREMFVAVPPGRDEKPVRVFATFTEDLQRLTDWLVQCGVTTAVMESTGVYWIPLYEILEQRGIRPCLVNARHMKNVPGRRTDWHECQWLQFLHSVGLLRAAFRPEQDICAVRTVLRHRNELVLAASQHVQHMHKALTQMNLQIHHVISDITGVTGLAIVDAILAGQRNSTELAQLRDPHIKAHPETIRKSLEGNWRSEHLFTLGQSRDLYRIYQQQIVKCDLEIEKMLQQFEPRTDPAERPLPPDRKRNRDGRKKRKKNGHPHPEFDLRTETYKLFGVDVTQIPGLDENALPLFSEVGRDMSRWPTAAHFISWLALCPDNDISGGKVLWRGARRIKNNAGHLFRLAAFSLHHSPTPLGNFLRRMKTKLGPKAATMATAHKIALIFYTMVKNQVEYDETIWATRDNQREKRLEAKIKRQAKQLGYELVPIVRNAA

SEQ ID NO: 392722 - protein, 343 aa, unidentified
MDHFAGLDVSVKDTSVCIVDDAGRIIREVKVASEPDALLAVLTNRIYHFKRIGLEAGPLSQWLFSALAEAELPVICVETRHMRAVLKAQINKTDRNDARGIAQMMRVGLYRPVHVKTLRSQKLRMLLTHRKLLQSKAIAVDNDLRGTLRNFGLKVGMVGTAKFEARIRELVENLPDLAVLVEPLLVVRRVLREQIGILHRRLLAIVRDDEVCRRLMTVPGVGPVVALTYRTTVDVPARFRKSKSVGAVFGLTCSRDQSGERDRPGAISRCGDEMMRAMLYEAAQSMLGRSSRWSWLKAWATQIAKRRGMKRAIVALARRLAVIIMDRPCLAREFERNGHFGPR

SEQ ID NO: 392723 - protein, 438 aa, unidentified
MWTAVMGWTPPARGSNLPLARDADHEPCNEKSPVPCHVQAKLTIAVDFAKNVFEVAVSAAAEHIRERRRMSRQQFERFWSTREPCRVVMEGCSGSHHWARLLIGLGFEVKLIPPRYVTPYRRRNKTDRADCEAILEADRCAGIHGITVKSEAQQAILSLHRVRSQWMATRTARINAMRGMLRELGVTCALGAERFLTDLHQVVEHNRERLPERIRRMVTLLWEEVRELEGRIESVEEELAGLAKEEPVIRTLLQVPGIGVLTATALYASVGSVHVFRSGRHLASWLGLTPRESSSGERRRLGRITKQGDPYLRTLLIHGARSALLAAARAERAGRSLTHLQAWALERAGEGHTNRAAVALANKLARIAWAVWRHERRFDGDHALHSRPLPVRLPRVPRAAAGSEIEALSSQREERDLRLRAPGQEGGVHIRSLGHART

SEQ ID NO: 392724 - protein, 348 aa, unidentified
MQATTVGIDLAKNVFRVDGCDAHGKPVLRKQLGRRQLLSFIANLPRCLVAMEACASAHYWAREIEKLGHQVRLIGPRFVRPYVKANKNDASDAEAICEAASRPSMRFVSVKSVAQQDVQSVHRVRQQLVKNRTALVNQARGLLAEYGIVVARGVSRLRRALPAILEDRENGLSGVMRELLGEIGERLRFIDDRLRKYDVTIQRLFRQDERCRRLAEVEGVGPLVATALVAAVGNAAEFKSGRELAAYLGLVPRHRASGGHTVLLGISKRGDRYLRTLLVHGARSAMRTIERRPGARGVWAARLKLRRGANVAAVALANKNARVLWALLSRGQNYQPTPFSARVPQTGA

SEQ ID NO: 392725 - protein, 348 aa, unidentified
MLAEVVDAAIGADTHRDTHALEMTAPTGVSIATISISNDERGFADALAWIVEHAPGPRVVVALEGTRSYGIGLCRALQAAGLTVVEIERPRRSERRRGKSDPIDAHLAAVHALRLHADRLPTPRADGDREALRILLGARRELTTTKTRTINRLRALLLTGNDDDRALARGALSLNRLAAIARRRGRPHETREQAIRRAEIRRLALSIRDDDRQLADNKRQLADLLTHMAPQLLAKHGVGPVSAAQAIVSWSHPGRCRNDAAYAALAGASPIPASSGRVVRHRLNRGGDRQLNRALYDILLTRWRACPRTREYIARRRAEGKSDTEIRRCLKRYIARELYRCLNTAMAT

SEQ ID NO: 392726 - protein, 406 aa, unidentified
MNLNAVGIDVSKRKSTVSVLRPGGDVLMKPFDISHRTADFQTLADKLKALDGETRVVMECTGHYYEPVARELSQAGLFVSAVNPQIINKFQGQGNPLRKVKTDKADSVKIARYTLDNWANLKQYTLMDELRSQLKNMNRQFDFYMKHKTAMKNNLIALIDQTYPGANTYFNSLAREDGSQKWVDFLDTYWHVDCVRKMSLQAFTEHYQKWCSRKKYSFRKSKAEEIYGIAKELVPVLPKDNFTKCIIKQAVAQVNAASQTVEQLRSLMNETASKLPEYPVVMAMKGVGPSLGPQLMAEIGDVTRFTHKGAVTAFAGVDPGVNASGDYSQKSVHASKHGSPMLRKTLFQIMDVLIKTKPDDVVYLFMDKKRAEGKPYYVYMTAGANKFLRVYYGRVKEYLSALQESY

SEQ ID NO: 392727 - protein, 400 aa, unidentified
MRAVFGMDVSKTSSEVAILVNGEKVHGYTILNDAIGFNRLLGDLKTVHNPEIIFEATGVYSRRLQAFLEECGYAYTRLNPLEAKKQLDSLRVRKTDKIDAEKLAKSQLVHNRKPTYVQEEVYQHLRDLSRFYQNMTEDLVRAKNRLHKVLQVTFPELENLLSTPTGEQYWNLVMTFPCKEFVLSLSQSDLYEIIRQSTSKRISEKRIAYLTDKLIKLAKQSFCAVKKTSPMLEEVRYYAQELLRLSERRQVVLNDMVALAQPLPEYDILRSIPGIAETTATSIIGELGDIRRFQSTNQINAFIGIDLRHYESGNFLAKEHITKRGNPYARKILFKCIHNIASASHTNPCHIADFYEKQKRQSTIASTKPHTIASIHRLIRTMYYLITHNKLYDYSLTQNR

SEQ ID NO: 392728 - protein, 394 aa, unidentified
MIYAGVDIAKTDHVIGAVDERGAEMCPPMPFKNTEAGLERAVAWLEGLAGSPSDVVVGMEATGHYWMACYSFLVARGYSVAVINPMQVKAVRKLKGLDKVKNDRVDAWLIAEALRIGQYDETRLATDEMASLRSLSRYLQSLRGMVAELKTQCICLMDAHFPEYAGIFSDMFGAGSRAVLSKSPLPFELARRRADSLARDVAEASRRGGKSSGYAAKIKAAAKSSIGVRLGQEAASFQVKSLIRQIEFADSECAKVEARVRALLDEVEPLVLTIPGVSYATGAQIVSEIGDVSRFRNASALVSYAGLNSSVSQSGQFDSGGGPITKHGSPYLRRALWLAANRARQYDPGLRAFYDKKRAEGKPHRVAVTAVARKLCHIVFAVMRDQVPYDPGRE

SEQ ID NO: 392729 - protein, 403 aa, unidentified
MNAVGIDVSKGKSMVAIMRPFGEIVSTPFEIKHTTSDINSLVELINSVEGESRIVMEHTGRYYEVLAHQLSEANLFVSTINPKLIKDFDNDSLRKVKSDKADAVKIARYALDNWQDLRQYTSMDIIRNQLKTMNHQFSFYMKQKTSYKNNLISLLDQTYPGINDFFDSPARSDGSQKWVDFVSSFWHVDCVRSLGLATFTERYQKWCKRHGYNFQPEKPAQIYSFSKELISVFTKDSVTKFLVKQAVEQLNTVSFTVEQLRLEMNRLAAQLPEYQVVMAMKGVGPSLGPQLMAEIGDLSRFSHREALTAFAGVDPGVNQSGTYEARSVRTSKRGSPQLRKTLFQIMDVLIKSAPSDDAVYRFLDKKRSEGKPYYVYMTAGANKFLRIYYGRVKEYLAALPKPE

SEQ ID NO: 392730 - protein, 378 aa, unidentified
MRKNITWVGLDAHKKAINVAVLVGYETRPQEWVVEHKPAAIRRLVKKLVRDADGDEVRCCYEAGPCGYALQRQIEAEGPVICEVIAPALIPRKPGERIKTDRRDARKLAELLRAGLLTAVQAPTPEQEAVRDLCRAREDAKQDQMRCRHRLGKLLLRRGIVYGGGKKAWTQAHRKWLRTVKFEHASDQAAFDDYLLAIEQVEERIATLEQRMQATAESEPFATPVGWLRCFRGIDTVSALSLVAELHGIERFASPRELMAYLGLVPSEHSSSERPRRGAITKAGNSHARRLLIEASWHYRHPPRLGAALKARRQGQPAAVMAIADKAQQRLYRRQRHLTGRGKRPAQAVVAAARELSGFIWAALLHQHQQPLASAAGQ

SEQ ID NO: 392731 - protein, 354 aa, unidentified
MNYSTDWTIGIDLGDKKSFVFALNRETSETRESEINTTESDLREFLSPWPRCRVVFEVGGQSRWVKRIVDEMGFDAVAVNPRQIALITKNTRKNDRNDAMRLAELASAELHSSRLRLLNPVEHRSDELQADLAILKARDSLVEMRTGLVNMVRGMVKTMGQRLRSSSTPSFHRLKEEIPCELSEALSPIFDQLEFLSKQIRGYNRTIERVQEERYPEVAEIMKIRGVGALTALAFRLTLADATRFKSSRDAAAYLGLCPKQHESGSMSKTLGITKTGDRFTRRLLVQSAHYILGNFGEDSDLRRFGQRLIRRGGQAAKKRAAVAVARKLAVVMHRIWADQSEYKLFMNKNDAAA

SEQ ID NO: 392732 - protein, 348 aa, unidentified
MSITMIGLDTAKSVFQIHAVDAAGKPQLKRKLRREEVIPFFEQQERCTVVLEACGAGHHWARILTELGHEAKLLAPEAARPFVKKGKKNDAADAAALCPAASRPEATFVPVKSPEQQGVLALHSVRTLLVKQQTMLANAMRGLATEFGLVVAKGIHKLDELEAQVQAEASMPATAKQAFAELHGQSQATATRIAGLEVQIVAHARQDATARRLATIPGIGPITASLITATVGDSIGSFKSARHFAAWLGLVPRQHSTGGKTRLGRITKAGNSEIRRLLVLGATSMVFRAGQWNSAAGAWLRGVLERRPVRLATVALANKMARIAWAVMTRGETYQAKGRAPAAAAAVA

SEQ ID NO: 392733 - protein, 340 aa, unidentified
MGDITTIGLDLAKSVFQVHAIDEAGSVMMRKRLRRSQVLGFFAKVPPCLVGLEACATAHHWARELIALGHEARLMPPNYVKAYVKRNKHDVADAEAICEAVRRPSMRFVPVKTAEQQSALMMHRARDLLIRQRTMLVNALRGHLAEFGLIEAQGLHKVARLIAIVMDEKDGRIPDIARQVLKIIVSHIEHIQTQIADLERQVLAWHKNNPVSQRLATIPGIGPIIATAIAATVADPNIFRSGREFAAWLGLVPRQNSTGGKARLGGISKRGDGYLRRLLVNSAHTVLLCSKQAKTDPWLTSLLSRKPRLVAAVALANKTARVAWAIMSRQDTYRHAAVAA

SEQ ID NO: 392734 - protein, 348 aa, unidentified
MVAATLAHRWFVGIDLHKDTLTACVYCSCCGEIRFQKIACRCRKQIAEFFGNLPRPHVVAIETVGFYRWLWEMLEPLVEKLVLADASQARALAGRRMKTDREDARNIAELLACNRLPLAYAPSCEVQVLRDCSRQRNALSRQHAHVLHRVKSVMNANNRPGPARMASSGLIRYLEAYEAKLPEQHGRYLWQCVDQLVLIERQRAQLERELERLLAQPLFAEASAILHSFPGVGLVTCATVLAEIGDFRRFTYRKAISRYGGFDPRTFDSADKQRTGHISKRGPSNLRWVLVQAAWTAIRLDPHVKRIWLRIGRKAGKKAATVAVARRLLLWMWRAVRTGQPYRPPVAA

SEQ ID NO: 392735 - protein, 356 aa, unidentified
MTSNIKYIGMDVHKESISAAVRNSVGKVVMECVIETKANMILQFIDGLRGDLQVTFEEGTSAAWLYDLLKPHVTKLVVCDPRKNKSMREGNQNDKIDARRLAELLRLDHLTPVYHGEHGLRTLKELVRSYLTITKDLGRVMTRVKAIYRSWAIPCTGKQVYARRHRVEWLGKINEPGVRLRAELYYQQLDALRVLRQEARRDLLAESKKQKAWKRLCGIPSIGPIRAAVLLGILQPPHRFRSKRPLWNYGGLGIEMHSSADHRSVDGQLQRSRKNVLVRGLNRNCNHDLKNLFKGAAAVASSKPGPFREFYTALVAKGMRPEMARLTLARKIATIVLIVWKRGVCFDAQYLKPQTA

SEQ ID NO: 392736 - protein, 473 aa, unidentified
MSKGSGSSGMTRGDRRRNARRERLRGLLPRDGAVIGIDLAEDKQALAVIDHDVRVLARKTVRVKAFRLGEALDWAVGQARAKGFAAVTVACEPTGPRWMQVQRLCAERGLPLVCIQPLVSHIAREQQDYTTHKTDESDCVMIARLAVELHCYIPEELDEAWAHLRHLGRRRVQLITAATASAQRIRDFLSVAWPTVMETCAHPLESRTWLAALQLVTSRCGGRPEKLAAMGQEAFTALVRGAVADWGGKKVRGTISARVFAALADTEGVVAWSRRGLLRRVAEELGDLQRTRAQLRAVEADMVTVLDELGLSRLADIPALSAVGAAAILAETGDPRRYDGSSSLVKHAGLSPSDNASGAFLGDAHISRRGRPGLRLTVWRAVWPMLQFNPVMAAKYQAMTRAADAAAADAGPQQGTAAQAAARARRAKARVACAASLLRWIYCMVVHETGWDPGVASGAAGWHDAPQVQAEAA

SEQ ID NO: 392737 - protein, 475 aa, unidentified
MKQNHRRCCGIDVHKNSVTVCVLAPIGQGHLGVKKRKFPAYTRDLKQLRAWLKNCQVTEIAMESTGQYWRPLWNLLEGEFAKLILVNPQHIKGLNGYKTDPKDAQWIADLLESGKLRGSWVPSRPIRELRDLTRQRVNLLEDLNRAKNRIEQLCQSGNIKVSSVATDLFGVSGRKMLKAIVEGKRDAGWMADYAKGTLRGRRRELERALEGTFTDEQRWLLEKELRQVEWLETQVETLEQEIQRRVSTFEDAIRRLLTIPGIDHKTAWTVVAEIGVDLSAFLDAKHLASWAGLCPGNRESGGKRMSGRTRKANRYVKRAMCQAAWAASHTKDTYLSAFYRRMAVRKGSPKAVMALAHHMIVVIYQVLSREEEYVEFGGDYYDQRDKTKTAKRLVARLAKLGYQVDLKPLAQDAPQDLASPLAPRLAPDGEATSAAAQTTLPPKRKRGRPCKCAEREIFCKHVTSGAANSLIQEPS

SEQ ID NO: 392738 - protein, 435 aa, unidentified
MNEPSFAAWVAIDWADRKHYWHMAITDSALREKGSLDHTPQAIDHWATALQQRFPEGPVAVCLEQSRGPLVYQLAKYPHLVLYPVHPATIARYRAAFFPSGAKDDPGDTDLLLEILLHHRQHLRRLDPDTHETRLLALLTEQRRSLVDERTRQSNRLTACLKLYYPQPLDWMDNIDSPLGCALLQRWPTLTQLQSASAEVLRGFFVEHNCRSTRRIEERIQAISQATPAVHDPVLLEAGAINTGSLVAMLESLNCRVASLDQRIAELVPKHPEASLFAGLPGAGPVLLPRLIVAFGTNRERFASAAELAAFSGIAPVSKQSGHSKHVVFRRACPLFLRQTFHEFANCSRAKSAWARVFYRLQRDAGKHHHAAVRALAFKWIRILFRCWKDRTPYDEARYMARLQQLHSPLAESATSAECALTPRRPDGVNSDSSE

SEQ ID NO: 392739 - protein, 370 aa, unidentified
MKEFSKYVGLDVHKETIAVAVADASGGEARYVGEITHTPEAITKLVRQLRKGGGPIAWCYEAGPCGYGVYRQLSAAGEGCQVVAPSLIPKKAGDRVKNDRRDALSLARLHRAGELTAVWVPDPAQEGLRDLTRCREDMKHLQRQARQRLSAFLLRHGRRFTGKSKWTQAHVRWFETVSFEQPTQQIVFQEYVDTVLACNRRVQGLDEQLEGVARESVFWPVIEALMALRGVNVLTATTIVAEIGDLHRFANAPQLMAYLGLVPSEHSSGSKQTRGGITKTGNGHVRRVLVEAAWTYRHPARKSALLQRRAECTSEAVQDIAWKAQKRLCQRYRHLTNRGKQSVQVCTALARELAGFVWAIAQATPRPVTA

SEQ ID NO: 392740 - protein, 349 aa, unidentified
MLHVGLDLSRKRVDVCVISSEGELVEHFRAPCDRDGLYGLTRRVAVYEEPIRGVVESMNGARYVHDELVRYGWEVLVADAVRVKGLAPLACKTDKVDARVLAELSFRDLVPAIWLPTPELRAERERSRWRLHLVKHRAILKNRVHSSLIAYGHQVPMADLFGVAGRRLLASLDFPEPWLGHVKASLELIDDLDRRIGEIENWLRRSGADHRYLPLLLTCPGIGWITGYTIAAEIGDINRFASPVKLTGYTGLCPRVSQSGEIDCRGPISKHGPRYLRWGLMEAAIAASSHPLYRERYQRTRRRLGRQRGPKIAQIELARKLSEAIWYVLTRNQPFKPFVPAGAVLPLTA

SEQ ID NO: 392741 - protein, 367 aa, unidentified
MSKAEMSRLCVGVDLHKTQFTVCALNEDGEYLLEKQYPTKEEGYTDFAEEMHNREEEGYAIELAVETTGNARYFKNRMESEFFVVKVVNTNRFKVITMSTKKTDANDAATLAYYLMKEMLPEAHLCSQTSEEIRRLLKTRSVLVQSMVKIKNQIHGMMLGYGIETKASQLQSKRKRQELINDLADHNFSAYTAPSLKVMLKILDDLSSEIKGVEKLLEEMVASNEDVALLMTVPGIGINTATTIAAYTEELERFEGNYKRFAAYVGIVPSVHNSNETRHHGRITKHGPQELRTAFVQAAMGMIRLTNVTSEWRIIKDYQRRKGDKGSGRAIIALARKITRIVFVMLSRRESFNPKLMRCEEIIQQTA

SEQ ID NO: 392742 - protein, 427 aa, unidentified
MNYNRNKKLKQITPETLVVGIDIAKEKHVARAVDDRGYEFGKRLVFENNITGFERLLAWVSEKQQAYEKTHVILGCEPTGHYWFNLAYFAKAKEIPFVVVNPMHVKKAKELDDNSPSKTDTKDAHVIAQLITDGRYAVPNLQEGVYAELREGLKIRDQLSKDLQIITGRIDNWLDRYFPEFRRVFKDWDGKAAWYTLSHFPLPAEITAISAEDLVREWKQVAQRGIGIKRAHTLRQAAERSIGLTVGTRMAKRALQSLLKQYEHLQESIASIDEEMEQLVKVIPGTEEMIAMKGVNVLTVATFFGEVGDIAHYEHPRQIQRLAGLSLTVHQSGKCKGQTHITKRGRRRLRKALYLVVRPLVVHNAAFKALHEYYTTRQEHPLKKQESLIALSCKLIRVFFAMAKKRYRFDGEKMLRDMPQFSIQEAA

SEQ ID NO: 392743 - protein, 354 aa, unidentified
MKRTTKYVGLDVHQATTVIAVLDEQGRVIARQVVATAADALVDFVRGLRGTVRVVFEEGTQAQWLHDVLVPVVTEVVVCNRRGDGQLGHKGDHADAEQLADRLRWGGLRPVYHGSPSRESLRELARTYQQVLEDSTRTMQRLKAVFRARGIRTPGQRVYHPTERETWVAQLRQPGARLRAETLYAELETLQAWRRRVRIALLTEAKRDPAWRVLRTMPFLGPIRVALLLATLQTPWRFRTKRQLWAYAGLAVVTRASAEYELDDGRPRRRRRPPLTRGLNRNHHPLVKNVLKGAATAAATRPGPLHEFYAHMVQGGMRADLARVTLTRKLAAILLHLWKTGEPYDGRYLSRTPS

SEQ ID NO: 392744 - protein, 408 aa, unidentified
MADKIAGIDVHKKVLMVVVIDARTPESKPERWRFATMPGELRRLSTWLQERGVEEAVMESTAQYWRSVWLELEPHMCLHLAQAFSNRAPRGRKHDFKDAERLVRRLIAKELILSFVPDGEQRIWRNLTRMKLQLTRDRVRIQSQIECLLEEMRIKLSIVVSDLLGSSGLRILHALANGETDAKSLALLGDDRLKCTEEQLVEALTGRSHPMHGQMLALQLERLRLLDEQIAKLNSLIAQAMKPHQDAVIRLAEVPGLGIDSAQQVIAEVGVTASTFSSAAEFTSWVGTCPGKEESAEENSSSRSAKGNKYMRRVLNQAAHAAARSKGTHFQAVFRRLLPRLGYQSAVWAIAHRLCRLVWKILHQGIRYIEQGIESEPKLLIYRAKYLAKQLRKFGYNVQITPANGAPA

SEQ ID NO: 392745 - protein, 340 aa, unidentified
MVYCGIDVHKHSWKVAILKNGQIVKVFSQQPSIGQLVAHLRQNYTDCEFLLGYEAGFCGFWIAEELKNLGMECKVLHAADIPTTDKERRQKTDARDCRKIAICLSNPSVSSIHVPEKDLQYDRSVVRSRIKISRDGTRSRNRVKAHLYYYGLPLGDEIPKYWSKGYLDKLRQWSIEKQDLALGLLLDELMALRQLKLKALQEIRKLARQERYETKIKLLMSIPGIGLCHAMCFATEIGDIKRFKNLDQLCSMVGLIPNTNASGDNAGIGRMTKRGKTEVKNLLIEAAWIAIRCDPDLKVSFERLSQKMQKNKAIVRIARKLLNRIRAVLLHNKSYKVAIC

SEQ ID NO: 392746 - protein, 342 aa, unidentified
MKDMMIGVDLAKNVFQVHGALRTGEVQFRKKLTRTQFPVFMAQQEPCLVIFEACGGANYWAHEMRTIGHEVKLIAPQYVRPFVKRQKNDAADAEAIIIAARQPEMRFVAPKTVEQQSRAAVFRGRERLVHQRTADVNALRALLHEHGHVFPQGTRSLNRMKALVEDETTDLHALIRQECADLLVQISEKTARITERTVKLKTLAADSDRSRRLQTMPGVGPLTAVAVEAFGPDMAQFKTGRDFAAWLGLVPKQHSSGGKERLGRMTKAGQADIRRLLIIGAMSRLNWLGQRSIIEGSWLSRMLARKPKMLVAIALANKMARQMWAMMIKNEDYRNPALATAA

SEQ ID NO: 392747 - protein, 350 aa, unidentified
MKQDIKTEKQMDVETIGIDLGDKMSRYCIVNREGEVVEEGSFRNQVSSIEAHFSGERRRIGLEAGAQSAWISRELKRLGHEVIVANVRQLKWITASDRKNDPVDARKLALLARADVRLLAPVEHRTSEQQGELAVIRARDAILRARTLLINSARGIAKGFGHRLPKSITATFGKRALVDLPAMLRTTLGGLLEQIDALSQHIAGYDQQVGELAARHPEVERLSSIPGVGKLTAVTFVLTLGRPERFTHSRDVAGFLGLRPKQRQSGARDPQLGISKSGDPYLRKLLVQCAHYILGHWGKDSALRRWGLAKSEGGHKATMRAIVGVARKLSVLLHCLWVRGEFYKPFPRMV

SEQ ID NO: 392748 - protein, 468 aa, unidentified
MADLGGRARKGWEKMQDQGQVRQVEGLPVVRPNVAGIDLGSERHWVCARTKDGGGREIADFGATTPELLRMGRWLKDRNVESVAMESTGIYWIAPHEVLEAEGFEILLVDTRQLARVPGRDKKTDRTDCEWIQRLHSCGLLKGSFRPREDVCMLRTLVRDKGNLVAESGDWVRRMQKSLDQMNVRVHRAVSDVDGVTGMAILRAIAKGERDPRQLAKLRDRRCRRTEEEIAEQLSGHWREDHLFSLRQSLQMYDATQQRIADYDREIQRKLAEMARDENRGRPAPPVKNPQKAKAIKRRGEEQMREVLYRMSGVDLTSIDAIGVETVQIVLSEYGPDLSRFPTEKEFVSHATLAPRRPMSGGKPLRKKRRHTASTRVAAALRMAALSLRNSATALGAYYRKIARRIGGDIAVFATARKLATLIYRLLRWGQPYVDEGADRFEMRYRENQIKSLQVKAKQLGYELAQKA

SEQ ID NO: 392749 - protein, 402 aa, unidentified
MNAVGIDVSKGKSMVAIMRPFGEIVSAPFEIKHTASGINSLVELINSVEGESRIVMEHTGRYYEVLAHQLSEANLFVSAINPKLIKDFDNDSLRKVKSDKADAVKIARYTLDKWQNLKQYNVMDELRNQLKTMNRQFGFYIKHKTAMKNNLIGILDQTYPGVNTYFDSPARSDGSQKWVDFASTYWHVDCVRKMSLNSFIDHYQNWCKRKKYNFSQSKAEEIYGKAKELVPVLPKDAITKLIIKQAVDQLNSASTTVESLRTLMNETASKLPEYPVVMAMKGVGTSLGPQLMAEIGNVSRFTHKSAITAFAGVDPGVNESGTYEQKSVPTSKRGSADLRKTLFQVMDVLIKTHPQDDPVYQFLDKKRAQGKPYYVYMTAGANKFLRIYYGRVKEYLASLPES

SEQ ID NO: 392750 - protein, 388 aa, unidentified
MDMIDAVSNAPIQTTISAIFFSMELSGSKWLITSLSPGGGERMSKHVMPAGDVGGLLEQLDAIRSKAEAKTGRVFPFVSIQEAGLDGFWIHRVLDREGIESHVVDPASIATSRRRRRAKTDRLDGETLLRTLLAFKRGDPRVCSMVVVPTPEEEDRRRNSRERKALVHERVSLVNRLKGLLFSQGVTGYESLKSDRWERFAELVTGDGRPIGEHLRAAVERILDRIELILAQLKTIERVRDSLVAQQPAADQSPACPAQLMTLRGVGPDFAEVLWSEGLYRHFDNRRQLASYAGLSPSPWQSGSINSEQGISKAGNPRLRSIMVQLSWFWLLHQPDSALSRWFHDRVKLDGGRRKKLAIVALARKLPIALWKFARHGVVIEGAVFKSA

SEQ ID NO: 392751 - protein, 353 aa, unidentified
MEEKYVGIDIHRDYGVACVQDPKGKIVDEFRFGNDIEGINKVKDKLGGKNAHIAIESTGNMWVVFWDKLEENESDLHLVHPLKTKAIASSKLKNDKLDAKMLAKLLRGDMLVCSYVPPRDVRDERETVRLRASLVRMRTQVINKIRSIFHKYCIRYKGPLYQKPGMEFLNTLDLRPVDMSAIKSYQETLKTLNAQIESVNSQIADNNNEDVRLLMSVPGIDYYSAVLIHSEIGDISRFPSHNKLASWVGLVPSMHQSGTSFYTGKITKEGSKRLRWILIQCAHASIRANPKINGFYGKIAKRRGDNKAVVAVARKLVKIIYAVLTTRNPSLYGDKMKTERKIKRMKKIAERID

SEQ ID NO: 392752 - protein, 370 aa, unidentified
MSSRSGHWETVSQMEPVSPFGRVEARTVDWVRTEPGVTRTSPATASRPRNSGRGGLFVTSEKIGLGIDVAKATVDFATSDGLAGQVPRTPRGLRRMLDSLDGRPIDRAVVEASGGYERAVLEVLFGAGVPVVLIQPARARHFAKALGRYAKTDAIDASVLSTMAVFATDHCPLWSPPSPEAATLRALVDRRRQLVTMRDSERRRRQQASAVTLSGIQAHIEFLQEQIQEVEVQLELALEQVEEFRGRAERLTAVRGVGLVTAASLLVYLPELGTLTRREVAALAGVAPIARESGSWSGQRFIFGGRGAARRVLYMATLAAIRHNAHIKAFFTRLRERGKKGKVAVVACMRKLLIHLNAELRRHRLQAALA

SEQ ID NO: 392753 - protein, 354 aa, unidentified
MGLYLGVDFHARTQTVCWCDTADGVIQQRTLDHRSEDVRAFYQQFPAPAVVGLEATGYARWFQRLVEETGHHLKVGDAMRIRQFAARRQKNDRRDAELLLDLLMRGDFPCVHVPSPASQEALRLLRYRHRLVGIRTMLRNGLRAVMLNNRVAHGSPMRTVRWRQQLEELQLTGVDAIQREHSLRLIDELKTRIAALETELERRGANDAQVALLQTHPGVGLLTALAVFHTLQPIDRFNRARCVAAYCGLDPLERSSGDTVRFGHISKQGNRFLRFLLVEAGRSAVRPNGDEDLRRFFYQLSFKKNGAVAAVAVARKLVLRLFCMLRNQIDYDEFRLRGRDARRARGKASPDSSG

SEQ ID NO: 392754 - protein, 356 aa, unidentified
MSSNVKYIGLDVHKEAISIAVLNGAGKLVMESIIETKAATLVQFLQGLRGELHVTLEEGTWAAWLYDVLRPRVHEIVVCNPRRNALLKEGSKSDKVDARKLAELLRSGMLRSVYHGENGLRTLRELARSYQTISKDLKRVMNRLKALYRSWGISCAGTQVYAPHYREEWLNKIRQAGVRRRAELFYQHLDGLQVLRRQVRGEFLAESRKHKAVKVLRQTPCIGPIRAALLLALMQTPHRFRSKRQLWTYSGLGVETHDSAQHRYVNGQLQRSKKPQQIRGLNQNHNHQMKEIFKSTAMSATRCAGPFHDFYAGLLAKGMKPEMARLTLARKIAAITLTLWKKGGRFDAEHLKAQAA

SEQ ID NO: 392755 - protein, 385 aa, unidentified
MQAKLHKSQEYYIFEKLNLNYKTQRLMQTQRKELNFEGQNIFVGIDVHLKSWNVSIFTENLHHKTFNQPPKAVTLSNYLKLNFPNAIYHSVYEAGFSGLHAHYELTNLGIHNIVTNPADVPTSDKERRRKTDKVDSNKLARSLRNKDLKGIYTPSQDILEDRSFIRVRSSIVKDQSRLKNRLKSMLYFYGIEFPVEFQKSNTYWSKRFMVWLKAVRLKSQSGNVALATSIKEAEQLRALLLEINKELKVLAITEKYAKNMELIRSVPGIGLVTGMLFLSEIETIKRFENNDKFAGMIGIVPDCYSSGDNEQIGEITPRRHIHLRRGLIESSWIAVRVDPALSKAFSDYSKRMEPNKAIVRIARKLSNRIYFVLKNEKKYETRIIK

SEQ ID NO: 392756 - protein, 343 aa, unidentified
MTTHYIGLDTHCAFTEMAVVTNSGRVTRRERLKTAIPELVEAITSVRQPRRLTFEEGPLAGWLYRNLKLHVDELIVCDPRRNHLVAKDSDKDDAIDAAKLAQLLRGGYLKPVHQADSLQRAIFKEHVALYHDRVARRVGEANRAMARLRRHGIFVKEVEFSTEEKREDLLARLPGRLLRKDMSLLWRSYDAIASQANDLRADIRCRGRRIDVVKRFEAVPGMGPIRAATFYVYIDTPWRFRTKSALYRYVGIGLERRHSGTGPTQWRVARQANKHLKNVIIGAAKSAIAQRENHFADQYQKGIERGMTARNARRTVARQQASVLWGMWKSDTEYRPELLTGEC

SEQ ID NO: 392757 - protein, 413 aa, unidentified
MILLGLDWAEDHHDICVMSEAGETLSELRVSDDVAGVEAIHAAVAEYRSDPNEAVAVGTESAHGLVAQALVAAGYDVYEINPLAASRYRDRHSLAGAKSDRGDARMLADVVRTDRHNHRLFQGDSDLADSIQVLARTHQSLIHRRQTEINVLRSTLRQYYPQLLVAFPKLASPKDRDCPDAMAVIERAPTPEQGRTLSTLQIAAALRKGGRKLNLEKRAKQVHEVLHQPQLQAPAMTSGAYGSSVRALARVIVTMSQQIDELGAEMNVHFEKHPDAKIILSLPGLGPVLGARVMGEFGDAPNRYADARARKNYATTAPVTRASGKQRVVMARHAGNRILGDACLRWAFCAIQASPGARRYYDSLRGREKTHSAALRTVANRLVGILHGCLEHRTLYSETRAWPEPNVASGVAA

SEQ ID NO: 392758 - protein, 423 aa, unidentified
MDVIHQRVAGLDVHKKMGVACVRITAGNRVSREGRSFATTTAGLLALLAWLTESGCTHVAMEATGVYWKPVWNILGDGSFELIVANAAHIKNVPGRKSDLNDAMWIADLLACGLVKASFVPPADLQELRSLMRTRKQLVREQTSHTQRIQKTLEEANIKLDAVICDIIGRSGRRMIEAMIQGVRDPHELAALADRRLKATPKQLYEALHGRLRDHHRFLLQLHLGQWDALQEAIVAIDREVELHITRIDEPEPPAGQAPLCQVIANLSLSPGISILAARSIVAEIGRDMSRFPSAGHLLSWAGWCPSQNESAGKRKTTRLRKGAPWLKTILVQCAWAAVRKKGSYYQAQFLRLKRRRGPQKAICAVAASLLTAIYHMLKNRIPHRDLGAQHFERHSPEAKAKRLAAQLAKLGYQVQLQPAAAA

SEQ ID NO: 392759 - protein, 367 aa, unidentified
MKKHSSKHDPLSSTDVELCTTLCVDLAKQVFQLAGEDATGRVIYEDRIKSRQSFHDFLIKLPVTVTVLMECGPGAQAWARLLQAKGNPVRILPAQRVAEHRSGAKNDRNDTHAILRAGRDTSIASIPIKCITALAIQALHRVRRGNIKRHTALGNQIRGLLLEHGVSMPQGDAAINTHVPRALEDASLPLPDLLRELLDELLTDWLSLGERIATLSRRLEATAQEDKVAQRLITIRGVGPIIATAIVAKQTEPSRFASGRMYSAFFGIVPDQHSSGNKIRLGRMSKRGDGYIRSLMIQGAHAVLSQLRPDSDQPDDHRLLRWLSRLGRKEAAIRLANRNLRIIWALLQSDQVYQRKPNSNSEAAMSL

SEQ ID NO: 392760 - protein, 402 aa, unidentified
MKASNQYLRFCGIDVAKQKHVACIIDQNGRYLVRPKSIRNDADGYQQILNCLKQSGKAKSILTGMEATGHYWYSLHDFLTRQGYTVAVLNPIQTAQQAKQAIRKCKTDKYDAFHIANLLRSGQYKAAVVPGELAMTCRLLSRLRYRIVRQSAMIKQLVNSRLHPVWPEYEGLFSNKFGTTSMKLLQMASTPKELIDIDFDELSEHIRKASRGRFGPVHTQKILHSAKNSVGMQRGHYGISTGIKFLLEQIVALEPVSKKLDGEIKKLAAKLPEYLFTLPGATELTIVSLYGEVDPIEKFERPSQLVAFAGLDPKVFQSGQYDAPRRHISKRGCPYLRRTLWQMAYRAVCNEGDLRDFWLRKHRQNKHHLVAVTAAANKLCHIVWRIMTDRRDYIPKGYNPKS

SEQ ID NO: 392761 - protein, 438 aa, unidentified
MATNLVNLNAAGIDISSKEHVVAVPEDRAKESVRTFQGFTRNLHQLSKWLKDCGIKTIAMESTGIYWYDLYTILLDYGFEVYLVNAYHVKNVPGRKSDVSDARWLQELHTFGLLRSSFQPDNITRTLRNYVRQRKSIIRQMTRETQRMQKALEMMNIKLNNVIRDITGKTGITIITKILEGERDAKILTQYRDSRIKATRETLIKSLEGNWREEQIFNLRIAYEHYFFLQRQLDKCDIESEKIINTMSINSVSDKKVTKIRKSKNNPKFNVSQYLYDALGVEITKIYGLKEITALTIFSETGVDLKEKFPTEKQFLSWLNVVPNNKITGGKVISSKVKKKKNKAGQAFREAASALWKAQNPIGDYLRRKKAKSGGRKAVVATARKIAAIYYKMVTEKVEFEPKHLDKNKEVYLINKLKQLEKDKKRTEDLLLDYQAIA

SEQ ID NO: 392762 - protein, 341 aa, unidentified
MTDVSIVGVDLAKQAFQLHAAARDGSVIFRRKLSRSKFVEVMAKLPRCVVALEACATAHHWGRVLGAQGHEVRLIPPVYVKPFVKRQKNDAADAEAIVEAAQRPTMRTVAVKSADQQARAMLFRTREMLIGQRTQLANALRGHLAEHGHLVPQGLGNVARFAAIIASAENDLPDLVRDLARLYLDQIAHLSERIKTLEVRMGAEAKKSAVAARLRRMPGIGPVTAMAIETFAPAMANFRRGRDFAAWLGLVPRQHSTGGKQRLGRTSKMGQRDIRRLLIVGAMSVVTWKGRRSSPGSWLARMLARKPRMLVAVALANKMARAIWAMITYERDYQEPAAAVC

SEQ ID NO: 392763 - protein, 368 aa, unidentified
MKNITTYVGVDAHKKDLFIAMLVGAQQTPVTWQLANEPNAIRRLVRKLEREAPGPVSVCYEAGPCGYALQRQVTTTRVSCQVIAPGLIPRKPGERIKTNRRDARKLAELLRAGLLTEVRPPTPEEEAVRDLCRARDDAREDLQRARHRLGKLLLRRGLHYSGRNWTRAHRQWVDSLQWTQAAERVVVDDYWLAIDHVQARLIELDARLTEIAETAPYREPVGWLRCFRGIDTLTAILILAELHDFRRFHSPRALMAYLGLVPGEDSTGEKHRRGRITRTGNALVRRVLVETAWHYQHRPHIGVALTRRRKGQPTRVIAIADKAQQRLCRRFRRLGEQHKPAPKIAVAIARELAGFLWAALQPAREPAA

SEQ ID NO: 392764 - protein, 338 aa, unidentified
MKVQHIIGADLSKRSIDLVYHLSKAYIKIDNSINGFNDLMQWLQKLNINTSETMIVMEHTGLYSYCFESFLHQHQIAFCKVNALEIKRSIGLVRGKTDKLDAARIAEYGYEKRDRLTVDQPVSNGLKRLQVLHSTYQRLVRHRAALINALKEYKHIGITEKDLVIQTQRQLIKNFDKHIQKLMSEIEMVINQQPALKQNFLLLQSIKGVGKILALTVIIKTHNFTRFINARKFACFCGTAPFDHSSGTSIRMKPRVSHLADKQMKTLLDLSAKSAIQYDKELKEYYLKRTQNGKSKMSTINVVRNKILYRMFCSCKTTNTFYRKPFTSCLIYLAVWES

SEQ ID NO: 392765 - protein, 359 aa, unidentified
MKIIGCDFHPSFQQIAMVDTETGEIVERRLMHAGGEAQRFYESLRGPVLVGIESSGNTLWLERLLVKLEHKLLIGDAAAIRATVPRKQKSDKRDAKHLLRLLLENRFPAIWVPSLQERDLRQLLKHRHTLVQIRTRAKNQLQHIALNQGLQKKYKLWTKEGLQQLQALELEPWTQRRRDDLLKIVSEMDAHIARLTAAVEAEARQRPDAELLMSHPGVGPILALATVVTLGDVERFRRGKQVASYLGLIPREDSSGERRRLGSITKQGNSFMRFLLVQAGMSAARGDAELGRAYKRLVHRKHHGVAKVAVARKLVVRLYWMLRSKKQYPEVVRMQGSSSHSVAQATADRLSGRPASQPQ

SEQ ID NO: 392766 - protein, 410 aa, unidentified
MKVAGIDVHKKVLMVVVVDATAPEEKPTRRRFVTMPSELHRLLTWLREQAVEEAVMESTAQYWRSVWLELEPHMRLHLAQAFSNRAPRWRKHDFKDAERLVRRLIADELILSFVPSGEQRIWRSLTRMKLQLTRDRVRLQNQIECLLEEMRIKLSIVVSNLLGASGLRILHALANGETDPKRLAQLGGERLQCTEEQLVDALTGRAQPVHGAMLALQLERLQLIDQQMERLNSMIAAAMKPQQDAVMRLAEVPGLGVDSAQQIIAEVGAQAGTFASAAELTSWVGTCPGKEESAEQNHSSRSAKGNKYMRRVLNQAAHAAAAKKGSHFQIVFRRLLPRLGYQSAIWAVAHRLCRLVWKILHEGVRFIEKGVEVHPREKKKRAQMLARALRKLGYEVTITPLNQLVPKPAV

SEQ ID NO: 392767 - protein, 339 aa, unidentified
MELYSGLDLHSTNTYIGILNCDFKHVFKKRVSNNLDLILETLAPFKDQLKGLVVESTYNWYWLVDGLMDAGYGRVHLANPSAIRQYEGLKHSDDKHDAFFLAQLLILGILPQGYIYPKQDRPVRDLARKRMFLVKHKTAHILSLQSLIARCSGQRISSNQLRTFTSEDLQRLLKEEHLVLSAQANLDSISFFKQQIHGLEKVIKNKLKLNQAFNGLLTVPGIGNILAMTIMLEVGDIGRFAKVGNFTSYCRCAPTQRLSDGKSKGSGNRKNGNRYLSWAFSEAAQMSRRYNQRFRRYHDRKAAQTNTIVAARALSNKLARVCYYIMRDQVAFNEELILH

SEQ ID NO: 392768 - protein, 417 aa, unidentified
MPKEITSKEVKDELFYERCCGLDVHKKTVVACLRDGKKAAIREYGTMTGELRELAMWLRESGCQMAAMESTGSYWKPIYNILEMLEIDVIVVNASHLKNVPGRKTDVKDSEWIAKLLSQGNLRASYIPDREQRDRKELVRYRRSLIRERSREINRMQKMLEGANIKLTSVVDSVMGKSSRALVNATMNDKKITNDDVFSYISSNLKGKASDIVKAMDGIMSKTQKLLLKAVLDHIDDMTKRIDELTDSIDDDMKKYEEMIDNLDAIPGIGKESAQVIISEAGIDMDRFPTAGHFARWAGVCPGNNDSAGKKGRGKAYKGNSVLKSTLVQCAQSAVLTKNTFYRAQYDKLIVRRGKNRAKVAVAHSMAISIWHMLKHKVKFRDLGANYYNQFNKEKKVAMYLKKIMELGYTPTILAQA

SEQ ID NO: 392769 - protein, 373 aa, unidentified
MPKYSTAFGMDVHLRSTTVCALDADTGEAVTRRFPGNPWGEIAGWMDGFPGPSLAAYESGYLGFAPQRELAGLGVECVVAAVSKIPRSAADSASKNDRNDAARMAKAILAHDISPVWVPSPEVEGIRDLAGAYDGATARLATAKQRLLAFLGKRGYAYGGTTPAGNPRKYWTYDFLRWLDKVRPEDDGGIRTLAALRNEVEAAAEARSDLLSEYRAAVDASPIAAEVAALQSIKGCAFALAAAFSAEVGDFTRFRSGRQVTAYFGLAPSQRSSGDSVRLGGISGAGNALVRKLAVEGSWCYAAARHQPKLMPRDTGVPLEIRMHGRKGSERLLRRREEMLARGMPQAKANAATAAELVRWLWALGMMCREGAE

SEQ ID NO: 392770 - protein, 412 aa, unidentified
MEVLYACCCGLDVHKKSITACVLWAEGKGKARKEKRRFGTFTRELLQLADWLRACGVTHVAMESTGVYWKPVWNILEGQFEVLLVNAQHIKAVPGRKSDQKDCEWIADLLQHGLLHGSFVPPKEMRELRDLTRYRVSLAQEENRIANRVQKVLEDANLKLASVASDPLGVSGRAILKAILAGEEDTERLAEMSKGILRKKIPDLRLALEGRVTEHHRFLLQELLDHQEFLEKKMAEVEAEIEKRMRPFAAEVERLDTIPGVDRVTAWSLVAEVGVRMEQFPSAGHLASWAGLCPGSFESAGKRLSGRTRKGSASLRRCLCQVGSVVSHMRDNYLSAQYRRQAARRGGKRAVLAVAHTVLVMAYHILKRKQNYQELGADYFDRLNADAIRRSLVRRLERLGHRVTLEPLPQFA

SEQ ID NO: 392771 - protein, 416 aa, unidentified
MTEERRWYAGVDWASESHHVFLTDDRGAKVGERIFRHSGEGLAEMAAWLLSASGAAAPGRINVAIEVPHGPVVETLLERGFSAHAINPKQMDRFRDRFTLAGAKDDSRDAEVMASALRTDPRCFRELAIADPVVIELREWSRIAEDLGAERNRLTNRMREQLWRYFPAMLEFESDLGAEWLLDLWEAAPTPAKAARIRETTIANILKRHRIRRFDAAQLLDALRKPPVQVAAGTTEAASAHIATLVARIRLVNRQLKDAHQRLDVLTARLIPTAEIEPGQRKQHDVEILASLPGVGRTVLATLLAEAFDALQRRDYAALRSLTGVAPVTKRSGKSCIVIRRQACHDRLGNAMYHWARVAVQHDTKSRAKYAALRSRGHSHGRALRSVADRLLNVACAMLKTGTTFNPALAVQKPSC

SEQ ID NO: 392772 - protein, 328 aa, unidentified
MECIGIDVSKNTLEAAIVRKTGDFSEKVLRSHSFNNNTKGLEGLLSWAERTALSPETLFVMEATGTYYELSADFLYNAGMSVVVELPNKIKSFAKSRNVKTKTDKVDAKVIAAYGLHCATRRWKPMTENLAHMRTYIRQTCSLIKERTACKNQLHALEHSANTPEMLKRDLLDRIETLTKYIEKYQGETLKIAAEDSEFYSRAVKVASIKGVGLLTVLTVLCETNGFSLCTNVRQAVSYAGLDISLNDSGTFKSRGRISKRGNARIRYALYLPAITASHYGPESIRKLYSRVTDRRPDAKKVAIVAAERKLYTLIYTLWKKNESFKVL

SEQ ID NO: 392773 - protein, 293 aa, unidentified
MLIHYIDIAKRNFVIAVSSLSKTKTETNNPKGIAHTIEYLKKHKVALVVTESTGGLEIPAAKAIRRAGIAVIIANPRQTHQFAQSQPLTKTDAKDAKMPAFFAQMTAQKEDSQTMPYQPPTEAEEVLEALVNRRNQSADMRTAEKNRLHQVHETQVGSVKQLIAHFDRLIDELDKQIDDHTHTHFDGKAQVAEQIKGIGSITTATLMAMLPELGRLSHKRIASLVGIAPHPRESEETKFKAAALAEGLRCVRHCIWLPWQRHVLNRLFGISTNACCPRVSRIRLLLRHVCANC

SEQ ID NO: 392774 - protein, 491 aa, unidentified
MSRKRPKGKQERSAPTQMDWKVLEVVHPDAAGIDIGGREHWVAVSPERDPQPVRCYGCFTADLQEMARWLVEKGVRSVALQSTGVYWMPAFEILEQHGLEVYLVNAQHTKNLPGRKSDVQECQWLLKLHAFGLLNNSFQPTGEIRTARTLWRHRGNLVAEASSTVQRMQKALIEMNVQLSNVLSDLSGVSGMTILLAILKGERDPEKLAVLVQPEVKAAPEDIAKSLEGNWRPELLFVLRQQVELYQIYQKKIADCDVQLRRHLESLGGKVDLRVQPIGPRPKGKKASKNAPQFDLRSELYRITGIDWAQVNGIDVLTAQTVMAEAGADLEEFATEKHFTSWLGLCPSNERSGGKILNRATRKVVNRATVAFRNAASTLACRSLWLRLRPPALRRGPAATLSNTDIVGNGFGFWNTMPIARRTATTSTEESYKSRSSNSTLPSARAPGISSCMRLMQRTIVDLPHPEGPMIAVTWLARKSRSTPLTCSASP

SEQ ID NO: 392775 - protein, 410 aa, unidentified
MEAVLERCAGLDVHQASVVCCILISAPGRRSQKLLRRFGTTTRELEALRAWLAEHGVTHVGMESTGVYWKPVYAMLEGHFDLIVGNAHHIKNVPGRKTDVKDAEWIAQLVRHGLVAKSFVPPPAIRALRELVRHRRTLIETRTATRNRVLKLLEGANIKLSGVASDVFGVSGMAMLEALTAGTANASAMASLARGRMRRKHDALEAALEGRMREHQRFLLAMQLRTLKAIDHDIAALDAQIEAQLEPFRAQHQLLMQIPGVDWVTAASILAEIGPDMSVFATARRLAAWAGVAPGNYESAGKPKGAATRKGNVFLKSALFAAASAAVRAKGSYYCDKYNRLRARRGPVRALMAIAHKLLIAVFHMLTTGEAFRELGESYLDQVTRKRSTTRLVQRLSSLGYDVVLVPKAA

SEQ ID NO: 392776 - protein, 316 aa, unidentified
MKIVGIDVSKESFDCVWEAEGRTRHQRFEYKDAGMEVLLEQTPPDAHYVMEATGIYHARLALKLYESGRCVSVVNPLVIKRFAQMRLSRVKSDKADADLIRRYGEGHTLSPWAPAAAEVLELQQAHGWLDDLIGERTRLLNRQEAHTCHGKPSRFVAHQMSAQLRQLDKQIKDCERHLEETVKKSFLAIYERLLTIPSMGPKTAIELIIVTEGFSRFDDVKALCAYIGVSPTTFRSGTSIHGKGSIAKMGQGRMRQLLYLCSWTAKRCNPACKALHARLKAAGKPPKVINIAIAHKLLRQAFAVATMNRPYSAEYA

SEQ ID NO: 392777 - protein, 318 aa, unidentified
MKKAFFCGVDVSKDKIDVCFLTSILSEKAKFETLPNNHELIKVYFDSFKNDEILVVFEATSNYHLTLQRALSDLGIRYCVTNPYKSSLFLKHLSTIKTDISDSYGLAVYARTFKSEIAPDKYNAEYLEIRSYNSTLNLLQKINTQLKNFKSSQKTLNNKVIDDVIANLIKEIAKLQAMLQKLAFDLVKKAIPETEEIIKENKGFGIDLALNLFPQLHFNRDKSEKQFISFIGLSPRIFQSGSSVHKNQKINKMGNSNIRRILFMTALCAIRFNAKFKSRYERLLANGKKKMVAVVAVMCAIVRYLKSLFPFNVQARAF

SEQ ID NO: 392778 - protein, 399 aa, unidentified
MKKNLPLELRVGVDVGCHSHNAAIGLSTGEILEEFSIAHEPEGFRQFFSRIEKNERTYGCPVAVAMEGYNGYARPLDTLVRTRNYRLFNINNLKLARFKEIFPGAAKTDDIDARKALELFQLRDHLPIAKDVLQEVKTTPQENDILKRISRRRRRLVYERVRVLNNLQADLQSVCPGLLEITGEAGNLWFLRFITSTDDLRKLTRLRETTIRKIPGIGAKYTSIILKWQKAAEFSHETEWVSDMIQQDAERVLALHDQIETLETQMAEMAANSNIAQLLTTMPGFGPITTAELAGEIGTIERFESESSLALYLGMSNLDNSSGKHKGSKAPKQVNERAKAAMMIAVDRHRKSVAQSQKYYEKKRAEGKKHNQAVRALGRHLCRVIFKMLKENRGYFFTQ

SEQ ID NO: 392779 - protein, 278 aa, unidentified
MTRYIAFDVHAESTTCVVLSSAGKRLREEVVETSAGALISFLKTISGRKQLVLEEGTQSAWLHEMLSPFVDELVVAIPEKSTGTKNDSRDSWRLAEQLRVGAIQRTVFKRPQELAVLRAAVKTHRVLTSDLVRVKNRLRAVFRSRGISVSQDIYQPSVRSERLSLLPPHLRYQAEMLGKQLDLLEPLRDEAEAHLREEAKGISGVETVATVPGFGLIRAATLVAVTITPNRFRTTRQFWSYAGLALVTRSSSDWVRSERGWQRAEVNQTRGLNMNRHP

SEQ ID NO: 392780 - protein, 408 aa, unidentified
MEVVHRRCAGVDVHKKEVVACVRVASGRGAQHEVRRFRTTTTGLLELSDWLASFEVTPVAMEATGVYWKPVWHILESSFELILANAAQIRNVPGRKSDVNDATWIADLLAHGLIRGSFVAPEPIQELRDLTRTRKQFVREVAQQGLRVQKTLEDANIKLSDVISDTLGQSGRAILRAIIAGESDPHELLKHASRRLKAPRGEIAEALRGSIRSHHRFLLKLHLGQIEALEQSIRDLEARIGESLAPFRAYAELLKTIPGVSDIVAQTIIAEIGVDMTRFPTSGHLISWAGLCPGLNESAGKRRSTRVRDGAPWLKTVLVQAAWGATRVKDSYLQAQFLRLRGRRGAKKAIVAVAASILTAAYHMMQDGTVYEDLTAAHFDLKAKERTAYKLARRLEALGYHVELREAA

SEQ ID NO: 392781 - protein, 334 aa, unidentified
MKQVNQVGVDVDSEELVSMMRRGGQRLPLARFANSAGGHKKFIRWATKGARPVRVCLEATGIYSLEFALALHHAKKVEVMVVNPRAMKDFGRASMQRAKTDAVDAGVILDYLERMPFTEWQPPTSEILELQAINRRIVQLNTELTREKNRHHASEFAGASADAIAHDIEVNIHHLERRIARMQDSGLQLVRGVPALAAKLAHLVSAKGIGEASAMRILAELLVLPDDLAAPQWVAHAGLDPRPYESGTSVHPPRRISKVGNSHLRAALYMPALVAIRHEPNVKAFYDKLIAAGKKPLQAVVAVMRKLLHAIWGMLKHDQDFDGNKFFKLTEKTA

SEQ ID NO: 392782 - protein, 357 aa, unidentified
MKKLFIGIDFSKEKLDATIILACGMNEIGSREYGCFPNNNTGYRKLCNWVKNNAWDTIPGEWLFCGEDTGSCSIGLSKWLYGKGYDIWIENAYAIKHSSGIQRVKNDKADSAIIAEYAWRQQDKAAPFEPLNESLAQLREVFLYRHKLVGQRVAMELRKEDKSQSNKSKAISFINRKSKHLIDEINKAIAECDKMIDNIIEADEELKENYAIITSIKGVARQNATCMLVYTNNFKKFGYDPRKIACYYGVAPFGKQSGTSVNTPAHTSHFANKLIKSLLGQAAHIAKIYNPEIRDYYQRLINKGKKPQVALNNVKNKLIRIIVALVRKKVPYDQNTYKYYEEREVVKEKKNEKLIYC

SEQ ID NO: 392783 - protein, 356 aa, unidentified
MYGLKHQKEKRSMEHFAGLDVSVNETSVCIVDETGKIVREVKVASEPGALLTVLNSGAHHFKRIGLEAGPLSQWLYSALGEANLPVICVETRHMRAVLQAQINKTDRNDARGIAQMMRAGLYRPVHVKTLRSQKLRMLLTHRKLLQSKAIAVENDLRGTLRNFGLKVGIVGKLRFETRIRELVENLPDLAILVEPLLLVRRVLREQIAVLHRRLLVIVRDDDVCRRLMTVPGVGPVVALTFRATLDVPARFRNSRAVGAALGLTPCKYQSGESDRTSGISRCGDEMMRVMLYEAAQVMLVRSTRWSWLKAWAMQIARRRGMKKAIVALARRLAVVLHRIWVDGTEFRWSRQEAAAA

SEQ ID NO: 392784 - protein, 402 aa, unidentified
MTITPATELDAVFGGVDSHADTIHLAVITDRGGHVADAEFPTTSAGYAAAVAFLNAHGTVTAVGVEGTSSYGLGFTRAARHAGLTVVEVNRPDKAERRRIGKSDPIDAYAAARAALSGRASMIPKDDTVSGIRALHDAARSAVKARTATLNQIARIHITAPDDIRVKYTALRGKTQVDALSRLRPTGDGPRVALLTALKSLARRVQALRAEHDALTAALDTAATEHNPGLRAAFGVGPDTAAQLLVTAGGNPDRLRTEASFAALCGVAPVPASSGRTNPHHLSQGGDRGANSALYRIALVRMSSNARTREHVARQTAAGRTKKEIIRLLKRAIAREIFRYLTTPVAVPDIADLRPARQAKNITLTTVAEHFGVWPAVISCLERGTRRDDALADAYRDWLTAA

SEQ ID NO: 392785 - protein, 274 aa, unidentified
MQHYAGLDLSMESTQVCIVDESGRKLASEKVDSAPEAIVEMLERHGSIERVVIETGRMSPAICLGLRELGVPVVCIDARQAHQSLKAMKANKTDPHDAAGLAQLARTGFYKEVHVKSPAAHGVRSVITARGHLVEARVRLDNMIRGLCATFGYRPGPGQGKAFLARIMEAAHIPGLGEAIASLLSVRAELVEQIKEMDRRLRIIASQSQACEILMTIPGVGVQTSAAFAAAVDEAGRFRQSRNAGAYFGLVPRRHQSGELDWTGRITKQGDGTV

SEQ ID NO: 392786 - protein, 334 aa, unidentified
MEKITTVGIDLAKSVFSLHGVDGAGRVVLRRTVRRDQLVEVVAGLAPCLIGMEACSGAHEWGRRFQGLGHTVRLMAPKFVAPYRKSGKNDGNDAEAICEAVTRPSMRFVPVKSIEQQALLAMHRVRQGFVVERTAIINRLRGLLTEFGVVLPLRSVTVRRQAAAAAESLPELARRAIGDLLEQLRVLDERIGAYDREIEAQAKLCEPAQRLMKIRGIGPTTALAIVATVGNAREFKNGRQFAAWIGLTPSQYSTGGKPRLGHISKRGDAYLRNLLVQGARSVLNSAGMHQDRMSRWILELQPRRGYYRTLVAIANKNARIAWALLAKNETLRSA

SEQ ID NO: 392787 - protein, 352 aa, unidentified
MIKFIAKNKEIFVGLEDSKRTWKLCARSEKIVIQETSMPAKYEILKAYFKNNYPDCKIKIIYEAGFKGFTLHDRLVADGIDCVVTPPHTVTQEKDNRVKCDKIDARRLALNLENGDYKSCCVPDKELREDRQISRMLIQVQKDINKCKNRIRKFLDFHGYDEEFPAGTWYDREYKALEEFKFPEPLKAQMDIYLSTLKHFAETKKKLTELLKALTKKKRYARVFELFESAPGVGWYTAIRLILEWGTDIAQRFKTDKKIASFTGLTSSEFSTGEAVKRGRITGQGNRSVRAWLIESAWTAYKRDPALLHKFQEVYQHTSSKKKAIVAVARKLAVRLRALVVTDTPYQIGVAR

SEQ ID NO: 392788 - protein, 321 aa, unidentified
MAYFRDVVGIDVSKENLDLYVLSGQQRRTVANTAAGYGDLVSWLKSLGVRMAVMEASGGYERDVAKALRQAGFDVRIVDPKRVRHFAKAAGRLAKNDRIDAEMIAEFGAVFAAAQRCEIPLDAKREHLAGLVATRQALMDHQTSLQNQISACPKGPARQALAAALKPIPASIKQLDRLIAEAIAAHPQFAALAARLDTVPGVGPVTIAALIAWLPELGRLDRRALAALVGVAPFDDDSGKRTGQRYIKGGRGKLRNIVYMAVMGAATKHNPVLKAYYDSLLNRGKLKKVALIACLRKLLTILNTMVAKQQDWNPASMAIAA

SEQ ID NO: 392789 - protein, 311 aa, unidentified
MKKEITFDQVIDRGCGIDVHKSVIVATIRGIGIKETTKTYSGFTESIEEMRNWLKEKKITHVAMESTGVYWKPIFNILEEDFDIILVNARHIKNVPGRKTDKKDSKWISKLLLSGLLKASFIPPKPIRELRDLTRYRRKIVGQIAAEKNRLQKILEDANIKLSSVVSNMSGATATKIINAMIDGEENIEELLKFRHGKMQSSKEDLAASLKGKLTEHHKFMLTTIKESIKEKESLIEKLDIRIEEHLKANELMLDSQLLQTIPGVGKDAASGILAEVGNKMDQFPNEQHLASWAGMSPGSNESAGKKKAVG

SEQ ID NO: 392790 - protein, 318 aa, unidentified
MTKTICIGIDVAKASLEIALGAQGTVMTYPNTPEGHDELTVTLANYAIDLVVLEATGGYEVPVACVLQTIGLAVAIVNPRQARDFAKAMGNLAKTDKIDAQVLAQLALVLSQRTDRDKIVRILPSAQQRVLQAMIARRRQLVVLSISERQRLGNCHPDIRESITLMISFIQEQLKVIESALSKHIKTYHRSKLDLLSTVKGVGPATIATLIADVPALGKLTRREISALIGVAPFNRDSGFFRGKRTIFGGRAMVRRMLYMATLTAIRFNPVLCAFYKRLTEAGKPNKVAIVACMRKLLVILNAMIKTNKPWDESFHTV

SEQ ID NO: 392791 - protein, 449 aa, unidentified
MSKETKNKAKQVSTLSLPVINPDAAGIDVSASMHMVAVPADRDTNQVKQFGAFTEDLHDIARWLQVCKITTVAMESTGVYWKQLYIVLLQYGFHVCLVNARHVKNVTGRKTDIDDAQWIQKLHSCGLLNSCFLPDDVTESLRSLVRHRKSLLEDSSKYVLRMQKSLELMNIKVQSVLSDVMGKTGSAIIKAIIEGHREPQYFLQFVDRRVKADPATIVKSLTGNWREEQLFLLEENYMLYQLLQQRIESCDKKIESFLQLQAAVVTDGIIEPADAAIKKKSKNQPCFDVRSYLHRIHRVDVTSIYGISAATALQILSETGSDLSKWETEKHFVSWLNLCPNNKITGGKLISSSVMKKKAGNATQAFRAAANTLQKSDHWLGDYFRRMKSKGGNKYAIIATARKLAVIYYKMVRQKKEFQPLNKDQYREKYKMAKIAYLEKQLLKLKAVG

SEQ ID NO: 392792 - protein, 315 aa, unidentified
MDEPRCVTTCVGIDVSKVRLDVHLRPSDESFAVTRDGKGLENLVERLAALDVSMIVLEATGGFETTVAAALASAGLPLSVVNPRQIRDFARALGRLAKTDAIDAKVIALFAERMKPEARPISSPQAQKLGELVARRRQVVEMIGMEANRKRRVADKRLIKKIERHIGFLEKELADIDADIDAAVRATPAWRETEDLLTSVPGVGPVTARTIIADLPELGSLDRRKLAALVGVAPFNRDSGAWRGKRMISGGRTGVRNVMYMAALVAIRWNPTIKATYERLLKNGKPKKLAIVACIRQLLTILNAIIRTKLKWQNA

SEQ ID NO: 392793 - protein, 363 aa, unidentified
MEEEKRRYVGIDLGKREYTMAIIDRKGKMRIHHGKTSDQGRQTLYKLLEKGDKVALEAGNLAFITAREIQERVGSEVRVLNSAKLPFIWDAPTKTDKEDAMKLAHLVEERRDEKLPIVPLPSEKEIERRKTLASYGREMKNRTRHINTLHAIFVHQGHTTIVKKNLATAENRQEAVRLLTGLEREEAEWILKYLELHERRIKELKCKIQKEAKEDEDMRNLQTIPGVGPVVAYAFAAYVGDGSRFSTGAQVSNYIGFVPRLDYSGTIQRNGSITKHGNGYLRGLLVQAAWSMVTCKSESSLKDRYICLTVFGGKGKKKTIVSIGRRLAELMYYVLRDKSNYEARIWTGRREYLTRLKELRNSA

SEQ ID NO: 392794 - protein, 494 aa, unidentified
MENTTSIYAKQNPKIRQIFEQAGSPAKLLCGAIDYAKAQHVVLFCNGFGDILKKSFAIANSPEGLKTLLEELGSTCAHRGIKDQHVFFGGEDKPSYAQNFIQALTDKGYLVVWVNAWEAKQQRDNHQASTDELDVRAIAKALLNKASYCEEDQSKTILALKELSRKRSHFVILSSEQKLQIHHQASRLFPQFLNQQKSGVVPFSRASLALMSEGLCPERIRRWRCKDLSKFLDRHGQEQSEQTAEKLKALADQVLAPCVQMIDCWQAALGQHVLQYQSLSQSVSALEKQLARSLAKTPGALLTSISGIGVVLASGILSELGSPSAWGPLRSVCSYVGIVPRTNQTGGPDKPAQSSTVQRRCNRRAKNWVIQAANLIGQCGPAELKTQHQKLLLNGQHADFVMGKRLLRICKDLMRRGTVYRPKPLLAQDTPASELSAYYLALWDRLLDKWKGLIEWEELFNPLHPLGQWRQLAQELYKISLPLPNKKAKKARQS

SEQ ID NO: 392795 - protein, 354 aa, unidentified
MTQSSTLYVGMEGHKESIAVASVAQAHGAEVVALGPIGTRQCAMDKLLRHLQSKGPQLVCVYEAGPCGYWLYRYLTKKGSVCWVVAPSLIPKQPGDRVKTDRRDARHLARLMRSGDLTPVSGPAVDDDASRALSRAREDPLRELKAAKRRLKAFWLRPDSRSTGRAHGSPAHLRGLSEVGCPTPAQQLGFQEYVQPVTAQTARLQRLEHELRAQVTTWRFPPVVEALQALRGVQCTVAVTTGAALGALTRFDTPRQLMHDLGLTPSEYASGPRRQQGSLTKTGNAPARRALVEGAWAYRYPAKVSRPLQRRLAKLPAALQALSWKAQVRLGKRYRQLMAQGKHAKQVVVAMARE

SEQ ID NO: 392796 - protein, 375 aa, unidentified
MSTNLRNVGLDVHAETIAVAVAEPGGEVRPLGIIPNRPEAVAKLVRKLGPREHLRVCYEAGPCGYVLYRQLTRLGVHCDVVAPTLVPTKPGDRVNTDRRDAAKLARCYRAGDLTPVWVPDAAHEALRDLVRAREVAKHDQLRARHRLTKLLLRQGIRPPEGVKPWTQRYCRWLDAVPFDQPARRATFGDYLHEVDHAAARLERLEQALDEAVQAAPASLRAVIAALQTLRGIRQVTAATIVSEVGPLSRFTHPRQLMGYSGTVPSEHSSGAAIHRGGITKTGNAHLRRVLLEAAWAYRFPPKCAKGLRQRQRGQPEAITDLAWKAQHRLCGRYRRLLARGKPTPQVITAVARELLGFIWAIGVAAERVGTAAAAA

SEQ ID NO: 392797 - protein, 355 aa, unidentified
MDSRKYLGMDVHQASISIAVRDANGKLVMESVIETKAATILECIRGIRGNLWVGFEEGTSAAWLYDLLKPHVAQVIVCDPRKNALLKTGNKNDRVDARKLSDLLRAGLLTPVYHGESGVRTLRELARSYLTITKDLTRVMNRLKALYRSWAIPCAGEKVYSPRHRSAWLEKLSEVGVRRRAEQLYQQLDMLLQIRREARRELLRESRKHPAQELLRQIPRLGPIRVALVIALVQTPHRFRTKRQLWAYCGLALQTRSSAEYRFTGGQLQHSQKLPALRGLNSNHNHDLKNLFKSVATNVGTSTGPLGDFYRSLLVKGMKPAMARLTLARKMAAIVLTIWKKGERFDPGELKRQAA

SEQ ID NO: 392798 - protein, 405 aa, unidentified
MSQNFSIFVGIDISKDKFNACAIQNPSSIIFESAFDMSKQGFSSFVQKLSVFPKSSVLIAMESTGCYHLNLLSFLSLNDFSCVVLNPLLVNKSLPVGLRKTKTDKIDARSIALTIFYTHHILPTSSFLNSDFRDIVRKKESITHQISRVKNDIEKLLSLLFPELEKVTNIYNDAILNLLSSFPSAKAIQKASIDSLRVFFSKTTGRKLKLTPETLKELANDSIAQYWPVKEKILIQTIKELRFLQEQLNEFDEMLKEYCKCASLNQDVEILTSIDRIGENSALYFLAEVGDISRFSTYKKLIAYCGLDPSVDESGKHKGESCISKRGNAHLRRIIWLMSVNVVRHNEYFKAYFQRKRSQGLVYKKAMMSVAHKLLRTIFAMMKKREKFNINHTFSSSTQNLILHS

SEQ ID NO: 392799 - protein, 344 aa, unidentified
MHYIGMDCHITTLDFAVVNEAGRLVKANSVATSARRFMEFVKQVPAPRTIYMEEGTLAAWALETCVSYGEKLVITDPKRNHWISSSEQKEDPLDALKLAQLARGGYIKEIHHPVGQRRRFRELMEAYHDTVRSEVRVKCKLKAKFRQNGIQCTGDTVYAKNRRQEWKDKLPQEATLLLILEGLWLQLEQLEQTEKEILKAAKAQAKHYPEIKHFEDIPGIGFINAATISAILETPYRFANKRKVWMYAGLGLMRRSSAGKLYSEKLSGDYHRRLKYTIKQAAEAAIRAEDNPFRRKYLDMTLLHRIAPNLAKLTIARNMLATMWAMWKKGEKYNPEIRERANHK

SEQ ID NO: 392800 - protein, 456 aa, unidentified
MKIPQSTIRLLTGRLVTILLNREVSTMKSNTQNAKIEAITEKTLVLGIDVGSETHYARAFDYSGIEYSKKPFKFSNTETGFVTLKEWILDLKERHEKDKVVPGMEPIGHYWFNLGKFLQDNEMKLVLVNPHHVKKSKELDDNNPTKNDRKDPKVIAGLVREGRYMIPYLPDGVYADLRTASNIRFQLQAELTRIQNRISRWFNIYFPEYKTVYGNPDAKSGMLILKAAPLPEDILTLGIDGVNQIWRDAKLRAVGKARAKTLIEAAEHNVGSKEGAVSARMEIRMLLEDYESRNIRLQEVMTLIEGLAKQIPMAEKLLEIKGVGIKTVSGFLAEVGDISRFNTPKELQKLAGLALVESSSGKHKGETTISRRGRKRLRYLLFEVAMSLVAKNPEFRELHNYYTTRRLNPLKKMQSLMAIAAKLIRVFYAMLTKGVDYDPKKMVSDIKRPAVYLQAA

SEQ ID NO: 392801 - protein, 412 aa, unidentified
METITERVAGLDVHKDTVVACVHVPGAGGRRESNSHEFSTTTAGLLALRDWLVAHQVTLCGMEATGTYWKPVYYCLEDEIECWLLNARHLRNVPGRKTDTQDAAWICQLVEHGLVRPSFVPPPEIRDLRNLTRYRKAQIEERTREAQRLDKVLQDAGIKLSSVASDLRGVSAQAMLRALAGGERDPEILAELAKGTLRRKLPELAEALVGRFRAHHALLVSEILGKLDYLDEAIGRLSDEIERVIAPFGPQVELLRTIPGVDRRMAEALIAEIGVDMGRFGTSARLASWAGLCPGQHQSAGRQRRGTTRKGSKWLRMYLTQAAKAASRTKGTYLSSQYARLRGRRGGARATIAVAHSILVAAFHILERGTPYEDLGADWFIRRRSPEHHARTLVHQLEALGFDVSIQEHAAA

SEQ ID NO: 392802 - protein, 403 aa, unidentified
MNNVAGIDVSKGKSMVSVLRPFGEVVAKPFSVGHTGSELKELADYLKSLDGETRVVMEHTGRYYEPVARFLHEEGVFVSAVNPKLIKDYGNNTLRKVKTDKADSRKIARYGIDNWAELRQHTPMDTIRMQLKTLNRQQSLYAKTKTMMKNNLIALLDQTYPGVNALFDSPVREDGSQKWVDFATTFWHVDCVRNMSLTAFAERYRKWCKRHGYNFSQSKAVEVHAGAQDLIAMLPRDALTKTMVRQAIDALNAVSASLERLKAEMQALAAQLPEYPLVMAMHGVGDSLGPQLMAELGDVTRFTHRNAITAFAGVDPGADQSGTHEAKSTRVSKSGPPELRRALFLVMDCLLKTQPQDDPVYRFMDKKRAEGKPYLVYMTAGANKFLRIYYGRVKEYLASLEGN

SEQ ID NO: 392803 - protein, 449 aa, unidentified
MKQKKTSKKKPMRLPKHLVHLNACAAGIDVGSKSHFVAVPEGADPEPVREFSTFTDDLERLADWLLCCGVTTVAMESTGIYWIPVFEILESHGFEVRLVNARHVKNVPGRKSDVLDCQWLQQLHTYGLLRGAFRPADQVCALRAYVRQRATLVKISGSHIQHMQKAMAQMNLQLHNVVSNITGATGMRIIKAILEGERDPDTLAALRDNRCKNDAKTIARSLQGNFRPEHLFSLQQAVELYEFYLAKINECDRQILAQLKSFDAIGTEGDSGDDKPPASIDEALMRISGVDLTEIDGIDTTSALKIIAEIGIDMSRWKTDKHFTSWMSLAPGAKISGGKVLSSATQKNANRAAQAFRMAAFSLTRSKSYLGSYFRRMKARLGAPKAITATARKIATIVYKMLKNRTSYIDLGQDYYEERYQSRLVQNLKRNAKHLGFELVPTEGKIAAL

SEQ ID NO: 392804 - protein, 370 aa, unidentified
MKKLHKYVGLDVHQDTTMISVAEGGREGEVRTYGRISSDLHALERALAKLRGEDVVLHVVYEAGPTGFVVYRRLLQLKIDCAVVAPSKTPQGTGPKQKTDRRDATQLARLHRAGELTAIHVPDEVDETIRDMTRARADAVDELRRAKQRLKSFLLRHGYHYKGNANWSEAHQRYLRTLVLPLPALKAVLEESLLAIDQAVQRVSRLEELLSVQVPRWRWYPAVQALMCFRGFQLTAAAVLVAELGDLHRFRHPRHLMAFLGLVPKEDTSADKRRMGSITKAGNAHARWILIEAIQHALLPPKVSAPLAERQSGQPEAYKQLSWKVQLRLHKRGWHLLSRGVMKAKINVALARELAGFVWALLQQVPTPKS

SEQ ID NO: 392805 - protein, 377 aa, unidentified
MSTVRFVGLDVHAETIAVAIAEPGGAVRSVGIIPNRLESIRKLLGKLGPVQHLKVCYEAGPTGYVLYWQLTALGVACEVVAPTLVPVKAGDRVKTDRRDAEKLARCYRSGELTAVWVPDAAHEALRDLVRAREAAKKDQLRARHRLGKFLLRHGRRPTQAGKAWTKQYLAWIKTQVRFDQPALEATLAHYLQEVDHAASQILQLEKAIDEAVAQADPEIRSVIEALQALRGVAQMTAATIVCELGRLSRFPSPRQLMGYSGLVSREHSSGNRIQRGAITKTGNAHLRRVLVEAAWAYQHRPNVTGFLLRRQKSLTLSEEVKQMAWKAQCRLHKRYRAFARRGKNKNQIVTALGRELLGFVWAIAVHTEAQQKPAKAA

SEQ ID NO: 392806 - protein, 358 aa, unidentified
MQQQGTKIDFKGQNIYVGIDTHLKSWKVALYHDEIALKTFSQDTDPKLLVNHLRKNYPNANYQCAYEAGFSGFWLQKALTKQGIKCIVVNPADVPTTDKEKKFKTDKIDCHKIARSLRNKELDAIYVPSDEGLEERSVVRLYKDMVRNRTRYKNKIKSILNFYGITYPEQFKDSNRHWTISFCKWLKSLRLNTDAGTWMLNFHILEYAHSNELVKKARKQLQILSEQNKYASKIKLLRSIPGIGLVNAITILTEIEDINRFKTLDELCSYIGLVPNTSSSGDTDRIGDMTHRGNSFLKTTIIEAAWMSIRYDPGLLLSFQKLKSKMEANNAIIRIAKKLVNRIRFVLKNETEYVKSVL

SEQ ID NO: 392807 - protein, 301 aa, unidentified
MNETRLRDCVRPSGDTFALARDGEGVAALVERLRAAIPQLIVLEATGGFEQVVAAQLAAARLPLVVVNPRQIRDFARATGRLAKTDRIDAAVIAHFAEAVRPPVRPLPDKKAHVLDELVTRRRQVIEMMTAEGNRARQIDNKRLKKRIERLRSILQAELTAIDADLDEIIRGTPMWRESEDLLKSVPGVGNVVARTLIAELPELGTLDRRKIAALVGVAPFTRDSGTMHGRRSVCGGRAPVRTALCMAALVASRRNPVIAAFYQRLVAAGKCKKLALTACMRKLLVILNAILREHAPWQAA

SEQ ID NO: 392808 - protein, 395 aa, unidentified
MTNLFFIKQCDGIDIAKATFVACIAKMLSDHRIIFTDKRTFDNNKTGYNQFLKWVRKCTDKNNLILYNMEATGVYYESLAYHLNNLKKDISVVLPNKASHYTKSLNIKSKTDEIDAQVLAQMGCERNLRKWTAPIELFRELKALGRLHHTLGHDKTMAINRLKQIKSGYKPLEEAVKFHQSSIKRIKKQQGLVIAKMISLAKTDEKIWSKMCNLTTIYGIAIKSVLVVVSELNGFTMINNVRQLVSFCGLDVVQTQSGTSINGKSRISKKGNSFVRGALFMPAMSATRGDNEVARNYHRLVANGKNKKVALIATERKILILMYTLWNSDQPYNPNYQTLKTSGCHEEEVPSSSSTRRVEKMCNMEKVVASVRLTTTQNEHLYDQSSDVLLRQLQI

SEQ ID NO: 392809 - protein, 391 aa, unidentified
MHSDGSKHSSFSVPNNRNGAKLIVDRVTSVLLLQEIPQVVIGMEATSVYGDNLMRFLRESGSLGRFERSLHMLNPKQVKKFRDAYSDLPKNDFVDSFIIADHLRFGRINKEVYMDDYKYQALKMYTRARHQLVQELTREKQRFLNIVFICFSGLTQEKIFSDKFGATSMALIEEFSSLDELAYMNIDELADFIRKHGKNHFENPEEIAEAVQRAAKNSYRPPQVIAEAAKQMIAISMNTIRLLQKQIKEYDKAIEKMLETIPQTLTSVKGIGNVYAAGIIAEIGDINRFPSQASLAKYAGLVWTQHQSSDFEAEDKRMIQGGNHHLKYYLCEAANALRRCDPEVKRFYALKYKETNKHNHKRALALTARKLVRLVYTLLKTNRLYIPPEEY

SEQ ID NO: 392810 - protein, 424 aa, unidentified
MFVHPKMAYTYVGIDSHKSTHTAVYLNCFFEKLGEITIDATPSGFKDFLKQSEQQYLQDGTTFAWGLEDVGAYGRSLVKFLLSENQLVKHVDANLVANERNAKNIVNKNDSIDAECAGRVLINRFDRLPFATAEEKYFVLGKLVARRNLIVKSHTMAKNQLHSMIADHYPSYKKYFSEVDGAAALAFFEKYPSPSTLENVTVEDLTLLLKRASKNRTGEEKATLILETAKSDGVLLSGFQSIQGMTIVSIVQQLKMGKEQAKHFEAEIKKFLTHFNYPLNFIKGIDVITSASLIVEIGDINRFKTPASLAKYAGVAPVTHSSGDSSVDYANERGNRKLNKIFAELAIRSALPVGRGRTLVNPIFHEYYLKKLADGKTKKQALKCVQRRLVNIIWRVMKDGKEYINPDPAPAPPKENVGKPKKIS

SEQ ID NO: 392811 - protein, 408 aa, unidentified
MKRYYIGVDWGDRLHQVYVGDDEGKKVREMKVPETVEGLAEIGRWLNEKRAEGLELWAAIEKPAGCIVDFLLDHGVEVYPVNPKAVDRVRDRYRMSGSKSDAFDAYVLAEFLRTDQAHLKALRPSSEKAQELKILSRDQHRVVRHKTRLLNQLTTTLKEYYARPLEVFEDIETEIALDFLTRYPTPAHLGALKRKEFNRFATKQHHLSKPRCEELWEKLSQPQLAVPEHVVRAKAQLVEVLIDQLRASIKAVKTYNHRVESFFASSPAAAVAKTLPGGKSGTLVAAIWAELGDAQGRWQSSGHLQAEAGAVPVTKASGKSHVVHFRFACNKHLRYTMYWFSFVSLNNSEWAKLYYRGQRDKGHSHPQALRALGAKWLKIIFVMWRDHKPYDENYHLANIALQKMRQAA

SEQ ID NO: 392812 - protein, 447 aa, unidentified
MRIVYQRCCGMDVHKDSITACVLLIDEEGEFRTESRRFGTMTRSLKEMSGWLASLGVEAIAMEASGVYWKPVWNILEAEKKFALLLVNAQHVKRVPGRKTDQKDSKWIGELLQHGLLRASFVPPVEIRQLRDLTRMRARIRQTLASFANRIQKVLEDANLKLGSVASDVLGVSGRHMLKALMAGEQDPQKLANLAQGHLRKKIEPLQLALQGHFTDHHRLQLKLLLEFVEFGEQQLSHLDSEIQLLLSKVQGEPGLPGPAEGTVAEAEASPPQVTSPLQTAVELWDSIPGIDQLAATTLVAEIGANMDQFPSAHDLASWAGLCPGNDESAGKRRSGKTRKGSVWLRRALCQAAWSASRTKNTYLAAQYHRLIVRKGKKRTIVAVAHSMLIIAYYLLKRRCTYQDLGPDYFNLLNEEAITQRLVKKLTGLGYHVTLQPARTQAVSQAA

SEQ ID NO: 392813 - protein, 349 aa, unidentified
MTNIDDIELVVGVDTHRDSHTAAICDQRGRPLAELCVPTTPEGYTDLLSWVREVADGGRVVWAVEGTRHYGVGLCRFLSTQAQTVVEIGNNSHIGKRRAGKSDPIDAVRAAKELLARPEQTETRADGDREALRLLMIDRDNVVDSMRATRAVLTSLIVTSPAGLREELRHLSRDPRARACAQLASPAGADRQIRVLHETLSRVGQRIVESSQVVAHLEAQISEIVEDLAPGVVAAEHGVGALSLAQILLSWSHAGRLRSEAAFAMLSGTAPIPVSSGRTDRHRLNRLGDRQLNRALHIVAVTRMRSHPATLAYVERRRAEGKTDKEIRRCIKRYLARHLFRTLNGLDRT

SEQ ID NO: 392814 - protein, 456 aa, unidentified
MKKNKNSKDLAEFEQINFNAAGIDIGAETHYVAVPKGRDLKGQDVRHFGSFTADLYALAEWLKECRIDTVAMESTGIYWIALYELLESKGFDVKLINPMFIKNVPGRKTDVVDCQWIQQLHTYGLLHGSFRPAEQICVLRGYLRQRSMLVSYASHHIQHIQKALEQMNIKLNRVIRDITGTTGLGIIRAILDGERDPKKLSQLRDPRCKNDDKAIAKALHGNWRKEHLFALQQAVELFDFYQKKIADCDIEIEGQLVGFDNRSQGQPLAQSQKTSGRNKLSFDARSHLYRMTGVDLTRIDGLDALTVIKIISEIGLDMSRWPTEKHFASWLGLSPGSKISGGKVLSAKTKKCANPAAHCLRLAAYSLHKSNSAIGAFFRRKKAQLGPAKAITATAHKIARILYNMLKNGTEYKDIGQDYYEQRYKNRLYENLKRRAKQLGFELSIIKEQQPVMQTV

SEQ ID NO: 392815 - protein, 409 aa, unidentified
MYDKTKYIYVGLDLHKEQHTAVIMDCFNEKLGEITFQNKPSEFGKLITKCKKYCTDGKGIVFALENSYGYGRALAAWLIERGHIVKDVNPALSYAYRKSVPQYKKNDSYDAQCVARVAINELNKLPDAMPEDMYWTLSQLVNRRANLKTHHIRLKNQLHEQVCVAYPSYKQFFQDIGRPTALYFWEHYPSPRLLRGKTVEELAEELIPVSHNQFSTRKCQKILDAVKADGDTTRDYQPERDEITRGLVRDVRHYVNQLEEVDKAIANFLPRFGCTLNTIPGVSNTTVAKLLSEIGDIRRFPNANKLANFAGIAPVNFSSSGKGDDKPSKQGNRRLQGTIYFLAIQMIQLSSKGLPRNPAFYAYYKKQLARGKTKPQALILISRRLISIIYGMLKNKTEYRMPKVPENLN

SEQ ID NO: 392816 - protein, 342 aa, unidentified
MAIVAGLDVHRAQITFDALDTDSGEVMRGRIDATPAAVTRWARRFRGREVHVAVEACTGWLFVCDALVAAGAVAHLAEPVETRALRGRKRRAKTDREDARWLRELLTEGRLPEAWIPPEHVRQWRSRARMRHTLIDERTQWMQRIQATLYHHGVSGTPEKLRSRAGRTFLAALDVPADARERIEIALAMVEAIEAQIAPLERELRQLARRQTGCRALMGLYGMGELTSLVTLCELGDVGRLSASRKAVRMAGIDIGVHRSDRRARVGKLTRQGSPQLRWALYEAALSACRPSSPDHADYLALKARGLSHTRASLTIARKLARRSYHVLRELGPAALEPVPTR

SEQ ID NO: 392817 - protein, 435 aa, unidentified
MEEVTDEPLYRDRVCGIDIGKAGLVATIRVPSEKDPARRAAGTRSFGTTKREVLALADWLRSWQVPAVVMEATGDYWKGPFYRLEAEGFECVLADAKQVKNLPGRPKRDPADSRWLAACFERGAVTACFVATPEFRIIRLHTRYRRDLTEERTREKQRAEKLLESAAIKLSSVLTDLHGVTGRDIMDHLIGGEWNPKVLAQLARAAARRKISQLEQALEGAEFFTAEHAALLAKVLERIDRLTADIGDLSQVIERLLAPHEEQLAQAESMPGWGRRAAQDTLAETGPDMSRFPSGAHLASWAGRTPLDHQSGKRAGRSTAKKGNRYLGAVTGETAVAAGRTQTREGARHRRLARRRGKAKACVATGNTQLKVYHKLLSSPGMRYQDLGPDYYERQRDARRQVAHHVGKLGALGFEVTLCRIPEPEPDPTGPAQAA

SEQ ID NO: 392818 - protein, 366 aa, unidentified
MPSVGLLKPFPPYMEFTMIARSDAACFVGIDLHKDTLTACVLRGRDREVSYVKLACKCRDQIRSFFASLPQPSAVAIETVGFYRWLWTELEPLAGQLVLCDARGARALAGRRIKTDREDALNVALLLADGRLPLAWAPPENVQVLRNWTRHRNGLTRQHAKVLHHVKSTLNRLNFPGPVRLDAAALQRYLLAGVERFSADDLTMLWQHQRRLIEIEQDRAQSERRISELMRASEFARIREIIESVPGVGLVTAATVIAEIGDFSRFPDSKAIGRYAGLAPTVYASGNSSRLGHISKTGAPDLRWVLQQAAWTAIRCDAGFKKTWLRIAKTAGKKAAAVAIARKILVLMWTLVRKDEPYKSREPIAA

SEQ ID NO: 392819 - protein, 391 aa, unidentified
MIFVGIDVAKDKHDCFILNSEGTVLADVFTIANNRIGFETLLSRIQSCSQGESKIKVGLEATGHYSYNLLGFLLDSGLATYVINPLHTNLYRKSLSLRRTKTDRIDARTIAMMLMSDVDLKSYSNTAYHNEELKSLTRYRFDKVKERAKLKSSVARLVNILFPELEKLVSSLHIAVVYALLSNYPGASYIANANTEELAETLCTASKGRYTKSKTAEIQVAAGVSIGSKMPAKSMELKHTIALIRELDKEISEVESAIDKITSQMDSPIFTIPGIGRHMGAMILAEVGDFSNFASADKLLAYAGLSPSTYQSGQLQNCYAHMEKRGSRYLRYALFNAAKYVCLWCPTFSAYLEKKRSEGKHYNVALSHATKKLVRLIYALQKSGKTYLTAA

SEQ ID NO: 392820 - protein, 350 aa, unidentified
MTSMTSTRRVITVGVDTHSDTHHAAVIDEVGRPLADAGFPTTPAGYRQLLTWAGGHGEIAAVGVEGTGAYGAALARHLRAAGQTVIEVDRPDRKTRRQLGKSDPIDAYAAAAAVLSGTASGIPKTRDGLVEAIRTLRVARRSAIKARTQAINQLKAVLLTGPAQLRQAMAGQTTRELLGSCRRFRIDRRPADAADPVIAAAKTTLRRLARRIAALTGEIDELDAELRPLVSQAAPTLMAVYGVGTEVAAQLLTTAGDNPDRLRSEAAFAQLCGTAPLPASSGRTTRHRLNRGGDRHANYALHVIALVRLSSHPPTKAYAARRRTEGLSNLEILRCLKRYIAREIHHALVT

SEQ ID NO: 392821 - protein, 311 aa, unidentified
MELFVGIDVSKYFFDVCCGVDGKVSHFDYNQQAVAECVKMLERVEPTLVVLESTGGYELQLALAVQDSGLSVVIVNPSRVRSFGRACGKIAKTDKIDARTIAWYASALRPQVRGRINRKMCKLKTLTARRRQLVDMRTAERNRLEHVFEKAIRRSVEAVVKTIEREIGKVESAMAEHIDDDPQLREKVIKMRTVPAIGEVTASMIVSELPEIGSLNRRQIASLVGVAPMNRDSGLMRGKRTTGGGRKEVRTRLFMPTLVAIQHNPVIRKFYRRLLQNGKAKMTAVVACMRKLLTIINFMLAKNEEWKPNSA

SEQ ID NO: 392822 - protein, 326 aa, unidentified
MKMTHSQAVVGIDVSSGKLDAHVHGHDQSRQVTNDASEHRELVAWARAKRATTAVMEASGGYERDLARALRRAEFAVYVVDPKRVRHYAKAVGQLAKTDRIDARIIAEYGTTVLAAGRLALPRPDDPQRDRLSALLGARAALIEHRDALQQQSAAMPAGLARQALKDAHASMKLRIKQLERQIGALIAEHAAFAALARRLDTVPGLGPVAIAALIAWLPELGYAGRARISALVGVAPVADDSGDREGKRHIAGGRKKLRNVLYMPVVAAIRCNPVLAAYYKRLLACGKEPKVALVACMRKLLVIVTAMITNQQDWAPHSGAQTAAA

SEQ ID NO: 392823 - protein, 424 aa, unidentified
MNLTQNDRLNQVTADTLVVGVDIGSQEHFARAFDWRGFEFSKRAFKFGNTNVGFLSFLRWLEETLNKTGMKKIIVGCEPTGCYWLGFQKFLQDHDVLLVTVNPYSVKKCKELDDNSPEKSDLKDPKTIAGLVKDGRFSTSYLPTGVYAEIREAFVCREQIMKQHVRLSNQIQGWLQKYFPEYFECYKDWDSTSGLMVLEHAPLPQDIIRIGAGGINEIWRNAKVRAAGIKRAMTLVEAAQNSVGLEGGEAARLEIWILVNDYIAKAEQLKRLDEYLAQKVMEVPNVEKLLAIKGVGLSTVIGFVAEVGEIGRFTDPRQIQKLAGLEITKISSGKRKGQPGISKRGRCKLRRVMYESARSLITWNPAFQDVFLYYRHRERRPLGGMQSKIAVACKAIRVFFVILQTGCDFDEERFRKDIIRPQVA

SEQ ID NO: 392824 - protein, 358 aa, unidentified
MNRNTGMSAGQIIGTVNGMQVIGLDIAKHVFQLHTVDMGTGEIVNVQIKRAKVLEHFANKQPCLIAIEACGGAHHWARELSAQGHSVRLLHAKIVRPFVSGNKTDATDARAIWLAVQQPGVKFVGIKTAAQQATLTLHRQRELLMKMRTMQTNALRGLLYEFGVTFVQGQKALFKDIEQTLEELAVQLPQMLRDSLREQVARIKAMSEDMLAIEKRLGLQLKADPQMQRIAQIPGVGLLTATAAIATMGEASAFKSGREFCAWLGLVPKQTGTGGKVRLGGISKRGDTYMRTLLIHGARSVLAHAKERGPWLEQIKARRPASVVIVAQAAKMARTIWAVRANFQVYHRGFTSVRRLAA

SEQ ID NO: 392825 - protein, 418 aa, unidentified
MTKSHILGLDIAEASAVAQLEGADGSKCWRGPLTTDQAGWQQLESILAANHTAVADLFVIIEATGVHHFAWAERLAQAGAEVYVLNPLLAARLHSSANALRGHKTDEVDVAGLCETARLHAAALARFHYAPRPAQQGLRQLDHARNHLRHSLTNLKKSLKSQLGLVFPALLKAGIGADTARAAAILHRAPTAGTWRALPQAERRKLAGAKQPDLDRTCAETLADEALAEACVPAVHALLRAQQAIANELRACDELIKPRLPRERVALISSVPGFGERTAAVMSTYLPPTFEGWGTRKKIVARLQAYFGCDPRLRRSGVWVGKVKISKRGIGAGRTALFQAAFCSLGTDEENTAYYKRLRAVEKKDHKAAMVDLMRKHLRRLVAVLCNNRPFQRTPHASQQTLNPKGLRKRTRKSSSAA

SEQ ID NO: 392826 - protein, 478 aa, unidentified
MTPPKDYCLEAPCPPTPLLPPLPVLSDALQVCNPHAAGIDIGEAEHWVAVPPGRDPQPVRRFGTFTVDLDALADWLIDCGVITVAMESTGVYWIPLFELLEARGLQVFLIDPRQTKRAPGRPKTDRLDCQWLQRLHAYGLLAAAFRPADQICVLRSYLRHRQMLLTYGAHHIQHMHKALQQMNLKLSQVVSDLTGATGLAILKAIIAGERDPLTLAKLRNPHCQHSEDDIAKALQGTWRAEHLFAFQQAVALYQFSHQQLTVCDQHIQTHLGTFADKSRGQPLPPKARRHKKANEPRFDARTPLYRLAGVDLTTIEGIEEGTALVILSEIGTDMRRWPSVKHFCSWLGLSPQHKISGGKVLSRRVRPGAQRVALALRLAARTLHKAHTALGAFFRRLRSRLGAPKAITATAHKLARLVYSLLKHGSASVQQGLAAYESQYRERKVKAMARQAKALGYTLVALGTPEGASLNAVTAPIP

SEQ ID NO: 392827 - protein, 345 aa, unidentified
MKIVGCDLHTRYQQIAMLDQETGELIERRLEHESGEARAFYASLEGPVRVGIEATGHTRWFERMLAELGYELWIGDAAEIRASMVRKQKTDARDAAHLLELLLSGRFPRLWRPTMAERDLRQLVWHRQKLVWMRNAIGNQLHALAMGEGVCRKKKLFTKKGRAELEGLALDPWASRRRQELLRMVDQLDGSLKEFDQAVAEQAEQSEAAVLLMTHPGVGPVTSLAFVLTLGPVERFARSKQVVSYLGLNPREHSSGGRQRLGSISKQGNPMMRSLLVEAGHTAARLDGELRQDYQRLKLRRGGGVAKIAIARKLAVRMYWMLRSQASYAQLVRMQGSPRGTLVGQ

SEQ ID NO: 392828 - protein, 403 aa, unidentified
MNSVGIDVSKGRSTVAILRPFGEIVRKSYDVRHTAEALKELADTLKAIDGETRIVMEATGRYYEPIAQVLHDNSLFVCVVNPLLIHGYSNNSLRKVKTDKADAIKIAKYGLDNWTELRRYTSVDTVRQKLKVFSRQFNLYTKTKTALKNNLIAFLDQTFPSANSLFDSPVRSDGHQKWIDFATSFWHVDCVRALSEKAFVERYRKWCKRFGYQFSPSKAADIHKLAFGKVATMPKNANTKLLITGAANQLTETSKTVEIFRAEMILLASQLPEYPIVLEMYGVGKTLASQLIAEIGDVTRFTHRKSLIGFAGIDSPPNESGDYKGQGSEITKRGSSPLRKTLFQVMNCLVQNSPFDEPVFQFMCKKRAEGKPYYVYMTAGANKFLRIYYAKVMEHLRRLEDCS

SEQ ID NO: 392829 - protein, 348 aa, unidentified
MAMTIVEGTRPVTGGVDTHLDVHVAAALDDIGGLLGVESFEASAAGNDKLLGWLSWFGTVTRVGVEGTGSYGAGLARYLRGAGVEVVEVDRPNRQARRRTGKSDPADAVEAARAALSGRAQGAGKTRDGNVEAIRALVVAKRSTRSTKIKTLNQIRHLGFTATDDLRERFRGVSRFHLGATAAALRPRAGSDPVTYATKTALGVLGRRVVALDEEKERLDALLAELVAKTAPQLLELHGVGVDTAAALLVAAGDNPDRLRSEAAWAHLCGVAPIPASSGKVTRYRLNRGGDRQANSALWTIVITRMASDPRTRDYVARRLDEGRSKADIIRILKRYVAREVYRHLPRD

SEQ ID NO: 392830 - protein, 402 aa, unidentified
MWFAGIDWADTHHDALVIDETGQQAGSLRVAHTKAGINELKRFLLGIVKTPEQLACIVETSQGLLVAALLEAGFTVYPVNPKTVDRRRNAAGVKTDAVDAYLLAKTGRADLADLRKLQPDAPLVAELKLLTRDQDGLIQSQTRLVNQLTACLKTYYPVTLTLFSKLHQRSTLVFLQTYPTPAVAMAASAAEIATLLSKVHHPHPKEHAQQIVELLHQPHLVADVVTTRAKSRLMLVLVSQLLPLIEQIAHYDKEIAHLFSSHEDKKVFSSLPRAGKHLAPRLLAEIGEDRTRYADAASLQALAGTAPVAFQSGNYAKAHKRYACLKPLRNALYQFAWQSTLKEPWALAYYQRKRAEGKSHTVAVRALANVWVRIIHAMWLNHTCYDPATFEAAQRAHAKLVA

SEQ ID NO: 392831 - protein, 395 aa, unidentified
MYYVGVDIGKRFHSACIIDESGKTVVKPFNFSVNASGFGRFLASLDKVSGCKESFTIACEATGAYWLTLFERVKSREFPYVVVFNPLQVSSFRNKNIRGTKTDTLDCSLIANILRYEDYVNYQVPDNDLLNLRRLSRFRSDMVGRISPLKVKVLGVLDQVFPEYPELFSDVFGTTSKALLSSASTPEEIVRLDLRKLKTLLKKASWGHLGEKRALLLKKTASVSVGTKLSLDSLSLQLKFMIENIQLLQDQLKAVETKIDSLFHKQQTQLASIPGIAEVSGAAILSEIGNIGNFKKDGAKKLVAFVGIDAKVRESGAFKGKRKMSKRGSRYLRAAIMQASFVASNKDPYFKSVYQKQITRGKVHLVALSHVANKLTHVIYSVLKNNKPYFRPDLA

SEQ ID NO: 392832 - protein, 353 aa, unidentified
MKCDKYMGMDVHQAMTVVTGMEAEGKVILETMVPTEASAIIRLLQSLSGPLHVTFEETTQAEWLCDVVRFFVADVVVCDPRHNKLLGAGSKADKIDARKLADLLRTGMMRRVYHGHEGHRKLKQLMRGYETLSIDTRRTMVRIKAIYRGRGIRTPGRNVYQPKQREQWLQLLTEPGLRERVGWLFEELDHLKPLRRQAKQAMLTESRKYQAVKLLRTIPQLGPIRAALIAATIDTPYRFRTRHQLWSYSGLAVVTHMSSEYEMKDGRVVRSRKPIATRGLNRNCNRRMKEVFIGAAAAAGHTAMYRDYLEALEKRGVRKEMARLTLARKIAAVALTIWKKGEAFDPKKLNWTT

SEQ ID NO: 392833 - protein, 339 aa, unidentified
MTLYAAIDLHSNNGVLSVLDEADRVQYERRLPNDLSQVLKALEPFRDELHAVAVESTYNWYWMVDGLIEHGYRTELVNTAAVPQYDGLKHGNDHTDARHLAHLMRLGILPTGYIYPRPGRALRDLLRRRFHLVRMSTTLMQSVQCAWARRTAQPLRSNAFRQLDEAAIAQAITDPIECQALRAQYMAWRALDAQVDQIERWVLQHQGSSATLAALRTVPGIGAVLGSTIALETGVIDRFASVADYASYCRMVDSQRLSNGKRKGSGNAKCGNRYLCWAFIEAANYAVRFCPEAKRWYARKLGKRKLRTIAIKAVAHKLARACFYLMRDGTTFDAERAFG

SEQ ID NO: 392834 - protein, 420 aa, unidentified
MSRHAAYAALVGIDWADTKHDFCLRATASEQEEYGVIGSMPEEIDHWVRGLADRFPGGKVAVCLEQSKGSLIDALLKYDHLVLYPINPRMLAKFREALAPSGKKNDPADAQLLLELVSKHRANLKPWRPADEHTRTLQFLVEHRRTLVSDKTRLTNRLTSVLKGYCPHVLRWFAALDTPLVCDFLKRWPTLEAVQNTNDTALRRFFQAHQAHNPAINQQRMDEIRHAIPATTDQAVIRSSVMVVHTLVEQVRGLAEAIRRFEQEIGELTRSHADFPIFASLPGAGPVHASRLISALGTDRTRYECVEDLLTFAGIAPIIERSGKTMVTHFRWFCPKFLRQSFHEFAGQSIQYSRWANAFYRQQRVRGKDHQAAVRSLAFKWTRIIFQMWKRRTPYHERTYLAALQRRGSPLCHMLAEHPA

SEQ ID NO: 392835 - protein, 320 aa, unidentified
MSALSVMVGIDVAKAHVDVCVLGTHSDVQRFANDVDGHSALAAALQSLDVGLVVMEATGGYEAALACALQAVGLHVAVVNPRHARDFARSMGRLAKTDAVDARMLAEMAAVLVHREDLARYLRPVADECQQWLAALVTRRRQLLAMLGSERQRLQITNRKLHPSIEAIITVIKAQLDDLETQMVGHVREHFGELDGLLQSTNGIGPVASATLIAQLPELGRLNRREIAALVGVAPMSNDSGNRKGRRRVQGGRFEIRRVLYMATLTAARYNPVIRAFYERLKAAGKLPKVALVACMRKLLTMLNAMVRTGKPWDASLHSA

SEQ ID NO: 392836 - protein, 423 aa, unidentified
MRFIGLDIDRDFCEVAIAEGGELRLAGRVQTEPEALALFAQSLGGDDEVALEATGNALEIARIIEPHVGRVVLANPKAVKGIRRAGPKTDKIDARTLAQLLAGGFLPAVWLPDEQTRILRRRISARAQLVRQRTRAKNQVHATLMRNLKGKPPVSDLFGARGRRWLAAQDLPADEQETVAACLRQIGFLDGEIGLVERTLAEQLLASAELRRLLTLPGVNFVTAAALLAAIGDIRRFPSARQLVSYLGLDPRVSQSGVEPARHGRISKQGPGETRHVLVEAAWHAARTAGPLRAFHQRVAARRGGNVATVAVARKLAVIAWHMLSRGQDYAFARPSLTREKIRKLELATGAERQKGKRIGVWVTKEQHRLDKELAAQAELAYRRLVQDWQPAIKGTGAAPGRASCGPSSGQAARQETAPTPAL

SEQ ID NO: 392837 - protein, 338 aa, unidentified
MKTYAGIDLHSSNNYLGIVDDQDKRLFSRRLPNCIDTIVSALKPFRKTLTGIAVESTYNWYWLVDGLQDAGFKMHLTNPSAMQQYEGIKHTDDKWDSFWLAHMLRLGILPEGYIYPKRHRSIRDLLRRRMFFVQKRTSHIQSLQSMYTRHLGGKISSNEIKKLDPEHADKLFQDPYVALAVKNNIDAIGFLTTKIKNMETLILSKSKMKKPFQVLISTPGIGPILGLTIMLEVGEIKRFAAAGNYASYCRCVRSVKISNNKKKGQGNRKNGNKYLAWAYVEAAHLSIRYCPEANAFYQRKKAKTNGALATKALANKLARANFYMLRDQVAFKKEKLFP

SEQ ID NO: 392838 - protein, 360 aa, unidentified
MATCNLSQLQAFVDGSGGQPFFIGLDVHKASYHVALRRFDGAVHTLVTTAKPQVLIEKLTALGLTVAMAASESGPTGFGLARELTEAGIPNLVAAPSRIPRPVTWGAKTDRLDCVKLAEYAARGMLRPIAVPQKEEEAQRSLERRRHDLADDLRRVRQRIRSHLLYLGLHEPSNLKNWGKAGVAALGALPMPEAARLTLESLLRQMASIAGELAVVERQLEAICHQEGHARVIECLRSVPGVGLIVSATFRLELFRPERFTRAEEVTSYLGLAPMVRQSGESKGKAKLRPVGQTRLRSLLVEAAWKWRASDPQARAWYQKLVGKSGLPQKAIVALARKLAVILWRLSLEQRHYRFEAVAA

SEQ ID NO: 392839 - protein, 383 aa, unidentified
MENSSSDYCPKTSVIVSVELSKRNWLVASLSPGAAKPSLRTIPAGSSAALISHLRNLECKAADRISEPATIRLCFEIGYDGFWLARLLRSNDIDTYVLDPASFLVSRRGRRAKTDRIDAEAMIGILKAYLAGDKSVCRVVDVPSPEEEDARRVMRERGDLVHERTRIVSRIRGLLALQGIRSVKAIKGGDWSSQLDDMRTGDGRPLPPNLRRQIERCFGRLALLNDQIKDIERDRAEVVLHEESTFPCRDKAVRLEQLKGIGPNSAAMLVAEVFCRKFESRRHVAAFLGLAPAPFASGDVSRDQGISKAGNRSTRVQMVELAWCWLKYQPSSELTVWYRSRFKGNGARAAKVGIVALARKLLIALWRFVETGLVPQGAELRAA

SEQ ID NO: 392840 - protein, 343 aa, unidentified
MELYIGLDVSLASTAICVVSSHGKVIRETIAASEPEELERALRSLSGSVVGVGLEAGPLSQWLHRHLTDAGFDTVLMETRQVKGALKAMPIKTDRRDAEGIARLLQMGWFRPVHCKSISAQEMRALLSARKAIQQAIINLELSIRGVLRNFGLKMGRVAEGRFEDRVRELADGNAMLEAAANPILTARRALRTELADLEKLSRDHAKSDPVCRQFMTMPGVGAIVALTVKSAIDDPDRFRSSKDVGPWVGLTPRREQSGERDIMGAISRAGDVGLRTVLYQAAMVMLNKGCPSWLTTWAWTVAKRRGKRRATIALARRIGVILHRMWQDGTEFRFARAEEAAA

SEQ ID NO: 392841 - protein, 347 aa, unidentified
MEQIIRIGMDTSKHVFQLHGVSAAELPILRKKMRRREMVDFFAKCPPTVIGIEACAASHHWARLLRGFGHEVKLIAPQLVKPYVKRGKNDAADAEALCEAMSRPTMRFVPVKSVDQQAALMLVGLRERAVSAQTQIANTIRGYAAEFGLTAAQGMSHIPLLLERMMINDSIPALARELFASLAEEFAQLGERLKEVEAKVMAWYRNNERCRRLAKIPGVGPIGAILLVMKAPAPEQFTSGRQFAAWIGLTPKDHSTAGKVRLGVITRAGDETLRKTLVVGATSSLRQVRAGRGRNASSWLVELLKRKPPKLAAIALANKVARIAWKMMVTGEDYKGDAARPALACAT

SEQ ID NO: 392842 - protein, 345 aa, unidentified
MELHTIGIDLGKTVFHLVGLNLHGEVVVRKKFSRTQLLRFTANVHVQLIGMEACGGAHFLGRALREQGHEVRLIPAQYVKPYVKTNKSDYIDAEAIAEAVARPTMRFVPIKTDDQLDLQSLHRVRERWVMRRTAVINQIRGLLLERGITLRKGRCHVGAALPGILEDADARLSGALRMLLAQLKLELDHLDLRIDEADALIKKTACENEACQRLMAIPGIGPVTATAVIAAIGNGGAFRKGREFAAWMGVVPREHSTGGKQKLLGISKRGNSYLRRLFVQGARAVMQQRTKQSSGLNRWLTQLTSRTHRNVAGVALANKMARMAWAVLAKNEQYRPPVLADVAAA

SEQ ID NO: 392843 - protein, 378 aa, unidentified
MKKIMRYVGMDVHGETIAIAVVDEAGVGREVGVIPNRPEAVRKCLKKLGRPEELHCCYEAGPTGYVLYWQLVRLGIECVVVAPTLIPTKAGDRVKTDRRDARKLARYLRSGDLTAIWVPDEGHEALRDLVRARQAAKIDEKRARHRLQKFLLRHGQRPPQGVKAWSARHRAWLQTLQLEHATLQVVLGEYCHEVVHSEQRVARLDTAIEQAVEDAPEQIRAVVAALQGLRGVRKVTATAVVAEIGQFSRFAHPRQLMGYSGAVPSEFSTGGPGKHQRGAITKAGNAHLRRLLGEAAWCYRFRPAVRYPLQRRQQGLPAAVTEISWKAQVRLCNRYRRMVVRGKLKQKVVTAISRELLAFMWAIGVAVEKQQQHPRAAA

SEQ ID NO: 392844 - protein, 344 aa, unidentified
MHIASIGIDLGKTTFHLVALGERSKVLVRKKFSRTQLLAHTANLQPSLIGLEACSGAHFLGAALREQGHEVRLIPAQFVKPYRKSNKNDFIDAEAIAEAVTKQNMRFVPIKSQEQLDVQAMHRVRDRLVQRRTALINEIRSFLLERGITFPAQPIHLRQNLPTVVEDCEQNLTPRLRWLLDRLWQEWKQTEIDIETVTDEIERIGSEDERCRRLRQIPGFGPLVSTAMVAAIGNGAAFRRGRDFAAWIGVVPRQYSTGGKQKLFGMSKRGNIYLRRMLIHGARAVLFRVKYDTGGLGQWVHRLSQRAPRNKVVVAIANKLARIAWAVLSSGKDYRHQPLQRAAA

SEQ ID NO: 392845 - protein, 452 aa, unidentified
MKVMHERVAGIDVHKDMVKVAIRSPGEKRWARKTEVLTFGTFYGVLREMARELRRRGVTHVAMEASGVYTEPVYYALMEEDFDEVLVVNPAHVKAIKGQKTDAKDCARIAELLECGLLQGSYLPPPELKEMRDLTRYRIKKVQARTSEIQRLGKTLESAGIKLGSVASDITGTGPLEMIESLVNGERDGVVMAGLARGKARTPQKMASLSMALEGRFTRHHAAMCRLLIDQVNALKAAVAGVEIQIAAKAAAWEREIALLKTIPGFGDATAWTWIAEIGPAPHQWFATHEKLACWAGLAPGNHVSAGKRRYGRVSDAGTYIKPALVQAAWSAVRVKGRLQARYNKLVRRMGGPKNPAARKKAIVAIAHTLLKIAYSVLKSGRPYQDPGADFYARRESPAQRQAYHQRQIQKLYPGCTVTVTITPPPSGSTDAAPNAGQPGAPPPAGHVPEAV

SEQ ID NO: 392846 - protein, 403 aa, unidentified
MKTIFVGMDVSKDDFKAAVKDERNNLVKPVRTYRHDRPGLEAFDKDIRAIKEQLRCGAVFGMESTGIYHLSLYQHLVEAGEHVKLFNALELKRFKSSIRKTKTDDLDAQAIAEALLLVREPSYHPMSEPELVHIRELCRLRNRLVKKASQCKNQTVRDMDVLCRGYTTLFKDIFSPSSIAVMKAVVRTSRLFETDVENLTKILSKYMPKSAAEMKAKKLQALFQNTVIPEHMKDICVLELHMLVQQYELLKQQVKRIERRIETQIKKTNTHLLTIPGIGMLTAGAILGELGNLSRFTSIDQLTAFAGLDPSVMESGRSRRTGHISKRGSPMLRSALYDAALPASRVNPVCRQFYQRLKAKGKHHKICMVAIARKLLHIAYSVETNQRDFYVPAYITEQQADTA

SEQ ID NO: 392847 - protein, 387 aa, unidentified
MRSTTDHPISKQTAHPECARLHVSLELSRKIWLLTSLAPHSEKMSKHSVPAGDAPRLLQLLARLKANSEQRIGAPVEVVVIQEAGLDGFWLHRLLEANEMESRVVDPASIAVPRRHRRAKTDVIDGETLLRTLGAWKRGEPRVCAMVVPPSADEEDRRRVSRERETLLRERIQHTNRIRGLLFGQGITDYNPLRKDRRTRLEKLETGDGRPLPAQLKAEILREIDRLELLLDQTDELEAERDAHTQATAAEMGSTIAMLMRLKSIGPEFAAVLYLECLFRHFNNRRQVAAYSGLAPSPWKSGSIDHEQGISKAGNPRLRTMMIELAWMWVRYQPDSALSRWFNKRVGSERGRVRRIGIVALARKLLIALWRYITQGVIPEGAVLKTA

SEQ ID NO: 392848 - protein, 423 aa, unidentified
MPYRIAGIDVHKKKLAVVVADVEVEDEYQFERRWYGSNPEQLQVLAEWLIQQQVEEVVMESTAQYWKPVWGALEQYWKPSCEKREGAGRMSGTLHLAQALSNRGRRGRKRDFRDAERLLKRLVSQELTLSFVPNVEQRLWRTVTRTKYQLRRNKVRLHNQLEALLEEAHIKLSSLVSDLLGASARRMLKALADGETDPAALAALADQRLRATSAQLRDALGACTEINPVYRRLVKMALEELQLIEQQIGQLDQEIASLLRQHQDAVQRLAEVPGLGVDSAQQIIAEVGAKATTFASAKNLSSWVGACPGEEESAGVNYSPRSPKGNRHMRRLLNQAANAAAKHKGSIFEIVYRRLVPRLGHNKTIGAIAHRLCQLIWMILNKGVRYEERGPAVSENSRRARTSRMIRTLRKLGYRVELQAHPA

SEQ ID NO: 392849 - protein, 359 aa, unidentified
MQQTRNISQQKLTIGLDLGDRNSWYCVLDEAGQIQLEQRVRTSAKTLGEVFGAMPRCRITLEIGTHSPWISRLLSELGHEVIVANARKVRLIGESRQRDDRLDAQTLARLARIDPQLLCPVKHRSAQAQADLMMIRARAGLVRARTGLVNAARGLAKSYGERLRGCKVRNMNPEKAEGLSPELQRALEPLLSAIEELNERICEYNDRIGALAQQSYPQVALLKQIKGVGTLIAPTFLLTLEDPHRFGKSRDVGCYLGLQPGRRNSGQSEPQMHISKEGDPYLRTLLVQGAQHILGPFGVDCDLRRWGLKLAERGGRNGKKRAIVATARKLAVLLHHLWVSGEVYEPLHNSSQTTVAAAA

SEQ ID NO: 392850 - protein, 478 aa, unidentified
MKEQKTENIYRNGNQALREALALYKPSELLYVPIEIGKFNHKALVSNFFGDVLVKPFEFANKKHGLRFFLEKVRTAAKSTSCKKIFAACESCGHYHLNLVHYVKESGLPVEAINPRDTRKESPSKDAKTDTIDLKAIAGVLIQGKGARQIIPQGVYYRLQRATRTRCKFISYQTSSRNIVTGLVDRIFPGLWDKDDSIFSQRWGKGSLLVIEHYPHPGQVMRLGEERLARFLRKNNTKLGTDTSKKIVGAAKDCLAKPVEEMDIDILSLKSHIACLKDYGEIINRLERETAILLLQTPGTYLLSIPGISVTHASQFTGEVGDIRRFAYANQIISYAGSCPRVFESVEYQAKGLPISRRGSKFLRSCLNQAALVLNKWCQPFHTYYTRKSTQKNDRPGIARIATGNKFVKLAFALMKNEVLYRPQGLLLDEKSYYAGVWKKILKKLEKFDLSTLPQPNYLLKIKSWIEEKYGVALPLKV

SEQ ID NO: 392851 - protein, 356 aa, unidentified
MSTITLGVDLAKNVFSVCAMDGAGHVVQRQDLKRDAFAQWLAQLPVGSVVAMEACAGAHHWARRSLEHGLQPRIIAAQFVTPFRKSRTIKNDRNDAEAIATAARQGNMRFVPVKTLDQQARLTCHRVREGYKVESLALGNRIRGLLAEFGIVVAQSDVALRRVLADLDAHAGLPGEVCNLLRELRAHWARLHEAVDACDARIADHVREDTRCQRLREIIGVGPITADATVATVADAGLFKNGRQLAAWLGLVPTQHSSGGHARLGGISCRGDAYLRTLLIQGARSSLQRAKAVAIDKATPEQRWIRMLDARLPFGKVLVAIANKHARQIWAMLAHDVDYDPHACLAHPMHRQIQPA

SEQ ID NO: 392852 - protein, 356 aa, unidentified
MSHDVKYIGMDVHKEAIVIAVLNGSGKLVMETILETKASSILQFIHGLRGELHVTWEEGTWAAWLYDLLQPQVQQVLVCNPRRNALLKEGSKSDKVDARKLAELLRTGMLRPVYHGENGLRTLRELARSYQTISKDLTRVMNRLKALYRGWGIPCAGTQVYAPRYREEWLSKIEQAGVRRRAELLYQQLDGLQALRREVRGEFLAESRKQKAAKLLRQIPCIGPIRAGLLIALMQTPHRFRSKRQLWTYSGLGIETHDSAQYRYVGGQLQRSKKPQQIRGLNQNHNHEMKGIFKGAATRASCGTGPFREFYAALLDKGMKPEMARLTLARKIAAITLTLWKKEERFDAEQLKTQAA

SEQ ID NO: 392853 - protein, 405 aa, unidentified
MSKKRNKVCGIDVHKRFLVASILDNEGNCETKRFEQDLDELILLKNWILDSGCESVAMESTAEYWRPAYGILNPEINITIGNAYHMKGIPGKKTDVLDSQWIAELELNSLITPSRVFTGDLYELRTLTRARNKMVNNCTVFKNKILHQLDVCSIRLCTVLKDVFGKSGYALLKGIVERKTQDEIIKALPAKTRKIAPVFFEQIPDYIPDSAIFLIDSMLKIYDNLQVEIKRIEERIKFYLKDKENELRILMSVPGIGIVIGSNLLAEIGDIHDFPTADKLAKWAGLTPSVYQSANTNYTGPITKQGSKYLRWALIEAAHSAIRRPGKLNDYFNGLLPRKGYKKAIVAVARKILRIVWHLLINNEIFEDGIPRVKTVKIPKFPEKIERVGIAKIIQLLSRGAEIIV

SEQ ID NO: 392854 - protein, 421 aa, unidentified
MNQLADTEYSAYVGIDWASAKHDICVQAADGGAREFACISSQPEAIETWAQDLYGRFGGLIAVALELSKGPIVSALQKYDFFVLYPINPSTLAMYRETFTPSGAKDDPTDAELAVDLITRHPERFTPLKPQSTTMRKLIGLVEQRDKFLSDQGRVVNRLGHALQQYYPQVLEWFNEHNTVVFCDFVSQWPTLNQAKRARKASLERFFKSHHVNSAELIEKRITAIKAAMPLTLDAAVIEPHCLQVEILVEQLRITIKALQRFDDEIAVTAQKLPDYDLLFSPLPGAAKVLAPRLLAAFGEDRQRYPQADALQKYSGIAPVTKRSGKSTWVHWRWQCPTFVRQTFIDWSAQTINKSAWAGAYYRQQRAKGCSYQVAVRALAFKWIRILHSCWQHRIPYDESKYLEALRRKGSPLLKYLVETA

SEQ ID NO: 392855 - protein, 339 aa, unidentified
MSIVMGLDQHRGQVTGEWIDTDTGEIQRTRVTPADRSGVRKFLQRFDGRELEVALEATTGWRFVVEELRRVGATVHLAEPAETAARRGTKKRPKNDRADARHLRELLMIGRLPESWIPPDHILDLRARVRLRHTLSEQRGEWQQRIQATLYHQGCPQRRQLMTAEGREWLAAQSLPAAARETVTIALAMIDSLDRQMLPLEKELRAYARRQAGCKALMAHYGIGELCAVTILAELGDCTRFSTSRQAVRYAGMDITVHQSDQRRAPGHLSRQGPPALRWALFEAAQQTRRRTTSPDRGYYDQAAERIGGNRACLSLARKLLKRSYHTLRELGEDALQPA

SEQ ID NO: 392856 - protein, 396 aa, unidentified
MATIGIDIGGRSHALARCRDGEAKADREILRVSQSRAGFAALDAWFDRQAESVTLVTMESSGHYWMPLASHLRRHDVPVAVVNPLAAKYFAKSRLVRTKSDPADARSLAEMAMRDTPPARDPLAGAELRQAARFAMTLVTEQARVCQRLIRLVELGFPELGELFDDPTCRTARGVLRIAPTARAAVRRRTSTLANANAGPGHRRLGPARAERLQAAAADSIAVPELDAEVAFEVGLLLDQYDLLERQIAAADVRVAELLDGETARRLRTIPGVGPAIVATLIAEIGDIGRFSDFDQLLAYAGVHPAERSSGRKGSNPETAWHMSKAGNSQLRAAAYRMAVVGIQHNPVIAAHYARKRVAGKSKMNALGHCMRKALSIVWGVWRNGADFDPDWGVEA

SEQ ID NO: 392857 - protein, 348 aa, unidentified
MILVGCDLHTRKQQVALLNTDTGELWDQELSHDGDAIERFYATLPPPVTVGIESTGYSLWFHALLPRLGHTLLVGEAAKIRAMVVRKIKTDRRDARHLRNLLKDDRFPVVWIPDPATRDLRALIKHRLRFVRIRTMVKNGLHAIALNQRLALGPSLWSRAGLAQRHALVLPPHTRRRRDDSLELLQWLNGHIDELDLHVATAAAADPDARRLMTHPGVGPLTALATVLVLGPVGRFPGSKHVVSYIGLAPAVSASADKYRLGHISKQGSALLRWALGQAAPLATRGDAALKRIYFAVLRRRGRPKAKVALARRLLVRLYIMLRDQIDYDEFCRRGRTQRPGLEARIPV

SEQ ID NO: 392858 - protein, 347 aa, unidentified
MNFYTRQHKHYCGIDLHAKAMYVCILDQHGTKLVHKNLPTTPEAFLRIIAPYREDVVVGVEGMFTWYWLADLCAKAGIAFVLGHALSMKAIHGGKAKNDKIDAQKIAVLLRGGMLPQASVYPAAMRATRDLLRRRCHLGQKRAELLAHIQNTNSQYNLPEIGKKLAYKANREGVEEHFPDPRVRKTIAVEVSLIDHYDKVLGEVELYITRTAKAHDMQTFSRLQSVPGIGQILALVILYEIQDIARLPRVQDFVSYCRLVKCAKESGGKRLGTSGKKIGNVHLRWAFAAAAVLFLRQNQLGKEYFTKLEPKHGKAKALTVLAHKLARAVYYMLTREQAFDLNRFVTA

SEQ ID NO: 392859 - protein, 431 aa, unidentified
MNNRMNQRLEEITVTTLIVGVDIVKITHWARFTDYRGVEVGKAVKFKNNRDGFESIVARIEQIRNNKPPRNIFTEVIVGMEPTGHYWKAFAHYMMKAGYRVVGVNPYHTKRAKEFDDNSPTASDKKDAITIARLVKNGSYFAPYLPTDIYADLRILANSRENTIQRNNAVKNQITAILDEYFPEITEAFKEPLMGKASRQVLKNCPFPSLILNLGEVGVLAEIRKTVKKTVGMQKVQKLIEAAKASVGVEYGLATSKIRLGQLIEELEMVEKQLAEIETAMEELLYKTGYAEMLLSIRGVGIVTAARFLGEVGDPLRFKDARQIANYAGYNLIEDSSGNSKSGTVISKRGRNRLRALLYQMAFTMVSKNSELKALHQHLTTRTKNPLKKKQSLVVVSKKIITVIYSMLKKQAMYDPARVLGAVRLEIMQAA

SEQ ID NO: 392860 - protein, 368 aa, unidentified
MSAEGEAIRSNDYRKDTTVKAPSTRPAAVLGLDVGKSSHWACLIDRGGEVLASAPVRNREAELDALFASAPAGTLVVVDQFRNIGSLAVRRARAAGLGVAHLPGLAASRAAGLFAGEAKTDERDAAVIARTALGVPDSLSGVPGRGEALEAARALSSQRDHVVACATRDKNRLRAVLLESCPALEAAVDLSDRRWLELLAGFGGAWGIARSGAGGPRAEAAGEAAAASTAPPPALVEAENRQVRFLAARISEALDEAGALEAEAAALLEGDETYACLLTVPGIGPRTAAQLAVSVDIGRFPDHDHLASYCGIAPRVRSSGTSVRSVRASRRGDVSVNIFFTIFTNVFSPIAPTRMRRIRQRGCAAFGV

SEQ ID NO: 392861 - protein, 320 aa, unidentified
MRNAVGLDISKTTFDATAIIGGIEKSAKFDNDSKGFEQFKDWLDKLKCPDAHICMEATGNYYEGIADYIGSLYKVSVVNPLKISKYAESRFTRTKTDKQDAKLIAEYCQTAKAQDLVIRKPVINDGYKLKRLSALYAQLTADSTAQKNRLEAAKDTFVVKICQSNIKHLQRQIKAVKKELEKLTKQPALKEQTDRLATIPAIGRLTAVMLLNYLSGADFPTSNKFAAFAGLTPQIKDSGTSVRGKPSLTRYGNRRLRAMLFMPAMVAYRIKAFPDFIARLEAKNKPKKVIIAAIMRKLAVVAYHVHKKGEDYDPTRYKAA

SEQ ID NO: 392862 - protein, 340 aa, unidentified
MKFYCGIDLSARDCHVCVIDEQLKVVVEQKLRNELPKICQLLEPYKANLKIVVESTFNWYWLIDGLQAEGFEVVLAHTLGLYLITGAKVKTDRRDAYALAKLLLVGAVPAAYIYPVATRPVRDLLRRRLHLVQVRAGEYGSLRRLLLRQGILSSKQQEIKRATEAELEQWFEHPLVRLHASQELQRIELYSAQIAELEKTILLQAQTEQSYELLLKLPGVGQIIALTILYEVGELTRFANVKVFSSYCRVVPGIAQSGNVSRRGRASKQGNHYLKAAFSQAAVHAVRCYPKVRRYYERQLKRHQGRGRQMICYNIIAHKLAQAAFHVLKEQTEYREERGR

SEQ ID NO: 392863 - protein, 420 aa, unidentified
MKPWPEITHYAGFDWAKDHHEVVIVDSKGEIVADFVFDHSLEGWQRMVKETSAYPNLAVAIETSQGAAVDQLLQRQYTVYPIHAVAAQSYRQRKAPSGTKTDHLDAWGLADALRVDGHGWKVLQPMDPLTQQLRLLCRDEVALIQQRTTLVNQLQQALAEYYPAALEAFDDWTDAFTWEFVLAFPTPQALVKAGKRRWEKFLHTHKLWRPETAQRRLKLFSQADQFQASDPIVRAKSQLAVSLARLLRTLREQLELYRKEIEAWFKNHPDHDLFGSLPGAKKVLAPRLLAAIGNNPERYGSHEVLQCIAGTAPVSYQSGKINKVRVRWACDKFLRHTVHLWADCFRKASAWGQAYYEKKRAEGMSHACSLRCLGQRLLKIVFRMLKDKKPYDAEFHACNQQKHGSWVLKLVNPPAPKTSE

SEQ ID NO: 392864 - protein, 351 aa, unidentified
MMIIGVDYHPSFQTIAFLMEETGECGEQELNHSDGQAEKFYRDLQQRGISVRVGMEATGYSRWFERLLAELGFEVWMGDPAEIKAKRVKKQKFDREDARLLRRLMLENNFPQIWVPGPENRDLRQLLWHRHRLVQMRTRIMNQLQALAMNEGYRWKKKLFSEQGRAQLEKLSLAPWAGRRRQELLELLDRMNPTIEELTAAVEREARKRPEVLRLMTHPGVGPLTALAYVLIIGTPTRFQRGKQIGTYVGMIPCEDSSAGKQRLGHISKQGSSLLRFLLVEAAQAAARIHPDWRRRYMHLAMRRHKSIAKVAMGRKLAIRLYWMWRNGCEYSPSLEFGSYAGQLGTRHGVK

SEQ ID NO: 392865 - protein, 409 aa, unidentified
MGLYCGIDWATDHHDVAIIDSDGHVVARGRVSNDAPGFSALLTLLAEAGDSAADPIPVGIEIDHGLWMAALRETGRVIYPINPLAASRYRTRYSVSGAKSDATDAVLLANIVRTDPDAHRPLPADTEAAQAIRVLARAQQDAVWARQQVGNQVRDLLKEFYPAAIVAFADLDGGLTRPDARAILAAAPTPAQAAKLTPARLRRLLTKAGRKRYLDRDIARLREVFSDTYLRQPAAVENAMGIHLSALLGQFEAACTAADALAEAAIAHFERHPDADIITSFPGLGMLTGARVLAEIGDDRSRFTQARGLKAFAGSAPITRASGKKTVVLHRHIKNRRLAAVGPIWALASLRASPGARRHFDTRRAAGDWNHQAQRHLFNKFLGQLHHCLHTSQHYDEHVAFPPPLQLAA

SEQ ID NO: 392866 - protein, 357 aa, unidentified
MESQDIKYVGIDCGKKSLEVVRINSEGSYERQQFSTTEIGISKLINWLNPNDVVDLEAGSQSFRIAKSILNKGIQVIVLNPGDLATIYQSLKKTDKEDSLKIARLIQRYPMEELPVVPVPTDEEEDNRRLCTEQENWTRQLTQCKNRLHSLFTQAGLTEITKKHLRTKSSRETSVTLLPSRYQKEAERILQVLDLVEQNLKLIEEETKDALKKNPAYVQTIMSMPGIGMVTSLAIMSYMGDCKRFSSGKQAAYYAGLVPRVDISGDTVRYGKIVSRGCHSIRRVIVQAAWSLVRCQHGGKLKEFYERLYSKKGAKKSIIAVSRKMIEVLYSMIRTGALFDSMPEEVLHRKLAQHGLM

SEQ ID NO: 392867 - protein, 357 aa, unidentified
MRFYTTQHPFYCGIDLHARTMYVCILNQAGETLLHRNMTATPEALLKAIAPYRGQIVLAAECMFTWYWLADLCADHGLPFVLGHALYMKAIHGGKAKNDKIDAQKIAVLLRGGMLPQAYVYPAEMRATRDLLRRRMHLARKRGELLAHVQNTNSQYNLPAIGKKIAYKANRDGVAERFADPAVQKSIEVDLALITYYDALLRDLELTIVKTAKHHDANTLYLLQTVPGIGKILSLVLLYEIHDIKRFPRVQDFASYCRLVKCARESAGKRSGTSGSKIGNAHLKWAFSEAAVLFLRDNPAAQKLLARLEKKHGKGKALTILAHKLARAVYYMLQRQTAFDLDTFLHGSGRGAGELQA

SEQ ID NO: 392868 - protein, 435 aa, unidentified
MLHIEHPVRTATRLDDAMPIAMDATLFVALELSLSSWVIVASAPGENKASKHGVAACDGPVLLALLDRLRLRAEQRCRRPVAVVVMQEAGRDGFWVHRLLEAHGVRSFVVDPSSIAVNRRSRRAKTDRIDAEAMLRTLMAWARGERQVCAMVRPPTPEAEDTRRINREREALLAERIRHANRIKGLLATQGVFGFEPTLRDRRARLAAVRTPEGAALPPRLAAEIERQMDRLELAMQQLAAVEAARDAALAAEDVASPPSAAIPHAVACGTFGCSAQDAGTAVDDGANGTAASLPQHEGPGARLLRLKGIGPETASVLAGEAFFRDFRNRREVASYAGLAPSPWQSGGVDHEQGISKAGNARVRKTMGQLAWLWLRNQPDSALSAWYRDRVRDGRGRIKRIAITALARKLLVALWRFVTHGLVPTGAVLKPIKAG

SEQ ID NO: 392869 - protein, 388 aa, unidentified
MICAGIDIAKLNHVASVVSSDGEVLVEPFQFSNDFEGFRSLSLVLDKFDREKLLIGLESTAHYGNNLVEFLVAKGYRFCVLNPILTSTKRKKSVRNVKTDKVDSIVIAKTLMQEKHRLFEKQDLDCLRLKNLGRSRQDLMKKRTTCKIKLTSYVDQAFPELQYFFNGVHHKAVYALLKEAQTPEQIASMHMTHLSNLLRVASHGHFKKEKAQELRVLAQRSVGSNDSSISIQITQTIEQIELLDRQIDDDEAKIEEIVKAMGSVIMTIPGIRYTEAGMILGEIGDIHRFPNYSKLLAFAGLDPIIRQSGKFNASHTRMSKRGSRVLRYALVYSAHNVVKNNETFRKYYDLKCSQGRGHYAALGHCAGKLVRIIYKLLSEEIAFDPSKL

SEQ ID NO: 392870 - protein, 346 aa, unidentified
MKVVYQTCCGVDVHKSFLVATIIKTSSGVEPSYHKKRFSTFNNSILQFKEWLIENQCRDVCMESTGKYWVPVFNLLEDEINVTIANPKWVKAVKGNKDDTKDSKWIGDLFRLGLVPGSYIPCKPIRILREFTRYRYKLTSCRSSEKNRFQNALTVCNVALDSVVSDIFGKSATSVIDYLIEQSDNSINHEEIASRLLRSLKKKSVSVIESVEGYQMTDSQKYRMCLVRAHMDYITSTINDIDTMIDSLIAPYENAVQLLCTIPGVDRNSAITIISEIGTDMAQFSNSKRLCCWAGLTPGNNESAGKKKSVRITRAGVYLKPALVQVTHAAVKSDKSPYYKTKLGIC

SEQ ID NO: 392871 - protein, 301 aa, unidentified
MKKITTIGLDLAKHIFQVHGADADSSPVFNRRLRRAEVLRFFEKQPPCLVGIEACGSSHYWAREIAALGHEVRLIPPAYVKPFVKRGKTDAADAEAISEAVTRKTMRFVPVKSIEQQTAAIVLKARGLLVRQKTQAINALRAHLSELGVIVGIGTAKVAGLIDIVRDETDARLPQSARFALSAVADQIEALAWQIARLERDIVAEAKRDEGMRRLTTIPGVGAITAASIKALIPDPAGFKSGRHLAAWLGLTPRSHSSGGKERLGKISKMGNTELRSLLVLGATSVLRHARGNKNASKWLG

SEQ ID NO: 392872 - protein, 316 aa, unidentified
MSAQPFVGIDVCKATLDIAVRPTDEIWTVHNDDRGITQVTACVRAMKPALVVLEATGGLEVPVATALAAAGVAVAVVNPRQVRDFAKATGRLAKTDTLDARVLAHFAQAVRPEPRPLPDEQLRQLSALVTRRRQIVNMITAEKNHLGSARSKSIRDRIKPHIEWLQQELADVDDELGRSIRQTPIWRENDQILQSVPGVGPVLSLTLLAELPELGHLDRKKISALVGLAPLNRDSGIWRGRRAIWGGRAQIRAVLYMSALSAKRFNPVIREFYQRLCEAGKLKKVALTACMHKLLIILNAMIKNRTLWQYPYAPAP

SEQ ID NO: 392873 - protein, 388 aa, unidentified
MDVLYQSCAGIDVHQATVVVCILHGPLTSTRPKREMAQFDTTTKGLKACHDFLSQFHVEAVGMESTGVYWRPVWHELCDDFELILAQPAHMKSIPGQKTDKKDAHWIAQLTRIGLLPRSFVPDETIQELRELTRQRKHYVESRNRETNRIHKILQSGGIKLTTYIEDIMGASGRNLLQLLIDETPLTPRMIHQSVYTSLKRKIPQLLEALDGYFSAHHRFMLGQSLEIYDFYQKQIDCLEERINGYLNLYERPVEILDSIPGIDLITASVIIAEIGVDMSQFPTAGHLASWAGLCPGNNESAGKKRSTKIRHGNSYLKRCLCQAVFAAKKQKGSPLAERYYQIQSRRGPQKATIALAHQLLKIAYILLKENLTYQEFVLQKRLLETSQ

SEQ ID NO: 392874 - protein, 433 aa, unidentified
MPTTHPYDLVIGLDRSDRKADLHLIDTRTGTVEKQTVATSPEALHDWLVQLRRDHPQARVALCLEQPAANLIVFLETYSWITLYPINPISLQKFREAFVTSRAKDDGKDAQYLAELLLSHPDKLKAWQPDDSQTRQLQQLVLHRRAVVDQRTGLTNRLKALLKQYFPQALDLCGEDLWRPLARAFLLKWPTLQSLKKARKESLKQFYYLQGSRSQTLIEQRLERIDKAVPLTDELALLQSYTLRVQLLCKELQLLLKTLQQFDQQIAKVFQQHTDRPIFEAFPGAGPVLAPRLLASMGSERERFAQPENLQSFSGVAPVTKQSGGTCSIHRRYLCPKFLKQSFHEYAKESILHSRWAAAYYGPQRNKGCGHHTAVRALAYKWQRIIWKCWQTRTIYKEAIYEAALKKNKSPLIGLLDQIELGKSPVKSRAKKS

SEQ ID NO: 392875 - protein, 520 aa, unidentified
MATSRSRSRPSGRRVPMSVGKPRGVLHPRVQQVGPEHFGILCFDCAKARSKLLLADFYGRVLLPPTVVAHTRPALDAAVAQIRDAFAQHQLRDGLVAIERTGRYHRVVQRTFAAAGFETRILHPFVTKQYRQPVDPGNKTDDADLTAIHRATVTGCALLEATRDEAWTTLQLVIRHRRDLVCKGAALNCQIRDHLEAALPGYAACFDKLWESPIPWHLLRSYPTAGQLREAGLTTLCHSLRQADIRFQQRTVQTVLDWAEQAAPGDVAAGQHLRIALALYDDRHRKTQEIQALERDIAGRLVQTPYVLLLSFPGINVVSAADFAGEMGPIEHYANAKSITGRAGLRPSRYQSDQVDKANGPLVRHCNRSLRAAILGIADNLIVCNHHFQALATQWTAQGKDPRHTRVKVGLRLCRIAFQMVAGRHVFRHPSIQGRHYILDKLTAFHRAHATGMVEVLRDLQAALGQVPPREHAAEAKPLQEELQRIHDGHRRGPQVLGDILPIVLARLGVGVVQSPESGE

SEQ ID NO: 392876 - protein, 439 aa, unidentified
METYAGVDWASNKHDVLVADAAGEKLLATTFAHDEKGLRSLCRELVRLKVRLVAVERPDGLMVERLLDSGLRVLALHPNQVAAARDRFRVSGGKSDRFDCFVLCELARTDHHRFRVLEPDSDQTKALRALTRGREDLVGTRTALVNQLRAELERFWPGPLRLFSDLHSKISLAFLARYPSPADARGLGEARLQTFLARERYSGRQQPAQLLFKLRQAPEARVGELELATRRALVLSFVAMLKTLNGQIKTLERQITTQVRAHPDGPIFLSLFKSPSSVVTAAELLAEMGDCRDRYPNRDALCGDAGQSAVAIESGKRKTARFRWACNKRLRQAFCTLADSTRHWHPCAQALYADAIAAGHDHPRAIRTVGRSWSRVVWRCWQDRTPYDPARHRALQRRLTVVIPTASGPVIDQAATKRMARALAITTAAPATAEVTATP

SEQ ID NO: 392877 - protein, 409 aa, unidentified
MQVVHERCAGLDVHKRTVVVCVLVPEGREVRTFGTMTRELMEMVDWLLGKRVTHVAMESSGVYWRPLFNLLEGRGVELLVVNARHVKAVPGRKTDVKDAEWLADLLRHGLLRASFVPDRSQRELRELVRYRKTLVEERARMVTRIQKVLEGANIKLSSVASNVVGKSGKAMLEQLAAGNEDAEAMAELALSNLRSKRGQLREALFGSMGEHQRFMLKSHLHLVEELDAEIEAVNAQLGERMRPFESQIALLDQIPGIGPTSAQQILAEIGVDMSRFPTADHLASWARVCPGMNESGGKRHPASTGAGNPWLRSTLIEVALAAVKAGRRQPNFFSARYHRLSTRRGPKRAAMAVAHSLLIAIYNMLRNGSYFVDLGPTHYDQRRRNLIVKRSVRRLEDLGYKVSIEEAVA

SEQ ID NO: 392878 - protein, 353 aa, unidentified
MTSTKYIGMDVHKESISIAVRNDAGKIVMECVIETKANIILDFIHGLRGELQVTFEEGTWATWLYDLLKPHVTKLVVCDPRKNARQGNKNDQIDARELSDRLYMNKLSSVYHGGAGVRTLKELARSYLTISKDLARVMSRVKAIYRSWGIPCAGKQVYAPRHRAEWLAKITEVGVLRRAEFYYQQLDALRSLRHEVRRDLLAESKKHKATKLLRQIPSIGPIRAALLIALIQTPHRFRTKRPFWKYSGFAIEMHSSADYRSVKGELQKSKKQISVRGLNRDCNHDLKNLFKSAATIASVKPGPFQEFYAALVAQGMRPEMARLTLARKIATIVLIVWKRGVSFDAKYLKSQTA

SEQ ID NO: 392879 - protein, 458 aa, unidentified
MTLLARLGEELPERYYLGLDIGYKEHVAVVIGLETFVRGGERWKRAHCLHFSSTQTGLSKFQHYLDEFSSDPQMFLGICEPTGGYYGATVYQYLLDRRYPMWMVENALTRHMREQIMGSIPKTDDIEARVMARICYLHEAVGEEFKLRPLRLAEPEDANLVALCRDSWKLNQMVVRERNQFGQLMAVVFPELKTFFTKSVASLASVSLMAAYPTAAELVAASAEEVQTVLWGAGAYHHARRVSELQELARHTSGLLPDPCRAWRLEWLTELLLSHLQAQAKLKKQVKMLVTRHPDYVWIAPVPYAGPATLGVILAVTGDVHRFRNYRRYVAYTGYYAGLEKSQTIDRTRMSRRGNRDLKRAYFQIAAPLVWFDQGENPYKTLFERKTAAGYPWYKAMPFVCAALARHIYHCLKFKQPYDVKKAFGVVSPASEQALLDLQADLDERFEVMEAHLIVEEE

SEQ ID NO: 392880 - protein, 448 aa, unidentified
MYHVGIDIHSKQSSLCVINRNGECIKRATVRGGTREVCQALAEFEGDLHIAFEASLGYGRWFEALSKIAKRVTVAHPGQLRLIFRSKKKNDRNDAETLARLAAVDALPAVHVPQLDVRHWRKLITSRQKAVSARTRIKNGIRALFREEGIATPRTLWIGKGRAWLNAYRFDDEMQQLDLDEFLLSLAEAEARVDRITARLDQIARAHPGVALLQTIPGIGPRTAEAVVAWIDKPHRFVKNNRIGAYFGLVPSQDASADRNRLGRITCDGPSAVRHLLVEASWQAIRRSPAVRARFERIMRDDPLRKKKALVATAHHLARVMLAMLKSGEVWRDEMGDDLQPAKRARSSRRRSSRKQIARRASKRTNDQAQTETSAEDSTQRSTKQTATRSTKQTATRSTQQPATRPTKRPAMRSTKQPATRSTTRPTKRPATRPKSPKENHQNKQTRV

SEQ ID NO: 392881 - protein, 373 aa, unidentified
MNYNTVYVGMDVHKESFSLCSFTIEEDKASHAQKVESDYKQVLKYLEFLRTIYGKDAYFICGYEAGCLGFTLYHQLTEHHVNCVILAPTTMLQQRGKKKIKTDKRDAALIGRCLAQHNYSPVHIPTEQDEETKEYLRMRTDHKLALKKIKQQILAFCLRHNYRYERGGSHWTQTHIKWLRALTPDGLYKEILDEYLLIFDHLSNKLERLEQRIEELGSREEYGADVKKLTCLLGVKTQTALSVIVEAGDFKRAAPADRFSSYLGLVSGVDSSGDGRQRLGITKAGNTHVRRLLVEAAQSYSRGQIGYKSRELKARQSGNTPQLIAYADKANERLRRRYYKMVLGQNKRSNVAKTAIARELACFMWGMMTNHIA

SEQ ID NO: 392882 - protein, 356 aa, unidentified
MLAELVDAVIGVDTHRDTHEVEIALPTGTPIATITISNDSAGFAALLAWIFDHAPGPRLAVSIEGTRSYGAGLARAVAAAGLVVVECEQPHRKVRRGKDKSDPIDAHLAVLTALRCDAGRLPTPRADGDREALRILLSARPDLTTAHTAPTNRLRALLLGADDADRQLARAALPDTVLAALARRRSPRDANRAQAVRHGELRRLAIAIRDGGRALKANRAQLHAIVDDLAPGLTDRRGVGPVSAAQVIVSFSHPGRCRSDAAFAALAGTSPLEASSGRTVRHRLNRGGDRALNCAVHTIALTRMRCCERTQAYVARRTAQGKTLREIRRCLKRYITRELYRALTTTMTPAMSPADA

SEQ ID NO: 392883 - protein, 429 aa, unidentified
MRTESTPGARGPVFCGVDTHADSHWLCVLDWRGRRVLSRQFPADAAGYEALAGAIAAAGEPACVAMEGTSSYGAGLTRHLASLGMPVREALSPAGTQRRRPGQGKCDEADAERAARAAMSGSRLGTPKSQDGWVDGVRCMLAARSGAVKARTSAINTARSLLTTAPEGLRSRFRGMAGPRLMEELPSVRAEGALGAALGALADLWAAARDAALDMERAIEASLEENCPALLAMYGCGPVSAAKLAVAAGDNPGRLRSEASFAAICGACPVPASSGKTVRDRLNRGGDRQANSALHEIARQRVMRDPETAEYAERARARGKSDREVMRCLKRYVAREAYRALMRPHEVRRPEDASELVAARRAAKVSQVRAASILGTSEKYISMLERGQRELKPIRRAYEAWVEAGLPLDWDRQAFEAERKMDSKKHLAK

SEQ ID NO: 392884 - protein, 430 aa, unidentified
MKSNTQNAKIEAITEKTLVLGIDVGSEMHYARAFDYRGIEYSKKPFKFSNTEAGFVTFKEWILDLKERHEKDKVVPGMEPTGHYWFNLGKFLQDNEMKPVLVNPHHVKKSKELDDNNPTKNDRKDPKVIAGLVREGRYMIPYLPDGVYADLRTASNIRFQLQAELTRIQNRISRWFNIYFPEYKTVYGKPDAKSGMLILKAAPLPEDILTLGIDGVNQIWRDAKLRAVGKARAKTLIEAAEHSVGSKEGAVSGKMEIRMLLEDYESRNTRLQEVMVLIEELIRKIPMAEKLLEIKGVGIRTVSGFLAEVGDISRFNNPKELQKLAGLALVENSLGKHKGETTISRRGRKRLIYLLFEVAMSLVSKNQKFRELHNYYTTRRLNPLKKMQSLMAIAAKLIRVFYAILTKGVDYDPKKMVSDIKRPAVYLQAA

SEQ ID NO: 392885 - protein, 351 aa, unidentified
MSQKANAVAIRTIGIDTGKNTFHLIGLDQQGTIVLREKLARGRVGRRLANVSPCLIGIEAGLATHYVARELLALGHDVRQIPPAYAKPFRQGHKNDFRDAYAIAEAVLRPSTRYVPVKTDDQLDLQALHRVRSRLVGQRTAVINQIRSFLLERGIAVRQGPRFLRQQLPEILAKRIDLLSPRMIGLIEDLAGDWRRLDERIECVTEEIEQLAHGSESCRQLMTVPGIGPLIASAMVAAIANGAAFAKGRDFAAWLGIVPKQRSTGDRTILGHISKRGNRYLRTLFIQGARVILLRPANWARHSFGPWLTAAAKRLHHNVLATALANKLARIAWTVLAQRRNYETRVVTEAA

SEQ ID NO: 392886 - protein, 352 aa, unidentified
MKILAIDLGKFKSAACVYESATGEHAFTIVRTKPAEIHDLLATHQPHRVVIEIGSAAGWVYDMGLTMNVEVQVANPNHEAWRWKNVKRKTDKDDALKLAQLSAMNQLPMVQLPSKKVRQWRSLICYRNTLVARRTAIKNHIRSILDRQGIGWPVGPSGWTDKAIVSLKRIAGFIENANPDGLWRFELRMELEAMLQAQMLINRVEVMLDALAKEDSRVHQLRTIPGVGPRLAEVVVAVIDDAKRFKNAKQVGAYAGLTPMQFESGTMNRQGGISGRGNKLLRALLVQVSWLGRRCNGRISKIFEDVCRGNKTRRKIAVIATARRLLVICWAMLRDGTTWREPGNPLGALSTS

SEQ ID NO: 392887 - protein, 351 aa, unidentified
MVMIGVDYHPSDQYIAFADSETGECGERRLNHGDGEAEKFYRELKLRAVEVRVGMEATGYSRWFERLLAELGIEVWIGDAAKIKTKRVRKQKTDRQDAQLLLKLLLENNFPRVWVASPENRDLRQLLWHRHRLVQMRTRIMNQLQALAMNEGQRRKKKLWSEQGRAQLEKLPLATWASRRRQDLLELLDRMNPTIEALSAAVEQEAKKRPEVLRLMTHPGVGAITGLAFVMIIGTPERFPCGKQIGSYVGLIPSEDSSAGRQRLGHISKQGNALLRYLLGEAAQAAARCDADWRRRYVHLAMRRQRNIAKVAMARRLAVRLYWMWRNDWEYSQWVKFSSHAGQLATGHGVN

SEQ ID NO: 392888 - protein, 345 aa, unidentified
MTNLPINAIAESIHRLFAGVDVGADELVLVIRKNGKSFDPQKYANTRSDRARLVNKLIKLPGIKVCLEATGIYHFDLAIALHDAGIPVMVVNPKASHNFAKVLMRNSKTDAVDANTLAEYVERMDFVAWTRPSNQTLALRGFARRIDALTGQKAAAKNHLHALSATQETPKALLRDAKLAISQLEKRIDTLAAEAMTLINQHPELKRVFELLTGIKGIAHTSAIALMGELLLLPPNLSHREWVKFAGLDPKAFESGKSVHKKMRLSKAGNRHIRSALYMPALSAKQHDPHVSAYFQHLVDNGKKPLQAVCAVMRKLLHAIHGMLKHDQPFDNTRFYVIPTPIIAE

SEQ ID NO: 392889 - protein, 316 aa, unidentified
MDTRCFVGIDVSKDRLDVHVLPSSEQRSVGNTQVEITELVKWIGEKKAALVVLEPTGRYETQVAATLARAGIPVAVVNPRQVRDYARATGVLAKTDALDAAVLARFAQAVQPEPRPLASEATEQLDALLTRRRQLVEMQTTERMRFRTAQGLVRKNITEHLAWLNAQIKSVDKELSDSIRKSPVWREKEDLLKGVAGIGRVTTASLLAELPELGTLNRRKIAALVGLAPYASDSGKQRGKRIIWGGRRKVRSALYMATLAATRHNPTVKSWYQHLLAQGKAKKIALVACMRKLLTVLNAMFRDLKPWNPSMPQLST

SEQ ID NO: 392890 - protein, 371 aa, unidentified
MSYKIAGIDVHKKVLAVVVSDVEIESEYQFERRMFNSNPEQLRSLAGWLVEQEAEEVVMESTAQYWKPVWGALERYWKPVREKREGARRRSGTLHLAQALSNRGRRGRKKDFRDAERLVKRLVARELTLSFVPDAEQRLWRTVTRKKYQLRRDRVRLQNQLEALLEEAHIKLSSLVSDLLGVSARRMLKALADGETNPAALAALAHERLRATPEQLCDALGACTDLKPVYRQLLKMALEQLQLLEQQIGQLDHELATLLHPHQDAVQRLAEVPGLGVDSAQQIIAEVGPTAATFPSGEQLSSWVGACPGDEESAGVNYSHRSPKGNRHMRRLLNPAANAAVKVKGSIFEIIYRRCVPRLGHNQAIGLIAHR

SEQ ID NO: 392891 - protein, 361 aa, unidentified
MYVAGIDAHATYSVVAIVSKTGELVQKAMRIRNEDNQRLLELLKGHRPIEAVVETSPAWPWLYDLLAGEAGIDFVLAHAKKLRAIAEANYKKDEIDAELLARMRVAGVIPEVYPKPIETREQALLVRHRARLVRIRTAAANRVHAEIQSVGLRLERGKLLTNGGRQWVADNAWPLFGPEQRRLVRTHWALIRGVRPMIRSLDRQIERVGEQIPAVSVLRTIPGIGPYRGLLIATELLPIERFATPGNVVSYAGLAPRHAQSGLRPIRHGNIPAGANRWLRGALVRAVVSHLQQAPKSWLSRYYEGQKQRLGWQVARVAAARKLARAIHAMLRTGEAWRDETYTGERSELRPLHVAETTLSS

SEQ ID NO: 392892 - protein, 352 aa, unidentified
MTICHYIGFDVHKKSVSLCVKLPDGMIVEEDRIASRRHDLEQWAKKRTAPWHGAMEATIFSGWIYDTLKPYAAVLEMGNPSMMKAISASKKKNDRLDARKIADLARCNLLPSCYVGPTEMRELRRILRYRNKVVQHVTQAKTQMSGMLMEVGAEYSKGKLHGKEYFTALLNDLGKVPESVKDLLQMSRCELEMLEATQRRILNRLQKAPLLAERVKLLQTIPGVGEVTSLTWALEIMDVRRFPSIGDAVSYCGLTSALNASAEKEQRGPLSKQRNPHLQHVLIEAAKLAPRWNQQLAEVHAKEVEQGHRNRASLEVARKLVGYLMAVDRSGQPFQYRNIPEPQQKETKPVAA

SEQ ID NO: 392893 - protein, 379 aa, unidentified
MKKDSTKQSPKQVTKQQGKQDQKRNLQQSGLVVGMDLGDDYCHYCMLDGDGEEMEKGRVRTPLAGMEKRFKGMERVKVVIEAGTHSGWISRQLKRMGHEVVVANPRKVRLISANSNKNDGVDGELLARLGRADEKLLHPIQPRREQSQADLEWLKARDQLVAVRRKLINHIRGAVKSVGGRLKKCGTESFHKQAPGELPEMIAQSVKPLLETIEHLTRQIRDYDRRLKQLCREQYQETELLQQVHGVGEVTSLGFVLIVDDPERFSSSRTVGCYTGLRPGRSQSGKQDPELRITKEGNSFLRRLLVQSAQYILGPLGQDCELRRWGLKLAGRGRKNAKKRAVVAVARKLAVLLHRLWVNGEAYDPFYYSHQHPSLVAAQ

SEQ ID NO: 392894 - protein, 334 aa, unidentified
MEKITTVGIDLAKSVFSLHGVDGAGRVVLRRAVRRDQLVEVVAGLSPCLIGMEACSGAHEWGRRFQEHGHTVRLMAPKFVAPYRKSGKNDGNDAEAICEAVTRPSMRFVPVKSIEQQALLTLHRVRQGFVVERTATINRLRGLLTEFGVVLPLRSITVRRQAAAAAESLPDLARRAIGDLLEQLRVLDERIDAYDREIQAQAKMCEPAQRLMKIRGIGPTTALAIVATVGNAREFKNGRQFAAWIGLVPGQYSTGGKTRLGHISKRGDAYLRHLLVLGARSVLHTAAAHLDPVSRWALELRPRRGYYRTLVAIANKNARIAWALLAKNEALRSA

SEQ ID NO: 392895 - protein, 363 aa, unidentified
MATTTTIGLDLAKNVFQVHGVDASGKTTIRRQLKRREVLAFFEKLQPRCLVGMEACGSSHDWARRIEALGHTVHQLPAEDVKAYRRHNKTDAADAEAICEAVTRPRLKVVPTKTVEQQMLSVPHTVRDHLITVRTATRNMIRSLLSEFGVIAATGDKGLETLLAIVTDAARTEIPAPLRPPLMAAAAVLAETEASLDRIDAQIAAHAKTDERVRRLKSIPGVGPLIASAFVAAVTAPQIFPSGRAFAASLGVTPKMTGTGGEVTYGPVSKRGNVYLRRLLYLASAARLAAAQKRPATADPKLTALLARMPFRKAALALANKTARIIWVLLTRGGTFIDKHLPAAHAQRASGSAMTQYAGSVEI

SEQ ID NO: 392896 - protein, 419 aa, unidentified
MTNGNITASAPVLAAIDIAKERHEVLIEAPDKKRRRRVSVLNNLDEFDRLIGLLRSYQRPVRVAFEATGNYHRALAYQLGCAGFEVKLISSIALARTREALHNSWDKNDPKDAQVILHMMTIGAEQFYHDPLMHGTNDIQELSKTHDMVSRSKTELWHRILTHYLPLYFPEADRFHRSSRSDWFFAFLELFPSPHFIAAMSKGAFIEAAWDVVGRKVGKERLLADIYTTSTRSIGLPVTPDSGAICMFRMILAEGRSLIAQRNQIETRAVAMLKDNADYQLLCTIPGIGPINALTILAEAGDLRRFQHHRQFLKFCGMDLATIQSGMFRGQTKLSKYGNARLRRTLWMAAQVAILQRANSFRDKFERYITKDRHNTHLRRKASTAIAAKMARTVHAVIKSGEPYHPFFEGTIHSGRTIL

SEQ ID NO: 392897 - protein, 357 aa, unidentified
MNYTQNQKIEQVTESTLALGVDIGSSEHYVRAFDYRGRELTRKVFRFSTDINGFNSFYDWVTQICIKHGKNEAMIGCEPTGHYWYTFYQFVKDHGMKLAFVNPASVKKAKELDDNSPKKTDLKDPKTIAKLVIDRRYSFPYVPEGIYAETREVTSSRDLIMKELNAASNRIQRWLKIYFPEYLTVYKKFDTTTGMMILEEVPLPTMVTALGVDNIIKIWREHKVRGKGASFNRAKTLVDAAHDSVGKSGGQGAVMEIQMLLEDYKVKKQQLKMVTSVMEELIMQIPNAEKMLSVDGVGLVTVAGFISEVGDISRFKNPKQIQKYVGFELVENSSGKHKGRTTISKRGRKKLRKSYIR

SEQ ID NO: 392898 - protein, 323 aa, unidentified
MSVRRILAKTIDTDLEYEAIGIDLAKNCVSAALLTTDGEVVCIDRLDYSELEKSAQALSSTTFAMEPCTEMNYLVQKLEAWGHRCLVIGGKNVQNYVENHFSGQKTDLNDAQALAFLAQDTQLRTIKAKDVEQQKYASLTTLREQYIKQYRQTIVSLKGICQAWGLNISKGISGKARLKDLIENHAALLGSICSCRLRATVGDIKRFKSPKDFPAYYGLVPRSIATGHNERKGKITHRGDRTMRSLMVQAAGSLVNMATKGKLKSKQLTKWILKKQKEKMPWGKLVCAVAAKLLRIVRAVLISNKPYNSKIAGVAKCSLPKGS

SEQ ID NO: 392899 - protein, 346 aa, unidentified
MVIIGCDFHPSWEQVCWLDTETGETAEQKLVHSAGEAQGFYSSLPAPALIGLEATGNCHWLLDLLRDLGHEVWIGDAAEIRASYVRRQKTDKRDAAHILKLLVEGRFPRLWVPDRQERDLRQLLIHRHKLVEIRSRVKNGLQHLALNQGMQKKRRLWSAAGQQALRELPLQPWASRRREDLFGLLASLEQQIAPLDRAVAEAAQQNPQARLLMSQPGVGPITALAFVLTIGEVSRFARGKQVASYLGLIPREHSSAGHQRLGAISKQGNRFLRMLLVEAAQSAVRYDPEFRREYQHRCHSKPKNVAKVAAARKLAVRLYWMLRTYKAHPESVAIESSPRVPLVSAS

SEQ ID NO: 392900 - protein, 387 aa, unidentified
MQVVADRAAAPIAIQTDLRAIFVSLELSRSTWLITSLSPGGGEKMSKRSVRAGDIAGLLKRFAQLKEKARARTGRDFPIITIQEAGLDGFWIHRVLQSEGIESHVVDPASIATSRRRRRAKTDKIDGETLVRTLLAYKRGEPRVCAMVKAPTPEEEDSRRLCRERKVLTAERVLHVNRIKGLLFCQGISGYEPLRRDRHERLEELQTGDGRLLPQHLKAQINREIDRLELLLKQIKAVEAERDALLVAAHTPAAVPTSMLLNIRGIGPEFAAVLWSEGLFRHFDNRRQVAAYAGLAPTPWQSGAVDREQGVSKAGNPRLRTTLIQLAWLWLRNQPHSALTLWFHERVSRNGGRLRKTTIVALARKLLVALWKYVTAGVVIEGAAIAA

SEQ ID NO: 392901 - protein, 409 aa, unidentified
MTVMIGVDPHKGSHTAVAVDAGERSLAELRVRSGPKQLERLLKWAERFPERTWAIENATGLGYLLAQQLVAAGERVLDVQPKLAARVRLLATESTNKSDPHDALSVAIAALRSPAPKEVGVEDHAAVMKLWARRHRNLSSSRTQVACRLHAVLCELVAGGIPDEIYAEKAASLLANIEPDSAVAAARVELAEELLDDLRRVDRQLAESKKRLEQVVAASGTTTIDIFGVGPVVAATVVGVTGDIARFPTRDRFAAFNGTAPIEVSSGGRKVWRLSRRGNRTLNHAIHMAAVTQLRFHHSPGRGYYDRKIAEGKTPKEALRALKRRISDALWAAMVADARRAAAVTTSSRRKAGPGGQPGNDSVASAAGSHPETPALRPSHSRTRSKATTTKTSPRRTTSKTPRAARRTA

SEQ ID NO: 392902 - protein, 443 aa, unidentified
MKVLHERVAGIDVHKDMVKVAIRSPGEKPWTRKTEVFEFRTFYGVLQEMARFLRERGVTHVAMEASGVYTEPVYHALCEQDFTEVLVVNPQHVKALKGHKTDARDCRRIAELLECGLLRGSYVPSAEQKEMRDLTRYRKKTVQARTSEIQRLQKALESAGIKLDSVASDITGKSATAMIEALINGERRTQVMADLALRSLRQPGKQADLNMALAGRFTEHHAMLCRMHRDQIKLADHAIARLDKQIAAMAARWQRELDLLLTIPGIGLVTAAVWLAEIGPEPHRWFDGHDKLASWVTLCPGNHISARKRKHGKTGDAGTYIKPALIEAAWGAIRVKGRLQARYRRLVRRFGGDKNPGAKKKAITAIAHTLLKIAYQVLKSGQAYQEPGADFYTRRESPAQQQDWLIRRLQNLNPGCTITITPPPGAPPPAPPGAPPPGRAQAA

SEQ ID NO: 392903 - protein, 384 aa, unidentified
MNKHSMIFIGLDTHKEFHEVACCEEQRGATPVHYGRIPSSKVSVKKLLRQFKSKYPGATLHVVYEAGPCGYWIYRLITSLGHCCYVVAPSLIPKKPGERIKTDRRDALKLVRSLKSEDLTPIYVPEPEDEAVRDLSRAREAAMKDLKEAKYQLKALLLRNNIRYEGTANWSKKHLRWLTELILPHPAQQIVLQEQLQTIEERIRRLERLDNELTHHVHQWRYYPVVKAVQAMRGVRLLVAVGVVAELGDLNRFDHPRKLMAYLGLVPSEQSSGGKRHLGAITKAGNGRARRLLIEGAHSYRYPANVSTELQLRQEGLPKDIVDIAWKAQLRLCKRYQRMSKKGKHYNLIITAIAREMAAYIWAIAKEVVLTPVNPKLRLSRVPA

SEQ ID NO: 392904 - protein, 343 aa, unidentified
MQVSTIGVDLAKNVFQVHGVDRDGKVVISRQLRRNQVIEFFGKIPPCVVGMEACGTAHHWARELTKLGHTVRLMPPSYVKAYVKRSKNDAADAAAICEAVTRPSMRVVPVKTAEQQAALMLHRTRDLLIRQRTQLINALRAHLAEFGLVAAKGREGVAQLFAIVSDDSNGHALPAAMQQALQVILDQLDALQQQIGQLDRCIHVQHRASDVCRRLETIPGIGVIGATAIASTVADPSAFKTGRDFAAWIGLVPRQYSTGGKEKLGGISKQGDRYLRRLLVLGATAVIQHARRHPEKHPWIMRLLTKKPAKLVAVAVANKMARIAWAIMAKGGIYRAPELAATA

SEQ ID NO: 392905 - protein, 354 aa, unidentified
MSQTLNAAIAVIGIDIGKNSFHIVGHDERGAIVLRQKWSRGQVEARFANMPPCLIGMEACVGAHHLSRKLNSLGHDARLMPAKYVRPYSKGQKNDFRDAEAIAEAEQRPTMKWVATKTADQLDLQALHRVRERLVSQRTGITNQIRAFLLERGIAVRQGQRFLRAELPRILATPPDVLSPRMVRVIEGLAGDWRRLDERIEGLSGEIEAIARQEPGCERLVSVPGIGPIISSAMVAAIGTGDAFSKGRDFAAWLGLVPKQMSTGDRTILGKISKRGNRYLRVLFVQAAWVVLIKPMSWERHGLKPWIEAAKKRLHRNVLAIALANKLARIAWSVLARGRSFEARTITNVAAQAA

SEQ ID NO: 392906 - protein, 370 aa, unidentified
MSKDSTLFVGLDTHKQSIAVAYIGSQREDCVQDFGTIGTLHRDIDRMIRRLQSKASTLFFAYEAGPCGYWLYRYLTGKGFQCIVAAPSKLPKDKVKTDRRDARTIATALKNANLSEVYVPSTEDESMRDLIRARTDMVNDLKSAKQRLNSFLLRHDQVYHGKRWSRQHWHWLSERVFDTTAQNVVLKQYMDAVEDRQNQLEYMEKQIDEYLPEWGRYPVVQALQSLKGVRQITAMTMVAEIIDFKRFANPQQLFSWLGLVPSENSSGGKKRQGTITKCGNSHARKALVESAWSYRHPEKLTRDLMLRQEDLPKPVREIAWRAQLRLCKRYRSLTARFKNKNIVVVAIARELSTFMWEIVNKGLIESEQSA

SEQ ID NO: 392907 - protein, 320 aa, unidentified
MMAQNDLVVVGIDVAKDKVDACIRRFTLRQTFPNTAQGHRKLVAWLRKYQVGKAVMEASGGYEREWRNVLHNAGIEVRIVDPRRVRSFAQSAGRLAKNDPIDAEMIAWFAETFSQAPGQIPDAAREELAALAKARKALVDVKIRLQAQDEHAAPEPARKAYARALKSLAAEIDKLEAAISAKVEATPEFAERAEIIESVPGLAQATSAILIAGMPELGQVSDEVAAALIGVAPYDDDSGKRRGERYIKGGRRWVRNAIYMPCLGAATQYNPVLKAFYQRLLAKGKEPKVALVACMRKLIIILNTMLARRQTWNPGRHAMA

SEQ ID NO: 392908 - protein, 401 aa, unidentified
MRSIGMDVHRTFAQIAVLEAGVCRDEGRIGVRPEDLWAWAETLRPEDQIVLEATTNSDAIATMLRPRVARVVVSNPRKTRAIAEAKVHTDKVDARILAQLLAADFLPETWVADDRTRMLRRVVGRRTHLVRQRTRLKNQVHAILSRNLVPTCPHADLFSGVGRRWLAAQALPADEQRSVAALLRQLDFHGDELAAVDRDIASEAIDDPVAARLMTVPGVDVAVAMSLVAAVGDFSRFADPDGLVAYLGLHPSVRQSGNGPATHGRITKTGRSQARGMIVEAAFSAARAPGPLRAFYRRISQRRGVQVATVAVAPKMVVLCWHLITKGEDYAFARPSLLAHKRRKLELAAGAPSRRGPQPGPSKDYSNKQHRQREKELVEQQERAYEVLIAHWQPQRPHAKD

SEQ ID NO: 392909 - protein, 412 aa, unidentified
MRIIGFDIHRAFAEAVAWEDGKLGRLGRVDMRRNLLTAFAVTLSREDIVVVEATGNAAAVASVIAPQVKRVVIANPIQVRMIAHAKIKTDTIDAGVLAQLYASGFLPEVWIPDEATQALRRQVTRRNQVERQRTRLKNIIQSILHAHLIPSCPAADLCGSKGRAWLGKQVLPEDERFAVERHLREFDRLGEDLAVIERDLARSALADENVARLIAIPGIDMVVALAVIAAIGDINRFGEPQKLVSYLGLNPSVRQSGPGPAHHGRITKQGRGHARGMLVEAAWAAARAPGPLRAFFLRVRATRGQHVAAVATARKLAVLIWHLLHKKENYAWARPALQARKIRKLELKAGHPAKRGQKGSAHAYNIKGHREQERRFVEQAEAAYAHFVAGWTPRGSKPASKVRTGAANEERR

SEQ ID NO: 392910 - protein, 341 aa, unidentified
MQITTIGLDIAKNVFQVHGIDAAEKVVVRKQLRRGQVMKFFGALPACLVGMEACATAHHWARELTKLGHEVRLMPAKDVKAYVKRNKNDAADAEAICEAVRRPTMRFVRAKSAGQQGRLMQHRTRDLLLRQQTQVINALRAHLAELGIVAAQGREGLKQLLTIIADEKDARLPMDARASLIVLAAQLQALHTMIGSIEKRLTVQHRANEASKRLESVPGIGIIGASAITATVTDPKSFQSGRDFAAWIGLVPRQDSTGGKQKLGSISKQGDRYLRRILVVGAHSVLRRAKQNPEKYPWLTKLLARRPFKVVAIALANKMARVAWALLARGGTYRVPALAAA

SEQ ID NO: 392911 - protein, 348 aa, unidentified
MRLYNQQHRFYAGVDLHARSLFTHVLDHAGRTVFEKDLPAGPDAFLDAVRPFRDGLVVGCECMFAWYWLADLCEDHAIPFVLGHALYMKMIHGGKAKNDRIDAAKLAGLLRGGLFPMAYVYPRAKRQTRDLLRRRSFFVRQRAQLIAHIQNTNSQFNLPPFPKKLTYAGNRSPQIAERFAHPSTRLSVAADLAMIDAFDDQIADLERHLIQHAKVDDPVTFHLLRTTPGIGPILGLILLYEIDAIGRFPEVGNFLSYSRLVRCQHESAGKVKGTGGKKIGNGHLKWAFSEAACLMIRGCPPVKAWVQRQQKKRGKRKALALLEAKLGRAVYHLWRKQVPFDPKRFLHG

SEQ ID NO: 392912 - protein, 340 aa, unidentified
MTITTVGIDLAKNVFAVHCVDQHGKTVLVKPKVSRAALPELIASLPPCVIGMEACSGAHYWARLFRQYGHEPRLMAAKFVSPYRMAGKSGKNDAADAQAICEAVRRPHMRFVPVKDENQQAMQCLHRIRQGFIEEKTATYNRLRGLISEFGVIAPQSTDALRHMVSEQKSSLPLQVQQCVNDLLEHIDRIEDNITEYDRILSRMAKTDHRSQRLMELKGIGPTTACALVASIGNAHDFKNGRQLAAWLGLTPSQYSSGGKSKLGRITKAGDSYLRTLLVQGARSVLIGAEKRTDLFSRWVCSLVDRRGYWRAVVAIAAKNARLCWASLHYGDDFRLYSAS

SEQ ID NO: 392913 - protein, 374 aa, unidentified
MENSVTYIGMDTHKKQHNVAVHYPDDEQIVQFSVKNNARDIQKMVKKIKKQAPAAVAFCYEAGVCGFTLKRWIEKQDGRCEVIAPSLIPRKPGERVKTDRRDALKLLQLFKAGLLTEVHAPEEQDEADRELTRLRETAKENLKRSRHQILKLLTRHGYVYSDGSHWTQKHLAWLRTIEFTESMLNKVFESYFDEMVYCMGRLDNLDKEVERLADSEKYKEVVGLLSCFHGISTLTAMTILTEIFEFGRFDSARHLMSYLGLTPSEDSSGEKQKKGAITKAGNKRVRRLLNEASWHYRYRYVPSKALKKRRADKPSWAIEIADAAGRRLSKRHRDLLNNGKIPCKANIAVARELAGFIWAMMTQWQARKNTKDAA

SEQ ID NO: 392914 - protein, 430 aa, unidentified
MAYRIAGIDVHKKMLAAVVADVEVEGEYDFVRQRFGSNPQELRRLSAWLSQHGVEEVVMESTAQYWQPVWGALERYWRPVCQKREGAGAMSGALHLAQAQSNRGRKGRKKDFPDAERLIKRLVAQELILSFVPQAEQRLWRAVTRRKYQLTRNRVQLHNRVESLLEEAHIKLSSLVSDLLGVSARRMLNALAEGETNPLALAALAHQCLRATEAQLTDAMGACTELNPVYRRLLKMALEELQFIEQQRDQLEQEIAALLRQHEDAVQRLAEVPGLGVDSAQQIIAEVGATAATFASAKHLASWVGACPGDEESAEVSKSHRSPKGSRHMRRILNQAANAAVRTKGSIFQIVYRRLVPRLGHHQTIGAIAHRLCRLIWLILHQRVCYEERGPAVSQKSKCQRTRKMIRELQKLGYRVERLSVAPNAPAPAQ

SEQ ID NO: 392915 - protein, 341 aa, unidentified
MSNANSYIGVDLHKKTCFITVMNEMGKIKRQTEIKNEKETICEFFKRYNDASVAVESTMNWMPFYENLENMGFNVVLSNPLQTKAIAAARIKNDKVDSRVLADLLRTNFLPTAYLQPREVRDLKELVRQRMNYVDMRTQIKNQIHSVLFKSGISHSFSNLYGKAGMEFLKKLELREVYRRQLDWHLTALGNISVQIKEMSEVIEKTAKADFDCRLLATIPGIGYFNALLIKSEIGDIARFANANKLCSYAGLIPSTYASADKVRHGRITKRGSKWLRKALVDSITSGCRHEGRLAYVYRKLKKSKGTGKARMATARKLCHIIFAMLTDKQPFREFAPVKQR

SEQ ID NO: 392916 - protein, 342 aa, unidentified
MSYLGIDLHTNSFTVCRRTKQGKNSIRTFQIARIADFCKTLRKRDLLAVEATGNTAWFVSQVRDRIRKVTVVDPYRFEVIRRSVKKTDKNDSKTLALFLSKDMLPEARMKTKENAQLHSLATTRDKLVKQRTALINKVHNVLNSYGIKFKKESLGSEKGLKSVWAYDWDVIVRIELEVLIEQIRSLNKSIKTLDKEMTDHGQKLKGHENLTSLKGIAGRSATVLLSVIGDVNDFADENKLAAYFGIVPRVSDSNETVRHGRITKHGSKLGRTTLVQCTLVAKRYSPYLRQYYERIKSHRGSGKAIIATARKFLGIIYNTLKNDWIFEDFPNFVLASSCVKKQ

SEQ ID NO: 392917 - protein, 327 aa, unidentified
METQKQNYAGLDIGLEWIDAAWYELDKLHHVKVSNNVSGFKQLVKQCGTSRHYVMETTGPYYVALALHLHLKGIKVSVVNAIVIKRFIQMNLEKNKSDKKDAAWICKYAISQQPNLWQAPQEHIIRAKQMQTAIMQLTKNRTAFINAQKSLQQMPVISKESKRSYQHMIDQLNKEIILLEKSLNALLKQHEEKKMEALATIPGVGKRTVAMMIIVTDGFRKVDNYRQLSSWAGLSPKEYSSGKSIRGKIRISKMGGKELRNMLYMCSLSAIKSNKACKELYNRLKAKGKNGKLALAAVGNKLIKQCVAIAKSGLPYDEKYFSEKTCF

SEQ ID NO: 392918 - protein, 337 aa, unidentified
MTIIRIGLDTAKHVFQVHGVDENEQTVVRRQLRRGEMEKFFGKLAPTRIGLEACGASHYWARLLRGLGHEVVLLPPQYIKPYVKRGKNDANDAEAICEAMSRPGMRFVPIKRAESQAELMLLGVRNLLIKQRTTVINAIRGHAAEFGVIAAKGPVKVAELLQQAHTEEASVPELALDMLRLLAAQLDALDVKLKLIETRLMASHRENPLSQCLASQPGIGPIGAVSFALRVTDPKSFRSGRHFAAWLGLTPKDHSSGGRHRQGRISRQGNEALRKLVVLGATAVIRFARPGHASPWLLNLLARKPKKLAAIALANKMARTLWAMMVSGEVYRRPLPA

SEQ ID NO: 392919 - protein, 331 aa, unidentified
MNYAGIDVGSENLDIVIRKKGKSLKCKQFKNTSSGHLELIRYLRKHKVARVGLEATGYYHLDLAIELDDAIDIEVMIINPRASKNFAKALMSKIKNDAIDAEILAKFVERMDFVAWSSPDHEVFILRACGRRLVFLTKEKTKAKNQLHALSLTKRTPDFIIDDLKLTIEQLEKQIDTIIAHALEIIKQSDQLAKCYKRLISIKGVADKTAIKLLGELGVLENDMSAKQWVSHAGLFPREFQSGNSVHKRTSIGKIGNKYIREALYMGAMSAAKHDPNIRGFYQHLINDNGLKKIQALCAVMRKLLVAMHAMLKTDKPFNSQLFYSLDNSPA

SEQ ID NO: 392920 - protein, 420 aa, unidentified
MITTQFTPPQAALVAIDIAKNRHEVLIDPGAGMPRRRLSVLNNRAEHDRLVATLRDLGRPVIVGFEPTGNYHRVLAHRLISAGFETRLISSMALARTREALHNGWDKNDPKDAQVILHMLRIGATTVYSDPGYGRLNDLQELSKTHDMVSRAKTELWHRLLTHYLPLYFPEAERFHGNSRSDWFLALLEQFPTPASITVLSKEAFIEAAWDLVGRKVSKTRILADIYETARSSTALPVRLDSPAIAMFRMVLAEGRSLLRQRDQIEAQAEALLLDDPDSARLRQLPGIGPIIALTILAEAGNLRRFGHHRQFLKFCGFDLATHQSGTFRGQTKLSKFGNARLRRSFWLAAQVAIRQRDNSFREHYGRYVAKDPENKHLRRKALTAVAAKMARVAHAIVRSGADYRPFFEQPVPSGRTSLC

SEQ ID NO: 392921 - protein, 335 aa, unidentified
MKKTKNVEFYIGLDVHKNFTAYAVRDKEGKNVKEGSCASTPQDLKANLEPYLFSCVLGLETNAEVYPIYNSFKEKYDIRVANTIQIRTLIGKNDQLDAIRLSDMLRLGTFPCSYIPDENVSKLRTLVKIRHGFMEESVSLQLKIKSILRKLGLPMSNAKSFTKIWCSVLEKHIAFDKDGFQLRHLYDTYKYTETKLEIASNEMIEFTKSNFIKEFEAIIQIKGIGPTLTSYFIAEICPITRFKNIKKLRRYAGVIPISQESAGKIYGTYLPKTSSRKLLRYALVAAANCMNKHNENIKKYYTKKKKQKKIHGKAIMPVARSISDMIYKTLNAIEA

SEQ ID NO: 392922 - protein, 346 aa, unidentified
MKNIKFFIGVDISAEYITVSALSKKDSKVESFENFENNANGFQSLLAVFQSHKITAKNSIICMEATGVYGESLAYFLVGKNFRVAIENPYKIKRGFDISPKKTDRIDSKRIAEYALRFIDELTFWSPRIEILEEIRIFLSQREQITKQKISLNNALKSLKKKFHQSEKATKLYEEMIDSCNTKIKYLDKEIEVLINSEPEYRQIIENLKTVPGVGNMLAVHMMVVTEGFESHLNAKELGSYLGIVPLPYESGKSVRRRTSSSGVGPSVLRKLLYLSSMTSRRYDEEMKKYFFRKVGEGKSKRLVLNNIANKLVKILVALIISKKPYIKNFLSINPMLLKKLDRKST

SEQ ID NO: 392923 - protein, 428 aa, unidentified
MDEVNHNRLEEFRQLRQEVRHSEEYLIVGIDIAKDQHYAFFGTATGKTLLKRIVFSNDHEGFRKLLDQAEALRVQHGLKKVVYGMEPTANYHKPLGEYLINLGRTVVLVSGVTVARNRESLDGRWDKHDGKDSANVADLISQGKCLYYEHPSAELRGLRGLLSLKRRLKKQEHGYKVRIRNHLLAQYFPEMDRDYERLGAEGLSIVRWCLPASQIAQLDIDPFIERVTSRRIRMEKRRRLEEVWEKAGESIGCEEVPGVNHEAKIMVEGLKQIRAMIKETEDQIKELCEQFPEYHYILTIPGFGPDVSSKVLGAVGDPDRFQNGKQVLKMGGLDLSADRSGKDSDKAIPEISKRGKADLRYALYQAALVASLQNRDVMVYYTNKIRGREREKGIHVKMRVKLAAKLLVIAWTLMKKKEPFNPAYLNAE

SEQ ID NO: 392924 - protein, 326 aa, unidentified
MTESTLQSATSLFVGIDVAKDKLDLARSDSNALLTVDNSVDDIHRIVALLRTTGVKLIVVEATGGLERALVDALLEADLPVARVNPGHVRHFARGLGILAKTDKIDAHVLVKFAQLASPRIAAKLSANQSELKALVICRRQFCHVRTEETNRRHSTSSKSAVKAIDAVLKVVEKQIAELDRQIRKLIDSDDDFNSIDKLLQSVPGVGSVLSSTLLAELDELGTTDRRSIGALVGVAPFNHDSGKLKGKRTIRGGRANIRSVLYMAALAAMRFNPVIQVFAERLKKTGKLNKVVIVACMRKLLALLNAMIRDNLSWDQLNVIKTLDF

SEQ ID NO: 392925 - protein, 354 aa, unidentified
MIIIGVDYHPEFQQIALLDKGTGEFREKRLSHPEEAEQFYRALATADQKVRVGMEASGHARWFERLLAELQLELWIGDAAEIQSKRARKQKTDRQDAQHILKLMLKDDFRQIWVPSWENRDLRQLLWHRHRMVQARTRVMNQLQAIAINEGLRCKKRLWRGGGRQQLESFRLAPWANRRRQDLLELLDRLSPTIAELGQAIEQEAEKRPEARRLMTHPGVGALTALAFVLIIGNAKRFQCGKQVAAYLGLVPLEKSSGNRRRLGHITKQGSSLLRFLLVEAAQVTVRSLPEWRGQYFHLLMRRGRKTAKVAMARRLAIRLFWMWREERDHEWTSSVRTQDSPNQAMVCSRTPRN

SEQ ID NO: 392926 - protein, 338 aa, unidentified
MRYVGLDVHWRQSSICVLDTRGRKLAAQAIKGGWSKVFEELGKIKKPFAICFEASSGYGYLFEKLTPIARRVVVAHPGQLRLIFRSKRKNDRVDAEKLAKLLFLDEVPPVHVPSVDVRSWRSIIEHRRKLVAEQTRTKNTIRALLRSQGIESPRGLWSRQGLTWLSSVTLATDLDELQRDILRERLESIASMIKRVERVLNRKATAHPGVQLLRTIPGVGPRTGEAVVAYIDNPSRFHSNKAIGCYFGLIPKQDASGRSNRLGHITREGPSTVRSLLVEAAWQGIRRCPRIREVYERIMRGDKQRKKIALVATAHYLLRAMLAMLQTGEVWRESEKAA

SEQ ID NO: 392927 - protein, 482 aa, unidentified
MSQSKTRESPSRKAHRRIRQAQQRAKKVSPQATAAAATAKAVARMEVKNPHAAAIDVHSNNHVVCVGPDQVQTFGAYTVDLEAIADHLKQHGVTTVVLESTGVYWVPLFELLESRGFEVFLIEPSQASPCGARPKTDVADCQWLQRLHTYGLLRPSFRPPDSVLALRGYWRQRQLLVRYAASHVQHVQKALEQMNVKLTEVAADIMGQTGTRIIEAILAGERDPQKLAGLRDPSCKKTEVEYAKALQGTWRPEHLFALKQAFALYRFHHQQITECDRHIEAELGRLPNRAADKQFQPRPRRCGRKSNDVRFKATEPLFKALGVDLTLIDGIEVNTALVILAEIGVDVSRFPTEKHFASWLRLSPQLEQSNHTRKKRSPRHGKNRLAQALRMAAQAVSRTKTPLAMFYHRIKGRLGGKGAITATAHKLAVLVYRLLKYGVEYVRQSLEEYAAKVKEQMERSLRRKAALLGYELVAKTPAGQPS

SEQ ID NO: 392928 - protein, 439 aa, unidentified
MVGDEPLQEAGKLMKLMYERVAGIDVHKDMIKVGVRTPGHRAWTRNSEVLEYRTFYGVLLAMAADLRERGVTHVVMEASGVYTEPVYYALTGQGFEQVAVINPAHAKALKGHKTDARDCLRLAELFECGLLRGCYIPPQELKDLRDLTRYRAKTVQARTSEIQRLAKALESAGIKLDSVVSDLTGKSATLMIEALIDGERRGQILADLAIGRMRTARKLADLSQALTGRFTEHHAALCRLHRDRIMLFNAAVDDLERRIAVRAAPYQRELELLKSVDGFGDVVAQAWLAEIGPAPHEYFASHEKLASWVTLCPGNYISAGKRAHGRTGTAGAYIKPMLVQAAWAAIKTEGRLQARYHKLVRRFGGPKNRGAVKKAILAIAHTLLKIAYQVLKSGQPYQDLGADFYTRRESPEQRRAYLLRQLEKLNPGCTITITPAEAA

SEQ ID NO: 392929 - protein, 360 aa, unidentified
MNITQYSSTKYVGMDVHKESTSVAVMDSAGKVVMDSVIETKASTMVQFIQGLRGDVYVTFEEGTWATWLYDVLKPHVTKVVVCNPRKAALLKDGSKGDKIDARKLAELLRLNNLKPVYHGEHGLRTLKELARSYLTIRKDLTRVMNRLKALYRSWGIPCGGRQVYAPRHRSEWLGKITEAGVRRRAEHFYQQLDALKDLRQEVRRDLLTESRKHKAWKLLRQIPGIGPIRAAILVAVMQTPHRFRTKRQLWKYSGLALETHDSAQYCYVQGQLQRSKKFVTLRGLNKDHNHDLKAIFKGAALQAVSGAGPFRDFYEALLAKGKKPTMARLTLARKIAAITLIVWKKEVSFDAKQLKQEAA

SEQ ID NO: 392930 - protein, 423 aa, unidentified
MEVLHECVAGLDVHKDSVVGCVRTVSGDKTTREHRTFDATTDGLLALLEWLTSCRCELVAMEATGVYWMPVWRILSDGAFKLIVVNAAHIKAVPGRKTDMKDSTWLADLAAFGLLKASFVPDEEQHELRALMRTRKQLVREQTRHVQRIQKTLTEANIKLDSVISDIMGRNGRRMIEAMITGVRDPRKLAALADQRLKATPKQLYDALHGRLTEHHRFLLQLHLGQWDGLDATIKGVDREVATRVSRMDTEVTAAKANFSDLIDQLVTIPGISRLSALTILSEIGTDMSRFATAGHLVAWAGMCPGQNESAGKRKRTRLRKGAPWLKTMLVQCAWAAKRKKDSYYKAQFFRLQSRRGPQKAICAVAASLLTAIYHMLKDGTIHQDLGSGYFDQRPPEIKVKRLVNQIAKLGFEVTLQPIAKAA

SEQ ID NO: 392931 - protein, 349 aa, unidentified
MQHYAGIDVSLELLSVCIVDTKGKIVKEAKVGSDPDTLVAFLRGLDLAIERIGLEAGPLSQWLHAGLTSAGFEAVLLETRHVKAALSAMTVKTDRKDARGIAQLIRMGWFRAVHCKSAGSQEVRALLVARKLLLSKLLDVEFSIRGILRGFGLKMGMVTRKRFEARVRELYAGHAMLEQICSAMLTARSALQTEYAKLHKALLVIVREDEVCRRLMTTPGVGPLVAITFKTGVDDPSRIHKSKAVGALFGLTPKKYQSGETDVTGGITRAGDEMVRTALYEAASVLLSRVTRFSALKRWGMDVAKRRGTKRAKVALARKIGVILHRMWVDMTSFRWTKGAPTTMRLARV

SEQ ID NO: 392932 - protein, 395 aa, unidentified
MKQRKNAESEPVRIKKFARFIAISGLPACLNPDPDSRLTSIVKVVGLSSNPFFLKSVKDKSMENFYFIGVDVSKKKLDFCVMFEGKVVHEEETSNNQGAIMSLLHHLEEDYGIASGQMLVCAEHTGQYTFPLACACKAVECKLWLENAAEIKYSSGVQRGKNDRVDAKRIAIYASRFQDKVQYYERPTEDIERLKQLESERTLYVTDLAKYKGQMKDQKEYMPKSLYERKMKRLQALMDDLEEAIQSITDEMDEVIASCPVLFRQRELLMSIDGVGRVVATNMIIATEAFTRFGDPRKFNCYAGVAPFSYSSGSSLHSKARVSHRADKVMKRLLHLAAVAVTHRIGGELKKYYERKVAEGKNKMSVINALRAKIVARMFAVIKRNEFMKGKVKKK

SEQ ID NO: 392933 - protein, 344 aa, unidentified
MEHYAGIDVSLESASVCVVDATGRIVREAKVASEPDVLIAWFRGLEFRVTRIGLEAGPLSQWLYAGMRDAGLAVELLETRQVRDAFKAMPVKTDRKDARGIAQLMRLGWFRSVHCKSLPAQEVRALLTARKLLQTKNHDVEMSLRGVLRGFGLKVGPTTPRTFAARIRVLVAGHPTLSTVAEALLAARSTLFEQWQQLEKRLRSLAREDHRVRLLITAPGVGAIVGLTYVSAIDDPSRFRSSKAVGAHFGLTPKKYQSGETDVTGRISKIGGGVRTALYEAANVILTRPVKGSTLKSWGMRLAARAGMRKAKVALARKLAVVLHRMLADGTEFLGDKAAAAVAR

SEQ ID NO: 392934 - protein, 342 aa, unidentified
MEKANIIGLDLAKRSFQAHGAQIDGGVAFRRKLSRDKVLGFLALQPRCVVAMEACGSAHHWGRAIGDLGHEVRLIPPVYVKPFVKRQKNDAADAEAICEAPSRPTMRFVAVKTEEQQSRAMLFRTRDLLVRQRTQLINALRGHLAEHGVVAPQGPAHIHVLEEAVEETTALLPLLVVELSRVFLDQIDGLSKKIAELEKATIHEAARGAMTRRLQTMPGVGPITAMAIETFAPPMSVFKRGRDFAAWLGLVPRQHSTGGKQVLGRISKMGQRDIRRLLIVGAMTIVRWACRKGAQEGSWLHRMLARKPRMLVAIALANKMARSIWAMLTKGEDCRAPAAATP

SEQ ID NO: 392935 - protein, 431 aa, unidentified
MKKSSQAQPVLPRGRAVVGIDIGKGKHAATALSPQGEIIAQLASFPNTRQGVDRLEEEILRKAGGPRKVLVGMEATGHYWMCPCHELMRRGYTCVVFNPLQTNARSRARVRKTRNDKIDSKTIARLVLAGEAKPTRLPDRKITELRLLVRHRHRLLQAAGDMERYAHTLVDRIFPEYAAVFCRPFLPSAQKLIRQIGIAPEKLVKNAEQVRELLRVAGRKMITDEKIERLLQAAQESIGIREAEDVIEAQLRAIFDYLDTVRQQIVAIDKQLDERARELDSPLYSLGITSPMVAAIHAESDPISDFATPDQYVAYTGLDPSRHDSGDTIQWRGKISKRGSPLLRCTLYLTAFVVCRRHDYFARIYRKHRAKGKKHTNALVIVARRLARVIWRLLTDDRGFSKRAPKPVSPLDKPRTSAKSTQPRRAIKAGV

SEQ ID NO: 392936 - protein, 428 aa, unidentified
MDEVNRNRLEEFRQLRQEVRHSEEYLIVGIDIAKDRHHAFFGTATGKTLLRRLVFSNDHEGFRKLLDQAETLRVRHGLKRVVYGMEPTANYHKPLGEYLITQGRTVVLVSGVTVKQNRESLDGRWDKHDTKDSANVADLISQGKCLYYEYPSAELRGLRGLLSLKRRLKKQEHGYRVRIRNHLIAQYFPEMDRDYERLGAAGLSVVRWCFPTSQITELDVEPFIERVTSRRIRMETRRRLEGVWEKAGASIGCEGVPGVEHEAKVMVEGLRQIREVIKETEDKIEELCKRFPEYPYLLTIPGYGPDVSAKVLGAIGDPDRFQNGKQVLKLAGLDLSADRSGKDSDKAIPEISKRGKADLRYALYQAALIASTKNPDFMRYYASKLEGRQKEKGIQTKMWVKLSAKMLLIAWTLMKKKEAFDPAYLTAE

SEQ ID NO: 392937 - protein, 341 aa, unidentified
MKQSKLSTGIDIAADTFVVSIISEPGTALHGPQEFENNLEGYTELVAWFKQNNIKPKDMIICMESTGVYGEKLCYFLYHKKYRLAVEQAKKVKRAFKIDGHKTDPADSLQIAEYAFRYYDELHPWKPREEIVEKIKAMITSRELLVTHKTAMSNSLHALNRKAVRPSVAIRIMEKEKQALANAIKMLEKKMNKLTLIDPYVRQTVNNLKTLMGVQDLMALNMLVITNGFKSEKYYKQIASYLKIAPLRHESGTSVYKKPKSPKYGPRIIRKLLHLAARTVVTHDPVYKIYYLRKQKEGKPKQLVLNNVGNKLIKMMCAMIRDQKPFIKHYHSVHPELLKTA

SEQ ID NO: 392938 - protein, 351 aa, unidentified
MQTQSKQIEFNGQNFYCGIDIHQKSWTVTIQTDSLVLRTFTQDPEPKVLFKHLTKHYPGGNYIAGYEAGYFGYSVQRNFESLGMKCLVLHPADVPTTHKDKEQKRDPRDSRKIAKALKNDEVVPIWVPPLGLEQDRQLLRAREKLTADQSRVKNQIKAALQFNGIEYPETFSVKGTHWSARFIRWLDEIQLNEPSATEAMKSKIRHLLFIRGELLNLLRKIRELSRNDRYSRLYIELIKIHGIGMITAMTLLTETGDIHRFKRPDNFKAFLGLIPRAHDSGDKERAGRITKRANSHLRYLLVEATWIAIRFNPYYLKIYQEYRKRMRANVALVRTAGKFANQIYFCLKKIS

SEQ ID NO: 392939 - protein, 393 aa, unidentified
MFYIGIDIAKNSHEVCFLDEIGNVLDGNSFKIANTASGVDKLQKMFGKHALSPDNSIVGMEATGHYWLVLYSWLVEKGFDVKVINPIITDAYRNMLIRKTKNDRIDAQVVAKVLMLGEYQESPVSDKDTLALRQFCRFRLWQVQSCADLKKKVIALLDQIFPEYEKLFSDVFGLTSKEILKNYTSPEEIASINTRKLTHLLEKASKGRFGKEKALEIKAVANHSLGIQLAIDAFSFQLRQLIEQIEFVEQQIALLDQQIENYMEKLQSPVTTIPGVGPVYGAIILAELGNIKRFPGGKQVVSYAGLDASVHESGDFVGTRSHISKRGSPYLRRALWGAAFVASWADPELSAYYHRLRARGKHHNVAVGAVARKLCYILYAVLSENRPFDKRPI

SEQ ID NO: 392940 - protein, 318 aa, unidentified
MTSYIGIDVGKKSLHIYLPIADKSIEITNNQQGLAKLLSCCVEYYQHLSDIIIAFEPTGGYERELREFLKLNKVNFVTVHPNKVRSYAKAKGLLAKTDLIDSKLLSEYATVFSLLVKQDYNCKSQEDLHCFIQRREQLIAFKNQEIARLENHYNKVVIKSIKSHINQLDKQLIQVQQSIEELCNNDLAIKDKVSKLTSIPGVGIVAATTAICEIPQLGNIEFSQLTALVGIAPYARESGGYKGKRSIFAGRVNLRKVLYMAAVASLRCNKKLKEFYDRLLANHKPAKVALVAVMRKLLGFMHAVVKNNSFWNNNYVTP

SEQ ID NO: 392941 - protein, 337 aa, unidentified
MEQEQQYVGIDLHRRRSVIVRRTNSGETLETVRIDNDPVALAAELAKAGEHPEVILEATYGWYWAADVIDECGGTVHLAHPLGNNWGNRRVKNDERDATDLVDLLRMGRLAEGWVAPPPLRELRELIRYRGKLVHMRSNLKAQVHAVLAKEGVAVPMTDLFGVGGQRLLDEVELAKAYRIRVESLRDLIELCDREIAMLEKETAPFFAGDLGYHAVQAIPGVGPVLAAVFVAEIGDIGRFTSARHLCSWAGLTPTHHESDEKVRRGHITKQGSRLVRWAAVEAVSRQHGATPIRAHHQQVGERRGKQIGRVAAARKLLILVYYGLRDGEIRCLAKAG

SEQ ID NO: 392942 - protein, 415 aa, unidentified
MDVQMKHACGLDVHQATVVACLLSVLDSGKVKKQIRTFGTTTRELLSLRDWLLAEGCRRVAMESTGVYWKPVYTILEGPLDLTVANAQQIKNVPGRKTDVKDAEWIADLLLHGLLKPSFVPPPPIRELRDLTRYRRKLADSQSAECNRLLKVLETANIKLASVASDAFGVSGMEMLDALAEGTATPAEMAELARGRLRGKIPQLEPALDGRMEEYHRYLLKLQLRRLRGLDQDLAELDARIQEKLKPYEKQVELLREIPGVDWILAAVIVAELGVDMKVFGSSGRVAVWAGVCPGNHESAGKRRNVRVTKGNVHLKTALVEAAHAAARTKGTYLRDKYFRLKARRGAKRAVVAIAHKILVAIYHMLSGDVSYHELGDLYLDKLNKHHLTRNLVRRLERLGYCVTLQQQVVQQPAA

SEQ ID NO: 392943 - protein, 352 aa, unidentified
MIFVGIDLHRRSSHVAAFDEEGLELLSRRVSNEPEAVRAIFAELGGEARVALEAAFGWEWLADVLEAEGIELHLAHPRQTKAIAAARVKTDAVDARTLAHLLRADLLPEAYIAPPELRELRELLRHHIGLTRVRTALKNRVHALLARQGIQRGRAELFGPRGLRFLAELALPAATRRRLESLLALIADFDRELAVVKREIQARAKDDPRVTVLTRIPGVGVFIALLVIAEVGDVARFPSPRQLASFAGLTPRVRNSGERVRLGPITHQRSPHLRWGLIQAAQTAVQAEGPLKAFYERIKHRRGSKVAKVAVAREILTLCYYGLRDGEIRRLEAAAARANSALALAPRGGPTG

SEQ ID NO: 392944 - protein, 433 aa, unidentified
MSKFFNNPTVGIDVSADFSYIAILAPNGDVYRKAFKIKHDVSGFNHLLKEIKKVEEEFNMKTAIFMESTGVYHLSLFHFLNKNFDNTFVINPLVTKCNKNVDIRKVKNDKKDALSIAQIGKFQNIKLSQGVSLDVFLLKSLVREYYKLTDTCSVFKKKLSADLKVIFPSYSTIFSNITSNSSIAILSYYSTPQSILDAPKDKILEILISKSKRGLAWSEKIYTKLFDSATEATIIGLPLRRLAIKITSSINLITTIEKEIATLLDEIKTLINSTGFPESIRNNINLIDSIPGVGYLTAITIVAEIGDINGFIKPKHLVAFFGIDSSVNESGKFKGNQNKMSKRGTRIGRRALYAVALASIRKNRSGVPINRILLDYYQINLNGKKAKVALGAIMHKIINYIFAVLRNQTPFEQRDPKIHKQMFLENRVLNNVA

SEQ ID NO: 392945 - protein, 342 aa, unidentified
MEITTIGLDIAKNVFQVHAEDCAGRVVFRKRLRRAQVLEFFAALPSRCVIGLEACASAHYWARELAKLNHVVRLVPPAYVKAYVKRGKNDAIDAEAICEAVRRPNMRFVPIKSIENQAVLVLHRVRGQLIRQRTKLSNMLRAHIGEFGLVAPRGKLLELVAIIADAGDERLPRMARIALQEVVAELDTLERRIETFEKEIIAFHKSNAVSRRLASIPGIGPITATAIAASVPDANGFESGRHFAAWLGLTPKDHSTGAKQRLGRISKMGNGHLRSLLVVGATSVLNRARKGSAPIHAWMRKLLLRRPPRLVTVAYANKMARTAWAVMARAEVYRPEMALPRQ

SEQ ID NO: 392946 - protein, 409 aa, unidentified
MSMLEVALDRGAVIVAVDPGKVMNRVWVSNGNGLLTEPVSLPVARSGVVALEKMLAAHAGEPVIAIEATGSLHRAWAAELERLHPGAIRLFAPSETKAARTQLGSGRFKTDDRDCAALTYLARQGAGRRQGEELAVEELRAAVRHRRSLVADRKTAQQRLHDQLNALAPGLSAPVGHGRSLPIETPTGQAVLACAAAFAGRAPATRSLIARSPGRLTKATAQYWANRWNDCLAPPPDAAGRAERLGRDLDRYRVLLVDIAAVEDEIAVLLARTDGQILTSLPGVAAIRAAAFAAHTLPIARFPDAEHLYSATGLAPAMYESATIRRRGRISRQGLAEHRDALMGIAWGLSQHSPSFAERNTELRARGMAPIQARVALARNACRLIHRILTTQQPFDEQAYRRGRLSRGR

SEQ ID NO: 392947 - protein, 335 aa, unidentified
MLYAAIDIHKRSFQAAVLDSESGEICEQRFGASREELSHWAMSLQGGVAAVAIEATTGWRWVWRELVALGFDVRLADPSEVKALRGTVKRAKTDRLDARWLVLLLAKELLPLSWLPPAEIQQLRDKTRLRKALAEDRTRWAQRLQAFLQHEGWPCARGRLLTAQGGRWVSGLALAPVARAHVETLLRLIDLVEDEQRALESELRRFARSDRRCQALETIYGIGPILACHILAELGEAKRFRRARSAVRAAGLHPVVADSGETTRRGHLAKHGSPELRWALVQAAHQARYRRSPDRALYASIKARRKAAQPAVLTVARKIARRSYHVLHELEREAA

SEQ ID NO: 392948 - protein, 365 aa, unidentified
MKQATTTPVTLTIGIDLGDRKSHICVLDAAGEIVEESRIATTPKALRARFKGLAPTRIALEVGTHSAWVSELLKDLDHEAIVANARKLRMIFQNDSKNDRLDAEQLARVARMDTKLLYPIEHRDRSARADLAVMRSRDALVTTRTRLVNHIHGVLKSFGYRVKKYATPGFHRQVAGEIPDELKPALQPLLDTLAVLRERILGFDRELRRLSTEVYPETALLSQVGGVGPITALCYVLTIEDPKRIKNSRNVGAYLGLRPRQRQSGQKDPELRITKAGDRDLRCLLVQCAHKILGPFGKDADLRLWGLELASRGGATAKKKAVIAVARKLSVLLHRLWVTGEVYEPLRNKNRRAAAQTHKPAAVTV

SEQ ID NO: 392949 - protein, 368 aa, unidentified
MSEVTTAFIGLDVHKDSIAIAVAVPGRAAPRFLGTTGSVLAEVEKALSHCGTPPQLLIVYEAGPCGYGLARQLCARGYRCEVIAPTMIPRKPGDRIKTDRRDALALAHFARAGDLTPVVVPQEPDEAIRDLSRAREDAVRARLKARQQLKAMLLRHGQRYTGKSSWTAAHERWLAGVRFAHSAQNIACVEYRTAVSEAHERVERVTAALREQVAEWRLQPVVAALMTLRGIELIAAVTLIAELGDLTRFAHPKQLMAFLGLVPSECSTGESRSLGSITKAGNSHARRVLIEAAWAYRFPAKIARELQIRNEAQPRALREIAWRAQLRLCQRYRRLSARGLHQNKICTAIARELAGFIWDLARQVTAPA

SEQ ID NO: 392950 - protein, 426 aa, unidentified
MKGAMTMKVVYQTCCGVDVHKSFLVATIIKTTSGIQPSYQKKRFSTFNNSILQFKQWLLDNSCFDVCMESTGKYWIPVFNLLEDEINVTIANPKWVKAVKGNKDDTKDSKWIGDLFRLGLVPGSYIPPKPIRILREYTRYRSKLTSCKSSEKNRFQNALTVCNVALDSVVSDIFGKSATSVIDYLLDQPNNSINHEEIASRLLRSLKKKSESVIESIEGYQMTDAQKYRMRLIDAHMHYIISTIADIDLMINSLVEPYENTVHLLCTIPGISRNSAITIISEIGTDMSQFSNSKRLCCWAGLTPGNNESAGKKKSVRITRAGVYLKPALVQVAHAAVKSKNTPYYKAKYERITKRRGKKRAIIAIARMILTAIYHMLSTGEVWNPTDLYKIDMPKSLVNKQKEKAIKHAMKLLIAEGIVEESLLVS

SEQ ID NO: 392951 - protein, 410 aa, unidentified
MDLVSAELPAKTLVVAIDPGKVSNRVLLANGEQGLIGEPVSLPVQREGIDRLCELIYASGATESVIAVEATGSLHLAWAAELERRFPGSLRLFAPSETTAARTQLGSRRFKDDDRDCAALVSLARQGRGRAHRPGILEALLDAVRHRRRLISQRKVARQHLHHQLNALCPGLSAPSGHGRALALETPTGRAVLACAVDLRGRAPSVRSLIARAPGRLTKANASWWARRWRACLPPPLDAELRAERLGRDVKRLEALKADVGAVEAQIAALLAESPGQVLTTLPGVAATRAAAFAVHALPIERFPTAEHLYSSTGLAPARYESATVRKSRAISRQAPGERRDALMAIAWGLSQHCEAFRQRDRELRGRGMRPIEARVALARHACRLCHRMLQTQQPFDQRRYARARHRRGR

SEQ ID NO: 392952 - protein, 356 aa, unidentified
MSYDVKYIGMDVHKEAIVIAVLNGTGKMIMETILETKASSILQFIHGLRGELHVTWEEGTWAAWLYDLLQPQVPHIVVCNPRRNALLKEGSKSDKVDAQKLADLLRTGMLRPVYHGENGLRTLRELARSYQTISKDLTRVMNRMKALYRGWGIPCAGTQVYAARSREEWLSKLPQVGVRRRAELLYQQLDGLQALRREVRPEFLAEGRKHKAAKLLRQIPCIGPIRAARLIALMQTPQRFRSKRQLWTYSGLGIETHDSAQYRFVSGQLQRSRKPQQLRGLNRNHNHEMKEIFKSAATRASCSRGPFHDFYAALLAKGMRPEMARLTLARKIAAITLTLWKKEERFDVEQLKTQAA

SEQ ID NO: 392953 - protein, 341 aa, unidentified
MSNIIRFGIDLAKNSFAICGIDDNGHVVVRKTLNRTRLLEFFANTPPALVAMEAGSGAHHWARELSALGHDARIIDPRLVAPYRHQGRTGKNDLNDAAAVCEAAGRPAMRFVPIKTVDQQAILLIHRLRRNCVAEHTRTINRLRGFLAEFGIIAPKGVATFKARWPLIRQQHDADIPALAWTVLDELFEQVRVLHQRVLAYDRQIKAFVRTDPRGRRLAEVHGIGPITASAIVATIGNGHDFKNARQFAAWVGLTPRQYSTGGKLKLGRISKRGDIYLRTLLVHGARSELRYTAGRNDAKSRWAESLKASKSRNKTAVALANKHARIAWALLAKDQKQLPA

SEQ ID NO: 392954 - protein, 349 aa, unidentified
MSELTRIGVDTSKAVFTLHGVDAADRPVLRINLRRAQMIPFFRKLPPTIVAMEACGSSHYWARKHSALGHTVRLVPPQYVKPYVKRGKNDRNDAAAICEAAGRPGMHFIPAKTLEQQAAGMVLKARDTLVRQRTALINTVRGHAAEFGVVAAAGVAKVGALFSVIEQQPDIPPVAREMFVLFRQQINDINTHIAELDARLNASHKANPVSQRLATIPGVGPITALTLAIEIDPAQFESGRHLAAWAGLTPREHSTGGKQRLGGISRAGNERLRRLLVAGATAVIQAASKPGSRQMTEWLRALLARKPRKLAATALANKMARIAWALMTSGQTYRRDAATVGVAKGGAVS

SEQ ID NO: 392955 - protein, 411 aa, unidentified
MTLYAGLDWASAEHAVCVIDRSGTVVDRLTIPHTAEGLGKLVRALDRHGQRDGAPVATAIERPSGLVVDTLVEAGQPVVPIHPNVVKATRPRYGASCAKSDPGDAYLLADLLRTDGHRFRALEPLSDPLRALRSKVRTRDDLVAARVRMANQLRSLLEVFWPGAVAIFADVDSPIGLDFIQRYPAPRDAARLGPKRLARFLAAHRYSGRRTPEELLERLRAVPAGLAGDIEEESRRMQALAFVSAIRPLVAQIRKLTSSIEHDIQQLAIGRTMMSFPRAGKLNAAQIVAELGDNGTRFVDADHLAAEAGVAPVTRASGKRSATVYRFACNKRLRNAICTWANNSRRASDWAAHVYQRARARGCDHPHATRILARAWCRVLWRVWQDGGTYDVERHAAARALIPPPAHPDDA

SEQ ID NO: 392956 - protein, 339 aa, unidentified
MELYAAFDLHSNNNHLGIINSNDKRIYKKKLPNDPQTILAALERYKDDLTGIVVESTFNWYWLVDLLMDHDYRVHLANPSAVKKYEGLKYSDDNHDAFWLSHLLRLGILPEGYIYPKNERSIRDLLRKRGHLVKLRTSLILSLQGIISRNCGLRVNASKIKAIRENNVLPLLTGDENLELSGSVSKEAIDFLTQKIRKIETAVKKKIKLKKPFILLQTICGVGDVLSLTIMLETGSISRFPKVGDYVSYCRKVPTGWTSNGKSKGKGNKKNGNRYLAWAFSEAAELSRRFDDNARAWYNRKSAKKNFMVAHSALSSKLARAAYYIMKNNVPFDPGKLFA

SEQ ID NO: 392957 - protein, 440 aa, unidentified
MQKETVFERVYENAAGIDIGAEKVFVSVDGIKVVSFNTFTSDYYKCVEYLQQNNIQHVAMEATGVYWVALYAMLESCGFKVCLVNPRETKQVKGRKTDVKDCQWIQKLFSANILRQSFIPEQNYMEIRQLVRERIDIIEMGSTYVNKMQKCLELMNIKLKEVISQIHGASGIKMIKAILSGNRDKDYLLSLCDKRIITKKGDSILKALEGNYNDTYLFMLKQNMFMWEKHQEQIVVIDNRIGQLLEQLCKEKRSVVAESKPKPVRHHAPKIEGLHGMLIRLYGVNVSSISGINDYTLLRLLGETGIDMNRFPTVKSFVSWCGLAPRHHTSGKMNKRVKGTSCNKTGQIFKEIAQSLINSKYIAIGSFIRKLRARKDSGIAIKAGARKLAIAYYNALTKGIDYVEQGIKKYEEQIKQRQKAVLYRLAKKFNVEIVEKQVAA

SEQ ID NO: 392958 - protein, 366 aa, unidentified
MKKHTTKTDLSPTDVSACSTVAVDLAKNVFQIAGENPLGQVIYEQRIKTRDSFQAFLLTLPAGVTVLMETGPGAQAWARLLQARGNPVRILPAQRVAEHRSGAKNDRNDVLAILRAGRDLKILAVPIKSTAQLAMQALHRARQGYVRRRTAMSNQMRGLLLEHGIALAQGEISLSRNVPGILEDATQPLPELLRELIAELLGEWSQLGERITVLTGRLEAAAREDETAKRLMTIRGIGPIIATALLAKQTEPERFANARQFAAYFGTVPEQHSSGQKVRLGKMCKRGDAYLRSLAIQGAHAVLRQLRPDSEHPDDCRLRRWLSRHGQKGAAVRLANRNLRIVWVLLQNDQNYRRQPGNGQEAAMSH

SEQ ID NO: 392959 - protein, 373 aa, unidentified
MPDHDAYIGLDVHKDSISVAIADAGRSGEVRLFGAIPNEPDAIAKLVKKLSSRHGRVEFVYEAGPCGYNVFRQIEALGFVCRVVAPSHTPVRPGNRQKNDTRDAVMLARLLRAGELTFVWVPDVVHEAMRDLVRARSVASHDARKARTLIQLFLLKHDLRHSAKSWTSRHRTWLRNRHFQHHAQQIAFQSYLNRLEQAEARKKELEDQIAVISQSWSLAPTVMNLQAFKGIGLVIAATLVAEVGIFSRFDSPRKLMAYLGLIPGEHSSGGSVRSRGITKTGNSALRALLFEAAWSYRVQAKVGNWMHKRRPDVPQAINDIAWKAQVRLSARYRKLVGSGKKSNVAITAVARELVGFLWDVARKTESETMSSAA

SEQ ID NO: 392960 - protein, 335 aa, unidentified
MRYVGLDLHPGQFTMAVVDESGTMLFEHSYPTSADNLIGVLDAVSEPKVVVFEESTLAAWVWRTLAPHVGQVVVAEPWHNHLISGDEDNDDLASAVKLAELYRGGFIKAVHHTGERGQVFKELVLFYHDTARELARFKNKLKSKLQQHGLYVVGAEVYDQQHRDAYLQQIDADGARLQAQLLLDTIDHLTDQKAAARAEVIRHCAAIEPIGRLRELPGIGPIRAATFVAIVDTPQRFATKRKLWSYCGLGVANRSSGDSEGPEHLNRRYNRRLKAVAKGAAIAAINHGDNQFARQYHRLIADGIRAHNARLTVARAIITTMWAIWRSGERYRPRG

SEQ ID NO: 392961 - protein, 417 aa, unidentified
MKKNSKSAMKKEQKAKRAKARRPVQREAKEVLAELVEKLRGKLELKSTSASQAEASPRTELGPNLDRLTVGLDLGDQRSHFCILGFEGETLSEGQLQTRQAEVAEFFQALPPARVVMEVGTHSAWMQEIIAGEGHEVVVANPRLMEGSKRRKRKNDRIDAKKLARLGRVDPQSLPPIRHRSREVRQDLVVLRAREALVAARTELINATRGLVKSMGTRLPKCSSPSFGQKVKDAIPEKVREALLPLVQLADALSDCIRSYDQKMEELGSDKYGHTKLLRQVKGVGPITALAYGLTLENPEHFAKSRDVGPYLGLVPKQEDSGESQPQLGISKAGDTMVRKLLVGSAHYILGPFGPDSDLRSYGLRLCERGGKNAKKRAAVAVARKLAVLLHRLWVSGEVYEPLGYVASRAIVQQAAA

SEQ ID NO: 392962 - protein, 408 aa, unidentified
MQRYYLGVDWADKSHQLYAADESGKKIKELEVQQTAEGLAEFGRWLDERRSAGTELWAAIEKPQGRIVDFLLDHGVVVYPVNPKALDRARDRFRMSQSKSDGFDAYVLAEFLRTDHTHLRALEPDSAQAQELKMLTRDHQRLLRQKTRLLNQMTITLKEYYPRALEVFDDLETQIARDFLHAYPTPQGLSRMTRPQWKRFAKGEHHLSEARWQELWEKINKPQITIPDHVVRAKAKLLLALVAQLEVGVKAVHDYSQEVERFFAALAAAKIARTLPGAKSATTMPTLWAELGDAKNRWNSFRHLQAEAGTVPVTKASGKSRMVQFRFACKKRLRTAMYWFAFNSLMRCEWANKYYRDQRAKGHSKHQALRALGAKWLKIIFVMWRDHKPYDENYHLANIARHAMRQAA

SEQ ID NO: 392963 - protein, 326 aa, unidentified
MSNILGIDVSKDKLDLVLLSEKGKFHKVISNDPAGFKTLDQWLISRHIDQVHVCLEATGQYGDEVSEYLYGQGHDVSVVNPTRIKRYGESKLHRNKTDKADADLIAEFCLKEKPALWEPLNPDLKHLRALVRRLIDLQANYRQEESRLTSGEKDDWVIRDLTVHLEYLKASIEATEAEIQNFTKGTPDLKAKQELLVSIPGVGKKTSARLLGEIGEISRFENAPQLAAYAGLNPKGFSSGSSVHKKTRISKQGRSELRACLYMPAIVAMTHNPVVRALKERLQKRQLSTMAIIAACMRKLLHIVYGVLKSQRPFDPDYDRQFNFSA

SEQ ID NO: 392964 - protein, 315 aa, unidentified
MNRITKINVGVDVSKNSLDVYFHQTKTFFKIENSSKGINVLLERLAEYEVDKIVFEASGGYEQLLLVTLEETKYNYWRINPIKVKGFITSEGTLAKTDKSDAKMLALFSYKKNKKHENIDLTEEERNLQALFRRKRTLKNMVVMEKQRLEKPMQKYCKNDILKTMKFFEKQIANLEKRILEIINSNKAMQRKVEIIESIPGLGKETSSALVIEMPELGKLEAKKPGALLGVAPCTNESGKFKGRSSIRAGRRIPRKVMYMAALTASRFNPEMKNFYNRLREEGKLAKVALVAVIRKLIELINTLLRENRLWKKYI

SEQ ID NO: 392965 - protein, 363 aa, unidentified
MSLSSWLVAGMVPGVERQPLKKLEPDEDQLLKLMNRWRHEALQAGHAIERVVVAYEAGRDGFWLARWLRERGVEAYVMHPSSVAVSREHRRAKTDRLDTELLMRAFLGWLRGERRHCSMAAIPTIEEEDAKRPNREHEKLVGDRTRIVNRMKSTLARIGIRGFKPTLRKAEEKLGELHTAEGMLLPENTREELRRDMARLRVVREQIKEIEQQRLSKLKTAAPAKEGPHAMVLLIARVIGVGIETADMLVNEILSRRLRDSKAVARYAGLTGSPDESGKRRREKGLSRSGNARVRRGMIQLAWRFLRFQKDSVLAQWFRARAADGRSGTRKAMIVALARKLVIALWRMTRTGEIPAGVILRAA

SEQ ID NO: 392966 - protein, 457 aa, unidentified
MSNRSCRLSRGDRRRNDKLVRLRAVVTRQTAVLAFDLAADKQVCALADQDSRGLARRTVKAKAWQLAEAVQWGLVQAAAAGFSSVVVACEPTGHRWRVLDQIAEQAGVRLVCVQPLLVHRARESEDFTRNKSDETDAIIIARLVTELRCYLPERAEPAWARLRHLGARRAGLVTDTIAARQQVTDLLECAWPAALQAAGKPMKSKSWQAAMTVLLDRVGTSGDLSVIRRWGWNRFAAAVRRELPRHGTTRWYSTIVRAVFDAATDPALAAAGVADQRAGALERARFALADLAHARAETAVVETRMVQVLDELGLAQLATSIPGLSAVGAAAILAETGDPTRFSSARALVKHAGLCPRDNASGTYQGKTGISGRGRPQLRLAAWRAVHAALRNNPVLAARYAHLTGRTDNKLTPTQARVAVAGSLLRQLHAVLTTGTAWDPAIAGGLPPSVKEAAPAA

SEQ ID NO: 392967 - protein, 398 aa, unidentified
MLSIGIDVSKGKSTVCGMKPGGEIVYTPFEVQHTREGMSELVSLLRSSGEEVRAVLESTGSYHCPVVAALLENGIFVSVVNSLRMKRFCSQSIRRVKTDQIDAMQIALYGLAYWQELQPTRLPENTYRELQLLARQYYQMTSMLIKAKVDFNAICDQVLPGMQELMSDHAGRHKLSDFVLRYRHTTHILEMGETRFRKDYCKWAEKKGYRNHERMAALIFATAQNGIPVLPDAPSTQIVITEAIRVLHTVEASRDAILTQMQALAKTLPEYSLVREMPCIGDTLAPRLIAEIGDVRRFHSKRALIAYAGIDAPPYQSGKFSANNRHISKRGNRYLRKTGYEVMQSYVMHKPANDPIFTFIEKKRSEGKSGKLAMVAGLNKFLRVYYGKVTELYRSLPQ

SEQ ID NO: 392968 - protein, 316 aa, unidentified
MTSKISILAIDLAKGSFQVCAVGPDGVVVFDRAVSRTRLATLLADQPACIVAMEACATSHHWGRIAQSHGHEVRLVPAAYVKPFVKRQKNDRADAEAIAEAAMRPTMRFVAVKNVATQGRAVAFRTYQCMVRQRTQLINALRGHLAEFGLVAPKGPASLKLLENALAEESTDLPEPVRHMGSIYVEQIARLTEVIDRLSDELETSSKIDEQLRRLCTIPGIGPVTAGAVAAFAPDLDTSDSGRNFAAWLGLVPRQRSTRGKARLGSVSKIGQTDIRRLLIVGAMSVIRRVVRKGGSANRWLAALVALKPKRLLPLP

SEQ ID NO: 392969 - protein, 407 aa, unidentified
MTVAVGVDIGSASHAVAICREGSQEAERRPLRISANRAGFDNLDAWLRRQPGPVARVVMESSGHYWVNLASHLRRQGYPVAVVNPLEAKYFGRRRLQRSKSDPADARTLAALAMVDQPRTQEPLVGAELREASRFAMRLVREQGQVCQRILRLVDIGFPELAEVWDDPTCVSALAVLRRAPTARAVTRMGAERLAQLKRPGKGGRAIGPAKAAELKRLAATSVGAPELEAQVGFEMGLLVRQYDLLEEQIHEAERRVAALLDGDVAQRLLSIPGVGPSTAASLMAEIGDIWRFTDVDQLLAYAGVHPKEQRSGKKGADPETSWVMAKTGNAYLREAAFRMAVVGIQHNPIIRAHYARKRAAGKTRMNAVGHCMTKALSLVWGVWRGGQPFDAAHGSATSTQARSPEA

SEQ ID NO: 392970 - protein, 360 aa, unidentified
MQQAQDILVVVDYHAENIDFRWFNEATGEERVGKYATTRAGILRQLEETAREVARDGRVVWIMESTTGWARVKDLIGTRARFVLANVLQMPLPPKARRRKTDKIDTGRLLREYLHGDLPQSFQPTAWWRQVRRVVDCRQDVVERQTALKNWMGSLLQHETWEDRENLWSARGRARLQRLEISASDRALVELKLEQLDQLAAQQTLIEKRMQAIYEGWPEAQWVDQVRGIGMVTAVSVLAHVGPIERFATAEDLISYAGLAPGVRQSDATCHHGRIGGGGTDTHLRYLVIEASMWLRDIPRYRPTYERVLKKRGKKIARIVVARLFLRSLHKMLKDRVRFNPAMSGRMKTTTATATAGCSG

SEQ ID NO: 392971 - protein, 368 aa, unidentified
MSSVASPEGLIHLGMDTSKNTIVVATLLPGEESPVTDRVFNEEEAIRRLVGRFPDRSVLRAWYEAGPGGYDLYRLLTSMGVACQVVAPSLIPKGGSDKVKTDKRDSRRLARLGRAGELTPVRVPSAAEEAVRDLARARAVVLDDRKRARQRLIAVLMRHGRIWRGASYWTAAHRAWIAAQQFSEPALASAVGHYRAALEVREAELAAIEAELAPWAAREPLAGPVARLGCYRGIAELSGLTLAAEVVDWRRFPAARAFMSYTGLVPAEYSSGDRTRRGHITKAGSEPVRTALTEAACAYRHGPAIGAGLRRRQHGAAPETLARSWTAQRRLHARYVHLVHAGGKAAPEAVVAVARELAGFVWAEMTAA

SEQ ID NO: 392972 - protein, 434 aa, unidentified
MQTAHPFELVIGLDRSDRTADLCLIDTRTGTRSHQIISTTPEALRRWAEQLQAAYPQACVALCLEQPALNLIACLETYPWLTLYPINPVSLQSYRQALVTSRAKDDTQDAHYLAEWLYHHHAELRPWVPEDRRTRLLQQLVAHRRAVVDERTALTNRLQALLKQYYPQALELCGEDLWRPLATAFLLNWPSLQALRRARPATLQQFYYRHGSRSTPLVHRRLELIANAVALTEDEALVDSYALRVQLVAHQLQLLTPAIQRYDEQIAEAYRQHPDRAVFAALPGAGPVLGPRLLAALGTQRDRLASAGNLQRQSGIAPVTKQSGGQRRVHRRYLCAKFLRQSFHEYAKESILHSRWAAAYYWQQRERGGSHHTAVRALAFKWQRILWRCWQSRTEYREEQYEAALRKSSSPLVARLDQIVVGKSPLYTRVNKSE

SEQ ID NO: 392973 - protein, 371 aa, unidentified
MEGTETRYVGIDLAKRTYVARMESPTGEKTLEWSGKTTHSGIEALIKRLHPSDRVGMECCSFAFYLAKLLMKRVGCAVYVLNAGQLQIIYKSTKKTDLADAAKITWMLKRFPASELPVVTIPTEEEEHRRAIISELRFKKRERTRLINRLHSVFVRIGDTTVEKKDLKNAEVRKVREDRLIGYELAEAGRIEEILVLLEKHIQALADEITTDLKTEPLAPFLLSVPGVGPTTAMAFLAHVGDGSRFTSGRQVSHFVGITPRVDNSGDTVHIGSITKRGCTAIRAVIVQAAWAAVHSTTPNPFQAKYQAVAIRRGKGRAIVAIARRMLEVMWIVTVRKELYNQTTQAELDKKLCRLGLMEKPKKKRIMEPAA

SEQ ID NO: 392974 - protein, 342 aa, unidentified
MRRSIGVDLHKNSFRVCFYKTEDEYQFETYKVRKTGLEAFKKNLKKSDEVAVESTGNTGYFVREIEEKVKRVRVINPRQFKVITTSVKKTDDEDALKIAKYLKKDLIPEVRMANKEQQKMRSLVGTRDKLVKLRTSLKNKIHNILNANGIVSRKEMFGGEKGLAFVRRLGLEDSYQFEIELIVEQIKYLNESVKKIDCQIKERSEKVDGHKSLKSIKGISDTGAAIFLSAIGNVNDFRDEKALFSYFGIIPRVSVSNETSHYGRITKQGNKIARTALVQSTLVAIRYSPYLREFYDKIKNKRGSGKAIIATSRKMLGVIYKTLKNNWVFEDFTQYKLVPQTL

SEQ ID NO: 392975 - protein, 335 aa, unidentified
MQSYGIDLAKEKFDVSFFDLTSKKVSNQPSHKVVKNNLKSIGRFLETLPSDAVLVAEHTGVYGDTLLKCCMDCNVKIAFVGGYVIHRYRATPDRAKTDVLDCALLRDFGERYPDKLKYKTFPEEALYELRQLARHREMLVEQRKQLITADKSEDCRPIRSLAVKRSMDRIKEMLDTEIAETEKEMLKVINGHESIRHNYELVKSVDGVGLITAVELLTKTENFTKITTARQYAAYAGTAPYEKSSGKMDKGAHISKIGNRRSKTLLYICAESARLHNKEIKLYYERRTLIDKKPRHYVLNAIANKLLRIIFTLVEKGEYYDANFIRQDPRVVKYN

SEQ ID NO: 392976 - protein, 347 aa, unidentified
MITLGVDAHKRTHTIVAVDPNGRQLASKTITTTTKEHLGLLTWAEQLAKGNGLLWAIEDCRHLSRRLERDLLAAGQSIVRVPPKLMAHVRDSARTYGKSDPIDALAVARAAQREPDLPTARLDGPDRDVRLLGDHRESLVAERTRAINRLRWYLHELDPSWEPKARSLDRRAILDKVSAHLDPFTGTVVRLARDLLDRCRALTKQINELTAEIATLVADMAPSLIAIPGCGAITAAKILGETAGVDRFRSKDAYARHNGTAPMPVWSSNRARHRLSRTGNRQLNAALHRIALTQAHWHEPAKQMMERRKAGGDSGMEALRVLKRRLSDVVYAALRTDLTAGVETAAA

SEQ ID NO: 392977 - protein, 360 aa, unidentified
MTTTAAKAPTAAGPILAIDLGKYKCVACVYHPATAQSEFRSIDTSVAEVGRLIRRTRPAVVVIEACSLAGWVHDLCGALGVPCKVANTGAEAWKYKHAKRKTDRDDALRLAQLFALGQLPEVVVPAKPVREWRALIAHRQALVGQRVAAQNRIRALLVGQGLPAPRGAKAWTVSGLAGIGQLAKPLADCAPDELWRGMLDLALTAYRQAEGLVAAAEAKLDAMGKASARVRLLDTMPGLGPRTAEAVVAHLDDPKRFKSGKQVGAYGGLVPRQYQSGEDDRRGRISKRGPAVLRKLLVQCAWAMLRYNPWARAVYDRLCRGKARKKQAVVALARKILVRCWAMLRDGVPWRPDPQPAAAA

SEQ ID NO: 392978 - protein, 355 aa, unidentified
MSSEKYIGMDVHQATISVAVLDAQGKTIMESILETKASTLLEFLGGLRGTLNVTFEEGTWAAWLYDLLKPHVAKVLVCNPRKNALLKHGSKSDKIDAQKLANLLRLNDLKPVYHGETGVRMLRELARSYLTVVKDLSRVMNRLKALYRSWAIPCVGEKVYSPRHRSAWLEQLSEAGVRRRAEQLYQQLDILLQIRRDARRELLRESRKHPAHELLRQIPQLGPIRVALLIALVQTPHRFRTKRQLWAYCGLALQTRSSGEYRFTAGQLQHSKKLPALRGLNSNHNHDLKNVFKSAATHVSTSPDALGDFYRSLLAKGMKPAMARLTLARKMAAIVLTVWKKGARFDPGELKRQAA

SEQ ID NO: 392979 - protein, 401 aa, unidentified
MEGPIVSIDVSNGNSHYMCFIKNNKRFGKVKKIDHNIEGFKRLLEDIQKLEAETNEKVCAVFEATGVYTKPLERFLSKNSIKTYIINPLESARKRKEEIHNKKTDKLDPISISKVYYDKEEMMELKKKDETYNWLRKKNRLYEDQLNHLRKYKVTFQNQLSICFPGYLDLFKDGYSDIPMTILKKYPHPDLLKNKKAETVARYLEKNTCHTHKVSLEYALKIIEFAKKTYPGCEKDDVEVEIFKILLDKVIETQRECEKTLNEMITVASTLEEYRYISSIDGIGTNLAARIIAEIGDIEEFKSREALVAYAGLDPHIYQSGDQDGKHLKISKKGNKYLRCLLFLAVGCSIRGAKDNPVNRFYQKKKQQSNPLNSKAAKTACTAKLLKIIYGICKNKTTYER

SEQ ID NO: 392980 - protein, 400 aa, unidentified
MVDIDKVGVFLGLDVGKHTHHGHGLTLAGKRVFDKPLPNTEPKLRAVFDKLKTKFGTVLVIVDQPASIGALPLTVARDAGCQVAYLPGLAMRRIADLYPGEAKTDAKDAAVIADAARTMPHTLRTLDLTDEVTAELTMLVGFDQDLAGEANRTSNRIRGLLTQFHPSLERVLGPRLDHQAVTWLLERYGSPQALRKAGRRRLIEIIRPRAPRMAERLVDDIFAALDEQTVVVPGTGTLDVIVPSLAKSLAAVHEQRRALEARIEDLLEAHPLSQVLTSMPGIGVRTAAVLLATVGDGSSFPSAGHLASYAGLAPATRQSGTSIHGEHAPRGGNRQLKRAMFLSAFAALHDPASRTYYDRCRARGKTHTQALLRLARHRTSVLFAMLRDGTFYEPRSPRLA

SEQ ID NO: 392981 - protein, 371 aa, unidentified
MSTKRILSNTIDTNQEYEVVGLDLAKNCVSAALITIEGELIGIDRLEYQDLRKCAQEMPATTFAMEPCCEMNLLVNELESWGHRCVVIDGKNVQNYIETHFSNQKTDLNDAQALAFLARDKQIRLIKPKDRQQLEFACLTTLREQYVKQYRQTLVSLKGICQSWGLNISKGISGKARLSEMIEKYEKFPEELRRELQNMVKHAQEVQKALTEINKTLKQVSKGDELCKMVQTVPGIGLVCACRLKATIGDISRFKHPKNFPVYFGLVPRSISTGHNEKKGRLTKRGDKTMRSLMIQAAGSVILMANKGNLKARALSKWILKKQREKMPWGKLTCAVAAKLLRIIRAMLISGKSFNPKVAAIAKCSLPKQTV

SEQ ID NO: 392982 - protein, 357 aa, unidentified
MSQNEIVSSFNKSGESIMKDIKVLGIDLAKNVFQLHGTDASGKVVLRKRLSRIKMVEFMSNLEPCLIGIEACGSAHYWARTLGEMGHTVKMMAPQFVKPYIKSNKNDMRDAEGINEAVTRPTMRFVPIKTIEQQDVLLLHRTRELAVKQRTAQANQIRGLLAEYGLIIAQGLHHLQALPSILEQGVLEQKISKKGSIIFLKLHEQLKYYQEQVDYYTKEIEKHAKEDARCVELQKIDGIGPITASAAVATIGDPNVFKNGREVAAWLGLVPKQHSSGNKTILGSISKRGDRYLRTLLVHGGRSAVKTCDNKTDKRNLWLADKKRRIGFNKASVALANKNARTIWAILKTGECYRQPE

SEQ ID NO: 392983 - protein, 337 aa, unidentified
MFTRRPISYCVKDAAGKVHQEGKIGSTRRDLDSWIKTLPQPRMMAMEATIFTGWIYDHLLPHAEKVKVAHPLMLRAIAAAKKKNDRIDAGKIADCLRCDFLPECHMASTEIRDRRRTLRYRGLLVKQMVQMKNRVSGLLMESGVSYNKQRLHKLGYFTDLLSTNEEISQSILPLLKLGREHIVRAQRLDSALIGSLEKDPLLSERLRRLRTIPGVGPITALTWALEIGDYTRFRSVKEAISYCGLCSAEKSSADKVMRMPISKQRNKHIQHVLVEAAKMAPRYSPELALVREREIQRGNKNRATFAVARKMVAYMLAVERRKQDFVPAEEMAGRAVA

SEQ ID NO: 392984 - protein, 378 aa, unidentified
MTQIDRTKTKSPRESSRRPGPSVQSTLGVTKPTRKRQKETPVEQQTQYVGIDLHRRRSVIVRRNGAGETLDTVRIDNDPVVLAAELAKAGEHPEVILEATYGWYWAADVIQECGGTVHLAHPLGNNWGNRRVKNDERDATDLVDLLRLGRLAEAWIAPPPLRELREHIRYRAKLVHLRTNLKSQVHAVLAKEGVAVPMTDLFGVRGQVLLDEVHLGDAYRVRVESLRDLIEHVSREIAMLEEQTAPYFAGDLGYHAVQAIPGVGPVLASVFVAEIGDIARFKSARHLSSWAGLTPTHKESDVTVRRGHITKQGSRLVRWAAVEAVAHQRGDTPIRAHHRRVGERRGTQIGRVAAARKLLILVYYGLRDGEIRCLAGTG

SEQ ID NO: 392985 - protein, 341 aa, unidentified
MTLYIGVDIHARQQTVSYLDTGDGTMGQQELHHERDDIRAFYSQFSGEVIIGIEACGYTNWFEEQVEELGHKLLVGDAAEIRRLARRRQKNDRRDADLLLELLVHDEFPALFRYPPESRELLRQLRYRHKLVKLRTMVANTLHALAINAGLSLRAQLLTRGGRKQLAGLRLSVISQQQRDELLSLADELSRRILTVEQWLKEQAKSDARVRRLQTHPGVGLLTSLCLVHTLGELARFSSTRKVAAYVGFDPVEHSSAERKVYGGISKAGSRLLRYLLVEAGQTACKHDEQLKQFYRRLVPRRGKPRAKVAVARKLLIRCFIMGRAEIDYAEFLRRGKKVAE

SEQ ID NO: 392986 - protein, 375 aa, unidentified
MGEHSEAFVAFDTAKLRNAVAIADAGREGEIRYLGEFENSGATTAKLVRKLAAKHRRLTFCYEAGPTGYGLYRQITSLGHECIVVAPSLIPKKPGDRVKTNRRDALSLVKLLRAGELTAVWVPDQHHEAIRDLTRARGAAVFDLRRKRQQMSAFMLRQGLHYSEKRRTWTKAHLNWLMSQKLVHAEQRLVFEETMLAMRQAQERIERLEQAIAVAVPDWSLAEVVTALMAMRGMDLVSATTFLAEIGDLSRFATPRQLMAYLGLVPSEESTGDKIVRGAITKTGNGRARRMLVECAWSYQHPPRVSRDKQPKVDAAPQLVRDIAWKAQYRLHHRYRALLRRGKLKSIAITAVARELAGFIWAVARATNNVRAVDK

SEQ ID NO: 392987 - protein, 412 aa, unidentified
METIYERCCGLDIHKKTVGVCLIVCESRGKPNKEIRTFGTMTEDLLELSDWLTANRVTHVAMESTGVYWKPIWNLLEGDFELLLVNAQHIKAVPGRKTDVKDCEWIADLLHHGLLKGSFVPDRPQRELRELTRYRTSLVRERTSEVNRLHKTLEGANIKLASVATNIMGSSGRQMLEQLVEGSTDAKSLARLAKGRLREKMPELERALEGHFGAHQCFLVARQLAHIDFLDESIEQVSAEIRERMRPFEQELSRLETVPGLGRRTAEVLVAEIGVEMARFPTPKHLASWAGMCPGNNESAGKRKSGRTRKGSPWLRSALVEAAHAAGRTKETYLSAQYHRLAARRGNKKAAVAVGHTILVIVYHLLKRGDTYRDLGPIYFDEHDRQAVERRLTHRLQRLGYKVTLDPLPAAA

SEQ ID NO: 392988 - protein, 343 aa, unidentified
MTIAVIGLDLAKNVFQVHGIDGNGRAVLRRKIRRSEVLPLFSRLPPARVGMEACHTSHYWAREIARFGHDVRMMPAQFVKPYVKSQKNDATDAEAICEAVQRPTMRFVPIKSENQQAALMLHRARDLLVRQRSSLISSIRAHFAEFGIVVGQGIRNVERLLALLGAEGDNRLPALAAEMLGVLAEQLRETAARVSEVEIKLLAWHRANPASRRLESIPGIGPITASAIVATVGDPRQFQSGRQFAAWLGLVPQQRSSGGKERLGGISKRGDGYIRRLLVHGARAIVGWQKRSAAHTTPWIERLLKRRPMNVATVAYANKLARIAWAIMIREDRYNPVRAFAVG

SEQ ID NO: 392989 - protein, 357 aa, unidentified
MQLQDTLSIPKVFIGLDIHKKSWTVSIQTDLFFHKTYSMPSIAEDLYQYVERTFPNHDVALVYEAGCCGFSAARYFLNLGWNVLVVNPADVKTGDKERYQKTEALDSKNLSNQLKSGVLKGIYIPTEEHEQFMTLARHRTQVTKKLRQTKSHIKSMLLFHGIKVPEEFDNPNWSKAFIEWLEELKFSTSCGDLALQGKIRMFKFIKLEYLEIANQMRAYCRKTNKKDYNLLRSIPGIGGYLASVILAECGDLRRFNNEGQFSSYIGLVPGIYNSGGSEKCLGITPRSRSQLRSYLVEAAWIAIRKDTEMQNYYRTHQGKNVKSVIIKVAHKMARRILSVIKTETAYQINRNLVPIEQ

SEQ ID NO: 392990 - protein, 323 aa, unidentified
MDDYIGLDVSMKETAVSIRRGGKRVWRGKCPSDPKLIADLIRKRASSVKRVVFETGPLSVWFYHALRAEGLPAICIDARHAKAALDMAANKTDANDADGLAHLAEVGFFREVRVKGFDSMLTRTLVAARTRLVRITTELSNQIRGLMKTFGLVVPAGKGSTFEKNVRSLLVGQDGLSAIVLPMLEAWRGLRIRAMELGRQLVAGARQNQACRILMSIPGVGAITATSFATAIEDPDNFKRSRSVGAWLGLTTRRYQSGEVDYDGHISRRGDRQVRGLLFEAATVILTRSSAESGLRRWGLKLRERVDFKRAAVAVARKLAVAC

SEQ ID NO: 392991 - protein, 323 aa, unidentified
MMAEPAEIQCVLGLDVSRDTVTLCDGRTRHTVTIANDADALRTALLPYQGTATLAVCEATGGHEDTLLGVLLELAIPAHRADPAKVKAYIASFGKRAKNDPVDARWLSRYGRDRAATLPRWQSADLTQQKLELLVARRLDLVAMRVQEQNRLKAPRSRLIADNIRDHLAELERHIEALNAEIDTLVGESRDLALRAQQLRSVPGIGPVLVPLLLAVIPELGTLNRRQVASLAGVAPHPKDSGKASWYRSTTGGRRQIRPALFIAALAACRGDNGLATAYKALLKAAKPKRVALTAIMRKIITIANARVRDAVRHQNEIMQINA

SEQ ID NO: 392992 - protein, 390 aa, unidentified
MIYVGIDVAKDKHDCCILGPDTEELFPVFTIRNNSDGYGELFHKIESVSKDKSQIKIGLEATGHYSYNILGSLLDHGYHTFVINPLHTNLYRKGQSLRKTKTDKVDARSIAEMLVTDKTLKPYTGTSYHSEELKSLTRYRFELVKERAKLKTSVSRLVNILFPELESLVPTLHMNSVYRLLQELPGAYFIASSNLTHLKALLADASKGHYGREKAIEIRETAKSSIGSLMPAKSMELRQTIRRIDTLTSDIKEVEQSIQKIMDECGSPITTIPGIKYRMGAMILAEIGDFTRFSNADQVLAYAGLSPSTYQSGQLISSYARMEKRGSKYLRYALFNAAIYASVWDERFRLYLSKKRAEGKHYYVAINHVVKKLVRTIFRMEITHTSYQPL

SEQ ID NO: 392993 - protein, 386 aa, unidentified
MQKLNDLSRSPSPLDPDGTLIAVIELSLSSWLVAGIVPGVERQPLKKLAVDESALLKLLHRWRDEAAKAGHHIKRIAVAFEAGRDGFWLARWLRAHDIEVHVIHASSVAVSREHRRAKTDRLDTSLLKRSFLGWLRGERDHCKMVAIPTIKDEDAKRPNREHESLVGERSRIVNRMKAALIRLGIRGFNPKLKKAAGRLEDLRTPEGEPILPNMLAELRRDMERRQLINDQIRQIEDARLERIEQAPGDGPNAMVLLLARVIGVGIETAAMLVQEVLARNMRDRRAVARYAGLTGSPDESGIKRREKGLARSGNARVRRGMIQLAWRFLMFQKDSTLAQWFRGRTESTRGTRKIMIVALARKLLIALWRLVREGVVPDGVVLRPAQ

SEQ ID NO: 392994 - protein, 320 aa, unidentified
MTSKGVEKMTSSTIGIDISKDFLDAHRLPDGEARRFENSKAGHKMLIRWLSDTPVERIVYEPTGPYHRCFEQALAKVGLALAKVNPRQARRFAEATGKLAKTDRADARMLARMGVALALAVRPVAGEMLSEIKELHLARQALIKDRTAAKNRGKIINLRLLKQQNAQRCKQIDAQITAIEEEIEARIANDEQLAERLAILESIPGISKITAFALLIEMPELGTLDGKQAASLAGLAPVARQSGRWTGRAFIRGGRASLRQALYMPALVAARFNPAMKANYRKLIEAGKPAKIAITAIMRKLIVLANSLLRDRRNWVEIRA

SEQ ID NO: 392995 - protein, 391 aa, unidentified
MVYVGIDVAKDKHDCIIKNSVGEVVFKTFTIKNNLDGFNDLYQKIETVMEDASKVKVGLEATGHYSYNLLGYLIDKGLPTFVINPLHTNLYRKSLSLRQTKTDKVDVNTIASMLMSDVNLKSYSDTSYHNEELKSLTRYRFDKVKERAKLKASISRLVCILFPELEKLVPTLHMNSVYSLLYEFPGAKQVAFAHLTRLSNLLSESSKGHYDKDVAITFREAARTSIGSNMPAKSLELKHTIKLIRELDSEIDEIEGKIKAIMDTINSPILSIPGISYRMGAMIIAEIGDFSRFESADKILAYAGLSPSTYQSGQLDNCHPRMEKRGSRYLRYALFNATIYVCHWDPTFNAYLARKRAEGKHYYVAMSHAAKKLVRLIYRLEKSNQPYNKAV

SEQ ID NO: 392996 - protein, 415 aa, unidentified
MDVVYERCCGLDVHKQTVVACVLLSGPGGPLQPQIRTFGTYTNDLLALGDWLAERSVTHVVLESTGVYWKPIWNLLEDRFTLLLVNARHVKAVPGRKTDVQDAEWLAELLRHGLLRASFVPDRAQRELRELTRYRTSLTQERSAAVNRLQKTLEGANIKLASVASDVVGLSGRQMLAALVEGTTDPTVLADLAHGKLRNKLSDLEQALLGRVGPHQRLLVAEQLAHVDFLDAAIERLSTEVAERLRPFDESIARLDAIPGVGRGVAEVLLAEIGADLTRFPTAAHLASWAGMCPGHDESAGKRRSGKTRKGSPWLRTALIQAAHAVGRSKQNYLVAQYRRLTARRGKKKAAVAVGHSILVIFFHLLTHDCPYVDLGVTYFDERDRHHVRRRLVNRLQALGYHVELTPLAPAADAA

SEQ ID NO: 392997 - protein, 344 aa, unidentified
MEITTVGLDLAKNVFQVHAMSSTGEVVVRRSLRRAQVTPFFAKLSPCLIGMEACGTSHHWARELVSLGHEVRLMPPAYVKPYVKRGKTDAGDAEAICEAVTRPTMRFVPIKSVEQQAALALHRTRDLLVRQRTQLVNMIRGLLAELGIDIPKGITHALAFVRRAVTGEAPEVPDLAAQVIGALAEQAIEVQGRIQQLERDLLAWYRSNDLARRIATVPGVGLLGATAMAASVTDPTQFRSGRQFAAWLGLTPLNNSSGGKERLGRISKMGDQYLRRLLVTGMTSLVRRNKHHPSAADPRINALLARKPLRLATVAMANRAARAIWAIMVRGEVYRMPALGSAAV

SEQ ID NO: 392998 - protein, 340 aa, unidentified
MNIKVLGIDIAKNIFQVHGVDSAGKKVLNKAIKRDKLLEFIAQLPPCLIGMEACGGSNYWGQKFTSLGHEVKLISPQFVKPYVKSNKNDAVDAEAICEAVARPNMRFVAIKNKEQQDIQCIHKVRARLVKERTALSNQTRGLLQEYGIVIPQRISRLMGELPKILEEGANNELTPYGRELFADLYNQLKAIDAKVEEYDKKIEVLCAGNPTCKLLCKLPGVGPLTATAMVALVGDAKVFKNGRELSAYLGLVPRQCSSGGKTRLLGISKRGDRYVRCLLVHGARAVLFRAKDSSVGSRINWLKGLVERCGMNRATVALANKNARIMWAIMTKGEAFAWSK

SEQ ID NO: 392999 - protein, 429 aa, unidentified
MQNESAPGARGPVFCGVDTHADSHWLCVLDWRGRKVLSRQFPADAAGYEALAGAIAAAGEPACVAMEGTSSYGAGLTRHLASLGMPVREALSPARTQRRRPGQGKCDEADAERAARAAMPGSRLGTPKSQDGWVDGVRCMLAARSGAVKARTSAINTARSLLTTAPEGLRSRFRGMGGPRLMEELPSVRAEGALGAALGALADLWAAARDAALDMELAIEASLEENCPALLAMYGCGPVSAAKLAVAAGDNPGRLRSEASFAAICGACPIPASSGKTVRHRLNRGGDRQANSALHEIARQRVMRDPETAEYAERARGRGKSDREVMRCLKRYVAREAYRALMHPHEIRRPEDASELVAARRAARVSQVRAASILGTSEKYISMLERGQRELKPIRRAYEAWVEAGLPLDWDRQAFEAERKMDSKKHLAK

SEQ ID NO: 393000 - protein, 403 aa, unidentified
MGNRFAGLDWASRTHAACVIDERGGVHLQFEVDHDAAGLAELCHRLRGAGATAVAIERPSGLIVDALLEAGFSVVPIHPNVVKATRPRYRSHGGKSDASDAYLLADLLRTDGHRFKPLAPQSDDIRALRALVRGRDDLVATRVQLANQLRSLLQSFWPGAAEVFADVDSPIGLAFILRYPTPESAARLGPKRMAAFCAQHAYSGRRSAQELLDRLHQAPAVALGELEMEAKGELALSLARTLDRLVEQIRLLTSRIEHHVSSIEDGRILMSFPRAGRVCAAQILAELGSVRERFDSDEHLAAEAGVAPVTYASGKSKAVTFRWACNHRLRAALTCMADNSRHANAWAASVYAKARARGCDHPHAVRILSRAWLRVIWRAWTDRKPYDPALHRGAQLVLKKAGG

SEQ ID NO: 393001 - protein, 329 aa, unidentified
MTQSNTLAAGIDTCAGIDTSKDKLDVAIHASTTRWQADNTAAGWRFIAERLTAAGITRVGIEATGGYERGIVKHLREQNFSVLVLQPTQVKAYAKMHLRRAKNDAIDAGLIAGCAAGIEPPAIAPDPRLEVLAGHLTFIEQIEEDKARLKTRLEHTDDPRLRGLIKADIAELSKRRATEMLRIIKALRAHADLARRYHLVLSVAGIGERTAIAIIIRLPELGRLSREEVAALAGLAPYDVDSGKYHGQRHIAGGRARLRRSLYAAALPAAFRWNQALIDLYTRLIGRGKCHQAALVACARKLIIYANTVVQRGTPWVANRPATAVPTPE

SEQ ID NO: 393002 - protein, 397 aa, unidentified
MYIVGIDIAKRKHEAAVIDGEGAVIIKPFSFTNNCSGYNRLLAMLTKAKLPLDEVSFAMEATGHYWLALFTRLQKEGFRVQVINPVQTNSIRSFYIRQAKTDPRDALLIAEVIRFGHFSESTLHPENIYELRELCRGRHAIVSMQADVKRKVVALLDQVFPEYETAFTNMFSDTSMAILQTCPTPKELSEMPLEELCHLIEVSSHKRFRMVKAQELQVLARNSFGFAMAGDVFSTMIRLYAKHLDFLKQQVREMDRKIAEIMETLDTPITTITGIGPTLGAYILSEIGDISRFSSAAKLAAYAGIDPTMRQSGEYNGVRNRMSKRGSPYLRHAIWLAASSAVLHDPALKLYFQKKRDEGKPYMASVGHACRKMVSIIYAVMRDNKAYTPYIPNEISA

SEQ ID NO: 393003 - protein, 340 aa, unidentified
MQITTIGLDIAKNVFQVHGIDAAEKVGVRKQLRRGQMMKFFAALPPCLIGMEACASAHYWARELTKLGHEVRLMPAKDVKAYVKRNKNDAADAEAICEAVGRPRMRLVRAKSAEQQGRLMQHRARDLLLRQQTQVINALRAHMAELGIVAAQGREGLKQLLKNIADEKDARLPSDARASLIVLAAQLQALHTMIGSIERRIVVQHRANEASKRLECIHGIGVIGASAITATVNDPGAFRSGRDFAAWIGLVPRQDSTGGKQKLGPISKQGDRYLRRILVVGAISVLRRAKLNPEKYPWLTQLLARRPFKVVAIALANKMARIAWALLANGSHYRPRLATT

SEQ ID NO: 393004 - protein, 346 aa, unidentified
MEKKIENFRWYLGIDVGSTQHSYCLYRGKEKVASSFFANSTKGLKELLTWLKEHKVEFDKLLSCLEHTGVYGQKVCRVLYGEGSTVWLVSAVRLKGVSGDLERRKTDAVDAEKIGSFAYRFADQYRAYRPDSKELRALKDWCRLRKQLVNQRVRLVNQHKMFEQQAIQTLEVEKVYKELIQTYDEQLVQIEQKINVLIESTDCWEEQRKWLMSIPGIGSVTARKLLVITQGYSRMNNHKQLASYGGTAPFERSSGKHKPKRRISRRADPELKKLLTTAVMCTIKPGGYFHEYYHILLKVPGRKPLQAINMLRNRLLKIAVTLVRKKELFDRDLYKQNCLSWQNGLT

SEQ ID NO: 393005 - protein, 341 aa, unidentified
MSEASTIGLDLAKRVFQAHGADASGRVVFRKRLRRDQVVTFFASLPACVVAMEACSSAHYWARAIGELGHTVRLIPPAYVKPFVKRQKNDTTDAEAICEAAQRPTMRFVSVKSEAAQANAVVFRARDLLVRQRTQTINALRGHLGEYGLVVAKGPSHVAQLIAHVEDPVADLPEAARTVLRVLTASLQFLAERVALLDREIARRAREDKEVRRLTTIPGVGPVIATALAALAPPAGAFRRGRDFAAWVGLTPSQRSSGGKQKLGATSKMGERTLRRLLIIGASSVVRKAIKYGTPSGSWLARMLARKPRMLVIVALANKTARIVWALRATGEIYRAPVVAS

SEQ ID NO: 393006 - protein, 319 aa, unidentified
MNTTTHANIRNNERHVGIDIGKDTLDIHIYELEKHWQTSNSTIDIRKLITHLKRYQLTRVLVEATGGYERKLVEACAERGLPIIIVPPIKVRQFAKAQGVIAKTDKIDARLIAQFGVVMQPEVRALPTKKVRLVRDLLSRKRQLNETRTQELNRLQKASTVLQPSHRRLIKLLEKDIAWINEQLKKEVSTIVEWQRTYDIVSSVPGIGDGIAYTLLGELPELGQLSNRQISALSGLAPFNRDSGYMKGRRRIKGGRAPIRTVLYMGMLCAIQHNPVMRQFYDKLVAQGKHKKVALTACMRKMITILNVMVRNDTEWKMN

SEQ ID NO: 393007 - protein, 346 aa, unidentified
MEHYVGLDVSLKLTAICIVDRTGKIRREGVVHSDPGAIAAFIKSNAPHVARIGLEAGATSTWLWTELNKLGLPVICIDARHAKAALKMQINKSDRNDAVGIARIMQCGWYKEVRVKDLDSHAVKALLVSRALLVKIKRDIENQIRGLLKNLGLVIGRAKMNMFAVRAAQLAEDRSELFAAVDPLLKAREAVEQQILDLDRKVLRLARNNAQVRRFMTAPGVGPVTALCFLATIDDPTRFKRSRSVGAYVGLTTRRYASGEVDWTGRISKCGDKMLRSYLYEAANVLLTRVARWSALKAWGVRLAKRSGLRKAKVAVARKLAVILHRMWIEGSEFNWSSKEAANQPA

SEQ ID NO: 393008 - protein, 440 aa, unidentified
MGSYAGVDWASEKHDVRVADAAGEKLLAATFAHDEQGLRSMCRALVRLEVELVAIERPDGLLVERLLDAGLRVLALHPNQVAAARDRFRVSGGKSDGFDAFVLCELARTDNHRFRVLEPDSDQTKALRALTRGREDLVGMRTALTNQLRAELERFWPGPLGLFTDLHGRISLAFLERYPSPADARGLGEARLAGFLARERYSGRQKPAELLAKLRRAAAARVGELELSTRRQLVLGLVAMIKSLNAQIKELERQLARTLGEHPDGEIFRSLFRDPRSVICAAELLAEIGDCRGRYPSRDSLAADAGQAAVAIESGKRKAACFRWGCNKRLRAAFATLADSTRHWHPWAQDVYAAALARGHDHPRALRTLGRAWCRVVWQCWQKRTPYDPARHRALQQHITVTIPTASGPVVDQLATESMAAGLFATNAPTSRQQQVTAAQ

SEQ ID NO: 393009 - protein, 387 aa, unidentified
MEKSNSRVIGLDVHPDSFAGAILEGREAGRAQVLSTSTRVALAELEKWVERHTRREDLLVLEASGNAFAVAQRLRALQRRVEILDSHRAGKVGQAYCANDRVDAVKIARIYLTGLSPLVWQPDAQTLERREVFSAYQAVVKESTRLKQQLKAMLNEHCVRLEKGFRLSHPTAMTRLRQLKEWSPVQVMLLEQLHTGLVAARVRRGKLRRYMAQEVLDEPELLRLTRLCGISLITLYGLSAAIGDIERFSHSRKLVSYLGLNPSVCQSGNWEGSTALKRHGRGALRALLVQSAKKLLQVNNPLQKWGLAVAARRGRNKAAVAVARKLCVAVWHIMKGHLIGAIERMDTLHTKLHKLTTELGLSAIKALGFETKEAFVQKKLYVLRSYP

SEQ ID NO: 393010 - protein, 332 aa, unidentified
MYYIGMDLHKQDLVMAVEDEQGPVGRVRRIACRDIEAIQAAVERWRPFRAVVEASASYRWLYDLVSRQGEMVLAHPLRLRAITAARAKTDKLDAALLARLLRANLIPAAYVPPARYQQLRDLTRGRARLSYGATLAKNQVHALLARANVHPPLKTLFGPRGRRYLAGLDLGLSGNLARDELVRRLEHYGREIATLDAHLEAVASEFPEAEALEVLHGIGRYSALLVVAEIGEPERFRNARQVGAYAGLTARVHQSGGHEHRGGISKQGSRWLRWILVQAAMKLVRRDERLANFYQRVRKRRGRNVARVAVARKLAGICWVRLRRWQREQAAA

SEQ ID NO: 393011 - protein, 346 aa, unidentified
MLYAGLDLSRKRLDFHLLDGEGTTVELGAAPPDADGLLGLTRRLDRHREPIRAAIESMNGARFVHDRLELAGWQVEIADAQKVKGLAPLACKTDRIDAWVLAELARRDLVPAIWLPDPMVRAERERARWRLHLVRHRSSLKQRVHAVLLTHGKPCPVSDLFGVRGRQLLARLGLPEPWQGTIAASLRLIDQLEREISDCERELRRLGADHRYVPLLCTVPGISWVLAYTIAAEIGDVSRFASPRKLAGYSGLCPRVYQSGERDLRGPLSKQGPRYLRWALVEAATHACTAAVYRDRYQQTKARIGKQRGAKVAQIDLARRLSEAIWHMLSRGEPFAPKGATDPLAA

SEQ ID NO: 393012 - protein, 415 aa, unidentified
MKTYILRAPQPVEPQKSIRSPRPKLVIPATPVTIVGRPSVTAKDPVLFTGLDVHNDSIAVSLAPSDSTEVRRYGIIGGEHDDVLKLAHKLHAAHPGMVLKFCYEAGPRGFALCRCLRSHGLDCILVCPSKVPRKPGERVKTDRRDADGLARLYRAGELTGIYVPEPGDEAMRDLIRARFQVGQQQHRARQQLKMYLLRHNLRYGGQSSWTPAHLRYLAKIKMPFPVQQIVFQEMLEVISHAAAQLERYDQEIERAVPNWRWEPAVRALMSLRGMALLHAATLVAELGDFNRFEHPGQLMGYLGLVPGEHTTGKDRQQGGITKMGNAPARRALVEAAWQYRAPARLSPHLKKRQEGLPKHITDIAWEAQRRLHHRYTHLTRAGKKKSQVAVTAVARELTGFVWAIARQVKPVTAQP

SEQ ID NO: 393013 - protein, 348 aa, unidentified
MNNVHYIGFDVHKKSISYCVKTAAGEIVEEGTIPAQRNVLRAWAAARRQPWRGALEATLFSGWIYDTLKAYSGGLEMAHPAKMKAISSGKKKSDTIDARTIADLLRCNLLPACYVAPARIRELRRLLRYRSLVVSEAVRMKNKMAGLLMETGAEYVKEKLHGKKYFATLLEELEEVPESVIDLLRLSRGALEMFESTQRRLIQELLADAELRERVERLRSIPAVGEITALTWALEIGDPERFGSAGEAMSYCGLTAALKSSAGKQQRGPISKQRNHWLQTTLIEAAKLAPRWNPQLAALHARELERGHRNRATLAVARKLVSYLLAVDKSGLPFQVRSPSQEPTQKAA

SEQ ID NO: 393014 - protein, 334 aa, unidentified
MKNYLFHSGIDISKLKLDVNLLNSQTLQSEHFVINNNPKSIKEFVKLLTKRKIDVKDILFCCENTGVYTNHLSYVLLGLKLDLWIVPAIEIKRSKGISRGKNDKTDAKDISYYSFRNIDKLRLNELVEIDIQKLKMLYTEREKALKSLLLLETTKENSEFVIKEVYKEVLPINQSLINSIKKSICKIEKRIKEIIKSNEKLNNQYKLIKSVPGIGEQTSLYFIIATKAFSSFKNWRQFACYSGVAPFEYSSGTSIKGRTKVNHMADKKMKSLLQMCAMTTLKYDPQLKDYYLKKKEEGKNSMLVLNNIRCKLISRVFAVVNRETPYINTYKFAS

SEQ ID NO: 393015 - protein, 392 aa, unidentified
MVTPTRIGAGCRGRPLTQKRKDTATVTIVAHTHPFVIGVDTHARNHALSILGMPHGEVIDDGEFSTTSAGIARAIEWVGRRTGGDLEVLWVIECSATYGAQLARSVTAAGYQVVEAARMSAADNRGVGKSDPMDARRIAASVLALRADQLRYLRKDDGPRAGLRVLLAARDHMTSERTATINALIALLRILDLGIDARRPLTGKQVIEVSRWRSRAEAVEVGIARAEAVRLARRVVDLDDELAQNIRTTTVLLRKSAARVLLDKPGIGPVTAAVALAAWSHDGRLHSEAAFASLAGVSPIPASSGNTVRHRLNRGGDRRLNKALHMAVIVRMTHDAETRAYVDRRLAEGLTKREIRRILKRYLARQIHRALTAASRADHLPINSTPATSFPT

SEQ ID NO: 393016 - protein, 343 aa, unidentified
MKISRVGVDLAKNVFQLHGVDRNGETVLKRRLSRDKWISVLVSSAEPGCEIGMEACGGAHHWARLLMTKGFRVKLIPPQFVTPYVKSNKNDAKDAEAICEAMSRPTMHFVKAKTVEQQDIQATHRIRSELMCHRTAKANQIRGLVTEYGLVAPLQMTSLRVAIPRWLEDAGNGLTDRFRALLHGLWDDLLTLDQRIEPLDGDIESIAKSDPVAQRLQQLRGVGPLVATALIATVGNGDQFTKGRQMAASLGLTPRQHSSGGKDRLLGISKRGDAYLRTILIHGARSVVATARHKEDRLSRWVTGLAERRHPNVAAVALANKTVRMAWAMMNRDADYDPECAVS

SEQ ID NO: 393017 - protein, 408 aa, unidentified
MEVVYRCRCGIDVHKKIIVACLDQGGEQSLREFGTTTSEIKSLATWLTESGCEMIAMESTGVFWKPLYNLFELMDLDAMVVNAAHMKALPGRKTDVKDAEWIADLLRHGLLKASYIPSREQRELREITRYRKSLTEERCRETNRLQKILEGANIKLDSVVKDINGKSARKLLEKIIEDDVPTSEEEVSKMVHGRMRSKLGQLVTAIEGITTPLQRKLLAQVIDHIDDLNRRIADLDRLVQDYMDEYAAAIAALCDIPGIARRSAEVILAEIGLDMSRFPSAAHLCSWAGVCPGNCQSAGRRKHGKTTKGNKPLKTILTQCAKSARSVKGSYFSAQYQRIAARRGKNRATLAVAHSMLIAIYHMLKNSVPFRDLGSDYYDSFNRDRKIHSYLKRLKALGWEPDALPGSA

SEQ ID NO: 393018 - protein, 330 aa, unidentified
MNSIVYVGMDVHKEQYTICCYSYETDKVEYKQTIPSDYKLVLKYIDQVRSRYDGEVTFVCGYEAGCLGYSLYHQLKEHAVDCKILAPSTMAVTNTHHVKTDKKDAANIARCLAFHTYSEVYVPDNDDNDVKEYIRMRDDQKLYLKKVKQQILAFVLRQGKHFECGKTYWTIAHLKWLKTLELSALQRETLDEYLLTYEYLTEKISRFDERIEELASAERYKEKVKHMSCLIGIKTHTALSMIVEVGDFERFEKAPKFASFLGLVPSEDSSDARVNRYSITKAGNCHLRRLLVEAAQSYTRGNVGHKSMALKQRQKRNSPEVIAHAVNDTI

SEQ ID NO: 393019 - protein, 315 aa, unidentified
MNSKEVFVGIDVSKDHLDIGLHPMGKTWQLVHDEAGKEQLYQELRKLKPDLIVMEASGGMESALAVRLQEGKLPAVVVNPRQVRDFAKAHGILAKTDRIDAQVLARFAERIRPEVRPLPDEAQRALEGLMVRRRQLVIMMTAEKNRLRRASQEVAQGIQEHIEWLKRQLEGVDRDISRRIQRNDVWKRKEKLLKSTPGVGPVVSRSFLSGLPELGTINGKKISALVGVAPFNCDSGKFKGRRRIWGGREHIRSILYMGTVAAVRWNPIIRSFFLRLVGAGKSKKVALTACMRKLLVMLNAIIASNEPWKYGKVVY

SEQ ID NO: 393020 - protein, 407 aa, unidentified
MIFVGVDWAEDHHDVCVLDDEGKVLGRRRIGDTLAGVGGLHALAAQYLGEDDEPNNVVVGIEKDRGLIVTALVAAGYQVYAINPMASARYRDRHHVSRAKSDPGDAKVLADLVRTDRHNHRHVAGDSSAAEALKVLARAHQNAIWSRQRQTNALRSALKDYYPGALEVFGTDLTHVDALAVLALAPTPALGRTLSRSKIASALRRGGRQRNIEKRAQEIQLALRQEQLVQPAALEGAYGASTKATVAVIAQFNTTITELEEALSEHFEQHPSAKIIRSLPGMGMVLGARVLGEFGDDPNRYADAKSRRNYAGTSPITRTSGRSRAVLARHVRNKRLADALDQWAFCSLNTSPGARRYYDELRSRDKTHRTAIRRVSNRWVGILHTCLERGCLYDEELAWIRYQNIAA

SEQ ID NO: 393021 - protein, 441 aa, unidentified
MAMRKRDDDLVFPNAAGIDVGGSSHWVAVPRQCCDEPVREFGAMTDDLNAMADWLRACGVDTVALESTGVYWIPVYEVLEQRGLKVFLVDARQMKYVPGRKSDVQDCQWLQKLMSLGFLRAAFRPTDEVCVVRAVARQRDVLLTEQASWVQRMHKALVQMNIQLTEVLTDVMGLTGQAIIRAIVAGERDPKVLARHRHRRVKASEHDIAKALTGNWRDEHLFVLCQALAMYDDIARHLGECDAKLQGLLSQLGASKVDLGKMPRAGSKTRTEFDTRQILANWAGVDLTRINGLGLAAVMKILSEVGPDLSRFANVKHFCSWLGLCPGTKISGGKVLSAKTKRSANRVRQALKMAAMSLSHSDSALGAFYRRLSGRMDKPRANTATAHKLARMVYFMLTRGEAFVDQGQQRYEEQQRERSIAALKRRAAALGFQINPTAVAA

SEQ ID NO: 393022 - protein, 344 aa, unidentified
MERAGARYQLHVGVDIAADTFTAAWLAGDGRPSAPFTGEQTPAGFAALQRQLRSAAKPAGTLVLLEATGNYWVALAVTLHEAGYQVSVVNPRQAHHFAKAQLRRAKTDALDARDLAQLAAALQPAPWAPPPAVYHEVRQRLVARDGLLAMRTQARNQRHALLQWPVVVEGVRQHLDELIADLDRRIARLDAEIAAVLEESGWAESLACLCSAPGIGLVTAAWLLVSTLNFTLCPGPTALTAYAGLAPMPRESGRSIRSRPAIGHAGNGRLRTALYMATLSAARYNPAIKPFYQRLRAAGKPLKVARCAAARKLLHLAWALGTKRQRFDPDHKQQQHEALPRLAA

SEQ ID NO: 393023 - protein, 339 aa, unidentified
MLYVGLDIHSKHISICILNNNGKIERQLKVRQVDQMMKVLEELPDRFAACFEASCGYGHYHELLTPIATRVVVAHAGLLKLIYRSKKKNDRRDAERLAKLLYIDQVPTVHVPSADVRAWRELIGFRQKLVHKRTRAKNGVRALLRTVAIQAPTRPGLWTRNGIAWLKRLEFSQPMHALQRDLLIDEIETLSVQLRRVEKELTRFSKDKPAVWQLQSIPGVGPRTAEAIVAFVDDPHRFPHSKCVGAYFGLVPSQYQSGDRNRMGHITREGPAVVRHFLAEATWQAVRRSPTVRAYFERIARGDKDRRKTALVATAHYLVRVMWAMLKHGTLWKETAQTA

SEQ ID NO: 393024 - protein, 430 aa, unidentified
MKSNTQNAKIEAITEKTLVLGIDVGSETHYARAFDYRGVEYSKKPFKFSNTEAGFVTFKAWVLDIKEKHGKDKVIPGMEPTGHYWFNLGKFLQDNEMKPVLVNPHHVKKSKELDDNHPTKNDRKDPKVIAGLVREGRYMIPYLPDGVYADLRTASNIRFQLQAELTRIQNRINRWFNIYFPEYKTVYGKPDAKSGILILKEAPLPEDILTLGIDGVNQIWRDAKLRAVGKARAKTLIEAAEHSVGSKEGAVSARMEIRMLLEDYESRNIRLQEVMGLIEGLVNQIPMAEKLLEIKGVGIKTVSGFLAEVGDIRRFNDPKELQKLAGLALVENSSGKHKGKTTISRRGRKRLRYLLFEVAMSLVAKNPEFRELHNYYTTRRLNPLKKMQSLMAIAAKLLRVFYAILTKNVGYDPKKMVNDIRRPAAYAQAA

SEQ ID NO: 393025 - protein, 337 aa, unidentified
MQRYQLFIGIDISKKWIDVCLSLTGKTSQMPHQQFLNNKSGFKKLLLFIQSFASKHAIDGAWLFCMEHTGVYALPLCSFLEKQSLDYVLQSALEIKRSLGLRRGKSDQADAAYIARYAFLHQDELTPSRIPNDKLLKIKSLLSLRSRLVKANKSLKVASKELTAFSTFSGSVNRTTRKVCKELDKQIKQTEQEIQSSIQESESLNRLFKLVVSVKGIGLIIGASLLVYTNAFTAFDNARQFACYIGIAPFGHSSGSSIKRPDRVSPLANKKMKTLISNGAMSALQWDQEIKAYYHRKIGENKNKFLVQNNVKNKLIQRVFAVIKRGTPYVELNQFKS

SEQ ID NO: 393026 - protein, 377 aa, unidentified
MDEHSRYVGLDVHAETIAVAVAEPGGAVRSVGTIPNTPEAVRRLVKKLGPPATLRVCYEAGPTGYVLYRQLRGLGVPCAVIAPTLVPVKAGDRVKTDRRDAEKLARSYRSGDLTPVWVPDAEHEALRDLVRAREAAKKDQLRARHRLGKFLLRQGHRPPAGIKAWGAKHRAWLQAVRCAHPAQDATLLDYVTEIDHARERIERLERAIAMAVETAPAPVRAVIAALQALRGVAALSAVSVVTEVGALSRFATARQLMGYSGAVPSEHSSGAHTRRGGITKTGNAHLRRIVIEAAWAYRHRPALGGTLRTRQAGVSEEVKALAWKAQHRLHGRYARLLAKGKAPTQVVTAIGRELLGFIWAIGVHVERQQEGAARTAA

SEQ ID NO: 393027 - protein, 361 aa, unidentified
MFSERTSVGLDVHARSVAAAAIDGDTGELFQTRLTPSFDHIRSWITDLPGPVAVAYEAGPTGFGLYRKLAAAGIRCEVVAPSKLQKPAGDRVKTDAKDAIHLARLLRLDEITAVSIPTVDQEAARDLVRAREDCRGDLMRARHRLSKLLLRHGIVYYGGKAWTGKHDMWLRVEALPQLTTRATRLTFDSDYETVLATKARRDRLDAAIEQMAADSEFTPLVRRLGCLRGIGTLTGFALAVEIGDWHRFTGNTIGSFVGLVPSEHSSGQSRAQGPVTKTGNGHARRLLVEAAWHHRPRYAIGKTMRDRWDRAPARARGDDGNRRLHQRWVKFINRRKRSTVANVAVARELAGWCWSLAVMDD

SEQ ID NO: 393028 - protein, 347 aa, unidentified
MTIVSSTRPVTGGVDTHLDVHVAAVVDANGGVLGVESFATTPAGHLALHAWLGSFGVVERVGVEGTGAYGAGLARHLGDQGLVVIEVDRPNRQERRRNGKSDELDAVEAARGALSGRVAGLAKTGTGNVEALRVLLVAKRSARSMRISAVVRLRHLMFTAPDELRTRHAGLSVNALVNEAARLRPRPDGDAVLRATKTAAVSLARRAQALEAELELLDTQIEPLVKATAPALLNIYGVGFDTAAVLLTAAGDNAARIRSEAAWAKLCGVAPIPAMSGKNNGRYRLNPGGNRHANNALWRIVLTRLGQHEPRTVAYMNRRLAEGKTKPEIMRCLKRYVAREVYRALPR

SEQ ID NO: 393029 - protein, 387 aa, unidentified
MRSRGLRIIKGRPISSRVGCERNLTKGAPPSMESTKYIGMDVHKEATTIAVLDPSGRLVMESIVETKAATIVQLVQGLRGDLHVTFEEGTWAAWLYDLLKPYVTKVVVCDPRKNALLQSGNKSDRIDARKLAELFRAGLVSGVYHGQISLRTLKELARSYLTISKDLTRTMNRLKALYRSWSIPCAGTSVYAPRHRAEWLSKIQEVGVRRRAELFYQQLDSLQLLRQQARQDLVAESRQQEATKLLRQIPYIGPIRAALLVAMIQTPHRFRTKRQLWAYSGLALETRSSGEYRYVQGQLERSHKPDTPRGLNQNHNHDLKSIFKGAAVKASSAAGPFQDFYLALLTKGMKPTMARLTLARKIATISLLMWKKGVCFDAGQLKRQESV

SEQ ID NO: 393030 - protein, 355 aa, unidentified
MKYYTSTTEFNCGIDLHARQMYVCVMDRQGKKLVHTNVKDNDFAFFLKLVQPFRHSLTVCCECMFGWYWLADACLEAGLSFVLAHALYVRAIHGGKNKNDRIDSEKLTHLLRSNLIPPAYVYPATLRPVRALLRQRVCYVWRRSELLARIYSHQLAYNRIPVRQSRRNRDPWKERFLAQEDHPLRRIALQNDWAMIVQYDTQISALELDLLRVTKECAGRDYALLQSVPGIGRSLGLTILYEIGSIERFPTVKDFLSYCRLVKGTVASAGKIKGLRGAKLGNPYLRWAFGEAAVIAKRDHAIIGPLAQRLEAQMNGNKFKANTVLAIKLARAVYFMLKNKTVFDPERLVAVLAKH

SEQ ID NO: 393031 - protein, 367 aa, unidentified
MWEAPVRGQRTSVGLDVHARSVVGCGLDGETGELFERRLTPAHGGVLSWVRSLPGPVAVTYEAGPTGFGLARFLVAAGVDCQVAAPSKLQRPSGDRVKTDVRDARHLARLLHLGEIVAVAVPDAETEAARDLVRAREDVRGDLMSARHRVSKLLLRQGIVYSGGVAWTGVHDVWLRKQKFESAALQLTYDTAYDTMIAAVDRRDRLDKVIAAMAADSPFTPVVTRLGCLRGVSTLTAFGLAVEIGDWRRLTGRSIGAYLGLVPTEYSSGGSRSQGGITKTGNGHARRLLIESAWHHRQPYHRPSVDLRRRWDLADAASRARGQQANRRLHARWAGFDARKKRPVVANTAVARELAGWCWSLAVGENS

SEQ ID NO: 393032 - protein, 413 aa, unidentified
MFFAGVDWGDKKHSVCVVDEKGETAAAFDVRHAPDDLDMMVGRLKTFEPLAGICVETSSGLLINALVSAGIPVFPVNPKVAKAWRDGWSAGGSKTDPTDAWMLAHGLREHHVKMRALPRDSALARELAILCADEKSLIQQRTALVNSLISALKTYYPQALDWFSDWTRPAAHDFIIIFPTPASLGAASKKRLAGFLKTHNIGLSPKWLDRIAQTRRGAGPAWPRDTAVCAAKSLLAVSLAKELRALDAALAEYRKRIAELFDSHPDADIFSSLPGAGDKLAPRLLSAFGDDRAKFQSARSVQQLSGVVPVRFESGKLRFDKFRYACNKDFRDALTSFAFHSIPRCPWAKAFYNNAIAKGQSHFLALRNLAAKWLTIIFRMWIDRVPYDEGVFIHSLMQHGSPLAAAYQPVEKR

SEQ ID NO: 393033 - protein, 411 aa, unidentified
MQVVHQRCCGMDIHKKTVVACVLIMSGSGEVQKHVRTFSTMTVDLLALADWLRALQVTHVAMESTGVFWKPVFNLLEPDLSVILVNAQHMKAVTGRKTDLKDAEWMADLLRHGLLKASFIPPQPICTLRELTRYRNSLIQERAQEVNRLQKTLEGANPKLAAVATDVLGKSGRDMIQTVIDGTTDASVLASLARGLLRKKLPQLQEALVGRVQPYHRVLLRHMLAHADFLDAQLSQLLQEIETQLAPFQEEQARLQSIPGIQATTAAVIIAEIGVDMSVFPSADHLVSWAGLCPGNCQSGGKRLSGATTSGNPYLRSVLTQVAWAVSHTKDNYLSSQYHRLARRLGRKKAIGALAHSLLVIIYHVLRTKKPYADLGTDYFDKLDTTRIQQHHLRRLEQLGFTVTLTPKEAA

SEQ ID NO: 393034 - protein, 344 aa, unidentified
MKNRTIAVDLAKNVFEIGISDRPGHVKKTYRLSRAKFLKFFVNQSPSRVVMEACGSSHYWAREIAKLGHEVKLISPQYVKPYVQRNKTDRADVKGMLEADRNSEIHSVPVKTVAQQQITALHRIRSRWMATRIGRINTLRGLLREFGFIIPVGAQHVIPGATELIEDAEVDMPPVLREVFHQICTEIRDLEARLQSVEKRLEALASQTPAVARLRSIPGIGLLTATAMVGFVGDVERFHSSRHFASYLGLTPREHSSGNVRRLGRISKRGDVYLRTLLIHGARSLLWSAHRKSITPSPLQRWGLRIHEQRGYNKATVALANKLARRVWAVWKRDSNYQTDYRAA

SEQ ID NO: 393035 - protein, 427 aa, unidentified
MAYRIAAIDVHKKMLAVVVADVAGEGEYQFERRKFGATPDQLHLLAQWLAEQEVEEVVMESTAQYWKPVWGALEQYWKPARQKREGATKTSGTLHLCQAKSNRGRRGRKSDFVDGERMIKRLVAQELVLSFVPNPEQRLWRTVTRRKHQLTRHKVRFQNQLESLLEQAHIKLSSLVSDLLGVSARRMLKAMAEGETDPAVLAALADYRLRATPEQLRDVFGACAQLPGVYRRLLKMALEELKLVEDQIEQLEQEAFDLLKEHQDKVQRVAEVPGFGVDSALQMIAEVGPAAEAFASEKALASWVGVCPGDEQSAGESKSTRSPKGNRPMRRLLNQAAQAAVKANGSIFQVTFQRLLPRLGYKQAIWAIAHRLCRLLWMILHKGIHYEERGPAVSAKSKRRRAARMIKELKALGYRVEGGPPLAGVHA

SEQ ID NO: 393036 - protein, 343 aa, unidentified
MHVNTIGVDLAKNVFQVHGVDSAGKVVIIRQLRRKQVLEFFSKLPGCLVGMEACATGHHWAREISKLGHTVRLMPPSYVKGYVKRSKNDAADAAAICEAVTRPSMRFVPIKSTDQQALLMLHRTRDLLIRQRTQLINALRAHLAEFGLVAETGREGLAQLGAIITDEGNHEVLPSAMKQALQAIVDQLAALELQVGALDRAIHAHHRANDMSCRLETVPGIGVIGATAIACTVADPSGFKSGRDFAAWIGLVPRQHSTGGKERLGGISKQGDRYLRRLLVIGATAVVRQARLHPQRHPWIMRLLAKKPAKLVAVAVANKMARIAWAIMAKGGYYRAPELAAAA

SEQ ID NO: 393037 - protein, 355 aa, unidentified
MNSEKYIGLDVHQATIVVAVTDSSGKLIMESILETEAATILQFFAGLRGTLAVTFEEGTWSAWLYDLLNPHVDKLVVCNPRKNALLKDGNKSDRIDARKLAELLRGNQLKPVYHGETGVRMLRELSRSYLTIVKDLSRVMNRLKAVYRSWAIPCAGRDVYYRRHRAQWLDKIREAGVRRRAERLYEQLDMLQKLRQQARRELLAESRKHAITAKLRQIPYLGPIRSALAVALIQTPHRFRSKRQLWAYSGLALETRTSAEYRFVEGQVRRSKKLLCIRGLNKDHNHDLKGLFKGTATMASVRPGPFQDFYQASLAKGIKPTMARLTLARKIAAITLTLWKKGENFDAEKLKSQAA

SEQ ID NO: 393038 - protein, 353 aa, unidentified
MSIGVDTHTKTHTLVGIDDQGRTCGTRTVANSPQGWTIALRWVREQGDVGCWGIENSGSLGKGFAQFLLAQSESVVHEVSPQRTAQYRRRGRSQEKTDTTDALAIARLLRAEDAALPLVQADDASTELRLLSDHRDNLVGERTRLINQLHAQMLQIDPCYVEKSGALTSRTGVRYCRDVDVPHTDGVLRTRLLIVRQLTDHLLRLWEEIGTVEIALRQRVAALETPLLQLCGVGAIVAARLIGELGCTPRIRSAAALAALAGIAPVAVSSGGRHGHRLNRGGNRQLNKVFHMIALSQLRHEPLAQAYYAKKRAEGKTARSALRCLKRRLVDVVYRLLPASALSIPESPLRTAA

SEQ ID NO: 393039 - protein, 345 aa, unidentified
MQPTYYNGLDVHKRKISYCVKDGSGKVHAEGWIPATRFDLDRWMNTLPQPWSAAMEATMFSGWIYDHLKPHAAGLKVAHPLMLRAIAAAKKKNDRIDANKICDCLRCDFLPECYMAPTAIRERRRTLRYRNLLVRQMVQMKIKIGTLLMEAGVSFNKQKLHKAGYFRELLVSNPDINEGLRPLLHLCRETVVRLSKLESALVRSLQSDSLLLRRVERLMSIPAIGPITVLNWALEVGEVQRLSSIKKAISYCGLCGDEQRSANSVQRTPISKQRNKHLQTTLIEAAKMAPRYSPTLALLYDREKQKGNANRATLAVARKLVAYLMAVDRGQTHFLVIDQETCTAA

SEQ ID NO: 393040 - protein, 427 aa, unidentified
MKYTQNDRITQLTETTLIVGVDIASQVHFARAFDFRGIEHGKVVRFANDLEGFEQLRMWVKDLCAKHGKDHVMIGMEPTGHYWFSIAEYAKCHSMETVLVNPYHVKRCKELDDNNPTKNDRKDPKTIAMLVKDGRYVTPYIPDGVYGELRTAMSTRWRIAKQLNSVKNRVRRWLGIYFPEFSSVFLSWEGKAAQACLQKFPTPSLVLEQGIEGITQHWKEVGLKAVGVKRATKLYEAAKHSVGISQGLRAAREELNLLFEEYTLLQCQEERIMTMVEELLSKIPACQELLKIKGVGLITVAGFLSEVGDITRFDSPKQVQKYAGLNLKENSSGKHKGRTTISKRGRSRLRALLFRAVMPLVAKNDEFRELHRHYTTRPENPLTKKQSLVALMCKLIRVFYAILTKNVAYDGRKMLDDIQRPALQLAA

SEQ ID NO: 393041 - protein, 341 aa, unidentified
MLHYGLDVHTKYTTYCALDDRGEVVDEGRVPNEREAFQQLFQQPGPKRAVMESCIAWPYVHQLMGDLVDEVQLAHPLLAKYIAWNRVKTDRLDARALAVLLRGDLVPRAYLAPREIQMARNLVRHRLSLVRHRVACKNSIHFILFRTGHQRTASDLFGRGGRSWLAGLPLHKIDRHMLEQKLATVDTFTELISDADRQIQQYFLPHPAFALLQTVPGVGPLIAAICIAELGDIGRFPSAKQVVSYAGLAPSEHSSGGKVRRGHITRVGSKVLRWAAIEAATGYVRKVPDVAARHQRLLESRGAGVARVATAASVLRTVYGVWKSGRPCRAGSATPVPALVS

SEQ ID NO: 393042 - protein, 339 aa, unidentified
MNVMIGIDPHKASHTAVAIDRAEDHLSSLKVRATHRQVDQLMDWAQSFEKRTWAIESVGGMGYLLAQQLVARGEDVLDVPATLASRIRVLATDRSNKNDPGDARSIAIAALRAPRLRIVEPANHVEVLRLLAKRNMDIGNQRQRIVCRLHSLLSELAPGGMAKELYVSDADTLMARLDPQTPTQQMRFDLVQELLDDVRRLDTQIKESHRRIKVAIKASGTSVIDVYGVGPIHAAALIGYSGDITRFADRDAYASYNGTAPIEWSSGGRVVHRVSRRGNRKLNHALHMAAITQLRNPGTQGRIYFERKVAEGKTKKEAVRSLKRQISNSVYRQLLLDAR

SEQ ID NO: 393043 - protein, 337 aa, unidentified
MSEVHVLAIDLAKRSFQVCGADRGGAVLFNRSVSRAKLQQMLCAQPPCIVAMEACATSHYWGRVARDCGHEVRLIPPIYVKPFVKRQKNDAADAAAIGEAALRPNMHFVAVKSAAHQARAVAFRAHQCFVGQRTQLINALRGHLAEFGLVVAKGPANLKSLVGMMKDESLDLPEGVRDVAKLFLDQIEAITSRIDHLALRLKKATKENDEMRRLCTVPGVGPVTAGAVLAFAPDLKVFTSGRNFAAWLGLVPRQHSTGGKTRLGAVSKMGQNDIRRLLIVGAMSRIRWIVRKGVLPDNWLGRILGRKPRMVAAVALANKMARVIWAMMTREENFRMA

SEQ ID NO: 393044 - protein, 481 aa, unidentified
MHGIRSFLPAFRTQNMAKKTRKISGRGHFCQAVAFQKSLLPVTTHCAGLDIHKDLIWACAGPFEDGCTPEVRTFPTHTSGLEALAAYLRERQVETVAMESTGVYWLACFELLRDRGLSPMLVNAQHVKGIRGRPKTDRQDCIWLCRLCMYGFLTPSFVPSDEILILREHIKLRQDLLLDYTRYLHRCLDEMVKMNCRLDTLVSDLAGMSAQRVIRAVLSGVHNPHKLVALLDPSIQKRHKAEDMLNALSGNFAPRHLLILEEWLCEMDYLHQRLEVVCKKIASLLKALPKAAVIQPLPPRHDHKHYKENLFFDEPLRPIFNDIFGMDLTQLPGVGCGLLLTFVGVVGTDLSAWPSSGQFASWLGLTPVNQISAGRCRSSKTKRVKNRLTQTLKTAVMSLQRTKTMLGENYRRLNRRMTGAKTRTAIARKLAIILYDCLTGKTTPEAYDEDRQSHVLKERRIKSMSRQLHKWGYDVSPRKTA

SEQ ID NO: 393045 - protein, 385 aa, unidentified
MAPPRMPEAVIGLDVGKLSHWACVATRDGEILLSAPVANREGDLDSLFGRFPDALVVVDQSRNIGALALARAKAAGMSAAYLPGLAAHGAARLFAGDAKTDERDAMVIAKTALGIPDALLPVGDPGPTVAAARALAAQRNFLTCENTRSKNRLRSILLESCPAFEALVDLSDGPQLRLMASLGGAWSVADAGPRRAAALTRGAARGKIEALVRSTASSTRPDAAAIAAEDRAVRLLARRISENSAEIDVITAEISALLEGDDTYRCLLTVPGIGPKTASELAISIDIEDFPSHDRLASYCGLTPRNRQSGTSISSVTASRQGNKRLKNLLIFSCNCLTRTEGRWGDYYARCRERGMPHGKALKALARKRLKVIYAIMRDRVPYAA

SEQ ID NO: 393046 - protein, 383 aa, unidentified
MRTMYSNVACGGMDVHYKFSNVTFRDQAGRVVRRERLDHPQRARLRERLRRWPRGVPIVLEASFGWGWLSDLLSEAGLEPHLSNCYKLEQMRKARGGVKTNKKDADLVSLLPFETTDWWEVWRAPREVRNRREQMRFRGDLVALQTAVKNRIHAVFHRHGIFHEFSDLFGGQGRRFLAELCLGGSEYLSPEALQALRGQVLLLDHLRRQLADVAWILRRQLARTPLIRRLKTVKGFGLILSHVLTAEIGRIERFRNHKALASYSLLAPRSHESGQEDPDRSPRGRHLGTRGNRTLKWAFIEAAHGAVRSGGRWRATFDRVTDGGTRDRNRGYIKVARELVKVVYVVWTKGVDYQPIAPPRPGRSQKKQSRSGTGQLSHPMVHA

SEQ ID NO: 393047 - protein, 408 aa, unidentified
MQKRENLLYVGIDLHKESHTAVMVNCWNEKLEVVVIENKPSEFKKLAEKVNKKSNHLGLEPIYGLENAYGYGRSLAVWLIEKGYIVKDINPALAYDQRKSAPMLRKNDEHDAYCVATVLINQLHTLPDAKPKDNEWTLAQLVNRRDLLVKDGIRFKNGLHEQISIAYPSYSKFFSEIDGKCAMYFWKTYPSPVQLQGKTAEDLTIEFKEISRIAKKDKAELILDCVQNDGNTFREYQESRDFITTSLVRDLEHQKEELAGLDQEIEKILLSFDYKLTSMPGIGTSIASKLIAEIGDIRRFPSADKLARFAGVAPVKFSSAGKGKEQSSRQGNRQLHGLFYFLAVTMVSKPKNGIPNHPVFYDYYMRKIGEGKTKSQALVCIMRRLVNIVYGMMKNKTEYREPIRKEEQ

SEQ ID NO: 393048 - protein, 363 aa, unidentified
MLIIGVDYHPSFQEIAFLNEETGECGERQLNHSEGEAEKFYRELKQRGVNVRVGMEATGYARWFERLLAELGFELWIGDPAVIKTKRVRKKKTDREDARLLLRLQLEKRFPIIWMPTPENRDLRQLLWHRHRLVQMRTRIMNQLQAVAMNEGKRWKKKLFSEQGRAQLEKLQLAPWASRRRKELLELLDRLNPTIAELTAAVEQEAKRRPEVLRLMTHPGVGPITALAFVLIIGTWERFHCGKQIGSYVGLVPCEDSSAGRQRLGHISKQGNTLLRFLLVEAAQAAVRWDPDWRRRYLHLAVRRDRRIAKVAMARRLGVRLYWMWRNGREYSQSVEFGSLRTSRGRRCREQRKRKKTKEKKLF

SEQ ID NO: 393049 - protein, 411 aa, unidentified
MQVIYERCCGLDVHKRTITACRLKWLGSDWQREIRQFGTMTKDLLGLLDWLMSEGCTQVAMESTGVYWKPVYNILEGQFEVLVVNAQHLKAVPGRKTDVRDAEWIAELLAHGLLRGSFVPPANVRELRELTRYRTSVVRDRARTVNRLQKVLEAANIKLASVVSDIDGVSARLMLEGLVAGQRDTEQLAGLAKGRLKEKHAQLVEALSCRLQPHQSFLIAEHLAQIDYLEGAIERLSRQIEEKLRPFEQPIGWLDTIPGVNRRTAEVLWAETGGDMTRFASARHLASWAGMCPGNHESAGKRLSGRTRKGSPWLRHCLVEAAHGAAHTKNKYLSSQYHRLAARRGKKKALMAVGHSILLIAYHLLTRKQAYSDLGANYFDERDRQAVTRRCVNRLQKLGYQITMEKLQMAA

SEQ ID NO: 393050 - protein, 403 aa, unidentified
MSMNAVGIDVSKGKSMVAILRPYGEIVSKPFEVKHTVSGIRSLIKQIQSIDGESRIVMEHTGRYYEPLVRELSQANLFVSAVNPKLIKDFSDNSLRKVKSDRADALKIARYTLDSWTELRQYSLMDEIRSQLKTMNRQFDFYMKHKTAMKNNLIGILDQTYPGANTYFDSPARDDGSQKWVDFAITYWHVDCVRKLSLNAFIDHYQKWCKRKKYNFSESKAEEIHRTAKELVPVLPKDDLTKLIIKQAVEQLNTASQTVEQLRIMMNEAASKLPEYPVVMAMKGVGKSLGPQLIAEIGDVSRFTHKGAITAFAGVDPGVNESGSYEQKSVPTSKRGSSTLRKTLFQVMDVLIKTKPQDDPVYLFMDKKRAQGKPYYVYMTAGANKFLRIYYGRVKEYLSSLPK

SEQ ID NO: 393051 - protein, 350 aa, unidentified
MKKNSKACERHPAETIGIDLGDKMSRYAILNEEGEVVEEGSFRNHADSIGKHFGNRARARVALEVGTQSAWIAREFTKLGHEVIVANARELKWITSSDHKNDRNDARKLARLARADRNLLAPVEHRTAEQQTELAVIRARDALVRSRALLVNTARSLAKGFGLRLPAAVTPTFGARALVLLPESLRAAVGGLLEQIDRLSLEIGAYDEGVAEVAARHPEVELLASVPGVGTLTATAFVLTLGRKERFAHSRDVGSFLGLRPRQNQSGERDPQLGISKSGDKYMRKLLVQCAHHMLGHLGKDSALRQWGLSKSGGSAAKKRAVVAVARKLAVLLHRMWMTGEKFKPFPKMV

SEQ ID NO: 393052 - protein, 319 aa, unidentified
MAQNQSVVVGIDVAKDKVDACIRSFRLRQTFPNTAQGHRKLVTWLRKYAVGKAVMEASGGYEREWRDVLHKEGIEVWIVDPKRVRSFALSAGRLAKNDPIDAEMIAWFAETFRQAPGQVPDAAREELAALTKARKALVDLKTRLQAQDEHAAPKPARKAYARVLKRIGAEIGELETIISAKVKATPAFAARAEIIESVPGLARTTSAALIAGMSELGQVSDAVAAALIGAAPYDDDSGKRRGERHIKGGRRWVRNAIYTPCVGAATQHNPVLKAYYQRLIARGKPPRLAFIACMRKLIVILNTMLARREKWDHSRYAPQ

SEQ ID NO: 393053 - protein, 388 aa, unidentified
MRQTDDLSKSITPFVQGNTLVAIIELSLSSWLVAGVVPGIARQPLKKLEPDEAELLRLLQRWRDEAVKSGCAIERLVVAYEAGRDGFWLARWLRAHEIEVHVIHSTSVAVSREHRRAKTDRLDTAMLLRVFMGWLRGERGHCGMVAVPTIEEEDAKRPHRERENLVGEKTRIVNRMKAALIRLGIRGFKPELRRAPLKLDGLRTPEGLPIPPNTLDEIRRDLARLAMVREQIDLIEQARLERITQGPKTGPNAMVRLVASIVGVGVETADMLVREVLSRDLRDRRAVARYAGLTGSPDESGSKRREKGLARAGNARVRRGLIQLAWRFLGFQKDSALTQWYRARTDGVKGASKTKMIVALARKLLIALWRMVTTGEVPEGVRLRPVEA

SEQ ID NO: 393054 - protein, 445 aa, unidentified
MGDTPSNSSDGLFPRSSLCHRLSPAITKGLHHSNRATPATRFGAHIRLGVPLLDDVLRCYTHRSGGEGPVELLTPARLVSFRRPGGVCHPFAFSEQKGATMSMVRMIVGGVDTHADTHVAAVVDSNGGGLGIESFPADHGGFEALLGWLASHGEVDCVGVEGTGSWGVGLARFLHDHGISVIEVDRPNRQDRRRVGKSDPTDALSAARAALSGSASVIPKTRNGPVEEIRILLVARRSARSQRIETLNQLRHLIYTGPETVRSRFKDRYKTGLVTEVAKLRPRKGSDQVLYTTMVTMRGLARRIQSLNSEIKDLDSVLTELVSDTAPSLVGLYGVGTDTAATLLVTAGDNPDRLRSERSWVHLCGVSPIPAGSGKTSGRHRLNRGGNRQANAALYRIVLTRMSSDARTRTYVTRRRAEGRNTAEIMRCLKRYVARETFKHIHHIT

SEQ ID NO: 393055 - protein, 475 aa, unidentified
MGILLYYRVVVIKAPLQGRCYTVRDAVDWCDSPTTRWFSKGSNHSPYTFVNQLNTARRFMWNKATKVRRTVDAASDFALEVFVMVVSIGIDVSKDKHDCFIVSSEGKVLADAFTIPNTMDGFNCLLQRIQDCTTPQDKMKVGLEATGHYSYNLLGFLLDNGLTTYVLNPLRTNLYRKRLSLRKIKTDRVDARTIASMLLSDAGLKPYTDTAYHNEELKSLTRYHFDKVKERAKLKSSIARLVCIMFPELEKLVPSLHIASVYALLEEFPGAKQIAAAHLTRLKALLETASKGRYKRDMALEIRDAARNSIGSWMPAKSLELQHTIRLIRELDNEIAEIEEQIQAIMDELNSPITTIPGIGFRMAAMIFAEVGDFTRFDSPDKLLAYAGMSPSTYQSGQLKNCYPHMEKRGSRYLRYALYNVTKYVCHWNPAFAAYLAKKRAEGKHYNVALSHAAKKLLRLISAMERSRQPYCAAP

SEQ ID NO: 393056 - protein, 321 aa, unidentified
MQRYIGLDVHRDYCYAHVLEVGQVEGRRLRFPNTAEGWAEFVTPLGPDDAVALEVSSGAFRFYDSLVDRVGQVLVVDARVMRRLGSRKRKTDRDDARLLAERLALGTLPGVWVPPAAIRELRALIQLRRQLVEQRTRWKNQIRAVLLRHGYRTPRGLWRARSHLEQLWRLSLPEAERVWLAVALEQLRSTTEHLRAVEREIAYRVRHLRPVRQLMSIVGFHVIAAATYYAYVGDPWRFPSGKHVVSFVGLAPRVRQSGTVDRRGGISKEGPRVLRWALVEAAAVAARHGPPALRTFYLRLRATKGHQVAMVAVAAKLARIA

SEQ ID NO: 393057 - protein, 344 aa, unidentified
MMEVAIIGVDLSKNVFQLHGSGADGATVFSKKVSRTRFLSFLSRFPSCIVAMEACASSHYWSREIRELGHEVRLIAPIYVKPFVKRHKNDANDAFAIAEAAARPTMRFVEVKSEAQQSQSMVFRTRELLVRQRTQMINAVRAHLAEHGLVVANGAVHLEKLRQRLEDASEQIPEIVHDMADLYFEQIAGHTQKIKELEKKLQTLAKNSDEAKLLQTIPGLGPITAIAIQAFAPALTIFKRGRDFAAWLGLVPKQHSTGGKQRLGKTSKAGQRDIRRLLIIGATTVIWWARKKGAPRHPWLEEILARKAPMVAAVALANKIARMGAHHSFGRFRLALWRGRTQNR

SEQ ID NO: 393058 - protein, 451 aa, unidentified
MAKKKLEMDIINPHCAGIDIGSRSHFVATGQALEDVKEFGVYADDLIKICEHLNARGITSVAMESTGSYWQNLYVELVKHGFDVVLANGKFTKNIKGKKTDVKDARWIQKLHSIGLLTGSFLPDDQTETLRTYCRQRQNWLDLAVEATHKMQKYLKLLNFRLDVVVRDVCGLTGMTIIKDICKGNLNPQELAKHRHFNCRKSQDEIAKALKGNNRTDYLFGLKQEFESYEFYQKKIAECEKMIAAFLKSEINTNPQKKKLKTTDKQHKRLNKNAIKGIDLNQASFQYFGGVDLMAIEGLGHSTVLSIISEVGPEGFSKFETAKHFTSWLRLAPNNKISGGKLLSSKTPKGSNRLKIALRNAANAIGNLKDTHLSNFFNRVCYRKGRTVAVSATARKLAVIIWNMVVKQIPYQPPTQYLFLDEKRKLGMVKRIRKQMDRFELTNADLGFVTT

SEQ ID NO: 393059 - protein, 341 aa, unidentified
MSNAPIVYGVDLAKSVFQMHWFDPETGEVMNKQFKRAGFLSHFANRAPCLIGMEACGGSHHWARQLIKMGHQVRLMPGEFVKAFNIRNKNDAADARAIWLAVQQPSKAIAVKTELQQAMLALHRIRQQLVKFRTMQINALRGLLTEYGEVASQARMSLDKVMPEILARIAERLPTALIDTLREQWNGLTKLDEQIAAIERRMREWKKDDCAVKAISEIPGVGLLTATAAVAMMGDAKAFRSGREFAAWAGLVPKQTGSGGKVKLHGISKRGDTYLRTLLIHGARSVLINARDPSPWVQQLRQRRHPNVVIVALANKIARTIWSVLAHNRPYRKEYISMKPT

SEQ ID NO: 393060 - protein, 384 aa, unidentified
MSVDHRPEQTSIYIDLGAIFVSLELSRATWLITSLSPGRQKMSRHRVRGGDSAGLLVRLAELQAKAHTRTGQLFPLIVIQEAGLDGFWIHRVLQTEGIESHIVDPASVATSRRRRRTKTDKIDGEALVRTLLAYKRGEPRVCAMVRAPTCREEDERRICRERRVLTAERVTHVNRIKGLLFAQGIADYEPMHRHRRVRLDELKTGDGRPLPPQLKAQVCRELDRLELLLEQLKAVEAERDALLAATETANKPALPTLLLGLKGVGPEFASVLWSEGLYRSFANRRQVAAYAGLAPTPWQSGAVNREQGVSKAGNPRLRTTMIQLAWLWLRHQPDSALSRWFHERVERSTSRRKTTIVALARKLLVALWRYVTAGVVIEGATMKA

SEQ ID NO: 393061 - protein, 428 aa, unidentified
MKYNTQNAKIKSITEKTLIVGIDVGSETHFARAFDWRNYEYSKKPLEFSNTEAGFMTLKAWMADFAEKYGKNVVIPGMEPTGHYWFNLGAYLQDNGMKPVHVNPHHVKKSKELDDNNPNKNDRKDPKTIAALVNEGRFSYPYIPTGIYAEIRSLSNLRLQTQEEITRIKNRIARWFSIYFPEIKDVYRNPDSVSGLMILKEAPLPQDIVKLGVDGINKIWRDAKLRAAGLKRAKTLVTAAEHSIGSQEACDSARIELKILLNDYEIYHQREEELMELIEEKLSEVPYIDKLLEIKGIGMKTVSGFVAEVGDIKRFDNPKQLQKLAGYAIVECSSGKHKGESHISYRGRKRLRYVLYEAAISLIARNEEFKEVHRYYRTRKENPLKKMQSVIAVACKVLRIFYTILTKGVTYDGAKMMQDIKRPQLKVA

SEQ ID NO: 393062 - protein, 351 aa, unidentified
MLLIGVDYHPSFQQIAFFEDETGECGEQQLNHSDGEAERSYRDLQQRGICVRVGMEATGYSRWFERLLAELGFELWIGDPAEIKAKRVKKQKTDRKDAQLLLRLMREDNFPRIWVPSPENRDLRQLLWHRHRLVQMRTRIMNQLQALAMNEGRRWKTKLWSEKGRAELEKLALAPWASRRRQELLELLGRMSPTIEELTAAAEQEAKKRPEVVRLMTHPGVGPLTALAYVLIIGTPARFHCGKQIGTYVGMVPSEDSSAGKQRLGHISKQGNSLLRFLLVEAAQAAARTNSEWRRRYMHLAMRRHKSIAKVAMGRRLAVRLYWMWRNGCAYSPSLEFGSYVGQLGTGHGVK

SEQ ID NO: 393063 - protein, 340 aa, unidentified
MKEVITTIGLDLGKKVFQVHGVDAVGGVRVRRSLRRSQVLGWFGKQPACLVGMEACATAHYWGRELSRLGHEVRLIAPAYAKACVRRNKNDAADAAAICEAVSRPGMRFVAIKTVAQQAAGGLHRVRDLLQKQRTMLINQLRGLMAEFGIVVAGGPQHVKDLLAVLADPADARVPELLRGPLLGLAQVLGDVERRGATLERQIVAWGRGNATYRHLITVPGYGPILAGAFAAFVVEPSTFRSGRDFSASLGLVPRQEGTGGKLRLGSISKRGNGYLRRLLVNGAMSILNTSRARQDPWIARLLASKPRKLVAVALANKLARIGWAMMVRQEDFRPRSAAA

SEQ ID NO: 393064 - protein, 405 aa, unidentified
MGKVFVGHDWAEAHHDVCVIDEGGDRLGGGRVPEGVEGVARFHDLVAAHAEDPAEVVIATETDRGLFIGSLVAAGYTVLAVNPLSTSRYRERHSTSGAKSDPGDAWVLANLARTDGHNHRPIGGDSDLAEAIKVLARAHRGLIWTRQRQLNQLRSTLREFYPAALDAFSELGHPDALAVLAIAPTPAQGRRLSQSKIASALRRGGRQRRIEQRTVEIQTALRAEQLTAPNVISDAMGATAQALVAVTGELTTQIAALENQLADHFDQHPDAEIIRSLPGLGMTLGARVLAEFGDDPNRYADAKSRKNYAGTSPITRASGTRQVVLARYARNKRLADACYLWAFAALTSSPGARAFYDHRRAKGDTHHRALRALANRLVGILHGCLRHHTPYDEHTAWAHRHDIAA

SEQ ID NO: 393065 - protein, 339 aa, unidentified
MTEVSTVGLDLAKKVFQVHGIDAFGAVVVRRTLRRSQMLAWFAKLPRCLVGMEACATAHYWARELAKLGHEVRLIPPAYAKAYVRRNKNDPADAEAICEAVGRPSMRFVAVKTEQQQAAVGIHRVRELLMKQHTMLRNQLRGLMAEFGVVAAKGRVGVGELSAILADPEDRRIPSPLRDGLMMIVETLRGIDRKLEVIERQLAAAGREDTRYRHLITAPGYGVILSSAMAAIVVNPAAFRRSSDFAASLGIVPRQEGTGGKVWLGPISKRGNGYLRRLLVNGATSLLNSKRAKQDPWLVKLLATKPRKVAAVALANKMARIGWALMIRQENYRMMPAAA

SEQ ID NO: 393066 - protein, 355 aa, unidentified
MDSKKYIGMDVHKESISIAVMNAPGKIVMECLIETKASMILQFIDGLRGDLQVTFEEGTSAAWLYDLLKPHVTKLVVCDPRKNASMRDGSQSDKIDARRLAELLRLNHLSPVYHGEHGLRSLKELVRSYLTITKDLGRVMTRVKAIYRSWAIPCTGKQVYAPRHRAEWLGKISEPGVRRRAEFYYQQLDALRTVRQQVRRDLLAESKKHKAWKLLCQIPSIGPIRAAVLLGILQTPHRFRTNRQLWTYSGFGIETQSSADHRNVDGQLQRKKKQSSTRGLNRNYNHDLKNLFKGAAIVASNKPGPFQEFYTALLTKGIRPEMARLTLARKIATIVLIVWKRGACFDAQHLKPQTA

SEQ ID NO: 393067 - protein, 472 aa, unidentified
MATGEMNRKQRKELTRQLRSQDPGLEVVHPRAAGIDVGNSAHYVAVRPDQDAEPVRRFECFTADLHRLADWLEACGVQTVAMQSTGVYWIPLYEILEERGLEVYLVNARHTKHLPGRKSDVQESQWLLKLHTHGLLNNSFQPPAEIRVARTYWRQRGEHVRGASPCVQRMQKVLTQMNLQLANVSSDLSGLTGQAIVRAILAGERDPRKLAELSHPQIRASREEIVKSLEGNWRPELLFVLKQEMEMYDTYQRKIAECDRELQAHLKQFADNVGRSAPELTSTEQPKAFKAKKAKRVQGNAPEFNLSSELQRISGVDLTGIDGVSVIVAQTILSEVGLDLSRWKTEAHFASWLGLCPDNRVSGDKVLKRGTRRVINRAATALRVAATTLIRSRSYLGAQYRRLRTRLGAPKAITAMAHRLARLVYRMLKYGQEYVDKGTQFYEARLRDQQLQSLKKKAASLGLQLIEADEVA

SEQ ID NO: 393068 - protein, 465 aa, unidentified
MAARKKKRMSAQVVEDEDYQLHYEKVAGIDVAKESAAVCIRLPAAEGKTHRTSHLREVIATVPAITELAWELKTLGVQMVSMESTSDYWRIWFIVLEEAGLAVQLVNSSQARSLPGRPKTDKEDARWIARLTEMGLLRPSFVPPPEIRALRLLTRHISDLTADRTRYWQRLEKLLEDGLCKLTSVVSKLAGHQTARAVIEAMIGGERDPRALAALGKGNMRDEKLPALAAALTGMRFGPEHAGVAASLLAAIDLLEEELRVAEDAVAAKLAAIPASWGVDAGGATGPDAGREEGAPVLPAVDRLDEIPGLGRESAAALIAEIGLDMSRFPTPEALVSWAGLTPTARQSGPRKGRGKKGRGNTYAKHIAVLAAYAAANTDTFLGERFRRLASRPGGGGRKKAGCAVGRSILVIVWHLLSDRAARYRDLGPDWHARHTDRNRKARSARRQLEALGYDVIITLREDAA

SEQ ID NO: 393069 - protein, 358 aa, unidentified
MAGKVTETAVVGGVDTHKDLHVAAVVDQNNKVLGTQFFSTTRQGYRQMLAWMTSFGALKRIGVECTGTYGSGLLRYLQNAGLDVLEVTAPDRMERRKRGKSDTIDAECAAHAAFSGIRTVTPKTRNGMIESLRVLKTCRKTAISARRVALQIIHSNIISAPDELREQLRNMTRMQLIRTLGSWRPDASEYRNVTNVYRISLKSLARRYLELHDKIADLDVMIAAIVDELAPELIKRNAIGYESASQLLITAGDNPQRLRSESGFAALCGVSPVPVSSGKTNRYRLNRGGDRAANSALHIIAIGRLRTDDKTKEYVARRVAEGHTKMEAIRCLKRYISREVYTLLRNQNRQINSIPITA

SEQ ID NO: 393070 - protein, 314 aa, unidentified
METTRYVGIDVSAAMLDVAVHEGSVTQVANDASGITDLVKALQDASTTLVVLEATGAYHREVTSALVAAGVPVAVVNPRQVRDFARSTGLLAKTDRLDAGVLARFAAVVRPTPRPVPSDATLELTALVERRRQLVEMLTAEKNRLSVARKPVRPSVQQIIRALEKALAAADADIDRWIRSSPVWRAQDDLLQSVPGVGPQTARLLIAELPELGRLTRREIAALVGVAPLACDSGTLRGQRHCWGGRSHIRAVLYMATLAGSRFNPVLRAMYRRLKAAGKPPKVALVACMRRLITILNAMMKTQRHWQAPALLTP

SEQ ID NO: 393071 - protein, 344 aa, unidentified
MSKVTSRTVFVGLDYHAESVQVCVLSGEGKMLANHSCRNDWRAVATAVREKCGPGTEVQAAIESCCGAADLADELIAQARWSVDLAHPGYVARIKQSPDKTDFSDARLLADLERVGYLPRVWLAPEEVRELRRLVRYRQTLTKERKNLKLQIGATLREARQKPPTELNPWTKAWLDWLTNRTELSPNARLIVRQRLNRLAALATEIRAAERLLAQQTEHDPLVQKLLTFPGIGLVTAVTLRAEIGRFDRFRTGKQLARFCGLSPRNASSGQKQADAGLIKAGNPQLRTVLVEAAHRLIRYDERWTKLAGQLRQRGKPASLTTAAIANRWMRWLFHQLQPERLAA

SEQ ID NO: 393072 - protein, 370 aa, unidentified
MNKTDKYIGLDVHQDTTVIAVAEGGRVGEVRVYGSIPGDLRSLEKVLGKLGGENVRLHVVYEAGPTGFLVYRRLRQLEIDCIVVAPSKTPQPKGVRQKTDLRDAVQLARLHRAGELTGINVPDEVDESVRDLTRARADAVHDLTRAKQRLKSFLLRQGYRYPGSANWSEAHQRYLRKLTLPLPALRSVLEEQLLAIDQATERVKRLDDLLEVQIPKWRHYPAVQALMCLRGFQMTAAAIMVAEAGDVRRFAHPRGFMGFLGLVPKEETTGGSRKLGSITKAGNAQARWCLIEAIQSAYGPPKLSSRLSLRQEGQPKAYRDLAWKIQVRLHKRGWHLLHRGVMKAKVNVALARELAGFVWDLLRQVPAPDA

SEQ ID NO: 393073 - protein, 334 aa, unidentified
MEQITTVGIDLAKNVFSLHGVDRSGAVALRRTVRRDQLLQTVAALSPCLIGMEACSGAHEWGRRFQEHGHTVRLMAPKFVAPYRKSGKNDGNDAEAVCEAVTRPNMRFVPVKSTEQQALLSLHRVRQGFVVERTAIINRLRGLMSEFGVILPLRSVTVRRQAAAAAEALPELARRVIGDLLEQMRALDERIDGYDREIEAQARLSESARRLMKIRGIGATTALAIVATVGDAREFKNGRQFAAWIGLVPEQYSTGGRPRLGHISKRGDAYLRNLLVQGARSVLQSAGAHQDRMSRWILELLQRRGYYRTLVAIANKNARIAWALLAKNETLRTV

SEQ ID NO: 393074 - protein, 325 aa, unidentified
MGTSPHQQGWDTKMEKLSYGGIDVSKDRLDVVVLPEERFFSVSNDAAGWAELVARIRPLAVSAIGIEPSGGYERGIIRALLAAGLSVRRINPNKLRQFARARGVLAKNDRLDARLIAEYVAIMPTRVVQRDEAVEKLAEVVTMRRQLRDEHVTVENQAAHIEDAMLQRLNKRRLARLEADTRLLDKRLAEMVATNAALAQRYELLTSMPGVGPVLAFTLIALLPELGQMSRKQIAALVGLAPYDFDSGKLRGHRSIYGGRMPVRNVLYMAALSGCRYNPALKAFHKRLAAADKKSKVVIVAVMRKMITTLNAMLRDNVEWQPKSA

SEQ ID NO: 393075 - protein, 402 aa, unidentified
MYNAVGIDVSKGKSTVAVLQPAGVIIRKPFNVNHTSSELDELAKYIGSLEGETRVVLECTGRYHEPVVKTLSEAGLFVSAVNPHLIKNFGNNSIRKVKSDPADAKKIARYTLDNWIELRQYSSMDNTRTQLKTLNSQFSFFMKQKVAAKANLIALLDNTYPGVNKLFDSPVRDDGSEKWVDYAYSFWHVDCVRKIGLKTFTERYQAFCKKHHYNFQPAKPAELFLASKDLIAVFPKEASYKLLIHQSIQQLNLASSHVEELRSKMNELASTLPEYATVMGMYGVGKTFGPQLIAEIGDISNFSHREALTAFAGVDPGVDQSGTHNSKSNKASKCGSNRLRKTLFQIMSTLLQTAPENDKVYQFLVKKRAEGKPYYVYMTAGANKFLRIYYGKVKECIRNLEQ

SEQ ID NO: 393076 - protein, 343 aa, unidentified
MAYFAGLDVSVKETSVCIVDDAGKIVREVRVASEPEALLQVLTNTIYRFKRVGLEAGPLSQWLYSVLAEAGLPVICVETRHMRAVLKAQINKTDRNDARGMAQMMRVGLYRPVHVKTLRSQKLRMLLTHRKLLQSKAIAIENDLRGSLRNFGLKVGMVGTVKFEARIKELVENLPDLAELVEPLLIVRRVVREQLGILHRRLLAIVRDDDVCRRLMTVPGVGPVVALTYRVTVDVPARFRNSKAVGAVFGLTPAKYQSGENDRTGAISRCGDEMMRMMLYEAAQSMLVRAAKWSWLKAWAMKIARHRGMKKAIVALARRLAVIMHRIWVDGTEFRWTREVAAT

SEQ ID NO: 393077 - protein, 358 aa, unidentified
MSRCIPTDAQAITLGVDTHKDVHVAVALDGIGRHRGTLSVPANLAGYKRLVDWAEQFGPLKHAGVEGTGSFGAGLTRFLKGRRIKVSEVIRPKRRDQYRAGKSDSLDAEAAARAVLAGTATGQPKSADGEVEMIRTLRITRRSAVKARVGAANQLQNLLITAPEGLKSELCGLSTARLVAIASRFRPGPNPSDVEAATKFALRSVARRYQRLSEEISELDEQLDRLVTEAAPELVAVEGVGTDTAASLLIAAGDNPERLENEAAFAHLCGAAPIPASSGKHVRHRLNRHGNRDANRALYVIAVCRMNRDERTRSYVAKRTAEGKSKKEIIRCLKRYIAREIYRVLSSLSLHKPSISVP

SEQ ID NO: 393078 - protein, 369 aa, unidentified
MKHASNSVCVPVLTMGIDVGDQRSQACIVDGTRRVLEEFSFETSAMSLCDKLRREPCQVILEVGPHSRWMQKSLESLGHRVRVVDARKIQLISRSNHKTDRRDARTLAQLGAGVPELLGDIKHRSDQAHADLTVLLTRDHFVQLRTATINRTRGVLKSVGVKVPKMATKAFHARVGALVPSALKRGLQPLLDELQSLQLRIHSLDREIQAMAARYPAVAKLSAISGVGNLTALAFVLALDDPGRFKKSRDVGPFVGLTPRKRASGASDPQLSITRTGNPFLRRILVQAAHYILGPFGPECLLRSHGKRIVERGGKHAKKRAAVAVARKLAVLLHRLWVSETPYEPWYRSTPPAPLEVRQRAKKRRPARP

SEQ ID NO: 393079 - protein, 398 aa, unidentified
MNHITKLLEKVNVNSFKDIQTRNYPAYIGMDTHKDTIVSSIATPGRTQPKHLGTIANDPKKIAIFVKNISTKFNGEVLLFCYEAGPCGYILYHQITSLGHDCMVVAPSLIPQKSSKRVKTDRIDAQKLARYLRDGSLTSVWVPNTEQEAMRDLVRIRLDFKIQETKAKQQINGFILRNGHIWPREKSRWSKGFYTWLEELKFKHPWQQVVLQEYFDALIGATKKLDQLCAYIQQVRMTWSQSVIIDSMRALRGIDTLAAMTILAEIGDFSRFEHPKKLMSYFGLTPSEYSSATKRRQGAITKSGNSAARRMLVECAWSYQFPARKTKHIKAKEKNASDHAKAVAWKAQKRLCTRYQTLIQAGKNKNQVIVAIARELVGFIWEIVIVETHKLKQAQSLK

SEQ ID NO: 393080 - protein, 332 aa, unidentified
MEKIYIGIDLHKRSQTWVVLGSQDNTKLLTRTYPVTPDGIVSAISDAKKLGNDMSALVEPVCGWIWVVRQLRELGLKVEISNPRRIRMIAESLKKTDENDAYTLARLLKTGEVALSNECDPETRKHRSLVRERCFLVNIRASIKTRLESIVTRDGNHTFLARAKNRTQMIVTNSEVMMHQEAIASLDIILKKVEEEIRQKAKVLSPQLKRLMTVPGVGLVTASTICAEVGDFRNFKRPKNLTSFAGLVPRERSSGGKQKLGSITHQGSTYLRYVLIETALRIRETKETMSLYAFYQKIKVRSGAMKARVALARKLLTIMWFMMKNEKDYVAY

SEQ ID NO: 393081 - protein, 387 aa, unidentified
MPQLNDLSRSLVALDQDSTIIAVVELSQSSWLVAGVLPGIERQPRKKLEPSAERLLGLLHRWRDEAVRAGKTITRIALAFEAGRDGFWLARWLNARGVEAHVIHPSSVAVSREHRRAKTDRLDTELLKRAFLGWLRGERGHCSMARVPTIAEEDAKRPNRERECLVGERTRIVNRMKGTLARLGIRNFKPTLRKAADRLATLHTPEGMPLPPNVLAELQRAMARLGFVVSQIREIEQARQKRLEQQPETGPHAMVRQLARVVGVGIETADMLVHEVLSRPMRDRKAVARYAGLTGSPDESGTKRREQGLARAGNARVRRGMIQLAWRFLLFQKDSALALWYRARTADSRVGTRKTMIVALARKLMIALWRFVTTGETLEGVVLRPAG

SEQ ID NO: 393082 - protein, 364 aa, unidentified
MDNITHLGLDVHKDTIAVAILRPGDLPLDQRVIANTLEALRKLVARCGDPASLLACYEAGPTGYDTHRLLTSLGVRCDVIAPALTPRRVGLRVKTDRLDARNLARLHRAGELTAIRIPTPAEEALRDLVRTREDLKADCRIAQQRIRSFLLRQGRRYPAARSGWTERFDRWLRSQRFTEPAAQTTFLHLLAAYSVRRAQLDSIDAEIISAAKMPELADPVALLRCFRGIDTLSAVMLVTETGDFRRFPSAACFMAFTGLVSSEHSSGLSFHHGSITKTGNAHIRRVLVEAAWSYRHRPYVSQALAKRLENQPPEIVAYSWAAQCRLSGRFRKLAPTRGQNKAVVAVARELSGFVWGMMTERTAI

SEQ ID NO: 393083 - protein, 397 aa, unidentified
MYLNIGIDVSKNKHDACILNENGEQIGKFMKLTNTKTSLDKFLEQIKMISEKHGAKVRIGLEATGIYWYSLFSKISDDHNINIYNPTQIHAFAKVNVRGSKTDKIDAKTIANMLRFGNAPQTDYSDKQRLELREYVRFHWKLTNKKTNLKKRFKRNLHLVFPGYDQVFKNVFTKTSKEILSQSPTPDDILEMGEAKLLELMKKASKNHIDKEKARELIAKAEDTIPSEILKESSLFELQIMMDMIENIEKHLDSLEKRIFAIWDKVKDKHYIQTIPGISEFRAAMIWAEIGDIENFKHPDQIVAFAGLDPKVRKSANKEVIGGPNKRGSSTLRWALGWAVQESKNVNPVLAPYFEKKIAEGKHYNTARCAASKKLIRIIWSVEKNKKPFQIPSNLKS

SEQ ID NO: 393084 - protein, 387 aa, unidentified
MQKPHDDSKACLTAFVQDSTLTVVIEMSLRSWLVAGMVPGVNREPRKKIAPNPELLLQLLYRWRDEAIKAGKEITRIAVAYETGRDGFWLARWLRARGIDAHVIHATSVAVSREHRRAKTDRIDTAMLQRGFLGWLRGERGHCSMAIVPTVAEEDGRCPHRERETLIKQRTSTANRMKSVLIQFGVRNFNPSLRKAPKKLDSVRTPEGIPLPSNAVAALQRHMERFRIINEQIKAIERTRLQRLQRDPAEKFNAMVFLLVRIIGLGVETAEQLVREILSRNLRDRKAVARYAGLTGSPDESGSMRREKGLSRSGNGRVRNILIQLSWRLLKFQPQSDLVLWFNNRTANAQGARKPMIVAFARKLIIAIWRYVNTGVAPEGFQLRSAA

SEQ ID NO: 393085 - protein, 404 aa, unidentified
MYFIGIDIAKRNHVVGIRQEDGQPCGNAFSFSNDEAGFKSLMERLGASSVDAQKCIVGMEATGHYWLALYSFLTDHGFDVAVINPIQTDAFRKTQSIRKTKTDAIDAFMIAEFTRFGGSGLCRVAPEDTEGLKYLTRYRMHLVSEVTSLKNRATAILDRIFPEYETLFSPLLSPSSMHLLETLPTPQDIAGADIRTVERLLREGSRGRFGRKKADELKALAKTTVGVSFAAQTLGFELAHIIKLIRHLEGEVGSLNDKIACLLEKTTGKWLTSIPGIGEVFASVITAEIGDANRFEAPNKLIAYAGIDSSKNQSGEFDGTKAHMSKRGSPYLRWALIQAADSVRKQEAYFGDYYDSMKARGKHHYVALSGVARKLAGLILALMKEERAYESRPAIQPKQASKST

SEQ ID NO: 393086 - protein, 422 aa, unidentified
MNEMHGTRQEQQRCWAGLDWGSETHAVSVVNDARAVMGRFKVEASLKGLEQLVKCLGGFGTVAGIAVEATRNPVVNYLASAGFTVYPINPKLSKNWRACNSVAGVKNDERDGLVLAVELAGRHASLRALEREDPTVAELAGLCEKLRDLVDERTALLQRLKATLGQYYPGVLGFFTDWTSPVAWRFLQQFPRPEALAHARKDTLIRFLKANRIGIKPLWLERIEGRGEVTHWPCPGDRVALEAMTLAIIAQLQALQPHIDKMDRLIAESARHLPHAHLLKSLPGAGKRLAPVLAAITAPVASGETEIEGIRCVSGVAPVEDQSGKRHRVGIRRRCNKHWRDVMHLFAYSSTHWCCWAKAFYDMHREQGDRHASALRKLADKWLKIINRMLETGEPYDDQRYVEALRRNGSPLYFRLAEKPCG

SEQ ID NO: 393087 - protein, 418 aa, unidentified
MDTLFRCCAGLDVHKDTVVACARRLDGAGKVHKEVRTFGTMTCQLLALSDWLADFGVTHVAMELTGVYCKPVFHVLEGRFQVLLVNAYHIKQVPGRKTDVKDCDWIAQLLQHGLLKASFIPPAPIRELRDLTRQRAQLAGEKGQVANRVQKVLEDANIKLGSVATDVLGESGRDIIRALIAGETDPDKLAELARKRLRAKIPSLRLALHGRVTPHHRFLLQLHRDHLESIERLMDRLGERIGELMASYGEVAERLAEIPGVGPQAAEVVVAELGTDMTAFPTDARLTSWAGICPGNNESAGKHRSGRTPKGNRWLKRVLVQAAWGAAHSKDTYLAAQYRRLAARRGRKRALVAVAHSLLVIIHHMLKEGTTFQELGADYLDQLSSERLTRQLERRLESLGHTVTLKPAGGPAPGEPEA

SEQ ID NO: 393088 - protein, 382 aa, unidentified
MGPNLTAGTLPKPIGPVLYLAFELSQKEWKLGFTVGFGQRPRIREIPARDIKRLQEEIKLAKARFHLPDTTAVISCYEAGRDGFWLHRCITSLGITNLVVDSSSIEVSRRARRNKTDRLDARKLVNMLIRYHNGEYKVWSVVKVPSVAIEDYRQLHRELSSLKKERTQHINRIKGLLASQGTYLPVTPSFPGKLAEVRLWDGSQLTPYLRNRLQREYKRIQLIEEQMKQIDDLRYTLLRTSQEPEIEQVRHLMKLKGIGINSAWLFVMEFFAWREFRNRREVGALAGLTPTHNQSGETSRDRGISKAGNCFVRGIVIEIAWGWLHHQPNAKSTQWFQERYALQSKRLRRIGIVALARRLLIDLWRYLETGEIPPGAVLMNPS

SEQ ID NO: 393089 - protein, 347 aa, unidentified
MKHYVGLDVSMKNTSICIVNEQGKIVHESEAKTDPHTLADAIEKTGLKIELVGFESGSLGHYLIQGFKERAIPAVCMDARKMSAILSIRVNKTDKNDARGIADALRAGMFTRVHEKPQEAINRSAVLSMRRCLVQHRTDIKNHIRGILKTYGIRLGSAGSTAFNKEVKRRIETLDLLVCQTIEGILEIFDVLTKKITQLDLELLQIAQQDKNACLLMTAQGIGPITALTYQAEIFDPTRFPNSRTVGAYLGMTPTQYSSGETQKQGRISKCGSNELRSLLTEAGVVILTRSKKWSKLKAWGLKLMRKKGIKKASLAVGRKLAVIMHRMLLEQKEFVWGEAPAVKAVV

SEQ ID NO: 393090 - protein, 405 aa, unidentified
MFDTEDVGVFLGLDVGKSTHHGRGLTLAGKKVFDKQLPNSEPKLRAVFDKLAAKFGTVLVIVDQPASIGALPLTVARDAGCKVAYLPGLAMRRIADLYPGEAKTDAKDAAVIADAARTMPHTLRSLELTDEITAELTVLVGFDQDLAAEATRTSNRIRGLLTQFHPSLERVLGPRLDHQAVTWLLERHGSPAALRKAGRRRLVELIRPKAPRMATRLIDDVFDALAEQTVVVPGTGTLDIVIPSLAASLAAVHTQRRALETQINTLLEAHPLSPVLTSMPGVGIRTAAVLLVTVGDGTSFPTAAHLASYAGLAPTTRSSGTSIHGEHAPRGGNRQLKRAMFLSAFACMNADPASRTYYDRQRARGKTHTQALLRLARQRISVLFAMLRDGTFYEPRTPKDVELAA

SEQ ID NO: 393091 - protein, 387 aa, unidentified
MARKRTLSTLDTSIAYEAVGLDLAKTDVALAAFDSDHKEPYLIDRIPYDKLYELLADMAPTLVAMEPCSGAHQIAEQIQELGHEVMMISGRHVQAWVKDHCNGQKTDLNDAFAILNLAYDRWLTPIRGKTREECRLLALQASYRQLKGQRTKTMVHVKATLHAWGFPIRAGSFNQKVLHELIDANREAFGDEVVETLHLMTHRVRDLDHDIATVLKLLTEATKRDPRASLLRSIPGFGILTMSRWCAVIGDIARFDSPKQTMAFIGLVPNNRITGHHTETSSGREARGQGRMSKRGDKMLRSLCIMGAGSLCLMVRNDRLPDCPFVASIKERLASPRPWFKVLVYVAAKLVRIATALLKYGETFSFEKAGISKAVLKQWELEQAKAA

SEQ ID NO: 393092 - protein, 345 aa, unidentified
MISFIPNSCVGSQPVSRKAGSKKLDPTARQRMTQQICVGVDISKAMLDVGTTEEQHWRCANDEPGIAELVEKLQALRPEKIVVEASGGYEAAVVAALAAGQLPVVVVNPRQVRDFAKAVGRLAKTDRIDALLLAKFAQAVKPELRALKDEKTRELEALLMRRRQILQMLVAERLRLAQAQPRLRQEIKDHIHYLVKRMKDCDRGLDAALRDSEVWREREALFKPVKGIGPQALLSLCAMLPELGRLNRRQIAALVGVAPFNWDSGTMRGQRRCWGGRTELRTTLYMGTLTAVRCNALIRMFYQRLVAAGKPKKVAIVACMRKLLTILNAMVRDNAPWNENLHAGA

SEQ ID NO: 393093 - protein, 380 aa, unidentified
MTATSHVDPRCYVALELSQAKWLVGALLPRRAKIILHTVQGGDAAGLVEVLEKVSARASNEASTQVPLSVCYEIGYDGFWLARYLIDRGIDTHVLDSSSFRVSRRGRRAKTDRIDVEAMAVTLRAFMAGDKGACREVAIPEPEVEDAKRMSRERTQLARERTRHVNRIRGLLTLHGIRHVKGIWGGEWRSALKGLVTADGRRLGPFLCAELAREFERLHLLLGHMKQLEAERRAATATATAFPSAPKVKLLVTLAGVGEIGATVLVTEVFHRSFKNRRHLASYLGLTPSPYASGESSREQGISKAGNKPARTLLVELAWCWLRYQPGSGLAEWYRRTYGEHSSRVRKVGIVALARKLAIALWRFVEHGVVPAGAVMSPAR

SEQ ID NO: 393094 - protein, 392 aa, unidentified
MEYRLYIGVDVSKESFTVCIKNPNGKTVFQGSFPQSLEGFQDFLNTVNNLSPDPVIVGMESTSIYYLNLFSFLLENGINTVIINPSVIKNFSKLGIRDAKSDRKDAATIAEYLLYAKPELSDKEKLSDLKLLSREKEKLSKELSHLKDEILRCLFNLFPELERNFNVFSKGMLNFLLKFPSARKIRRSKRKTVEYEFNKAFEGRGKKPSFTANDIIELANRSIGIDSVALEEILVTKINMLLTIEEEIDKFDKLISERIEEIQIDKIDIITSIPGIGKSLATSFICEVPEVEMFKDGKSLVAFVGVDPVVRQSGQYIGKHGISKKGNRHLRRIIYLMAINVIRFEGRFKEFYLRLRARGKSYMEAVIAVANKLLRTIYAMLIHRTYYSPNYS

SEQ ID NO: 393095 - protein, 462 aa, unidentified
MARRIWSDQPGLDVVHRDAAGIDIGSREHYVAVGPDRDAEPVRVFGCFTTDLRRMAEWLQQCGIKSVVLQSTGVYWIPVYDVLEQHGLEVWLVNAQDTKNLPGRKSDVQESQWLLKLHTYGLLRRSFRPAPEIRGLRTCWRERGEYVQQAGSCIQRMQKALTEMNIQLATVLSDLSGDTGMSIVRSIVAGERDGKRLAEFRDPRVKASKQTIAKSLEGTWLPEQLAVLQRQLGDWDHIQRQIAACDVDLQAMLQQIPTAKVQHQPSLAPATAPVGKRKRKRKKNGKWSKNEPKFNLAAELQRVTGVDLSRIDGIKAMTIMTVISEAGLDMSKWATEDHFVSWIGLSPRNDVSGGKVLKRKTRKVKSRLATALRTSATTLRQSDSYLGAQFRRLRSRLGPPKAITAMAARQARLVYRMLKYGQEYVDKGAVIYEQKYREQQIRFLEKRAAQNGFALVPLHQNA

SEQ ID NO: 393096 - protein, 599 aa, unidentified
MTPHKDSFPDPRPPAPTLPQPSVLSEALQVCHPHTAGIDIGEAEHWVAVPPGCDPQPVRRFGTCTVALDTLAAWLMDCGVTTVAMASTGVDWMPVFELLETRGVQGLLRDPRQAKRAPGRPNTDRLACQWLQRLHTSGLLAGAFRPEDQVGVLRRALRHRQMRLTSAAQPRQHMPKALQQMHRKRTQGVRALTGVTGMAILKAISAGERPPVTLAKLRHPHCHHDADAIAKALPGSWRAEHLVALRQAVALYDVYHQQMAQGDQQITRPLETFADHSAGQPLPPKARRHTKTNAPRCDARTPLSRMAGVDLTTIEGSAEHTAFILLSAIGTDLHRWPSVKHCCRWLGLGPQHQISGGKVLSRRGRPGAHRVTVALRLAARSLHHAQRALGAFLRRMQARLGTPKAITATAHTLARLVSSLRHHGSASVQQGLEAYAAPDRARQVTTMAKQAKALGYTLVPRAAQGEARCPGPLRSRPSSSHASHALRCHMSQGLRGRYVPRTPRQPPPPVHRGSPTAATPSKILLTLAKTLLTLLQKGLTSRRSSLGGRMATDCALAASKFWHAHRVMLGALRHCLRFRVESDHWDRHTGSGSNPFGVS

SEQ ID NO: 393097 - protein, 335 aa, unidentified
MGTHWVGADVAKSTFDAALVRCNQHYPDTPLREIPACTFERSSKGVQAFLSWLDAQGLEDTDVRVVMEATGNYSTELAVWMLSQRQTLRPAIANPRHTSAFIKSMGLRNKTDRLEARALGFYGVERRPLAYEAPSPEQAELRALSRYRDSLVRQRTALKNQMKETCGSTFVQKNKAKRLRLLTRDIERVEEQMKALVAQHEDLNRDIELLMSIYGVAFINATTVLAELGDLRRFTLARQLSAFAGMSPRHRQSGTSIHGRSRLCKQGNSRVRQCLYLSALAAIRGNNQLRDTYQRLLAQGKPRMVALGAIMRKLLTLMRAILISGKRYQPLGITR

SEQ ID NO: 393098 - protein, 431 aa, unidentified
MKTKSTDKIPTPPFAVLIGLDWGHQSHAIAEQIHGGPTQTLTLEHSSENIHQWLDQLEQRCGGRPVAVAIEASKGAAVYALLERSWITVYPIHPATSTRHRSMFQPSGAKDDTPDALVLLSLLQYHLDRLRPLAWDDEVTRTLARLTEARRKAVDRRTLLSNQLQSTLQDYFPQALELAGENLAAPLALDFLEKWPRLSDVQAAKNATIKNFYHRHNVRRPELIAARVQRLRAARSLTRDGAVIEVAVRIVRLLIAELRVLQEHIAEFENAIAQAFAAHPEKNLFRELPGAGAVLAPRLLAAFGTMRDRFADAAAMQRYFGVAPVTEKSGGRKWVHWRWNAPVFLRQTLVEWAGQTVLYCPWAKAYHQQQRAKGVGHWAILRALACKWLRILWRCWQRSEAYDEEKYLQQLEKRRSPLAAPARLLAQQMSI

SEQ ID NO: 393099 - protein, 328 aa, unidentified
MKNYQEVIGIDVSKNKLDAYSHNGGSHREFSNDVAGYKALLKWAKVKGQRVFFCFENTGHYSLKLAMYLASKKQVYVQENPVVIKRSSGVIREKNDVIDAIMIARYGWLHREELSPSELKDNELLEVGRLLALRDQLVRNRTGLKSTLSELKKLLSSSSTDTCCKTLVSSITHLTSQINKVEKQLKSLIKTSEALSQNYKLITSLKGIGLVVGAQLLYHTNNFKRFDSWRQFSSYCGTAPFGHSSGSSIHKKRKCHPMGDRQMKSLLSMAACTAIQYDSELRHYYKKKREEGKLKMIALNNVRNKLLSRVFAVVKRGTPYVELHKFAA

SEQ ID NO: 393100 - protein, 399 aa, unidentified
MRFAGIDIGSETHVVAVVDEAGAVLHKAAPFGEEAAGYRRLREILGTSDDLVVAMEATGHYWRNLGAMLIAHGYAVALINPLRTRRFAEEDLARTKTDAIDALGIARFAAQKRPAMTDFCDDEIQQLRELVRLRERLLVEQGNQIRHLHRSLHLTFPEFTRHVRTLESALATAILSRYPTSEAFRTVRLKTLARLCYDGRHRVGGSLAGTLIAAAKHSIGGHHTEPYRRQIKFACQDIEIARERIRQLENDIGLKLERHEVGKLLTSIDGIGSQTAARLIAELGDPARFRSAAALASYVGVIPRVRQSGKRRYSGRPSVPLGNAALRHSLWMPTLTAVRLSPWLRPYYLRLRRAGKRPKVALVAAMHKLLLAVWSVAKHRRPFVSRTSPPTDGVAIGPV

SEQ ID NO: 393101 - protein, 410 aa, unidentified
MDVLYERCAGLDVHKDTVVACARISGPGGESKREVRTFATTTRGLLELSDWMTEHGCTHVAMEATGVYWKPVWHVLEGAFELVLANAAHIRNVPGRKTDINDATWIADLLAHGLIRGSFVPPAAIQHVRDLTRTRKQLVREVAQHTQRIQKTLEDANIKLTGTISDVLGLTGRAILDALVAGESDPERLADLADRRIKAPRIKLVETLRGRVTEHHRFLLKLHLGQVDALRAAIAEVDEQLGKALGEATAMAKLLTTMPGVGELVAQVVVGEIGTDMGRFPSAAHLVSWAGLCPRSDESAGKRRNTRVRHGAPWLKTTLVQAAWSAAAKKNSYHRAQFQRLKARRGPKKAIVAVAASMLTAAYHMLRDGTAFHDLGPDHFDRQDRGKVAQRLTRRLEQLGYVVDLRPAAA

SEQ ID NO: 393102 - protein, 428 aa, unidentified
MDRQLERCCGLDVHKETIAACVRIGGRSGRASQHVQTFRTTAADLVILRDWLAAHGVTHVAMESTGVYWKPVFYALESDFTCLLINATHIKQVPGRKTDIQDCVWIAQLLEHGLLRGSFVPPVPIRELRDLTRYRKALIQDRTRVANRLHKALEDAGIKLATVASDILGVSGRAMLEALAQGTTDPTMLAELARGRLRGKLPALRAALAGRFRTHHAFLVGQLLTHLDYLDEAIGTLSTEIERHLIPFSDQLNRLDSIPGINRRTAEVIIAEVGVDMRAFPTAAHLASWAALCPGNNESAGKHKSGKTRKGNRWLRTALIEAAAGASRAKDSALRARFQRVLRHRGPKKAVVALAHALLRIAYHVLAQGTTYRELGGNYYDRRHTQRLTRRAIPHPSRDSPAGRPRLPRDSRTGSMSAPLMLMSFSEQ

SEQ ID NO: 393103 - protein, 413 aa, unidentified
MQNNVITAVGIDVSKGKSMAAIRRPGDEIVQMPFEVKHTVLGLKDLVKLLHKTGGEIRIVMEHTGIYWRPIARALQEAGFFVSIVNAILIHDFSDNSLRKVKTDRADALKIANYALSFWDSLCELSSEEETRVLLKTQSRLYERTIDASVVLRNGLISLLDQTFPGVNKLFSSSSRNRSGHYKWIDFAKRFWHCDCVAGLSFQSFSETYGKWCKREGYVYYLSAAERIYDAAKQAVAVFPKNDSTKAIIVQSVNTLNAIYESLQTMREEMGRLASLLPEYDVVMEMHGVGKITGSQLMAEIGDVRRFTNKSALVAFAGVDAPPFQSGTFDAKSRRISKRGSPHLRRTAFMVCSSIIQIGNTDDPIYAFMDKKRAEGKHFYVYMVAGAAKLLRIYYARVSERMSSLNHDLKQSA

SEQ ID NO: 393104 - protein, 418 aa, unidentified
MDIRPPFSYQATVGIDWADQKHDVFVRFTNGNSYRRKINSRPEAIQEWLLELRSACAEGKIAIALEQRRGALFYQLCTHLNWIDLYPINPHSLSSFRLTFFSSRAKDDPIDGQLLEELVRTHHDRLRPYQPEATTERKLYLYCRQRRSLLDIATKAELKLVSTLKQYFPVTVSLFAAIGMKSDIALDFLSRWPTLHDLRKAKVHTIRSFFYAHNSRSQSLIEKRLQQIAEAHEVTDDSALIEPLVLTAKCLVAQLRQFNEIINEFDRKIRELFKSHPDHFLFETLPGAGEKLAPRLLSLFGSDRSRWTDATDLQKYSGIAPVVERSGKSLWVHRRLSRPIFVCQTFHEFAQQSTRFSSWADQFYRRQREKGKSHHSAIRSLAFKWIRIVFACWKANKPYDESLYINALAKRNSSPSST

SEQ ID NO: 393105 - protein, 394 aa, unidentified
MFFVGIDIAKRKHEAVVIDEKGRIVQKPFHFPNSLSGYNSLISLVKRITSTRKDVVFGMESTSHYWLALYSHLIKDGYTTHVINPIQSDAFRGLFIRQAKTDPIDAVIIAEVIRFGKYSSTHFPQHKILALREMCRNRLYMVDSISDLKRKITALIDQIFPEYEEIFSDIFLVSSIEVLYRYPTPKKLLHIRKDTLTNLLIKCSGGHFGSAKADEIMDAAKNSFGIDDPYDVYANLIKTYLKQIKFIQKNISEMEQKITEIMDEIGSPITSIPGIGVTLGAVILSEIGDISRFKCADKLAAFAGIDPSIKQSGDYSSIRNHMSKRGSPYLRRALWMACTPATQFDPMFRAYYLKKRSEGKSHMKTMGHVAKKMICVIYAVLRDNKEYQPVLTAA

SEQ ID NO: 393106 - protein, 408 aa, unidentified
MEVLYARCAGLDVHATNVVACVRIAAGAKVTYEHRTVPTTTRGLLELAEWLTAHACTHVALEATGVYWKPVWHVLEDHFTLVLANAMHIRNIPGRKSDKNDAMWIADLLALGLIRSSFVPPAPIQELRDLTRTRKQLVREMARHTQRIQKTLEDANIKLTEVVSDILGVSGRAILLALVAGETDPERLADLAHRRLQTPRAQLVEALHGRVTAHHRFMIQLHLTQIAALETAVADVEARIHEALAPFRAAVSLLMTMPGVSATAAAVIVAEIGDDMSTFPTAGHLVSWAGLCPRLDESAGKRRSTRTRSGAPWLKTTLVQGAWAAARKKDSYFHAQFLRLKSRRGPKKAILAVAASMLTDVYYMLRDGVEFHDLGGQHFVQRDKEHLTKRLLARLRDLGVEVEVKHAA

SEQ ID NO: 393107 - protein, 414 aa, unidentified
MERARKRYVGLDVHKDVVEYCILDAAGKKIDGGRILCEQSVLQRFAMKTLSPKDHVALEATTNTWSVVDILESHVAKIVVGNPLKTKAIAEAKIKTDKIDAMILAQLLRCDFLPTVWIPDAKTRVLRRLSSFRKTLVQDTIAAKNRIKGILNHLLIKHGVVWSKSGLDELKKLDIPAHERIIMDCEIAVLEHLGKQIEKVELEIKKLAYEEDNVRLLMTLPGVDYNTATAIVAAFGDISRFKDADHVASYLGLVPSTKKSANSCRHGAITKTGSSLARSLLCEAAQCLSRNEGPLGVFVRRLLQKKTWNKAIVAGARKLATIAYHMLKNKEPYRYATVLRTQQKLGRLRASASDKKIERPRYRYDENLRGHIKSDVAVRFIPPLSEVYEKEGFRWYVRWTNFRSAKNVLLRRWA

SEQ ID NO: 393108 - protein, 410 aa, unidentified
MEVIVERPGALDVHKARVTACVRVPGQDGRVEEVQEFKTTVRGLLVLRDWLKAHRVTQVTMEATGCYWKPVWHVLEDDFELLLVNARHVKQVPGRKTDVADAQWLCRLAEAGLLRSSFVPPKPIRELRQLTRYRKAQISERQREANRLHKALEDTGIKLDCVATDILGVSGRAMLDALVSGTTDPEVLAEMSKGRLRAKIPELTEALEGRFDKLHGLLVGSILAHLDFLDTQIEALSEAIEAKLAPFATGAVELLCTIPGVGERTAQNVIAEIGVDMSVFPTAGHLASWAGQCPGNDQSAGKRRSGKTRKGSKWLNLALKEAAMGAIRTNDSYLQALYRRKKSQGGHNKAIGAVKHSIICATWHMLQTGEIYTGLGPDHLARRNPARQTKRLLAQLERLGHTVTIQQAAA

SEQ ID NO: 393109 - protein, 400 aa, unidentified
MKYYVGIDIGKYTHQAILCNEEAKPLAQSLRFHATYEGYQLFISYLKKVVDPKNFGTVSVGMEATGSYWLSLYEKLKKLGLPVIVLNPLQVKAYRNEGIREAKNDRLDAQLIVKVLRFGDYKISDIPNEDIFALRQLTRLRSDLVSMTTDLKLKTISIFDQVFPEYKDLFYDIFATTSKALLDEAVVPKDLAMIPTEKLTLLLEKASRGRQGEKEAKQIKAVAEQSIGVTIGLDAFTLSLKILLTQITHLEGEIKKLDKEIMGRVQSQETTLTSIPGIGVNTAGTILAEVGNFERFRDDKDGAEKLVALAGIDPKVKESGKYKGKAKMSKRGSPYLRQAVRQAAFVAACGLRHDPMFAALYQKKIQEGKPFEIALSHVENKMLHVIYSLLKSKKEYKPNI

SEQ ID NO: 393110 - protein, 417 aa, unidentified
MDKKFSYAYIGVDVHKEQHTAVAMDFWTTWIGEDITFSSKISEYPKFIEQIKKMIPIELTPIFGLEDVGGNGRSLAVFLKEEGYLVKEVNPSYSTAERKDCPTTYKNDVWDAKCIAEVLVKKLDLLPTAEPSDLFWTLKQFVYRRDSIVKALTTTKIQLHEQLVKNYSSYKKFFAEIDGKTALAFWEKYPSPSTLKNTTVEELKNFLLGASSNACSIRKAEKIFKLIEGDGDTYREYQENRDELIKSYVRCIRFSMEETEELEKHMKKIIGKLDYKLESLTGIATVTASQIIAEIGDINRFKNADKLARYAGIAPVNFSSAGKGKDKKSKQGNRTLNGVLYFLAMQQVQLTKGTKQPRNPILYEYYLRKISEGKTKTQALICIMRRLVNIIYGMMKNKTEYVMEYRANRESDLKVVV

SEQ ID NO: 393111 - protein, 374 aa, unidentified
MKKPTRWVGLDVHAETIAVAVAEEDGAVRSLGTIPNEPASVERLVRKLGDRPTLRVCYEAGPCGYVLYWQLTKLGVACEVVAPTLIPVKAGDRVKTDRRDAEKLARCHRSGDLTGVWVPDAEHEALRDLVRAREAAKKDQLRARHRLGKFLLRRGKRRPQGIRAWGDKHMTWLSSVTFEHAAACDTFVDYFSEVKRFAERIKRLEKALDEAIEQAPLHMREVVAALQSLRGVAKMIAVTIVAEVGQLSRFTRPKELMGYSGLVPTEASSGGKTRRGAITKTGNGHLRRVLVEAAWLYRFRPVMYAALRARQRGQSEDVKAIAWKAQHRLNSRFRKLTARGKPQPQAVTAIARELLGFVWAIGVQIEQNKVPSAA

SEQ ID NO: 393112 - protein, 347 aa, unidentified
MYSFYLGIDLHLKRSYLVLMNGEGEVIDKQRLKNTEIKNYIEKNIPKETYAVMEATRNWPFFYDLLDEHVERVELAHAKGVRMIAEAAVKTDRVDASALAHLARLNYLPTAYAAPQEIRDLRQHLRYREWLIDERRRAKNRIHAVLAGYNLASPVTDLFGRAGREWLVEIAEKELRLTSKKVVLETLTMIDQLDDQIKELKKDIPLPEELKPKAELLMSMPGIGKLISAVILAEIGDISRFHSPKALCNWAGLTPRVHQSDRTVRHGRISKQGSRYLRSAMVFAAMTASRISPRWYGVYEHLARKIGRRGARVAVGRRLLTVVYYMLKRDQPYDEDYEQRRLAEQGA

SEQ ID NO: 393113 - protein, 342 aa, unidentified
MGSVKRSGRSRHTMSALVCGLDVHKDSTYATILDSEGKIVDQTRMENDKVAAYLSQHRVGKVAMESSTAVAPLYRQLKKEGFDAVVSHPKKTKLIAEAKIKSDRVDSKAIAQLLRMDWLPLSYVPDEDIGALREKVRRRAFLVRERVKLRVKIKSYLTIQGLKWPEDHGLWTKNGLVWLHGLDLAPVESYLRLIDGLSEEIKLLSKEMQGEAKEDEDVKLLMTIPGIGYYSALLVKSEIGDVGRFPFAEKLCSYAGLVPSTYQSGGTVRHGSITKEGSRWLRWIMMECASTHVSKYDTWISRSYRCLAGRRGKKTARVAAARKLLVVCYSVLRHKKPFYDQP

SEQ ID NO: 393114 - protein, 418 aa, unidentified
MKSIKAEKIKTINKKTLVVALDIGKKVHYGYFRTPENQDVKPFRIYNNGQSFNKFWEKLCRFKEKHMLDEVVIGFESTGPYAEPIANYLRKKPVKLVQVNPMHTKRIKELTGNSPNKTDKKDPRVIADVISLGHSLTVIVPEGASAQLRRLTHARERAMERRTAMNNQLQDLVFVIFPELGEIIKPSTKTGMYLIKNYPGPESIVSIGIETLCNIVRKVSRGRFGIDRAEELYNAAKASVGITEGKESILLEISHLVSNIETENRYIQSLEEQMIVYLEQIPYSHSILSVKGIGNITVAGLIGEVGDFRKFKTISEVMKLAGLDLFEISSGKHKGRHRISKRGRALMRKLLFFAAINAVKSHGIMHARYQRMLNNGTPKIKALIAVSRKLLRIIFALARDNAQYEENYNRKHEFKLAA

SEQ ID NO: 393115 - protein, 386 aa, unidentified
MQKLNDLSRSLTALEPNGTLIAVIEMSLSSWLVAGIVPGVERQPLKKLAVDESALLKLLHRWREEAEKAGRRIERIAVAFEAGRDGFWLARWLKARGIEAYVIHASSVAVSREHRRAKTDRLDTELLKRSFLGWLRGERDHCKMVEIPTMQDEDAKRPNREHDSLIGERSRIVNRMKAALVRLGIRGFNPKLKRATTRLDGLHTPEGEPIPPNALAELRRDMERRRLVNNQIRQIEEERLERIEQAPCDGAHVMVRLLARVMGVGIETADMLVHEVLSRNMRDRRAVARYAGLTGSPDESGRKRREKGLARSGNTRVRRGMIQLAWRFLLHQKNSALTKWFRSRTENARGTRKPMIVALARKLLIALWRLMREGIVPDGVVLRPAQ

SEQ ID NO: 393116 - protein, 343 aa, unidentified
MNEYDGKQFVGIDLHRRHSVIVRQTSTGERLSAVRIVNDPDSLALQLEEAGEHPDVVLEATYGWYWAVDALQAAGATVHLAHPLGVKGFRYRRVKNDVRDAGDLADLLRMNRLPEAWIAPPPTRELRELVRYRAKLVALRSGLKAQAHAVLAKAGVLIAVSDLFGVEGRQRLARVPLGAAYAQRMSSLLELIDVLDTHERRFAEQIAAKLHDDRGYGAIQQLPGVGPVLGAVFVAEIGDVHRFADPSHLCSWAGLTPQHRESDTVVHRGHITKQGSKLVRWAAVEAIQRQPAGTKISVDRKRIEARRGKNIAKVAAARKLLTLVYYGLRDGHIRALTHQPAAA

SEQ ID NO: 393117 - protein, 424 aa, unidentified
MHEERRWLVGIDWASREHVVSLLDGGGRKIGERKVTHDGAGLAEMIAWLLKASGGEPGEIHVAIETPHGPIVEALLERGFNVYSINPKQLDRFRDRFTVAGVKDDSFDADVLGDSLRTDMRLFRKLSIAEPRIVELREWSRINEQLKRERIRVTNRMRDQLWRYYPQMLELVDDDLGADWLLALWELVPTPEKAARVRETTIARLLKKHRVRRFDAAHVLSELRKPALTVAQGTIEAATAHIQVAIERLRFIDRQITDAEHQIDRLCEKLAEPVVGEDGVSARGQQQEQRDVAILDSLPGVGRIILATLLTEAPEALQRRDYHALRTLSGAAPVTRRSGKSCIVARRYACNKRLRNALYNWARVAIQRDATSRAKYDALRARGHGHARALRSVGDRLLYVACAMLKSGTLFDPSLASRKSAVGS

SEQ ID NO: 393118 - protein, 338 aa, unidentified
MSKITTVGLDLAKQVFHLVCCDGRGKVVGKRMLRRAQVLGYFANLAPCRVGMEACAGAHYWARELQRLGHAVKLLPPRFVKAFVRGNKNDYNDALAIAEAVVRPEVRGVAVKTVAQQDIQALHRLRSACVAARTALCNQLRGLLAEYGVVLPRGVSSLRRRLPALLEDAENGLSPLFRRLLAQGYQQLCELDAQIAAYTAEVERHSRQDDVCRRLQTIPAYGPVVASVFHSVVGDGQAYRRGRDVSAALGLVPRQHSSGGKSVLLGISKRGDRYLRSLLIHGARAVVRQAAHKDDRLSRWINRIKAQRGHNKAVVALANKLARIGWAVLRHQREYQAA

SEQ ID NO: 393119 - protein, 345 aa, unidentified
MKNSNVIGIDLAKHVIQVCKIDKHGELISNKAISPGKLKELLAKTAPSIVAMEGCGACHYWARQAQRHGHDVRVISPKKVKGFLQGHKTDANDALAIAIASIQIGMKFSQIKTEEQQSLQTLETSRKFLDKELSALNNHIRAYLYEYGITMRRGRKSLRETIAIVLDDLDTRLPTCLKNTLGLLWERYKLTVEQLTEAEKYKAHLVNQLEPCQRLMDLEGIGKVCASMLYANIGNGSEFKNGRQASVYIGLTPKQHSSGGKTFMTGIDKQGGNKELRAALYQGALSVISKLPIEPRTVKEAWLIELVKRAGVKRTCIALANKTVRTAWALLSTGKSYEPALLGRS

SEQ ID NO: 393120 - protein, 437 aa, unidentified
MDEVTDEPLYRDRVCGIDIGKAGMVATIRVPSDRDPARRASETRSFGTTRREVLALADWLRVWQVPAVVMEATSDYWKGPFYRLEAEGFDCVLADAKQVKHLPGRPKRDPSDSRWLAACFERGAITACFVATPEFRVIRLHTRYRRDLTDERSREKQRAEKLLESAAVKLSSVVTDLHGVTGRDIMDHLIAGERNPKVLAQLARARARRKISELEAALEGAEFFTPAHVALLAAMLERIDRVNAEIARLTGVIETLLEPYEEQLQQAESMPGWGRRSAQDAIAETGTDMARFPTGAHLASWAGRIPLDNSSGKRQGNAKSKKGNRYLGGLLGETAIAAGKTQTREGARYRRLARRRGKAKALVAVGNTQLKVYHALLSSPGLRYEDLGPDYYERQASTRRQIAHHVGKLGALGFEVTLCRLPEPDPDPRQAASTQAA

SEQ ID NO: 393121 - protein, 339 aa, unidentified
MNAKTYGLDVAKRVFQMYWVDAQTGEIVNRRFGRDELIRFLAQRPAGRVALEACGSGHWWARKIKAVGHEVVLLHAKFIRPFVQTNKTDAADARAIWTAVQQPEMRTVAAKTEDQQAMLSLHRMRALLVKFRTMQVNQLRGLLYEFGATFRAGRVAGLAEIRARMVELEEALPGTLIGSLQDQLQRIEALEQDINRLEQQIGAWQKQEAACRAIAAVPGIGKLTATALATMGDAKTFKSGREFASFLGLVPRQSGTGGKIRLGSISKRGDPYLRTLLIHGARSVLYHAKVPTPWQREIRARRPANVAAVALAHKMARTAWAILAYGREYQRDYASVKAA

SEQ ID NO: 393122 - protein, 400 aa, unidentified
MYVGIDWAAESHDVCVVDTAGTIQGRATVAHSRDGFEELVGHLGRWAKHGEVLVGIERPEGRLVDRILEAGYPIVLIPTYAMKDLRRRYAVGGAKSDPGDSYVIADVVRTDGHRLRRLEPLSPETRALRSVVRARDDLVDQRVALSNQIRACLETYWPGAAVIFADVASEICLAFLERYPTPEAAARLSDVRLQSFLKKAGYSGRRSPAELLERLRAAPEGIRGVEAEARADAVRAMVRVMRSLPRSIKDLDRAVVAHLGEHPDAEVFTSLPRSGQINAAQMLAEWGDCREAYPDPDSVAMLGGLCPVTHASGKHRDVSFRWACNKRLRVALTAFADNSRHASPWAADIYRRAIARGCDHPHAVRILARAWVRVIWRCWQDRKPYNPALHRAATHLEEAA

SEQ ID NO: 393123 - protein, 318 aa, unidentified
MKETTATVYVGIDIAKATLQVHRQGSQAEWANTPAAHRKLCKELKSFPAVHVVCEATGGYEQALVGALHKAKIPVSVVNPAQVRAAARARGLRAKSDRIDAAMLTDYGQRYQPKPTPQPSRIQQQLVALTQWLKQLVQTQMVVRSQAEHHQHPFVKKQHQALVDYYQAQIKNVEERLETLLEKDQMLRQRVEALDAIEGVGPRTAFVVLAHMPELGQLNRQQVAALAGLAPWTRDSGTMKGLRCIGGGRPEVRLALYMPALTAARRNPLLSALYQRLIAKGKPAKVALTAVMRKLLIYMNHKLKALDAQPLSAVPIPS

SEQ ID NO: 393124 - protein, 344 aa, unidentified
MQITTIGLDLAKNIFHIIGTDSHGKQVRRRKLRRGQVLAYFAQLPKCLVGMEACASAYYWAREIQTLGHTVKLIPPQHVKPYVDGQKNDYNDAAGIAEAVTRPKIQKKCVAIKTVEQQDQQAIYRFYQGALDSRTRLCNKTRGLLAEYGIILPKGIKVLRSAIPEILENADNGLSGFFREHLAVMSEQLQALDKQITSHKEAILLTAKTDEVCQRLQALPGFGPLVSLAFKAHVGDGHQFQRGRDNSASIGVVPKQHSSGGKEVLLGITKQGNKQLRCLLVHGARSVVSAAKKKKDPLSLWINRIREKRGYNKATVALVNKMARVGWAIIRYGETYQPGKRIKH

SEQ ID NO: 393125 - protein, 424 aa, unidentified
MKVTYQTCCGVDVHKSFLVATIVKTNGGIEPSYQKKRFSTFNNSILEFKQWLLDNDCHDVCMESTGKYWVPAFNLLEDEINVVIANPKWVKAVKGNKDDTKDSKWIGDLFRLGLVKGSYIPCKKVRILREYSRYRYKLVSCRSSEKNRYQNALTVCNVALDSVVSDIFGKSSSSIIDYLLEQSGTSINHEEIASKLLRSLKSKEDAVIESIEGYQMTDAQKYRMRLVRAHMDYITAEINDVDKMIEKMISSNPDFENAVQFLCTIPGVKRDSAITIISEIGTDMSQFSSSKRLCCWAGLTPGSNESAGKKKSVRITRAGVYLKPALVQCAHAAVKSDKSPYYKKKYESLVKRRGKKRAIIAIARMILTAIYQMLSTGEQWNPCDLYKIDMPVALVEKQKAKAIKQAKKLLQREGLLPPDESLAS

SEQ ID NO: 393126 - protein, 387 aa, unidentified
MYFIGIDISKFKHDCAIIDEAGDTVTASWSFANNCEGFSLLKQLLDALDGQKKIGFESTGHYGHNLKLFLEANNFSFMEFNPLLVSKFVRSKSLRNTKTDSLDAVSIAQYLMTVEYKPYPPSFYHMDQLKSLTRFRDSLVRQHSRQLVELTNILDKVFPEFKPFFDGRFSATALYILTHYQSPEKIANMNAKSYEALRKKSRGKFSMVKFAQLKTLAKNTVGRSDAFLLKQMEITIDIENQLDAKIDEIESQILECIRALNPPILTIPGIGELTAAIILSEYGDINNFENPAQLLSFAGLEPGYYQSGLAEHQGHMVKHGSSHLRYALMNACLPLITYEPVFAEYYAKKRAEGKPHRVALTHVAKKLLRVIFTLQTKNISYNPTLIR

SEQ ID NO: 393127 - protein, 424 aa, unidentified
MNLTQNDRLKQVTTDTLIVGVDVGSQTHFCRAFDWRGFELSRRVFKFSNTGMGFLTFLRWTEELMNKTEMKKVIVGCEPTGCYWLTFQKFLQEHDVQLVTVNPFTVNRSMELDDNSPEKSDLKDPKTIALLVKDGRYSTSYLPSGVYAEIREASVCRDQIMKQRVRLSNQIQGWLQKFFPEYLECYADWDSTSGLMLLKEVPLPQDMLKLGAGGINQIWRNAKVRAAGIKRAQMLVEAAQSSVGLEGGEAARLEIWILVNDYILKAEQLKRLDEYLEEKVKEVPNVEKLLAIKGVGLSTVIGFVAEVGDIGRFTDPKQIQKLAGLEIVKKSSGKKKGKPRISKRGRRKLRRTMYESARALINWNPAFQDVFLYYRNRERSPLGGMQAKIAVACKAIRVFYVVLQTGCDFDEGKFRKDIIRQEAG

SEQ ID NO: 393128 - protein, 410 aa, unidentified
MMGAKSQADESSGPAERSLPRQQAEDMSAPETIAALQDPLTRGANGMDPALPARVTVSRPLLRGRTVMQIVRIGLDLAKYVFEIHGVDAQGKTVVRRTLRRHAVSTFFANLPPCLVGMEASNGAHFWANALSDLGHDVRLISPQFVTPYVKSNKNDRNDAEAICEAVGRPSMRFVPVKSAEQLAVQAVHRIRSRLVADRVRLVNQIRGLLGEHGVVVAKDIGNLRRALARIVDDEDRVLNPLARALMAELREELAELDARIGGYDLKIRELYRNSEICQRLGKVEGIGPVTATALVAAVGDRSSFKNGRQFAAWLGLVPKQRSSGGRARLFGISKRGDRYLRTLLIHGARSALERVRDKQDPRSLWLGRMRQRRHPNIVAVALANKNARIAWSLLTSDSVYDVRLSVRAS

SEQ ID NO: 393129 - protein, 358 aa, unidentified
MKKIVIGIDISKEKIDASAIEVQNVLLSVRKLGYETFENRPMGFRRMLVWARHLIKGVGLEEVLFCCETTGGYDRSLCDYIYAKDLDIWRESALQIKRSMGVRKGKDDKADSLMIAEYAMRHMDKAVIYETPSQTIRELKALLQYRHKLVQEKTEKKVRMSHLADTAAKSKSMSFILRDARKSIKALEKSVKQCERQILELIKGDEELSRSYRHIISVSGIGIVNATALIAYSNNFRGITTANRMASYYGIAAFRDTSGTSVDKKAYVKCYSNSLLKAYLTQAAEWTIRENGIYHDYCLRLKEKGKPYGIIINNARNKLIHLVFSLVQNDMDYERNHEYIRMQRRVNADRTTELKNIN

SEQ ID NO: 393130 - protein, 327 aa, unidentified
MKTSSNAIPIERYVALDIHKEYVMAGGMNAAQEWVLRPRRVEMERFRAWAVTNLRMGDAVVIEATTNVWDIYDIVVGLVSRVVVAHPAAVRQIAEARVKTDKQDVERLLRLLIADIVPEVWVPPVHVRELRALISYRWRLVKMSVMIQNRLHSLLHRNNIHPPEGGLDTEKNRSWWEQQEFSPLETLQVKQELATLYQVERHKGEVEQELGRMSNSEPWASQAAYLMQLPGVGVVITMTALAAIGDIGRFESPKKLVGYAGLGAGVHDSGKEHRDKKITKCGRKELRCLSWRARPGGDDRLSWPDRPGRRRGGRFGITRTGRSNSKP

SEQ ID NO: 393131 - protein, 404 aa, unidentified
MIFVGVDWAEAHHDVCVLDEAGAVLAKRRIADGLEGVRQLHAMLADHAEDPGEIVVGIETDRGLLVGALVAAGYRLYAINPLAASRYRERHVTSRAKSDAGDAKVLADLVRTDRHNHRPVAGDSDQSSALQVLARLQQNLIWSRQRFVNQLRSSLREFYPAALAAFGTELAHPIALGVLQEAPTPAIGRTLSLSKLAAILRRAGRERNVEATALEIQAQLRAPQLAATPFVDAAYGKSVAATVRLLRELNAQLASVEAELGPTFEKHPDAEIYRSLPGLGVVLGARVLSEFGDDRTRYAHPKARKNYAGTSPITKASGTRHVVLARLARNRRLADACHQWAFCSLTSSAGARRYYRTLRLRGKTHHQALRALANRLVGILHGCLEHRHPYSEQVAWPSSVTAAA

SEQ ID NO: 393132 - protein, 419 aa, unidentified
MGYSPENKRLTRLFSGELPTIRELSRVAARIGTQMGHFYGYALSDGMRRPVSAGCDTLPMFDVLKAQRKGDRQCRRLALCGQREVEFSMDEAGEVILEQKLPTTPEAMKRAFERMLRSRIALETGTHSPWVSRLLTELGHEVIVAHARNVRLIGNSSRKDDRIDAQTLARLARIDPRLLGPVRHRSAKAQIHLTVIRARAGLVSARTALVNTARGLAKSYGERLRKCGTQQVGRELAAGLSAELRTVLEPLLEEVEALNQRIKEYDKRIEQIAKESYPEIALLQQVKGVGTQIALTYVLTIEEPHRFRKSRDVGCFLGLRPGRRNSGQSQPQMHISKEGDRYLRTLLVQGAHYILGPFGEDSDLRRWGLKLAERGGKNAKKRAIVAVARKLAVLLHRLWVSGEVYEPLRNSQRVVQAVA

SEQ ID NO: 393133 - protein, 391 aa, unidentified
MSMYFVGIDISKYKHDCCIISAADQQIVSKFTVKNDKDGFEHLLTTLNSLSNPEDIKIGFESTAHYALNLELFLENAHHSFMEVNPVLIKEYKKSTTLRRTKTDSVDCESIARWLMTVEYKPHSKGFYHSYSLKSLTRLRDRLIRQRSFYLVKITNVLDHTFPEFKPFFNERLSKTAIYLVENYGSAEKMAHMNSASYDKLRCASRGKFSIQQFLRFKELAANTVGVNNSIFDIELNSLLTLYNSLCKEIKTLEAEITKLIEEVHPHYMSIPGIGPISAAVIYAEYGDISNFSNPGQMLAFAGIEPGINDSGTESHGGRMVKHGSSQLRYVLLNACLPLIRFDITFATYYAKKRAEGKKHRVAITHVAKKLIRVIYALERQDVDFNVQKLR

SEQ ID NO: 393134 - protein, 366 aa, unidentified
MDVHKKSFSLCCYTNEKEQAEYPQKTAPHYSKVLNYLEAMRFHYGDDVLFICGYEAGCLGYTLYHELMDHNVKCILLAPTTIPQPTSRKKVKTDKRDAALIARCLAHHDYSPVHIPSEKDEQVKEYIRMRNDHKIALKKVKQQISAFCLRHGYRYDATVNQWTQAHLKWLRALKPEGLYRDILMEYLSTYDQLTDKIERMDRRIEELAGEPQYREGVKKLSCFLGIKIQTALSTMVEVGDFKRFSSAQRFAAYLGLVPGERSSSESQNRLGITKAGNSHIRTLLVEAAQSYTRGRVGFKSKALKERQYGNPADVIAYADKANERFRRKYYTMVLTKGKKVNVVKTAIARELACFIWGMMVGNLTER

SEQ ID NO: 393135 - protein, 342 aa, unidentified
MAEYVGLDVSKEETSICVMNVAGEVLWSGKALSDPASIFAALREHTLCPRRIVLETGTLSNWLARGLRAQGLPVDVIDARQAHAVMKLQHNKTDANDARLLAAIARTGFCRPVSVSSEAAQKQRIVVKARRHLVRQRCATENAVRGFLGALGVRFPKGAGKLAERVREALETRLDLVAMIEPLLASAAAQREQIKRLDVEIAAATAASSPARLLITVPGVGPIGALAFAATIGDALRFSGSRAVGAYLGLTSRRHQSGEMDYTGRISKHGDSLLRSLLYEAANVFLTVVRKAHPLKDWARRIRKRSSHKKACVALARKLAVIMHRMLVTGEPFRWPEKPATA

SEQ ID NO: 393136 - protein, 419 aa, unidentified
MFKIILNNCCGLDVHKTWIFACIGITDTHSRTRYYEARFKAFSNGLRDLAAWLAKYNCTEVCMESAGKYWIPVFNVLEKTCHVVLAHPKYTKPMKGNKTDRKDAMWICDHFMYGMIKPSFIPPPVIRQLRDLVRYRGKLTNMITGEKNRAQNCLTVSNLKLDDVFSDVFGKSARSITEFILAHPGETFDVSPFIDRRCKTPIPEIQTAVDGAVSHEQAVKLRQCLDHIDELDEHRSQIVAEIDRLVSPFQPALDLIHTIPGFDKNPLTAITVISEIGVDMSVFPTSKNLVSWAGCCPRNDKSDVKVKSTRISTAGSCLKPTLVQIANAVIKSKDHPEFGVRYRRIKAHRGHKKAIIAICRMLLTAIWNVLSKQVPYSPDGFVALKPSFNAKPLTKSQGFALLRQMGYIIKDDNSPPLSA

SEQ ID NO: 393137 - protein, 395 aa, unidentified
MRAIQQAEPFSPRRYDVFAGLDVDKTSISVTFMDHGNSVKSFRIPNKAENLLNYVSKNFPEKQVAFAYEAGPTGYGLYDSITAAGYPCLVVAPAMVPTAPGMRVKTNKIDSKKISESLRGGQLKSIHVPSAAYRQLRHLVQHRDTCVRNSIATKLRIKALLLFEGIPYPKAENSDEQWSRDVISKLKALECSSAVRFKLDQLLAALEFSRNQVLVTTKEIRRFCTEEADILNCIMLLISIPGIGWITATHLLARIGDWRNLGNVRQLAAFLGLAQRENSTGEHVNRGGITRSGDGRLRNKLVQGAWAAIRIDPELREFYRRIYQRHPKNQAPKKAIVAVARKMTMRIHAVLSQQREYVVRPHIPSVPLHPEEMICPRERLDSAQKQEMPDAPDVS

SEQ ID NO: 393138 - protein, 411 aa, unidentified
MEPIVERASGLDVHQKTVVACVLVGDAIHRPKKEVKTFGTTLSDLQELRAWLVEHRVTHVGMESTGVYWKPVYAVLEEAGLELIVGNAHHIKNVPGRKTDVKDAEWIAELVRHGLIAKSFVPPKPIRELRDLMRYHRKLVNVRSGERNRLLKLLETANIKLSSVATNVFGKSGMAMLEAIANGQSSGAELAELAQGLLKKKKGVLCKALEGRVAEHHRFVLRMQLDRLKALELDLAKLDAYVEAKMAPYQSQQRALEAIPGVGAYTARMIIAEIGVDMDVFKNEHRLAAWAGVCPGNNESAGKRLSGRIRKGNVHLRTALVEASMSAVRKKGSYLRSKYYRLKSRMGVKRAAVAIAHKILIAAFRILADGTVYQDLGDGYLDSLNAARTSRNLVRRLEALGFRVQIEPVAA

SEQ ID NO: 393139 - protein, 438 aa, unidentified
MVPMTLGIDVACRAAHQGSLADPKGRFAWSGRKFRTTVADLNRLWESIPEGTALTVVMEPTRNAWVPLAAWFRRRGASVIMIPPEQSADLRDYYSKHAKSDHLDSRMLARLPLLHPDGLRPAEGLGPADALRRATKLRASLVKRRSVILARLDSYLELLGPAWHAAFGGDLANNTPLRFLAAGYADPHAVRRLGRARLARFIWRYSHGAFGEQLAGQLLAAAAETLQLWDGELSYPDLAEDIAAEARLALALTTETRDLERKIASLLHELDPAAIMTSVPGVGAIGAAQILARLGDPARFQSLAGARSFTGLVPSLDASGTSGRHGPPTKSGDAPLREALFMAANQARRIDPALAARYHRLMVTCGKHHNSALCHISTALLTRIIACWRAGTPYQIRDLDGTPLTAAQGRALVAARYRISDEIRAQRRTSHTKTRASR

SEQ ID NO: 393140 - protein, 358 aa, unidentified
MKYIGCDFHPSFQQIAMLDKETGELVERRLLHTEEARGFYEGLQEPVVVGVEASGNMDWFESLLARCRHQMWIGDAAAIARQEGRKQKHDRRSAALILRLMVENRFPRIWVPTLAERDLRQLLIHRHHLVRMRARIKNQLQHMALNQGWQKKSKLWSRAGLELLGNLKLETWAGQRRDTLLAMLGDLEEKIKPLDQAVAREAEGNQMARLLATHPGVGPVTSLATVLTMGDVNRFADSRSWVSYVGLNPSEESSGQRRRLGSISKQGNPFLRQLLVEAALTAARGDKDLGRMNARLKARKHHGVAKVAVARKLAVRLYWMARTKKSYPDVVRMQGSQSHPVAEVKAGTLNRPPASHQW

SEQ ID NO: 393141 - protein, 387 aa, unidentified
MIVIGADTHKGSHTLAAVDEGTGRVRGGREIKADDAGHLAAVRWARGLDEQRVWAIEDCRHVSRRLEQALLAAGERVVRVPPHRMGASRKGEREPGKSDEIDALAVARAVVKDGIDQFPVAYLDERAMEIRLLLDHRQDLIAERTRTVNRLRWHLLELCPELEQSLKRGALNNSRVLDRVDRVLRKLPAGARVRVAREHVSQLRSLTRQVNQLQSELLELVKAHRPELLAEQGCGGLTAAILIGHTAGVKHFRRPSSFGLQTATAPIPCSSGQRTKHRLNRGGDRQLNHALHIIAVTRAQHDPATKEYLARKEAEGKTTKGALRSLKRHLARRFYHLLADPPADHDPQAVNGKPIVKPKLPAIPERPRPRREVQQIRTAPYSMVCVR

SEQ ID NO: 393142 - protein, 359 aa, unidentified
MEHLAIDLGSRKSQVCVRAADGTVLEEQKLETAGLGLYLQSRPKGSRVVLETCAESFRIADLALAAGHEVRVVPATLVRSLGVGARRTKTDRRDAQVLSEVSCRIDLPSVHVPTAASRQRKTLCGMREALVSARTQLVNCGRGWLRTQGIQVKKGAEGFPERVRTQHREQRQAELPDYVENLLQAIEGLDAQLRAADKRLRELAKKDPTCQRLMSVPGVGPVTAVRFVAALDDPSRFTSAHAVESYLGLVPGEKQSGDRQQRLSITKAGSARLRCALVQAAWCARNTRPHDPMVRWCLEVEKRRGKFIATVALARKLAGILFALWRDQTTYDPRCGASDVPPDPTIEEAVRQTLEHFQQ

SEQ ID NO: 393143 - protein, 397 aa, unidentified
MIAVGIDISKAKSTVAVIDSDGTVLASPFTMAHTQPEMESFVTYLKGLGEPTTILMEYTGHYHYPVLKKLQDEGFPVCIVNPYQMKKYGDVEIHKAKTDKKDALRIAAYALEKSYKLVPYSSMEQKYEDLKFLSRQYNQRISYVAKLKVQLIALLDQTMPGITRILPLNSRNPEKCALLLFIKRFKSFDEIQRIGKARFLASYDVLAKKASERSASSKGLSIYELAVDSITTRGEDPYIWLSQNQCVDLLSATQNAADEIISQMRNIAETIPEYKVLRAMHGVGDRLGPIILAEIGDVHRFHSGKALNSYAGNDAPPYQSGQFESRNRHISKRGSSTLRKACYEVMQALKLTKPQDDPVYLFMLKKEQEGKPFNVAKMAGVNKFLRIYYARAMELYK

SEQ ID NO: 393144 - protein, 344 aa, unidentified
MGLSPVCNQVLGPDPTNMMEVGMNDKGNRVIGVDIGKRFLDVAREGVRAVRRHSNEAAEITRFVGDLDREHDIVVFERCGGYERQLEAQLAAAGIRWAVVHSRRVKAFREAKGIKAKTDAIDCRLLRDFGRDRLDDGQLRFGRLEDVTLAALVARRRQLNGLLHDERCRHETAAIALVQASIARTIATLEHELAATEAEIDRHIAADAELALKQETMCRRIGVGQTTARSLLAVLPQLGRATGKEIAALGGTAPRVHQSGTLRKTRGLDPGREAVKTILFYPAQTAMRYDPDMKAFAQRLRQRGKPGKVIMVAVMHKMLVRLNAAIRDALNSSWRTCSAPPAAV

SEQ ID NO: 393145 - protein, 405 aa, unidentified
MPELWAGTDAGKAEHHCTAIDADGTKVLSRRVPNSEDELLQLLSDVLDLADGDLVTWAVDLNAGGAALWIALLVNHGQRLFYIPGRAVHHASGAYRGSGKTDAKDAFVIADQARMRRDLQPLQETSEIAVDLKILTARRMDLSADRTRAINRLRAQLLEYFPALERAFDYSASKAALILLTGYQTPAALRRIGRTRLTTWLKNHGVRALNTAKSAADAAVTAAEAQFTAVPGEKTAAKMAHTLAREVMALDEEISELNALIEGRFREHPDAEVITSMPGVGDMLGAEFIAATGGDMAAFGSPDRLAGVAGLAPVPRDSGKVSGNLRRPRRYSRRLLRMFYLSAQVASVYCPQSKTFYQRKRAEGKSHKQAVLALARRRLNVLWALIRDHRAFETVTPQPAVAAAA

SEQ ID NO: 393146 - protein, 453 aa, unidentified
MKKKVSSKDKLDDASLPVVHRKAAGIDIGSRFHVVAVPPDLASESIRTFDSFTGDLQEMARWLKDLGIKTVAMESTGVYWIPAFSILQEKGIEVYLVNASLAKNVPGRKTDINDAQWLQRLHSFGLLRNSFQPAENIASLRAHLRHRDNLIEYKAAHIQHIQKALMLMNLQVHHVVSDITGVTGMRIVRAIVAGERDARILASFRDVRCKSSLETIEKSLVGSYKLEHLLQLRHAVELCDHYQQKIDECDQQIESILQLLQLNKSPPEEPLPKHRHRTKQPNDPNFDARSYLYRITGVDVTKVHGMGPHTVLKLIGECALDMSKWPTAKHFTSWLSLSPGNKISGGKVLSSKTRRSTSKSATMFRLAAVNVGKMDSALGAFYRRLAARVGKAKAVTATARKLAVIFYNTLRYGTKFVDPGAEYYEEKYRERVITHMAKKAKKLGFELRELVPA

SEQ ID NO: 393147 - protein, 383 aa, unidentified
MTNQASRFIPRDYDVFAGLDVDKKSMAVVFTNHDGPMRGLRMAHSAKPLLNYVRKHFPGQRVAFAYEAGPTGFGLHDELVTEDYTCLVVAPSKVPRASDERVKTNRLDGRKLSESLRGGQLRSIHVPTRAYRDLRHLVQLRDTHVRQLSASKLRIKSLLLYEAIPFPDPQEKWTARAMRELQTLPCPETVRFKLDDLLNTLHFHFQAAAAATKQIRRYCLQDAELQQSIDLLLSLPGIGWIVGSHLVARLGDPQQIKNGKQIAGFLGIVSSEHSTGEKENRGPITHTGDSRLRNKLIQSAWTAIKKDPELRAFYRRIYQRHPRKVAARKAIVAVARKLTQRIYVVLKEQRPYVMRLDSSIAPLTAEETVGPRERLDGAQNDQL

SEQ ID NO: 393148 - protein, 375 aa, unidentified
MATTRRTECSAGDAPLYVAFELSAREWKLACAPSGGVAPRLRTLRDDARLDLPRELALARRHFQLPATAPVVSCYEAGRDGFWIHRHLTSLGVRNVVVDAASIEVTRRARQVKTDRLDALRLLDLLVRAEAGRAAWRVVRVPPEAAEDARHVMRERRTVRADRTRVRNRLRGLLATQGVRVPLRRDFLTRVAAARRWDGTPLGPGLQQRLRREWEALQAIETRLTVVEPRPATWREPAPPAVAALQRLCGIGDAGAWTLGLEVLSWRTFRNRREVGSFLGLTPTPYASGAQRREQGISKVGPPALRALLVQLAWQWLRYQPRSALTKWYTARFAGGGPRARRIGIVALARKLWIALWRYVTQGVIPDGAVVKAAA

SEQ ID NO: 393149 - protein, 347 aa, unidentified
MKRFVGLDVSQESCAICILEDDGKKLFEGDCATDPDTILEMVFAKAGAVARIVHESGPLSIWLSRELGKRDAPVVCIDARAANKALSARMNKSDRSDAEALAQLARTGWYREVHIKSEESDRLRLLLSARERLIKIRMDIEAQARGILKTFGIRLGPVRAGRCRRDSRDQLAEVVSGDPILEVVFASLITVHETVCQEATGLDAEIQAFAKDSPLARRLTSVPGVGPIVALSFIATIDDATRFRRAVDVGAYLGLTPRRYQSGETDWSGRISKRGDSGMRKLLYEAANILIQRVAKFSPLKAWAMRLVQRKGLKKATVATARKLAVILTRLWRDGTEFAWTQEALPT

SEQ ID NO: 393150 - protein, 380 aa, unidentified
MKKNTIVNLQVTKSQIRRMAAKQRLTVGLDLGDRTSRYWILDEAGEKANEDQLPTTKTGLEAMFGKMPPCRIALEVGTHSPWVSRQLKAKGHEVIVANPRKVKLITESVKKNDRMDAEQLARLARVDPKLLSPIQHRGAEAQADLAVVRARMALVDARTELVNSARGLAKPMGERLKKCDTDYVKESLADGLSEAAQNAIRPLLKSVEEINQQIGVYDQRIEEIAKRYPEMKLLKQVHGVGTLIALTYILTIEDAERFAHSREVGPYLGLTRKLRDSGDSRPELGISKAGDELLRRLLVQGAHCILRDGAPDSDLKVWGKAMLQSGGKKVSKARKKKAVVAVARKLAVLLHRLWVTGEVYDPQYNRKAAQQAAKGKGKAA

SEQ ID NO: 393151 - protein, 340 aa, unidentified
MTVIIGIDPHKTTHTAVAIGCDEGELATVTVRATRQQVGKLLGWATPFEERTWAIESAGGLGYLLGQQLVDAGEYVLDVPATLASRVRVLGTGKSDKNDPNDARSVAIAALRSPGLRSVQPADHAEVLRLLAKRNQDIGDLRTKLVCRLHALIASLAAGGIAKELNASYADGLLGAFEPCSPVEATRHQLALELLEDIRRLDNQLKESHKRMKIAVRASGTSLTEVFGIGPVLACALIGYTGDVTRFTSRDQFASYNGTAPIEVSSGGRAAHRLSRRGNRQLNHAIHMVAICQIRQTHSEGRAYFEKKVAEGKTKREAIRSLKRQISNTVFRHLVLDTKR

SEQ ID NO: 393152 - protein, 360 aa, unidentified
MTDASRGEPKMTTAGIDLGDRYSYLCFLDTRSGEVIEEGRLRTTPQTFERRFCSERPLRVAIEAGTHSPWVSRLLEECGHEVLVANARKIRLIYAEGRKTDRVDAEKLARLARLDPKLLAPIEHRGERSQAHLALIRSREALVRIRARLINHVRFTVKPFGHRLPKCSAQVFHKKKVAEGMPESLKPSLAPILETIGELSARIGEYDRKLEALAEGFYPQTRLLRQVQGVGPLTALAFVLILEDPMRFASGRAVGAYAGLVPGKDQSGESDPQRRISRHGNELLRRLLVGCAHYILGPFGEDSDLRRHREKIAHRGGKNARKRSVVAVARKLAVLLHRLWLSGEVYDPLYNARRAVEYAA

SEQ ID NO: 393153 - protein, 378 aa, unidentified
MNASGTALQGKHTVEASELYMAFELGEKNWKLSLSDGVRSPSRYTVAAGDTAALLECIAKTKARCGLAPEARVCSCYEAGRDGFWLHRWLIEQGIENIVVDSSSIEVNRRARRAKTDRLDGDKLLSMLIRYRAEEPRVWSVVRVPTQEQEDARRAHRELGRLVHERSAHINRIRALLVLTNVRVKYVGGRLWQRWWTGHGQELPPGVRAEIERESARLLLVKQQMDTIEAAQRQAVDSNTEPQVARLAQLRAIGMSSGWVLAKELFGWRRFRNRREVAGCLGLTPSPYASGESETEQGISKAGNRRVRTLMVELAWSWLRYQPQSELSQWFNRRFAGGGKRMRRIGIVALARRLAIALWRYLEDGLIPQGAQLKAIGA

SEQ ID NO: 393154 - protein, 343 aa, unidentified
MHVNTIGVDLAKNVFQVHGVDSAGKVVITRQLRRKQVLDFFSKLPGCLVGMEACGTGHHWAREISKLGHTVRLMPPSYVKGYVKRSKNDAADAAAICEAVTRPSMRFVPIKSTDQQALLMLHRTRDLLIRQRTQLINALRAHLAEFGLVAETGREGLAQLGAIITDESNHEALPSAMKQALQAIVDQLAALELQVGALDRAIHAHHRANDMSCRLETVPGIGVIGATAIASTVTDPSGFKSGRDFAAWIGLVPRQHSTGGKERLGGISKQGDRYLRRLLVIGATAVVRQARLHPQKHPWIMRLLAKKPAKLVAVAVANKMARIAWAIMAKGGYYRAPELAAAA

SEQ ID NO: 393155 - protein, 438 aa, unidentified
MSTYAGVDWASEKHDVLIADETGEKVLAATFAHDEAGVRGLCRALVRHEVTLVAIEWPDGLLVERLLDAGLRILALHPNQVAAARDRFRASGGKSDRFDAFVLCELARTDHHRFRVLEPDSDQTKALRALTRAREDLVGTRTALVNQLRAELARFWPGPLGLFTSLHSQISLAFLERYPSPTDARGLGAARLHGFLVRQHYTGRQTPAQLMAKLRRAPEARVGELELGTRRQLVLTLVTTIKTLNEQIKQLERQIATAIREHPDGAIFLSLFRKPNSVITAAELLAEIGDCRARYPTRDTLAADAGHAAVAIESGKRRAACFRWACNKRLRQAFVTLADTSRHHNPWAHDLYAAAIGRGHDHPRAIRTLGRGWCRIVWRCWQDRTPYDPARHRALQRHITVTIPTSSGPMPDLAANPADARRRRHPKGGPQGPSAKRL

SEQ ID NO: 393156 - protein, 339 aa, unidentified
MELCCGMDLHSSNTVIGIIDEKRKHLIDRKLPNNPELIRSFLKPYKPQLKGIVVESTYNWYWLADLLQEDGYRVHLSHPVANEQYNGLKHSNDKHEAFWLAELLSLGILKEGFIYPRQVRSLRDVLRKRAHLVRLRSGLLVSLQHMISRNYAMKVKTGDMKRLKEDVISPLLIQDEALLLAGQTSKGVIDCLTRQIDKIERWALKRLCREGIFIGLVTLPGVGDILGMTILLETGPISRFREVGNYASYCRKVSSQWTSNDKVKGRGNIRNGNKYLAWAFSEAAEHARRTNEACRRFYDRKLRQTNTKVAHNALAHKLARAAYYIMKDHVSYQEEKMFA

SEQ ID NO: 393157 - protein, 453 aa, unidentified
MQVVHERCCGLDVHKKVVVACLILLAANGQRHKEIRTFGTMTRDLLALGDWLRAAGCTHVAFESTGVYWKPIFNLLEGEMTVLLVNAQHIKAVPGRKTDVKDAEWIADLLQHGLLRPSFIPPAPQRELRELTRYRSSLVADRARVINRLQKALEDTNVKLASVVTDVTGVSAHAILRAYLSGEETDPWELANLARGSLRGKQVQLAQAMVGTVKDHHRFLLLHQMTLIEVLEQQIAEFDQEIATRIARDDEESDADQPQVSVSSVPAVVSEGETEPSASPVARQSLAGYAKALERLDEIPGVNRRVAEIVLAEIGINMDQFPSGGHLASWAGMCPGSKVSAGKRLSGKTTKGSTWLRAALLEAAHGVSHSKHTYLGEQYRRLARRIGKKKALVAVAHSILVIIYHILKEEKTYHELGSTYFEEREHDAVKRRALRSLERLGYDVSLQEKGAVA

SEQ ID NO: 393158 - protein, 373 aa, unidentified
MPKYSTAFGMDVHLRSTTVCALDADTGEAVTRRFPGNPWGEIAGWMDGFPGPSLAAYESGYLGFAPQRELAGLGVECVVAAVSKIPRSAADSASKNDRNDAARMAKAILAHDISPAWVPSPEVEGIRDLAGAYDGATARLATAKQRLLAFLAKRGFVYGGTTPAGNPRKYWTYDFLRWLDKVRPEDDGGVRALAALRNEVEAAAEARADLLSEYRAAVDASPIAAEVAALQSIKGCAFALAAAFSAEVGDFTRFRSGRQVTAYFGLAPSQRSSGDSVRLGGISGAGNALVRKLAVEGSWCYAAARHQPKLMPRDTGVPLEIRMHGRKGSERLLRRREEMLARGVPAAKANAATAAELVRWPWALGMMCREGAE

SEQ ID NO: 393159 - protein, 413 aa, unidentified
MLFVGIDWAEDHHDLVVMAEDGQVRAGTRIGDDLAGVGRLHGLVADHQVDADEPVAVGIETDRGLLVTSLVAAGYEVFAVNPMVASRYRDRHSIAGAKSDAGDARMLADLVRTDRHLFRPLAGDSDEVEAIKVIARAHKRLIQDRQSQVNRLRNSLRDYYPGAAACFGADLADRDALAVLAVAPTARQGRGLSQAKAVAALRRGGRKRNLERRATEIREALCAPQLDAPAAVAAASGTAASALVAVIGVFNTQIAALEAELVDHFHEHPDAEIYRSLPGLGDVLGARVLAEFGDDPNRYHDARARKNYASTSPVTRASGKSTIVHARYARNARLADACRQWAFCSLTTSPGARTYYDVLRSRGKSYEHALRQLANRRVGILHGCLDHGTTYDEPTAWDHWLNATTAKESRAAA

SEQ ID NO: 393160 - protein, 415 aa, unidentified
MHTFEQLTHFAGFDWAKDHHDAVILDRHGATVQSVTFAHTAEGWAQWREMIKAYPALGVAIETNQGAAVEQLLQSPVTVYPMQPKAAQRYRDRHVPSGSKTDRTDAWCFGDALRVDGQHWRALAPEDPLTEELRMLCRDEVELITQRTALVNQLQQALYEYYPAALEAFDDWTAPYAWEFVLAYPTAEQLVKAGKRKWEKFLHTHKLWRPATAPKRLEIFARADQFCGREAVSRAKSRLAVSTAQVLRALQKQLEEYRTAIEKLFAQHPDHDLFGSLPGAGAKLAPRLLGEIGSDRQQYPDAQGLQCLAGTAPVSFESGKVRRTKIRWHCNRHLRHAVHLWSDCSRKFCAWAGTYYQAQRDKGKSHSCALRCLGQRWLKILWKMWQSRQPYDETVHALNQQRHGSWVLQLQPKTT

SEQ ID NO: 393161 - protein, 345 aa, unidentified
MEIRTIGIDLGKTVFHLIGVNARGEVVVRKKCSRTQLLRFTSNLRACLIGMEACGGSHFLGRALREQGHEARLMPAQYVKPYVKTNKNDYIDAEAIAEAVTRPSMRFVPIKTDDQLDLQSLHRVRERWVVRRTAVINQMRGLLLERGITIRKGRQHLAASLPGILEDADNKLSGALRVLLTQLQWEMQYLHRQIEESDKLIVRIASELEPCKRLVAIPGVGPLIATATIAAIGNGAAFKKGRGFAAWLGVVPGEHSTGGKQKLIGTSRRGNKYLRKLFIQGAHTVLLQRTKQTSGLSMWLASLVARKRKQVATVALANKMARMVWAVLCKGEAYRPPLLPQPAAA

SEQ ID NO: 393162 - protein, 316 aa, unidentified
MKTVINQKIHVGVDTGKYQLDIYLRPLDIYFTVPNDEKGIAEAINQLKQYPVERIVIEATGRLEMPFIMACANSKLPFVIANPIHIKRFAGAIGQRAKTDKLDAQLIAHYGEVIKPALSQLKPATMQVMSDLVARRNQLLVMQTMEKNRLQSLPKSLSMTIKPILTAFKHQILKIEKKLVELIESCPEYQKKNTILQSMTGIGKIAAASIISNLPELGYVTGKQASSLVGVAPMNRESGRYKGQRRIQGGRHQVRTVLYMAMLSAIQSNPVFKDTYQRLVGAGKPKKVAIIACIRKMVVILNSMLRDEVMWEAPKA

SEQ ID NO: 393163 - protein, 405 aa, unidentified
MCVQEKILGPRIVEWDKRITTKGILILFLPLKQGGKTMSKRFHGIDRHKRFSTICVLEQSGEELEFIAMCTDLKRYIRSLGSEDAVVLEASTGTFWWADQIEAQGALCFILDPHKFRIIKDSWNKTDKHDARNMAKALWVYQVTGEFGIPTVHKPQAVIRELRTLFSQYMMLNRQIRMLKNSIHATFGENGIALSSAKAEQLLSAKTGTRLLEELNISVASKTCIEMNQSLLWAVLVKKQQMVTEILLAGEQLRKQVELLITIKGITPLTALAFLADVGDVRRFRTTRKMNAYLGLVPRSKDSGGNMQSGHINRESRKLTRTLLTQSIHHVSRSSPYLRNYYCTLTERRGCGRARIALIRKTCAMMRRMLLNDEPFRWVDRTLFEKKLKQYRYLIEKNNEERKSA

SEQ ID NO: 393164 - protein, 365 aa, unidentified
MYDSTTTVTVGLDVHARSIRVAAVRADELLEERTLPYDEEAVELVLRRWPVVRCCYEAGPTGFGLQRFLVERGIDCQVVAPGLVPQRPGDRVKTDSRDARKLARLLAGGLLEPIHVPSRELEAARDLVRAREDARLDRMRDRHRLSKFCLRHGRALPTSSWTVARRKWLSEQRLEFAAQQQTFDSYVHTVDLVDARIEALERAIRETAEEEPWRRLVASLRCLRGIDTLTALALVAEIGGDFDRFSSAEEFMAFVGLVPSERSSGDQRRQGSITKVGNAHVRRLLVESAWHARRRPTVGYRLARRQRGQDAVVVERAWRCQQRLYQRWQRMAGRGKPQQKIVVACARELAGFVWAIATDQPLRST

SEQ ID NO: 393165 - protein, 359 aa, unidentified
MGNGTFVGLDVHARSVVAGLIDEATGEVRVVRVPHATDELVGWMGALPGPVRTAYEAGPTGYGLARALEGAGIECLVAAPSRIPRASGERVKNDRRDAERLARLLRAGELVAVAVPSVADEGARDLVRAREDARADLMRARHRLSKMLLRHGRIYDKGAWSGAHDAWLRRQSLDEPPARAALSDYYDAALAARLRRDRLDAAIAELAQRPDLAPLVGRLSCLRGVSTLTAVALAVEIGDWHRLSGATIGAYLGLTPSESQSGARHTRGPITKTGNSHARRLLVEAAWHHRRPPRKSVALERRRAGCRPEVRARAEAAGLRLHRRWVSLESRRGLRSTIVAVAVARELAGWCWSLAVMDD

SEQ ID NO: 393166 - protein, 451 aa, unidentified
MSKAKPQVIDDEERERVHERVAAVDVAKDTGMVCTRLPHPSRPGARQSTVWTVRARMGAIRVLGRQLARDGIEIVTLESTSDYWRIWFFVLEACGLAVQLVNASQAKSLPGRPKTDKLDAMWLARLTEMGLLRASFVPPKAVRDLRDYTRMRTRLIQERTRCFQRMEKLLESALVKLSSVASKLTTLSAQDMIRAMIAGQRDPLVLAALARTAMRARHDDLVQALDGMFDDHHGELAGMLLDQITFLDQRIAALAARAASLTAAMPAAWGVDAGGTTGPDAGTGPDAPVLPAVARLAEVPGISPDLARAIIAETGLDMSRFPTAAHLVSWAGLCPSARQSGPRTRTGKKGQGDTWLRGTLGQAANGAARTHTFLGERYHRILRRRGKAKAQVAVARSILVIVWHLLKDPTARYTELGHGYYQGRLDTDRRLKNHIRQIQALGFDVTITKTA

SEQ ID NO: 393167 - protein, 309 aa, unidentified
MTQVDVGIDVSKDHLDVVILPDGETLRVENDKAGRCALAKRLRALAPRAVGLEASGGYERAILKALLKADLPVRRLNPWRVRQFAQALGVLAKNDRIDAGIIARFVAVLPTRKVVADEAAEAIAELVTARRQACEDLTRCRNQAAHAQGNLVKRLARRRAEHLEQDIQVLDRALAKAVADNPEHAHKDALIQSVPGIGPVCSHTLIGLMPELGRLTNRQAAALLGVAPYDHDSGKMKGKRAIFGGRQAVRDVAYMAALAAGRHNPTLKAFKDRLLEAGKKPKVAIVAVMRKLITILNALLRDNAPWKAA

SEQ ID NO: 393168 - protein, 309 aa, unidentified
MKVTTLGIDLAKNVFQLHGVNEYGKTVIKKQIRRDQMAEFFANLPACLIGMEACGSAHHWARKLEGFGHTVKLMAPQFVKPYVKTNKNDAADAEAICEAVARPNMRFVSIKNIEQQAVLALHRVRQGFVKARTAQANQIRGLLSEFGLIVPQGIGYIASRVPELIEDAGNELPGSFRMLIERLLDHLRALDHQVVELEAQIVSWHRQSAVSSKLAQVPGIGPITASALVASLGDAKNFDGGRQVAAWLGLVPKQHASGGKQKLLGISKRGNTYLRTLLIHGARSVIYRAQNKPESCRWINGVVSRRNIT

SEQ ID NO: 393169 - protein, 440 aa, unidentified
MEKIRTNVAGIDIGAKKVFVAVEGQLVVSYFTFTEDFMLLRDSLLKHKVETVAMEATGVYWVILYEILEEAGIDVWLVDGRQTKQVPGRKTDVKDCQWIQELHSYGLLGRCLVVDSDIKELRSYIRLREDHISSSAMHINHMQKALTLMNIRLKEVLSQIHGASGLAIIEAILKGERDKHILVSLCHRSVLKTKRELILKALEGKYTEAGLFALKQAYDGYKFYLGQIEECDKRISIVINRIGQSGKGQDTKNKRKAIRHHNPSVEKLASNLMNIFDGKDATLISGITDYTWMQLLAETGSDLTRWKTEKHYTSWLGLSPGQNNSGKRNRNAKKKGRPKAGQIFRTIAQGLINSKNIAIGSFGRRLRGRKGPAIAIKAMARKIAVLYWRVMVKGLDYAEKGIIHYEEQLLANKMKTLNRLANELNIEIIGNKQVTQICHW

SEQ ID NO: 393170 - protein, 440 aa, unidentified
MRDHSEAFIGIDTSKLRNAIAIAEGGRGGEVRYFGEIDSADAATRKLVSKLAVKYRSLTFCYEAGPTGYGLYRLIRSLGHECVVAAPSLIPKKPGVRVKTNRRDAVELAKLSRAGELTAVWVPDERHEAMRDLSRARQAAKKHLTSKRQQILSLMLRLGRHYPGKKTWGTAHMNWLTQQKLEHREQRIALEELLEGMRQEAERVERLEQAIREAVPEWSLAEVATALQAMRGIDLVAAVTVLAEIGDLSRFQSPRELMGYLGLVPSESSTGDKVKRGGITKAGNGRARRILVEAAWSYRHPARVSREKQPKVAAAPRRVREIAWKAQMRLCGRFRSLTRKGKLPSIVATAIARELSAFIWAIKSRGHGSRRRARNPQRPDRPQCDAVLATVKAWPGDSRRSRRCTATASLDGGCARRPGNSTGRDEETGSQVEQRNWLGS

SEQ ID NO: 393171 - protein, 343 aa, unidentified
MQAVTTIGLDIAKSVFQVHGVDSHGKVVIRRQLRRRYVLVFFKKLSPCLVGIEACATSHHWSRALQALGHTVRLMPPAYVKPYLKRQKNDAADAEAICEAVVRPNMRFVETKTAEQQSCLMLHRTRHLFVRQQNAVINSIRAHLAELGIVAPVGRNGVEELLDVAADPNDDRVPDAARDCVVALGAQLRMLKAQILEFDRRIMAWHRSNETSKRLDEIPGVGPALATALVASVANPKAFRSGRDFSAWIGLVPKQNSSGGKERLGNITKRGDRYLRSLFTTGALAVIRYAKIHGTKHRPWLTALLVRRPTKVAAIALANKIARMAWAMMSKGERYREPAALAA

SEQ ID NO: 393172 - protein, 386 aa, unidentified
MDHPTTLSVPDPTGIRGDCATLCVSLELSRSTWVATSLALGSKKISKHTLVGGDARKLLDLLARLKSRAEQRMAAPVKIVTIQEVGLDGFWIHRLLEANGVESHVVDPASIAVPRRHRRAKTDAIDGETLLRTLMAWQRGEPRVCAMTVPPSPSEEDCRRVSRERATLLRERIRHTNRIRGLLFGQGITNYNPLHKNRRKGLEELRTGDGRPVPAHLKAEILREIDRLELVLRQINEVEAERDEMLRLAQASSPVALLMRLKGIGPEFAAVLYLEGLFRHFENRRQLAAYAGLAPSPWKSGSVDHEQGISKAGNPRLRTTMVELAWMWVRYQPASALSCWFRQRVGSERGRIRRISIVALARKLLIALSRYINHGEIPAGAVVKPV

SEQ ID NO: 393173 - protein, 336 aa, unidentified
MKYIGLDVHSTHINCAVIDEQGNLIHHDCFPTSLQNLINLSEKLKHPLSLVFEEGELADWLFQGLRSSFEEIVVADPIENRLIYGGDQKSDPIDPLKLATLLRGGFINPVHHTWDHHRSQFKQLVFAYHDMAKQVTRTKNKIKAYYRKQGIIIKTDSVYHPDKRTLFINESRHPEIIEKYYQFLDLFQHEKDRFERTLKKEARRYPIIRRFLKIPGVGIVTATTFFTIIDDPHRFARKQQLWSYAHLGKSVHQSGNYEVTRRQRKGNRLLKYVIKIAAGDAVRQKTNEFTRAYIRILNIQQKEPKLAYRIIARKLATIMWTMWKNNQSYLEEMSST

SEQ ID NO: 393174 - protein, 393 aa, unidentified
MIYVGIDVAKDKHDCFITNSDGEVLFQVFTIQNNRKGFDDLFSRIQSTSSDVSNIKVGLEATGHYSYNLLGYLIDKGLPTYVINPLHTNLYRKSLSLRKTKTDRVDARTIAAMLMSDVDLKSYTDTVYHNEELKSLTRYRFDKVRERAKLKQSVSRLVTILFPELEKLVSSLHSASVYALLSEFPGAKQISSTHMTHLKAVLKNASQGRYGQEMAETIRNAARSSVGSVMPAKSLELQHTIRLIRELDAEIEDIETAIQAIVDEMQSPITTIPGMGVRMGAVILAEIGDFSRFDSPDKILAYAGMSPSTYQSGQLSLSGAYSHMEKRGSRYLRYALYNATKHVCHWDPTFAAYLAKKRAEGKHYNVALSHAAKKLVRLIFAMEKSQRPYCAAA

SEQ ID NO: 393175 - protein, 318 aa, unidentified
MNIIGLDISKDTIDATLHKTNGSIHYIKFKNNDDGLKQFRLWIKGNRIRKVYIGMEATGIYYEKAADMLSSYYTVYVINPLKIKDYGKSRFNRTKTDKADSNLIADYIKRHQDTLIPYQIPKNKALQKLINLKNQLQQHQKQIKNRLHSTEEDFIRNIHQDLIDTIQDKMEQVKIAISEQIKKQTDYNHYRNLQTIPSIGKDTASVLYAQLTEKHFKTANQFVSYAGLSPAIIQSGTSVRGRGRLSRYGNRRLKSTLYMPALCAYRFNAFPKLINNLKKAGKPKMVIIVAIMRKLAKLAYYIVKTGQPYDAERHRLNQ

SEQ ID NO: 393176 - protein, 345 aa, unidentified
MQNMYYIGLDVHKRTISYCVKDGSGTIHAEGTIPATRFDLDRWMKTLPQPWTAAMEATVFTGWIYDHLQPHAAALKVAHPLMLRAIAAAKKKNDRIDASKICDCLRCDFLPECYVASTAIRERRRTLRYRNLLVRQTVQMKNKIGMLLMEAGVSYNKQRLHKAGYFRELLATNPDIDEGLVSLLRLCRETVVRLQKTESALVRSLEGDSLLIDRVERLMTIPAVGPITALTWALEVGDAKRFSSIKKAISYCGLCGAEKSSANTVQRTPLSKQRNKHLQTTLIEAAKMAPRNSPELAMLYDREKQKGNANRATLAVARKLVAYLMAVDRGQRNFQAMETSHCIAA

SEQ ID NO: 393177 - protein, 323 aa, unidentified
MSSSSETESRCYVGIDISADRLEVQVLPTEQRQSLVYEQAGVTHLVGFLQQLKPALIVVEATGKLEMAVVASMAAVELPVVVMNPRRIRDFARSLGLLAKTDRVDAYVLARFAESVRPQPRPLPSEQQHAMQELVSRQRQLVEIRAAESNRLRRTRTTAVRHNLQIHLAWLDKQIQEMDRQIRQLITASPCWREKDQLLQSVPGVGPKLSSVLVAHLPELGQLNRRQIASLVGLAPFNRDSGRWRGKRFIGGGRSKVRCTLYMGSLVAAYHNPVIRALRQRLENQGKPFKVVLTACMRKLLIILNAMLKNGTHWNSALCRNLS

SEQ ID NO: 393178 - protein, 325 aa, unidentified
MSSYEIVGIDVAARTLVAIGERVTLAAAYDNTPASRSSLIQTLGRSRRPVRVVLEATGIYFVDLACELVAAGIAVMVVNPKAAHHFAEAILQRRKTDPVDAAMLREYGRRMDFVPWQPPRPELFGFRALTREVQALSKAVAAAKNRLHAVTATRLTPAALIRALERQIAHNQTLIDELVAAALAQTETDPELARLFARTDSIPGFADKAAVLVIGELAVLPPMTARQWVAQAGLDVREESSGTSLARRPRLSKRGNKRLRQTLFYPALTAARCCPAAGAFVERLVAHGKTRLQAIVALMRKLLHGLHAMWRNDEDFNAEKLFAQA

SEQ ID NO: 393179 - protein, 467 aa, unidentified
MKNYDYNLFVGIDVSKGKADAAVLAVPELRSVKPRFLRKKLSFKFIKSDVVEFLNTVRKYSSDPHCLHTYFALEVTGIYSTNVYSFIKENCNSDEEIHQLNTDFVNKWRESHNISKSDPLDAQTISTIIGTDDDVRYVSDSVFENKNGYQDLKALVHRHYQIKKLHSQETNRLIALCDCYFPELQYVFEPKSAAFLAVLSQYPTSHDIINASKNEVFSLVYEASKHRCNMDKIDKLFNYAQDTLVPHVSDHIRCVIFNTVESIFNIRAQLKLIEKDIRKLASTFNVYSLLMTITGCGPLTAAVIIAETGDIFRFKNADHYVSYSGSSPRNKRSGKSVEIMGKISKKGSKYLRHALYMIAEFARRHNPVLKHLFERVKNGNKKRHKLAVIAVANRIARYIYSIMKNESSFVIMHENIMRLPEETRNTFFNSISLDFPKNTRKQIYQYSDVNGEIHRFVYKNETTESIA

SEQ ID NO: 393180 - protein, 456 aa, unidentified
MAKQASKKRDRKIRQLNPNAAGIDIGSQKHYVAVPTDRDNEPVRSFGCLTPDLHQMAKWLKSCGIETIAMESTGVYWVPVVAVLESYGFDVKLVDAYKVKNVPGRKTDVKDCQWLAELHRFGLLSGAFRPNRQIQVLRSYWRHRSTLVEACSTQIHLMQKALEQMNLQLHKVITDITGVTGIKIIRAIVAGERDAVKLAGMKHPLIKSSTETIAKALTGEYRQEHLFTLKQALEIYDVYQNKIADCDRQIEEYMKTFEHKADANDLDSKSGKNNRTKRRKNQPNFDLRTRLFEMTGVDLTQIDGIETMTAQTVISECGFDMSVFPTEKHFTSWLGLCPNNQITGGKVRKRSTRKVQNRAARALRLAAQSLHSSKSALGAFYRRMRARLGAPKAITATAHKLAKLVYCMLKYGMDYVDSGQQYYENQYRERVIKNLTKRAREMGYAVVCTNTGELVS

SEQ ID NO: 393181 - protein, 416 aa, unidentified
MAAVMIGVDPHKASHTAVAISAAEEQLGELRVRACVARTERLLAWAAAWPQRTWAVEGAGGTGHLLAQQLLSAGERVLDVQPKLGARVRLLAAGDVNKNDPNDARSVAVAALRSAGVRQVRPDDHAAVLKVWSKRYRDLGRTRTQAACRLHAVLGELIPGGVPKAVTTARAGRVLKALRPEGAVETARCELAADLLEDLRRIDASLRETRRKLAAVVAAAGTSLTGLFGVGPVIAAAVIGDVRDVSRFPGRDHFAAYSGTAPIEVSSGRRKVHRLSRRGNRRLNHAIHMAAITQIRNKHSEGRAYYDKKLAEGKTPKEALRSLKRQVSNAIFACLQADARRAAARAEGPGGQQGNDSVASAAGSHPRHRLFGQATPGPGHHTTTTAGDPASRPAIARGRASRSPDAATMPTRFRKG

SEQ ID NO: 393182 - protein, 340 aa, unidentified
MVLIGIDPHKASHTAVVIDESERELARVKVKADRSQVAALLQFADCYQPRRWAIESAGGLGFLLAQQLVRAGEDVVDVPATLAARVRLLGSGRGSKSDPNDALSTAIAALRDPHLRTVVAEDHAMVLRLLADRHQDLTSLRTQAVCRLHALIAALTPGGVQTRISAEGAASRLRSIHPQNAVEAQRKEMALELVADVRRLDKNIAEVKKRITVAAAASGTTVTEVYGVGPIVAALLIGHTGDITRFPTKGHYASYNGTAPIEASSGKVVRHRLNQRGNRQLNHALHMAAVTQISRDNPGRTYYLTKIEAGKSTKEARRALKRKISDAVFRQLRDDARPQT

SEQ ID NO: 393183 - protein, 419 aa, unidentified
MSEETSPTVFAGVDWATQKHDVCVVDGQGRVLGERTFAADAAGLSALADWLVETARVAAQRVPVAIEVPHGPVVEALLERGFAVHAINPKQLDRFRDRFSVAGAKDDRRDARALADSLRTDARAYRRIDNDHADVIELREWSRMAADLTVEDVALCNQARQQLSRFYPQILELSGDPGEAFVLALLEAAPTPAKAQRLRSATIQALLRDHKIRRLRTDEVLAILRKPALVVAAGTAEAAVGHLRQLAARIRLVRRQLAECREKLDEIFARLGAEEVQGRKNEPRDVEILLSLPGVGRIVAASLLAEASRPLRDRDYQALRTLSGVAPVTKRSGKTLVVEMRRACNPRLRNALHHAARNAGQSDDAWKIRCAAMRAGGQTHGRACRGVADALLRVVLAMLRTRTLYDPSKIGATRAKAAA

SEQ ID NO: 393184 - protein, 436 aa, unidentified
MSNLVSFEQHNACAAAIDIGSKKIFVSCDGITVKSYDTFTFSYRKCIEDLRSQQVKNVCMEATGVYWIALHELLEQAGFCVCLVNPKEVKQVKGRKTDVADACWMQKMFSAGLVRQSYIPAGRLKELRMLMREREDIISMGSSYVNKMQKALELMNIKLTEVISQITGVSGIRMIEAILRGERDGKVLLSLCHKSIKDKKADEVLMALEGNYNESWLFLLEQNLKLWKIHEQQILIVDQRMEVLLSFLEQGSSFVAPVHKEKPVRHHKPMIKDLNQKLLNIYGVDAGCLPGVTNYSMLKLLGETGTDLSRFPTEKHYVSWCGLSPGHNQSGSRSRKAKMKNSSRVGQIFREIAQSLLNSKHIAIGTFIRRIRTRKGPAIAIKAGARKIAIAFYNLLTKGTAYLEQGAAKYEQQLKQREQQYLLKLATKHNLKLVEI

SEQ ID NO: 393185 - protein, 422 aa, unidentified
MEEARDTGEIIERVAALDIGKAELVCCVRVPSPGKSGTRLQEVTTHSTMTRSLLVLADRLRELGVTRVVMEATSVYWKAPFYLLEAAGFETWLVNARDVKHLPGRPKTDKLDAVWLCKVAERQMIRPSFVPPPEIRRLRDLTRYRTSLVVVRNAEKQRVEKLLEDAQIKMSVAVSDIFGVSGRKMLAALVGGQRDPKMLAEMACGSMRRKIPMLVEAFTGYFTDHHAFLLTKMLARVDDIDADLADLDARIEAEIGPFADQVRRLDAIPGIDRAAAHAIIAEIGVDMSRFPTPAHLASWARFAPGVKESAGKQKGCGASGHGNRYLARILGNAAAGAGRTNTFLGARYRRLARRRGNKKALVAVGRSMLVVIWQVLSDPSLEFIDLGADYYELRNNDPARKRREHVRQLEILGYKVSLESAA

SEQ ID NO: 393186 - protein, 345 aa, unidentified
MTEAYDGRQVVGMDLHRRRSVLVRMTEDGRKLETARIDNSPSALRSVLARAGKSPRVVVEATYGWYWAADVLQAAGAEVHLAHPLGVKAFAYRRVKNDERDCADLADLLRLGRLPEAWIAPPPVRALREITRFRHKLVGQRTSCKDQVHAVLAKAGIPVTRSDIFGRGGGIWLDGLPLPQPYAGKVASLRALIAVLDGEIARLEEQAAAMLAGERGYAAIRRLPGIGPVLGAVICAEIGDITRFRNPGQLASWAGLTPRHYESDTRVIRGRVSKQGSRMLRWALVEAIRRHPAGTRPLQARDAIIARRGDQARGIAKTAAARIMLTQVFYALRDGHIRRAPSQAA

SEQ ID NO: 393187 - protein, 380 aa, unidentified
MPDVSSGAPADVNQWIVFDVHKNSLVAGVLPASGGTPQVSRLENTERAIRRFIERTGDPATLAVAYEAGPCGYDLFRFLSGMGVACDVIAPSLIPIRAGDRVKTDRRDAKKLVRLYRAGELFFVQPPSPAQEGLRDLVRCRDDLRCARTAARHRVAKALLRHGHIYREGKTAWTAKHRVWLDRQRLDDPLAQLALEQMRAHLDGLDAQLATLDHELAQIAEREPWSDPVAWLCSFRGIATHTALGLLAEIGDFRRFAAPRELMSYLGLTPSEYSSGDQQHRGHITKTGNRHARRLLVEAAWHYQHPARLSKRIATNRRHVPAQVSSRAWQAQIRLHHRHRTLTSNGKRPTVATVAVARELCGFIWAAMTDQPLREEVAAA

SEQ ID NO: 393188 - protein, 338 aa, unidentified
MSLYGGIDLHSRISWLVILDGALKLVRQVKLTNDLREFLRVLEPYRAELAGLVVESTPNWYWLVDGLHDAGYRMHLANTYAAQQYSGLKYTDDRHDARWLAHLLALGILPEGYIYPAHERPLRDLLRRRGFLVDKRTSMLLSLGGAFACHTGRRVSSDTVKKWTAVEIEELLDNATVARGLTCLLEPIKAMNTQIKMLEKEVLAQAKLRDEFALLRTVWGIGPILALTVMLEVGDIKRFEKVGNFASYCRLVKTEHLSVGKRKGSGNAKNGNPYLSWAFSEAAHFAIRYHDAAQRFYQRKLVKANRIVAVRALAHKLARASYYVMRDKVEFDPDRLFA

SEQ ID NO: 393189 - protein, 343 aa, unidentified
MSEYDGKQFVGIDLHRQRSVIVRQSDTGEQLSAVRIVNDPVALGLQIEQAGPNPEVVLEATYGWYWAVDALRASGADVHLAHPLGVKGFRYRRVKNDVRDAGDLADLLRMHRLPEAWIAPPATRELRELVRYRAKLVALRSGLKAQVHAVLAKAGVLIPVSDLFGVTGRQKLARVPLGDAYARRVISLLELIDDLDAHEARFTARIATELHNDRGYTAIQALPGIGPTLAAVFVAEIGDVHRFTDPAHLCSWAGLTPKHRESDAVVRRGHITKQGSKLVRWAAVEAIQRHPAGTKISTDRKRIEARRGRNIAKIAAARKLLTLVYYGLRDGEIRALAHQKAMA

SEQ ID NO: 393190 - protein, 362 aa, unidentified
MGVIIGMDPHKRPATIEVIDERAVVLAAGRYGTDKAGYTQMLAAARTFAGRVWAVEGCNGIGRHLAHRLVHDGEVVVDVPPELSAQVRVFAAGNGRKTDEVDAHAVALRTPGLVQVQVEEDLVVTGMLADRRDELGRARTQVVNRLHRLLPELLPGGAEKFLSARQARALIASVRPRDLAGKTRRRLAVELAGELEMIDKKTRALDKELTGLAAARGSALMDLHGIGPSGAARLLADAGDIHRFASRDRFASWNGTAPLDASSGSQARHRLSRAGNRRINRVLHIMAAGWLRNQTKGRAYYDARRAGGMPSMMAMRALKRRLPNVAFSCMLADQKRREAGPGGQSGTPADSSVTGPDPGHRP

SEQ ID NO: 393191 - protein, 481 aa, unidentified
MAKRKRTTFERLQGGKLNRTQRKQLQQKLNAADPGLTVVHPDAAGIDVGNASHFVAVPAGRDPQPVREFGSWTEDLHRMAEWLKSCGIGTVAIQSTGVYWIALQGILEEHGMEVYLVNARGTKNLPGRKSDVQECQWLMKLHTYGLLRNSFRPPEQIRAVRAVWRLRDRLVEDAGRAIQQIQKALTTMNIRLANAVTDVSGATGMAIIRAILSGERDPRVLARLRDPRVKASEEEVALCLEGHWRDEGLFELEQVVECYDFHQRRIAACDQKLKGYMAALPDREVPSEPTVAEGPEGPKKVKKRRAKHSRNQPTSFDIEAELRRSFGVDLTQIDGIKAMTAQVILSEIGPDFSAFPSEGNFASWLELAPRRDITGGKVIRQKGRKSNNRVAEALRMAAESLWHSDSYLGARYRRLRGRMEGAKAIKAMAHYLARLVYRLVTKGQEYVDRGAAYFEGQRAQRDLINLQRKATELGLKLVPTA

SEQ ID NO: 393192 - protein, 402 aa, unidentified
MNAVGIDVSKGKSMVAIMRPFGEIVSAPFEIKHTASGINSLVELINSVEGESRIVMEHTGRYYEVLAHQLSEANLFVSAINPKLIKDFDNDSLRKVKSDKADAVKIARYALDKWQNLKQYNVMDELRNQLKTMNRQFGFYMKHKTAMKNNLIGILDQTYPGVNTYFDSPARSDGSQKWVDFASTYWHVDCVRKMSLNSFIDHYQNWCKRKKYNFSQSKAEEIYGKAKELVPVLSKDAITKLIIKQAVDQLNSASTTVESLRTLMNETASKLPEYPVVMAMKGVGTSLGPQLMAEIGNVSRFTHKSAITAFAGVDPGVNESGTYEQKSVPTSKRGSADLRKTLFQVMDVLIKTHPQDDPVYQFLDKKRAQGKPYYVYMTAGANKFLRIYYGRVKEYLASLPES

SEQ ID NO: 393193 - protein, 460 aa, unidentified
MLYAGCDWSDRWLDVAVLDRSGSLLGEKRIVYAERRDPVAEFQEFLTPLARRWRSTVTGIEDTNLLFARSLAASGMTVVHVDPTRAARHRSAHGVPKTDAADARLIASMTLAGECRPVIANCATAEALRVIAHAHRAAVADRTETLHALRAALMRIWPAAVYAWPASVGGLRNAQALAVLETAPGPRAAARLSRDQLAALLTEAGRNRSVQDEAERLRLLFCRPVMLLDPHVEEAESIRIRTLLVALRQAVERTDIVGRALEGSYAAHEHHRLVSRIPGVGSVLGAYLLAEIGDRPVDRFGSGRSLAACSGVAPVTWASGKVVRVAFRRASSTNLRSTLHAVAFSMVNHSPGAQAYYRRRRAAGDAHATALRKLGRKFVVSLYHCMASGVPFDDGLAFGYDPAAADAPTLTRRMVLDEGDVQRGKDMLATPGVTVTATAQGLGVSTQTIYRHVLGRPRRR

SEQ ID NO: 393194 - protein, 405 aa, unidentified
MPVEKSWRGKHERALGRKSRRIECAPLHYRALREDRTLSNVQKLHLAKQVTQALFYINLLTEGTQTMEEIKVVWCGMDVSKDEFYAALDLPGEDGNKITVAGLKAERFKRTEKGLNRFWNWVDKNSKDYTVRFVMESTGYLSRQLFNWMKEQRADAQVSIHNARYIANFIKSLNLPHKTDKSDAQAIARFGSERTPTPRQRVAKHWDELKEYQRQRAALIKIRVELENRSPSLFFGETNTINDNTIAAIKLQIKKIDKVIRAHVNEHQDIRKEVHFMCTVPGVQFISACAIIAELGSMTQYSAKQLSAMSGLAPRIRSSGSSLNQSFMGRCGSTRLRQILYLDSIQSVAKIPSLNSLYERLVQRGKCKMSARCACMRKLLIILRAVVVTSTNYDEKLLKNSYQVA

SEQ ID NO: 393195 - protein, 384 aa, unidentified
MITVEARVHPLVASRPLNGLLIPIGNGDAPMSYDYHIGVDYHKAYTHLVVQDSGGKVLRSGKVKNDPQSLAGFLTPYLENSHAVMEASRNWTVMYDWLDELCDDVVLAHPLKVKVKAIADAKIKTDKIDATILAHLLRADLIPESYVPTDAARELRQALRERIFFVRLRTMVKNRVVTIFDRYPTQTRALREMTDLFGKAGRGQLELLCVSVIDREHIDRAIAFIDDINQKIREAEKTIRRFSKDNADVKRLKTIPGIGEFFARLIAAEIDDISRFRSAKKLAAYAGLVPSTYASGGKCWNGRIIKAGNKWLRWAFVEAAAPAMRAEPALKFDYERLKATKGANRAKVVVARKLLTIAFQMLRDKRDYERRDALEQLSTSSRLS

SEQ ID NO: 393196 - protein, 356 aa, unidentified
MTSAKYIGLDVHQATTAAAVLDANGKLLMESILETHASTLRDFLAGIRGELNLTFEEGVAAEWLYGVLKSDVDKIVVCDPRKNALLKAGNKNDRIDARKLAELLRGGQLKQVYHGNRGVRTLKELARSYVVLTRDVRRVLNRIKAVYRSMAIRCAGQRVYHPRYRQQWLEQLAEPGLRRRAERLYQQLDLLQPLRQQARRELLAESRKHAARQLLEQIPSIGPVRAALLIAILQTPHRFRTKRLLWAYSGLGLEIRTSSDHDFKNGQLQRRRPKQISVRGLNRNHNPELKNLFKSTALSASLRPGAWQECYQRMLAKGIKPAMAQLTLARKIAAVVLTLWKKGENFDPDKLTMQAA

SEQ ID NO: 393197 - protein, 348 aa, unidentified
MSQTLNAAIAVIGIDIGKNSFHVVGLDARGAIVLRQRWSRGQVEARFANMPPCLIGMEACVGAHHLSRKLHGFGHDARLMPAKYVRPYSKGQKNDFRDAEAIAEAVQRPTMKFVATKTADQLDLQALHRVRERLVSQRTGIINQIRAFLLERGIAVRQGQRFLRAELPRILATPPVLSPRMVRVIEDLTGDWRRLDERIEDLTSEIEAVARQEAGCERLMSVPGIGPIISSAMVAAIGSGDAFSKGRDFAAWLGLVPRQMSTGDRTILGKISKRGNRYLRVLFVQAAWVVLIKPKSWERHGLKPWLEAAKKRLHHNVLAVALANKLARIAWNVLARGRDFEASKLRVA

SEQ ID NO: 393198 - protein, 313 aa, unidentified
MKKTICGVDVSKAKLDVCIEPGHRLASFDNDTAGIAELAAFCREHAVTLVVMEASGGYERRAFVELWEKGISCALTNPRNVRRYAEAMGILEKTDRIDSSIIARFADAKNLVPTPLPSQAQQRLKALVARLRQVTDDLTVQKQRRASLLDNPQILASLDEVIALLKRQSRSLEGEIASMIDDDPLWAKLAETWREVKGVAGRTVARLHAEMPEIGTLSNKAIAKLAGLAPIANDSGKRKGKRSTRGGRAGVRSILFLVAAIAARYDKSLGEFRDRLLKAGKEKMVVRIALARKLLVRLNAKARDARAEYANAT

SEQ ID NO: 393199 - protein, 383 aa, unidentified
MTATIPGAVTASFDPTSTLVVAIEISDRSWVVGAHVPGSTKTCSRLLIEPNVAALKEALAKLTKRCRKRPERTVVVYEAGHTGFWLARLLRDEGIEAHVLHPASVPVDRRARRAKTDRLDVELLLRAVLAWLRAEPGVCSMAPIPNEADEDWRRAVRERQELLTERTRLTNRVSALTATLGIIDYDVRRANRRARLDTLQRPGNAPIPPHARAKLERLIARYELVLEQLDQLEAERDLVLEQQPSGEAEAMIQRLCTLKGVGAQGATVLVREGFVREFRNSRALGSYAGLTGTPWASGSMSREQGISKAGNRHLRTVMVELAWLWRRWQPQSALGQWIAARTGDAAGRLRRVLVTALARKLLIALWRFARHGVVPEGAVFKTV

SEQ ID NO: 393200 - protein, 388 aa, unidentified
MPQQRKPNDLSRSLTALDMDTTLIAVVELSLSSWLVAGIVPGVGRQPLKKLKTDESALLALLNRWRDEAVRSGYKISRIAVAFEAGRDGFWLARWLNARGIEAHVIHASSVAVSREHRRAKTDRLDTEHLKRAFVGWLRGERDHCKMAAIPSFREEDAKRPSRERESLVGEQSRLVNRMKATLIRLGIRGFNPKLRHAEQQLEALRTPEGEPIPPNTLAELKRDMQRRRFICDQIRSIEQERLERLERTPDTKPHAMVRLLARVTGIGTETADLLVHELLLRNMRDRRAVARYGGLTGSPERSGATSREKGMARSGNARVRRGMVQLAWRFLLFQKDSALAQWYRQRTEKAPKARKTMIVALARKLLIALWRLVREGVIPEGVVMRPA

SEQ ID NO: 393201 - protein, 370 aa, unidentified
MKKVRFLGLDVHAETIAVAMAEPEGEVRSLGIIPNREESIRKLVKKLGPAEQLQACYEAGPTGYVLYWQLTALGVKCEVVAPSLVPVKAGDRVKTDGRDAMKLARSYRAGDLTAVWVPNEEHEALRDLVRAREAAKQDQLRARHRLSKFLLRHGRRAPAGIKVWTQKHEEWIKKQVHFEPPAQEYTLLDYLHEVEHMGDRIRRLEQAIAEAVKLAPPRMQEVIQSLRGIAQISAVTVVAELGEISRFEGARQLMGYSGVVSSEHTRGKRMQRGPITKTGNAHLRRIAIEAAWAYRHRPSIGPRLRKRQEGLSEEVKEIAGKAQHRLHKRYRTLSAAGKEKQKVITAVGRELLGFIWAIGVQVERNRKPVA

SEQ ID NO: 393202 - protein, 410 aa, unidentified
MSQEVAVVFLGVDWAEEHHDVCLLGERGQVLGRARVANSLEGVSRIHALVADHAEEPEAVVVGIETDRGLLVQALVAAGYQIYAINPLAVDRYRDRHSVSGAKSDAADAKVLADLVRTDRSNHRPVAGDSQQVEAVKLLARAHQALVHTRQRQVNQLRSALHEFYPAALEAFKDDLGGRDAVAILEYAPTPSRGRSVSQAKLISALRKAGRERNLEARAVELQGILRRPHLEQPATLVAAYELIVRSAVRMIRELNAQTTELEDELTKSFELHPDAELYLSLPGLGFVLGARVIGEFGDDPNRYLDAKGRRAYSGLAPITKASGTRHVVLARNARNRHLADACYLWAFASLNASTGAHRYYRALRARGKSHPQALRALGSRWVSILHGCLRHRTLYSEDVAWPVQVAAAT

SEQ ID NO: 393203 - protein, 392 aa, unidentified
MSKCTIPSFVGQVIFCGFDVHKDKWSVCVRHCGREIAAYPAPADARAIAGKLRRDYPDADIRSVYEAGFSGFEAHRILVEEYGIRNIVINPADVPTNNKERTRKSDRIDCRKLARTLEAGLLEPIYVPSRDHLQFRNLVRRHTRTTSSLTRTINQLKSHWYFNGEPVPTRVCRRVLASRREQALRNGDYTSVSLIDQYFFLIELRKTIRTWEHETILQLNLSAKMKNLVSIPGIGFRTATVILSEIWDVRRFPDKDHLASYAGFAPYLVGSGEKEETVGADCRKHKLLHYILIQAAWRAARSDPEMICLYGKLQKRRHSPQRIACIIAKKLLFIARAVLLEDREYRSAGAGKKKDPLRTGSGAAASCPPPSPTGQGGVPFPPSAEPSISRGD

SEQ ID NO: 393204 - protein, 386 aa, unidentified
MQKLNDLSRSPNPLDPDGTLIAVIELSLSSWLVAGIVPGVERQPLKKLAVDENALLKLLNRWREEAAKAGHRIKRIAVAFEAGRDGFWLARWLRARDIEAHVIHASSVAVSREHRRAKTDRLDTELLKRSFLGWLRGERDHCKMVAIPTTQDEDAKRPNREHESLVGEQSRIVNRMKATLIRFGIRGFNPKLKKAAERLDGLRTPEGEPIPPNTLAELRRDMVRRRLVSDQIRQIEDARLERLKQAPSDGPHAMVRLLARVIGVGVETADMLVQEILSRSMRDRRAVARYAGLTGSPDESGRKRREKGLTRSGNARVRRGMIQLAWRFLMFQKDSVLAQWFRTRTENARGTRKTMIVALARKLLIALWRLVREGVVPDGVVLRPAQ

SEQ ID NO: 393205 - protein, 373 aa, unidentified
MKLIALDLHQDNFVTAILDRSQQSPSISSRRYGLDEESLAHFSAGLSKDDVIVVESTFNAFWLYHRIAALVHSCHVLDTNAVHLRGNKTDKLDAKKLLELLSTFVMTDTLDRMPTVFVPPKNVTKLRSLFSTYRLLIKTATQLRNRIHSVCRQNGIVIDRKELAAAKYRSTLLTAHRLDDYWSEQVETLLETLDHTIHQILRLKKAILSLGLVLFAHEIRLLTTIPGFSPLTAAAFMSDIADIRRFPSAKKLCAYLRTAPSIRSSNLTRHLGPVSKRGRSLTVTFLTQSINHLKTASPHYAEFYQRLRAGKSAGKCRIALIRKTLTAAYYMLLRDTEFDYKNTVNYERKHQVMKTMLRGYQAPDLSKEEVSTA

SEQ ID NO: 393206 - protein, 388 aa, unidentified
MTTQATLGGETNACDAALYMALELSDRSWKVLFHAPSGRRRERSIAARDVGQLLGELAEAKRKLGLPPEAHVVSCYEAGRDGFWLHRALVDNGVESLVVDSSSIEVPQRARRKKTDRLDLVKLMALLLRYVGGDRGVWSVVRVPDEEVEDKRQLSRGIDRLKTERGRHIVRLKSLLVKEGIKELRVGGADWAERVDKMRLWDGSPLRPRLKRELILEGERLALIERQLAELKAEREVLVASSPCKIAGTTRALRELGGIAEESSFVFSTEVLGWRTFANRRELAGALGVTGTPFNSGNSEHEQGISKAGNRRMRAMLMEIAWCWLRYQSKSALARWWQDRFARGNKRTRRIGIVALARKLLVALWRYLEEGLVPEGATLKTAKTRAAA

SEQ ID NO: 393207 - protein, 348 aa, unidentified
MKYSGIDLHSNNSVVVVSDEADRLLVRRRVPNDAEAILALLAAHRGDLVGLLAGHREELVGVVVESTYNWYWLVDALQAAGYRVHLANTAAIKRYEGLKHSDDEDDAAYLAHLLRLGILPSGYICPPAARAVRDLARKRMQLVRSRTAHVLSVENMLSRQTGAGMRSRVVQRLTAQAVEGFGFDQDVQRAMCANVAVIRTLNREIDKLEQRLHQCVRLRPEFRLLTSVPGIGPTLATLIMLEVGTIERFAAVGNFASYARCVDSARISNGKKKGQGNVKNGNAYLAWAFVEAANFAHRYCAEARRFYERKKARTNGIVATKALAHKLARACYHMLKEQKPFDVKRCFA

SEQ ID NO: 393208 - protein, 385 aa, unidentified
MQKPNDLNQSRIVLKQDSTLIAVIEMSLSSWLVAGIVPGVERQPLKKLAVDESALLKLLNRWREEAEKAGRRIERITVAFEAGRDGFWLARWLRARGIEAHVIHASSVAVSREHRRAKTDRLDTELLKRAFIGWLRGERDHCKMVAIPTTKDEDAKRPNRERESLIGDQTRIINRMKAALIRLGIRGFNPKLKKAAGRLEDLRTPEGEPIPPNTLAELRRDMERRRLISDQIRQIEDARLERIKQAPGDGPHAMVRLLARVIGVGIETADMLVQEVLARNMRDRRAVARYAGLTGSPDESGTKRREKGLARSGNARVRRGMIQLAWRFLMFQKDSALARWFRARTENARGARKTMIVALARKLLIALWRLVREGVVPDGVVLRPV

SEQ ID NO: 393209 - protein, 338 aa, unidentified
MKLYGAIDLHSNNNVTVVSDEQDHVVYEKRLPNDLALITQQLSAYRDSLQGIVVESTYNWYWLVDGLMDEGHKIHLANTAAIQQYEGLKYTDDQYDARWLAHLLRLAILPQGYIYPKEHRPVRDLLRKRGQMVRQRTANLLSIQNLFSRNTGGSMSANRVKRLDSEEIDDLIPNADLALAIKANLAMLQCADGQIELLEKAVINGVKLKPEFDLLKTVPGIGLILALTIMLETGDIGRFPTVGDYASYCRCVGSQKISNGKKKSQGNTKNGNKYLAWAYVEAANFAVRYNAKIKSFYQRKKAKTNGISAIKAVAHKLCRACYYIMKEQVAFDVTKAFA

SEQ ID NO: 393210 - protein, 358 aa, unidentified
MLAKSNAGSRPKIKETGMEYCGIDLHAEYSQICILDEDGEVMETSRVRTSRQALERFFRREPMRVVLEAGGSSPWVSRLLESLGHEVVVCSPRRVRLIAESKLKNDKVDAEVLARLVRLDPEFLKPIQHRSEEAQLLRGNLKVRSAMVETRTKWINTIRGLLRSFGYKVSGKAPRTFVDRVDQMELPDELREVIDPLLEQLDLLTGEIDRRNEHLEEMVKDLPEVDHLRQIPGVGPVVATYFVLTIDDPNRFRHSRDVASFFGLRPSMRESASVSHFGRITKEGDPEMRRLLVQAAHACLLTKADSELKTWALALAERKGRGKAVVALARKLAVLMHHLWVTGQVYQALPNKEDTQAA

SEQ ID NO: 393211 - protein, 361 aa, unidentified
MKRVQSNKLDFSGQNIYVGIDVHLKSWSVAILSEHSVLKRFSQIPEPEALHKYLVSNYPGANYFSVYEAGFCGFWIHEKLMDLGITNIVVNPADVPTMSKEKLRKTDAVDCNKLARELRSGSLEGIYVPKADVLEMRSLIRMRNLIVKDSTRAKNRIKSLLRFHGVEIPEEFTRCSIGCWSKRFLTWLHSLELSTEYGKKTLELHLEQFVRLRMMLLQETRAIREISRKAPFEKPIRLLTSVPGIGVTTAATLMVELDDIVRFKNADHLTSFIGLVPMCHSSGESNGTGDITVRRHFMLRCLLVEAAWIAIRKDPAMTVAYTEYRKRMNPQKSIIKIARRLVNRIYYVLKHEKEYIPCVVK

SEQ ID NO: 393212 - protein, 385 aa, unidentified
MSIVGIDVASRSANYAVLGSRGFVSTNNEFTMDSKGFEAFIASHCVAESDVFVMESTGKYHLPLYNWLLNHGRKALIINPMLIKQHQKGITIRKTKTDKLDAMAIAMYAADPSVRLPWGGTNMDTQSKVFARRREQNAEELAKAKTILKGDLSVAFPELLGLDVFTKSMLGFLCRFGCAKEVLEASDEELESALCVVRGRRSHAATISRIRELADTSIGVASHGVLVKDSAKKVVECSTRDEALTKSLLDIENSLHKEAVDIVSSMPGIGPITAAQFMAEVEDISRFATYQKLIAFMGTDPSIYQSGESERHGHITKRGNASLRKYVYLMAQGSINWNPVFKAYYHKKREEGFPHRKAMVATMNKLIRTLFILLTRGEKYCEEKV

SEQ ID NO: 393213 - protein, 436 aa, unidentified
MKTLAVLDPRAAFVDVGSEHMHVSVAGDEPMVFGTVTSQLHALRDWLKSQQVRCVAMEATGVYWLPLYGVLEAAGFEVRMVNGRQTRNVPGRKTDMKDSQWGATLHMHGLLKAGFVPPADIRRLQDYLRLRADHVSSAAAHVQHMQKALERMNIKLHDVISSLAGVSGLAVVRAIVNGERSPDALLALCDQQIRRAKAEQVKEALRGTWESEHIFALRQALQSWEHYQQQIAECDRQIQAVLPPLDPDQPALPRKTSKRAGVNSPDIPKLREILAQMCGGRDLTQLPAHTHYGVLQITGEVGTDLTKWPTEKHFTAWTGLAPGNHDSGKRKGRAKRGRNRTGQLFCMMAQSLVRSKDIALGGFYRRMAARRGGLIATMALARKLAAWYWRVMVKGDDYVEKGLADYDAQVLKTKQRALKRLAKELGQQLVPISDPA

SEQ ID NO: 393214 - protein, 299 aa, unidentified
MRFYTKQHKFYCGIDLHANKMYLCILDETGEIKLHRNLITDREVFLKAIHPFREDIVVAVECMFTWYWIADLCVEEGIPFVLGHALYMKAIHGGKAKNDKIDSRKIAVLLKGGMIPQSYVYPAKMRATRDLLRRRNHLMRKRSELYAHIQNTRSQYNLDEPLGRIAKPQNREGVAERFEDPSVQKMIATDFAVIEAYDPIIAEIEQDIIQSARHHDPVSHALLHTIPGVGRILSLVILYEIENIKRFPSVQDFASYCRLVKCAKESNGKKYGSGGKKIGNAHLKWAFSEAAALFLRGNE

SEQ ID NO: 393215 - protein, 391 aa, unidentified
MVCVGIDVAKDKHDCCILDSDGTIRADCITIPNNMDGFKQLLQTIRDCTKKSDKIKVGLEATGHYSYNILGFLLDNDLAVYVMNPLHTNLYRKSLSLRKTKTDRVDARTIATMLLSDVDLKSYTDTAYHNEELKSLTRYRFDKVRERAKLKQSVSRLVTILFPELEKLVPSLHGVSVYALLSEYPGAKQISEAHLTKLTNLLSIASKGHYGKEKAIQIREAAKSSIGSVMPAKSLELKHTIKLIKELTSEIDEIEDSILQIMDELHPPILSIPGVGIQSAAMILAEIGDFSNFESPDKILAYAGCSPSTYQSGKLTNCYAHMEKRGSRYLRYALYNATKYVCHWNPVFAKYLAKKRAEGKHYNVALSHATKKLVRLIYALQKSGKVYLTAA

SEQ ID NO: 393216 - protein, 368 aa, unidentified
MIVHIMTYERSTLVNSEKYIGLDVHQATISVAVMDPRGKVVMESILETKASTILEFFAGLRGTLWVTFEEGTWAAWLYDLLKPHVAKLVVCNPRKNALLKHGNKSDRIDARKLADLLRLNDLEPVYHGETGVRMLRELARSYLTIVKDLSRVMNRLKALYRSWAIPCAGRDVYYIRHRSEWLEKIPEAGTRRRAEQLYQQLDMLQHLRQQARRELLAESRKHTITAKLRQIPSLGPIRSALAVALIQTPHRFRTKRQLWTYSGLGLETRDSGEYHYVQGQPRRRKKQVSIRGLNKDHNHDLKGLFKAAATRASVQPGPFQDFYQRSLAKGIKPTMVRLTLARKIAAITLTLWKKGENFDVEKLKAQAA

SEQ ID NO: 393217 - protein, 357 aa, unidentified
MAKRIKLGEMDVAAIGLDLADQWSDWAAIGKDGEIKVRQRVRTTEPELRKTFGSMRPTVMAMEVGTHSAWVSRVLSSCGHKVIVANARKVALIHRNKRKNNRIDAELLARLARADEKLLFPITHRDEQSQADLALLRSRDLMIGARTKLINHVRGSSKVFGTRLPKCSTPAFVNRCQPMLPEPIKNALGLILEHITKMTEHIETYDKQIEQMAKRYPAAQQLMQITGVGTLTALAFVLTIEDPHRIVRSRSAGPYFGLVPGSDDSGETHVQKRITKEGDRHCRRLLVLAAHYILGPFGPDSDLRRHGLEIAARGGKNAKKRAVVAVARKLAVVMHHLWISGDTYVPLFNSQQTAAAA

SEQ ID NO: 393218 - protein, 372 aa, unidentified
MGKHSEAFVGLDVAKARNAVAIAEGGRNGEVRYLGEIENTPEATRRLIAKLIKTYSRMTFCYEAGPTGYGLFRWIGDLGHECIVVAPSLIPMKAGDRVKTNRRDAENLAKLLRAGELTAVWVPDARHEAMRDLVRAREAAAQDQTRKRQQVTSFLLRHGRIYPRKKTWGATHGRWLTEQAFEHVEQRIAFEELAMAARQATERVARLEAAIVELVPKWSMAPLIEALQAMRGIDLVAASILMAELGDLTRFDSPRQLMAFLGLVPSERSTGDSVWRGGITKTGNTRARRVLIESAWSYRLPPKLGTRKRFLVARAPPAVREIAWKAQTRLSARTRALTAKGKRSTVVVAAVARELAGFIWAIGREVAPASAR

SEQ ID NO: 393219 - protein, 398 aa, unidentified
MPEDAPRPAQAAIRTDLGAIFVSMELSRRAWLITSLSPGAGEKMSKHSVPASDVSGLLRRFAELRRKAVARTGRDFPIIVIQEAGLDGFWIHRVLQSEGIESHVVDAASILTSRRARRAKTDRIDGETLVRTLMAFKRGEPRVCSMARAPTPQEEDRRRVCRERRTLVGERVRHVNRIKGLLFAQGVFGYEPLRKGRRERLEDLRTGDGRPLPVHLKAQIIRELDRLEVVLEQLKTVEAERDALLKPANDEMPSPAAMLAQLKGIGSETSVLLWSEGLFRRFDNRRQVAAYAGLAPTPWQSGSIDHEQGVSKAGNPRLRATMVELAWLWLQNQPTSRLSLWFHERSPASWRADAKDDHRRAGAQASHRPVAVHDRRRRHRGGRDEGSASDDLTPSART

SEQ ID NO: 393220 - protein, 397 aa, unidentified
MISVGIDVAKEKSVVAIMNEERKLLRKVVTLNHTMSEISAFIELLTFYQEDEEVRVIMEATGYYHEPVLQLLCESGFKVYVVNALVIKKYNDAKLRQVKTDKQDAIKLAEYLLGNHYQLREHKEEGLKYQELRFYAREYHKSMAIKVKIKNQLTQLIDKCFPGIKKIYHNNMEGTLLDVLEKYPTIDHVSRLGQKRFSNLFVKWATKKGHRIAEKKAVQIYELTLKGVQTVPSSECAEMMMRLLIKSLREQIEITTSILTQMKTIAESIPEYGVVREMSGVGDRTGPRLLAEIGDIRRFRSSKALVAYAGIDVSPYQSGQFEARERKITKRGSKYLRKVLYEIVQSLKTVKPTRDSAVYQYVLRKELEGKASKKAKVAGMNKFLRIYYARVMEVYQL

SEQ ID NO: 393221 - protein, 372 aa, unidentified
MEQSSKSLYVGLDVHKESIAVAYAPEDRGAEVVSLGPIGTRQCDIDKLIRKLQSKGATTLVFVYEAGPCGYGLYRYLTGRSFACHVVAPSLIPRKAGDRVKTDRRDAMTLARLMRSGDLSSIYVPGIEDEALRDLSRGRDDAMQDLKRSKRRLKSFLLRQDIRYEGRATWNAAHLRWLSEVVCPTPPQQIVFQEYLRAVSEQHERVQRVERELHEAVQGWRLYPVVEAIQALRGVELTGAVILMTELGDLTRFENPRQLMSYLGLTPSEYSSGARRRQGGITKAGNSHARRALVEGAWAYRYPAKVSRHLQLRLEKLPAEVQAISWKAQVRLCKRYRQLTARGKHVNQVVVAIAREMAAFAWAIARLVPLAS

SEQ ID NO: 393222 - protein, 341 aa, unidentified
MKNKSFIGIDISKNVIDASIFCEGAPIKDFPHAVFNNSRKGFGEMCTWLKKNHVVLSNCLFGMEFTGSYSMELEKFLNARNYQFCMLSTHMVKHYPMGPKDKSDKIDSAKIADFLYRYNGTECVKPYKMPDKTMQRLKALMNERKFLVEQRTCFMNRRQLCTTKEDTQLYDGYIKKLSRDIENIELEEQKLLATDESLLTTYRNLLTIPGIGSVNAINVIVITRNFTAFETARQYASYVGVAPHSHTSGTSVKWRPRPSARCDGQAKADLSMAATVAVQYDAELQSFYNRKLGGKQDSDSKRKALNAVKFKLVLRMFAIGKQNRKWEPLDSKSSNEKLAIS

SEQ ID NO: 393223 - protein, 507 aa, unidentified
MKAKKQLKAKSNHKTGSSASKKRSVASKAQQREEQMRRVNPHAGGIDCGAREHYVAVPPESVEPGEPCVRCFSAFTEGLDILVEWLKACGVTTAAMESTGVYWIPLYQKLEAAGIEVYLVNARHVRHVPGRKSDVQDCQWLQQLHSWGLLSASFRPEDMICRLRSLQRHRANMISVAASEIQHMQKALQQMNLHLHHVVSDINGVSGLRIIDAILAGERDPKILAKLRDYRIRKSTPARMEAALVGDYRAEHLFVLGQGLQAYRFYQAQMEVCDREIETVLNQLAQRFESACDAEAGAPQPEQAVQDPQREHAVEAQTQRRVKEKRKRKPRANEPKIDLCAYLERICGVDLTQVVGLNVMSVLLIVSEIGVDMSKWRSAKAFCSWLGLCPGNKISGGKVLDSRTRKVINRVATALRLAAQAVGRSNNTCLGIFYRRKKAHLGPAKATTATARKLACIVYHLLKYKDQYREPDPATYQLKLHNATLNKLQKQAAIIGYQLVPSPLVAR

SEQ ID NO: 393224 - protein, 366 aa, unidentified
MLWTASTPSLNLGKVLGREMEERQMVQAASVGLDIAKNVFHAYGVNSYGEKAFSRKLRRAQVEAFFSKLEPCLIGIEACATAHHWARTFEAMGHRVRLMPPAYVKPYVKTQKNDEADAEAICEAVTRPNMRFAEIKTIDQQSVLVLHRTRTMLIKHRTRTGNTIRAHLAEFGITETIGREGLARLIEMIVSGEDNRITGVTRRAMMCLVEQYRLLQEQILDLDRQVMAWHRSNDASKRLATIPGIGPLAASALVASVGDASHFKNGRSFAAFIGLVPRQSSSGGKERLGKISKRGDHYLRWLLVVGSLAVIRYAQRHGTKRPWLVKLLQRRTTKIAAVAMANKLARVAWVLMSRGGAYREPVVQAP

SEQ ID NO: 393225 - protein, 377 aa, unidentified
MKRIKFVGLDVHAETIAVAVAELEGEVRSIGVIPNRCESVRKLVKKLGPVEELRFCYEAGPTGYVLYWQLTALDAKCEVVAPTLVPVRAGDRVKTDRRDALKLARSYRAGELTAVWVPDAAHEALRDLVRAREAAKRDQLRARNRLTKFLLRHGKRPPEGVNPWTLNYMNWVRKDVHFEPLAQQATLLDYLHEVEHMAARVTRLEQAIEEAVQLAPHQMREVIEALQALRGIAKVSAVTIVAELGELSRFGEARQLMAYSGTVSREHSSGESCKRGGITKTGNVHLRRIVVEAAWAYRHAPAVTACLRKRQERVSEEVKEIAWKAQHRLHGRYRKLTARGKITGKVITAVGRELLGFIWAIGVKVEAEQRKALGQAA

SEQ ID NO: 393226 - protein, 444 aa, unidentified
MTNSGMILISKGEDAPVIMGISKPAGLKSPCGEVKIVNPLFVGIDVSSKNNVAYLMKPDGSKHSSFSVQNNLGGAKLLSERIVSALGSMQLERVVIGLEATSIYGDSLVYALREDGRLGRFQRKIHVLNPKQVRKFKEAYSDLPKNDWVDAFVIADHLRFGRINREVYMDDYRYKALQTLTRARFDVIQNLTREKQRFANYLFLKCSGMAQDKDIQNTSATTIALMEHFETVDDLANADLEELTAFITETGRGKFADPDATAKAVRAAAKGSYRLPKTVNDTVNQAMAVSIASMRALKGQVKVLDKAIEQQFEIIPNTLTSIPGIGKVYSAGIIAEIGDIHRFDSQASVAKYAGLVWNRSQSGDFEAEHSRMIKSGNRYLRYYLLEAANSVRRCDSEFRRYYDLKFKEVNKYQHKRALALTARKLVRLVFRLLKDNRLYIPPEG

SEQ ID NO: 393227 - protein, 363 aa, unidentified
MTESTTRWVGLDVHARQTLATVFTPASGEVAQRRIEGRPRAVVEWLTGVPQPFRAVHEAGPTGYVLARAAAERGLEVAVCAPGHIPRHPSDRIKTDPRDSLRLARLYAAGELKLVRIPTVEEEQLRDLVRAREDVRVDLMRVRHRISKFCLRRELPYPGPGKTWTLAHRDWLCRLRFPDRASELVFADSLQAHDHLLGRRAGLEHALAELVPESPWASTVAALRCLRGIDTLSALGLCAEVGDWRRFPHPKFLCSQLGLVPSQSSSGERRRHGAITKAGSKHARRLLVEAAWHYRHPPRVPSTLLRRQQGQDPRAVEIAWRAQRRLHQRWQRLDSERGKRTTVVAVAVARELATFCWEIATLD

SEQ ID NO: 393228 - protein, 411 aa, unidentified
MENVFPCCAGLDIHQKSVEACVRRLEPTGQLHHQTRHWGTMTRDLLAMADWMAAQGVTHVAMESTGVYWKPIYNILESRFTVLLVNARHLKQVPGHKSDVRDCQWIAQLLQHGLLKGSFIPPRTQRELRDLTRHRTQLVEEKTRTVNRLHKVLEDGNIKLASVATDILGVSGRAMLEALMEGQEDPVQLADLAQRQMRGKIPELEKALEGHLTEHHRFLLRLLWKELAQQEELIAELDRKIEEHTRPFANEIERLDAVPGVDRRVAEVVLAEVGSDVKPFPTHFHVASWAGMSPGNEESAGKRRRGRITPGNRWLKRTLVQAAWAASHTKNTYLASQYRRLAGRRGKKRALVAVGHSMLVIFYHMLKERTTYKNLGGDFFDRLEPERLTRYYVKRLKDLGHKVTLEPGVAA

SEQ ID NO: 393229 - protein, 369 aa, unidentified
MGEITRASIARVGVDLAKRVIQVHAVDAAGRRVVARALKRDQFVAWCAQLPAGCLVAMEACSGAHHFARKLRSMGLDARLIAANFVSPYRMEGKSGKNDMTDAAAICEAASRPSMRFVAIKSCEQQGVMSLHRVREGLKEERTACISRIRGVLAEFGLVFAQSPKALRAVLAELIEDATHELSALARRVLQRAFDHWRELDEHMRWCDQQVGQHVRSSSTARRAAQITGIGELGASALTAAVGDFRQFRSAHQFGAWLGLVPSQNSSGGKTSLGRITKRGDNYLRTLMIQGAKSAVMSAAKRDDPISTWLVQLTARVGWQKACVAMANKNARILWAVMTRDQGFNPRHVSVKPQAKEPAPLTALAAAPA

SEQ ID NO: 393230 - protein, 339 aa, unidentified
MELKRISIDTSKHVFTIHGVDRQEHPILRREIRRTQLEPFFAKLEPTEVALEACAGSHHWGRLLSRMGHRVKLIPPQYIKPFVKRSKNDRNDAEAIGEAASRPAMRTVPLKTTEEQAATIIVKHREMLVAQRTQAINALRGHAAEFGIIAAKGCPNVTALLSVLAADEAIPVSARAMFAEMGQHVADLDTKIRELDRQLLDQHKINPVSRLLAAIPGVGPITAITMALTVDPRNFESGRHLAAWLGLTPREHSTAGKHRPGKISKAGNERLRQLLVVGAMSVIRVAKPGRPSASGWLLQLLERKPRKLAAVALANKMARIIWAMMARGEAYRGKPVAAA

SEQ ID NO: 393231 - protein, 407 aa, unidentified
MSLAVGIDVGAYKCAAAVCRQGEREAERKVLNITTQRGGFAALDAWMVQQGAPIDVVVMESSGHYWFNLASHLRRQGYPVAVVNPLQAKYFAKSRLQRSKSDPADARTLAALGTHDQPRISEPLVGAELKEAARFAMRLVREQAQVCQRIQRLVDIGFPELRDVWDDPTCVSALAVLRHAPTAAAVARMHQDRLGRLKRPGSGGRAIGPLKAGQLKQLAQTSVAAPELEQQVGFEMRLLIAQHDLLDQQIASADTRIASLLDGEVSQRLLSIPGVGPSTAATLMAEIGDIWRFTDVDQLLAYAGVHPKEQSSGKKGANPETSWTMAKTGNAYLRAAAYRMAVVGVQHNPILRAHYARKRAAGKSAMNALGHYMSKALAIVWGVWRGGKDFDPAHGSGRISLTRTYGI

SEQ ID NO: 393232 - protein, 421 aa, unidentified
MEDITEETAELVARVAALDIGKAELTACVRVPHEDKPGRREQEVRTVATTTRSLLELRDWLICQGVTLCVMEATSTYWKPPFYLLEDAIECWVVNARDVKNVPGRPKTDRLDAVWLAKLAERGMLRPSFVPPPWQRELRDLCRYRRTLVQERTREKQRAEKLLEDTQIKLSSVISDIFGKSGRDMLDALIAGQRDPHVLAELARGSMRGKKSVLQEALTGHFRDHHGYLLAMMCDRIDALTAQIEELTGRIDEAIAPFAHQVAQLDEIPGVGKTGAQELIAEIGTDMARFPTAAHLVSWAKFAPRAKQSAGKSKPAATGKGSPWIAGTLGEAGIGAARTKTFLGSRYHRLARRRGKQRALVAVGNSILTITYYLLSDPAARFTDLGPDWHDRLSPLRRKRQLIAELERLAGKKVLLQEAAA

SEQ ID NO: 393233 - protein, 406 aa, unidentified
MDVIYPRCAGLDVHKQTVVACVRIVGDGPPLQEVRTFDTTTSGLLALCDWLDSFGVKHVGMEATGVYWKPVWHVLEAHFELVLANAAQVKNVPGRKTDVNDSIWLADLLAHGLIRASFVPPTAVQELRTLTRTRKQFVRERGSHAQRIEKILEDANLKLSVVLSDILGKSGRAVLQALIDGESDPEQLVRHIGRVKASRAELLEALRGRVSAHHRFMLKLHLAHIDALDKAVAEIEKEVGLGLEPFRQAAKLLSTMPGISAVSANVIVAEIGIDMSRFATPGNLLSWACMCPRNDESAGKRRSTRLRRGGKWLKTTLVQAAWAAIKVKGGYLQAQFHRLRARRGAKKAIIAVAASMLTAAWHMLRDGTEWHDLGAAHFDRADATKTANRLIRRLQQIGYTVQATPA

SEQ ID NO: 393234 - protein, 347 aa, unidentified
MKFYTKQHTHYCGIDLHARMLYVCILDSQGETVVHKNIKANPEALLRLITPYQDDIVIGVECMFSWYWVADLCREKGIAFILGHALYMRAIHGGKAKNDKIDSHKIATLMRGGMFPEAYVYPSEMRGTRDLMRRRMHLMRKRSELLAHVHNTNSQYNLPEIKKNLRYAFNREGVADRFNDPSVSKSIDLDLNLIDFYDKQLSKVEWHIQQHAVDCDQRSLILLRTVPGIGKILSLVILYEIHTIERFPSVQNFASYSRLIKCKRESAGKSYGTAGAKIGNAYLKWAFSEAAVLFLRKNPDAQDWLKKKTNQHNKARALTILAHKIGRAVYFMLKRHTIFDQEKFLNI

SEQ ID NO: 393235 - protein, 428 aa, unidentified
MINHKITRRQQFCQIQSEITGSDQYLVVGIDVAKDKHHAFMGTASGKTLLKKLIFENDLDGFRKLLQRCEAARVQNGLAKIVLGLEPTGNYHKPLANHLTANGYHVVLATGKAVKDNRRLLDGRWDKNDTKDAANVADLVSRGRCLYYDAGSAQINQLRDLLSLRRRLKKEEHSVKMRIRNTLLAKYFPELDRFYSACESESLAIVRWCLDPAKLAVLDFDQFFAMVTRSRRGIAQKLRLQKIHQLAAQSVGCPMGPAAEFEAALLVQKLKQDREQIKQVEDLMQQVARDFDEYQILLSIPGFGPYVAAVVLAAIADAVRFESSNQVVKLAGYDLCANRSGKSSDDAVPVISKNGNAQLRYALYQAAFIASVHNPHFSAYFTHVLRGRQRERGIKTKMRVKLAAKMLIIAWTLMKKKEPFNPDYLHIE

SEQ ID NO: 393236 - protein, 369 aa, unidentified
MPHVTSIGLDVHARSVAAAAFNPFTGEVVHRDFGTDAAEIAEWALGFEEPRACYESGPTGFHMARELRALGLDCAVAAVSKMQRPAADARRKNDRRDAEFIARMLATHNIVEVPLPDAAVEAARDLDRALDDATVEYRRARQRLNMFLIRLGHVWDERNADGARKGSWTRAHWRWISGIRLEGPQRDVLEYYVTAARCAESDRRQLEKKVLALARTDRWRPAVEALSCIKGIDTLTAFRLAAEAGSFTRFRTAPAFASWCGLVPSERSSGETERRGGITKTGNRLARTALVESAWHYLTCTPRPKAPAPGADVPAAIRARADDCTARLCRRREALAAAGKSSCKANAAVARELACWVWEIGCRAEGTLG

SEQ ID NO: 393237 - protein, 459 aa, unidentified
MRPKANKTKPKSRAPFNSPPVPRPNAAGIDIGAREIYVAVPRERDPKPVRAFETFTESLHKLADWLQSLGIDTVAMESTGVYWIPLYQILEARGIEVFLVNARHVKNVPGRKSDISDCQWLQYLHSVGLLNGSYRPAQHVCAARSLFRHRDSLIEMAASHIQHMQKALDQMNLQIHHVISDITGLTGLAILDAILAGQRDPAVLAKLRDRRIQASPETIIKSLQGEYRPEHLFTLKQALAAYRHYLQLISECDLEIQSHLRQFESLYEAPTEPAPTPVQRRRGRPCGSHMPQAKMARELHRIFGVNLIEVPGLNVSTVGTLATEVGPDLSKFRSAGAFSSWLTLCPDNESSGSKVLTGKTRRSKSRAREAFRMAAYSLHSSMSFLGEYYRRLRAKLGAPKAIIAAAHKLARIFFHMVTTRQAYNESIFAKQEIIYRRRLQNRLKAQARQFGFQLVPITD

SEQ ID NO: 393238 - protein, 383 aa, unidentified
MNLLILKGVPMALKIVYKICCGIDVHKTFVVACIASTNDKGVTSYESHRFSTYTSGLKTLLQWLLNRNCKDVCMESTGKYWIPVYNILENDCSIVLAHPKYVKAIRGKKTDKKDAKWIADLFKHDLVVGSFMPPADIRQLRDLMRYRFKLTCFQSSEKNRLQNCLTVSNIRLGNVVSDTFGKSAQAIPDKLLENPADTSLDLEPLIYKSLKKKLPELRDAIDGYITPEQVGKLKVIKAHYESLESRKAELEELILALAAPYQQELAILQTAPGIRSDFTAIGIISEIGTNMEAFPSAKHLCSWAGLTPTNNESAGKKKSVRVSKAGCYIKPLLVQCANAVVTSKNRPEIRNRYLRLKKRRGHKKSLFPLLSNLFITLSMSAKV

SEQ ID NO: 393239 - protein, 349 aa, unidentified
MSVAADADFVAGVDTHLDTHTAAISDGRGHLVAGRQVPASEAGYQELLAWARAQAAGRTLVWAVEGAGHYGLNLARHLAAAGEQVAEISHTPHVGRRRAGKTDAIDALRAARELLAAPRPAQPRADGDREALRLLMTDRDHAVRSCRSARALLAATLVTMPGQLRDQLRALAPGRRARACAALAAPEGADRLATIQHQTLARIGQRIEDLAGQARQIEAQIAQIVEDLAPGLVAAEPGLGYLSAAQILLSWSHRGRIRSEAAFAKLAGVAPIPASSGRTVRHRLSRGGDRQLNRALHAVIITRTRSHQPTRDYITRRQADGRTPKEIRRCLKRYLARHLYRELNRLDTT

SEQ ID NO: 393240 - protein, 340 aa, unidentified
MDTVSLIGIDLGKHCFHLHAQAASGHMVFRKKLTRNQLFSLLGNVPSCTVVMEACAGAHWMARRIQGLGHQAKLISPRFVKPFLRGNKNDFADAQAICEAGSRPAMRFVSPRNETQQTLSALHRVREGLIRDRTGTVNQIHGFLLEFGVSLPKGMAVIRRLPAVLAAHELPPRLIALLERLQAHFKYLDEQIGELDRELVQQLGEDERSLRLLEIPGIGPVTASVLATELGDARQFASARQFAASIGLVPRQYSTGGKPTLLGISKRGDKNLRRLLVQCARSVMQRIERRTDRLSVWIRGLLTRRHSNVVACALANKLARIAWAILAKGTHYLCEQAAAA

SEQ ID NO: 393241 - protein, 348 aa, unidentified
MLHAGLDLSRKRLDVCLLAEDGERVEVGVALPDSGGLAELVDHVRERYGPQPVRAAVESMNGARFVHDRLERLGWEVEVADAVKVKGLAPLACKTDRIDAWVLAELSRRDLVPAIWLPSFETRQERERARWRLFLVRKRTALKNRVHAQLLAFGHPCPVSDLFGRRGRTLLDQIAFPEPWSSNVLAAVAMIEELDQEIAAIEKELRDLGADHPYVPLLRTVPGIGWVLSYTIAAEIGDINRFSSPTKLTGYTGLCPRVHQSGNTDRRGHLSHAGPRYLRWALVEAAVHACHRDPFRDRYERNKRRLGRQRGAKVAQIDVARRISDAIWHMLTRCEPFAPASAKDTLAA

SEQ ID NO: 393242 - protein, 339 aa, unidentified
MLYVGIDVAKNKHDVTALNVPGKTVLKPLTFSNNKAGFELLDLSLRQLNQDCLIALEDTGHYAFNLLNFLHEQGYKVYTYNPLLIKKFAKSLSLRKTKTDKKDAHGIALKLLSDPNREQFQHNNRQVELKILTRHIHRLKKKQSDWKVQYTRCLDIIFPELDKIVGKHSEYTYQLLTRYPNPQKRIEAGFDKLIEIKRLTASKIQDILSVAPRSIGTTSPAREFEIIKHYKRLIDKAETCVNDLMAEFNSVITTVTGIGNRLEAVMLAEIRNIHAFDNPAQLQAFAGLDSSIYQSGQIDLAGRMIKRGSPHLRWALIQAAKACARFSPAFKAYLKTKLE

SEQ ID NO: 393243 - protein, 464 aa, unidentified
MNDDSKPGSEPGGARKEEGIAVLGRRVGGIDVGSKGHWACAPAREGEGREVQVFGATTPELERMAAWLLERKVESVALESTGVYWIAVHEVLEGKGLEVRLVDTRALARVPGRTKTDRRDCQWIQRLHSCGLLQGAFRPPEQICMLRTLVRDRGNLVAEQGDWVRRMQKSLEQMNVRVHRAVAELTGATGMALVRAIVNGERDPRQLAKLRDPRCHKSEEEIAEQLTGHWREDHLFSLGQALKMYEAIQERIQDYDRAILEKLQKMEREECRGEEPPELKNKEKAKTILRRGQEPLRQALYRASGADLIAIDGIGVETVQAMTSEYGTDLSAFPKEKQFVKHVLLAPNRPTSGGKPVKKKNKHGTASSRVAAALRMAALSLRHSQTALGAYYRQIARHKGDDVAIFATARKLATLIYRMLRWGMNYVDEGAEAYEKRYREARLKRFTSIARELGYQLAPLPANA

SEQ ID NO: 393244 - protein, 345 aa, unidentified
MDHFAGLDVSVKETSICIVDDTGRIVREVKVASEPDALLQVLRNPAYHFKRIGLEAGPLSQWLFGALAEAELPVVCVETRHMQAVLKAQINKTDRNDARGIAQMMRVGLYRPVHVKTLRSQKLRMLLTHRKLLQSKAIAIENDLRATLRNFGLKVGMVGKMRFEERIKELVENLPDLAALVEPLLVVRRVLREQIVILHRRLLAIVRDDEVCRRLMTTPGVGPVVALTYRATVDVPARFRKSKAVGAVFGLTCSKYQSGEIDRRGRISRCGDEMMRAMLYEAAQSMLRSKKWSWLKAWAMQIARRRGMKKAIVALARRLAVIMHRIWVDGTEFRWTREQAAAAAA

SEQ ID NO: 393245 - protein, 359 aa, unidentified
MNEITTVGVDLAKEVIAVCAADGSGKSVFMRVFRRDAFAAWAVQLPPCVFGLEACGAAHHWARRLTSHGHTPRLMAAEFVKPFRKSRAVKNDRNDAEAVLTAVRQPNMRFVAVKSIEQQAYLSWHRMRQGWSEERTALINRLRGLLGEFGVWRGRSAQVLTRALPVLEHDEALPLLVRRLLTEARPHLARLDAAIAGCEVEIKSHTKTNAAARRISAISGVGALTAAAVLATVTDARDFKNGRQFAAWQGLVPSQDSSGGKTRLGHITKRGDSYLRGLLTQGARSALQAALTKEPLRRTRLQAWIVQLHARVGYHKTLVAIANKHARMIWAILAKGEDYDPDAWRRWSRTAAATSGVTP

SEQ ID NO: 393246 - protein, 355 aa, unidentified
METKVLIGVDPHKATNAVAVLDEDGELLERAEFSADRQGLRALERWARRFPERRWAVEGANGLGRSLAHKLASAGEEVVDVPPKLSARVRVLSVGNGRKNDRLDATFAALAAWRNGRLAQVRPDDRIDVLRLLSDRREDLVSERTRILNRLHGLLRDLIPGGVPGRLSAERASRILRSVRPRRDSRSATESVRRQLASELLRDVRALNRRIADLDTRIREEVEASGTTLIDIFGVGPILAAKIIALVGDTGRFPTRGHFASYAGVAPVEVSSGEVVRHRLSLGGNRRLNHALHMIAINQVRYEGKGGIYYRKKIAEGKTHREAMRCLKRRVSDAVFKRLTADLEEVRTPRSDCRT

SEQ ID NO: 393247 - protein, 356 aa, unidentified
MTTMTQQDPERQVFAGVDTHADTHHAAVVDVLGRHLDDREFPATPVGYRALLAWIGSLGAVQAVGVEGTGAYGAQLSRVLRAAEEVVIEVDRPDRSSRRAHGKTDPLDAYAAAQAVASGRAKGVPKTRDGIVESIRCLRVARRSAVKAKTQCINQIRAMLINGPAELREQMRNLPTGKLIGALSRLRPGSDLACPSGATKMALRSLARRHLTLTKELTELDAALAELTALAAPGLLAKTGVGVDVAAQLLVTAGDNPGRLRSEASFAHLTGAAPIPASSGRTTRHRLNRGGDRGANNALHTVALVRMRYDERTRAYVLRRTAEGLSKKDIMRCLKRAIAREIYHEITRPQQARIAA

SEQ ID NO: 393248 - protein, 342 aa, unidentified
MQTITTIGLDIAKSVFQVHGVDAAGQVVRRQLKRRYVLAFFQKLPPCLIGIEACASSHHWSRELQALGHTVRLMPPAYVKPYVKRQKNDATDAEAICEAVTRANMRFVPTKTPEQQSCLMLHRTRHLFIRQQTAVINAIRAHLAEFGIVAPGGRKGVTELLHVVADPSDGRVPEVARACLAALGTQLLGLKEQIVEFDRLIMAWHRSNETSKRLHYIPGVGPLLATALAASVADPQTFRSGRNFSAWIGLVPKQHSSGGKDRLGSISKQGDRYLRSLFVAGALSVIRYAKIHGTKHRPWLTALLARRPTKVAAIALANKLARMAWAMMARGERYRQPVALAA

SEQ ID NO: 393249 - protein, 352 aa, unidentified
MEFYAGLDVSLEATSVCVVNGDGTVVREAKLPSDPDAIELFLSEWGVRLKRVGLEAFSFSAWLFAALDEKGLPVVCVETRHAKAAMSAMLNKTDRNDARGLAQLMRTGWFRAVHVKSREAQALRVLLAGRKAMLGQAIDLENMIRGLLRPFGLKVGQVSVGKFEARVRELVADAPALEAIIAPLLDARAAMRLQFTKLHRLALAAARRDDAVRRMMTTPGVGAIVALTFRVTVDDPARFRKSATVGAHFGLTPRRYQSGETDRSGRISKCGDELTRAMLYEAAIAILTRIRRAFKLRLWGLRLMKKKGLKRAATAVARALAVLLHKIWIDGATFRHAAGMKRGRGRRIAQCA

SEQ ID NO: 393250 - protein, 344 aa, unidentified
MKKSNVIGIDLAKNVLQVCKVSKHGELVLNKAVNPSRLKELLANSTPSIVAMEGSGSCHYWGRLAESFGHEVRVINPKKVKAFLQGQKTDANDALAIAMAATQFGVRFSQVKSEEQQTLQTLETSRKFLDRELTALNNHIRAYLYEYGITMRRGRKSLRETIALVLDDVNARLPECLKNTLLLLWERYQLTLAQLKETSQAKASLVKQVEPCKRLLALESVGEVCAAMLYANIGDGKEFKNGRAASACIGLTPKQHSSGGKTHMMGINKKGGNKELRTALFQGALSVISRLPSEPKTVKQAWLIELVQRVGVKRACIALANKTVRTAWALLATGESYKPVLLRN

SEQ ID NO: 393251 - protein, 512 aa, unidentified
MITIPAVKECCAGIDVGKRGIAVAVMTGPADKEAAIQTRWLGTTVPELEALRGWLLQEKVTSVAMESTGSYWIPIKNVLEKGLEVVLVCSKKHHPKKGEKTDFRDAIQLAHLHRHGLLTGSYLPERGVVELRDLTRRRKKLMGNLASEKNRIQKVLEVANVKIGNVMSDVFGVSGQEMLEALLSGREIEAEEIAGMAKTQLRDKIPQLTETLKGHQLNDHHRWLIQQSIDHIVLLDRQVEQLEDRIMEKVEPYRKQLDLICTVPGFKEMNGAALLAEIGPDMSVFPDGDHLCSWGGRCSGNNRSAGKSKSGRVKKANKFLGCTLGQAAICAVKKKDCIMRRKFQRWVKRMGGKKANVAVGHSLLKVVWCVLKTGNPYREPDPGVMHEMERQKLVRHHARRLRALGAEPEAVEAIVEQLLSPAPTAEGSQSSVAIEEACLAEQPPVAVTGKPRRACPPKGRGEVCRGKLGFRVRQTRKPLSVIKEQPGPLTNVSGDKRRNRSQRRKGLGNDSA

SEQ ID NO: 393252 - protein, 345 aa, unidentified
MQIRSIGIDLGKTTFHFIALGERSQVVIRKKFSRSQLLEYTANLPSSLIGMEAGVGSHFLGRALREQKHDVHLIPAQFVRPFVKSNKNDYRDAEAIAEAVERENMRFVPIKTEDQLDLQALHRVRDRLVARRTSVINQIRAFLLERGISFRKGPATLRRQMPEILENADEKLSPAMRRLLDFLWQEWKGLQLQIESLNTQLEEIASSDPSCVRLQQIPGVGPLVSTAVVSAIGNGAAFKKGREFAAWLGLVPRQWSTGGKAKLLGISKRGNPYLRKMFIHGARAAVLRVKREGSSLGKWMSGLETRTARNVVIVATANKLARISWAVLASGNDYQPRHKPAVFSN

SEQ ID NO: 393253 - protein, 359 aa, unidentified
MTRRAVAKYLATRHICQAIRTVEGPSRPCIIKDHDKHMSSNFHEGHRTNIIAFEVSKASLTVHSLPDDRQVTIPNTAPAIRRLLKAKTKGSNPFVICEASGGYERHVLNCAVEVGLSAHRAHGTRTRNFAKFLGLSAKTDAVDARMLALFAAKSVDLRLWQPPAPETVELRGLRRRRDDLAQMIRIEQNRLEHPQIKHVERSLKRHVRAMSNEIKELDTQIAALVAATPEFRQKSGLLTSVIGVGLKTAAACLAYLPELGSLTKGEAASIVGLAPHAQDSGTLKGRRRISGGRREVRSSLYMAALTALRLDPAMQAFAHRLKERGKPAKVVITAIMRKLAVILNAVLKTGEPARRTHSA

SEQ ID NO: 393254 - protein, 434 aa, unidentified
MRILYERCCGLDIHKCSIAVCVVMTRDGKTEEETRRFGTMTADLLELAAWLKARGIEHVAMESTGVYWKPVWNILEAEGFDLLLANAQEVKIVPGRKTDQKDSQWIADLHQHGLLRKSFVPPRQIRDLRDLTRSRATLAQEHSSMCNRIQKVLEDANIKLSSVASDVFGASGRAMLLALMKGENDAEALAELSKGRLRNKIPELRRALEGRVTGHHRFLIDRHWRQMESLENQMRQFEEEIAERMKPTAEEIARMGESLPAEAPLPLSPREEAILLWMELPGVGLTTACSMVAELGVNMEQFPTSAHVASWAALCPGNNESAGKRMSGKTRKGNVWLRRTMCEAAWAAAHSKNTYFAAQFGRIAARRGKKRALLAVAHSLLVVAYEMLKRKGHYRELGADFFDGLNKDQVKRRLVQRLAKLGFQVTVTKAPTAE

SEQ ID NO: 393255 - protein, 344 aa, unidentified
MDHFAGMDISVKETSVCILDDAGKIVKEVKVASEPPALLKVLGNPAYRFKRIGLEAGPLSQWLFSALAEAELPVICVETRHMQAVLKAQINKTDRNDARGIAQMMRAGLYRPVHVKTLRSQKLRMLLTHRKLLQSKAIAIENDLRGTLRNFGLKVGMVGKVRFEARIQELVKNQPDLAVLVEPLLIVRRALREQIVILHRRLLAIVRDDEVCRRLMTTPGVGPVVALTYRATVDVPARFRKSKSVGAVFGLTSSRYQSGEIDWDGKISRCGDEMMRVMLYEAAQSMLRSKKWSWLKAWAMQIARRRGMKKAIVALARRLAVIMHRIWVDGTEFRWTREQAAAAA

SEQ ID NO: 393256 - protein, 326 aa, unidentified
MMETKKLCCGIDVSFTTLDVCYQNNKGELFHLHVGNNNEGFKKILEHTGAHHHFVMEATGVYYIRLAFFLHAHNCTLSVVNALSIKRFIQMHGERNKSDKKDAAWICRFAIEQKPPFWQMPDSAYFQGKQLYNTIREYQEQIKRFNNQLHSLGLLPIQSKDTIRSIEKIKATLQKEVKNLEQKLQELLAEWQPEQLKNISSVKGIGKRAAAMLIVFTQGFKYTHSYRQLISFAGLSPTEYSSGTSIQGKPRICKRGGKPLRDVLYMCAMNAMKTNPACKALYERLRAKGKTGKQGLIAVCNKLLKQVFAVMKSGTLYQPNYASVRP

SEQ ID NO: 393257 - protein, 414 aa, unidentified
MLKIVYRVCCGMDIHKSFVVACIASTNEQGVTTYKRKRFSTFTGDLRRCAVWLAENNCKDVCMESTGKYWIPIYNILEPTCNIVLAHPKYVKAIHGKKTDKRDAKWIADIFKHDLVAGSFIPPADIRQLRDLVRYRWKLTNFTTGEKNRAQNCLTVSNFKLDDVFSDVFGKAASAITARILENPTEKITDVSGFRTKGMKATDEQVLAAVDGEMCAEQAEKLRIIRSHMDSLELCKLNLESLILSVAEKYLPQLGLVMTAPGIQSFAAVGIISEIGVDMSVFPTSKHLCSWAGLTPQNNESAGKKKTTRISRAGAYIKPLLVQCALSAIKAKKFPEVRNRYLALKKRRGHKKAIIAIARMLLTAIYNILKKNELYNPELYRSADRPPKNREVSVEEAVFILQRQGYLVTAPPTA

SEQ ID NO: 393258 - protein, 332 aa, unidentified
MVYVGVDYHKRFSVATKMNRDGEVLEQVKLANTPECLRGYVDTLPPHAKIALEATGSWYWFYELLEDKSPEIYLAHPLKTRAIAEARIKTDKVDSAMLAHLLRTDLLPFSYIPPREMRDIREILRYRASLISQRTQVKNKVRALLSKNGITVEYSDIFGKKAFEYLSGLELRPAYCEELRGYLALAETLNSLVSEVDGSIERIAKDNPQAMLLTTIPGISYYSALLIVSEIGDVARFSTARRLCSYAGLVPRVHSSGGKTRCGPITKQGSKYLRWIMVERSQQFIAGSRRMEGLYKRVRSRHGANTARVAVAREMLKVIYYMLRDERPFYED

SEQ ID NO: 393259 - protein, 365 aa, unidentified
MQKISTMRTSGKNIFQGRLTIGVDLGDRSSAYCVLNEAGEIVFEHKLATTPLAMKQVFGSMPRCRIAMETGTHSPWVSRLLTALGHEVIVGHAQKVRLITKSRRKDDRLDARTLARPARIDPALLSPVQHRSAQAQLHLAEIRARAGLVSARTALVNAARGLVKSYGERLRKCGTQQFRREMASGLSAELREALKPLLQEIESLNEGIREYDRRIEKMAKEKYPETALLKQVKGVGDLIATAYVLTIEDPHRFRKSRDAGCFVGLPPGRRNSGESEPQMHISKEGDEYLRTLLVQGAHYILGPFGKDSDLRRWGQKLAARGGKNAKKRAVVAVARKLAVLLHRLWVSGEVYEPLRNSQKAMSAAA

SEQ ID NO: 393260 - protein, 474 aa, unidentified
MKHKRAKSKTKSEATKPLHEPNPDAGGIDLSPTEIWVAVPPERAQNSVRKFEAFTKDLIELVQWLVQCGVRSVAMEATGVYWIPLYQLLEDAKIKVCLVNARHVKNVPGRKSDVRDCQWLQYLLSVGLLCGSFRPAQCVCAARSIWRYRQELISTAGQYVQHMQAALDQMNIKLHYVIDDLTGLTGQAIIEAILKGQRDPVQLAKLRDKRIKASEATIAKALEGDWRKEHLFVLQRAWESYQQIQQQIQQCDQELLAYAGELAAATQVIQPAKTMRLRPELLGAEPDKVSIQKPPKVRKKTSKNQPEGSWKEELERFFGVDLTAIPGISVLSGLTLMTELGNDLRSFKTEHHFASWLCLCPDNETSAGKVLRRATRRSQNRVRYALRMAASSLHHDKSFLGQKYRRLRTRLGAPKAIVAMAHQLARIIWTLITRQLPFDSSVFAYQEKLNEQRRLKALKASARQMGYQLAPIAA

SEQ ID NO: 393261 - protein, 391 aa, unidentified
MVCVGIDVAKDKHDCCILDSDGTIRADCITIPNNMDGFKQLLQTIRDCTKKSDKIKVGLEATGHYSYNILGFLLDNDLAVYVMNPLHTNLYRKSLSLRKTKTDRVDARTIATMLLSDVDLKSYTDIAYHNEELKSLTRYRFDKVRERAKLKQSVSRLVTILFPELEKLVPSLHIASVYALLSEYPGAKQISEIHLTKLTNLLATASKGRYGKDKAIQIRDAARTSIGSVMPAKFLELKHTIKLIRELTSEIDEIEVSIQKIMDELNPPILSIPGVGIQSAAMILAEIGDFSNFESPDKILAYAGCSPSTYQSGKLTNCYAHMEKRGSRYLRYALYNATKYVCYWNPVFAEYLAKKRAEGKHYNVALSHATKKLVRLIYALQKSGKAYLTAA

SEQ ID NO: 393262 - protein, 454 aa, unidentified
MREAINKKTNIMNTSHPYDLIIGLDRSDKKADLHLITPATVQRRAQTIDTAPEALWEWLLELRQQHPQARVALCLEQPAVHLIAFLEAYEWITLYPINPITLQKFREAFVTSRAKDDAKDAQYLAELLLTHHAKLKPWAPEDSPTRAVQQLVFHRRAVVNERTGLTNRLIALLKQYFPQALVLCGEDLWRPLATRFLLKWSSLQAVQKAKPATLKQFYYLNGSRSAKRLEQRLALVQKAVPVTDETALIESFALRVQLICRQLQLVQQTLTYYEKQIAAAYAAHPDREIFASLPGAGPVLGPRLLASLGSQRERFGTAADLQHYTGIAPVTKRSGGSCYIHRRYLCPKFHRQSFHEYAKASLLSSRWAAAYYLQQRTKGSPHQTAVRALAFKWQRVIFRCWQNRTPYQEAIYEAALRKSGSPLVALFDRVELGKSPFKNPVKNPKKTVDGLPQR

SEQ ID NO: 393263 - protein, 341 aa, unidentified
MKILKQVVGIDVSQNELVVSVGRLKEDLTKEIYGYKVFSNSPKGFLELSEWIKKKTSSEVSVRIVMEATGVYHESLGYYLADQNQLVSIVMPAKISNYQKTLEIKTITDKTASEVIAQFGLERSLATWKKPKKIYRDIRQVSRERNQLIEQITVLKNQLHAEQAEAYPNETTLQRTKAHIKFIDDQIKEIMQEIRDFINQDEEVKKLTMLLGSIPGIGLLTAAIILSETNGFDLIRNKKQLTSYVGLDVKEKESGTSVKSKPKISKKGNKYIRKAMHFPALTAIRHDERFKAIYARLVQKHGIKMKAAVAVQRKLLEMTYTIYKTNKPYDKEYLKQINENY

SEQ ID NO: 393264 - protein, 353 aa, unidentified
MREYVGIDWAYRRAAWCAMSAGGAISAEGFTPADEDGLARLVLQLGSDVKACVEMMSGAVWVRDRLRAAGWQVEVADARRVKGIAPLACKTDRVDARVLAELCRRDLVPALWIPSLEERELRERLRRRMHLVRLRTSAMNRVYGLGTQWGLRLSADRLRKQGGLELLARSGMPAVWRRSIEEALAVIELLDERIAPLEQELAPIARADRDVALLVTIPGVGDLLALTLAAEIADISRFPSPRKLVGYAGMAPGVHQSGERSKSGLPLSKAGSRTLRWAAIEAAQHAWRESNPWHELYTDLAKRGSGNAAKSAVARKILTAAWHMLSLQQPFKPSRPRSGASTVSASSISVLAA

SEQ ID NO: 393265 - protein, 307 aa, unidentified
MAAVGIDVGKTNLDVAVEGRQGVTRYANTRSGIAKLVKCLRGLEAPRIVVEATGGYEEPVLEACCDASLWICRVNPRQARNFARATGELAKTDAIDARLLALMARLLSDRLRPYAAPLAWQRELRDWLRRRGQIVMTLQAQKQQAAMAPPAVRTLTLRTIAALARELKAVEQAISGLIKQHATPAVCSSKGLGPVFQASMLALLPELGELSRREIAKLVGVAPMNRDSGQGQGKRRIHGGRAPVRVALYMATLSAVRWDPLMKAHYQQLRARGKLGKVALVACMRKLLGIVNARRRDELRADGRLLA

SEQ ID NO: 393266 - protein, 342 aa, unidentified
MQAPRHIGIDLHRDKFTCCVRLENGRNYVTDWKLEDLPQFVKKLRPSDEIAVEVTGNTRLFRDGVAPHVARVVAVDPNQFRVISHSVKKTDPNDARNLALYLAKDLLPEVRMKDKTQAQLASLAQTRDTLVKLRTALKNKINNILSAHGTNLEKEALSSEKKLKQVLAMAFDPMIRIELKVLVEQIRSLNQSITELDKTIEDEGRKLEGHKNLTSIKGIGPLTASILLSVIGDINDFADEGKLAAYFGIVPRVSKSNETEHAGRITKRGSKLGRTALVQCALIAQRYSPYLKRYYEKIKARRGAGKAIIALARKLLGIIYRTLKNKWVFEDFTNFVLAEEAA

SEQ ID NO: 393267 - protein, 354 aa, unidentified
MSFRPFNLLVTIMKSFRHAAGVDAGKSSFVLAIRTLDDDPIIKSKSFKNTRDGADKALAFVVAFGADPAQTLLCVEHVGVYAEKLCYYLQEKTGMVFMADPEHVHRSMKDRRLKTDKMDAIRIAHYGVRFTDFVRPFKLKNPLVERIEALLQLRRATVKERTRYKNQLKSLRHKWSVPAEAEMRLQAMIDLVSKHISDIELEIQSLIKTDSMMAQGVSILKSMPGVGLILATAMLVLTNGFEDLPSYRQASSYLGMAPKPYESGESVRRPSRSRGDGHSMMRQLLYLSARSLITARTEARSYFARKVQMGKPKTLVLNNLGNKQLKVMLALLRTWKPYDENYRSINPSFALTKP

SEQ ID NO: 393268 - protein, 328 aa, unidentified
MKVMYERVAGIDVRKDMIKVAVRSPGDKPWARKTEILTFRTFYGVLRAMARELRRRGVTHVVMEASGVYTGPVCYALCEEDFTEVAVVNPAHARALKGHKTDARDCARLAELSGCGLLQGSYIPAAGLKEMRDLSRYRMKTVQARTSEIQRLAKALESAGIKLGSVASEITGKGPVAMIEALISGERRGAVMADLARGRARTAGKLADLSMALEGRFTDHHALMRRLHLDRITAPDAAVADLEARIAATAADWQREIGLLKTIPGSGDIVAWAWIAEIGPAPHQWFASHRKLASWVSLAPGSNVSAGKRKHGRTGDAGCGVPKLDQST

SEQ ID NO: 393269 - protein, 353 aa, unidentified
MANQRGGVVGGVDSHADEHHVAVVDLQGRLLDATAFPTTATGYAQLISWLQSHGEVERVGVESTGAYAAGLVRALRAGGIRVVEVNQPHRHARQRLGKSDPIDAELAARAALSRTATAVPKQTSGIVEAIRQLQVVRTSALKARHAALQQLNDLIVTAPEQLRGELRHGRTMKAKAALCRTLRPDTQHIHDPTQAAKLALKSLARRIAELDSEIGDLDRQIERLVHTAAPRTTQLFGVGTQGASQLLITAGQNIERFRSEAAFAKICGAAPIQASSGRTTRHRLDSGGDRQANRALHMIAVCRLRYCPRTKAYATKRTADGLNKREILRCLKRYIAREAFHTLQADLEALNGT

SEQ ID NO: 393270 - protein, 326 aa, unidentified
MEHELHYIGIDTAKEKLDVDVLRPDGRHRTKKFTNTTKGHDELVSWLKGHKIDHAHICIEATGTYMEPVAECLYDAGYIVSVINPALGKAFAQSEGLRNKTDTVDARMLAEFCRQKRPAAWEAPHPLERALRALVVRHQALTDMHTQELNRTETAREVQRPSIDAHLLWLEAELKRPEKQIKDLTDDDPDMKHRRKLLESIPGIGEKTSAVLLAYIGLKDRFAHARQFAAFAGLTPRRYESGSSVRGASRMSKAGHVSLRRALYMPAMVATSKTEWGRAFRDRLAANGKKGKVILGAMMRKLAQVAYGVLKSGVPFDASRHNPVAA

SEQ ID NO: 393271 - protein, 289 aa, unidentified
MKVVGIDISKYYFDLHLLPEGKTAHYANTTEGIQQCHQFLLEVRPERIVLEATGGYEWALTLDLQTAELPVMVVNPRRVREYARSQGRLAKTDRIDAQVIAEFAQSPRGQPRELPKVEARQRMALLTRKRQLVEMHVAESNRLEHAGDRLVVQSLRRSLRDLEKQIARFDREIAASIAADPQLQRKLEILDSTPGIAPATAAVLVTELPELGRVNRQEIATLVGLAPMNRDSGQFRGKRTTGGGRVQVRRALYMPMLAAIRCNPAIRRFYQRLLDHGKPKMTALGLSTK

SEQ ID NO: 393272 - protein, 351 aa, unidentified
MAMLADLVELVIGIDTHKDTHTAAVVATTTGAVIAQATVSATPAGYRQLLALADQQPGQRVWAIEGTGGYGAGLTRFLQGHAEQVVELDRPKRAARRHGAKSDPLDATRAAREALGRDQLAQPRAAGHRAALQARLTTRRSAVQAATDAQRQLHALVVAAPDILRGRLRGLTTYQLVTACGRLRQRAAWDAETTATAASLRALARRIQLLEAEIADHTRAITTLVRAWRPDLLTPCGVGPIVAAVVLCAWSHPGRCGSDAAFAMLGGAAPIPASSGQTVRVRLNRSGDRHLNQALHLIVLTRLRYDPATRAYAQRRRAEGKTNREIRRCLVRYVARQLYRLLEANPHFDPT

SEQ ID NO: 393273 - protein, 447 aa, unidentified
MDTESATQYAAYIGIDWADKDHAYALRATEDKKVEQGKVEAKPEAIEEFVAQLRQRFGGKAIAVALEQSRGSLLFTLSKYDHLVLYPVHSSTLDSYRKACHPSGAKSDPDDAALILDLLQKHPEWLQPFAPDTVPTRTLQFLTEERRDAVNDKTRYLNQLTAALKTYFPQMLEWLDVDSKVMCEMLQRWPTLEQLQQQKPSVVEEFLREHRYPVVRVKPLQEAMEKAIPATTDQAVIEAKKFTVQRTIAQLEALRENIAELDRRIEQITRLHEDYRVFASLPCAGKVMVPRLIAAMGTQRDRFQTASELQCQTGIAPVKEASGQREWIHWRWACPKFLRQTFVEWAWLSTRKSQWAREFYDRQRAKDKSHHAAVRALAFKWQRIIFRCWKDRCPYDEARYLATREQRARTAKASTDGSPQLKSSQAGGVEITWKNVSGFSRPDSISC

SEQ ID NO: 393274 - protein, 381 aa, unidentified
MYRKESKSKVDRTMPMVHPNAAAIDVGATMHMAAVGPDHALEPVRSFGTFTADLDQLVKWFVECGVETVVMESTSVYWIPIFELLDARGFAVFLVNARDAKHVPGRKTDVSDAQWLQRLHSFGLLRASFRPKGQIAELRAYVRQRERLLEYAASHIQHMQKALTEMNLQLHHVVADITGATGLRIIRAILAGERDPETLACLRHYSCQSSVETIAKALTGSYRAEHLFALDQALALYDAYHEKASACDARIEAVLKELTIHRDHDHGSAPPVSRRRNRTDQANALAFDVRALLFALLGKDVTAIDGLGPYLSLKLIAECGDDLTSWPSAKHFTSWLGLAPSNKVSGGKMLSSRTRRSGGRAAALLRLAAVTVGRTDTALGA

SEQ ID NO: 393275 - protein, 382 aa, unidentified
MEVIHERCAGMDISKRDAKVCVRVPGARPGTYGKRITVHGAMHRDIAELRDYLLAQQVTLVVLEATGDYWKPFYYGLEDALNVMLVNARHAKNLPGRKTDISDAQWLTELGAHGLVRGSFVPPWPIRQLRDLTRQRTLLIRQRSREIQQLEKLIESTGIKYTSITTRTLGVSGRLFLEALIAGERNPASLADLAKGRLRVKAEQLRAAFEGSFTTHHGNLARLHLDRIDLLNAHIQTLTGLIDALIKEHSLGWARDLLATIPGISETGAENILAETGVDMTRFDTPAHLASWGGVCPGQHESAGKSRHVRARPGNAHLKGALGIAAMAAARTNGSFFQHRYKRLAARRGPTRALVAIEHSLLIAIWHILTNGEPYRTGQAAA

SEQ ID NO: 393276 - protein, 350 aa, unidentified
MIIIGCDYHPGFQQIAWLDSDDGELQERRLAHREEAEQFYGKLKQPGKPVRVGMEASGHARWFERLLAELQFELWIGDAAAVRAKRVRKQKTDRQDAQLLLQLLLENRFPRIWVADAENRDLRQLLWHRHRLVQMRTRVINQLHVVALNEGLRRKKVLWRPAGRAELAGLSLAPWASRRREDLLDLLDRLTPKIQELTGKLEQIVQRRPVTRQLSTHPGVGPLTALAYELVIGTPDRFQCAKQIASYVGLVPAEESSGDRRRLGHISKQGNVLLRFLLVEAAQVTVRSDARWRSQFFHLALRRGRKIAKLAMARKLAVQLYWMWRRGWNYAEMQKLGSHAGEPGNPHGVH

SEQ ID NO: 393277 - protein, 327 aa, unidentified
MPLTFAGVDVSKATLEFAWAGQASTKQFPNTPAGRSALLRTLQVCSAAAPVQIVLEPTSTYHHHLVEALAAAGLAFTMVNPARTAAFAHVQGSRAKTDKADAKLLAAYGASQQPPASPSPDAAQEQLKALRRHKEWLEGQLQDTKNRLEAAEHSPWTPRAVIQSLKQTARDLERQVEQVQKALEILVASEERWQREIPLLVSIPGIGVQTAILLLSELPPVDRCASAKTWVAFCGVNPTPYDSGKHKSSRLSRAGTVHVRAGPYWPTIVSMGHNPLIRPFNTRLQAAGKLGKVRIMAAMNKLLHLCFAVLKRGTPFVTSLGSAPQSP

SEQ ID NO: 393278 - protein, 352 aa, unidentified
MRTISTIGIDLAKKVFQVHGVDAEGKVVVARKLRRKEVFAFFAKQAPCLVGMEACGSAHYWAREIAKLGHTVKLMPPKYVKAYVKRGKTDAGDAAAICEAVTRPSMSFVPVKGLEQQGLSMLHSARSQLIGQRTQLINGVRGHLSELGIIAERGLLGLAELAAIVRDESDHRLPVTARAALMVLIRQIEAVSAEITKLDSALRKENKASDVGSRLETIPSVGPVIASALRARVTDAKLFENGRHLSAWIGLVPENDSTGGKVRQIGLSKKGDRYLRSLLVNGAMAVVRQAQKRPDKHPWVTRLLGRMSSKQAAIAIANKTARIAWVLMVRGGIYEAGHRAAHYRAQVCVVTG

SEQ ID NO: 393279 - protein, 337 aa, unidentified
MTLYCGIDLHSNNSVVAVLDERDRTVYEKRLDNDITTIIEVLAVYQPELAACVVESTYNWYWLVDGLMAAGFPVRLAHTSALPEYSGLKYSNDFSDARQLAHLLRLGLLPTGYIYPKQERALRDLLRRRLLLVRQRSLHHVSLQSLIARHSGQRLNTRQIKTLLPEQLADYLQGYALLSGEITHQARCWLDRAVMRIEQELQQQVKPREDYQLLQSVPGIGAILGTTIALETGTIGRFASAGNYASYARCVKSEKISNGKRKGQGNKKNGNKYLAWAFMEAGHYGAIWNPRIKRYYQRKKAKGHILVAKKAVANKLARACYHMLKRREVFDVTRAFS

SEQ ID NO: 393280 - protein, 338 aa, unidentified
MKLYGGIDLHSNNTVVALLDDEDHMVYHKRLANEAAGVLEALAPYREAIVGLVVESTYNWYWLVDALMEAGYRVHLANTAATVQYSGLKYSDDDSDARWLAKLLRLGLLPEGYIYPKAERAVRDLLRRRLRLVQQHTANLVAVQNLLARNRGRALSANAVRRLTPEAVERLLPDANLALAVQSTLLAMRGQEAAIELLERQASAQVHLRPAYRHLLTVSGIGQILGLTILLETGPVERFAAVGHYASYCRCVGSERLSNGKRKGRGNAKNGNKYLAWAFVEAANFAVRWNPAIKRYYQRKRAKTNGIVAIKTVAHKLARACYFILRDGSDFEVSRAFA

SEQ ID NO: 393281 - protein, 452 aa, unidentified
MEITYTHAAGLDVHKKTIVACCLTPGPKGAPQKEIRTFGTMTHDLLALADWLLTKGITHVAVESTGEFWKSVYQILETSFTVLVVNAQHIKTVPGRKTDVKDAEWIADLLRHGLLKASFIPPLPQRDLRDLTRQRTNLVQDRARVVNQIQKVLEWANLKLTSVVTDIMGVSARAMLAAIVEGEVDQGVLADLAKGRLRSKQTELEQALVGYVRDHHRFLLARHLIHIDFLEEEIARFDQEIETFITTQTTAEPPPPPTREPSGTTHATTTDAPPASTTPTMLPWAEAVALLDTAPGIGRTAAELILAEIGTDMSRFPTEGHLASWAKVCPGNRQSGGKRYSSRTGKGSRWLRPVLVQAAWAAIRVKDSHLAAVYRRLVVRLGKQKAIMAVAHRLLVAIYHMLTDHMPYREIGAAPQSEPAKRNVVKRLQRQIEKLGYTAEVKALAEPEFQAA

SEQ ID NO: 393282 - protein, 413 aa, unidentified
MEVIHERCAGIDISKIDVKVCIRVPSGTGKRRRSEVRTFSAVTSGLLAMRDWLLAEGVTVVGMEATGVYWKPVFYLLEHDMECWLLNARHMKSVPGRKTDVKDSEWIAKLVEHGLVRPSFVPPEPIRQLRDVTRYRTEIIRERTRETQRLEKLLEDTGIKLSATVSNILGVSGRAMLEALIAGERDPHVLADLAKGSMRRKTDALVEALTGNFTAHHAFLARAMLDRIDACTATETKLSEHIEVMLQPFRRRIELLVTIPGVDTRAAQVILAEIGADITRFPSAADLASWAGVCPGNHQSGGRTGSGKTRHGDPWLKAALGQAAVSASRTKDTYLAARYRRIAARRGKKRALVAVEHSILTAVWHMFTYDAEYADLGGQYFIERTGRARQTRRLVSQLNQLGYQVTLQTEGAA

SEQ ID NO: 393283 - protein, 320 aa, unidentified
MLSFCGIDVSKDRLDVMVLPDEYSSSVPNDPAGWAILVEQLRGFSITAIGIEASGGYERGAVRSLQAAGMPVRQVNPFKLRQFAKASGVLAKNDPLDARMIASFVGIMPTRPAQRTTPAAEQLVEMLAVRRQLSAEKTAADNASRLLEDLMLQRLSRRRIARLAADIELLDKRLVEIVATDATLAHRYRLLTSMPGVGPVLACTLIALLPELGGMSRKQVAALVGVAPYAFESGTLKGRRCIWGGRANVRQVLYMAAMSASNWNPVLKLFHDRLKGAGKLPKVVIVAVMRKMITTLNAMVRDDIAWADRLSGRHSVTTAR

SEQ ID NO: 393284 - protein, 402 aa, unidentified
MTDGSTRFFGLDIHKEYFVAVAVNRERETVFGPQRVSNYQLDDWAGRVLTPQDAIVLEMTTNTYLFHDTLLPLVHSVIAVHPPNVPLVTNVHVKTDKKAAETLAQLLAAGMLTGVWIPPHEVRDLRSLISRREKMVHLSTMAKNRLHALEHRNHLVLPDNPFSPDQRTWWENLELSTTEKLLVRSDLDTLQFAQKQVEKIEECLKQKSIQDERIPLLIQLPGVAMLTATTILAAIGDITRFPTAKKLVGYAGLGTRVHDSGMTHSSGRITKAGRKDLRRAMVNAANHAVLDNPHWKAEMERLEPHLGRSKAIVAIARKLLVAVWHVLSRQLADRFADPQNVARSFLSHAYQVRVRNLPKGQSAPAFTRQQLDRLGLGKDLQKISFGSKLIKLPPSKLLIEKK

SEQ ID NO: 393285 - protein, 400 aa, unidentified
MRAVFGIDVSKASSEVAILVNGEKVHGYTISNDALGFARLLGDLKTVHKPEIIFEATGVYSRRLQSFLDEHGYAYTRLNPLEAKKQLDSLRVRKTDQIDAEKLAQSQFVLNRKTTYVQEEIYQNLRDLSRFYQNLTEDIVRAKNRLHKALQVTFPELENILSTPSGEQYWNLVIAFPCKDFVLDLSKDELSESIRQSTSKRISDKRVAYLAEKLIALANQSYCAVKKTSPMLEEVRYYAKELFRLSEQRQTILDEMVELAQPLPEYDILLSIPGIAETTATSIIGELGDIRRFQSANQINAFIGIDLRHYESGNFLAKEHITKRGNPYARKILFKCIHNIASASHTNPCHIADFYEKRKRQSQTTSTKPHTIASIHRLIRTMYYLIMHNKLYDYASTQNR

SEQ ID NO: 393286 - protein, 344 aa, unidentified
MQITTIGLDLAKSIFQVHGVDATGQVVVRKSLRRSQMLAFFTKLPPCLVGIEACGTSHHWARELIKLGHEVRLMPPAYVKAYVKRGKTDAADAEAVCEAVARPTMRFVPVKSPQQQAALSMHRTRDLLVKQRTQLINMIRNLLAEFGVDIPKGLERALLMARQIVDGKAPDVPIEAAKILGTLSQQVLATHVRLREIDRDLAVLLRGNEVARRLMTIPGIGPVGATALAASVTDPHQFRSGRQFAAWLGLTPLQKSSGGKERLGRITKMGDKYLRKLLIVGMTSLVRRAKYNPGKIDPRLADLLTRKPTRVATVAMANKTARIIWAIMARGETYRAGHRPALAA

SEQ ID NO: 393287 - protein, 389 aa, unidentified
MEARTVNNPPPAAPHDDAVRCVLAIELSKKSWIVAVNTPSSEKISRYTLEACDWKELLKLCERIRTRIARELKKDVELVSCYEAGYDGFWLHRLLEAHGIRNYVIDPASLQVDRRARRAKTDRVDVERLLRSLMAYLRGEPKVWSVVCVPSVAEEDDRRLHRERGRLINERIQHVNRIKGLLAIHGIYDYPPLRHDRMQQLERLRTADGRTLSPRLKAEILRELQRLELVIGMIKTIEAERDAIASAKIETEHSSAKRIQDLAKIKCIGPEFATTLVGEVFYRSFDNRKQLASYVGLTPAHFQSGETCRDQGISKAGNAKARRVMIELAWLWLRHQPASPLSVWFHDRVGKLKGRIRRITIVAVARKLLIALWRYLETGLAPEGAILKV

SEQ ID NO: 393288 - protein, 421 aa, unidentified
MDFEVKHLICAGLDVHKKTIVAAVCMTDPVTLEAAYKVKSFSTNNSQIAAMRDWLLSYNCHDVCMESTGKYWIPVFNILETHMHVVLTHPKYVKAIKGKKTDKRDAKWIANLFRFDIVKASFIPPADIRALRELSYMRSAEKKRFQNSMTISRIRIDCVLTDPFGKTASSIMDYLLSDVPFDETECAKLIHGRVKASNEEIFDSIRGFEILSEQRFKMSHAKQHMELLSSYMDDIETELFRLSRSYDEVIKRISGIVGFTERSALFVISEIGADMGVFESAKHLCSWAGLTPANNESANKKKSTRCSKAGQYLKPLLIQCALAAVKSKKNPYYAIKYKRLAKRRGRKKAVIAIARMMLTSIYHMILNNEEWKPDDYEAIIHPSKPVKVALTLDNVIQFLGEQGADPETLKLLQQQCAVTPG

SEQ ID NO: 393289 - protein, 316 aa, unidentified
MKDVLTFVGIDVSKARLDVASHPTGATHSVANDANGIKTLVEQLRAVKPLLVVLEATGGIERAVVRALVAAELPVTVTNPRQVRDFAKATGQLAKTDVLDAQILARFAEAVRPALRPLADEITLELRALISRRRQITEMLTAEKNRLSRAPRRVQKRIEAHIRWLQSELERADEDLDQTIRQSPVWREQEDLLKSVPGIGPVVSRTVLAELPELGNLNRKQIAALVGVAPLNWDSGLLRGRRVIWGGRSHVRTALYMAALTASRRNPVIREFYKRLRAAGKAPNVALVACMRKLLVILNAMLRHRVPWRPVVAQIP

SEQ ID NO: 393290 - protein, 343 aa, unidentified
MVGGSSPQADRLGSVFWKETHVCVVTRNGTVVHEAKVPSTPASIAAALARVPSCRWILFETGRMAPMLYHGLTRLGLPVVCVESRQAYQALKSLATHKTDRNDARGLAHLARTGFFKPVHVKSLPAHAIRALIIARKKLVGQRVALENQIRGLAVVFGVRLPRALSSTFIRQALQASEGIPGLSAAMRGLVAARAAVLAAVVAIDGDIRKMARASGACRRLMSIPGVGQLTALAFTAAVDDPGRFRRSRDIGAYLGLVPRRYQSGEVDYTGGISKCGDRRVRTLLYEAANVMLTRYKGQLKLKAWALAIAKRSTMRKARIALARRLAIIMHAMLRHGTEFKPA

SEQ ID NO: 393291 - protein, 368 aa, unidentified
MTTTDFIFVGCDLHEKTLVNRIAVNREPAEKRTFGNTVSGRAKLMAMLKQKAEDLGGARIVYVYEASGQGFILCDQLKAAGIECYVLAPTKIERSSQEKRNKNDDRDADRLLDIVRAHELAGTKLPAVWVPDRQTRDDRETVRTRLDLSEKQTGLKAQIQTLLKRQGLEKPEGIKGTGTKRYRQWLEGLSQAGSLGTGLRNVMGSLLRQLEFNEQEMARVDQAVEQLCEMPHLKPIVDPLDAETGVGRLAAVAYATEVGDFARFRRRQQIGAYWGLTPSSNESGEIQDRKGHITRQGSPRMRRILCQAAWSRVRHHEAEREAYQRLVTRNPKRKKIALVAAMRRLAVRLWHVGRKAQQEMAGLKPAER

SEQ ID NO: 393292 - protein, 358 aa, unidentified
MIGNTDIIIANVGVDIGKNAFHICAMNAKGTIVLRERLTRTALPKRLANILPCLIGMEACAGAHHIGRKLASLGHDVRLMPAKYVKPFLKGHKNDYRDAEAIAEAVQRPTMRFVPFKSDEQLDLQALHRVRSRLVGQRTAVINQIRAFLLEHGVPVRQGPGALRQALPSILAQRTDTLSSRIIRLIEGLIDDWRRFDQRIADVTSEVEQLAKQSENCKGLMSVPGIGPITASAMVAAIGDGSAFSKGRDFAAWLGLVPKQISTGDRTILGGISRRGNSYLRTLFIQGARSVLQRFEGWEKKSFGRWLIAASKRLHKNVLAVALANKLARIAWSVLYNARGYDATYANSGMTTVAASQK

SEQ ID NO: 393293 - protein, 394 aa, unidentified
MILVGIDIGKNKHTFSIIDKNSGEILLSPSDFSNNLKAFLFLIRKLSSYTKSELLIGMEDTGHYHFALLKYLLDKRYTVALINPTTTDLTRKLQGGITKNDHLDSLTICDVISSNHRNKPYRVTKLNRFDLYEQKQLTRHHHNLKEELNTYKNRLQKCIDIVFPEFNSLFHSKYGIVYMNILKTFSSAKAIANADIRSIRKCFEFKGQGKRISLSAEQLKLTAKSSIGIPSVAEEIQIRHLVSQIELLEKQLSEIDKRIEEFSLKNNSPILTIPGISHFSGTSIISELGDICNYTKASQIIKFAGVAPYHYESSQFTAQHTAITKKGSKYLRKTLYQIILPVISNNEVFYAYYTKKLNEGKGHRCAQGHCIRKLLRVIYHLLSTRQPFNSKLLV

SEQ ID NO: 393294 - protein, 417 aa, unidentified
MKKHSKSAMKKEQKAKRAKAQRPVQREPRAVLAELLEKLSGKLEVKATPASPAEAGPRAELRPNLDRLTVGVDLGDRWSHFCILGLHGETLSEGQLQTREAEVAEFFQAIPPARVVMEVGTHSPWMQEIVAGEGHEVVVANPRLMEGSKRRKRKNDRIDAKKLARLGRVDPQSLHPIRHRSREVRQDLVVLRAREALVAARTELINATRGLVKSMGRRLPKCSSPSFGQKVKDAIPEKVREALLPLVQLADALSDCIQSYDQKIEEMSSEKYGHTKLLRQVKGVGPITALAYVLTLENPAHFAKSRDVGPYLGLVPKQEDSGESQPQLGISKTGDTMVRKLLVGSAHYILGPFGPDSDLRSYGLRLCERGGKNAKKRAAVAVARKLAVLLHRLWVSGEVYEPLGYASSRGIVQPAAA

SEQ ID NO: 393295 - protein, 394 aa, unidentified
MKLVGIDVGKNSHHFCVMDKETGEFNVAPSSFSNNKEGFDFLINSLKPYSKKSILIGMEDTGHYHVALLKFLLSNGYPVALINPKTTDLTRKMEGGITKNDKLDTITICDVLDTPERKKQYRITKVDRFDLYEQRQLTRHHHNLKEELNVYCNRLQKSIDLVFPEFNTLFSSKYSIVYMNLLKTFGSAEAIASTDIRTIRKCFEIKGRGNRISLTPEKLKECAKNSIGISSEVETIQIKHLVSQITLIKEQIAEIDKKIEEFSITNNSPILSIPGISHFSGTSILAELGDIGNYSKPSQIIKFAGVAPYHYESSQYNAQHTGITKKGSKYLRKTLYQIILTVINNNPVFKKYYLLKISQGKGHRCAQGHCIRKLLRIIYHLLETGQSFYPALLR

SEQ ID NO: 393296 - protein, 334 aa, unidentified
MALENKITVGVDVAKDTLAASIFNGQIHEYILLDYTQKAINKEFIKRFKNLETSVVFVMEATGIYHSKLAYWLYSAGFDIAIINPLIIKRYAQMKMSRVKTDKSDCAIIAEYGYKEELQLFKPKSKETVTLGNLLKASEDFLHQKSIALSQRHALMHQADYSKEILSFYNKHIKFITQEILRLKKKIELLLEQHFTNEYELLSSIKGIGIMSSAMIISVFDSFRNFDNAKQASSFVGIAPAPYESGTSVKKRGSISKQGNTLARKLLYMASLSGVQSNSLLKQQYERLLQNGKSKKQALIAVAHKLLRIAFGVLKHNEPFSINYIEERKMLKIC

SEQ ID NO: 393297 - protein, 338 aa, unidentified
MTIVMGFDQHREQITWDALDSSTGELRRGRIRPADRLSFRHFLGQFDGERLEAALEATTGWRFMVEELKAVGAEVHLAEPAETKMLRGPKRRAKTDRADAKHLRELLQQRRVPESWIPPEQILELRSLVRLRRALVEQRTAWLQRIHAQLFHHGHPARRDLLVRERRAWVEGLELPHAARTQIEIALRLIDHLNVQLVPLDRELRQIANSWPGTKALQAHYGVGPLTAVAFLAELGDARRFSSSRKAVRYAGLDITVSQSDSKRAPGRLSRQGPATLRWAAFEAAQSAHKPSSPDRDYYLQAADRLGGNRACLALARKLVQRAFHTLRELGEEALQPA

SEQ ID NO: 393298 - protein, 444 aa, unidentified
MKALPVLDPKAAAIDVGSERLHVSIGGDVPKVFGTFTGDLEALRDWFQQQAVRTVALEATGVYWLYLYEVLEGAGLEVVVVNGRHVQNVPGRKTDMADCQWLATLHAHGLLRGGFVPPADIRQLQDYQRLRADHVIGAASQVQKMQQALERMNIKFHDVISDLTGVSGLKVVRAILQGERRPGELLALCDEQIQKKKSAAVKESLRGCWKKEQLFALRQALELWEAYQQKINDCDREMQALLQQLAEPPGPQGGGGLIGPVQLARVKVQGKNAPAIERCQELLARLCGGRDATQIPGLGMYLVLQIISEVGTDMTRWPSEKHFVSWLGLAGGRKQSGKRKGSVKAHRNRAGRMFCAAARSLAKTVDKALGGFYRRLRGRVGGLAANVALARKLALLFYRLLRYGADYVEKGLKAYEAKVWQTEARLLRKLAQKQGFTLVPAKAV

SEQ ID NO: 393299 - protein, 420 aa, unidentified
MSPPGASEPASELLLQYLLQHLLVQTQLSDQLLQPLILILQLPQTPQLRHAQPGKFFLPVNGMDYLLPLRLTVRNVLTRRITMNIVFPGIDLAKNVFQLCGLNQAGKPVYTKRTGRKELLQTLANIPACLIGIEASTGAFYWQREFEKLGHKVKVISPQYVKPFVRGQKNDGNDAQAIAVALMQPTMQFVPPKSPEQQDIQALHRARQRIVNHRTATVCQIRGLLLDRGIPIGSAVSRARRAIPLILEDAENGLSSRMRRTIAELYDLFNDLERRIHFFDKEIETVFRQSEACQRIAKVKGIGPKTATAVVAAIGKGTEFKNGRHFAAWLGLVPRQHSSGDRQVLMNMTKKGDKHLRTLFIHGARAVVRVATNNNDGHMNQWVNQLKERRGFNKTTVAVANKNARIIWSMLRNETEYQVV

SEQ ID NO: 393300 - protein, 417 aa, unidentified
MQSASTSLPAVAPDGVTAGVDWASTDHVACVVDAAGKVVTRFTAAHTADGLKALVKGLARVRAAEVAIERGDGLMAGALLAAGLTVVVISPNQVKNLRSRYGSAGNKDDRFDAFVLADTLRTDRARLRPLTPGTPATITLRSAVRARRDLVAHRVAMCNQLRAHLALVFPAAVGLFADLDSPVSLAFLARFDCQDRADWLSPRRMAAWLKSAGYSGRTRPGVLHGRITAAPRGATGDDGTARTHVTRALVTVLVTLAGQIKALAAQIAEQPGLHTDGHVFTSLPRSGTVRAARLLAEIGDCRQRFPDPSSLMCLAGVAPSTRQSGKIKAVSFRWAVNKQLRDAVCDFAAGSRHASPWAAQLYNQAIARGKDHPHATRILARAWLYVIWHCWQDHTAYDPAQHRALQRLLAQDQLAAA

SEQ ID NO: 393301 - protein, 259 aa, unidentified
MDKSVVGVDVSKEWLDIAVAGSMRTERIANTPEAVMALLDRLRPALVAFEPTGGYERVLQRALRARGILFVRVHPNDVIAFRKSRGIRAKTDRIDAGLIASFAADELMRRGLRTPIVADETLQELAARRRQLVDMQQAERCRLDLASTPAVRHSLSLTLEILEQSLRAVEREIAARIAADPELTQLSDLLQSVKGIGPITAMTLIAELPELGHLNGKEIAALVGLAPHTRESGKTHYHAATGHGRPSVRRVLFNAAQLR

SEQ ID NO: 393302 - protein, 341 aa, unidentified
MTKVSTIGLDLAKNVFQAHGADSAGAPVFRKKLRREQLLSFFATQPHCLVAMEACPGAHFWAREIGKLGHTVKLIAPAYVKPFVKRQKNDAADAEAICEAAQRPTMRFVSVKSEAKQASAVIFRTRDVLVGQRTQLINAIRGHMSEYGLIAPQGPFHVEKLIAEIEDPASELPQAARTCLSVLVDALRHLQEQTAALDAEVAARAKADDVTRRLMTVPGIGPLIATAIEALAPPPETFRSGRDFAAWVGLTPVQRSTGGKERLGRTSRMGERTLRRLLIIAASGVVRWAKRKGVPTGSWLARMLARKPPMLVIVALANKNARVAWALLTKGGIYRAPAVAA

SEQ ID NO: 393303 - protein, 369 aa, unidentified
MKKVGIDLGKRQSDCCVFDETGGIVERFQVRTRREALSARFGNREKCLIGIESSRDTGWIYEHLTSLGHEVIALDTTRSRAIGIGEGRRKSDRRDAEAIGRALVSGVAKPAHVLSRERRRLRDALWGRDKLVGMRTRVVAMLRGQFQGRGCETPKCAPERFAARLRSSGLPGVEDAVVSSLLRVLDTMQDELEVVEAHLAKLSEGEESFERLCSAPAVGLITALAVAAAWDDARRFADAHAVEGYLGFGTAEYSTGGKRRTGRITKCGNSMARRMLVQAANNMLRTRSAQDDPLVVWAKQVWQRRGRKRAVVALARRLAGVLWAMTVDGTFYDPHGLARASWQGLSRRARQAEASARTMRAASEAAAVA

SEQ ID NO: 393304 - protein, 339 aa, unidentified
MNRIVVGVDIAKRVFQLHWVEPETGEIVALQLKREKFLEHFANRSNCLIGMEACGGSQHWARALQQLGHEVKLLSGRMVKPFVGGNKNDVADARGIWTAMQQPGIKAVAVKSEEQQAVLALHRMREQLVKFRTAQINGLRGLLTEYGEVMPQGRAGIKRDIPGALGRLSDRLPAIVIETLREQYARLGALDEQISQIEGRLRQWQREDPATQRIAAIPGVGLLSATAAVATMGDAKAFKSGREFAAWLGLVPRQTGTGGRVRLLGISKRGDKYLRTLLIHGARSVLTHSKSPPEWLSELVKRRPKNVAVVAMANKMARTIWALLAHERAYQSGYVSRPA

SEQ ID NO: 393305 - protein, 354 aa, unidentified
MFVGVDTHKKTHVLVALDTEGRTHGSRTVPNTPEGWAAALQWVRGQQQQPVRWGVENSGSLGKGFAQFLLAQGEADVREVVPHRTAQYRRRGRSQDKTDVADALAMARLLRAEGEGLPLVQADDASTELRLLSDHRDNLVVDRTRLTNQLHAQMLQLDPGYVERSGPLTRAAGVRYCQDLHLPEGDGVVQTRLLVVRQLAARIAHLDVALKEVTATIQQRVAATETRLTALPGVGAVVAARLLGELGCIPRVRSAAALAALAGIAPLAVASGGRHGHRVNPGGNRKLNRALHIVALVQRRCEPRAQAYYEKKRAEGKTGRAAMRCLKRRLVDVVFRLLVPTAQTTPAVVVPQAA

SEQ ID NO: 393306 - protein, 318 aa, unidentified
MSPACFVGLDVAKAQLDVAVRPSGESWSATNDEAGIAQLVVRLKALRPTLLVAEATGGFEHAAIAALAAGGVPVVVANPRQVRDFARATGQLAKTDQLDAGILALFAERVQPAPRPLPDAAAQLLDALLTRRRQLVEMLVAEQNRLSFAPKPLHRSIRQHIHWLERQLDDVTMELARQIEQSPVWRAKDDLLQSVPGIGPIVSATLLGELPELGTLSHKQIAALVGVAPLARDSGTLRGKRMVWGGRASVRTALYLAALCGRRWNPQLRVFYERLRAAGKPKKVALVACARKLLTILNAMVRSNTRWAIPAPSAQHSC

SEQ ID NO: 393307 - protein, 350 aa, unidentified
MKILAMDLGKSKSVACVYEGAHAGREADPRFETIASTPAEVLKLLERERPGRVVIEIGPTAGWVCDLCRGRGVEVQVANTNAEAWHWKRVKRKSDRDDALKLARLSALGQLPTVHMPEPRVRAWRELIRYRHTLVGRRTRIKNSLRAVLQRQAIDWPAGPAGFSKGALEELAAMAAGGSESWRLTLGPELAQLRQVGEAIAQVERELDTLAAADDRVALLRTIPGVGPRLAETIVAVIDDPRRFRSGKEVGCYAGLTPRRWQSGGTDRHGRISGQGHDLLRSLLVEVAWLGRQYNPWMKAVYERALRGSPSRKKIAITALARRLLVVCWAMLRNATPWRESAAAKLGLAA

SEQ ID NO: 393308 - protein, 377 aa, unidentified
MESIIYVGIDVHKDTYSLCSFDMQKDLFFSQHTMKASTVNVVSYLKKISESNGNAITVCGYEAGPTGYRLCLELQQQGFNCVIMAPTSIAKTAKDKMLKTDKADAQMLARTLAYHSYKQVVLPMENILAIKEVVRLRASVLKSCKKAKQNLLSFLLYHGISYPGGGRESYWTVKFFTWLKTVTFASDYLTYCFEEYVSEVSRLIQRLDQLNAKLKELEGDKEISEGVKKLKCISGIDTVTAVSLIAETGDFNRFKSAKEFASYTGLIPGRHDSGLSVGNSVGITKQGNQNLRHLLVESAKSIKRATALSHGQKSRRLLARQEGMESVIINYADRAALRIKSRMRKLELRGINYNKAAVACARKLACFAWGMMTNHIQ

SEQ ID NO: 393309 - protein, 368 aa, unidentified
MNELYIGMDVHSKSIYCIAQDWFGKVLFDGRIETKPEVIKDFLLNFPGGRVPKGTQIGFESGTQATWLSRLLDSLGMEPVVIDAHEVRKKARRIGQKTDRRDAFEICEGIRKQMYDSIVYIPDEETQKLKDVLKKRRHFVNICVREKNSAKALLRGSGISTSRLPLKGKTSWENLYKRLGDNYRSSYARMHMDVWEMAYKKVKELEVELNEALEPFKDIMDILTTVPGVGLITAATFIGSVGTPRRFPDSSRVVSYVGLAASTFNSGERTQHGSITKRGPAELRAMLCEAAQSSRKSDNPFNPYFLRICSKKGYKKAIVAVAHKMAKILYQMWKRKETFDIRKTNIESGEFVKTKKVYYKIKKKAARV

SEQ ID NO: 393310 - protein, 355 aa, unidentified
MTMLAEVVEAVIGIDTHRDSHEVEIADVTGKPVTTMRIGNDSAGFAQLLAAIAEVAPGPRVAVSIEGSRSYGIGLARALTAAGLLVIECEQPSRKQRRGKGKSDPIDAHLAVLAALRLDAGQLPVPRADGDREALRILLVARQEISEARTAQIGRLRALLLAGDDTDRQAARKALTHQALAALAGRELSAGARREQVVRHTEIRRLALALGQARQQLKDNRAQLLTIVDDIAPGLTSRYGIGPVSAAQAIVSFSHPGRCRSEAAFAALAGTSPVPASSGRTIRHRLNRGGNRALNRAIHAIAVTRMRSCPRTRAYIARRTAEGKTAREIRRCLKRYIARELYRQLTRSMNPPVSP

SEQ ID NO: 393311 - protein, 380 aa, unidentified
MEPMYYIGLDVHKRTISYCVKDGSGTIHAEGAIPATRFDLDRWMKTLPQPWTAAMEATVFTGWIYDHLQPHAAALKVAHPLMLRAIAAAKKKNDRIDASKICDCLRCDFLPECYMASTAIRERRRTLRYRNLLVRQMVQMKNKIGMLLMEAGVSYNKQRLHKAGYFRELLATNPDIDEGLRSLLRLCRETVVRLQKTESALVRSLEHDSLLMDRVERLMTIPAVGPITALTWALEVGDVQRFSSIKKAISYCGLCGAEKSSGNTVQRTPLSKQRNKHLQCTLIEAAKMAPRYNPDLAMLYDREKQKGNAQSRNAGGGKEAGGLPHGGRPWAAEFSGGGDELHCCVERGGEQGGFLRRVACQVLPLSRLGEGAQALDAPVD

SEQ ID NO: 393312 - protein, 345 aa, unidentified
MTNIVKQVAGIDVAQDELVVSLGSIDVSIETNIYAFKTFANKPTGFAALLVWISKHSSADVPVRFIMEATGVYHEKLAYYLTDQGKQVSIVLPNKISNYVKTLEIKTVTDKTASQAICQFGLGRKLEIWQKPKKIFRDLKQLTRERDQIVAERTIAKNQLHAEQAGAFPNERSIIRLNQRISLFNSQEKEIKVEIADAVKTDEALTQKINTITSIPGIGKLTATIVVAETNGFELIRSKKQLVSYSGLDIKEKLSGTSVKGKPRISKKGNRHLRKAMHMPALTAIRNDERFKAVFFRLVSKHGIKMKAAVAVQRKLLELIYIVWKTDTKYDKNHLQRTTQNVQAA

SEQ ID NO: 393313 - protein, 408 aa, unidentified
MELLCPRCAGLDVHKDTVVACIRICEGLETVYFTETFGTTTKELLRLSDWLSGHQVTHVAMEATGVYWKPVWHVLDGTFELVLANAMHIKNVPGRKTDINDAHWIADLLAHGLIRASFVPPTEIQDMRTMMRTRKQLVRERAQHVQRIQKTLEDANVKIASVVSDITGVSGRAILRAIIDGKTKPEQLVAVTTGRLQATDSVLREALRGRIRAPHRFLLKLHLEQIEAIEKAIGTMDQEVGALLEPFRAKCERLKTIPGFSDVVAQVVVSEIGTDMSRFPTAGHLISWAGLCPRNDESAGKRRSTRLRQGAPWLKTTLVQAAWSAARSNSGYLPTQFRRIKSRRGPKKAVIAVASSMLKAAYFILRNDVDYCDLGAGHFEQADRDKTASRLVKRLTNLGFTVEIKEAA

SEQ ID NO: 393314 - protein, 411 aa, unidentified
MGLLHEALPASTLVIAIDPGKVSNRVWLSSSAAGMVVEPLSLPVLRPGLEALQRLVLEHSDGSNPVFAIEATGGLHQVWVRELDQRFPGSVRLFAPSETTAARAQLGSRRFKTDDRDCAALTYLARQGQGRVVTDRVDDALAAAVRHRRGLVAERKVAQQRLHDQLHALCPGLSAPVGHGRALKLEGVIGQAVLDCAVAFVGRPPSVRSLRSRAPGRVLDSEAQFWVDRWRSCLRPPADAPARAARLGRGLARWRALAADITAVDGDLTGLLAGTDGQILTTLPGVATSRAAAFAAFSLPIARFPSAEHRYSATGLAPASYQSASLHRRGRISRQGLPEHRDALMNLAWGLSQHCGVFIERHDELRARGMRPIQARVALARHACRLAYTLLRTQQPFDEQRYRRARHQSER

SEQ ID NO: 393315 - protein, 387 aa, unidentified
MAAVMIGVDPAKRSHAMAVLDQGETQLGALQVGNDSAGYRDMVRLARRWPERTWAVEGAAGVGVQLAQRLVADGETVLDVPPKLSTRARIFDVGHGRKNDPDDARTVAVVAIRTKGLRQVVPDDEMVALRLMSERRRDLVRSRTQTVNHLHQLLMELIPAGAGRNLTAKKAKALLTTVRPRDIAGRTRRQLAADLVEDLVGLDRKLKDLDQRLKAAVTATGTTLTDIKGVGTATAAMILGEVGDVRRFPSRHHFATYSGVAPIEVSSGEVERHRLSRAGNRQLNHALHIIALSNKRYDRRGGNYYAKKIAAGKGKKGALRSLKRRLSDSVYRQLVDDQKQRAQRSPGGHLGAALQSSAAGSHPNTDTSEQPHTGLHNNPTPGLPAAS

SEQ ID NO: 393316 - protein, 371 aa, unidentified
MGESSKMLFVGLDVHKDTTAVAYAPEDRGADVESLGAIGTRQCDIDKLIRRLESKGATLVFVYEAGPCGYWLYRYLTRRGFSCAVVAPSLIPRKAGDRVKTDRRDAVTLARLLRSGDLTSIYVPTVADEAIRDLSRGREDAVGDLKRSKVRLKAFLLRQDIRYEGRANWNAAHLRWLARVVCPTPAQQIVFQEYVHTVTEQSERLRRLESELHTAVKTWRLYPVVEAVQALRGLDLTGAGTLIAEVGDLTRFDTPRKLMSYLGLTPSEYSSGAHRRQGGITKAGNGHARRALVEGAWAYRYPAKVSRHLQLRLEHVPPQARAIAWKAQVRLCKRYRLLSARGKHVNQVVVAIAREMAAFAWAIARTVPVAS

SEQ ID NO: 393317 - protein, 409 aa, unidentified
MKLFVGLDVSSQDAKVCFLNGEGDRLESFTITNDLPGAIILKEKIMNTASKLTCEVIKIDLESTSIYSYHPAMFLHNDKELRTYGSQVFMINPKQIANFKKSYPEMDKTDAIDAFVIADYVRFGRHTMSIVKEEQYIALQQLTRSRYQLVHALTKEKQHFLQHLGLKCSQFTQDVGSSVFGNAMMELFLERFSLEELAQMPLQDLALFLQEKGKNRFGNPEEIAKSIQKAVRGSYRLSKVVEDSIDLLLSTSIQIMRTYQAQIKEIEKGIESLMSSLPQTLESIPGIGPVFAAGIVAEIGQIERFTDETRIAKYAGLFWKKYQSGRFTAENTSLTRSGNQYLRYYLVEAANSVRRHVPEYRDYYVKKSAEVPKHKHKRALALTARKFVRLVDALLRNNQIYTPGRSVDR

SEQ ID NO: 393318 - protein, 458 aa, unidentified
MMEQALAQRNRSLNLNSGRSRQALTITHPNAAGIDIGSASHYVAVPPDRDEQPVREFKSFTADLHHLADWLDACGVDTVAMESTGVYWIPLYELLDARGFTVLLVNARHVKNVSGRKSDVLDCQWLQQLMSYGLLRGAFRPGDEVCVLRALSRQREMLLKSQARHVQHMQKALTQMNIQLANVISDVAGETGQKILRAIVAGERDGKTLAAMKNARIRASVDEIAKSLQGNWRSEHLFALKQALALFDFYATQLTECDCAIEQQLQRLHVHDGEPTTAKKRGRARNAPKFDLRAHLFKMCGVDLTRIDGIDVTTALAVISEVGADMSKFPTVKHFTSWLTLCPGTKITGSKLISGKTRRSANRAAQALRLAAAALRTSQSALGAYFRRLCARMDKPKAVTAAAHKLARLIYTMLTKGEEYTDQGQDYYEERYRERVLRQLSKRAEKLGMRLVASEQPA

SEQ ID NO: 393319 - protein, 342 aa, unidentified
MAKLEIIKQVVGIDVGKEKFFACYQIKDLDEYVVIKGSKSFRNDNVGYKEFLLWCEKREKTTIAPTIYVMEATGIYYEDLAYFLYENGCKVSVQLAQKLTYFAKSNNLKTKTDKVDAKMIATFGIEKALETLGIWEPPSREFRVIRDLAREHTSLKEDLTAAKNQLHAMEHAHQTYKRVIELKEEMISFYQEQLKSIEKELKVLITANQHLSSKIKNIETIKGVGFITIVKVLAEVNGFFLFKNIRQLVSYAGLDVVEKESGNFKGKTRISKKGNARLRSALYMPAMAAATHNSNIKTFYNRVNTNRKIKKHGIVAVMRKLLILIYTLWKKEEPYQIHYEMG

SEQ ID NO: 393320 - protein, 379 aa, unidentified
MGVNAEKCTILGPHKISNEHLEDWIAKHLLPTDAVVMEMTTNTYQFYDTLVPHVGSVIAVHPPHVLLVTGVKVKTDKKAALTLAQLHAAGLLTGVWIPPVEVRELRAVIAQRSKMVRLQTQAKNRLTSLLHRTHRERPTQLFKPEQKAWWESLPLTTLEKYIVASDLETLAFAGKQIDAIEEVLRQEAAKDERVPLLTQLPGIAMLTALTILAAVGPIERFEDSSHLVGYAGLGASVHDSGQMHATGHITKAGRRDLRGAMVDAANAAVRHHPYWKKEFERLEYRLGRSKAIVAIARRLLVAVWHILTNKAADRHADETSVAASMFKLAYEIKVSNLPKGTSARAFTRQQLDRLGIGQNLEVLPWGGRKVKLPPSQLKT

SEQ ID NO: 393321 - protein, 340 aa, unidentified
MFYVGLDIHSPRISICVLNETGQLAHRSQVRSLEEMLRVLQGLPDRFEVCYEASCGYGHYHDVLQPLASRVLVAHPGQLRLIFRSKNKNDRNDAERLAKLLYLGEKPTVHVPSLEVRTWRELINCRSLVIAKRTRAKNTLRALLRSAGVNPPKHPGLWTKAGFRWLRQLELPTFSQQLRRDLLLEEIETLVSQVRRIEQQLNRQARRTSAVAQLRTIPGVGARTAEAVAAFIDDPHRFPNAKAVGRYFGLVPCQDQSGGRNRLGHITREGAPVVRQLLAEAAWQALRRSPTVRAYFERTQREDPQRKKIALVATAHYLVRVMWAMLRHGTIWQERAVQAA

SEQ ID NO: 393322 - protein, 341 aa, unidentified
MKNKSFIGIDISKNVIDVSIFCEETPIKDFSHDVFNNSRKGFGEMCTWLKKNHVVLSNSLFGMEFTGSYSMELEKFLNTRNYQFCMLSTHVVKHYPMGPKDKSDKIDSAKIADFLYRYNGTECVKPYNMPDKTMQRLKALMNERKFLVEQRTCFMNRRQLCTTKEDTQLYDGYIKKLSRDIENIELEEQKLLATDDSLLSTYKNLLTIPGIGFVNAINVIVITRNFTAFETARQYASYVGVAPHFHTSGTSVRWRPRPSARCDGQAKADLSMAATVAVQYDAELQSFYNRKLGGKQDSDTKRKALNAVKFKLVLRMFAIGKQNRKWEPLDSKSSNEKLAIS

SEQ ID NO: 393323 - protein, 326 aa, unidentified
MKNSLTFVGIDISKNTLDICSIKGEKKLAKRIDNNKKAIKVFFSGSKPQSLKVCIENTGRYGRKIIEVLTSLNIVFYEVNPLHLHKSIGLTRGKDDIIDAFRIAKFLEKNHTELEPHQKPEPGIEKLKALISHRNLLIKQRAQLKAKNKENLLIADLDLPQLEEHGAELIQLLTEKIKQTDKSIIEVIEHNSVLKHQYHLIRAIPGVGPILSWNMLIKTNAFKSITNPRKFACYAGVAPFSKSSGTSVFGRASVSIYADKGIKKILHLAAMRAIQLPSDLKQYYHRKVNEGKNKMSVLNAVRNKIIHRIFAIIKNQKIYNNNLQVS

SEQ ID NO: 393324 - protein, 348 aa, unidentified
MENPTTIAIDLSKNVFEIAVERQGRICQRKRLNRRQMVEFFSQCPSATVLMEACGSSHYWGRVLQRLGHDVRLLPPQHVKPYVLGNKTDRRDAEAILSARHRESIVPVPVKSIEQQSVVFLHRLRATWMKTRTSRLNVLRGILRELGVTIPEGASRVLPAVSAALSDPSAPVPEVLHSVLMSAMAEVRELDERIEGVKRQLEAVAGTVPMVERLETIPGVGLLNATALAAMVGEFSRFPSGRRFASSLGLTPKEHSSGMRRRLGAISKRGDTYLRTLLIGGARSVLLSAHRTKKPHRLQEWALNVERRRGRNRAAIAVANKLARIVWAVSTRGVPFHPIPLAPQNVPA

SEQ ID NO: 393325 - protein, 338 aa, unidentified
MELYAGIDLHSNNSVVTVLDEQDRTVFAKRLANDLTAIIAALRSCAGTVRGVAVESTYNWYWLVDGLQDAGFTVHLVNTAAVKQYDGLKHGGDFSDARHLAHLLRLGILPTGYIYPREQRAVRDLLRKRSQLVRQRSTQILSIGNLVARNLGTHAGGNEIKRWQREHVDAMPLLDEQKQALMANLAVMRCLDSQIDALERSILAKAKLREDYQALKTVSGIGEVLALTIALETGEVGRFDSPGHFASYARTVDSRRESNGKKKGEGNAKCGNKHLAWAFVEAAHFAVRYDAAIKRWYQKKCANGLAVVAIKAVAHKLARACWHVMKDGKAFEVTRAFG

SEQ ID NO: 393326 - protein, 412 aa, unidentified
MQTLVERGCGLDVHQATVVACLLIVVNNGKVQKQVRTFGTTTRELLSLREWLLGEGCTHVAMESTGVYWKPVYAILEGALEIVVANAQHIKKVPGRKTDVKDAEWIADLLCHGLLRSSFVPPPPIRELRDLSRYRRKLVESRSAERNRLLKLLETANIKLASVATDVFGASGRLMLGALVEGEATPQQMADLAKGPLRKKIPHLELALEGKMEEHHRFLLKVQLHRLQAAEEDLAVLEQRLRERLEPYATQLALLDEIPGVDWTLAAVIIAELGVDMTVFQSVSQLASWAGVCPGNNESAGKRKSSRIPEGNVHLKTALVEAAHSAAKAKGTYLRDKFFRLKARRGYKRAAVAIAHKILVAIYHMLSQQVSYNDLGDLYLDKLNKHHLTRNLVHRLERLGYTVTLTPEQKAA

SEQ ID NO: 393327 - protein, 400 aa, unidentified
MLSIGIDVSKGKSTVCGMKPGGEIVYTPFEVQHTREGMSELVSLLRGSGEEVRVVLESTGSYHCPVVAALLENGIFVSVVNSLRMKRFCSQSIRRVKTDQIDAMQIALYGLAYWQELQPTRLPEDTYRELQLLARQYYQMTSMLIKAKVDFNALCDQVLPGMQELMSDHAGRHKLSDFVLRYRHTTHILEMGETRFRKDYCKWAEKKGYRNHERMAALIFATAQNGIPVLPDAPSTQIVITEAIRVLHTVEASRDAILTQMQALAKTLPEYSLVREMPCIGDTLAPRLIAEIGDVRRFHSKRALIAYAGIDAPPYQSGKFCANNRHISKRGNRYLRKTGYEVMQSYVMHKPANDPIFTFIEKKRGEGKSGKLAMVAGLNKFLRVYYGKVTELYRSLPAIE

SEQ ID NO: 393328 - protein, 407 aa, unidentified
MNAVGIDVSKGKSMMAALRPMGEVVLQPKEYPHTEVGLERMSLDILALGEDTRGLMEATGRYHEPVAAALHEYGIRVTVINPLFIKQSGGGSIRKVKTDKADAMKIAKYALDNWVDLREYTPMEAIREQLKLCSRQYDLYMKNVVALQNNLISLTDKTFPGVNELFTSPERTDGSQKWIDFVIAFWHCECICLVSQAAFTERYRKWCKRKRYHFNERKAVELYMDSMGHITTLPKNSNTKLLITTAAKELASAKATLAVLRAEMTRLAQQLPEYETVRAMYGVGETTAVQLMAEIGDVRRFPRRSSIVSFAGVDPAVDDSGKHISKSNPTTKRGSPHLRKTLYQIVCTYLRKAPADEPVYQFLDKKRAEGKPYFVYMTAAQNKFLRIYYARVKECLIAADTKELSAD

SEQ ID NO: 393329 - protein, 397 aa, unidentified
MDPTYAVFCGIDVGKGEHHAVGLDPNGTRLFDKALPNDETKLRTVFARLAEHGPVLVVVDQPNTIGALPVTVARACGHAVAYLPGLTMRRVADLYPGQAKTDARDAFIIADTARTMPHTLRRVDVGDEALAELGVLVGFDDDLAGEATRISNRIRGLLTGIHPALECVLGPKIAHPAVLEILSRCGGPVGIRKAGKRRLTTLATKHAPRMGARLAEEILAALDAQTVTVPGSSAAEIVLPKLADSLKEVLQQRKSIAEDVERMLDDHPLSQVLMSMPGVGIRTAARILLEVGDGSAFASAAHLAAYAGIAPVTHRSGSSIRGEHPARSGNRKLKRALFLSAFAALHDPTSRAYYDRKRAEGKKHNAALICLARRRCDVLYAMFKNKTFYRTPAAAAA

SEQ ID NO: 393330 - protein, 359 aa, unidentified
MSKITTIGLDLAKKVFHVHGVDVAGNVVVARRLKRKEVLAFFAKLPPCLVGVEACGSAHHWGREIAKLGHTVRLMPPRYVKPYVKRGKTDPIDAAAICEAVTRPTMSFVPIKGVEQQGLSMLHSARSLLIGQRTQLINAARGHLSELGIVAARGLLGFAELAAIVRDERDQRLPATARAALMVLVRQIEAISAEIASLDSILMKENKASELGSRLDTIPSVGPVIASAFRARVTDAKLFENGRHLSAWIGLVPENDSTGGKLKQKGLSKKGDRYLRSLLVNGAMAVVRQAQKRPDKHPWVTKLLGRMSAKQAAIAIANKTARIAWALMVHGGVYETGHRAPPYRAQACAAARIRGWAMG

SEQ ID NO: 393331 - protein, 319 aa, unidentified
MFPNPGEATVKDITTVGVDLAKNVIQVHGVDRRGKVVLKKQLPRSRFVEFFANVPACLIGMEACSSAHHWARELEKLGHQVKLMAPQFVKPYVKTNKHDAADAEAICEAVSRPAMRFVPIKNVEQQAVLALHRARAGFVKARTAQANQIRGLLGEYGIILPQGIAHISKRLPAILEDGESELPGAFRQLLLRLGAHLKELDRQVGELEGQIEAWHRADAASRRLAQIPGIGALTASALVATVGDARSFHNARQLAAWLGLVPRQHSSGGKALLLGISKRGDGYLRTLLIHGARSVVRVAERKSGVRWSTADGHPVKGHS

SEQ ID NO: 393332 - protein, 338 aa, unidentified
MKTHVGVDLHQRFCYLTALNASGKIFKQGQVVNEGVALRSWLRQLPGPRQVVVEASGFWPAFARAVAPESERLVMVHPRRVKAIASAKLKNDRVDSETLAHLSRCDLLPEAWMADEPTQQLRLRVRLRITLGRQRARAKNQLQAVLHQEGFKKPVTDVFGKRGRVWLAGLDLSVAGRLVVDTWLREVDHLDSELASQTRELQRLAKADARARFLESVPGIGSYAAMVILAELGNVERFQNKRALASYAGLTPVVRESAGKRKRGAITHQGSNTLRWIMLQVAQVAARCSPGARSYYAGLRQRKPAQVARIALARKLLTVVWALLHHGLCYDEELFIRG

SEQ ID NO: 393333 - protein, 508 aa, unidentified
MPATASTTIAVIGIDIGKNSFHIVGLDDRGAIVLRQKWSRSQVEARLANMPPCLVGMEACVGAHHLSRKLKALGHDARLMPARYVRPYSKGQKNDFRDAEAIAEAVQRPTMKFVATKTADQLDLQALHRVRERLVSQRTGIINQIRAFLLERGIAVRQGQRFLRTELPRILAAPPDVLSPRMVHVIEGLASDWRRLDERIEGLSGEIEELAKRDAGCERLMSVPGIGPIISSAMVAAIGTGDGFAKGRDFAAWLGLVPRQISTGDRTILGKISKRGNRYLRVLFVQAAWVVLVKVKPNRWEGHGLKPWIEAAKKRLHHNVLAIALASIFIYMVLAAQFESFVQPAVIMTALPLSVPFALLTLFLTGRVLNLWSALGVLLLLGIVKKNSILQVDYANVLRARGVPLREAIVESCRTRLRPILMTTTAIIAGLIPTSLGIGIGGTGRAAIAVTIIGGQSLCLFLTLLLVPVAYVKFYALEQALIGQGARDWLSKVSAATVGRLRPAVPNH

SEQ ID NO: 393334 - protein, 405 aa, unidentified
MLYLGIDLHRKQMTVSLRNEDGNVVLRRQVSTQWPKLEEFREQLREFAAGDEKYVAIVEVCGFHDWLVRWLPRDERCHMLLVVQPLGRSPIKTDRRDANALSELLWINRERLLRGERVHGVRTVYQPSAEQQADRQLTRLRERLVWRRTQTLNQIHKILRRRNLEWERPTKTFQTRKVVEWLKALELDAMDRLDLNQLLLQWKLWEQQLVAVDTRIGQRFLASRDAQLLATMPGVSTYMALAIVCRIAPVGRFPQVRSLANFLGLTPGCRSSGETERLGSITKVGSRMVRCLLAEVVLHLLRRDGTVRTWYQRIKRRRGSKIARVALMRRTATIIWRMLSTGEAWRPGEAAAEAPSAACAAEPLRPQRSRHAVLSALVAKEAETGCRSTGSSSLLTGEEVVRCQA

SEQ ID NO: 393335 - protein, 389 aa, unidentified
MLHDHPSVGPTAILTQFGAIFVSLELSRSNWVLTSLSPGNGEKMSQYSLAAGDIGGLLARFAELKRKAKERTGSDYPIITIHEAGLDGFWVHRVLQNEGIDSYVVDAASIATSRRRRRAKTDKIDGEALLRALLAFKRGEPRVCAMVVAPSPEEEDRRRLCRERQTLIAERIIHVNRIKGLLFAQGISDYVPLRRDRRKRLEGLRTGDRRPLPVHLKTQISRELDRLELLLDQIRKVEAEQEALLAAESKAAPEGEPHNAVAMLLAVKGIGEHSAAILWSEGLCRQFSNRRQVAAYAGLAATPWRSGAVIHEQGLSKAGNPQLRTTMVQLAWLWLRHQPQSALACWFRARGERGRKGSIVALARKLLVALWKYVTHGVIIEGAVMKPAA

SEQ ID NO: 393336 - protein, 312 aa, unidentified
MTCWVGIDVSKQTLAVWVLPQEASIEVSNTAAGHRQLVALLADKAVERVVLEATGGYERGVMSTLSAAGLCVVRINPRRARAFATALGKLAKTDPIDACVLARMAQVLKTPAQVSASPQREALRDLVQRREQLVQQRDDERRRLAQGHSARVQESLCACIEHLKSQIQQLDRAIAQAARTADAERTEQLTAIAGIGPVTVSSLLAYLPELGQLNRQQIAALVGLAPYNNDSGKYAGKRSIQGGRPAIRRVLYMAALSVIRKQDDFKRRYEQLRTRGKCAKVAIVACMRVLLIRLNAMIRSQTTWKTEPVPQT

SEQ ID NO: 393337 - protein, 377 aa, unidentified
MDKDSRFVGLDVHAETIAVGVAEPGGEVRSLGTIPNTPEAVRRLVKKLGPPETLRVCYEAGPTGYVLYRQLSALGVPCAVIAPTLVPVKAGDRVKTDRRDAEKLARSYRSGDLTPVWVPDPGHEALRDLVRAREAAKKDQLRARHRLGKFLLRQGRRAPTGSKAWGVKHRAWLQTIRFAHAAQDATLLDYRTEIDHAADRIARLERAIATAADLTPAPVRAVIAGLQALRGIAKLSAVSVVTEAGALSRFAKPRQLMGYSGAVASEHSSGPHRRRGGITKTGNAHLRRIVIEAAWAYRHRPAIGGTLRTRQAGLSEEVKALAWKAQHRLHGRYARLLAKGKAPTQVVTAIARELLGFIWAIGVHIEQHTAGGAPAAA

SEQ ID NO: 393338 - protein, 402 aa, unidentified
MNCVGIDVSKGKSMIAVMRPFGEVVVSPFEVRHTANELSELAGLLKSLDGETRVVMESTGNYHAPVAWLLHDAGLYVSVVNAMLVHDYGNNSLRRAKTDKKDAVKLANYGLDHWLTLPRYIPEEDTRLMLKTCYRQYQQYSKVQTMLKNNLISLLDTAFPDANRLFTSPPRADGSEKWVDFVATFWHCECVCGLSKKAFTAKYQKWCRKHGYNFSQDKALDIYASACGRFGVMPKTNTAKLLVEQAISQLQTTSAALAALKQEMQSLAASLPEYPVVMGMFGVGPTLGPQLIAEIGDVRRFHSKKALVAFAGIDAPPYQSGQIDVRSRSISKRGSASLRRTLFLVMGVLLQCAPIDEPVYQFMNKKRSEGKPYRVYMMASANKFLRIYYASVKAYLDSLEHD

SEQ ID NO: 393339 - protein, 413 aa, unidentified
MADLTNNSTPSTLIALDIAKKHHDAKILYPNGHAVHLRINNTLEGYERLLEVADAPAEQVRVGFEPTADYHRNIAHWLLMQGVQCHLVSSLACARAREMLFKTWDKHDRKDASVILYLMEQGLSNPFYDPLVQNMMDIQEISNTYHQITMARTRCLNSLVNHYLTLYFPEAEQFLHMSRAEWFCQFLLKFPTPLTITSMRKSTFVKRAWQLIGRKQFKQQFLEHLYELAQRSIALPVAPGSRAIDTFRLQLHRYLDLSRQRLELERLAEEYLQERDDYRHLRTLPGVGPIIALMIIAESGDLRRFPHYRQYLSYCGFNLSAAQSGQSHSGYRLSKRGNARLRYAYWLAATCAIRMRENSFRYKYERYIRQNGDSPDRRRKAFTAVAVKLARVAHAIVKQDVDYHGYYELSHGT

SEQ ID NO: 393340 - protein, 387 aa, unidentified
MPQPNDLGRSLVALDQDSTLVAVIEMGQASWLVAAIVPGLNRHPLKKIAADEEQLLQVLRRWKKEAETAGRMIKRTAVAYEAGRDGFWLARWLGARGIEAYVIHPSSVPVSREHRRAKTDRLDTELLKRAFLGWLRGEPDHCSMAAIPTLTEEDAKRPGRERESLVSERTRIVNRIKGALARLGIRNFRPMLRNASQRLETVRTPEGVALPPNTLAELRRDMARLSFIKQQIKEVETARLERLQRAPGEGANAMVQLLTRVVGVGVETADMLVHEVFSRNLRDRKAVARYAGLTGAPDESGKRRRERGLAKSGNARVRRGMLQIAWGFLVHQKDSALAAWYRTRTADARGTTRKTMIVALARKLLIALWRLATTGEVPSGLVLRAAA

SEQ ID NO: 393341 - protein, 370 aa, unidentified
MAHTSTLFIGLDVHKETIAVAYVGEEREAEVISLGTIGTRQGDIDKLIRKLHSKGKTLHFVYEAGPCGYWLYRYLTKKNLTCWVVAPSQIPKKAGDRVKTDRRDAVQLARLLRSGDLTPVYIPSVEDEAIRDVVRAREDVLKDLKAAKVRLKACLLRQDIRYEGRANWTAAHLRWLANVVCPTPAQQIVFQEYVRAVSEQTERLQRLEAELLPLVQTWRWAPVVAALQALRGVQFLAAVTLIAELGDLTRFETPRQLMSYLGLVPSEHSSGERRRQGSITKTGNSHARRVLVEGAWAYRYPAKVSRHLQLRLAKVPKAIQDISWKAQVRLCKRYRRLVARGKNVNQVVVAIAREMAAFVWAIARAVQVAH

SEQ ID NO: 393342 - protein, 319 aa, unidentified
MQSKLTIGMDIGKAEVVVACHESAFAVLKMANAVRVLRRWLATLPAGSRLGLEATGGYHEPVAELAHSLGFTVYILNPKDVHHYARALGARGKTDRLDAQVIAAYVAEHNARLHAFVPLSADEKLLRELARRRATLVNAKSMLQQSLRVLPGFEREGRELLRAMGSFADRLERKLAEIAARSSERAALVKRLQTIDGVGTLTSIRCATLFTRVPLHRSDAAVAFFGLDPRPHDSGQHRGRRRLSKRGPSEDRRLLYNAAMSAIRTPTWRPLYQHLRNRGLASTEAIIIIARRMVRIAFAMYHNHSDFNPRLVPRPSCPA

SEQ ID NO: 393343 - protein, 419 aa, unidentified
MEQITEDDEIVARVAALDVGKATLVACVRVPGEDKPGRLQEVRTFATTTAALLELRDWLVCLGVTLCVMEATSTYWKPPFYLLEDAVGCWVVNARDVKNVPGRAKTDKLDAIWLCKLAERGMLRPSFVPPPWQRELRDLCRYRRTLVQERTREKQRAEKLLEDTQIKLSSVISDIFGTSGRDMLEALISGQRNPAVLAELARGSMRGKKSVLQEALTGQFRDHHGWLLRMMLDRVDALTAQIDALTGRIDEVLAPFAHQVAQLDEIPGVGKTGAQELIAEIGVDMTRFPTSGHLVSWARFAPRARQSAGKAKPGTTGKGSPWIAGMLGEAVPGAGRTKTFLGSRYHRLARKRGKQRAIVATGRSILVIAYQLLSDPGAQFADLGPDWHDRIAPLRRKRQLIAELERLSGKKVTLQEAAA

SEQ ID NO: 393344 - protein, 421 aa, unidentified
MRNRYRLRIREAVRDPSLKFASRTWFGMMVWTLARHKRLQQSQVMYATLHNDEEGPKMEVTTIGIDLAKNVFAVCGADESGRPVLRRGLRRNQMLSFFGQLKPCVVGMEACGGAHWWARKLLELGHTVKLLHPRAVTPYRSGAKNDGNDAAAVCEAASRPQLRSVAVKSVAQQDLLAVHRVRQLLIRQATACSNQLRALLHERGIVVRQGAKALQQTLAELPLDNPDLSGEVRTLLMEVGGWWQQTQVRIEQLERKLKDQGDADERSRRLQEMSGIGPITATAVLALVGNAREFKSGRHLSAWLGLVPGQHSSGGKTVLLGITKHGNRYLRTLLIHGARSALRTCVRRTDPHARWMQQLLKRRGPNVAAVAVANKQARIMWALLTRGDRYLSERAVFGRAPSSADAAVRRVRNQKLLMLKD

SEQ ID NO: 393345 - protein, 414 aa, unidentified
MQVLHPRCAGLDVHKDSVVAAVRLTGAGGTRTEVRGFDTTTPGLLALADWLAECGCTHVAMEATGVYWKPVWHVLSDGDLVLILANAAHVKNVPGRKTDVGDAAWLAELLAHGLVRASFVPDAPTQAMRALLRTRKQLVREQSSHVQRLQKTLEDANLKLASVLTDVMGLSGRAVLDALVAGERDPDRLLALVHPRVKAEPARLRAALTGRLTERHRFLLRLHLGQYDALAAALAEIDAEVERDLDPFRDAVRLLRTVPGVGDLAAQVIVSEIGTDMGRFPTAGHLISWAGLCPRNDESAGKRRSNRLRKGAPWLKTALVQCAWAASRKKDGYLRAQFQRLRQRRGPKKAICAVAASMLTAIWHMLRHGTFYHDLGPDHFHKRSPAQQAEHLARQITKLGFTCAISPQAEPVSV

SEQ ID NO: 393346 - protein, 339 aa, unidentified
MKLYAGNDLHSSNNYLAIIDESGKRVFKKKLANATDDILHALRPYKNDIAGIVVESAYNWYWLVDALMADGYAVHLANPAAIQKYSGLKHADDKHDAFWLAEMLRLGILPTGYIYPKEARPIRDLLRKRGHLVRLRTSLILSLQNIVTRNCGVDLRGNDIKRLKENRVTPLLEANEDLAMAGQVSKDAIDFLTRKIRAIETFVENKVKLSEPYSHLLDIFGIGKILALTIMLETGPIERFDKVGNYVSYCRKVSTQWTSNGKTKGKGNKKNGNKYLAWAFSEAAEFARRYHQEARAYYNRKMQKTNFMCAHNALAHKLARAAYYVMRDQVPFVPEKLFT

SEQ ID NO: 393347 - protein, 333 aa, unidentified
MNMHPQGGVANRDQRPNAGIDVCKQHLDVCLGTTAQRVANDASGWDELTAKCRQADVDLVVLEATGGYERGLVCALQDAGITVARVNPRQARDFAKSMGVLAKTDQVDARTLRDFADVLARHQDRAKYITPMHDERRQQLAELMTRRRQLVDMRVAENNHLEHAVGKHAVRSIKSVLKTLDKQLAAVDHEVDDHIDRHFKDQRTLLDSVKGVGPVTILTLTAALPELGHLGRRQISKLVGVAPLADDSGPRMGKRRIWGGRADVRAVVYMAAVVAMKHNPVIREFHSRLIAAGKPKKVAIVACMRKLLTILNAMLRDQALWNAARHVQQPTSA

SEQ ID NO: 393348 - protein, 386 aa, unidentified
MQKLNDLSRSLTALKPDGTLIAVIEMSLSSWLVAGIVPGVERQPLKKLAVDENALLKLLHRWREEAEKAGRRIERVAVAFEAGRDGFWLARWLKARGIEAYVIHASSVAVSREHRRAKTDRLDTELLKRSFLGWLRGERDHCKMVEIPTMKDEDAKRPNREHDSLIGERSRIVNRMKAALVRLGIRGFNPKLKRATTRLDGLRTPEGEPIPPNALAELRRDMERRRLVNNQIRQIEEERLERIEQAPCDRPHVMVHLLARVMGVGIETADMLVHEVLSRNMRDRRAVARYAGLTGSPDESGRKRREKGLARSGNARVRRGMIQLAWRFLLHQRNSALTKWYRSRTENARGTRKPMIVALARKLLIALWRLVRDGVVPDGVVLRPAQ

SEQ ID NO: 393349 - protein, 414 aa, unidentified
MDVVYERCAGIDISKADAKVCIRVPGRGKGTRRRGEVRTFPALTSGLLAMRDWLLAEGITVVGMEATGSYWKPVFYLLEHDMDCWLLNARHMKAVPGRKTDVKDAEWIAKLVEHGLVRPSFVPPQPIRQLRDLTRYRTDVVRERAREAQRLQNLLEDCGIKLTSVVSDFLGVSGRRMLKALIGGERDPKALAQLAAPNLRTRRDVLAEALTGYFTDHHAFLAQTMLDRIDEATAMEQRLSSRIAEHIRPFQRQVELLATIPGVSAHTAEVILAEIGADITRFPSAGHLASWAGVCPGNYESAGKSPSGRTRPGDPWLKGVLGQAAISACRTKDTYLAARYRRLVGRRGRRRALVALQNSILISIWHMFTRDIEYADLGGEYFLERTGKSRATRRLVSQLNRLGYQVNLQPVEAT

SEQ ID NO: 393350 - protein, 348 aa, unidentified
MAAVTERYEHVVGIDTHARTHTYCIIESRTGAMVDTRSFPTTVPAMQRAVSWIRRRTRGTEVLAAVEGTSSYGAGITTALLAEGIEVAEIRALYRRSRARTGKSDPLDAEAAARTALSTDTEKLAHPRLSGDRAALRVLLASRSLTDQQRTANKNALTALLRTTDVGIDARKPLTDAQIATIAAWRTGRDEPSHRVFREEGRRLAKSIIEQSRSLQQNHQALSVLTESLAPGLQGIPGVGAVTGAILVASYSHHGRVRSEAAFAALGGIAPLPASSGNTSRHRLSRSGDRQLNRAVDVVVRTRMSYDPATCKYVDRRRAEGLSKREIRRCLKRYVCRSLFRELRTRMA

SEQ ID NO: 393351 - protein, 391 aa, unidentified
MPEDAPRPAQPAIRTDLGAIFVSLELSRRAWLITSLSPGGGEKMSKHSVQAGDIAGLLRRFAQLKEKARARTGRDFPIIVIQEAGLDGFWIHRVLQSEGIESHVVDAASILTSRRRRRAKTDRIDGETLVRTLMAFKRGEPRVCSMARAPTPQEEDRRRVCRERRTLVGERVRHVNRIKGLLFAQGVFGYEPLRKGRRERLEDLRTGDGRPLPVHLKAQIIRELDRLEVVLEQLKSVEAERDALLKPASEEAASPAAMLTRLKGIGPETAAVLWSEGLFRQFDNRRQVAAYAGLAPTPWQSGSIDHEQGVSKAGNPRLRTTMVELAWLWLQNQPTSALSLWFHERVRRLGGRMRKTTIVALARKLLVALWRYTTAGVVIEGAVMKAAAMTI

SEQ ID NO: 393352 - protein, 425 aa, unidentified
MNLLILKGVPMALKIVYKICCGIDVHKTFVVACIASTNDIGVTSYESHRFSTYTSGLKTLLQWLLKRNCKDVCMESTGKYWIPVYNILENDCSIVLAHPKYVKAIRGKKTDKKDAKWIADLFKHDLVAGSFMPPADIRQLRDLMRYRFKLTCFQSSEKNRLQNCLTVSNIQLGNVVSDTFGKSAQAILDKLLENPADTSFDLEPLVYKSLKKKLPELRDAIDGYITPEQAGKLKVIKSHYENLESRKAELEELILALAAPYQQELAILQTAPGIRSDFTAIGIISEIGTNMEAFPSAKHLCSWAGLTPTNNESAGKKKSVRVSKAGCYIKPLLVQCANAVVTSKKHPEIRNRYLRLKKRRGHKKAIIAIARMLLTALYHMLKNGENYNAELYRKSYLPPVDREITVEQAIIIARNQGYKIKSATA

SEQ ID NO: 393353 - protein, 315 aa, unidentified
MSPQVFVGIDVSKAHLDVAVLPPERRRRFPNDSPGFEELIAWLGEPEATLIVLEATGGYQVAVTAALSLAGFAVVVANPRQIRDHARSQGRLAKTDKLDADCLADYAAKNKPPVRPLPEEQTRLLQALMARRHQLVEMLTMAKNHLQQAPAPLAKPIRKHIQWLEKQLQQLDDELDHQVRGSELWRQNDELLRTVPGVGQVTSYTLLADLPELGQLNNEQVAALVGVAPLNRDSGKRKGHRVIWGGRAAVRTALYMATLSALRHNPVIKAFYQRLKKAGKASKVAIVACMRKLLTILNTMLKERQPWQPRLLKTA

SEQ ID NO: 393354 - protein, 357 aa, unidentified
MLYLGIDQHARQLTVSLRGEDGDVLLARQVSTEPDRVRAFFTQLTRDRLQEGESFVAVLEVCGFNDWLIRMLREYRCHKVILIQPEDRKKRKTDRRDAAALSELLWANRDRLLHGKPVRGLRQVEITDPADQENRRLTTLRKEAGVARARLINKVKWVLRRHNLQWGMPTKTFPTAKAVAWLKGLALPEIDRLEMDHLLADLDQADRRLKDLEQAIARRSAGDRHVAVLSSMPGVGRGFTALSLACRVGRVERFPRAHSLANYWGLTPGCRNSGENDQRLGRITKAGSATARWLLAQLVHKILRRDARLRDWFKRVKRRRGPTVARVAVMRKLATVIWHMLSKRQTYAECRELAAAA

SEQ ID NO: 393355 - protein, 317 aa, unidentified
MFSERTSVGLDVHARSVVAAVIDTSTGEVFQSRLTPSHEHVLAWVRGLPGPVAVAYEAGPTGAGLHRAATSAGIRCEVVAPSKLQCPAGDRVRTDARDAIHLARLLRMDEFTAVAVPSLEQEAARDLVRAREDARGDPMRARYRLSELLLRRGVVYCGGQAWTEAHDRWFRQLRFDQRAVQPGIGVRLRGDAAGQGPEGPARRRDRGHGRGQRVHRGHLPSCCLRGVGTLTGFALAVEVGDRHRFTGATIGSFVGLVPPEVSSGASRVQGPITKASNTHVRRLLVEAAWHHRTRYAIGKTMLDRWDLAGPAARARSG

SEQ ID NO: 393356 - protein, 392 aa, unidentified
MYIVGIDIGKNHHEASIVSPEGKQIGRSLRFATTHKGADSLMSFIFKNIGNSPCVFGMEATGHYWYPIYSFIKAKGYTIYVINPIQSDSLRKMYIRQTKNDSIDSFLIAEVIRFGQFGTTSMADENILAMRQLCRYRDSVISSRTEIKLRIGTIMEQIFPEYEKQFSSLWVSTSMGILEKYLTPENIENAPIDELFEIIKDKSHNKLTMKKAISIREAASDTFGIKIAQDAFSFQLKQLIDRMNFLDKQIEALDIEIMKYYEQFDCYLHTIPGIGMIATATILAEIGDIHRFKSSSALVAFAGIDPTVRQSGEFNSTHNHMSKRGSPYLRHAIFLAATTCSFHNSPLNAYYKKKRDQGKHHLTATGAVARKLTTVIYAVLRDSKPYEPKKFC

SEQ ID NO: 393357 - protein, 344 aa, unidentified
MEHYAGLDVSLELTSVCIVDVQGGIVCEAKVASEPEALIGFLRARALPIVRVALEAGPLSQWLHAGLVHAGFDAVLLETRHVKAALSAMTVKTDRRDARGIAQLLRLGWYRSVHAKSASAQEVRALLTARKLIQAKLLDVECGIRGVLRGFGLKVGAISRGRFEARILELFDGTATLEMVIGAMLAARTALAAEFKRLHRELLALVRDDPVCRQLMTVPGVGAVVAITFKSGVDDPTRFKRSRDVGSHFGLTPRKYQSGEIDVTGRITKVGDRMVRTALYEAASVMLTRTVRFSSLKAWGMAIAKRRGTKKARVALARKLGVVLHRMWVDGASFRWSNEEPAIA

SEQ ID NO: 393358 - protein, 304 aa, unidentified
MSEVTTIGLDLAKHVFQVHGIDAQGATVLRKRLRRGQVLAFFSRIPRCLVGLEACATAHYWARELAALGHEVRLMPAQYVKAYIKRNKHDAADAEAICEAVQRPTMRFVPVKTAEQQAAQLLHRGREQLVRQRTMLVNALRAHLAEFGMVAAQGLRNVAQLIAIVRDEDDLRLPDVARQVLQVLANQIEQIEAAITALEKQLMAWHKTNPVSQRLASIPGIGPIIATAIATTVADPNVFRSGREFGAWLGLVPRQNSTGGKTRLGGITKRGNRYLRRLLINGASANLLRSKATKADPWAGGSLS

SEQ ID NO: 393359 - protein, 475 aa, unidentified
MNHRRLVGIDLGIASAHTVRVLDGEGTTLAKRKAWPTLESLGEIEAAALDGCPPGTRLEVVMEPTGPAWMPIAVFFTTRGHVVHRVSSAKAHDLRRFLSRHTKTNGIDADTLARLPLFDPAGLQPLVLPTAERAALDRRVRVTDRLTEQGAVHKRRIKDLTRQLMPMTPLTGDLGVADLAVLERYADPNALVRAGEKRLTTLIAKSSNGQQGTDRARQWIDAAGASIELYAGHPAVAFADLAAEIATEVRLLRAVQTELTAHAAERESCYRWVDPAQLARSLPGVADVSGPALVAAMGDPTRFARGKQFRSFTGLVPKASETGDTDRKGQPMSKAGSSLLRTTLVRAADNARRTDPQLARIYYIQMVERGKDHLGAVCVVAANLAERFWAVMHRGMPYVICDTDGRPVDPDEAKAIIAAHWTVPADVRARRRSKKAGKAPQTVRTGQRLRGDLPRHQSIDQHDTHRQHQPQRRTA

SEQ ID NO: 393360 - protein, 284 aa, unidentified
MTISSEHCVYVGIDVAKDKLDVAVLGQKTTSEADNTKRGITALVKKMCALQPQLIVVEATGGYEEALVMGLFEAGLPVALVSPQRVRQYAKARGLLAKTDKLDAQNLAEYGKNIQPRLFVAKSEAGRRLSAIIGRRRQLGDMQKAEKNRFRTAYAEMRSSIQTVIDCLEAQIEILDEEMRKFMKEHADFGEREKLLRSVKSIGPVTAATLLADLPELGKLDRQQIAALVGVAPLNQDSGKKRGYRKTKGGRPAVRSVLYMSALSAIRYNPVIKPHYEQLVKRGK

SEQ ID NO: 393361 - protein, 324 aa, unidentified
MVEQKLATTKPAMQQVFGKMPRSRVALETGAHSPWVSRLLTQLGHEVIVAHARNVRLIGESSRKDGRLDARMLARLARLDPRLLSPVRHRSAEAQIHLTVIRARAALVGARTALVNSARGLAKSYGERLRKCGTQQVSKDLATGLSAELRAALEPLLAEVTSLNQRITEYDRRIEQIAKEAHPEVALLKQVKGVGTLIALTYVLTVGDPRRFRRSRDLGCYLGLRPGRRNSGSSQPQLHISKEGDRYLRTLMVQGAHYILGPFGQDSDLRRWGLKLSERGGSNAKKRAVVAVARKLSVLLHKLWVSGEVYEPLRNHSTGIGAVA

SEQ ID NO: 393362 - protein, 402 aa, unidentified
MNSVGIDISKGRSTVAVMRPFGEVVVSPFEVRHTDSELSELARQLKSLDGETRVVMEATGNYHTPVAWLLHGAGLYVSVVNAKLVHGYGNNDLRRVKTDRKDAVKLANYGLDRWLTLPRYIPEEDTRLLLKNCYRQYQQYSKVQTMLKNNLISLLDTTFPGMNRLFNTPARADGSEKWVDFAADFWHCGCVCECSEKVFMNKYQRWCRKHGYNFSERKALDIYTEASGHIGVMPMSDTTKLLVAQAVSQLRATSAALAVLKQEMQTLASQLPEYPIVMEMFGVGPALGPQLMAEIGDVRRFHSKKALVAYAGIDAPPNDSGDVTGRHKGMSKVGAPSLRRTLFLVMSVYLQNAPLDEPVYQFMDRKRAEGKPYRVYMMASANKFLRIYYASVKAYLETLERF

SEQ ID NO: 393363 - protein, 318 aa, unidentified
MTNKTYLFNVGVDISKLKLDVAFSDQKAASFDNNQKGFERFLKALKNQSETRVVMEATGGYEKPLAQFLHSQGIAVSIVNAKRVRDYAKALGKLAKNDRIDAEVIRLFAEAVDPNVMATQSDTQQSLDALVHRREQLVKQRAMEKQHLETVGNKEAVRSIKRTLAYFDKEIKRIEQAIKALIGAEPTLTEKVDRLSAVKGIGDISALTLIADLPELGQLTNKEISALVGVAPFCRDSGTLKGKRTTWGGRAQVRSILYMATLSAVQFNPPIKAFYSRLIKNGKTKKVALVAAMRKLLITLNSMLRNNTEWNPNHGKLA

SEQ ID NO: 393364 - protein, 377 aa, unidentified
MTQFPVSTSNEQSIYAALELSKNSWLLAIQVPGRDNPSLYPIGGGNAEGLMAKLDAARNRLAKVSGQTPKVTLCYEAGYDGFWLTRFLEQRGIECLVMEPASLQVNRRARRVKTDRIDVENILHTLIAWCRGERHVCSMVVIPSVEEEDLRRTHRERNRLVRERTAHINRIKGLLFAQGIRGINVMKDYKTLAPAELITGNGRSLPKRLDREITREIERLALVQEQLVEIEHERDQAPTPCAATERKRHDLLRLSGIGPTISAILAREVYYRRFANRRQVASYIGLAPSPYDSGDGRRSQGISKAGNSLARYSLIQAAWLWLRHQPNSALTQWFHHRTEGQSKRVRCIMIVALARKLAIAFWRYLETGLIPEGAVVK

SEQ ID NO: 393365 - protein, 443 aa, unidentified
MNKNDSAHLRGERGQAFANLVRGIPPEQILCVSLDISKYFHVVMIHNGLGEIVIPTFEIDIYQSGFDQLCQMIDAAQEHTKARLVLVGMEPTSHYFENLARHLLARSQPVKLINSFSVKQNREQQLMRREKTDQIDVAAIGDLLRRGEGTPYKPPTSIYLQLQQIDRVRLGKLKIANMLKNQILGHLDRIFPGLVLVSQTAQERYTPLFNVDFWQCQTLQALIRIFPNPYQLVAMSPDQLIQAFHAQKHRMGPAMAAKIIAEAHKTLLPDLELAAIRCELLQHDLALLEAVQAHITSLEQRLTNLVAQTPYQVWTKLKGISAVQTASLAAAIGDPANYTEAAQVFRRSGLVSGRNDSGNHQRKGRGNPILKTGDVYLRRSLMNAVATLILHQPVLYRYYKQLSFTKPSGVARVATARKTIGILWAAQRDQSSKTLINCKGAAM

SEQ ID NO: 393366 - protein, 416 aa, unidentified
MKKNSKSPTKKETSKRTRSQRPVQRETKEVLAELVEKLKGKLELKATPASLGEAGQRPELRPNLDRLTVGVDLGDQWSHYCILGLEGETLSEGQLRTTQADVAEFFQAITSARVVIEVGTHSAWVQEIIAGCGHEVLVANPRLMEGSKRRKRKNDRIDANKLARLGRVDPQSLHPMQHRSREVRQDLVLLRAREALVAARTELINTTRGLVKSLGTRLPKCSSRSFAHKVGEAIPEQVREALLPLVQLAEGLSACIQGYDRRIEELASEKYGHTKLLRQVKGVGPITALAYVLTLEKPERFAKSRDVGPYLGLVPKQEDSGEIQPQLGISKAGDTMLRKLLVGSAQYILGPFGPDTDLRRYGLRLCERGGKNAKKRAAVAVARKLAVLLHRLWVSGEVYEPLGYRVSGTIVQPAAA

SEQ ID NO: 393367 - protein, 460 aa, unidentified
MGSKRPPPTPPLTIRKVRDRAAATDVGAEEHWICVDPALTDQPIRRFGAFTEDLIAAVAWCVELGVTSMAMEATGIYWRELFSRLEEAGIEVMLVDPRRTRNPRGRKTDMQDCRWIWELHAHGLLDGAYVPPPEVQELRTYLRFRKTRIERASMALKEVQRALSMMNLKLQHVIADIGGATGQAIIAAILGGERNPRTLATLRNYRCTASEETLVKSLTGTWRTEHLFLLAQAHADYLQQLQAIAACDQELDRLIATLPQRSHDDGSDLPPKRPTGKHDFGFDAQRASYRITGVDLASIDGIGPNTALSFLGEVGFDLSAWPTAKAFCCWLGLCPNPKRSGGKNHGNLPTTANRAAQMLKDAAMGLRGAKQNPLARYYAKLAVRRGSAQALKAVAHKLARIIYALFKSGSAYDRTKLVPPTSERTAKRTIQRLTAEAGKLGYSLQKTLVQPFGQEGAASC

SEQ ID NO: 393368 - protein, 342 aa, unidentified
MKNMMIGVDLAKTVFQVHGALRTGEVQFRKKLTRKQFPAFMAQQEPGMVIFEACSSAHFWAREMEALGHEVKLIAPQYMRPFVKRQKNDAADAEAIVIAARQPEMRFVEPKTVEQQSCAAVFRARERLVHQRTADVNALRALLYEHGHVFPVGMSHLARMTAFVRDETGDLHALIREECLDLLVQIAEKTARIIERTTKLKTLAAQSDRARRLQTMPGVGPLTAVAVEAFGPDMADFKTGRNFAAWLGLVPRQHSSGGKERLGRMTKAGQADIRRLLIIGAMSRLNWLGQRTIVEGSWLSRMLMRKPKMLVAIALANKMARQIWAMLTKNKDYRDPAMAVVA

SEQ ID NO: 393369 - protein, 341 aa, unidentified
MEQYVGLDVSMEETSICVMDAAGAVVWEGRAKTSPAALRCALHRQAPHAVRVGLESGPLSTWLWHALRASGMGIVCIDARHAQAALSMRVNKTDRNDALGLAQLMRMGWYREVKVKGLPAHADGALLASRALLVTQRCELENQIRGLLKNFGLRVKATKGRAFEQSAAALAAKQPMLGAMVHALLAVWSSLRVQIDVLTRQVQNQVAGDAACRRLMTMPGVGPMTALAFRTAIDDPRRFRHSASVGAYLGLTPRRYASGEIDRMGRISRCGDPLARSYLFEAANIMLGRARKANPLKSWGTKLAKRAGFKKARVALARKMAVVLHRMWLDGTDFGAPTASA

SEQ ID NO: 393370 - protein, 360 aa, unidentified
MNVLKVNLGIDAAKDNCECNLSVLTAELVVKVIATKMFLNTDHGLEELEKWLIKNCPAECTKVHVVIEASGVYHERFALGLQKAGYCISVVLPNKAKKYMESLGLKSKNDSIDARGLARMGCEQNLEEWIALSPFYHKLRTYTRLHEDIQQKRTDTTNQLHALQHSAVQMKSAIKVLERLVKVFDKELAHTKKLIEDHIATSTEIKEKMDKVCDIKGLGTLSVATVVAESNGFDLIKNIPQLVSFAGYDVVEDQSGKRVGKTKISKKGNAHIRRILHMPALNAKTYEVGSMAALFERTFNKHGIKMKSYVALQRKLLILIYTLWKKNEAFDKDYEKKKSARIKEAETSSRLSLAEAEKAA

SEQ ID NO: 393371 - protein, 314 aa, unidentified
MSTQESKFYVGVDVALRHLDLFDPKSGKSERIKNDAVAIDSLCQRWKGQSDVMFVMEAGGGNEELLVSKLQQASIPCALIIARRVRDFANSIGVDATSDQIDAKLISQFAAVLKPDQLPAQSDDERKHVALVTRRFQVVDIISQERNRLKVTWDQEPRSSIQKVIELLREELGSIDAKLVKMLASDTKNKRKVEILRSADGIGDVAASVLLAQLPELGKINREQMAKLVGVAPMNPDSGESSGRRSLYGRRSNVRTVLHMATLISIRGNGKMKPHYAHLKSEGKESRVALVACMRKFITTLNHLIKTDQLWETK

SEQ ID NO: 393372 - protein, 412 aa, unidentified
MGRCLGRSIGVLVYHPALLRPSALCHFRRNEMKSQDGKYVGIDCGKKTLEVVRINSENSLERRQFSTTESGINNLLKWLTLNDIVGLGFSATLKANTNASLAFSNFALHGSLDWLSIFRIAKSILNKGIQVISPESRRLSNNLSILKKTDKEDSLKIARLIQRFPIEELPVVPIPTDEEEDNRRLCTEHENWTRQLTQGKNRLHSLFTQAGLTEITKKHLRIKASREASVTLLPDRYKREAERILKVLDLVELNLKLIEEEIKEALKKNQSYVQTIMSMPGIGMITSLAIMSYMGDCKRFSSAKQAAYFVGLVPSVDISGDTVRYGRIVSRGCHAIRRVIVQAAWSLVRCQHGGKIKEFYQRLYLKKGAKKSIIATSRKMIEVLYSMIRTGDLFDSMPEEVWNRKLAQYGLM

SEQ ID NO: 393373 - protein, 337 aa, unidentified
MVYGAIDLHMRHSRIRIIEAEGHVLRDQRVPTNAERFLAAFAGYGSMRLVVESGTESEWVAQTLEGAGHEVIVVDPNFAPMYGELRRKVKTDTRDVAALAEANRRGWYRAAYRASPAQRARRQTLRARRQLVRMRSGTIALVRALVRQTGARVGAGSSERFAQRLEQLPLSPALRETIAPLTRTLTLLTREIATLDTHLAQEAKSDPVVQRLQTVPGVGPVVALTFRAFVDRIERFGSAAQVSAAIGLVPREDSSAERRHQGHITKAGPGEVRSLLIQAAWVCWRTSRQGPFRAWADQVAARRGKRIAVVALARRLSRVLYAMWRDETDFLGSRVAA

SEQ ID NO: 393374 - protein, 367 aa, unidentified
MIVNEVAKNVEKIISIDTAKNSFQVLVVNQKTGKKKNTKVQRSKFVEYILKQGPCLIFMESCSASQHWARLFESFGFTVKLIAAQHVKAFLRNRRVKNDERDAEAIYKCGIQPDTKFVRIKTVEEQTVALLHTLRKAAVSQRVELSNRIRGILAEFGIVVARGRGSFNSEIEAMFNECEKIHDVNLRVAISSLFEDYHRLEQREKELSEKIEALNKDNELVKIALTCPGVGSLTASAIVAEVGDASQFRNGREMAAWNGVVPSQHSTGGRSTLGGITKTGNRYLRTLLAQCACAVIQNASRHLEQGKDTHLDRFALRLKLNGKPVKKIMIAIANKIIRILWAMLTQRKTFENKAEETSDISAELQLA

SEQ ID NO: 393375 - protein, 401 aa, unidentified
MIDTRDVAVFLGLDVGKGEHHATGMTPDGKKVVDKPLPNSEPKLRAVLDKLTAKYGRVLVVVDQPASIGALPLAVARDAGCEVAYLPGLTMRRIADLYPGEGKTDARDAAIIADAARTMPHTLRSIDLDDETIAELHMIVGFDDDLAGEVTRVANRLRGLLTQVHPHLERVLGPRIQHPAVLILLERFGSPKAIRKAGRRRLMTLLRPKAPRMAERLVEDIFTALDEQTVVVTGTDAAAVIVPKLAKNLTSLLDQRKELAADIEELLKSHPLSELLTSMPGIGVRTGARILIDVGDASGFPTAGHLAAYAGLAPVTRRSGSSIRGESPSRRGNKHLKRAFFLAAFAALSDPASRAYYQRKRDEGKRHKQALMCLARRRVDVLFAMLRDGTIFEPQAIPQAA

SEQ ID NO: 393376 - protein, 348 aa, unidentified
MAYFVGLDVSVKETSVCVVDDSGKVISEQKVLTEPDNIITLLTSIGETYARIGIEAGPLSQWLVNALIAAGLPVICVETRHMKALLTAQQINKTDRNDARGIAQMMRVGLFKPVHVKTQVAQEQRMLLTSRKLLQRKLLDVESDLRGTLRNFGLKVGAVSGGRYDARVRELVEGFPGLAAIVAPLLTVRRVMRQQFAVLHKMLLDTVRDDPVSRRLMTAPGVGAVVALTYRATIDQPQRFVHSRAVGAHVGLTPKRYQSGEIDYDGGVSKCGDALLRTMLYEAAQTMLTRAKKWSWLKAWGMRVAQRRGIRRAIVAVARRLAVVLHRMWVDGTEFRWSKDSATVLNAA

SEQ ID NO: 393377 - protein, 331 aa, unidentified
METDQYIGVDLHKASFQVCAITPRGERLWEARFARTPEGIAAFVARCTPRSAVAVEATTPTWHFVDQITAHVATVCVVDTRKTKLKAGYAAKTDRLDARRLADALRRESVVSIYVPPPAIREQRELARHRLMLTQMRTRVLQRMRALLLRQGLGDPPTKRLRSAAGQAWLDALELPSQAHRVLITLRQIERDLCAQLAPVEADIAREASADPIVQRLQQVHGIGPVLGLMLRAEIGDIRRFPTPAHLASYAGVVPQVDSSASRTHYGRITKDGSPWLRWALVAVGVQTLRRQDPLGRWGRKLAVRKGAMKAHVALAREMCREIMEAWRRAA

SEQ ID NO: 393378 - protein, 362 aa, unidentified
MKQYDYTGKTVYVGIDVHKKTYSCVSICEGQVMKRDTMPADPNILLNYLKNSFSGAVKINTAYEAGFSGFHLHRYLISHGINNIVVHPGSIEVASRDRVKTDKRDAFKIATQLAAGRLHGVFVPSPEREEKRTVTRLRATIVRSRHRVGQQLKALLFTQGLIEAADDTTLCEKWITKKLCEVKKAGLSTDFYFTINYYAQQWIQLSKDIKEVESSLEDQANTEKGLQLIYESVPGIGPIHGRQLANELGDMKQFRNEKQLFSFTGLTPSEHSSGEHTRQGHITRQGNSILRHILVEAAWVAITEDPSLEKIFKRLARGRGKKKAIVGVARRLIGRIRSCVITGTFYEIKSTEEACSLLRKVA

SEQ ID NO: 393379 - protein, 343 aa, unidentified
MEKSLFIGIDFSKKTFDVSLIDGNNLNGIPGYKQFDNTKEGCNQLLKWVKLWSKIPVSEWLFCGEHTGLYSVLLSEFLIKKNLFVWLENPLQIKLSTGIKRDKNDKVDSREIALYALRFQDKAKESQLSDKSLKSLELLLGFRDRLIGNKHALLVSAAELRTVLNRDVTARYIYEQSQKDIERINKEIKCVEAKMKEVVDSNDAIKETYEVVSSIKGVALINTVAIIVATKNFSRFENSRQFACYAGMAPFGKQSGTSIKTGPHVSHLANKRIKTLLKQAAQCAIRYNSDLKQYYTKKVAEGKNKWVALNNVRNKLIHCIFALVREKQLYQEGYLQHLGKSIA

SEQ ID NO: 393380 - protein, 482 aa, unidentified
MKKRSIFQNRSQQLLALFEKAGNRLKMMCVPIDYAKKDHIVMFCNGYGDILRKPFSVKNTLDGVKYLIDHVMRSCRQRHIKKEYVFFGGEDVNSYAENFANALRAKGFLVANVNAHDAKKQRENLQASTDRIDLMGIATMLLNLRAKCSPAQAGIYRNLRTLVRHRKKLVVMKTGVKNRVHTQVDRLFPGFLNEKNTGINPFSESSLVLMQDRFSAQQIRRRQQRTLIKILKRCATSDAGNVAAKLHSYAAQVITTPDEYAATLQLSLQHHIKLYRCLKENIDQLLSEIALVLAQTQAAFLTSIKGVGIVLAAGVSSEIGNPFGQKPLNNLTSYCGIIPRVKQSGGIEGHTHTGRVSKRSNHLLKDYVVQSAFHIGLRGPQPLLLDYKRREAAGQHADFGVGRRFLRMGMCLMRSSQVYLPPKLRSPKAQMQERAVYYLTMWPLFRDKWKKAHAHQVAFAKDQPLGQWRQMVQELYDIKLKL

SEQ ID NO: 393381 - protein, 310 aa, unidentified
MSTTLCIGIDVSKKHLDVAIENEATATQYANDQEGVDAIIKRIKPLAIKLVLLEATGGYEVLAASCLHNAGLPTVIVNPRQVRDFAKSTGVLAKTDAIDAQVICRFARAVNPMQRTIKDADTSELAALVTRRRQLVKMLVAEQNRFQQAAKRNQKDIKDHIKWLKKRLGNIDNQIRKDIENSSMWRAKDDVLQSCPGVGPVTSAKLLSGVPELGQLDRKAIAMLIGLAPLNRDSGKFKGSRRIWGGRSEIRSALYMAAMTATKHNPIIREFYQRLTVTGKCHKIAITACMRKLLIILNAMVRDQKKWQHT

SEQ ID NO: 393382 - protein, 422 aa, unidentified
MKNNAARKLRQVPEGYLIIGVDPHKKKHAAVAITQDLTIHDRFKVDNTREGLEFLLRRVKTVMVKSGCRGIMFAIETGGHYWRNIAYYLDERGVPFRFINQYTLKRRREGKDLNKRKNDYRDSEVAAQLLCTGEFVESGIPQGVYAELRTAHNAYRRLVKERTRITNLVKGLLDALFPEFVRVFKDPCGLTSLSVLSTCSTPGIIAGMTEEEFIAAIEAAHHGRRLMRKKLRELRSVAKSSIGIEAGAHSVSVEIAFLIEKQKLIKGQIQTIERTLIKLVDASEEGKYLLSIRGIHYIAVAGLLAELGCFKSYRTAKQMIKMAGSNPTESESGGKRRSRTPMSKQGRPVLRYCAWTSVIPMLRLNPDFRAWAKERRERPAHANPLNGREIVGAALNRLLRLCFAMVKNKTYYRSPHLVQVSN

SEQ ID NO: 393383 - protein, 388 aa, unidentified
MSKQTAAASTIQISSPAQTLMLAFELGEGSWLLGFSAGFGEPVLRRKIASRDTVALLREIERAKEKLDLPAEASVKSCYEAGRDGFWLHRFLESRGIENFVIDSASIEVNRRSKRAKTDRLDVNGLVDLLARHLAGSRKPVFSVLTVPSEQAEDLRQLGRELKLVKRDRTRVSNRIKGLLANQGLLIDRSQDMAKQLASLRLWNGSKLPHHLRARLERYASDYGFYTARIKELDRERKAVLRANETEATEKVWRLLWLRGVGIETAWCYGMEFFGWREFRNRKQVGSLAGLTPPPHDSGNQQREKGIGKDGNRWVRGVAIEQAWAWLRFQPESELSQWYQERFGRGSKRLRKIGIVALARKLLIALWRYVETGLLPEGAVIASSVRLP

SEQ ID NO: 393384 - protein, 387 aa, unidentified
MTNVIDIKKAAASVNESALIWLKINSQINHYGGAAMAKYNIGVDYHKKFSYMVVKDEKGQVLRSGQIQNSRSSVNKFLAPFKEDSAAVLESCRNWCVMHDWLEDTVDEVILANPFKVKAIAEAKIKTDKIDATVLADLLRADLVPQCYIAEREVRDMRSILRERMFFVRLRTMTKNRITTIFDRYPEEAGKQKAQTDLFGKKGRANLDNIELRGPDRALINRELNFIDLINEFIKEIEEVIAENFKENKNAQYLKSIPGIGQFFAMLIDAEVGEISRFRTADKFASFVGLVPSTYSSGGKTVNGRIIKRGNKLLRWAFVEAVIPAITHNEELRADYDHLRKRMNWNKAKVAMARKLLTITYKCLKEQRNFKKLNKIELERKLLLRAS

SEQ ID NO: 393385 - protein, 400 aa, unidentified
MSGSRSPFQGFVGIDVSKDKFDACGIGEDGTKLFQFSAAMDRNGFEKLKSHLSSVPMGSVLIGMESTASYHVNLFSYLISEGYAAVVLNPLLISHYVKMQLRKTKTDKKDAWVIAQFLLANRNSLIRRATSPLISDLRELARQRESLVDQMTSLKNDIKRILNITFPELEHMAGIFTKSILKLLQRYPSAYALQEADPDHLTRMLIKDSYGRKRGAFAEALLKAARSSIGTPSPMKDVILKQKVSLHFHLEEALQEITEMLLQTSRGMMGDDMDILNSIKGIGEKSAASFLIEMGGDIQQFDDPNKIIAMAGIDPAVRQSGKHEGSSRITKRGNRHLRRIIWLMTTQVIHFCDVFRVYYRKRRKDGLPYKKAVLATSHKLIRVIYAMLTQRTVFCQAVNS

SEQ ID NO: 393386 - protein, 316 aa, unidentified
MGSISGRSWAVVTIGIDPHPGSHTASAMSDRDGVHDTLCVSSGAKGHRQLVEWAQKYPRREWAIEGCGNPYIRELVQDLVACGEVVYNIPPAMTSLYRSRYRRGKDDDIDAGRAAHALRSNRHKLRPIVSGQMQLELKELTRSYRKLRAQLTRNRMACKAAESPQAREAYRAVITSLEEALDQLEKAIAEHMRRVAPDLLKPIGFGPITAAVTLAEVGSITRFPTRDHFASYAGSAPIPWSSGASTSFRVNPGGNRQLNWAIHMIVKTRLRLDARTQAYRDRKLTEGKTMREVYRTLKTYVSREIYRIMKAQVVML

SEQ ID NO: 393387 - protein, 461 aa, unidentified
MLVVAMPTSPSYWVEEERENAMAKVIIGVDPHKLSATIEVVDRRERLLGSGRFSTDQAGYTAMRTFAKAWPERVWAVEGSNGAGRPLAQRLLEAGEHVVDVPAKLAARVRLFDTGHNRKTDARDAHSIAVVAVRTRTLRVLAADGELEGLRMLCDRREELTRLRVQTVNRLQRLLAELIPGQGQKDLTALQAKAILATVRPRDIAGKTRRRIAVEELADLVAVEAKMKKATAELKTIVLARGSRLMDIHGVGPVVAARILADVGDITRFADRNRFASWTGTAPLDASSGEQNRHRLSRAGNRRMNHMLHIAAVTQIRLDTEGRAYYSRKRAAGKKPLEAMRCLKRRLSDVVYRQLVADAERAAMTASSGEAGTGPGGHCGATQESSAVDLPPHIDTSDQPLPGPAHPTLPATKPHANPCAASAPRRSRRRAGAVKVERPTGRTTLTAPSAGAHSAAPKPTS

SEQ ID NO: 393388 - protein, 339 aa, unidentified
MSKRSIQVQETMYCGIDVSAKSLTVAIQQVHQPVEQRSFPNTSVGHKALIVWLRKAKSPVRVSLEATGLYSLDLAFALDAAEGIEVAVLNPKVANRFAQTIRRSKTDAADAEVLAEYARRMPFTAWVAPSLRSMRLRSIVRHVESLSVQSAQNQNRLHAAQGSTYTPGCIVQDLKRSVASLELRIHKLRREAMALVRQDDLLCKRFGLLVSIPGIAQVSAMQLLAELSTLPSDLTVREWVAHSGLDPAHEISGSSVRKASRISRAGNRHLRRALYMPALVASRCDPHAKAFSESLLARKKARLQALIAVARKLLHAIYGIFRSGLKYEGTKLFPRTTLS

SEQ ID NO: 393389 - protein, 320 aa, unidentified
MMAQNDRVVAGIDVAKDKVDACIRSLSQRRTLPSTAEGRRQLISWLRKHKATKAVMEASGGYERDWAKALREAGIEVRIVDPKRVRSFARSAGRLAKNDAIDAEMIAWFAETFGEAKGQAYDAAREKLIQIVHARQGLLDLQTSLQNRGEHAAPEVVQKMQGRLLKKIALELAGLEAAIAAMIKATAHFAELAEIIESVPGLGEVTAAGLIAAMPELGQVSNKIAAALLGVAPYDDDSGKRRGERQIKGGRRKVRNLFYMACLGAATRHNPMLKAFYQRLLAKGKEKKVALVACMRKLIVILNTMIARGEKWDATRCALS

SEQ ID NO: 393390 - protein, 340 aa, unidentified
MRKLYAGCDLHSNSNLVGVIDGQGKRVFKKRLSNDMGWIREALVPFKGELVGIVVESTYNWYWLVDGLMEEGYRVHLANPSAIQQYSGMKHSDDRHDAFWLAEMLRLGILPEGYIYPKQERPMRDLLRKRSHLMRLRTSLVVSLQNILSRNVGRKVSVNDVKGLREDRITSLLEESEDLAMAGRISKETIDFLTHQIDQIERRIDKKVRLKGVYRFLQTLPGVGKILALTIMLETGPISRFETVGDYVSYCRKVPSQWMSNGKWKGSGNTKNGNRYLSWAYAEASDYARRLHPEPRAYYQRKMQKTNAVVAHSALAHKLARAAYYVMRDQVPFDPERLFR

SEQ ID NO: 393391 - protein, 346 aa, unidentified
MRIIGCDYHPSWQQVCWLDTETGETEEKRLDHASGEAERFYRQLREPALIGMESTGNCRWFVEMASAAGHTVWIGDAARIRASDPRQQKHDRRDAALILQLLLENRFPRIWIPSNEETDLRQLLIHRHKLVGIRVQVKNELQHLAMNHGVTKKRRLWSQAGEKLLRELPLRPWASRRREDLLKVKEMLNEQITLLDGAVSAAAEKNEKARLLMTQPGVGPITALAFVLTMGDVSRFPRGKQVASYLGLIPREYSSGGKQRLGSISKQGNRFLRMLLVEAAQGAVRYDPQMRNEYLHRCHGKAKGVAKVAAARKLAVRLYWMLRTNRGYPEVVRVESSSRVPLVSAS

SEQ ID NO: 393392 - protein, 314 aa, unidentified
MNTNTLQNINVGVDTGKTQLDIYIRPLDIYFNVTNDEKGIKQAVRTIAKYHPERIVIEATGRLEMPFILACEHANLPYVIANPLHIKKFSGALGNKAKNDRLDAALIAHYAEAIKPKLTQLKSENIRLMSDLVTRRNQLLSMQTMEKNRHQILPQSLASSIKPILTALKNQIAKVENRIEKLIETCPDYQAKNEILQSVPGIGKIAAASLISNVPELGYITNKQAASLIGVAPITRKSGSFKGKRMIKGGRMQVRTVLYMAMMSAMQCNPVFKETYQRLLAAGKPKKVALIACVRKMVVILNSMLRDGCMWNGR

SEQ ID NO: 393393 - protein, 399 aa, unidentified
MKKNLPLELRVGVDVGCHSHNVAIGLSTGEILEEFSIAHEPEGFRQFFSRIEKNERNYGCPVAVAMEGYNGYARPLDTMVRTRNYRLFNINNLKLARFKEIFPGAAKTDDIDARKALELFQLRDHLPIAKDVLQEVKATPQENDILKRISRRRRRLVNERVRVLNNLQADLQSVCPGLLEITGEAGNLWFLRFITSTDDLRKLTRLRETTIRKIPGIGAKYTSIILKWQKAAEFSHETEWVSDMIQQDAERVLALHDQIETLETQMAEMAANSNIAQLLTTMPGFGPITTAELAGEIGTIERFESESSLALYLGMSNLDNSSGKHKGSKAPKQVNERAKAAMMIAVDRHRKSVAQSQKYYEKKRAEGKKHNQAVRALGRHLCRVIFKMLKENRGYFLTQ

SEQ ID NO: 393394 - protein, 395 aa, unidentified
MFIVGIDVAKRSHEVCMITSDGQTVQRPFSICNNCTGYNLMLEKIRKHTNIKSQIVFAMESTAHYWLALFTRLRKDGYHVILLNPIQTSAMRDMFIRKIKTDAKDSFIIAELIRFGRYAESNVAQDRLLALKELCRNRFYLVDMAGDLKRKLIALIDRVFPEYEAQFDTIFCKSSVALLKKYPTPQRLSNAHLDKLTELLWNSSNGHFGEWKARELRELARNSFGVEDCDGAYSTLILLMLDQIQSLSGKADALEKEISRLFQSFDTTVTTIPGVGPIIGAVILSEVGDISRFSSADKLAAYIGVDPSVNQSGEFQAAHAHMSKRGSPYLRRCIWMASQVAVQRDPMFRAYYEKKAAEGLKYMTIIGHVTRKMTAVVFAILRDHKVYEPVLPTAA

SEQ ID NO: 393395 - protein, 343 aa, unidentified
MDHFAGLDVSVKDTSICIVDEVGKIVREVKVASEPDALLAVLRNATYRFKRIGLEAGPLLQWLFSALAEADLPVICVETRHMRAVLKAQINKTDRNDARGIAQMMRVGLYRPVHVKTLRSQKLRMLLSHRKLLQSKAIAVDNDLRGTLRNFGLKVGVVGAARFEARIRELVEDLPDLTILVEPLLVVRRVLREQITVLHRRLLAVVRDDEVCRRLMTVPGVGPVVALTYRATVDVAARFRKSKSVGAAFGLTCSRDQSGERDRPGAISRCGDEMMRAMLYEAAQSMLVHSTRWSWLKAWAMTIAKRRGMKRAIVALARRLAVIMHRIWVDGTEFRWTRDAAAA

SEQ ID NO: 393396 - protein, 340 aa, unidentified
MSMNPNSCLGDRARILQGRERTAMSVANEVFVGIDVSKAELEVCWLPQLGRLQVAREEAGLVQLVERLKALGPSLVVLEASGGYEMPVVMALAGASLPCVVVNARQVRDFAKASGKLAKTDRIDAQVIAEFAQAIRPQVRALPDAAAAHLIALVARRRQLVEMLTAEQNRLALSHAAVREDLKQNIAWLKSRLQDLDGELARAVRSSPLWRENDKLMQQVPGVGRVVSAVLLALLPELGRLSPKKIAALVGLCPFNRESGRWNGKRAIFGGRAGVRSVLYMAIVSAIRWNPLIKAFYERLLAAGKPKKLAMTACMRKLLVILNAMMRDRSDWNPNGALAT

SEQ ID NO: 393397 - protein, 358 aa, unidentified
MQRNKISFKGQRIFIGIDVHKRNWDVAIAPSVGNVKRHTQKASSKELFDFLKRHYPDGDYLAVYESGFSGYSTYYALNEVGIECMVIHAADVPTTQYEEVMKTDRIDSVKLVRSLKAGLLRGIYIREKENIDDRSVVRIRKTIQKQLSGYKTRVKHLLYCNGVSFPERFEKPGSHWSMAFVKWLKEDVTLLSSTRNSLDLLIRQVETIRMTLLEATKMVRSLSQTERYKSKFDLLMTVPGIGVTVSMCILTEVYDIRRFHNEKQFAAYLGLIPTCHSSGDKVAHGEKTFRGNKLLGPMIVEAAWISVFKDAGLASLYLRYKERMKPQEAIVRIARKLSNIIFAVLKNEKEYVPYQMGK

SEQ ID NO: 393398 - protein, 432 aa, unidentified
MKAVVERCAGIDVAKNVLNVCVMTGAADLEPEVELGKFGTFNAELNRLRQWLLETGCTHVVMESTGSYWKPVYAALESSGIQVILANGEDVKARRGHKTDWNDCQFLANLLRHGMIRASFIPPQAIRDLRDLTRRRRQLIGDATSERNRVQKVLEEANIKLGSVLSDIFGVSGQLMLEKLLEGEPNMEAIANLAQRKARMKIPEIVQALEGHRLRDHHRRMLRLSLEHMAFLEQQISAIDAEALQLIEREGYQTSFDLLQSIPGVQQISAAALLAETGADMSIFPSEAQFSSWIGVCPGNRMSAGNNKSGAISRGNRWARTALVECAWAAASKKDCHLKERFRKLCVKGRKPALIAVAHSLAVIIHRTLNTGIPYQEPNQPAPDERKRQRLIRHYVRRLGKLGVAVHSLRPESATHHKSSAGTRTHRVHHKE

SEQ ID NO: 393399 - protein, 309 aa, unidentified
MDTTVVGIDVSKDRLDVHALPGGESFAVARDAAGLEALVEQLQPLAPKIVAVEATGGFETVVAASLAAAGLPVVVVNPAQVRAFAQALGQRAKTDPIDAAVIARFVAATDPEVRSLPDAETQALSDLVARRRQIIQMVVAERQREKRAAGRMKKSILRLLKALQKELTEIEADIDDAVRGSPVWREKEDLLASVPGVGPTIARTLLADLPELGTLDRRQIAALVGLAPFTRQSGQWRGRSFIGGGRATVRAAVFMGAMVAMRWNPHLRDFHHRLVAAGKPKMVALIAVARKLVTVLNAILRDRRPWQTA

SEQ ID NO: 393400 - protein, 347 aa, unidentified
MLHAGLDLSRKKVDVCLLSEAGEHLDQLATPPDADALRTLARRIEETHREPVCAVIESMTGARLVHDTLEQEGWNVEIADAQKVKGLAPLACKTDKIDSQVLATLSHRDLVPAIWLPDPRVREERELARFRLHLVKHKSALKNRIHSTLINFGKPCPVTDLFGVEGRELLARLEIPEPWRGNVTASVELIDDLERQIAEINRRLKEGHADHPYIPLLLTAPGIGWILAFTIAAEIGEIERFDSPTKLTGYTGLCPRVNQSGESDRRGPLTKHGPRYLRWAMLEATMHALKHPAYSERYQRNKRRLGKQRGAKVAQIDIARRLTHAIWHMLSRNEKFAPRGAALRQAA

SEQ ID NO: 393401 - protein, 319 aa, unidentified
MTRCICGVDVSSISLEARIGPQGPGGSFANNPEGVAELAAFCQQHGVELVAMEATGGYEKQAFALLWARGVPVALLNPRAVRRFAEGMGLLEKTDRIDAGVIAWFAAVKRVAPSLPASAEQARLQALVRRLQQLTELQTGQRNQRRLVTEGAVLASFTEMLALVAAQIRILEGMIAELIAADPLWQKLDTTFRSIKGVADRTVARLMADLPEIGRISNKAVSKLVGLAPLARDSGKTQGKRPVRGGRRAVRDILFVVASVVRRYDPDFAAFQARLSAAGKPKKVIRIALAHKLLVRLNAKAHQVRQQFGAEPTWITAVG

SEQ ID NO: 393402 - protein, 373 aa, unidentified
MDSSLLSGISVPDWKSSTTSQQKEESTMRIMRIGIDLAKQVFQIHGVDSSEKPVLRRQLTRHQMVKFFSKLTPCLIGMEACASSHYWARRLIGMGHTVKLIAPQFVKPYVKGNKNDANDADAICEALGRPNMRFVAIKTVAQQDIQALHRIRTELVHQRTAKVNQIRGLLGEYGIVVAQRVTSLRKALPEILEDAENGLTGDFKTLLNELRADLVYLDARVAAQDLAMQRLASAHADAKRLQTLRGVGPITATALIAALGDGRMFKRGRDAAAWVGLVPGQHSSGGKDNLLGISKRGNAYLRTLLIHGARSVLKTAKDKDDRLSCWVQSVCHRRNKNIAAVALANKTMRMAWALLTSGADYQPEFGQPDTQPA

SEQ ID NO: 393403 - protein, 345 aa, unidentified
MSLFVGLDVSQRLTHLCVVDADGKRVWRGKCATDPTILAQTIRAQAGSDARVGIETGPLTPWLVHALRAAGVAMICVEARHAHAVMAAAQVNKNDRHDALALAQLVRTGWYRAVHVKSYPAHQLRAVLAARAQLVGMVTRVSNHIRGVMKIFGLVVVGVRGTAFAARVEELVADRPEVQSIVAPMLGTWLHLRSQVAAFDRQLLAVAKTRPACRLLMSIPGVGYVSALAFMGAIDVPERFARSRAVGAHLGLAPKQHQSGEVDRLGEISKCGDAYVRTVLVEAANSLLIRCRKPSPLREWALTLEKRSGPKKARTALARKLAVIMHSVWRSGMPYASALPSDMTL

SEQ ID NO: 393404 - protein, 406 aa, unidentified
MAQGQPDKQSPAVVTKAWRKDVPNTASLPIVAIHFNTTLVLALETSSKNWVLAAHVPGTGQVKAKQVIAPSADALEAAIEGYRRRAAAGGQTVERVILVYEAGYGGFWLARWLKAHGIEVHVIQPSSVAVERKKRRAKSDNIDADLLLRTLLAWLRGEPRVCSMVPIPDETAEDARRPSREREELIRERISLTNRIGAVLTTLGIDGFNPLRKDRRKRLEALRTPFDQPLPEHAKAKIVRSIDRLELVMAQIAALEAQRDAVLEQDAPGAAERMVQALVLLRALGAQTATVLVYEAFVRHFSSGKALGSYAGLTGTPFNSGGAEREQGISKAGNQRLRATMGELAWLWVRYQPESALSKWFRERLGGAKGRMKKILIVALARKLLIALWRYATHGVIPEGAVLKPA

SEQ ID NO: 393405 - protein, 343 aa, unidentified
MHIASIGIDLGKTTFHLVAVGEQGKVVVRKKFSRKQLLAYTANLQSSLIGIEACSGAHFIGAALRSQGHDVRLIPAQFVKPYLKSNKNDFLDAEAIAEAVARQNMRFVPIKTEDQLDLQALHRVRDRLVHRRTAIINQIRGFLLERGITFAKGPANLRNQMPAMLEDAELKISPRLRTLLARVWQEWKQLEIDIADASDEIERISSEDAGCKRLRQIPGIGPLVSTATVAAIGNGAAFRKGRDFAAWLGLVPRQYSTGGKAKLYGISKRGNIYLRRMFIHGARAVLLRVKYDTGGFGQWVHQLEARAPRNKVIVAIANKLARIAWAVLFRAEDYRHMAVCAPA

SEQ ID NO: 393406 - protein, 342 aa, unidentified
MEHYAGIDVSLECSSVCVVDASGKIAREGKVASEPEAVIAYFGSLRLCVVRIGLEAGPLSQWLYAAMKEAGLAVELLETRHVRKALETMPVKSDRNDARGIAQLIRLGWFRPVHCKSIGAQETRAVLTARKLVQSKLLDVENSVRGILRGFGLKVGHTTNRSFAGRVEDLVVNHASLHLIAAALLSVHAVLLRELKAFDKRVRSMARVDVKAKLLMSAPAVGPIVALTYASAIDDPGRFTSSRRVGAHFGLTPKKYQSGETDYTGRISKIGDATVRTALYEAAHIMLIKPIKGCAPLKSWAMRIARRSGMKKAKVALARKLAVILHRMLANATPFNAAMAAA

SEQ ID NO: 393407 - protein, 387 aa, unidentified
MAQVNDLSRSLTAFDPISTLVVVVEMSKASWLVSGVVPGIERQPLKKLESDATALLRLIERWRNEAMRSGRPISRITLAYEAGRDGFWLARWLITRGIEAHVIHSASVAVSRERKRAKTDRLDAAMLMRVFLGWLRGERGHCGMVVIPTMEEEAARRPSRERESLVNERSRITNRMKSALARLGIRGFKPHLRKAPERLAGLRTAEGTGLPANVIEEFRRDMARLALVREQISSIEKTRAERLERAPDTGPHAMVRLLARVIGIGIETADMLVREILSRRLRDRRAVARYAGLTGSPDESGLKRREKGLAKAGNARVRRGLIQLAWRFLMFQKDSALARWYRTRTEGPSGARKTTMIVALARKLLIALWRLVTTGEVPDGVELRPAA

SEQ ID NO: 393408 - protein, 281 aa, unidentified
MTLSYPIVGIDISSTTLDVAELNADGTFKASSFANTKVEARKLARRLAKIGAGLVVVEATGGYELIAMAALAVEEVPVARVNPRQVRHFAKGIGRLAKTDPIDARVLAIFGERARPRVTTLPSKEEARLKALSLRRRQLVDARVAEKNHRGKIVEKDIKASVERVIESLDSEIEMIEEAIAEHIAACEPMRARQQLLESIPCVAAATSGTVLAELPELGQRSTSVLKALVGVAPFNSDSGGMTGQRHIEGGRAPLRQALYMAAQTGYRCNPIPESVTSGFG

SEQ ID NO: 393409 - protein, 348 aa, unidentified
MLHAGLDLSRKRLEYCLLAEDGERVENGAAPPDADGLASFARRVERDHGPVEVHAAIESMNGARFVHDTLERCGWEVEVADAQKVKGLAPLACKTDKIDAWVLAELSRRELVPAIWLPSFELRGERERARWRLFLVRKRSSLKHRVHAQLLTFGHACPVSDLFGHSGRQLLGRLEFPEPWRSGVLAAVGMIEDLDAQIIEIDRELKAAGVDHQYIPLLMTVPGIAWVLGYTVAAEIGDIHRFASPTKLCGYTGLCPKTYQSGAKDRRGHLTHAGPKYLRWALMEAAVHAGQHPLYRERYQRNKRRLGKQRGPKVAQVDIARRLAQAIWHMLTRNQPFAPAGATRALAA

SEQ ID NO: 393410 - protein, 429 aa, unidentified
MDDVDSTRLESFRQLRKEIRGSNEHLIVGIDVAKDNHHAFFGTARGKTLLKRLVFNNNLQGYEKLYTYVEAAKVKNNLNKVVFGLEPTANYHKPLGEHLIKSGFEVVLVAGTAVKRNRELLDGRWDKHDTKDAANVADLVSQGKCLFYEYPIMSLRELRNLLSFKRRLKKQEHGTKVRIRNHLLAQYFPELDPYFPRMSACSLSVVKWCLEPSLIAGLEYEEFLRLVAPGKRTIKQREHVKLIWEKAFESIGCSAGATVQFEAKMMVEELQHVRESILEVEEKIEEICLNFPEYTYLLTMPGFGKDISSKVLGAIGNPFRFDNAKQVVKLSGWDLNANRSGKQSAGATAVISKKGKADLRYALYQAALVASSRNQLFVAYFTEKLRQRSRERGIKTKMRVKLAAKLLVIAWTLMKKQEPFNPEYLKVTL

SEQ ID NO: 393411 - protein, 351 aa, unidentified
MTCKKDVAVVRTIGIDTGKNTLHMIGLNEKGAIVLREKVSRNRIAARLVNIPPCLIGIEAGMATHYMSRDLLALGHEVKQVPPAYAKPFRQGHKNDFRDAHAVAEAVQRPSTRCVPIKTDDQLDLQALHRVRSRLIGDRTAVINQVRGFVLEHGIAVRQGPRSLRQQLPQILATRTDVLSSRMLRIIGDIVDDWRYLDDRIERVTDEIEGLARTDVNCGQLISVPGIGPIIASATVAAVGNGTAFAKGRDFAAWLGLVPKQMSTGDRTILGRITKRGNRYLRMLFVQGARAILLRPKSWAKHSFGPWLTAAARRLHRNILTIALANKLARIALTVLIQGRSYETRIASAAA

SEQ ID NO: 393412 - protein, 399 aa, unidentified
MQTLIERGCGLDVHQATVVACLLIVRKDGKVQKQMRTFGTTTRELVGLREWLLSEGCTHVAMESTGVYWKPIYAILEGALEIVVANAQHIKKVPGRKTDVKDAEWIADLLCHGLLRSSFVPPKPIRELRDLMRYRRKLVESQAAERNRLLKVLETANIKLANVATDVFGMSGRLMLRALIQGKATPQEMAKLAKGLLRKKIPELELALEGKLEEHHAEKDLAVLEQRIRQMLEPYAAQLALLDEIPGVDWTLAAVIIAELGVDMSVFGNVSQLASWAGVCPGNNESAGKRKSSRIPSGNVYLKSGLVEAANAAARSKGTYLRDKFFRLKARRGYKRAVVAIAHKILVAIYHMLSQEVSYNDLGDLYLDKLNKNHLTRNLVHRLERLGYAVTLTLQQKAA

SEQ ID NO: 393413 - protein, 301 aa, unidentified
MEYLGKIDNEATAIRKLCDRLSGRGKKLAFCYEAGPCGYGVQRQLASLGHRCDVVAPSLIPRKSGDRVKTNRRDATMLARLFRAGELTSVWVPDADHEAMRDLVRLRSIARQMLTRARQHLQGFLLRHGRKHGGGTAWRMAYRRWLSSLAFEHPAQQIVFQDYVDAVGDAERRLKRVEGQILALLSDWSLSPIVDALQAMRGIAVINAVVLVAEVGDFTRFANPRQLMAYFGLVPGERSSGQSVHRVGITKTGNNRARRALVEGAWAYRMKARVGPPQGRSHRSLTQGGSRHCLESTASSL

SEQ ID NO: 393414 - protein, 412 aa, unidentified
MDVQYNLAGIDVHKRMLAVVVTNARDTELQFECRRFGTTLSELRHLLAWLQERAVQEVVMESTAQYWRPVWLALEGSCRLHLAQARSNRGPRGRKTDFRDAQRAVSRLLSGDLVLSYVPEVEQRYWRTLTRTKYQLTRDKVRLQSQLESLLEECQIKLSSLVSDLLGASGLRILRALAQGETDPARLAELGDKRLRASDAELKDALSGVPQRIHRQLLSLYLARFDLIESHMENLDGMIAEEMKAHQHAIVRLAELPGLGIDSAQQIIAEIGPKAAAFPSAAQLASWVGVCPGRQESAGVSSSDRSAKGNRSMRRLLNQLAHAAVRKEDCQLQIVFRRLSSRLGYAKAVWAIAHRLCRLIWKVLHEGVSYVEYGPTPTPLALKRRRQRLVTQLKKLGYQVQLLPITLDRSGV

SEQ ID NO: 393415 - protein, 346 aa, unidentified
MQPVIGCDAHKHFSVFVSVDQHGRPSRPVRVDHDRDLYCKYLRTLPSGSEIALEATGHWYWIVDAMEQAGHHPHLANPFEAKRRMAKSNKTDALDAKGLAILLRCGTLPESWIPPGELRDQRELLRTRMALRDLRTSLKHRIHAGIDRYGLQADAISDLFGTKGRAYLASILKALPTETAQMIALQLNSIDQLEEKIEAIERRIAETLKTSLEMRLLRTVPGLGPILAPLVWLEIGDVERFPRAEHLASYAGLVPRIIASGGHIRHGSTCRNVNHYLKWAFVEAANCAIRIKAHRQNHIGLLYHRLYPNKGHGRAVVAVARHLAEASYWVLRKRQAYRAPQPRING

SEQ ID NO: 393416 - protein, 351 aa, unidentified
MTQQTTAETIATIGIDLGKNTFHLIGMDARGKIVLRRKIARGQLQSCLANVPVCLIGLEACTGAHHVGRQLAALGHDVRLLPAQYVKPFLKGHKNDYRDAEAIPEAAQRPTMRPVPLKSAEQLDLQALHRVRSRRIGQRTAVINQIRGFLLECGIAVRQGPAGLREALPTLLAHRTDVLSPRMIHLIEELAEDWRQLDERIAVLTRDIAALAGQDAGCRRLMGIPGVGVITASAMVAAVGTGAAFTKGRDFAAWLGLVPKQISTGDRTILGGLSKRGNRYLRTLFVSGAQTLLRDPGRWQNHGFGRWVMTALARLPRNVLAAALANKLARMAWSVLFRGCGYEAEFATRAA

SEQ ID NO: 393417 - protein, 411 aa, unidentified
MEVINKRCCGLDVHKERVVACLMIREGGKVLKEVRTFLTMTLDLVVLSDWLKAHGVTHVAMESTGIYWRPVFNLLEDDFTVLLVNAAHIKTVPGRKTDVKDCEWIADLLSHGLLRGSFIPPEPIRDLRDLTRYRKSLTDERVREVNRLQKFLEAANIKLSSVATNVMGASGRAMLEALTAGNTDPQVLSELAKGRLRKKLPELKKALEGRFRSHHRFMVVEILTHLDFLDEAIERVSQEVSSRLAPFSKKVELMDLIPGINQRVAEGVLSEMGMDMSCFPTDGHAASWAGLCPGNNESAGKRKSGRTRKGDRWLRRYLIEAAWGATRQKGSYLSALYYRLVVRRGRKKAIVAVAHKILIILYHVLKDQASYRELGPDYFNKLNAVHVQRHHVKRLESLGFKVILEPLCEAA

SEQ ID NO: 393418 - protein, 320 aa, unidentified
MPKEEVFAGIDVSKRTLDVAIDPSGDQWTSSNDDSGIKDVVRRLRKLTLALVVIEPTGGFQNHLVAALVASSMPVVVVNPRHIRNFARATGRLAKTDAIDARIMASFAATVRPEPRPLPDAQAQEFGAILARRRQLMEMQTAEKNRLLHAEKTVSERIGAHITWLEEELKTIDQELGRAIRNSPVWREKENLIRSVPGVGPVLSVTLLAQLPELGMLNRKQIAALVGVAPLNRDSGTLRGKRSIWGGRAPVRAVLYMATLAATRCNPLIREFYKRLCTAGKAKKVALTACMRKLLTILNAILKQRTPWRYADPSIIGPCS

SEQ ID NO: 393419 - protein, 318 aa, unidentified
MESIEALYVGIDVAKAKLDVALDADGDVFEITNDLSGLTQLIDRLKTQSVALVALEASGGYETLAVATLGAAGFPVALVNPRQVRDFARSTGRLAKTDAIDAKLLARFAVTIKPRVTALAETGRAELTELLGRRNQLVGMQVAERQRLAQARSKRVRKDVQGMIDFIAKRLDKAEDDLGKFIAARPEWQVNDDLMRSVPGVGPATSRVLLGRLPELGELTTKTIAALVGIAPINRDSGSFRGKRTIAGGRADVRTALYMATFSAIRCNPVIRTFYQHLRAQGKPFKVAMVACMRKLLVILNAIMKSRTPWQHVPAHAA

SEQ ID NO: 393420 - protein, 344 aa, unidentified
MSYSNVIAIDLAKHVFQVCKASHDGTVIYNRTCSRQKLKELLVKEKTALVAMESCGGTHYWARFAREQGHEVKAIAARIVKPFRQGQKTDANDAIAISVAARQPHIHSSRLLSIADQCQQSIVRARDLLINQKVKTSNHIRSLMLELGIAITKGDKALKQAIPEILEDAENDLTTGFRMTLNVMYKHFQILLDEIETVSRQLNQEVAQDGICQRLKALEGVGPICAIQLKIALDPAHYTKGREASACIGLTPVQHSSGGKQKLGSISKRSTHNALRSALFQGALAVVVNVEKREARTHKDAWLKALIARGGKKLAAIALANKTVRTAFAMIKHNQEYQPQLLVA

SEQ ID NO: 393421 - protein, 338 aa, unidentified
MEVINIQYYAGLDIHKKSCQAIICTEKGDTVKQGRIPTEKEKIQGFFSGYERITIAIEACNTWEHIFDTLEMDGHQVVLAHPLKTRIIAEARVKTDKVDAKILMHLLRTGLLPTSYIPNKEIRDLRNLVRRRIFLGRYTARLKNKIYAELLRHGIKYERGPTLFKRRGRQWLRSLNIPSVDSYLILYESALEVIKSLELELKKHGRQYEEVRLLTTIPGIGIYSALIILSEIGDINRFTGEEKLYSYAGVIPSVHQSGEQIYHGHITKQGSKHLRWILIEVVRIHLIWTKRHDSETNISRFYHRLCKKKPGNVAATAAARKLLQIIYHMLKNKDEFRG

SEQ ID NO: 393422 - protein, 376 aa, unidentified
MGAEPEVGMSSAHANSSGKDPTETEVRALMKVLIGVDPHKASVAIAVVDEAMGELVERASFPQNRAGLRALERWAKQFSERRWAVENAGGLGRHLAGRLAAAGESVVDVPPKLSARVRVLSTGNARKNDGVDALATALAASRNERLAQVDPEAASEVLRLLSERREDLVAERTRALNRLHGLLRDLVPGGIAGTLSADRAARILRGIRPQEGSSSRVRRRLASEVLRDVRTLDRKIADLNERIEAEVQASGTTLTQIFGIGPILAARIIGTVGNVKRFPTKAHFASYSGTAPVEASSGEVVRHRLSLAGNRKLNYALHMIAICQARSDARGESYYRKKIAEGKSRREALRCLKRRISDAVFRSLMADSRAPSRDAA

SEQ ID NO: 393423 - protein, 327 aa, unidentified
MVKEHWCGLDWADRSHAVCVVDETGGIRARFEVDNAAKSFSGLVRRLVKLQVAGVAIERPDGPMVEALMEAGLTVYVVAPAMLKAVRSRYGASGAKSDPGDAFCLADFLRTDRHRLRAVVPDAPATKGLRAVTRTRKDLVDARIALTNQLLAQLQLCFPGAIGLFEDLHSPIALAFLRRYPTAARAARLTEARLGAFLKRVHYPGGTQASELLRRIREAPAPALQAEEDQARAVCVTSLLEAIASCAGQAKQLERGVVHRLEAHPDAGIFTSLPRAGRGVRAASLLSEIGDVRQRFPEAESLMALAGASPVTRASGKHRSVGFRWCL

SEQ ID NO: 393424 - protein, 323 aa, unidentified
MAKRTTICAGIDTGKRKLDVALDGSSEQLQVDNTAEGHKALLDWLRRRRVKRIGIEASGGYEQAVVAEMRRKGFVVVVFQPAQVRAFAKFHQQRAKNDKIDAALIATCTAAVKKIHAAPDARLLPFAEQLTMIDQIGEDIARLKNRIETCRNPRIQHVWEEDIVRLEERERIEFKALVRAICEHRDLSERLDLIHSVDGVGLPTAVAVLVRLPEIGQLTREQVAALAGLAPYDDDSGEQVGARHIDGGRKRLRRALYAAALPASFRWNPQLIALYKRLMAAGKKHKRALIACARKLLIFVNTVVARGIPWQHARPPIAAMPGG

SEQ ID NO: 393425 - protein, 280 aa, unidentified
MSVRRILAKTIDTDLEYEAIGIDLAKNCVSAALLTTDGEVVCIDRLDYSELEKSAQALSPTTFAMEPCTEMNYLVQKLEAWGHRCLVIGGKNVQNYVENHYSGQKTDLNDAQALAFLAQDKQLRTIKAKDIEQQKYASLTTLREQYIKQYRQTIVSLKGICQAWGLNISKGISGKAQLKDLIENHAAFPEELRESLVDMVTHAQTTQKVLNKITKTLEVLAKNDKVCQLIQTIPGLGTICSCRLRATIGDIKRFKNPKDFPAYYGLVPRSIATGDRHRAQ

SEQ ID NO: 393426 - protein, 380 aa, unidentified
MNRIIKIGMDVHTSNYTLCIFEPSFEHDGTVHCITQVKPEIKKIIHVIETFKKKHENEELNIVCGYEAGCLGYSLYHELKEKGIECVILAPTTMKTEKGGRKLKNDYRDAKMIAECLAYGGYSAVHIPTELDNSVKEFIRMRDDIKENLKSIKQQIIAFLTRNGKQFEGKSFWTRKHIDWINTVSFSEPLLQDTLKEYMIEYNHLCNRIETLDRQIEEISLKEEYVEKVQQLQWLIGIKTHTALSLIVETSDFNRFKKGNMYSAYLGLIPGDDSSRGHVNKLGITKAGNNHLRKLLVEAAQGYTRGRVGFKSKDLKARQEKCSSEVVAYADKANERLRRKYYRMILRGKKYNVAKTAIARELACFIWGIMTDHIDLCSWL

SEQ ID NO: 393427 - protein, 526 aa, unidentified
MVAKSKIRKTKGTKKRFIGKPSGQIQERVQAVGAGRFGILSVDCAKCRSKWMLCDFYGRVLIEPTTVEHTLGALRAMTLAASEAKQSEGLADLVVAVEMTGVYHKPVFQAFRKAGFDTRVVHPFASNHFRRALHPDTKTDDHDLEAIFQAAVRGFGLAHFPCDEVYLWLQAASRHRHNLVKQRSRLMVQMRHLLHQTMPGFADLFDEGTLFQGSIAIPIALQFSSAEAIRRAGVSEMGRYLRENNIRFQNRTIERLVAWAGTAGEPTELAAIYTQQWQQLNTLRRMFDEQIDTAEREMARFLAKTPYVLLLSITGINVVSAARLAGEAGPIEHYASARALNGRAGLYPSRYQSDEVDYADGTLVRQCNRRLRGAAMLVAENLIKCHPYYRGLSALWKQQKVDPRDRHCRIANRAMRMIYQLVGGRQVWRGKGVDREYVLAKLQEFHRLHATPLDQTIRDLEAAYAWLPKSTYAEEAQPLAQLVRTKHRGPQNIGELMIPLLIRLGVSIDEHDGELESNTSEARSSD

SEQ ID NO: 393428 - protein, 449 aa, unidentified
MAKKKRKYRKLERSLPVMRPNAGGIDIGATEIFVAVPADRDTESVRSFPTFTQDLHALADWLQQCRVDTVAMESTGVYWIPLFQILEARGIEVHLVNAQHVHHVPGRKSDVLDCQWLQYLHSVGLLRASFRPEHAVCEIRSLMRHRENLVQMACVHVQHMQKSLDQMNLQIHHVISDITGVTGLAIVDAIVAGNTNPKELAKLRDHRIKASIETVTKSLVGDYRPEHIFTLKQSLTAYRHYQKLIADCDQEVQQRVEAFQSNDDGPTAAADSSSATSPTAPSFDLHSHLERIFGVDLTAIPGFDVLRIQTIFSELGADMSPFPTDDTFCSWLNVCPKDGTSAGRRIRAPKVKTKNRVTQAFRMAALSLHNNKSYLGDYYRSQRARHGALKATKNAAHKLARIFYHLVKTRQPYDETVFAKLEARNQKHRLHKLQTLARQMGYSLVQANA

SEQ ID NO: 393429 - protein, 356 aa, unidentified
MSMLADQVDYVIGVDTHRDTNTAAVVTAAGTVLAHQQCSTDAMGYRRVVAFADEHAPGRRVWAIEGTGSFGSGLTTHLLERGEWVVEIDRPARPARRNGAKTDDLDAGRAAREALTRDHLAAPRARGDREAMRVMLAARQGAVVARTKAIGQLKALIINAPEALREQLRRGTTDQQLDRCSRLRTLPSHSVEHRATVRAIRAVARRALFLEAEAAEHESELEQLVTAACPELLDKPGVGAITAAQFLVSWSHSGRIRNEAAFATLGGVAPIPASSGQTVRHRLNRSGDRQLNRALHTVALSRLQHHDQTKAYAARRTAEGKTRRDIKRCLKRAIAREIYRLLEAHAKAEKKINQAA

SEQ ID NO: 393430 - protein, 338 aa, unidentified
MDHYVGIDLHSTNNYIAIIDHDNKRVFKKKTKNDLRLVVEALKPYQEQIKGVVVESTYNWYWLVDGLIEEGYTIHLANPSAIKQYEGLKHSDDVTDAFHLADLLRLGILRTGYIYPKEERPVRDLLRKRLQLVQQRTLQILSFQNLVARNLGKSMNGNAVKKLSEDDVEHLFHDKHLVVSGKASISTILFLTEKIKQLEKTIHKVAKLKDEYTLLMTVPGIQKILALTIMYETGPIERFRKVGNYASYCRCVGSKRISNAKVKGKGNRRNGNKHLSRAYVEAAHHAMWHYEYVQRYYQKKMVKTNTLVARKTIAHKLARACYYIIRDQTVFDPKRVFV

SEQ ID NO: 393431 - protein, 412 aa, unidentified
MDVFVERCAGLDVHRDSVMATVRLPGARRRQRERHTRAFGTTIAQLEVLSAWLAGFGVTLVGMEATGIYWQPVFHVLEPRFECWLLNAQHLHNVPGRKSDVIDSAWICELVEHGLVRPSFVPPPEIRRLRELTRLRKAEIQERTRTIQRLEKLLQSVGIKPTSVASQAYSISARAMLEALLAGTSDPNQLAELARGPMRAKIPQPREALANRFDIRHHGVLVSQLLAHVDALDQAIATLDERIALYTEPYAELVELLSTIPGVKQRTAQVLIAECGTDMSVFPTVRHFASWARICPGNNKSAGKNRSGKTLRGSRWLREALTEAAKAAARTKGTYLASHYWQIRGRRGEPKAIGATRHDILVAYYHIVRDRVPFRELGPDWLARRYSPEHRARRLVRQLEALGLEVTLKAAA

SEQ ID NO: 393432 - protein, 317 aa, unidentified
MDVETKADRFVGIDVSKARVDVHVRPDGIAFGCATDPEGLGALGARLKPLLPCLVVLEASGGYEGAVAAALVEAGLPVAIVNPRQVRKFAGAIGQLAKTDAIDAAVIAHFAQAVRPPARPLPDDLSVRLAELMARRRQLVVMINAEKQRLAKARDPIAQSSFKAVLKRLQAERARIDKAIDRLIAVSPLWCAKQDLLKSVPGIGDVVARTLIAELPELGRVDRHQIAALAGVAPINRDSGRYRGKRKIQGGRVEVRAPLYMACLVAIQHNPVLKSFYRRLREAGKPARLALVAAMRKLLILLNAILRDQRPWAHAQT

SEQ ID NO: 393433 - protein, 487 aa, unidentified
MRSIFRKRNPDVEGLFRDAGSASKVMCVAFDYAKKSHTCAVCNGEGQQLRAAFDVHNDREGLEYLVGVVTGLRRKHRIRHEHVFFGGEDCGSYAFNFIHSLVSRGFLVVGFNARIASHERENSKASTDLIDTVGVAGMMIKMRGRTIGEAVGTIHGMKRLRRQRGALLKAHSASAHRTHRIVDELFPGFLTYELSGITAFSRASMWLMDDRFSPERIHSRRTPHLIRKLREFTIHDPEGVALKLKDLAGKALPPAAGMIPSLQRSLRDELALYRHLEQSLHGLDADIARLLARTPGALLTTIPGIGLRWAPGLYSELADPLRRRNVHSMAALGGIVPRLKQSGGPDSPAVVGHRSAKGSAFLKNILMGSAVSISQYGHPELKDAYRHDKQMGRDARGRLAQHILRVALYIIDHQTFYLPPSLHSGGSMNAIRDYYQSAWRKVLVKWRDSGAILDAIAEGAPLRQWRDMAQELYGIELDLRSPQTGRK

SEQ ID NO: 393434 - protein, 336 aa, unidentified
MFQLGIDVSKKTLDLCLLREGVKGRVKTRKLQNDINAVSAVIAWLSKQHCKPEDVHIIMEATGVYHESLAYGLHKAGGRISLANPHRAREFARGMGMLTKNDRVDAYMLACYGVLKAPEPWLPPPEEVRHLSALLRRRDALVADSTREKNRLEKYLATDTPSVIAESVEAMIGQLNAEIKRLDRLIRPHLNQHPELKKDFDLLTSIKSVGYQLGLNMLVILRSHDFATAEQVAAFLGVVPVEKYSGTSVRGCPKLSKIGPPEIRAKLYLASLCGLRFNPLMKAMYERLCLRGKGKMCAIGALMRKLVHWCYGVLKTQKPFDVGYLPSYARSACKAA

SEQ ID NO: 393435 - protein, 409 aa, unidentified
MVVGIDIGSTTQYARAFDWRGIELGKVFPFSNSREGFESFKAWMQHLQDKYKKLDAIVGIEPTGHYWFDLGAYLEDEGILLVMVNPYAVKQTKELDDNSQSKNDRKDPKVIAKLVTEGRYSAPYTPDGVYADLRIMVANRKRLIREMTKIKNRFARWFAIYFPEYTDVFGDYEAQSSMLLLKKVCTPEAIVELGAEKINQIWRDAKLRAVGMKRATTLCETAKRSIGLKKGSSAAQYEMKLLLEDYEYKKAQLDAVMEEIEKLCRKIPESEQMLAIKGIGVITVAGFLAEVGDVRRFESPRQIQKLAGLSLRENSSGKHKGQTTISKRGRSNLRAVLFNAAIPLIATNPEFKSLHEYYTTRANNPLKKKQSVIAISCKLIRVFYAILANGVTYDAQKMLSDIHRQPQAA

SEQ ID NO: 393436 - protein, 358 aa, unidentified
MAQALYPVVGVDIGKDTMHVVALDQSGAIAHKQRCTRATVLTRLLQLDADLIAMEACPGAHHLGRCLSEQGRAVHLLVAADVRAFVRGHKNDYNDAQAIAEAAVRPTVRTVPIKSIEQQDVQMLHRLRARLVRQRTALINQARALLLEAGIPIAQGRKTIARKLPELLARDDVALSSCRREMLTQCLNGWRQAQAEAEQIEAQLSQVARSDERCQRLLAVPGVGPLTATALVAAVGNASEFRSGRDLAAWLGLVPRQHSTGGVPRLLGISKRGNTYVRWLLCHGGRSVREHLKRDQHPWGPWITALEARMHPNKATVAVAAKLARVCWTILRKGQTYQPRAGQANNSTNNRFCGAHAG

SEQ ID NO: 393437 - protein, 411 aa, unidentified
MQEATQHDAVDVFVDVDVDVGVDVGKGQHHAVALDRNGKRLYNKALPNDEVKLRALIAELKTHRRLLFVVDQPSTIGALPVAVARAEGVLVAYLPGLAMRRIADLHAGEAKTDARDAAIIAEAARSMPHTLRSLRLADEQLAELTMLRGFDDDLAAQLTQTSNRIRGLLTQIHPALERVLGPRLDHPAVLDLLERYPSPSALAAANEKTLANRLTKLAPRMGKNWAAEIVQALNEQAGIVPGTQAAAIVMPRLAQQLAALRKQRDEIAAEVERLVLAHPFWPVLTSMPGVGVRTAARLLTEAAQKAFATAAHLAAYAGLAPVTRRSGSSIRGEHPSRRCNKVLKRALFLSAFAALRDPVSRAYYSCKIQQGKRHNQALIALARRRCDVLFAMLRDGTIYPTIYPPKSAPDA

SEQ ID NO: 393438 - protein, 387 aa, unidentified
MIYIGVDIAKVNHFAAVVNHSTGEVLVKPFAFKNNSEGFKQLLNIIPNVPKDQLLVGMEATGHYMNALIRFLLNHQIPMTLINPIQTDAIRNSGIRKTKTDKGDTFLIIQALSLLNPRLFTERDWELLELKLLCRHRFHLVQSQSSLKRQLIGCLDQVFPEYATFFSSGPHILTSYELLKRYSTPVEILKASKSTLNHLLMKASKSHFKADKVDQLRALAKSSIGVSLAVLSIQIKQVIAQIEFIDKQIMDLNHQIKQMMDTLHSPICTIPGISYTLGSIILSEIGDISRFSDPSKLLAFAGLDPSVSQSGKFEAKSGRVSKRGSKFLRWAILRASFLISFNNDTFNQYYTKKIQAGKTHSCALGHVSHKLIRILFKILSDNIAFDL

SEQ ID NO: 393439 - protein, 421 aa, unidentified
MRRKAYGALRVNHVDAEALLRQRPGHDVVVGTDIGKFEMQVICRWPDGAHDRPWRVQNPGQLPELIGLLQRLGQGRRLVVGMEPSGTYGDALRQALYDAQVEVRRVSPKASHDYAEIFDGVPSQHDGKDAAVVAELVAMGKAKVWPYEPAAAWEQELHYWVAGLEAQRRILSMWLGRLEALLARHWPEANQLMKVSSATLLHAVSHYGSPALLAADPEAAARLQRWGGRYLSAAKVQALLRSAQTTVGVRAGEWPSRQLRDYARQARAARQEFRHGQRQLRRLAEGNEVLQAQGRAVGVPTACVLWVSTGDPRKFSSGPAYRKAMGLNLVEESSGVYEGRLRISKRGSPRSRQWLYFAALRTIRQAGVQSWYQAKKARDHHQAKRALVAVMRKLSLALYHVAHGATFDAARLFRAVACAKT

SEQ ID NO: 393440 - protein, 409 aa, unidentified
MAMLDVALDPATVVVAVDPGKVMNRVWVSNGDGLLEQPVSLPVARAGIAALERMLAAHSGERVIAIEATGSLHRAWAAELERLYPGALRLFAPSETKAARTQLGSARFKTDDRDCAALTYLARQGAGRRQVEESVVDTLRAAVRHRRGLVDDRKKAQQRLHDQLNGLCPGLSAPAGHGRELPIETPTGQAVLACAAAFAGRPPTMRSLIARAPGRLTKTNAEYWVQRWRGCLPPPPDAEQRAQRLGRDLARFRALQIDIAAIEEEMKAWLAATDGQILTSLPGVAVLRAAAFAAHTLPIARFPDAEHLYSATGLAPALYESASLRKRSRISRQGLAEHRDALMGIAWGLSLFSPSFAERDAELRARGMAPIQARVALARNACRLAYRLLVTQQPFDEEAYRRGRLRRGR

SEQ ID NO: 393441 - protein, 412 aa, unidentified
MQVVHPVCCGIDVHAKMLVACLILANGEKKKRTFSTMTAELLQLRDWLVAAQCTHVAMESTGVYWKPVFNILEDALTVILINPEHAHALRGRKTDVKDAEWLADLLRHGLLQPSFIPPPVIRELRELTRYRESVVREQSAVANRIQKLLESGNLKLGQVASDALGVSGRMILKALAKGESDPRKLAALARGKLKEKSLALEQALHGRLTVNQRFVLGELLSRWEQLEAADARVTSEIDKYVQANPKLARARELLDGIPGIGPRVAEVIMAEIGIEMASVFADAAHLASWAGICPGNKATGGKRLSGRTRKGNTYLRSALVQAAWGASLKKHCYLSSQFHRLVKRLGRKKALVAVGHSLLVIIFHVLQNDQTYTELGGDYFDRRHVEQQRDYYVRRLQMLGLKVTLEELPQAA

SEQ ID NO: 393442 - protein, 422 aa, unidentified
MSKKRNKVCGIDVHKRFLVASILDNEGNCETKRFEQDLDELISLKNWILDSGCESVAMESTAEYWRPAYGILNPEINITIGNAYHMKGIPGKKTDVLDSQWIAELELNNLITPSRVFTGDLYELRALTRARNKMVNNCTVFKNKILHQLDVCSIRLCTVLKDVFGKSGYALLKGIVERKTQDEIIKALPAKTRKIAPVFFEQIPEYIPDSAIFLIDSMLKIYDNLQVEIKRIEERIKFYLKDKENELRILMSVPGIGIVIGSNLLAEIGDIRDFPTADKLAKWAGLTPSVYQSANTNYTGPITKQGSKYLRWALIEAAHSAIRRPGKLNDYFNGLLPRKGYKKAIVAVARKILRIVWHLLINNEIFEDGIPRVKTVKIPKFPEKIERVGIAKIIQLLSRGAEIIVQEEGKEIMRINGSSQPT

SEQ ID NO: 393443 - protein, 424 aa, unidentified
MNRSEFKATIGLDWADRKHDIWIRPADGSKPLHRRVEHSPEALHAWVAELRARFPEGRVALGIETSRGPVISLLLAYDFIVIFPINPKAMKSYRDCFAVSGAKSDRPDAFLIEEYIRLHGEKLKPLQPDDTLTRKIGGWSEVRRQLVDERTALINQLQARLKTYYPLAVELLGGQFNTVMAAEFVTLWPDLESLQAADQEKVRSFFYKHNSRSKKKMEERLLAIKDARALTKDAAIIEPGRDLVRALAGLLKSLHKSVEQLEGKIERAMDEHPDAPIFRSFPGAGPNLAPRLLAAFGTQRDRFQSADEVSQFYGIAPVVIQSGNSRVTRLRRRCPKFGRQTFHENAACAAKSAKSQDWAKPYYEACRKRHEDKHHHTCRSLAYKLIRIYFACWKNKTEYRQQTYLQALEKSGSPYLVKAAAAGK

SEQ ID NO: 393444 - protein, 416 aa, unidentified
MKYAQILVLAETPPGGLTAGIDWGSADHAVCVVDTAGQVRARFTVAHDRAGIGKLIAGLRAAGVSEAAIERSDGVLVEALLEAGLTVVVVTSRQMRNLRSRYGSAGAKDDRFDAFVLADALRTDRARLRPLVVDTPATAALRAAVRARRDLVAHRIAACNQLRAHLAVAFPGAVGLFASLDSPISLAFLARFGSHDAAGQLTEDDLAAWLHTVPHRGKAARPGQLRARLQAAPRGATGPDGAALVPVTGALVATLATVSAQVQALEAEIAVQLAAHPDAHIFTCLPRAGTVRAARLLAEIGDCRARFPDPESLAGLAGVAPVTRRSGKHISIGFRWAVNRQLRDAVCDFAGDSRHASPWAAAIYDAARARGKDHPHAVRITARAWTYVIWRCWQSGAAYDPAKHAALQRVLEQRKS

SEQ ID NO: 393445 - protein, 317 aa, unidentified
MTYTSRFVGIDISKSSFDVCVLPEERFANFANDAAGIARFVTFLAQWEGVERLVLEPTGGYERGVVEGLLAVGLPVAKVNAKQIRQFARACGRLSKTDRIDAFVLADYARRMDTKVLEPSSPAHAMLIDLVSRYRQLSHMIVQEKNRREKLVNQDNARTRAWIEQTLAFLQQQRQAVVDAMAACLTSDEHLALKAEVLMPLKGIGLRTACFLLAGLPELGQMNKGQIAKLVGVAPINRDSGQMRGKRMISGGRKPIRDALYIAALPAIRFDPNMKAVFQRLKAKGKPGKVALVAIMRKMIVILNARMRDHRATALDC

SEQ ID NO: 393446 - protein, 352 aa, unidentified
MKTETTALVPKLYIGIDVHKKSWTFHYQTDLFDGKTITQPVNPNTLIEWVQKHYPSHEVTCAYEAGFSGYSAARLFQKQNWNVLVLNAADIPKPQKQNVVKTDQIDCRNICKQLKNDALNSITIPEEQRESFRSLFSERNNLVEGLRNVKLQIKSHLMYYGIVIPEEFDNPNWSKNFIEWIQTQKMSYETGTEKINFLLKRFNFMHYELLNISNQLRAYARKHYKKDYYLLMSVPGIGGIVAVSILAELGDLRKYNRFDDLASSVGFVPGIYSSGDTTIVSGITPRAKGLLRSYIIEASWQAVRFDPVLQEYYRSHYGKKPNKIIVKVARKLLSRIHAVIKTETPYQIGVIK

SEQ ID NO: 393447 - protein, 315 aa, unidentified
MTTRSGGFVGIDVAKEKLDLAVLGETQASQTTNDQVGILPLVAQMQERQPELIVVEATGGYQRALVLSLYEAGLPVAVVNPQRVRQYARACGKLAKTDKIDAFMLAEFGKHVQPRRFEAQSEAGRYLEALLVRRKQLEEMLKAEKNRLRSVHETLRASLENIIGFLKAELKQIDGKVRQFMDEHADFKEQEELLRSAPAVGVVTAATLLAELPELGKLDRKQIAALVGVAPMNSDSGKKRGYRKTKGGRAEVRSVLYMATLVGMRYNPVIKAQYEHLVVRGKLKKVALTACMRKFLTILNAMMRDQQPFRAGLAS

SEQ ID NO: 393448 - protein, 452 aa, unidentified
MPPKPERKGTWSATTYILQPNAAGVDIGATEIYIAVPPDRDSQPVRSFRTFTAELNAAAEWLKQCRIETVAMESTGVYWIPFFQILEAAGFKVFLVNARQVKNVPGRKSDVADCQWLQYLHSVGLLRASFRPKQAVCAVRSILRHRESLIQIATIHVQHMQKALDQMNLQLHHVISDITGVSGIAIIEAILNGERDPVVLSKMCDKRIKASRQTIAAALVGDYRREHLFTLRQSLHAYRQCQELIGACDREIEQHLAAFDSKVDLHATPLPKPKDRHRPRRNQMKFDLRAHMYRVYGIDLTAVPGIDALTAHVLFAEIGPDLSQFTSAAAFVSWLGLCPDNRISGGKLLSVKTRVVRSRVAKALRMAAQSLHRSQSYLGSYYRRMRTRLGTPKAITAAAHKLARVIYHLLTTRQSYEESVFARCEALHQQRLENRIRRQARDLGFDLVRSPS

SEQ ID NO: 393449 - protein, 344 aa, unidentified
MEYFAGIDVSLRSSALCIVDGKGKVLLERELPCEISDITECLKTFPYPIERVGFEAGTLSQHLFFGLTAEGFDVVCMEARQVNAALSAMRNKTDKNDARGIAQVLRTGWFSPVHMKSREAHGVRALLSTRKALLKKTMDLANEVRGLLKIFGIRLPMTVKHGSFDGVVRPLIEMDEVLAHALVPLLDARVVLYQHFWELDRRVKRAASQDEVCMRMMTVPGVGPIASLTFKAAVDDPTRFKRSRTVGAHFGLTPRRYQSGEHDNPGRISKAGDRDVRATLYAAANALLMRTMAGSQIKSWGMRLMRTKGRRRAVVAVARKLAVLLHRMWTDGTEFRQENLGDMA

SEQ ID NO: 393450 - protein, 410 aa, unidentified
MEVLYPVCCALDVHQASVTACLRAPGDGPQRRQQVRTFGTTTPELLRLAGWLTAAGCTHVAMESTGIYWRPVYNILEGSFELSVVNAQHVKMVPGRKTDVRDSEWLAQLLELGLLRRSFVPPAAQRELRDLVRYRKRLIEERAREANRVQKVLETANIKLASVVTTVLGVSARAMLKALIAGEQAPEQLADLAKRRLRRKRAALGEALTGRVTAHHRFLLDHLLRHIEFLDGAIAACDRQVETLTAPHAEALTQLDTIPGVARRTAEVIAAELGCDMTRFPTAGHAASWTGLCPGNHESAGKRLSGRTRFANRTLRQALVESARGAVRKRDSYLAAQYRRLVKRRGDKKAIVAVAHSILVIAYHVLRDGQPYRELGSDYFERLNADRLTRYHTKRLAALGYTVTLTKCAA

SEQ ID NO: 393451 - protein, 400 aa, unidentified
MNPVIGLDVSKGESHAQAFADRGTPYGKIFRFKHDLEGLASFLRFAQDLESFTGKRATVVLEATGHYHSSVVQFLEEHQYLHIVINPLLSHQAKKSNLRKVKTDAADAYQLGEMYYKEELEPYKKRGQYLMNLRYLTRQHESLTDMYVQAKLQFQAVLDQVFPEYHGVFGDLYSKVSLRFLALYPTSQAVLAMSEKDVMANIQRLAGHVNPSCWSQKSAQKLMAAAERNPFKETAFPSHLISMELLINSLLQYQEHLAKLDKSIEALAEELMEFDLIQSIPGIGTKIAATILAEIGEIDRFDHAKKLIAFAGIDPSVFSSGKFTASRNSITKRGSRRLRTALYQAVRCGLRSSRNKKLRAFYDKKRAEGKLFKVAVIACANKLIHWIYAILTKKEPFRLD

SEQ ID NO: 393452 - protein, 342 aa, unidentified
MQNDTRIAVDLAKAVFEIAVSDRPGRVGRRERLPRAQFLNFFAQRPAATVVMEACGSAHYWGRRIEGLGHRVVLLPPYHVRPYVRRNKTDRTDAKGILEASRNEDIHPVPVKTVSQQVLTSLHRLRSGWMSERTARINCLRGLLRELGVFIPTGARQVVPAVWALVEEADADVPDTLRPFLAELCQEIREIEARVDRVERQLQAMSQQLPVVAQLLTIPGVGLLTATALLAFIGDIRRFPSARHLASYLGLTPREYSSGLRRRLGGISKRGDGYLRTLLVHGARSVLLRARTLQPDRLREWAHQIAKTHVHNKAAVAVANKMARVVWAVWTHAKPYQSQLTA

SEQ ID NO: 393453 - protein, 388 aa, unidentified
MHQSNDLSRSFTTLNQDNTLIVVIEMSLSSWLVAGMVPGVERQPLKKLEPDEDQLLKLMNRWRHEALQAGHAIERVVVAYEAGRDGFWLARWLRERGVEAYVMHPSSVAVSREHRRAKTDRLDTQLLMRAFLGWLRGERRHCSMAAIPTIEEEDAKRPNREHEKLVGDRTRIVNRMKSTLARIGIRGFKPTLRKAEEKLSELHTAEGTLLPENTREELRRDMARLRVLREQIKEIEQQRLSKLKAVAQAKEGPHAMVLLIARVVGVGIETADMLVNEILSRRLRDKKAVARYAGLTGSPDESGKRRREKGLSRSGNARVRRGMIQLAWRFLRFQKDSVLAQWFQARAADGRSGTRKAMIVALARKLIIALWRLTTTGEVPAGVILRAA

SEQ ID NO: 393454 - protein, 392 aa, unidentified
MTDKKLWRNRKERKEWTQRLQSEDPGLDVVHPHAAGIDVGNGAHYVAVRPDCDPEPVRRFECFTADLHSLADWLKRCGVKTVAMQSTGVYWIPIYEILEERGIQVYLVNARHTKNLPGRKSDVQESQWLLKLHTYGLLNNSFQPSSEIRVLRTYWRQRGEHVHGAATCVQRMQKALTQMNVQLANVISDVSGLTGQTIVRSIVAGEHDPWKLAELSDPRIHASREEVAKSLEGNWRPELLFVLQQEVAMYDTYQQRIAECDQQLQKHLARFADTVPLQPTEAEPKRKKTKPAKNAPRFELRTELQRITGVDLTRIDGIDVMVAQTLISEVGLDMNRWKTEAHFSSWLGLCPDNSTSEDKMLPRGTRRVVNRAATGTRMAAVTLMRSRTYLGA

SEQ ID NO: 393455 - protein, 429 aa, unidentified
MRREPQCSTGVSPPGRLLRLRHDIVHGIVDGVRRDRGAVVGAARGALYLPSDRIQLDDSVSGRCAKPVVPQSSKLERQPLVNAPASSFETKPEQLSMMNMHQQGGATEGKRPNAGIDVSKDFLDVCVGDAEVRMPNDPTGCAAVVELMVSSQVDLIVLEATGGFERGAVGALQDAALMVARVNPRQARDFAKSMGALAKTDKVDARLLRDFANVIANHKDRAKYVTPMVEPERQLLSEMITRRRQLIEMQVAEGNRLAGARHKDMVRSIKRMLRAIESQIKELDEDIDNHLDGHFGPQKALLDTVKGVGPVTIMTMIAALPELGRLDRRAISKLVGVAPLSNDSGHRRGKRSIWAGRSHVRAVLYMAALVAKVHNPIIKAFFDRLVAAGKPKKVALVACMRKLLTILNAMMRDQRVWAASSSLVVVQNG

SEQ ID NO: 393456 - protein, 351 aa, unidentified
MRTSQKTSKPISTIGIDVGKNTFHLVGVDKRGAIVLQQKVTRHQLGRRLSNIPRCLIGMEACCGTHFIARQVTALGHDVRLIPAQYVKPFLKGHKNDYRDAEAIAEAVQRPTMRFVSIKTPEQMDLLALHRVRSRLVRQRTGTANQIRGFLLERGITVRKGLMPLRKALPEILSSKSDVLSPRMINLIGDLVQDWRRLDERIAHVSTEIEALAKRDENCQRLMSVPGVGPIVSSAVVAAIGNGTGFKQGRDFAAWLGLIPKQESTGDRTILGKISKRGNKYVRTLFVQAAHVVLERRPRTARQGLWPWIEQASKRLHRNMLAIALANKLARIAWAVLARGRAYQPRITAHA

SEQ ID NO: 393457 - protein, 340 aa, unidentified
MKLYGAIDLHSTNSVLVVIDEEDKIVYQKRLPNELALILQELSVYQSRLEGIVVESTYNWYWLVDGLMEQGYKVHLANTAAIQQYEGLKYTDDHSDARWLAHLLRLEVLPEGYIYPKVERPVRDLLRKRSQLVRQRTMNLLSIQNLMTRNTGSSMTANQIKGLDKPQVEGLLPDADLSLAVQANWSVMCSADEQVERLEQRVTERVKLRAQFSFLKTVPGIGQILALTIMLETGDIGRFATVGNYASYCRCVGSQKISNGKRKGSGNTKNGNKYLAWAFVEAANFAIRFNSKIKSFYQRKKAKTKAVVAIKAVAHKLCRACYHIMKDRVAFDVTKAFGQK

SEQ ID NO: 393458 - protein, 416 aa, unidentified
MKIVRPICCGMDVHKNIIVATIGITNKKTRITEYIQETFSTLNPDLLNLKQWLINHKCFDACMESTGKYWIPIFNILEDEINIYLTHPKYVKAIKGKKTDKKDSKWICDLFKHDLIKFSFIPPKEIRALREVSRYRYKLVGMRSSERNRYQNCMTVSNIGIGSVFSDPFGKSAQAIMKEVLESDIIEDEKILKCIHGSCKNKDKILDSIKHCNIETDQRFKMNESMTHMEELQVHIDNCEIEMMKRAAPMFDRFMHITQLPGISTLSAILIISEIGVDMKQFESDKQLTCWAGLAPANNESANKKKSVRISKAGQYLKPLLVQCALGAIKDKEGYFGIKYSRIKKRRGHKKAIIAIARMMLVSIYHMILTGETFNPSDYESFRNPKPPIKQQVLTEESAIEFLKKSGFDVSKLTKP

SEQ ID NO: 393459 - protein, 312 aa, unidentified
MEKLSYGGIDVSKDRLDVVVLPEGWFFSVSNDTAGWAELVARLRPLAVSAIGLEPSGGYERGIIRALLAAGLSVRRINPNKLRQFARARGVLAKNDRLDARLIAEYVAIMPTRVVQRDDAVERLAEIVTMRRQLCDEHVAVDNQAAHLEDAMLRRLSKRRLIRLEADIRLLDKRLAEMVATNAAFAQLYELLTSMPGVGPVLAFTLIALLPELGKMSRKQIAALVGLAPYDFDSGKLRGHRSIYGGRMPIRNVLYMAALSASRYNPALKTFSNRLAHANKKSKVIIVAVMRKMITTLNAMLRDNAAWQPQSN

SEQ ID NO: 393460 - protein, 412 aa, unidentified
MKIAGIDVHKKVLMVVVIDASSPEEKPERRRFATMPSELHRLLMWLQQQGVEEAVMESTAQYWRSVWLELEPHMRLQLAQAFSNRAPRGRKHDFKDAERLVRRLIADELILSFVPNGEQRIWRSMTRMKLQLTRDRVRLQNQMECLLEEMRIKLSIVVSNLLGASGLRILQALAKGETDPKRLAQLGDERLQCTEEQLVDALTGRVQPMHREMLALQLQRLQLIDQQTAELNRMIAQAMKSHQDAVIRLAEVPGLGVDSAQQIIAEIGAQASTFSSAAELTSWVGTCPGKEESAEQNHSSRSAKGNKYLRRVLNQAAHAAVTKKGSHFQAVFRRLLPRLGYKSAIWAIAHRLCRVVWKILHQGVRFIEQGHEPDPRAKKKRAQMLARALRKLGYEVAITPISPVTGTNELQM

SEQ ID NO: 393461 - protein, 346 aa, unidentified
MDQFVGLDVSQEMTHLCVVGSDGKIAWQGKCLSTPEDIAGNIRSKAPDVVRIGLESGPLSTWHWHALKAMGLPVLCLDSRHAQATMSGQVNKTDKNDAHGLAQIVKAGWYREVGVKSLDSHAVRSMLGARAQLVGMRVEVTNQIRGILKTFGVVLSRRTGEPFERLVDEACANSDPMLNQTVRSILCVHSCLKEQIRLLDRQLMSRARGSAVCRQLMAIPGVGVLTALAFVTAVDDPSKFAKSRSVGAYFGLTPRCYQSGEIDRNRGISKCGDGLVRTYLFEAAGTLLTRVEKWSALKAWGLRIAKRSGLKKAKIAVARKLAVVMHRMWVDGVSFRWSAAGAEAAA

SEQ ID NO: 393462 - protein, 322 aa, unidentified
METVSFEQVVSRGCGLDVHKKTVVATIDGEGLERVTREFGTFTSSLTELKDWLVDNEITHVAMESTGVYWKPVYNILEPTGITVWIVNARHVKNVPGHKTDKKDSRWLCKLLLAGLLKPSYIPPREQRELRDLTRYRKKLIQDVASNKNRVIRILEDCNVKLSSVLSDTSGVTATRLVDKLCDGKRVTMEDIDRVYHGRIKATRDELWEACNGNISDHHVYLLGTIRAHNRHVESLIEELDQKIRHLLSPYENVLELLREIPGLSHKTVEDLIAEIGLDMEVFPSEKHLASWVGVSPGNNESAGKKKAEEQPTGINKLKQPL

SEQ ID NO: 393463 - protein, 481 aa, unidentified
MISILASSVARQLSRSCRLFQLGSDTFPRQLRIGVCDFDAGSGIALLHSRQHRGTAASKGVQNMPARFRDLHDVPHQLQRLLRQMDAALGIAVAVMRPFGEVVISPFEVRHTDSELSELARQLKSLNGETRVVMEATGNYHAPVAKLLHDAGLYVSVINAKLVHGYGNNDLRRVKTDRKDAVKLANYGLDRWLTLPRYVPEEDTRLLLKNCYRQYRQYSKVQTVLKNNLISLLDTVFPNANRLFSSPIRGDGSEKWVDFVAEFWHCRCVSEKSEKAFTNKYQRWCRKHGYNFREAKAHTIYAEARGHIGVMPKSETTKLLVEQAVAQLRATSTALAALKHEMQSLASQLPEYPVVMDMFGVGPTLGPQLMAEIGDVRRFYSKKALVAYAGLDAPPNDSGDVTGRHKSMSKVGASSLRRTLFLVMSVYLQNAPLDESVYQFMDKKRAEGKPYRVYMMASANKFLRIYYATVKAYLESLEHTA

SEQ ID NO: 393464 - protein, 406 aa, unidentified
MADIFALDVSMGKSYCVWYRGKHCLKEFSLVHSKAGFNALRDMIKKAQKPIIYFEATGIYSRVIEHFCETNGLRFCRLNPLELHLKSESLRRVKTDQKDAHRIALTVQENTFRLTVPWKKDYLQLHELSRFYNQLNADWNYRLNHLHTALEQVFPELKQLFVNKTSKLALNIVELFPHPALVRPYSRVKLKNILMASTDKRISKMKAYKYADRLIDLAQQSYSAVSSDAIQVDEVRYYTRQLIALARKKEEVIKRMESIAQLLPEYGLYYSFPGIGKQTAAQLMGELGDISRFDNSNQLNAYVGIDIRRHHSGTYAGQDHINKRGNPIARKLLYFTIGNMIRQQHVNPNHIVEYYYRLKEKRPYPKLNKVAMVACMNKTLKCLLSMIKHHEKYHYRYTDSMVPVRA

SEQ ID NO: 393465 - protein, 323 aa, unidentified
MPSSIGVDVSKKKFDVALITAQGKYRCKVFDNDGGGFKAFLDWIKVHVPEGGAQACMEATGVYHEALANFLFDKRVTVFVVNPLRVKRFVESEGLRNKTDEGDAKALARFASKNELEAWEAPSKSVRELQALVVRLESLQTMRQAELNRLDIAHTSVRSSIEAVVAALDKEIESVRSLIRKTIDDDPELKQRNDLLDTIPGLGDATIPSLLAYIGRPERFKSVKALIAYAGLTPAIRQSGTSLDKRQGLHPAGHRDLRKALFYPAMAAGRFNPVVAAFWRRLKAQNKPGKVIVVACMHKLLAIAYGVLRSRQPFNPELAFRAA

SEQ ID NO: 393466 - protein, 324 aa, unidentified
MKYTTVFVGMDVHKESFSLACYTNEKEEAEYVQRTEAHYSKVISYLEAMRFHYGDDVTFVCGYEAGCLGYTLYHQLTSHHVKCVILAPTSMPTQKGKKKVKTDKRDAQKITRCLAHHDYSAVHVPTVKDEETKEYIRMRDDHKLALKKVKQQILAFCLRNNCSFPGNNHWTQAHLRWLREIKLGDVYQEILEEYLLTYSNLVDKLERLDKRIEELAAGEEYAKNVHKLSCFLGIKTQSALSVLTETGDFKRFGTAQQYASYLGLTPGEDSSGEGQDRLGITKAGNRHLRMLLVEAAQSYGRGKPGYKSTELKKRQEGIPPDVIA

SEQ ID NO: 393467 - protein, 312 aa, unidentified
MTNIICGVDVSADALDARIGQASAYQRFANSHEGVAELAAFCQHHRVDLVVMEATGGYEQRPFALLWAHGLACAIVNPRSVRRFAEAMGLLEKTDRIDAGVIAWYAAVKRITARQPASQTQQALAAAVTRLRQLTDSRTRETNQRRLVSDPTVLASFTAMLGVIAAQIRYLEETIVALIKDDPLWQQLDATFRTIKGVADRTVARVLAELPEIGTLSSKAISKLVGCAPIARDSGRIKGKRAVRGGRADVRSTLFIVAEVVRRHDPDFAAFHQRLSAAGKPKKVVRTALAHKLLVRLNAKARDARNTFALTA

SEQ ID NO: 393468 - protein, 347 aa, unidentified
MGKSITDLSSVTTVGLDLAKHVFQVHGVDASGRVIVVKALRRKDVLAFFAQLPECLVGMEACGSAHHWARELIKLGHDARMMPPAYVKPYVRRQKNDAADAAGICEAVTRPSMRFVGVRTLENQAALMHHKLREMLVAQRTQLINALRGHLAEIGVIAAQGLKNARDLAGVIKAEGDETIPACVRAALAPLVRQLHALDQEIARSDQTIAAMARDDEMARRLMTIPGLGPVTASAMATSVQDVSVFSGPREFAAFLGLTPRQNSSGGKERLGRVSKMGNRYLRKLLVVGAHAVLYHRKPHDDALRSWAKKLMQTKPFKLVAVALANKMARIAFAIMLGKTSYSAAPA

SEQ ID NO: 393469 - protein, 380 aa, unidentified
MPEAVIGLDVGKLSHWACVATRDGEILLSAPVANREGDLDSLFGRFPDALVVVDQSRNIGALALARAKAAGMSAAYLPGLAAHGAARLFAGDAKTDERDAMVIAKTALGIPDALLPVGDPGPTVAAARALAAQRNFLTCENTRSKNRLRSILLESCPAFEALVDLSDGPQLGLMASLGGAWSVADAGPRRAAALTRGAARGKIEALVRSTASSTRPDAAAIAAEDRAVRLLARRISENSAEIDVITAEISALLEGDDTYRCLLTVPGIGPKTASELAISIDIEDFPSHDRLASYCGLAPRNRQSGTSISSVTASRQGNKRLKNLLIFSCNCLTRTEGRWGDYYARCRERGMPHGKALKALARKRLKVIYAIMRDRVPYAA

SEQ ID NO: 393470 - protein, 334 aa, unidentified
MVLAFIDIHKHVFQACAVEPETGTLYDERFAASVEGVDAWLAGLPEPPRVVAIESTSGWRWVWRLLAERGIEVQLVDPGQARALQGRQRKPKTDKLDARWGVLLLEKEMLPQAWIPPIEIQQLRDQTRLRRALVVDRTRWAQRLHALLQHEGFPVRRSRLLTAEGRRWAASVSFAPHLRSIVDTMLSVISALDAQIDQLETTLRRFARSDARCRALTTLRGIGPIFACVLVAEIGDAKRFRRARQLVRAAGIDPVVADSADTRRRGRLSKAGSPHLRHALVEAATWAARPGSPDHPRYLATKQRIGSQKARISCARSLAGRIHRTLLELDTQAA

SEQ ID NO: 393471 - protein, 408 aa, unidentified
MNPLYVGIDVSSKSNVVYLMLPDGSKHSNFSVANSHDGSIQLTKHILSAVTSLSLDTVIIGLEATSVYGDNLVYFLREDASLVPYDRKIHILNPKQVKKFKDAYNDLPKNDYVDSYVIADCLRFGRINKEVYQGDYRYKALQNLTRARFFAVQNLVKEKQRFINVLFKKYSTMTQEKVFSDTFSTTALAVYEKFDSAEALASMDLQELTDFIMEKGKNRFPDPDAVAKAIQKAARSSYRLPKTVNDSVNQVLSISITSIKALDAQIKEFDKAIKAQMELLPNVLTSIPGIGPVYSAGIIAEIGDINRFPSQAQLGKYAGLAWTQNQSGDFEAENTKLIQSGNRFLKYYLCEGALSLVRCDTEYSNFYHTKYKEVNRHQHKRALALTARKFVRLVFRLLKDNRLYRAAE

SEQ ID NO: 393472 - protein, 416 aa, unidentified
MNAAGIDVSSRKSTVAVLRPFGEVVRLPFDVAHNTEGLASLAEQLKALDGETRVVLEHTGRYYEPVAKALHEAGLYVSAVNPLLIKEYGANSLRRVKTDKADAVKIARYALDNWADLRDYTPMDTIRYDLKTLNRQFQLASKQRTASANNLIALLEQSFPGIRKCFDSPVRSDGTQKWIDFVHTFWHVECVRKQSLNAFSERYRKWCKRHGYIFKQGNAVEVYSLAKNAVVLVPKSEVTKVLVQEAANQLTSISRSVETYRAEMERLASTLPEYPVVMAMYGVGKSFGPQLMAEIGDVRRFERKQSLVAFAGIDPMPNQSGDKNVRSNKSSKRGSPYLRKTLFNIMGIYLKCSPQDEPVYQFLDHKRSEGKPFYVYMTAASNKFLRRYYAQVRDYLSTLDDLPPVDMDSTGLKTSD

SEQ ID NO: 393473 - protein, 427 aa, unidentified
MRVLHDRVAAIDVHKDMVKVAVRVPGARRGARKTDVAEYRTFYGVLQEMGRELRRRGVTHVVMEASGIYTEPVYYALAELDFTQVLVVNPAHVKALKGHKTDAKDAVRLLDLYECGAVVRGSYIPSPELKEVRDLTRYRVKTVQARTSEIQRLQKTLESAGIKLSSVVSDVTGASATAMIEALIDGERRGRVMADLAQTRLRTAGKMADLSMALSGRFTEHHALMCRLHLDQIDGLGQQIDGLDERIAVRTARYSRETGLLATIPGFGDVVIAGWLGAIGPAPHEHFATAQRLASWATLCPGNYMSAKKSKGGRTGDGGAYIKPLLVQAAWAAIRVPGRLQARFHRLVRRFGGPRNKGAQKRAIVAIAHTLLKIAYQILKTGRPYTDLGDGFYDTRDTTQAKQDYLIRQLRKLNPGCHITITPAEAA

SEQ ID NO: 393474 - protein, 387 aa, unidentified
MATIFNAHKPATAFDHDSTLVLALETSGKAWDLGAVVPGVNRRPKRRLEPRAVADLLAAIERWKAEALGAGRTVTRVALTYEAGRDGFWLARYLIARGIEVQVVQPSSVAVERRKRRAKTDRLDLDMLLGAFLRWLRAEPRACTMVRIPSVEEEDARLPGRSREVMIAERLSIENRIGNLLCLHGIEGFNPRLKKAGEKLETLRTFGGETLPLRMMDELRRLMTVHRLLSEQLAALETARDQVLVVADPDREERMIRLLVAIVGLGVETATTLVREVFCRPFKDRRAIAAFVGLTGTPFQSGRTDIEQGISKNGNPRVRCCLQNLAWRWLRHQADSPLSRWFMERTGGAKGRIRKIMAVALARKLLVMLWRYVETGTIPEGVRLSAA

SEQ ID NO: 393475 - protein, 316 aa, unidentified
MNEVKSSTKIAGIDVSKKSLDVAVGQHEAIERFGNDAAGHHELTSRLTQLGVRRVGIEATGGYERAICAKLQAAGFELVLHQPLEVRLFARLNRQRAKTDRLDARLIAAATAHRHGLRAAADPRLAELAERLTAYEQATDLVSQLKTHLEHTRLPDLVAQLQAQLAGLLAHKKALALDLERRLKGHADLRRRFELMRSLPGVGVIVGLAIVIRMPELGHMRHGQPAALLGVAPFAHDSGAHKGQRFIAGGRRRPRRLLYLAALAAKRCDPAFKTFADRLAAAGKPPKLIVIAVMRKLVEAANLVLTRDSFWISKPN

SEQ ID NO: 393476 - protein, 422 aa, unidentified
MLGIGIDWAEEFHDVALGTAEKGVIEQFRVEHTPAGVGALIERVLRLEPDPAEVRVVLETRHGLLVEALIDAGFTVLPVNPDLVARRRGPARKKDDAEDARICCLLAVDRHAGLKALIPHGELGGELRAIARDDDRAARDQRRLLNRLRADLQTTYPAALVLAGQDLGAPTVLRLLERWPTQAELAAAPRAELLEFARAGRHGWPDRFADRVAAALTAPSLPTRDYLVRAKAAGIRLAAVQLLALHEARRGWEARMAELLLGGRRTGRNHTVQDPDPGKAFPGGAIYLSFPGLGDRLAARVAGEIGEHIDQFDSPNGLQCYAGQAPVTRRSGKSDFVVARRLAHNRYLGAAVHQWAFCSLTRSGWAREFYDQKITAGKSHHAALRALGNRWLEILWHCLTKGVPYNEAVHVANRNRALARAA

SEQ ID NO: 393477 - protein, 409 aa, unidentified
MNTGTITAVGIDVSKHKSTVAARRPGGEVVLLPFDVEHTAEGLKKLITKLRELDGEIRIVMEHTGMYWRPIAMTLKEAGFYVSVVNAILIHNFSDNSIRKIKTGRADAMKIANYGLTFWIDLQEYAGEDENRQLLKIQSRLYERTATTAGMLRNGLISLLDQTFPGANKLFRDDSRNSRGHVKWIDFVLRFWHKECVAALSLAAFTDTFQKWCKRTGYKFSASDAERIHAIARNAVATLPKNDSTKLLITQATNSLNAIYDSLQAIRTEMDRLASMLPEYELVMGMEGIGKVTGPQLMAEVGDVRRFSHKGALVAYAGVDASPYQSGSFDSKSRHVSKRGSPHLRRVLFVIMSMTLIRANTANPVFCFMDKKRAEGKHFYVYTVAGSAKFLRIYYAKVKEYLNALEDTA

SEQ ID NO: 393478 - protein, 428 aa, unidentified
MNVVDTIRREQFCQIKKEIQRSDEYLVVGIDVAKHKHYAFMGNATGKSLLRRLVFENNLEGYCKLLERSKAIMAQNALSKVVFGIEPTGNYHKPLGMHLIKCAHHIVLVSGIAVKNNRELLDGRWDKHDTKDAATIADLVAQGKFLYYDYPTGNISQLRQLLSLRRRLKKEEHSLRMRIRNNLLAQYFPELDPFYKACESESLAIVRWCLDPGRIAGMEFDEFFSMVTRTKRGIAQKQRLQKIHRLAIESVGCRMGPAAEFEASLLVQKLKEVRQQLDQIKDLMEDICLQFDEYRWLLTIPGFGPYISARVLASIATPWRFDSSNQLLKMAGYDLGASRSGQKSDQAVPVISKRGNSELRYALYQAAHVASTRNRDFILYFTRLLRGRQRERGIQTKMRVKLAAKMLKIAWVLMKKQESFDPAYLIIE

SEQ ID NO: 393479 - protein, 362 aa, unidentified
MVQSTTIIAFDQHAATTVAAVLLPGHRTPALHHLTSETRSLVRFVQRLERHGPIQCCYEAGPCGFELQRALTAARLHCDVIAPALIPRRPGDRIKTDRRDAGHLAVLYRAGALTAIHIPSEQEEAARDLLRCREDIRADVLRARHRLSKFLLRHGRRFTATKTAWSRRHDTWLRGQTWPFPALDQTHQAYVRAVDEARARLAAVEQDLHAVLDLEPLRSRVVRLRCFRGIDDLTALTIAAELGDPHRFASAPHLMAYVGLVPSEHSSGTKRAHGAITKTGNAHLRRVLIESAWHYRHHPLVSAVMRTRQRGAPTAVIAHAWTAQQRLHRRYARFAARGKPKQHIVTAVARELTGFVWAALTQ

SEQ ID NO: 393480 - protein, 494 aa, unidentified
MIKRRLSTLERLKSGKLNRKQRKELMRRVFAGDPGLDVVHPNAGGIDVGNESHYAAVPPGRDAQPVQEFGCWTADLKRIAEWLIGCGVKTVVMQSTGVYWIAVYDVLQKSGLEVWLVNARDTRNLPGRKSDVQECQWLMKLHTYGLLRNSFRPPEEIRAVRTIWRLRDRHVKDASREIQHMQKALTTMNLQLANVFSDISGESGQAIIRAILKGERNPQKLAQLKDYRARASEEEIACSLEGNGQEDVIFELPQSVERYDFCQGQIRACDQQLSKYLAALPDRKIEPVGGTTEPGSKSAGGDGKEVPPKRRKGKRKQSRGNEPKFDLEVELTRICGVNLCTIDGVGVMTVPTWVSEIGTDMSPWPTEDHLVSWLKLTPNKPISGGKVIKKGRNPDNRTKNRVATVLRTAATSLDESQSYLGARYRQLRARLDPGKAAKAMAAQLARLIYRMLTRGQEWVDRGAQEHENRRRDRDKQFLQRRAAALGYRLEAVAS

SEQ ID NO: 393481 - protein, 343 aa, unidentified
MNILYYIGLDIHKKVIAYCIKAIDGRLVGEGMIEASRRALDEWVAGLPGPWIGAMEATIFTGWIYDHLSRYAVELKVAHPEMLKAITAAKKKNDRADASRIADLLRVNLLPECYMLPTDIRELRRILRYRNHIVGTAVKMQNKMCGLLLEVGADYSKGRLKGKRYFNQLLGSVEDVPKSVKELLKFSRAGFEMFHAIQQQLVKELRTNNLIQDRVRRLMTIRGIGEVTALTWVLEIGDPARFDSIRKAISYCGLCSAQRESAGKEQRGPISKKRNKHLQHMLIEAAKIAPHWNPKLAAIHERELQKGNRNRATLAVARKLVAYMMAVDKSCADFIVPEDLIAA

SEQ ID NO: 393482 - protein, 379 aa, unidentified
MAQKLAEFLSSHHELSSIIIALESTSFYGIHIANYLSSCQLLMPFNTAVYCVNPKMIANYKKSFIDLGKNDYIDAFVIADFARVGRITIKPWRGSQFLALQRLTRHRLHLAKALTREKTYMLSNIFLKFSEFSMLEEEQQPFSDNFGATATSVLTDFLSTEEIINMPMDLLISYVCEKGHNRFSNPENTAKLLQQAARNSYRLDKCLYEPLTIAIASSFNLITTYTKEMKAVNAAIEKTLKGLNPNAYQSLLSIPGIGPVMSAGILAEIGCIDAFKSQDALAKYAGLVWRENQSGQFKADDTILSKAGNAYLRYYLIEAVSHIKKHCNEFAVYYQKKFDEVKLHQHKRALVLTARKFVRLIFGLLAKNQLYSSSRVDQI

SEQ ID NO: 393483 - protein, 392 aa, unidentified
MIIVGIDVASQKHDYFMVRPDTGEVFSKASVTIRNSENGYKKLHEDITAFCGATGDYDVRIGLESTGIYHTNIIMFLLSQNYQVMMINPILTNMARKSSRVHCPKNDNLDSQTICKYLIENPDKFSPYTLSSYHNEALKSLSRKRFFIVDELRKAKLTVNNLIQVIFPEFKSLFSNIYGATAISILKHYQTPKRIARAHADSLARFIHGSCSCTAAKLIEAAKSSVGISNDYLAFQLADAIEEMEHIQQRVKKFDEQIKTYVDELCPELLSIPGVGYVTAGLIMGEIKDISKFRTVDSLTAYSGIDLETYESGNYKSKNLHPTKKGSKYLRYALFQVARVAWIHDPVFNAYYRKKLSEGKHYYVALGHLQKKILRVIYSILKNNSTYSVKIA

SEQ ID NO: 393484 - protein, 319 aa, unidentified
MSEVILGIDVSKKTLDTCLIFEGRTLGKQFKNSADGFRLLAAWLVSLQIKRVLACLEATGIYSEAVALFLHESGHRVSVVNPLRIKGYAQSNMRRNKTDRLDARLIASFCQTQKPDVWQPPSEEVKRLQSLVRRVEMLEEMRQAEENRLSNVSAEIKPSVERMIGLLKAEIRELEQQIKRHIDQHPSLQEQSALLQTIPGIGSRTANLLLSEIEFERFHSARSLAAQAGVVPRQKQSGTSLKQTSLSKLGNARLRKALYFPAITAKQHNEIIKEFAERLKRNGKTPMQIVCAAMRKLLHIAFGVLKHKRAFDASLAFTA

SEQ ID NO: 393485 - protein, 317 aa, unidentified
MTEQSAYAGVDVSKYRFDAAIVPSGDHVSLATADLAKLVAWLARRKPKLVVIEATGGYQRDAVAAIAAEGLAVVVVNPRQVRDFARATGRLAKTDRIDAAVLAAFGQVVQPEPRPLQDEQARALRDLVARRRQLLDMRKAEKTRLQGPISPPVQAGLQRHLAWLDAEIASADDDIDRMIRQSPAWRADEELIRSVPGAGPVLARTLIAEMPELGRLNSRQIAALVGVAPFNRDSGKMRGTRSVWGGRAQVRSVLYMATVCAVRHNPPLKAAYERLRQAGKPPKLALTACMRRLIVTINAMLKSRSTWDPDLTANTAA

SEQ ID NO: 393486 - protein, 343 aa, unidentified
MQTITTIGLDIAKSVFQVHGVDATGQVVIRRQLKRRSVLTFFQKLPPCLVGIEACASSHHWSRELQALGHIVRLMPPAYVKPYVKRQKNDMADAEAICEAVTRANMRFVPTKTPEQQSCLMLHRTRHLFIRQQTAVINSIRAHLAEFGIVAPVGRKGVTELLHVVADPSDKRVPEVARACLAALGTQLLSLKQQILEFDRMILAWHRSNETSKRLHYIPGVGPMLATALVASVADPRTFRSGRNFSAWIGLVPKQHSSGGKDRLGSISKQGDRYLRSLFVAGALAVIRYAKIHGTKHRPWLTALLARRHAKVAAIALANKIARMAWAMMAKGERYKEPIALAR

SEQ ID NO: 393487 - protein, 339 aa, unidentified
MKLYAAFDLHSSNSYLGIVDENGKRTFKRRLRNEPEMIKEILRPFKPDIVGITVESTYNWYWLVDLLMDEGYRVHLANPCKIQQYSGLKHGDDEDDAFWLAEMLRLEILPEGYIYPKEQRPPRDLLRKRGHPVRLRTSLIVSLQNILARNVGAKMKTSAIKALKEDRVTPLLAGNDDISLAGKVSKDAIDSLTKQITAIEVAVEKKIKLRKPYDLLLSMPGVGRVLALTIMMETGPIERFIKVGNYVSYCRKVPAGRFSNDKKKGNGNRKNGNKYLSWAYAEAAELARRFDSEARAYYDRKRKRTNAPIAYSALAHKLSRAAYHIMRDKVPFMPEKTFA

SEQ ID NO: 393488 - protein, 339 aa, unidentified
MQVTTVGIDLAKHVFQVHGITKDGQVVFNRVIRRAQLMQFFTNLEPCLIGMEACGSSHYWARELSKLGHDVRLIPANYVKPYVKRGKSDANDAEAICEAVTRPTMRFVAPKSEEQQAVLFLHRARDLIVRQRTQLSNMLRSLLAEFGVIIPQGTGAAVKYAKGVLEGEKPALPEFAIDVLRQLSHQLVAMHLRFRWYEMRMRLHSKLDKRVMLLRTILGVGPVTASAIVATVGDAKQFKNGRQFAAWLGLTPLNLSSGGKERLGRITKMGDRYIRRLLVTGMTARLRQMKVNPDRVDPWAIGLLERKPARLATVAMANKTVRIVWAVLTRNEYYRPHSA

SEQ ID NO: 393489 - protein, 369 aa, unidentified
MFKVGAKSKSVSADEGRQPKLILTPEEPMSKSTHSQQRMVFCGIDVSAARLDVALIEPDRPLLQRQFINRSSGHKALIGWLAKYQGRVRVSLEATGIYSLDLALALDAAPEIEVSVLNPKIVNRFAQTLRRSKTDAADAMVLAEYSQRMPFVAWTPPSRSGLRLRAVGRHIAALAAQHARERNRLHAAQSSQAVPSCVIQDLKRSLVSVERRLVKMRREAMALVRNDAEFEQRFRLLTGIPGIAEVSALALLGELALLPPHLTARQWVAHSGLDPVHQESGTSVHRRSRISRQGNRYLRKALYMPALTATRFDPHLKAFYAELLARHKAKLQALTAVARKMLHAIYGIFKTGTSYDGAKLFPALAIAIA

SEQ ID NO: 393490 - protein, 343 aa, unidentified
MTEIMTIGLDLAKTVFQVHGADGEGRAVLRKRLRRGQVLGFFASLPPCLVGLEACASAHHWARELQALGHEVKLIPPQYVKPFVKTNKNDAADAEAICEALLRPTMRFAAVKSADQQSVLMLHRSRELLVRQRTMLINALRGHCGELGLVAAQGARKVAALIEVIEDPGDRRLPPLARQALVSLVAQLRATEERIAELEKELTAWHRSSEASQRLTAVPGVGVITATALVATVGDATQFRSGRQFAAWLGLVPRQQSSGGKDRLGRISKRGDGYLRRLLVHGARIVLFWSRRRKETRSDWLEALLARRPTNVALVAMANKTARVVWAMLSRVQAYMPDRQAAA

SEQ ID NO: 393491 - protein, 385 aa, unidentified
MAPPRMPEAVIGLDVGKSSHWACVATRDGEILLSAPVANRERDLDSLFGRFPDALVVVDQSRNIGALALARAKAAGMAAAYLPGLAAHGAARLFAGDAKTDERDAMVIAKTALGIPDALLPVGDPGPTIAAARALAAQRNFLTCENTRSKNRLRSILLESCPAFEALVDLSDGPQLRLMASLGGAWSVADAGSRRAAALTRGAARGKIEALVRSTASSTRPDAAAIAAEDRAVKLLARRISENSAEIEAITGEISALLEGDDTYRCLLTVPGIGPKTASELAISIDIEDFPSHDRLASYCGLAPRNRQSGTSISSVTASRQGNKRLKNLLIFSCNCLTRTEGRWGDYYTRCRERGMSHGKALKALARKRLKVIYAIMRDRVPYAA

SEQ ID NO: 393492 - protein, 338 aa, unidentified
MGKIVKQVAGIDVAQKELVVTLGHLLDDFSVELFAYKVFKNSDSGFKSLVEWTNKLTDNQVDVLYVMEATGVYHQKFAYFLTDNNYKLSIVLPNKISNYMRTLELKTVTDKSCSQAIAQFGLERKLDKWSKPKVTYKELQQLTRERDQIVQERSIIKNQIHAEITEAEPNQRSLERMQARIRFLNSQEKEIKEDIDCIVKENPDISQIIDRITTIPGVGELTAVIVLAETNGFELIRNKSQLSSYAGLDVKEKQSGTSVKGKPRISKKGNRALRKSMHLPALTAVKWDDNFKDTYARLVSKHGIKMKALVAIQRKILQLIYILFKNETIYDKDYKIKK

SEQ ID NO: 393493 - protein, 343 aa, unidentified
MQAVTTIGFDIAKSVFQVHGVDAAGRVIIRRQLKRRHVLAFFQKLPPCLVGVEACASSHHWSRELQAIGHTVRLMPPAYVKPYVKRQKNDMADAEAICEAVTRANMRFVPTKTPEQQSCLMLHRTRHLFIRQQIAVINSIRAHLAEFGIVAPVGRKGVTELLHIVADTSDKRVSEVARACLAALGTQLLSLKEQILEFDRKIMAWHRSNQTSKRLHYIPGVGPMLATALVASVADPTTFRSGRNFSAWIGLVPKQHSSGGKERLGSISKQGDRYLRGLFVAGALAVIRYAKIHGTGHRPWLTALLGRRPTKVAAIALANKIARMAWAMMAKGERYKNPVALAR

SEQ ID NO: 393494 - protein, 344 aa, unidentified
MDHFAGLDVSVKETSICIVDDAGRIVREVKVASEPEALLKVLGNPAWRFRRIGLEAGPLSQWLFSALAEAKLPAVCVETRHMQAVLKAQINKTDRNDARGIAQMIRAGLYRPVHVKTLRSQKLRMLLTHRKLLQSKAIAIENDLRGTLRNFGLKVGMVGKVRFEARIQELVENFPDLAELVEPLLIVRRALREQIVILHRRLLAIVRDDEVCRRLMTTPGVGPVVALTYRATVDVPARFRKSKSVGAVFGLTCSRYQSGELDWSGKISRCGDEMMRTMLYEAAQSMMHSKKWSWLKAWAMQIARRRGMKKAIVALARRLAVIMHRIWVDGTEFRWTRQQAAAAA

SEQ ID NO: 393495 - protein, 300 aa, unidentified
MSWTVAIGVDTHKDMHVAVACDALGRQLDSCSLPATSAGYLALWRWAETLGEPAFAVEGAGSYGAGLARFLRAAGGNVYECERPRRRERRGGKSDLIDAALAARRLLAGEELSRPRGDGAREDLRLLLLERRGVVRAQTAALNQLHSALLAAPASMRERLSELHGARLVAACARVSVRAQEERVLVGVLRRLVSSGDPARMRSESSFAALAGTSPVDASSGRHQRHRLNRGGDRQLNRALHVIALNRVRHHGETSRYYGRLLDSGKSAREARRCVKRALARSFYRRLCELPRLQEVPLRA

SEQ ID NO: 393496 - protein, 390 aa, unidentified
MDVLYQSCAGIDVHQANIVVCILHGPLTSTHPKREMATFDTTTKGLRACHDFLSQFHVEAVGMESTGVYWRPVWHALCDDFELILAQPAHMKAIPGQKTDKKDAHWIAKLTRIGLLPRSFVPDETIQELRELTRQRKHYVESRNQETNRIHKILQSGGIKLTTYIEDIMGLSGRNILQLLVDRTPITPRIVHQSVYTSLKKKVPQLMEALDGYFSDHHRFMLKQSLEIYDFYQKQIELLEERINVYLSQYEKHVEILDSIPGIDVITASVIISEVGVDMSQFPTAGHLASWAGLCPGNNESAGKKRSTKIRHGNSYLKKCLCQAAFAIKKQKGNPLADRFYQIQSRRGSQKATIALAHQLLKIAYILLKEQITYSEFLAQKKTTRDELVA

SEQ ID NO: 393497 - protein, 343 aa, unidentified
MSITMIGLDTAKSVFQIHGVNETGKVELRRKLRRSELITFFEKQESCTVVMEACGAAHHWARILTGLGHTVKVIASEAVKPFVKKGKKNDAADAAAICEAASRPDVKFVPVKNLEQQGILALHAARSLLVKQQTMLANAMRGLATEFGITVPKGMRNLDELMTLVDTDESIPKQAKQAIAGLHDYCQDLHEGIETFEAEIVAHARHDEIARRLATIPGIGPITASLIAATVVDISRFKTARQFAAWLGLVPRQNSTGGKTRLGRITKAGNREIRKLLVLGATSMVNRADGWDSAVGAWLRDILQRRPARLVTVALANKMARIAWAVMTRKEVYRPKGGIAVAA

SEQ ID NO: 393498 - protein, 347 aa, unidentified
MNFYHSTHRHYCGIDLHARSLYVCILDQQGEVLLHKEIKARPEPLLALLEPFRDDLVVGVECMHCWYWISDLCEEHGIHFILGHALYMKAIHGGKTKNDRIDSFKIAMLIKGGNFPLAYVYPKEMRATRDLLRRRTRIVQHGAMLKAHVVNTTSQYNLPPNKVNLKNVGAREQVRATFVDRDVQHNIDLDLAIIECYHRELSRLEEHLERQAKQHDPASLSVLRTIPGVGRILALTMLYEIGDIQRFESVQKFASYARLIKCKAESAGKVYGTQGNKIGNAHLKWAFSEAAVLYLRGNDKAQRYLQKLQKRMNKPKALSTLAHKLGRAAYFMLKHQRVFDEQRFLKS

SEQ ID NO: 393499 - protein, 408 aa, unidentified
MELRPMHRRVIALDVHQAKITACAIVEHDDGRVEVIQREFGAFKRDRRELAQWALQCAPEVVVMESTGVYWKSPFAALEAVGLVAWVVNARHVKAVPGRKTDLCDAQWLATLARAGLLRASFIPCADFRQLRLVARQRQKLVGTCSAEKNRLHKVLVDAGVRLNVLVNDIHGHSARAMVKALIEDKPMHEVLDLKGRLRASREDLFEALSTEQFSPTHRFVADEIVQHIEQIEQRIARMDRYLLAGLQPWQAQLNLLQTIPGIDQIGAAMLLVEIGADMAAFGSAERLASWVGICPGNNESAGKRKSGRIRRGNAWVRRLLCEFAQAAARTRCAFKDKFQALAIRKGHKKSVVALAHKILRTIYAMLASGTHYQDRVIDYEALNVARNAPRWLKMLQKHGYIATPATA

SEQ ID NO: 393500 - protein, 326 aa, unidentified
MKAVTWIGVDIAKESFVAAQRDPEGFQTEQFPVSPKGLKAFGKWLPQELQLQIVLEATGPYWCAFIHELRRVAPEIPVAVVNPRRVRDFAKASSHTSKTDPLDAQVLLHFAETFEPRLMEPSGDRADRQLRALTRHALQITEQRDEVRNQQEKAAADPDTPKFVLRSLQGHLKHLEHSLKQCWSQAQQCLDQDPQLKESSRLLLSIPGIGQKTALILISEYGTGLCQVGPKQLTRYAGLDIVFFQSGTSVYRLPHISKQGNWRIRRALYMAALSAIRHNPVVRAYYLKLVAKGKAKKSALIAAMRKLLHQCYGVLKNQTPFDPIYA

SEQ ID NO: 393501 - protein, 367 aa, unidentified
MEKGITFVGLDAHKKTIAVAMLPPAERVPIAWEIPNEPASVRRMVRKVEREGSGEVRFCYEAGALGYSLQRQIVEAGSGSCMVVAPSLIPRKPGERIKTDWRDARKLAELFRAGLLTEVQPPTPEDEAVRDLCRAREDLREDLTRCRHRLGKMLLRKGMTFTTGKKAWTEGHRRWLRALRFEDGSEAVFDDYLLAIEQLEERLRGLEEKIGAIAQKEPYAKPVGWLRCYRGIDTVTAMTIVSELYGFERFQSPRGLMAFLGLVPSEETSSDKTHRGGITKTGNGHVRRVLIEAAWHYRHKPGTRSLRKRREGQPAEVIALADKAQHRLFRRYRRMTEAGKPGPKAVTAVARELAGFVWATLSRGSNA

SEQ ID NO: 393502 - protein, 395 aa, unidentified
MFIVGIDIAKRSHEAIIIAEDGQVVRKAFSFRNNCTGYNLLLEQVRRLTLVKSQIVFAMESTAHYWLALYARLLKDGYAVMVLNPIQSHSLRELYIRKAKTDARDSLIIADLVRFGRCKASNVPQDKILALRELCRSRAYLVDMAADLKRKLIALLDRIFPEYESLFESVFSKASIAVLSKYSTPQKAKNAHLGKLTDILMESSNGHFGEWKAHQLKEAACSSFGIDDSGGVYSTLLGMFLEQILSLTAQADSLEKQISVFFQEFNNPLTSIPGVGTVLAATILSEIGDITRFSSADKLLTYAGLDPSVKQSGKFKSNQNRMSKRGSPYLRRAIWLASTVAVHRDPMFQTYYEKKISEGLHYMNVIGHVSRKMTAVIFAVLRDGQPYQPILQSAG

SEQ ID NO: 393503 - protein, 348 aa, unidentified
MKVTTLGIDLAKSIFRIHGVDVRGAVVLRRQLTRKQVLPFLTRLEPCLVGMEACGSAHYWAREIGKLGHTARLMSPHFVTPYRKSQKNDGNDAEAICEAAGRPTMRFVPVKNGIQQDVQALHRIRFQLVKWRTALANEIRGLLAEYGIVVANGIAPLRRELPRILDDGENQLSGLAREMFSEMAERLKLLDQRIQQYDLKVERVFNQDERCQRLAKVEGVGPLGATALVAAVGNAHEFKNGRELSAWLGLVPRQHSSGGRNVLLGISKRGDRYLRTLLIHGARSAVRVVERRKDPCSLAISRLKARRGPNVAAVALANRNARVLWALLRRGEDYRPRTAQRGPMTQSG

SEQ ID NO: 393504 - protein, 339 aa, unidentified
MEKLIRIGMDTSKQFFQLHGVDAAEQPVLRRQLRRRELLPFFKRLEPTLIVLEACGGSHYWARELACLGHDVKLIAPQRVKPYVPRGKNDAADAAGLCEAASRPTMRYVPVKTAEQQAALMLAGVRDRLVRNRAQLANTIRGYGAEFGLIAAKGMGRIEGLLSDAETDTTLPVLARELFADLGREYERLDAELVAIEAKLLAWHRASELSKRLAAIPTIGPVIASLLVMKTPDPHAFSSARQFAAWLGLTPKDHSTAGKQKLGAITRAGDETLRSLLVVGATAVIWQTRRGKSRNSSPWLVELLKRKPPKLAAVALANKTARIAWKLMATGETYKQATA

SEQ ID NO: 393505 - protein, 373 aa, unidentified
MSSLPVFVGLDYHQNVIQVCMMDQNRKILANQSVPNNPGAVFQVVGACGSHVRVAIEASTGVANFAEMLITRYQWHVELAHPGYVARMKQTPDKSDWTDAKLLADLTRAGYIPRVWLAPQYIRDLRELVRHRHGLVEQRKQAKLRLRALLRNHRIVCPRTPWTIKGKQWLLDAENISSPHVLFLLQDHYDTIEYFDKKINVVENKMWVEVADDPVVKQLRCQAGIGPITAVTMRAIIGHFDRFRTGKQLAHFCAVCPRNHSSAGKTTTGGLIKAGDDLLRQVLVEAAHRLVRYDTHWRTMADRLRANGKKTCVIVAAVANRWIRKLFHRMREPMLLSEATSGFSRHEQKSIVSLPSSVAPQQSRRPLRGTKKT

SEQ ID NO: 393506 - protein, 329 aa, unidentified
MSEATQLKRFSQSPDPDALYAHLVRNYPEAEYHSVYEAGFCGFWIHYRLVGLGIHNIVVNPADVPTTTSEKLRKTDAVDSVKLARSLRSGELKGIYVPGSESLETRSLIRLRDSITKDQTRLKNRIKSHLRYLGIEIPEEFSGPGRCWNRRFVVWLKGAETGTAYGRQTLDFLVRQYEALRGQRLEMLRAVRALSRTERFEKPLENLMTVPGIGQLTGMSLLSEIDDIRRFKSADQLAAFIGMIPMCHSSGEREGVGDITVRRSARLRSVLVEASWVAVRQDPALSMAYGNYCKRMAPGKAIIKIARKLVNRIYFVMKRNQPYVKCVVA

SEQ ID NO: 393507 - protein, 351 aa, unidentified
MPDKRNPAIAVIGIDIGKNSFHMVGHDKRGAIILRQKWSRGQIEARLANLPPCLIGMEACVGAHHLSRKLQMLGHDARLMPAKYVRPYSKGQKNDFRDAEAIAEAVQRPTMKFVATKTAEQLDLQALHRVRERLVSQRTGIINQIRAFLLERGIAVRQGLRFLRAELPRILAAPCDALSPRMLRVIEGLAGDWRRLDARIEGLSSEIEILARRDHGCERLMSVPGIGPIISSAMVAAIGTGDAFTKGRDFAAWLGLVPKQTSTGDRTILGKISKRGNRYLRTLFVQAAWVVLVRIGPKHWDRYGLKSWIEAAKKRLHHNVLAIALANKLARIAWSVLAHGRTFEASKMQVA

SEQ ID NO: 393508 - protein, 330 aa, unidentified
MEAYNVILGVDVSKLTLDISCAERLQHIQIENSSKGFSALKQWCKINEIDLQKSLVILEYTGGYEYRFLQFCTSQQIDFCRISGLEIKRSMGMTRGKNDKVDSFRIGQYGEEKIKRLELSKPLNGNILKLKQLLSFRKRLVRDKAGFTATVKEREYMYEVSKKDTIIRIGTKKIKQDERYIQEIEAEIMALIKADISMYQNYRILTSIKGIGPVNAWMTLAYTENFTSFENARQYAVFVGVVPFEHKSGTSIKGKNRVSHLANKELKQELNQAAKTAIIHDPEIHAYAERLFKRKDYSLVLNNVKFKLILRMFSLVKRGEMYVENYNRVA

SEQ ID NO: 393509 - protein, 491 aa, unidentified
MANRKISTFERLQRGKLSRKQCKELGRRLQSPNPGLEIIHRNAAGIDVGSGSHFVAVPPDRDVQAIREFGSWTAALHELTAWLKSCAIDTVVVQATGVYWVVLSDVLEGAGLKVWVVNAQGTKNLPGRKSDVQECEWLRKLHTYGLLRNSYRPPEEIRGLRDLWRLRERLVADAGRAVQQMQKALTGMNLQLTNALSDISGVSGMAIIRAIVGGERDPWKLAQLRQPGVRASEAEIAENLRGTWREELLFELRQVVAHYDFLGKQVVELDQLLEKRMAAMPSREVATKGSPVAEKEEVPEGKRRGRKPKTKVKPPPKNAPAFDIGRELTRLLGVDLRTIDGVNIHIAQTVYTEVGPDLSAFPTEGNFTSWLGLTPMRSVSGGKVIKHEKKRVKNRLADALRMGAWTLERSQRYLRARFRYLKARLDGRRAVKAMARYLACLIYRLMTKGQAWIDRGEAYFEQKKAERELRTLQNRAQKMGLQLVPLATVNA

SEQ ID NO: 393510 - protein, 340 aa, unidentified
MDDVSIIGVDLAKNVFQVHGATADGRPLFRKKIRRSKLLSSLAEIPNCTVAMEACASSHHWAREIGALGHTVKLMPPIYVKPFVKRQKNDANDAEAIAEAASRPTMRFVAVKSTEKQASGMALRIRDLLVRQKTQTINALRGHLAEYGLVAPSGTVHINRLQAAIRDPETKLPRAVVDHAQLLLDHIKMLVEKIDTLSAELRAGARQDPVSKRLMTIPGIGPITAVALAALSPDPTSFRKGRDFAAWTGLTPKQFSSGGKERIGRTSKMGQRDLRRLLIIGAASVVRWAIRRGGDQGGWLGQMLARKPRMLVTVALANKMARIAWALMAKNENYKNPALA

SEQ ID NO: 393511 - protein, 313 aa, unidentified
MSQNTMTTIYTGLDIAKLNLQLHLAGRIHDLPNTAAGHRRLLKLLTTQAGVHVVCEATGGYERDVVAALHEAKVPVSVLNPARVRHFARATGQRAKTDDIDAAVLSAYGQALQPKPTASRTEQEQQLAELVRRRVQVLEILVAQRQQAERLTVPTLRRQAQSLVRRLERDVAQIEAQLKALRTQAAILDARVQKLEAITGVGTITALGVLAELPELGTLNRRQAAALAGLAPHPRESGQWHGRRSIGGGRAPVRRALYMAALVAAHSNRQLKEFYQRLRAAGKPAKVALTAVMRKLIILMNHILKNPNFALQN

SEQ ID NO: 393512 - protein, 403 aa, unidentified
MRLPAAADKAWAGIDVGKRHHWVCVVDQDGRQLLSVKVANDEAGIEAVIGSVTGLAGKITWAVDIIGAPSALLLAVLSQSGQHVRYASGRLVAAMSGAYAGEGKTDPKDAYVIAETARIRRNLPVIGHKSDLVCNLGLLTGHRADLIADRVRMINRLRDVLTSVFPALEREFDYSSCKGALVLLTGYACPARIRRIGQARLASWLRQRRVRGYAGVAARAVTAAQAQRITLPGQDIAAGLISELARNLVALDQRVTELDKQIAATFDEHPQAEIIQSMPGFGPVLGATLLVTAGDLAAFPSAGHLAAAAGLVPVPNDSGRRAGNLHKPRRYSRPLRRVFYLSAQTSMMRDGPSRDYYLKKRQHARTHNQAVIALARRRVDVLWALLRDNRTYAPTPPELAAAA

SEQ ID NO: 393513 - protein, 303 aa, unidentified
MQKFIRIGVDLAKNYFQVHALVSEGGSAVTRKLTRSKMREFFAQIEPCRIGLEACGSAHYWARELQAMGHEAFLMPPAYTKPYVKRGKNDAVDAEAICEAVSRPGMRFVPIKSAEQQATLTLHKTRDLLVKQRTMTVNALRSHLSEFGIIVAKGIGHVSDLLQLAETDARLPSVANASVKALAQQIDAIDQSLDDLEKEIANAHSRSEMSQLLVEIPGVGKITATVISASMPDPNVFRSGRDFAAWLGLTPRQNSSGGKPSLGAITKQGNKYIRKLLVLAWANVRASCGTGSSGCWQKSPRAS

SEQ ID NO: 393514 - protein, 344 aa, unidentified
MEPMYYIGLDVHKRKISYCVKDRSGKIYAEGSLPATRVDLDFWMKTLPHPWSGAMEATMFTGWIYDHLKPHAAALKVAHPLMLRAIAAAKKKNDRIDANKICDCLRCDFLPECYMAPTAIRERRRTLRYRNLLVRQMVQMKIKISSLLMEAGVSYNKQKLHKAGYFRELLASNPDIDEGLGSLLRLCRETVVRLQKTESAMVRSLERDSLLIDRVERLMTIPAVGPITALTWALEVGDVQRFSSIKKAISYCGLCGAEKSSGNTVQRTPLSKQRNKHLQTTLIEAAKMAPRNSADLAMLYDQEKQKGNANRATLAVARKLVAYLMAVDRGQRNFQVVETNCIAA

SEQ ID NO: 393515 - protein, 359 aa, unidentified
MLKQSHYKVGCDAHKHYSRFAVLDGHGNLLDQSRVNHEPGAIRAFLSQFPPGTPVALESVGNWYWIIDEIEAAGCIPRMAHALYAKKMMGRIHKTDKLDAAGLATLEHLGSLPTVWIAPGEIRDARELPRTRMAFSKMRTALKNRMHSTLAKYALSLDTTSDIYAPKWRPQLLQLIDTLPEETCNCMHQELELLGLVQDQIGHLEARIKERIRLTESMQLVKSLPGVGPILSIVIDLEVGSVDRFPAASHLASYSGTVPKVKASGGKQRHGRMVKQANNYLKWAFIEAANVVVMKRRHYLWRRKHVSMLYERTRQRKGHAVAVGAVARHLAEATFWVLTKAEPYRDPVKVSPRQGQARG

SEQ ID NO: 393516 - protein, 352 aa, unidentified
MPKRTRIVIGGVDTHGRTHHAAVIDQQGRLLGDREFPATSSGYRQLLSWLGRHGQLRAVGVEGTGSYGAGLTRVLLDQSVRVVEVDRPDRRTRRQRGRSDPIDAEAAARAVLAGVASAAPKRRDGIVESIRALRTARSGAVKARTAAINQLKGLLVTAPASLREALDGRSTPALVGACARLRPDQTALADPVQGCKAALVVVAQRIQLLDQEVTLADQRLASLVGRAAPRLLQLLAIGNDHAGQLLTTAGQHPERLRGEAAFAHLCGVAPIPASSGQTRRHRLHRGGDRDANRALHLAVVVRMRFCPRTRAYVRRRTKEGLSKPEIIRCVKRYLAREVYHALVADFEALNAT

SEQ ID NO: 393517 - protein, 483 aa, unidentified
MKKHIDRKHACPRGAGRKQIQLIQGLEQINLQAAGIDVGSTENYVCVPQHSVRPGEKNVRKFGVFSQQQDDLVEWLKAYGVTTVAMEATGVYWMSLYDKIEATGLEVVLVDPHSVKQVPGRKSDVLDCQWLQQLHTYGLLRGAFRPDAAVRDLRGLCRQRADIVMNGAAYLQQAQKALVQMNVQLALVVSDINGETGLRIIEAILSGQQDAKELVKLRDQRCKKSSLTEMEAALKGHYTPELLFVLGQTIDGWKFCQKQLALCDQQIAKALAAIPTAKPRPAEVKVPPKTVAVDPAAAEKAKRPKRPRGNNQATVDFSEALRRVCGVDLMRICGLNVLSVLMLIAEIGPDMRHWRSQKAFSSWLGLCPGTKISGGKILSRRTRHVVNRAATILRLAAMAAGRTDTWIGRFYRRKQSHLGAPKAITATAHKLACVIYHMLKYQEEYLPIDVAIHDLQAQQRRLRHLRNEAEKLGCQVVEIQPAA

SEQ ID NO: 393518 - protein, 403 aa, unidentified
MIFVGIDWAEAHHDVCLVDESGQVLAKRRVADGLEGVGKLHALIAEHAEESASVVIGIETDRGLLVGSMLAAGYQVFAINPLASSRYRDRHATSGAKSDRGDARVLADLVRTDRHQHRPVAGDSELAEAVKVLARAHQGLIWTRQRQVNQLRNTLREFYPGALAAFEDLDSPDAIAILERAPTPNLGRALSQAKIASALRRRGRARNLETKALSIQSHLRQPQLEAPALVAQAYGHSVAASVAVIRQLNQQIAALEQELARSFETHPDAEIYLSLPGLGRVLGARALAEFGDDRTRFAHPKARKNYAGMAPITKASGTRKVVLARVARNRRLADACYRWAFSALTTSDGARRRYDSLRARGQTHHQALRALANRLVGILHGCLAKRDTYREDVAWQPTFEVAA

SEQ ID NO: 393519 - protein, 365 aa, unidentified
MRKVSTAKQGRDCSEQKLTIGLDLGDHSSCYCVLDETGHILVEQKVSTRPKGLQAAFGAVQHCRIALETGVHSPWVSRLLSGLGHEVIVAHARNVRLIGESRRKDDRLDAQTLARLARIDPQLLSPVKHRSAKAQADLTVIRARAGLVRARTALVNSARGLAKSYGERLRGCNVRNMNPEKAEGLSPELQAALKPLLVALESLSEQIREYNERIEKLAQESYPQVALLKQVKGVGTLIALTFLLTLEDAHRFQKSRDVGCYLGLQPGRRNSGRSEPQMHISKEGDPYMRTLLVQGAQHMLGPFGVDCDLRRWGLKLAERGGKSGKKRAIIATARKLAVLLHRLWVSGEVYEPLYNSRRVAIPAAA

SEQ ID NO: 393520 - protein, 405 aa, unidentified
MQRKQGIMRAKKCLEKRIIFNHGIKGYQQGLCNSQSKITAAKGELVVEQSKSTVYIKEVREFEYDNEGIEELIKFLGEYKEGIIEATGVYYFHLHEKLTEKGYKVTVINPLHLSEILGKKTDKLDAQRLLVAYMTGVIKGSYIPTGEIRELRELTRYRESLVEKITQVKNEIRKILESAGYKIQPLDKKGRQLLEKLAKGEELNKEEKDELKERLGRNLNDAEKLALKQLVELLKSLENMVKEVEDMIISKIPQPVVELSKIPGVGLISAATIYAEFGDVSRFSSSKAARAYAGFAPRTKQSGESESHSGMIRGNKYLRRAFFLVARVARKSEPFNEYYERLVSRGKSAIKATCALAGKLAGICYHVIKDGVYKGVVKKSFRVPRGKDVNVQDVDVGGVLDSLSQ

SEQ ID NO: 393521 - protein, 371 aa, unidentified
MTHPTSSTVSIPTHMSVQIPTTMGLDLSDRVSTFHVQRGDGLTLSVGKVASTRTQLTGLFQRWKGCRVVMEAGGHSPWISRLAVEVGMDVIVANPRKVELISKNDRKTDAADAEILADMGRTNVKRLYPITHRSQQAQFDLAVPRARTEIVRARTGLINHVRGVLKSNGYRAPSCSADSFARKMSEEGAMPAGLAHALHPLVSLIAQVTAQIQSFDKEMERIAAERYSVAQHLQQISGVGPVVSLCFVLTLDDPERFASARDVGAYLGLVPRKKGSGKSDPQLSITKAGDREMRRLLVIAANYILGPFGPDCDLRRFGLKIIGGGGDRSAKKRAKVAVARKLAVLMHHLWRTGEVYDPFYTAKRRGELVVA

SEQ ID NO: 393522 - protein, 342 aa, unidentified
MKELKQVVGIDVAQKELVVTIGRLLEDLSVDLFSYKVFKNNDKGFLSLVEWVTKLVENPQEVHYVMEATGVYHQKIAYFLDTNQLKVSIVLPNKISNYFRTLEVKTITDKTCSQVIARFGLERKLDLWKRPKTVYKNLQQLTRERDQIVAERVIVKNQLHAEKVEAEPNSMTLKRISERIKLLNKQENEIKNDISKILKNNAELKEEIDRMMTIPGIGELTAVIILAETNGFELIRNKKQLTSYAGLDVKEKQSGTSIKGKPKISKKGNRSIRKAMHFPSLVAVKWDENFKELYARLVSKHGIKMKALVSIQRKLLEMSYVLYKNQTIYDKEHKNSVQTQMA

SEQ ID NO: 393523 - protein, 342 aa, unidentified
MNSLAVFVGIDYHQDSIQVCVMDPQGKVLENQSMPSEVRCVQNFLKNWIGKNRQIERGAIEMCCGAATFADKLKAETQWLVQLAHAGFVSRMKQTRQKSDHADALVLADLARVDYVPQVWLAPEEIRQLRHLVRLRDQHVKYRTAAKLRIRALLREQRLRSPEKPWTKAWLAWLKSTDEIAKPTHFILKDHLETIKYHAKKIQQVEKFMTKITRDDLVMQKLLRQPGVGPVTAWTLRAEIGDFDRFRNGKQLAGFCGLAPCNISSGEKQATCGLIRSGNRVLRKTLIEAAHRLARHEPRWRTFYQRLVNEKNKPKCVAAAAVANRWMRCLFHEMKTPLAVAA

SEQ ID NO: 393524 - protein, 457 aa, unidentified
MTGRNKPVHSRGMSPVHPRAAAIDVGAKMHVAAVGPDRASEPVRTFGTFTDDLNRLADWFQECGIETVAMESTGVYWIPVFEILEQRGFEVVLVNARDAKHVPGRKTDVSDAQWLQRLHEFGLLRASFLPKGEIAALRAYLRQRERLVELAASHIQHMQKALMQMNVQVHHVVSDIMGVTGLRILRAIVAGERDPGVLAANRDRRCHADVETIQRALTGNWRAEHLFALEQALALYDACQEKVTDCDRKIEATLKRIEAQSAKPVGKPPPARSTKRQPNALDFDVRSALHAVLGVDLTQIHGLGPYLALKLVGECGTDLSAWPSAKHFTSWLGLAPSNKISGGKVLSSRTRRSGNRAASLLRLAAVTVGRTDTALGAFFRRLSGRVGKAKAVTATARKIAVLFYNTLRHGMDYADPGASYYEERYQQRVLANLQRRAKSLGYVLQQADTAPAAVGVS

SEQ ID NO: 393525 - protein, 355 aa, unidentified
MYGLKHQKEKRSMDHFAGLDVSVKETSVCIVDDTGRIIREVKVASEPEALLPVLTSDTYHFKRIGLEAGPLSQWLFSALAEAGLPAICVETRHMRAVLKAQINKTDRNDARGMAQMMRAGIYRPVHVKTLRSQKLRMLLTHRKLLQSKAIAIDNDLRGTLRNFGLKVGMVGRVKFEARIKELVENLPDLAVLVEPMLIVRRVLREQIGILHRRLLAIVRNDEVCRRLMTVPGVGPVVALTYRATVDVPARFRKSKSVGAVFGLTCSRYQSGESERSGRISRCGDEMMRVMLYEAAQVMLTRTNKWSWLKAWAMQIARRRGKKRAIVALARRLAVIMHRIWVDGTEFRWTRDLATA

SEQ ID NO: 393526 - protein, 386 aa, unidentified
MKCNDLSRSLVAFDQNSTLVAVVELSLNSWVVAGVVPGLGRDPVKKQSADCNALLKLLHRWRDEAIKAGGEIKRMVVAFEAGRDGFWLARWLRDQGIEVYVIHPTSVAVSREPRRAKSDRLDTQMLKRAVLGWLRGEPKHCSMVEIPTLAQEDAKRPNREHEHLVGERTRIVNRMKATMARHGIRGFKLNLRKARKQFAELRMPEGEPLPPNTLAELERDLARLQQVRDQINTIEKQRLKRLRQAPQEGRHPMILLLAKVLGVGIETADMLVNEALWRNLRDERAIGRYAGMTGSPDESGSKRREKGLARAGNARVRRGMVQLAWRWLMFQKESALTKWFRARTAGGPRDVRKTMIVALARKLLIALWRYVTSGEVPAGAKLRPAV

SEQ ID NO: 393527 - protein, 344 aa, unidentified
MEPMYYIGLDVHKRKISYCVKDSGGKVHAEGSLAATRLDLDRWMKTLPQPWSAAMEATMFTGWIYDHLKPHAAALKVAHPLMLRAIAAAKKKNDRIDASKICDCLRCDFLPECYMASTAIRERRRTLRYRNLLVRQMVQMKNKIGMLLMEAGVSYNKQRLHKAGYFRELLASNPDIDAGLGSLLRLCRETVVRLQKTESALVRSLERDSSLTDRVERLMTIPAVGPITALTWALEVGDVQRFSSIKKAISYCGLCGAEKSSGNTVQRTPLSKQRNKHLQTTLIEAAKMAPRNSAELAMLYDKEKQKGNANRATLAVARKLVAYLMAVDRGHRNFHVVETSTIAA

SEQ ID NO: 393528 - protein, 465 aa, unidentified
MVSSILQKGILHPIALTISKGNPSVQDDCLPLIVCFPEEEQYWVMEADLLIRKIQQRGLYMNHTCGIDWASDHHDVSIVNESGMEVKRMRIEDTLKGYWELLQMLRIIGGDIPIAIECKEHLLISFLISEGYTVYPINPRSVDRYKDRYNVAGTKTDPIDAFALADILRTDRHKHRPLVYSSEEVRRLQLLCNEYDKLLKNKNVLEGQLFDALSKYYPLALNLFYANSCKILYRLVLGYPTYEQLKSVDLDELSRFLKKNHYLNPKHIEKVYRAVQESGYYHTDILDEVLSTTAKTLCSMLLVVTEQLKKVKKKIAQITKSHALGPIFYSLPGSGDVMSAKLLALMGDNQELYSDPAEIQAYAGVAPVIKRSGKVFRVVFRFACNKNQRDALTWFAFCSLQHCPWAREYYDRKRSEGKRHYEACRMLGFKWLRIIFQLWKHGKMYDEKVHQNNLNRFKERKLKIA

SEQ ID NO: 393529 - protein, 406 aa, unidentified
MQTVYERCCGIDVHKKLIVVCLRNGKKEELREYGTLTGDIKELADWLLENKCQMAAMESTGVYWKPIYNILELFDIPAMVVNAQHMKNVPGRKTDVKDAQWIAQLTQCGLLRASYIPGKEQREMRDVVRYRKSLTEERSREMNRLEKILQGANIKLSSFVSSITGVSSKKLIEQAMTDDGVTEENIGALLHVSMLDKTSDLLRAMEGVLTPIQRQLVRAILNHIDDMTKRIKEMDNIVKSQMQKNEDEIKRLDELSGIGSTSAQIIIAEIGVDMSRFPSAAHLCSWAGLSPGNNESAKKRKGGKTNKGNKTLKSTLIQCAQAAVKDKDSFFYAQYQRLVVRRGANKAKVAVAHSMLIAIYHMLKNNASFKDLGNDYYSKFNEQAKICYYLNKLKDLGVTVPVPVPV

SEQ ID NO: 393530 - protein, 354 aa, unidentified
MIAGIDTHKDTLAVAVVDDAGRLIAGGDIPNTERGFVQLVNMFDTHHVLRVGIEGSGNFGRAVAVHLVLRWQPDRPVAVVEVPTLMTSRERRGQLGKGKTDPVDALAIARITAREQQLPPVRLTVGPAADLRALLDYREDLVRERGALVNRAHSELGGLRPGYQQQIPNLTTRAQVRVALELISDDTSVRATLCRRRLERVIAIDTETAELKRQIGGMVAAADTTLTDLYGVGPLIAARFIAEVVDIHRYPNRNAFAAANGTAPLPATSGRTVRHRFNPGGNRQLNRALYTIALTQTRGDTEGRAYYERKRAAGKTKREALRCLIGEVSVMRPGIGLDRGFSVVSGDGLVAEPL

SEQ ID NO: 393531 - protein, 344 aa, unidentified
MKITAIGLDLAKSVFQVHAVDDNGHVIVKKKLRRAQISMFFASIEPCLVGMEACSSAHHWARKLQAFGHTVRLMAPQFVKPYVKANKTDAADAEAICEAVTRPGMRFVPIKSVENQTLLALHRARQGFIKSRVAQTNQIRGLLAEFGIVIPQGPKNIEPQLPMILEDAENGLPSSFRQLLQRLHENARQLRIQAEEIETEIKHWHESNEQSRRLAEIPGIGALTASALVASIGDAKAFASGRQFAAWIGLVPRQYSSGGKAKLLGISKRGDKYLRTLMIHGARAVILRARAKAGYAESWLGRLLARRHKNVAACALANRSARVVWALLAHNRHYQPSYTRGEAA

SEQ ID NO: 393532 - protein, 406 aa, unidentified
MTNIAEHRETYAGVDTHADTHHAAIIDQNGKHLVDAQFPTTPAGYTALTAFILMHGVLVRVGIEGTGSYGAGLARHLTALGHHVIEVIRPNRQLRRINGKSDPVDAYAAARTALTQTKQATPKSGDGNVEQIRYLVTARRSAIKARVAAQVQIKSLLVTAPVLLRERFREVPDETLITRLADLDIRRYPENQGVVIALRALARRHRYIAAEIHTLDQELKTLTECTNPALLAAQGVGPVTAAQLLITGGDNTGRLRSEAAFAALCGVSPIPASSGKTSRHRLNRGGDRHANSALHRIALVRMSYEPRTKAYVEKKRSEGKSNKEIIRCLKRAIAREVFTLLTKDVEVPRVDDLRPLRQALGVTLQQAGTHFNVWLNKISRIERGLMRDDELALAYREWLETTAPTN

SEQ ID NO: 393533 - protein, 338 aa, unidentified
MALFAGIDLHSNNGYYGIVDSTGKRVFSKRLPNKLPEIIERLEPFKSELEAVAVEATYNWYWLVDGLMDLGYPMRLANPAAMGQYDGLKHADDENDAFFVAELLRLGILPQGYIYPKEERPVRDLLRRRMLLVKQRTTHILSFQSLLTRQTSGHMSGSHIKQLEASDVAGLLGEEHLALAGETNIALIRFLTQRILQMEGAVKKRIQLKPEYELLLTVPGIGTILGSTIMLETGPIDRFAKVGDYTSYCRCAKARRTSNGKKKGDNNRKNGNRYLSWAYVEAAHHAMRFLPEAKSFYQRKAAQTKVCVATKALASKLSKACYFIMRDQVPFDKTKMFG

SEQ ID NO: 393534 - protein, 392 aa, unidentified
MDESGTKITARTVTHTAEGWGEWGRELDAGRAQGIAVWAAIERPAGRVVDLLLDHGVVVYPVNPKALDRARDRFRQSGAKSDPFDARVLADFLRTDHGHIRPLQPSSEAAQELKLLTEDCQRHIRQQTRLVNQLTATLKAYYPRALEIAELTSALAREFLPAYPTPAALTALTERQWQRWARAHRLTEARTGELWAVLRQPQLPVPAHVVRAKARLMRALMEQLMPVMAAVAQYRKAIDDFFASIPAAQWARTLPIGKHGITAPTLWARLGDAPGRWESFRHLQAHAGTVPVTKRSGKQQRVVQFRFAGDKALRYVVDPVAFLSLLSSAWARAYYDQQRARGHSHRQALRALGAKWLKIIFVMWERHVPYDEQYHLATMTRQQLRPRQKQIA

SEQ ID NO: 393535 - protein, 401 aa, unidentified
MKTLPGGIDIGSESHHVIIMDDNGKILCDRKVAHKFREFREAIEEFKEIEKQHQGEITFAIEGKNGYGAPFDRMLIESGFKLYNVDNLKLRRFRDVFGAEWRNDRRDAKMLAKMLKLRDYMDTEEETAFIAVQKTPAVHEKLRILSRHQQSLIDEKVRIQNRLRKRLLEVCPDILEYGDTDSKKLLQLLKKYPDFNRYKKITLAALLKIETIGKKTAVSILEGLRNIQYVEELAVIYKAIIASYCRRILELKEEITLLDRELEETGEKSSEVMQLKSIPGVGTKLSSRLAGEIGDIRRFNRESQLAVYCGVACIDDDSGKSKKTKAVYKANRICKATMIEIAGCTIRYVQESKAYYEKKRAEGKEHNHALRCLARQLIKVIFKMLTENRGYICKEELKKAA

SEQ ID NO: 393536 - protein, 417 aa, unidentified
MLKIVFPICCGIDVHKTFLVATIASTDRSSVTTYQTKRFSTFTKDLENLSKWLLDNQCADVCMESTGKYWIPVYNVLELTCEVILAHPKYVKSLRGKKTDRKDSVWIADLFKHGLVKASFIPEKAIRDLREVMRYRTKLVSMKSSEKNRYQNALTVSNVQLASVVSDTFGKSAQALINQLLQQPKDTSFDVLPFLHGSLKKKAEQISESLNGSIDDIQAQKIRSCTSHMAELDSHIEDLQVAADLLASPFTAALRIIESVPGIGHLSALTILSEIGTDMSKFLSAKHLCSWAGLTPCNDQSAGKKKSTRISRAGCYIKPILVQCALAAIKDKSFPYYGQRYKVLKHRRGHKKAIIAIARMMLSVIYTLLSRGELFSKELYEESLKNPMVILSQEEQFQRLAKKFGYVVVKVHEPVPV

SEQ ID NO: 393537 - protein, 454 aa, unidentified
MTKRKKAITSVPELDILEQINADAAGLDIGAEEIWACVPAGRDSESVRVFPTFTADLHALADWLQACKVKTVAMESTGVYWIPVYEILESRGFDVYLVNARHIKNVPGRKTDVLDCQWIQQLHSYGLLHASFRPSEEICALRALARHRDNLIQHRSAHIQHMQKALELMNVKLTEVVSDITGVTGLSIIRAIVGGERDPRYLASFRQSGCKKSEAQIAKALQGNYKPEHVFVLKQSLAQYDFYLRQIQECDAEMEAMYAVMPPSDPQNRAPSPPERKGSKPRKNQANYDLATALYELVGVDLTAVDGIDALTAQTIITEIGLDVSAWPTVKHFTSWLGLAPHNDISGGKVLRTRTKKTKNKANLAFRLAAQSVNRSQSAVGAFYRRMKSRHGPAKATTATAHKLARMVYFMLKNRTDYADPGVTYYEQQYRERALRNLKRKAASLGMELVPMAA

SEQ ID NO: 393538 - protein, 317 aa, unidentified
MAPCNMIAAGIDVGKARLDAQIHGCASRFGVANSKAGYDKLIEWFTGQGVTRIGMEASGGYERGPADAFREAGFEVVLLQPRQVRAFAVYRLKRAKNDSIDAGLIARCAAELESVRAPRDPRLAALDEHLRLVEQIEADSARMKTRREAYRTPRLQRWIAREVARLERRLAAELALLTKAILAHQDLAQRLELIESVEGVGRRTAITLTILMPELGDISREAAASLAGLAPFDDDSGKHKGQRKIAGGRARVRRALYAAALPASFRWNQSLVDLYRRLREKGRPHKQALVACARKLLIFVNTVLARGSAWQKQTATS

SEQ ID NO: 393539 - protein, 357 aa, unidentified
MIVVGVDCHKKTHTAVAVDQVTGEWRTELTVKAHDAGHQDLLEWACSLGDERSFALEDCRHVSGRLERFLLASGQSVVRVPPKVMAGARRSSRTKGKSDSIDAEAVARAAIREPGLPVARLDGVERDVRLLVDHREALVKERTKAQSRLRWLLHGIDPEIEIPPRGLDRSIHLDRLEEGLARLAQTVEVRIARSLLARCRELTTEVTAMEQEISELVRVLVPEVLAVFGCGALTAAKLVGEVGGVSRFSSEAKLALHAGVAPLEASSGERRRHRLNRTGNRQLNVALHRIAVTQIGKYEPAMAYMARRQAEGLTKREAVRCLKRHLLRMVYRRLRQAEIRRNLEATSSPASTVVPAA

SEQ ID NO: 393540 - protein, 358 aa, unidentified
MRTMEQQNNGLTLEKKVYVGIDVHKENWHVTIRTLREEVFNGRIPGSYISLKKVLDRYRGNSVKVAYEAGPFGFWLYDRLTEDGVEALVVPPSTIPIESGNKVKTDKRDSRKLAILLERNMLKRTYVLSEEEREHRDLLRTRRQIVDHRNDVARQIKSKILFYGIPVPFSPKTRLTHRYIAWLKTLAFGTTYLKESLDLLIQLYEYLTQQITRINRKVVALCREKKYHERIKLLCTAPGIGKLTAIELLVELQDMARFKNASQLASYIGLTPAEYSTGEKTRQGRITRCGNKRVRTYLVESTWILITKDPWIRAKYLKLKATRGGKRAVVAIARRFIIRLRRMLLDNVPYNATCSLAA

SEQ ID NO: 393541 - protein, 361 aa, unidentified
MPSTKPVSPPLKHVVGIDIAKSSFVACLGQVNGNQQLLFGKETTFENTPGGFASLLSWVARQRAAAVPLWFVVEATGVYYEELAYFLADQQQFLSVLLPNKVKHFARSTELKSKTDQLDARLLCRLGLERALPAWQPPTPALRQLRALARERQVLTKQGAQLKARVHAYQYSYQPDNRTLARLAAQQQLVQEQIAALDQDLAELQAAEPELARKLTQLTSIPGIGLTTAVIVVAETSGFALVENERQLASYAGLDVVQRQSGLSAHATRISKRGNTRLRTALYLPALSSLRHNPRQIAFYARLRTRHPSGKPGVIAVMRKLLVLCYALWKTDRTYDPDYPTAQSVGQEIAPATEAGRGYAG

SEQ ID NO: 393542 - protein, 344 aa, unidentified
MEQLYYVGLDIHKKIIAYCIKQADGTIITEGKIEAKRVYLKQWAETLPSPWIGAMEATIFTGWIYDFLKPYARQLQVGNPLMMKAITAAKKKNDKLDARTIADLVRCNLLPCCYMASEEERSLRRVLRYRNLLMRQAVRMKNRMATLLMETGQEYNKKRLHGAKYFAELMDQLKDVPESLREILQMSRGALELFESYQKRLLKGLAGNDQLRDRVQRLTSIDGVGEVTALTWALEIGDVHRFTSVRKAISYCGLCSRQVESGGKVIRMPLSKQRNKHLQRVLVEIAKLAPGYNVELARVYDREIGRGSNRNQATITVARKIVGYLLAVDKSGKAFVNKSEKEAA

SEQ ID NO: 393543 - protein, 388 aa, unidentified
MIYVGIDIAKLNHFASAISSDGEELIKPFKFTNDNDGFQLLISKLAPLDKDSLIIGLESTAHYGDNLVRYLVAKNYKVCVLNPIKTSTMRKNNIRKTKTDKVDTYIICKTLMMQESLRFVTFYDLDLMDLKALGRFRQKTIKQRTRLKIQLTSYVDEIFPELQYFFKSGLHQKSVYALLKEAPTPEAIASMHMTHLAHLLKVNSHGRFDKEMAQQLRVLAQKSVGASDSSLSIQVTHTIQQIELLDSQLERVEAEMTEIMKFNDSVIMTIPGIGYINGGMILGEIGDIRRFSSPNKLLAYAGLDPSVYQSGNFQAKKTRMSKRGSKVLSYTLVNAAHNVVKNNATFKAYYDAKMAEGRTHYNALGHCAGKLVRIIWKMMTDNLEFNLD

SEQ ID NO: 393544 - protein, 346 aa, unidentified
MTQYKRIGIDTSKAVFTLHGIDQRDQPTLRINLRRAQMITFFRKLPPTEVAMEACCGAHHWARELTALGHTVLLIPPQYVKPYVKRGKNDRNDAEAICEAAGRPGMHFVPPKSLSQQAQAMVLKVRDTLIGQRTLLVNTLRGHASEFGVVAGKGVGRVGSLLAAIEQDATIPAEARDMIALLGQQIEHLDMKIKALEARLNAAHKANEVSQRLATIPGLGPVTALTLATEIDPAAFASGRHMAAWIGLTPKEHSTGGKQRLVGISRAGNERLRSLLVVCATSVIKAATMPASKQMTGWLRGLLQRKPRKVAAVALANKIARVAWAVMTYGTVYRRSPTNVEVSHAA

SEQ ID NO: 393545 - protein, 430 aa, unidentified
MSYRIAGIDVHKKMLAVVVSDVEVDGEYHFEQRQFGSNPEELRSLAAWLLEQEAEEVVMESTAQYWQPVWGALERYWKRIREKREGASRRSGTLHLAQAQSNRGRRGRKRDFPDAERLVKRLVARELTLSFVPDAEQRLWRTVTRRKYQLTRDKVRLQNQLESLLEEAHIKLSSLVSDLLGASARRMLKALADGETDPVALAALADQNLRATPEQLCDALGACTDLKLVYRRLLKMVLEQLQFLEQQIGQLDQEMASLLSQHQDAVQRLAEVPGLGVDSAQQIIAEVGPTAATFPSEKCLSSWVGACPGDDESAGVNYSHRSPQGNRHLRRLLNQSANAAARTKGSIFEIVYRRSVPRLGHNQAIGAIAHRQCRLIWLILHRGVRYEERGPAVTKRSKQKRTARMIRQLRSFGYSVELINSQQVAPGQAQ

SEQ ID NO: 393546 - protein, 359 aa, unidentified
MLETMTYVGLDVHARSTHAAAIDVGSGELRRARFGGGTEQVVEWLQTLPLPLKGCYEAGPTGYGLYRAAAAAGLQLEVIAPSKTPRAPGDRVKSDRKDAELLARLLLAGQLKPVAVPPPPFEAARHLARAREQVRGDLMRCRHRVSKLLLLHGCVYEGSGWTKTHRRWLAQQRFDEPAAELAYLDCLAAVDGLVARKQTLDERLSRLAFESDWAQTVARLRCFRGIDTLTAFVLCLEIGDFARFPRPAKLSGWLGLVPSLDQSGESRRQGAITKTGSGYARRLLVEAAWHYLPRPSEGPTLAARRVGQPDHVLQIAHRAERRLHRLSQRLRERGKPGNVTTVAVARELACFLWAAAVAD

SEQ ID NO: 393547 - protein, 395 aa, unidentified
MVDPLIRVGVDVGCKTHQVGIAGPDGTVLEKFSIPHTQDGFREFFERIEHHRQKLGLPVAVAMEGYNGHARPLDKMIMEKGYKLYNVNNLKLARFREIFPGPAKTDSLDVRKILELFHLKGHLPVAKDVLQEVPGVPKENEKLKRLTRRRKQLVHEKVRVMKRMQADLQAVCPELLDNLWFLRFLSSRDDLEELARLTPEEVRKIPGIGVKYAELVRKWQRGAKFSPEVEYVGPMIVADAQRILGLLSEIAGLEEAIEELCEESELARRLRSIPGFGVISAAELAGEIGTLERFGSEASLALYLGMCPLDKQSGQTHGTRSPRQVNRRAKAAMMVAVAHHIWEVPESRAYYEKKRAEGKRHNQAVRSMARHLVRVMWSMIKHGRDYEVREASCLC

SEQ ID NO: 393548 - protein, 438 aa, unidentified
MSNKVFFNLDDLFISVGIDVGADFSWMSIALPNQQFVGKPYKILHNSIDSLTTAVSKIKEAEELYSLESRIFLESTGIYHYPLFCYLRDKGFNCSVINPIITKNSTNINIRKVHNDRFDSKKAALVGLKPDLKVSLMPSDLALNCRNLCREYYDLMDNRSAYVNKLQGELRMAFPQYLGIFSKVTINTSLTLLETYTSPSAFLKADKQEIIDIIKSTARFGLTYAQNKYNAIIQAATDANQFGYIIDSNIKRIRLYISFIRKYDEEINNILESLHELVDANEDADFVKQIHLIETFKGAGFLSAVSIMGEIGDFSAFSKPKQLFAYFGLDPAVKQSGKFEGTKVQISKRGSAIARRVIHTLTLQSISISRNGEAKNPVLREYYLKKCDSKPKLVAMGAVSHKVCNMIFAILRDNKPFKIIAPQEHIKQYNAAKCDIAA

SEQ ID NO: 393549 - protein, 342 aa, unidentified
MVVYYIGADVHSNNTELSIERNGQIVARHGVPTNVRAIRQVLTVLQGRKHLTFEEGPLAGWLYRNLKDHVDSLIVCDPRRNRLISSDGDKDDRIDAAKLARLLRGGYLRPVYHSDNPQRVTLKRWVALYHDRVRDATRAINKLRGCCRVYGERIPRRALRDPSARQAWWASLEPDLAEQIDMLWLSYETNATQVRIARGQLARRASAFATIGHWSALPGIGPIRATTLFAYLDTPWRFQRKNQLWKYCGVGLQRSASGRDRHGRERQARLRLPWPVNGLLKNVVLGAAMSAIRSRDNMFRRDYERMLRDGALASNARHTVARKMLTVMWGMWKSQRPFEPWA

SEQ ID NO: 393550 - protein, 421 aa, unidentified
MRFYTKPHRYYCGIDLHARRMYICVLDAEGQVRVHRNGPATPEHFLATVAAYREDLVVAVECIFTWYWLADLCAQEGIAFVLGHALYMKAIHGGKAKNDRIDAHKIAVLVRGGMLPMAYVYPREMRATRDLLRRRCHFTRKRAELLAHIQNTASQYLLPTLGKIAYHGNRGGVAEQFRDPEVRKSIETNLALVDHYDRLLSELELHLTDTAKVHDVNAFYRLRSVPGIGKILALVLLYEIHDIQRFPRVQDFVSYCRLVKCAKQSDGKHYGYSGTKIGNAHLKWAFSEAAVLCLRKNPPAQRYVARLAHKHGKGKALTILAHKLARAVYSMLRRGQAFEAAKFFGRTGPDDLAARPEIDRTPRDEGHDASRSGPPRHDREGGRYLDPPEMKRHAPPRRVHELDSVPTQCAVDAAEGVEEET

SEQ ID NO: 393551 - protein, 370 aa, unidentified
MREFIRVKQEAVKGGELAGAGRRVAAVGLDLGDRLSQFCEIGEGGEIVQEGRLPTTEVGLRRYFGGMGRVRVAIETGMHSPWVSRVVSSLGHEVVVANSRKLRLIYENRRKRDKVDARYLGKLARLDPELLFPVHHRSESRQKDLAVLRSRGALVSARTQMVNHVRGSVKSIGSRLPSCSAEGFARRVGEQIPGSLKETLSPILETIALVTGQIREFDRKIERMAREAYPEAQRLMQVRGVGALTALAFILTLEDAGRFRRSRTVGAYLGLVPALDSSGKLNPQLGITKQGDVFLRRLLVGSGQYILGPFGRDCDLRRHGLLIAQRGGKNARKRGVVAVARKLAVLLHRLWLTGEVYEPLRQRGQKQEAA

SEQ ID NO: 393552 - protein, 338 aa, unidentified
MKLYAGIDLHSNNSMVVIIDEQDRVMFEKRLPNELERILFALASFKQWLVGVDVESTYNWYWLVDGLMQSGYSVHLAHPAALVQYQGLKYSADEHDARWLAHLLRLGILHEGYIYPRQARAVRDLMRRRMQLVQTRSAQVICMQTQFTRSTAKSPSGNALKRMLPDEIETLLEERNVASGVRANLEVVRTLNREIARLEREVSEQVKLAAQYEPLLSIAGIGRILALAIMLETGAIERFAGVGNFSSYARCVASKRLSNDKKKGEGNSKCGNKYLAWAFVEAAHFAVRYNPRIKRFYERKAAKTNKVVATKAVAHKLARAAYHVMRERVPFDEARAFA

SEQ ID NO: 393553 - protein, 348 aa, unidentified
MQSTLNLPVIGLDLAKSVFQLHIVDVESGEIQRRQIKRAKLTEFFAKCNRSLVAMEACGSSHYWARTIRALGHDVKLLPAQHVKAFLLRDKTDAMDAQAIWVAAQQPHILPVPVKSERQQACLALHGMRRQMMKMRIMQTNALRGILAEFGIAMPVGHNQLLKMIHAEIAEAQEKGHLPADLVICIQEQLKRIDGLQDDIDHIGQRLGAMIREDRQMQAIQQIPGVGDLTASALVAAVGDFCAFKSARQFASWVGLVPRHVGTGGKTQQLGISKRGDTYLRTLLIAGARAVIARSGKSDWIERLLQRRHYNVVVVALANKMARTAWAVLVRGMAFDRTRWNPLETVTA

SEQ ID NO: 393554 - protein, 392 aa, unidentified
MFFVGIDIGKNNHVASMMDDSGKVVFKAFSFPNTSDGGHALFSKLTSYSSSTDDFEIGMEATGHYWLSVYSFLFEKKFLLHVINPIQTDGWRRGTEIRKRKNDIIDSVLIADLIRYGQFVETRLADEDLFSLRTLTRFRTYLVESISNLKRKVVCVLDQVFPEYQSIFSDIFGKTSKEILLQFSSPIDFESVSSQTLAELLAKLSRKQVGPAKAAQLKAAASCSFGVTFAKSSFTFQLKALIEQIAFIEKQVKETETEIAGIMEKLESPITTITGIGNVTGAAIISEIGDISKFDSPRKLVAFAGLDATVTQSGEFEAAHNVMSKRGSPYLRKAIFQAALVAAFKDPVLSAYYQKKRAEGKHHLTCIGAVARKMCNIIYAVVKNNQPYVPKA

SEQ ID NO: 393555 - protein, 312 aa, unidentified
METFVGIDVSQDFLDVHVLPSGEAYRVGNDTDGITRLIERLQALEGPAPETIALEATGGLEHSAVAGLAAANLPVVVVNPAQVRAYANALGKRAKTDPLDAEVIARFVAATRPEPRPLKDADTQALSQLVSRRRQIVQMIVAEEQRRHQTLDRQMQKSIKRLLAALRRELENLDKSLDEQIRNSPIWRVKEKLLTSVPGVGPTVARTLIAEMPELGQLNRRQIAALAGLAPWTRQSGKWRGKSFIGGGRERVRSVLFMAALVAIRHNPVLRTFRDRLVESGKPKIVAVVATMRKLLTILNAIIRDSKPWQNA

SEQ ID NO: 393556 - protein, 451 aa, unidentified
MEILYTNCAGLDVHKKTVKVCLLTPGSNGRPHKEFRTYATTIEELLNLSDWLHEQGCTHVAFEATGVYWKPLYNLLEGHFEILVVNAQHIKAVPGRKTDVKDAEWIADLLQHGLLKASFIPSGSQRELRDLTRYRVKLTEEKAREINRVQKTLEDTNLKLGDVVSDIMGKASRTILYAIADGETDPSRLAAFAIGRVRASQEQLEAALTGRVTDHHRFLLREHLTQIRHLELAIDRVTAEITRRFTPPSPPEEPTASEKEDEATQERASESTPLPEAPVPPQAALSWTQAVVLLCSIPGISERTAIGILAEIGTDMQQFPTAAHLASWAGVCPGNHESAGKRLSGKTRKGNPQLRCLLVQAAHSASHQKHCYLAEQYRRIAKRRGAKRAAIAVAHSILVIIYHLLSNQTTYLEKGETFFEERDRQGMEKRLVRQLSRLGYQVQLQPIDQAG

SEQ ID NO: 393557 - protein, 430 aa, unidentified
MGLIVPNAMHPEHDEQPMPYEWFVGIDWGSQQHQVCMLDRDRRRVGERVVDHDGASLARLADWLLTVAAGQPQRVAVAIEVPRGAIVEGLLERGFHVFAINPKQLDRFRDRHSAAGAKDDRRDAFVLADSLRTDQPSFRRLHLDDPQLLRLRELSRAEETLLEDFRRSANRLRDQLHRFYPQMLELCSAADEPWLWDLIDLAPTPAHAVLLSGEQVQQVLKAYRIRRVEAHEVLTCLQAPALPVAPGAAEAAQAHCELLLPCLRVLAAQLQACHQQVSALLHTLAEAPGEGGRASDVAIVLSLPGVGRKITAWLFAEAAQPLAERDYQVLRTHGGVAPVTKQSGKRRQVMMRRGCNSRLRHALYHMARVAMQRDAHFSSVYAALRAKGQRHGQALRTLGDRLLRILMAMLRNGTCYDASRIRREPVVQRG

SEQ ID NO: 393558 - protein, 345 aa, unidentified
MESMYYIGLDVHKKTISYCVKDASGQVLQEGKIGATRGELDSWMKTLPQPWSVAMEATIFTGWIYDHLLPHAAQVKVAHPLMLRAIAAAKKKNDRIDAGKIADGLRCDFLPECHMAPTEIRDRRRTLRYRHLLVRQMVQLKNRVSGLLMETGVSYNKQRLHKVGYFRELLSSNQEIHSNIRPLLKLSRDAIVRLQKTEYALVSSLQRDPLLADRIKRLRTVPGVGPITALTWALEMGEVSRFPSIKQAISYCGLCGDEKSSADKVIRTPLSKQRNKHIQRVLVEAAKLAPRENHELALVYETEKQKGNANRATLAVARKMVAYLLAVDRGKRDFVPAEDHRGAAA

SEQ ID NO: 393559 - protein, 345 aa, unidentified
MPVYAALDVSKASTQVHVVDETGSCLWRGKSLTHPEALVETLAPFANDLVKVGLETCCLSTWLGHELRGRGLPVVCMDARQAHAALSVTMNKTDANNARGLAHLLRAGLYREVRLKSWDDVRLRTLIHARRALLRAQIDVANALRGALRTFGLMLAAGPGNGGARAFERRVREHLASRPDLVPIAMPMLEAWQAVRSQVVQHDRAIRAAVRADPRCRLPMTAPGVGHLTALGFVAAIGDPEAFRSGRTAAAWIGLTPRRYQSGTIDMQGRISRHGDKLLRSYLYEAAAHILTRAKTDSAIRRWGTALRERIGFKRASVAVARKLVVVLHAMWRSGRPFEAGNAAA

SEQ ID NO: 393560 - protein, 319 aa, unidentified
MEAPQVSFRQVVSCGCGLDVHKKVVVATIDGEGIKKQTREFSTVTSSLKELRDWLLEHKVTHVAMESTGVFWKPVYNILEPAGLTVWIVNAAHVKYVPGHKTDKKDSAWLCKLLLAGLLKPSYIPAKEQRELRDLTRYRTTLIQSNASNKNRIIRILEDANIKLSSVLSSTSGAVGTKLINKLCDGMEVTMQDIDEVYHKKLEATKEELYEACQGFVTEHHVYMLQLIRKEINDTEQTIESLNQRIKEVLSPYENALELLKKVPGISAKSVEDLVAEIGLDMSVFPTEKHLASWAGMAPGNNESAGKKKADEQPRETSR

SEQ ID NO: 393561 - protein, 424 aa, unidentified
MGKTIPICCGVDVHKKFLVATILTGDYLIPQCKQKHFGTSFRNLLAFKQWLLDNNCKDVCMESTGKYWVPVWNVLEGIVNVVIANPKWVSAVKGNKDDKKDSKWIGNLFRMGLVPSSYIPGKNIRILREFTRYRSKLVAMRASEKNRYQNAFTVCNLTLDAVVSDMFGKSAMAIENYLLDTDAVDPEICVSFLQRSLKKKSAEIIEAVEGFNMTQEQKERVRIIQGHFADIDKRISQIDEIIGRLTAEYEGTISLLCTIPGIDRRLAITIISEIGTDMSEFGSSRRLCSWAGLVPGNNQSAGKKKSVKITRAGVYLKPALVEAAHAAVKASEKSPYFRIKFEKIMKRRGKKRAIIAIARMILTAIFAMVSTGEVFNPSDLQRFDMPEELQKKRTIAEAKDAVKLLVSLGVVPEGSISLEALLAS

SEQ ID NO: 393562 - protein, 390 aa, unidentified
MEHPMQKLNDLSRSLTALEPDGTLIAVIEMSLSSWLVAGIVPGVERQPLKKLAVDESALLKLLHRWREEAEKAGRRIERIVVAFEAGRDGFWLARWLKARSIEAHVIHAASVAVSREHRRAKTDRLDSELLKRAFLGWLRGERDHCKMVAIPTIKDEDAKRPNRERESLVGEQSRIVNRMKAALVRLGIRGFNPKLKKAAGRLEDLRTPEDEPIPPNTLAELRRDMERRRLVRDQIRQIEEARLVRLDHAPSDGPHAMVRLLARVIGVGIETADMLAHEVLSRNMRDRRAVARYAGLTGSPDESGRKRREKGLARSGNGRVRRGMIQLAWRFLMHQKNSALAQWFRARTENARGTRKPMIVALARKLLIALWRLVRQGVVPDGVVLRPAQ

SEQ ID NO: 393563 - protein, 343 aa, unidentified
MPHYVGLDVSQKTTAICVVDEQGRRLWRGVCATDPGAISARVSQHAGVDAKVGIETGSMTPWLVHCLRSAGLDVQCLDARKVKAALQMQLNKTDENDAEGLAQIMRTGWYRAVHVKSLDAHRARALLGARAQLVGMTTRLSNMIRGVLKTFGLLPGAGRGLRFDRKVEALLESAPEIALVVRPLLATWRQLREQIAVFDKAVLQQVRADPICRLLMTVPGIGALSSLMYVSTVENPSRFSRSRAVGAHLGLTPRRYQSGETDRSGHISRCGDGLARTLMYEAAIVILHRVKRPLHLKDWAEAIERRSGSGKARVALARKLSVILHSVWRSGEPFRWSAPVMAA

SEQ ID NO: 393564 - protein, 482 aa, unidentified
MAKRKMSTFERIRRGEKLNRRECRAFQHALAEEGPELEVVHSHAAGIDVGNKSHYVGIKPGSCEQPVQEFGSWTADLKRMVEWLKSHGVKTVAMQSTGVYWVALYEELEQAGFEVYLVNARGTKNLPGRKSDVRECQWLRKLHTYGLLRNSFRPPEEIRAVRTLWRLRERHVREAGRAIEQMQKALTTMNVQLANAVSDVSGVTGLAIIRAILAGERDPWQLAKLRDPRVEASEAEIAYSLQGNWREDVLFELRQVLEGYDFLGRQMARCDEELQKYMAALPSREVSPTSTPAVEAGAVGKRARPKRKSKNAPSFDLAAELRRTTGVELLSIDGINVMIAQTILSELGTDLTAFPSESHFSAWLGLAPQREISGGKLLRHRPRRVKNRVANALRMAAEALSHSDSYLGARYRHLRARLGGLKAVKAMARYLACLVYRLFTYGQAWVDRGSAEYERKRQERELMILKRKATQMGMRLVPDQVG

SEQ ID NO: 393565 - protein, 339 aa, unidentified
MNNNVIGLDIAKNIFHMYTFNEEKSKPVKKKLKRAELLAFFANYPASLIGIEACGGAHHWARELTKLGHEVILLNARYVKSFVIGNKNDFNDAAAIFDAVTRPNKRTVSIKTIEQQDIQLVHKIREGLVGKRTALVNQVRGLLSERGIIIPKGIKKVRVELPLILEDAENDLTDLSREMFAEQYEKLVVLDEEVKKQDKRINRLSNSNPLSKSFLDVPGIGPITATIVASDIGIGKGYQSSRDYAASLGIVPRQHSSGDKQVYLGISKRGNRYIRTLLIHGARSVLKYCSGKEDKLSVWLQALIERRGFNKAAVALANKNARILWAMASQDKEYDAALV

SEQ ID NO: 393566 - protein, 373 aa, unidentified
MQEISKIHAGLDVHKDSISIAAAEPGRAAAKVIGTISHDVPKLLKMLTKLGGPKDVHVVYEAGPTGWGLQRALTAKGYDCEVIAPSKMPRRPGDRIKTDRRDCVQLAECSRAGQLRAVWVPQPEDEAIRDLARAREDAVNARRQLRQQLKGMLLRHDVRYPGKTSWTKAHYEWLGKLNFPELATQTAFTDYWLAVQAGDDRIKGLNAALQECVKGWRFAPQVAALQALRGIDVTSAIALVAEIGDFSRFDHPRKLMGYLGLVPSERSSGERTARGGITKTGNAHARRLLTEAAWNYRFKPRLGERARQRQEGLSQQVRAIGWKAQLRLTGRFAKLCGRGVQKNKVCVAVARELTGFVWAVAQAAGASTQKPSN

SEQ ID NO: 393567 - protein, 341 aa, unidentified
MTEAYDGRQVVGMDLHRRRSVLVRMTEDGRKLETARIENSPRALRAVMARAGVRPRATYGWYWAADVLAEAGAEVHLAHPLGVKAFRYRRVKNDERDCADLADLLRAGLLPEAWIAPPEVRGLREVTRYRHKLVGQRTSCKDQVHAVLAKCGVAVRHSDIFGRGGSAWLDGLVLPAPYAGKVASLRALIGVLDGEIARLEQQAAGMLAGHAGYAALRQLPGIGPVLGAVIAAEIGDVTRFARPGQLCSWAGLTPRHRESDTRVTRGHVSKQGSRMLRWALTEAIQRQPAGSRPRQVQDGLVARRGAEARNIAKTAAARVMLTQVFYALRDGHIRRAASQAA

SEQ ID NO: 393568 - protein, 342 aa, unidentified
MDTIGLDLHKRASQLCVLTEAGEIVERRIVTSRERFIAVLGSRAPARILLEASTESEWVARHLESLGHEVVVADPNFAPMYATRSRRVKTDRRDARTLMEAVRLGAYRAIHRASAAQRHVRAQWAVRDALIRTRTRYVNVVRALTRRDGLRLPSGGPDHLEAKLAALPLPALLAAEVAPLRVLLGPLNGEIVAADARLASVVAGDPVVTQLCTAPGIGPVTAVAFVATLDVVPRFKSAHQVEAYLGLTPQEYSSGERQQRGRISKTGNVRMRYLLVEAAWRVLRSKDAAAAPLRAWAEGIAQRRGRLIAAVALARRLAGMLYAMWRDGKDYRAPRPAAVAVA

SEQ ID NO: 393569 - protein, 310 aa, unidentified
MEPVFVGIDVAKAHLDVHVRPSGEAFTVPRDGESVANLADRLKALSPVVVVLEATGGFETIVAATLSGAGLPMAVINPRQIRDFARSVGQLAKTDALDAAVIARFAEAVKPEPRPLADEQTRMLSELVARRRQLVEMMTAERNRRPRLSRKHLIKALDRHLAMLQKDLSEIEREIDTTIRGTPIWHERAELMTSVPGVGPTLARTLLADVPELGTLDRKKIAALVGVAPLNWDSGTYRGRRTTWGGRSKVRAVLYMAALVASRHNPALKSFYQRLIQAGKAKKLALVAVMRKLLTILNAIVRDQKPWQSA

SEQ ID NO: 393570 - protein, 343 aa, unidentified
MQDVATVGLDIAKQVFQAHGADASGETLFNTQIKRENVLEFFSKLKPCLIGMESCATSYYWARQLLEFGHDVRLIHTSYVKPFVKRGKTDANDAEAINVALTQKTMRFVPVKTLNQQAAITIFRTRSLFVSQRTQLVNALRGHLAEAGLIAAKGIQNYSKLVNLMETAADTVLPTVMKQALTDICDQIHRLNDLVTKLDKEIERRVRHDENACRLLTIPGVGPKIAMCVIATIPDIHRFPSGRHFSSWLGLTPRTHSSGGRSVLRRITKMGNSELRTMLYLGGTVIMMRDKKTPIGRWASRLRARRPYKVAVIAVANRIARIIWALLTNGGVYDLTHGREASA

SEQ ID NO: 393571 - protein, 314 aa, unidentified
MSQPLFVGIDVAKDTVEVACSDASSHSFTNNEAGHAKLLRWLARKSITLIVLEATGGYEQACAVALAAAGLPVSVLNPRQARDFARAMGKLAKTDRIDAAVLAEFAAVLHARGHQPRPLPSMEQRELAALVARRRQLVVMLVAERQRLGVAHTRAKPSIQAVIELLLKQLADIDDDLQRTLRERHADLSDLLQSVKGVGPTTASTLIAELPELGLLTRKQITSLVGLAPLNRDSGTFRGQRHIFGGRASVRRVLYVAALVATRFNPAIKDCYTRLVAAGKPKKVALVACMRKLLITLNAIARTKTPWRNDFALA

SEQ ID NO: 393572 - protein, 355 aa, unidentified
MEPVVGIDVAKGNSVVQAFLMRNEPYGKVEIISHGESGFERLGELLTELQAQTLVAPIVVLEATGHYHRGLVGYLERGGWKHFVVNPLQSKRVKGTHLRKVKTDAADAWHLAEMYYRGDVRPHRTWEETYSELQHVTRQHEFITGMFVQAKLNARALLDQVFPAYTEIFYNLFSVTALKVLERCLNGKTEELVETIQEFARKSHSKRWAHEKVEQLDRLLISWNKQPRSPSQTAMLMSMIQLLLEFINQLSQLEKQMDEIASALPEVELMKSIPGIGDKLAAAIVAEIGDVKQFQSAKQLVAFAGLDPSIFSSGKFTATSSRITKRGSKRLRRSLYLAVQWTTTEHQQQDQGVFR

SEQ ID NO: 393573 - protein, 399 aa, unidentified
MGEGMVAGIDWASEVHVACVMDGDGAVASRFSFTHDGAAIRAMAGQLRAAGVAGVAIERGDGPVVEELLSAGLAVFVVPSRQIKGLRTRYGSAGNKDDRFDAYVLADTLRTDGHRWKPLRPDTGPTRALRAACRSRKDLVETRVQVLGQLRANLELAFPGTIGLFTKLYSTISLAFLQRFPTAAKAAWLSPKRLASWLASVGYTGGVSAGILYDRLATAAPGLTGAEGEARGQITLALVRVIGALNTQIAALDAEIGRLFAAHPDRHIFASLPRSGTIRAATLLAEIGDCRQRFPTDDALAALAGACPSTRQSGKRTQAVFRWSCSKKLRAAVMDFANGSRMADPWAAAIYAAAIARGCRHPHAIRILARAWLRIIWRCWQDGAAFDPALHRSRQTATA

SEQ ID NO: 393574 - protein, 358 aa, unidentified
MSKHSENQEVKVMGIDLAKRQFQVHGVDVGGRKVISKKFSRQKLKEYLVTLLPCTVAMEACAGAHYWGRLLRSYGHDVRLIAPQFVKPFVKSNKNDAADAEAICEAAQRPTMRFVAVKEVEQQDIQSIHRMRSLAVERRTAQINQIRGLVLEYGIEIPTGRFNLLKRLPEILEDAENGLTEFFRKELFGLYEELRHLDARIEHYDEKLKQIAQADERLQRLQTIPGIGPVIATALLAAIGDIQAFKNGRELAAWLGLVPRQHSTGGKATLLGISKRGDVYLRQLIIHGARAVLRWADRKTDRTSCWAAALKVRRHKNIAIVAMANKMVRVAFALLKKGENYRVQPLVAHNTRLGPIEA

SEQ ID NO: 393575 - protein, 338 aa, unidentified
MKRYLGVDLHRNCFTVYTRQEDGSGESREWSIRSLKAFAKMVTANDAVAVEATGNVRLFCEALKDRGCRIVVVNPHQFQVISRSVKKTDEHDAKVLAEFLAKDMLPEVRMKDEAHARVASLAQTRDKLVKLRTTLKNKVNNLLAARGILIRKESLASEKGLAGVLAAPVSELERLELEILVGEIRHLNESIKKLEGLLHGQGPKLPGWDNLTSIKGIGDTGASILLSTIGKIEDFADEGKLAAYFGIVPRVSNSNETEHSGRITKRGCKLGRTTLVQCALIAARYSPYLQTYYRRIAAHRGTGKAIIALARKFLGIIYKTLKNNWVFEDFPNFVLAKT

SEQ ID NO: 393576 - protein, 345 aa, unidentified
MTDLNIKKNNHEAKLSLQAGIDVGSEELILVIRKNSKSFNPQKFSNTPADRARLVKKLVKLPGIIVCLEATGIYHFDLSIALYDAGVSLMVVNPKASHNFAKVLMRNSKTDTVDANTLAEYAERMDFVAWTRPSDEKIALRCFSRRINALTHQKAAAKNHLHALTATQATPKAVLRDAKLAITHLQKRIDRLKAEALVLIGKHSELERVLELLTGINGIAETSAIALMGELLLLPPDLSHREWVKFAGLDPRAFDSGKSVHKKTRIAKAGNRYIRAALYMPALSAHQHDPHVGAYFQHLVVDNGKEKMQALCAVMRKLLHAIHGMLKHDKPFDNTRFYAIPAVVG

SEQ ID NO: 393577 - protein, 337 aa, unidentified
MALYCGIDLHANNSVLAVMDEQDKALYEKRLPNELPQILGALEPYRQDLAGCVVESTYNGYWLVDGLMDAGFQVHLAHTGAVPQYAGIKYTNDESDARHLAHLLRLGILPEGHIQPKAQRALRDLLRRRLLLVRQKTLHHLSLQSLIARYTGQRLSANQIKQLDNAAIAALLEEPIVLGGQITCLARRWLEEAVEVLEHEIQKQLKPRLEYQLLTTVPGIGQALGSTIALETGDIGRFPSPGHYASYARCVKSEKVSNGKLKGRGNAKNGNKYLAWAFMEAAHYAAIWSPPIKRYYQRKQAKSHILVAKKAVANKLARACYHMLSRQEAFDVNRAFG

SEQ ID NO: 393578 - protein, 366 aa, unidentified
MHNTTPDVRVTVGVDTHKDLHVAVAIDALGRRLAELVVPATAAGYQQLHRWAHDQGQVDAFGVEGTGSYGAGLARHLRRAGSRVIEVNRPDRATRHRKGKSDPLDAEAAARAVLAGTATATPKDGDDQVEAIRLLKLTRDSAVKAQTQAVNQLKAMLVTAPAQLRESLAGLGLITLLERCAAARPGNPTTPQSAAKHALRLLARRALALRAEAKHLRELLDGLTAAAAPTLVELTGVGPDTAAALLIAAGDNPHRLHSEAAFAALCGTNPIPASSGKITRFRLNRGGNRQANAALHRAIITRMHWHEPTKAYVARRTAEGKTKPEIMHCLKRYLPRQVYHCLVPRTPLDPVVQQPRDPRDDLANAA

SEQ ID NO: 393579 - protein, 359 aa, unidentified
MQTQSNKIDFTGQNIYIGFDVHLKSWTVTVMTERLTHKTFSQPPKPEVLYNYLAKNFPGATYYSAYEAGFCGYWIHNKLVELGVNSIVVNAADIPSTGKEKVMKTDPRDSIKIARSLRNGDLKPIHVPSIKTLEERGLIRMRSTLVKDLTRYKNRIKSFLYFHGIEYPEVFNRPKTHWSNRFNQWLEGIEFNDLISKATLDMLLGQSNSLRGSVLQITRQVRELAKTDRYKMQEKLLRSIPGIGILTAMIILTEIETINRFSNIDQLCGYIGLIPSTCSSGDKEVIGDLTPRGHSILRSAIIESSWVAARLDPALNKSYHDYCKRMEPNKAIIRIARKVSSRIRFVLKNNQPYVFSVVK

SEQ ID NO: 393580 - protein, 342 aa, unidentified
MTTIDYIGFDIHKKTISFCAKAQDGRILDEGTIPAQRGDLKAWAKERPRPWVGAMEATLFTGWIYDYLKPLAQELKVAHPPMLKAIAASKKKNDQVDARKIADLLRCDLLPECYMAPSPVRAMRRVLRYRNLVVRQATRMKNRIAGLLMETGTPYNKQRLHGKAYFGELLGSLRQMPDAVVELLKLSRGQLELFESIQRRLLRELGERPELSQRVERLQSIRSVGEVLALTWALEIGEVSRFSSIGEACSYCGLTSAERNSGGVEQRGPISKQRNKHLQTILIEAAKLAPRFNPQLAAVHERELQRGNRNRATLAVARKLVAYLMAVDKSGKPFQPQASVEK

SEQ ID NO: 393581 - protein, 414 aa, unidentified
MEKQWNIVCGADIPKKFLIATILSRDGTKITKRFGMTLDELLNFKNWVIENGCEQVAVESTGTYWVPIHTVLEGSIGLIVGNAYKIKHTPGNKNDLDDADWIAELCLNGMIEPSRIFPKADRDLRRLTRIREGYVNDMTREKNRIHHALESCGIKLSSVLSDVFGKAGQSILSGLLEGRTIDDILKGVNLKRIKATAEEIREAIKGSLDFTQILLIRGSLEQMEAIQKRINEIRKEIKSRIAYRKEDLKIAMSIPGVGFTSASTLLAEIGDITDFKKPEQLASWAGLVPSVYQSAGKLITGSITKHGSRHIRWILVQVARVIARGRNSKLKRFFLRVKSKKGSNVAVVALARKILCILHHLLINREMYKEDGINKKIKIDVGNEFSQREMDLEEMIKYIIRAGYEVRKGSAGGG

SEQ ID NO: 393582 - protein, 433 aa, unidentified
MACCRQVDSASASVASHVFSIDGEESQWELKPIFQRVIGLDIHQAQVTACAIIGNPDGTVEVERRQFGSFKKDRRALADWCATWQPDAVVMESTGIYWKSPYAALEQVGIRAQVVNACHVKQVPGRKTDVGDAEWLAMLARAGLLRGSFVPPAPLRELRLIARQRQKLVGMLASEKNRLHKVLTDGGIRLGVVVSDIHGQSARAMIKALIQGATPQEVLSLASHRLKASREEILDALQGDLSACHRFVLDEVMHHIEALEAQIARFDTRLLDGLAPQQHALALLQTLPGVDTIGAALLLVEIGDDMKAFGSADRLASWAGLCPGNNESAGKRKSGRTRKGNPYVRRVLCECAHAASRTQCALRTKFQNLVVRRGHKRSIIALAHKMLRIIYFMLSRGTYYRDAATDYEALSVQRNAARWIKKLIKFGFLPDPA

SEQ ID NO: 393583 - protein, 420 aa, unidentified
MRWIGMDVHRDFCEVAVGEKGRVRSAGRVLTRESRLEVLAQSLLPDDVVVIEATTGSDRIVSVLERHGLRVIVANTRKLKAISAAKAKTDRLDARTLAKLAMGGLLDEVWTPDERTRILRRLTSRRERLVRARTRAKNEAHGVLGRNLCERPPVTDAFGKAGRAWFATLQLPIDERLTLDGCLRQVDFLDQEVAALDREIAKAALAWPEIQRLMSVPGVNLQTAATFMASIGDVHRFSTPRKLVGYLGLDPRVRQSGNTPARHGRISKAGASEARHMLGEAAWKVTLTPGPLRAFFLRIRARRGPQVAATAVSRKLVVLFWHLLTREQEYAFGRPAMTRNKIRKLELLAGAPPQKGRHGIAGGKSKKVFEAERELSRQAEAAYRRLINDWKATGPTKDGAGVTRGRASQKALEGQSRAAG

SEQ ID NO: 393584 - protein, 410 aa, unidentified
MDVFCGIDWAEDHHDIALVNRDGGLLARARIGDDAAGLTRLLDLLAEHGDSAEDPVPVAIETPRGLLVACLRATRRVYPVNPMAVARYRDRHSVAGRKSDHGDAVVLANILRTDLHAHRPLPADSELAQAIAVLARAQQDAVWGRITAHNKLRSHLREYYPGFLAAFAAAKGGITRPEARAILAAAPTPADAAKLTLAQLRALLRKAGRSRGIDAGAARLRDALRKGQMRQLPLVEQAMGRQALALLRQLDAACHSADDLEQAATESFTLHPDAGIITSFPGIGPLTGARVLAETGDDRSRFTDAKGLKAYAGAAPVTRASGKTRSVTRRHIKNNRLAQAGYIWAFSALTASPGARAHYDRRRGNGDRHAAAQRNLFGRLLGCLWHCLATGQHYNEKTAFPNQAARPAAA

SEQ ID NO: 393585 - protein, 380 aa, unidentified
MKKIRFVGLDVHAETISVAVAEPERSGEVRSLGSIPNRLDSVRKLVKKLGSVDQFQACYEAGPTGYVLYWQLTEMGVKCEVVAPTLIPVKAGDRVKTDRKDAEKLARSYRAGDLTPVWVPDAAHEALRDLVRARLAAKRDQLRARHRLSKFLLRHGRRPASKMSAWTAAYLNWVKKGVHFDQPAQEATLADYIHEVEHVQDRIARLEKAIDDSIEAMPEKMRAVIDALQSLRGIAKISAATVMAELGEVSRFRTPRQLMGYSGAVSSEHSSGERTRRGGITKTGNAHLRRIVVEAAWAYRHRPCIGASLKARQKTASQEVKDIAWKAQHRLHRRYMKLMAKGKLKQKVVTAVARELLGFIWAVAVEVEQGYSSGQQKQAA

SEQ ID NO: 393586 - protein, 318 aa, unidentified
MNTNTLQNINVGVDTGKANLDIYIRPLDIFFTVSNDDKGIKEAVKIIKKHQPERIVIEATGRLEMPFIIACSKANLPFVIANPIHIKRFAGAIGRRAKTDKLDAQLIAHYSETIQPQLTQLKPEIMRLMSDLVSRRHQILTMQTMEKNRLQQLPKTLHSTINPIIASFKNQIEKIETLIIALIEKTPSYQSKNIILQSVLGIGKVSAAAIISNVPELGYISNKQAASLIGVAPMNRESSRYKGKRIIQGGRAQVRTVLYMAMMSAMQSNPVFKTTYQRLLEAGKPKKVAIIACVRKMVVILNSMLRDGTMWNENMAKN

SEQ ID NO: 393587 - protein, 321 aa, unidentified
MEETIVGIDVAKKKFDVALLRGEKPVSGAFKNTPEGFAMFQRWLERHGVERVHACMEATGTYGEDLATYLHSAGHVVSVVNPARIKGFAQSELSRTKTDKVDAALIARFCKAMQPEPWQPPSADVRELQSLVRRLESLNDMLNQETNRLTITRGIARESIERTIRHIETEIATTKRLIRDHIDGNPDLRNKRDLLESIPGIGPTTSAMALAEFGDVTRFHDARCMASFCGLTPRHRQSGTSVRGKSMLSKTGSSRIRKALFMPALSAIKYNPIIAAFRARLLANGKQRMVIVGAIMRKLVHIIYGVLKSGRPFDPAIAAAA

SEQ ID NO: 393588 - protein, 499 aa, unidentified
MNICMRVEVGPGAGEPLRSEPASRRTELAKRSGADRSPLLPVCLVPARKRPCERTVSLRAKRDDREHPIRNAPALIAGEIIDLDVAINLGGAVHPNMNPSAPMQNTTCGLDVASTSAYACVQSAAGTILHELNLPATRAGEDRLLALLPPGTAVFMESTGRYHWSWARRLTAAGHRVYVLNALLAKRLIGATNALRQNKTDKIDGRQLADIGRRDGASLQQYLFREDAGRLGLRTLCEVRTKQRQLLTDTLKSAAGLLQAMLPEAPWLKLAENRGLATLFLQINSLARLQRMRLPTLQTYACGKAEALHAVLRQPLSAATVFDALLPALQAQLRLIESLREQQLALLAQIRQAVVAAHREAEVELVETIPGYGAKTAATIVACLPEDLRQWGPKQKVSRKLQAYFGCDPKLRESGKWKGHVRMSKRGIELARTALFQAATCAMLHDPDMKAVFDRKKAEGKFYLVAVSHVMRLQLRRLVAVLYDRKPFVRRPENLSAAA

SEQ ID NO: 393589 - protein, 343 aa, unidentified
MEYYVGLDVSLKQTAICIVDHTGAIKHEAMVPSDPESIADFVRSHTESVIRIGLESGPTSTWLWTELDKMGLPVICIDARHAKAALKMQINKSDRNDAAGIARIMQTGWFREVRVKTLDSHAIKALLVSRALLVRIKRDIENQIRGVLKNLGLVIGRAKMNTFTTRTRELIEDKPALIAVIEPLLIARETVEEQIAGLDRKVMRLARNDTQVRRFMTTPGVGPITALCYLATIDDPARFNKSRNVGAYIGLTTRRYASGETDWSGRISKCGDAMLRSYLFEAANVLLTRVAKWSALKAWGMRIAKRSGLRKAKVAVARKLAVILHRMWVDGTEFQWSSKEATA

SEQ ID NO: 393590 - protein, 404 aa, unidentified
MVFLGVDWAEEHHDVCMLDEQGKVLARAQVANSVHGVARIHALVAEHSEESGKVVVGIETDRGLLVQALLAAGYQIYAINPLAVDRYRDRHSVSGAKSDAADAKVLADLVRTDRNNHRPVAGDSAQVEAVKLLARAHQSLVHSRQRQVNQLRSALHEFYPAAIEAFKDDLGGRDAVAVLEYAPTPSRGRSVSQAKLISALRRAGRERNLKARAAELQRILQQPHLEQPATLVAAYGVIVKSCVRLIRELNAQTTELEQELTKSFELHPDAELYLSLPGLGFVLGARVIGEFGDDPNRYSDAKGRRAYSGMAPITRASGTRHVVLARYARNRQLADACYLWAFSSLKRSAGAHQYYRALRARGKSHAQAIRALGNRWVSILHGCLRHRQLYSETVAWRAPVAVAA

SEQ ID NO: 393591 - protein, 343 aa, unidentified
MHTITTIGLDIAKSVFQVHGTDAAGQVVIRRQLKRRAVLAFFQKLPPCLVGIEACASSHHWSRELQALGHAVRLMPPAYVKPYVKRQKNDMADAEAICEAVTRANMRFVPTKTPEQQGCLMLHRTRHLFIRQQTAVINSIRAHLAEFGIIAPVGRKGVMELLQVVADPSDKRVSEVTRACLAALGNQLLSLKEQILEFDRMIMAWHRSNEPSKRLRYIPGVGPMLATALVASVADPKTFRSGRNFSAWVGLVPKQHSSGGKDRLGSISKQGDRYLRSLFVAGALSVIRYAKIHGTKHRPWLTALLARKPTKVAAIALANKLARMAWAMMARGERYRNPVALAA

SEQ ID NO: 393592 - protein, 451 aa, unidentified
MEDDVIKMEVVNPGAAGIDVGSRSHWVGVGQREEDVREYGVFNDDLFSLCDWLKECKVRTIAMESTGTYWQNLYAVLISRGFDVILCNGKFTKNIKGKKTDIKDCQWIQRLHSLGLLSSSFLPDGKTEELRTYCRHRQNLLHESASTSKKMQKYLRLLNLRLDVVVKDTCGLSGLRIIRAICNGEKNPENLAELRHHNCHTSKEDIARALQSNGREDYLFALKHELDMYDYLHKKIEECDQKIEEKLNSIINDDDNKKQHHIEPKPYKKLNKNTPKNIDLNLKSYQMFEGTDLLAIEGMSYSTVLALMSEIGVEGIRKFPTAKHFASWLRLAPNNKVSGGKVLSSKVPKGSSNLKISLRNAANAIGNLKDSTPLRDFFMRINFRKGRVSAISATARKLAVIIWNMVVKGVPYVNPEGYLFRDQKKKLGLLKRIQKQITKFELESTDFQFAN

SEQ ID NO: 393593 - protein, 341 aa, unidentified
MRYIGLDVHKDNITACVLTSTGKPKFEKDFIKDSESWNLSELMEYGDKDGFCVMMESGTYAYQPFRYFSDRGVETHVVHAQALKLITQSDRKTDKKDAYTIARMLRLWKRGEIDLQMAFMPTREQCELKDVCRYREEISRKIGDETRRIKSHMSRNCEYLPESFNDFQSQRARNYVRFNFSSDLTLMNRMAGLERLFAERDSIQKEVESRLPDSRDVEILITIPGIARQTAVQIMSMIVDIDRFDDSEKLCAYFGMVPRVRDSGGKEHHGRMTKNGDRMMRVIMERVTESHVRNCDSSVTRYYKRKCSEMGTKKALITASRKMLSVIYAMLKSGSDFRLAA

SEQ ID NO: 393594 - protein, 356 aa, unidentified
MESMPAPAIPVTVGVDTHLDTHVAAVIDQTGRLLGTQAFPASTRGYVALVTWAEGFGPVERVGVEGTGTFGAGLTRFVRAYGLAVVEVARPDRSTRRRQGKSDPIDAQAAARATLAGVATATPKTREGQVEMIRLLRVARRGAMKARIAAAEQLYGVLCSAPEELRQPLLGLKTKAMVGACAALRPGPLTSTTAATKTTLRSLARRWQQLQAELDQLDTQLQALVTSAAPTLVALPGVGVETAGQLLVTAGDNPQRLRSEAAFAHLCGTAPIPASSGRTDRHRLNRGGDRRANNALWRIALVRMRCHPPTRAYVQRRTNQGLSKLDIMRCLKRYIAREIYHQLTSPPPRNPPACLK

SEQ ID NO: 393595 - protein, 445 aa, unidentified
MSERTIAREAPGIRATHDSATMHATQRKHMNTWHQLTHYAGFDWARDHHDLVVVDPQGQIVAEFRIPHTLAGWQDFRQKVSAYPALGIVIETNQGAAIDQLLQIDLTVYPIHPVAAQRYRERKAPSGNKIDRLDAWSMADALRLDGRQWKALQPLDPLTQQLRLLCRDEISLIEQPTALINQLQQALSEYYPAALEAFEDWTRPSTWKFVIEFPTPQILLKRKRSRWEKFLHKHKLWRPDTAEKPLETFARAQAFCGSPAVTAAKSLLAVSLARLLGLLQGQLDEYRTQIEKLFEQHPDSGLFGSLPGAARFLAPRLLGEITADPERFDEPQALQCLAGTSPVSYQSGQIHKVQVRHQCHKLLRHVVHLWADCARHAAPWAQTYYQKKRQEGMSHACALRCLGQRLLKILWKIIQTRSPYNADVHTKNQLAHGSWVLQLMSPKPA

SEQ ID NO: 393596 - protein, 350 aa, unidentified
MLIIGVDYHPSFQQIAFLDQDTGECGERRLNHSDGEAEKFYRGLQRGVRVRVGMEATGYSRWFERLLAELSVEVWIGDAAKIKTKRVRKQKTDRQDAQLLLKLLLENNFPRVWAPSPENRDLRQLLWHRHRLVQMRTRIMNQLQALAMNEGTRWKKRLWSEQGRSQLEKIPLAPWASRRRQDLLELLDRMNPTIAELTAAVEQEAKKRPEVLRLMTHPGVGPITALAFVMIIMTPERFPCGKQVGSYVGLIPCEDSSAGRQRLGHISKQGNALLRFLLVEAAQAAVRYDPDWRRRYLHLAMRRERRIAKVAMARKVAVRLYWMWRNGWEYSQSVEFGSHAGQLATGHGVK

SEQ ID NO: 393597 - protein, 323 aa, unidentified
MNKYNEIFGVDISKDVFDVYGSKSGHNQFKNDASGFNFFLKSLPKKSLVIMEATGYYHYRLAQFLHKKAQIVSVVNPLSVKRFIQMKLAKVKTDKSDAKSICEYGIVNEVPLYNALTDVQSECLQLFRLMDSFIKKRTATKNKLHGEEVLGIPSSWVYRSLKRDKKHLDKELLGIEKQLLSLVRQDQQAQLTLLQSIPGIGIKTALFLIVVTDGFKKFETASQLCSYVGITPTIRESGSSVRGRSRISKVGNRKLRNLLFLCSFSASKQNKGCREIYERIVNKGKSKKLALIAVSNKLLKQSFAIAKSGNPYDASFVSVLKVK

SEQ ID NO: 393598 - protein, 362 aa, unidentified
MLKSTTIIAFDQHAATTMAAVLLPAHRTPALHPLKSDPPTILRFVVRLQRQGAVTCCYEAGPCGFELQRALTAKGISCDVIAPALIPRRPGDRIKTDRRDAGQLAVLYRAGALTAIHIPTEQEEAARDLLRCREDIRADLLRARHRLSKFLLRHGRRFTATKKAWSKRHDAWLRAHTWPLPALDQTHRAYLRAVDEVLARLRDVETDLQALLALEPLRPRVQRLRCFRGIDDLTALTIAAELGDPRRFATAPSTMAFVGLVPSEHSSGSKRAQGGITKTGNAHLRRVLVESAWHYRHHPFVSATLRARQRGAPAQVIARAWTAQQRLHRRYQRLAARGKPKQHVVTAVARELTGFVWAALTQ

SEQ ID NO: 393599 - protein, 514 aa, unidentified
MWAGFGDGRTVDRQRRLVGIDLGIASAHTVRVLDGSGREVCRRRCEPSVSSLTLIEQVALAGAAEGTRLEVVMEPTGPAWLPIAVFFGARGHAVFRVSSQKAADLRRFLSRHAKSNGIDADTLARLPLVDPDGLAPLRLRGSERAALDRRVRACDRLTMQASEHKVRLKDLVRQLMPLTPLTGDLGQADLAVLERWADPRALLRLGKTRLTAVIVKASRNHQGAARAEQWLASAEAAVELYDDHPAVAFADLAAEVATEVRLLRAIEAELAIHAAERESAYRWADPGQLARTLPGLGEVGAPVLAAVIGEASRFPTGAHFKSYLGLTPRASETGDTDRKDQPMSKAGSRLLRSTLIRAADHARKQDPQLAKIYHQQMVERGAGHLKALCVVAARMAERAWTVMNRRMPYVICDTTGQPVTPEDAKKIIDENWAVTADVRARRRSRKTIKAGKAPQQVPTGQDKPNARSAGKRGDLPHPRSSASNPNTSRTRPRRDAGGPPHSEGPPMNVTDRPS

SEQ ID NO: 393600 - protein, 409 aa, unidentified
MAGEVVDTSGIAVWCGLDVGKEEHHACALAADGTRLFDKPLPQDEAKLREVFTSLQAHGTVLVVVDQPNTIGALAIAVARDCGCQVAYLPGLAMRKAARLLPGDAKTDARDAYVIATCALKMPDTLRAVDRDSEVLASLKVLSGYDDDLARECTRSINRLRSLLLQIHPALERVFAGTRLTNQLTLDLLVRYGGPTGLRKAGAAKVRAWARKTKHRGVDGLVDDVFAALEQQSVTVIGTEAVETVIPRVAASIKSLKAERAELASEVERLLDNFPLREVLISMPGVGTKTATTILLAIGDASAFPTAAHLAAYAGIAPVTRRSGKSIRGEHPARSGNKQLKNALFRSAWVASNCDPDSAAYYQRKRAEGKKHNAAVMCLARRRCDVIHAMLRNGTLYTPRTPRTVPTAA

SEQ ID NO: 393601 - protein, 429 aa, unidentified
MRILQLPISGRSIGMEKQLNKVCGADIHKRFLVATILSRDGTKITRKFGMTLDDLLTFKNWIMENGCEQVAVESTGVYWIPIHAVLEGSVDLIVANSYKIKHTPGNKNDLDDADWIAELCLNGMIEPSRIFPRTDRDLRRLTRAREGYVNDMTREKNRIHHALESCGIKLSSVLANIFGKTGLYIQDCLLEGKSIEDIIEGITVKQVKKKADQIREAIKGSLDVTQIFLIRGSLELITAFQKRIDELDSEIKRRIAGRKEDLAIAMSIPGIGFVAASTILAEIGDFRDFKNGKQLAAWSGLVPMVYQSAGKLITGSITKHGSRHIRRILVEIARVIARTGNSKLRRFFLRVKAKKGSNVAAVALARKVLCILHHLLINREKYQEDGVQKNIKIDIDKTLSPKEMSMEEMISYLAKAGYEVRKSGGGVSG

SEQ ID NO: 393602 - protein, 406 aa, unidentified
MQVVHERCCGLDVHKKTVVACVLTKEGREVRTFGTMTRELLRLADWLGEERVTHVAMESTGVYWKPVYNLLEDQGIELMVVNAQHIKAVPGRKTDVKDSEWIADLLRHGLLRASFIPNRGQRELRELVRYRRTLINERADVVRRIQTVLEGANIKLGDVASDVMGVSGRAMLWALAEGRGDPAELAQLARTSLRRKSAELQLALEGSVSTHQRAMLRRQLRHVEFLEQEIQELNVEIEERMRPFDAGIELIDGIWGLGRRSAEAILAETGIDMSRWPSDRHLTSWAKICPGNNESAGKRRSGWTGNGNPWLRSSLVEAAWGVSRKPNSYFGALYRRLATRRGKKRAIVAVARALLVAIYHMLKDGTQYQDLGPEHFDCIDREAVVRRSVRRLERLGYQVTVERLSA

SEQ ID NO: 393603 - protein, 350 aa, unidentified
MLIIGCDYHPSFQQIAFVDTETGELREERLDHREGAEKFYRAMAVAGQQVRVGMEASGHARWFERLLAELQFELWMGDAAEIRRRRGRKQKTDRQDAQHILGLLLKNDFPPIWVPSWENRDLRQLLWHRHRMVQARTRIMNQLQAVALNEGLLCRKKLWREHGRQQLEAFPLAPWASRRRHDLLELLDRLNPTIAELSQAIEREVEKYPAAQRLMTHPGVGPLTALAFVLIIGDADRFQCGKQVASYLGLVPLEDSSGNRRRLGHITKQGSSILRFLLVEAAQVTVRSLPEWRRKYAHLMMRRGRKTAKVAMARRLAVRLYWMMRQGWDYQQWSKFGSHAGQPGHRDGVQ

SEQ ID NO: 393604 - protein, 477 aa, unidentified
MTKKTLPPVLCIGIDIGKMKHVAAFVSLDLLRAARRFERCPTLAFEQSREGIESLLQKIDSYGDRAQCAVLIEHTGHYHRIVEEHLRDAGLQVYIMPVLSRKRSQEKTDRIDALRLANQLYNQLVLGVQPEEKRAQIKHRFPPTKLAAQLRGLVQRHHELVHARTTLKNRLTAICDEIFPELTLIFKDPNLMTALSLRATFETPAAVAAASLEQLRSIRQQKGKPTDAHLRCLQELAAASIGVKDSPRRKTLLLEQKQLIEELATSGKHLEIIDKEISELMEPSREYKILASMSIGPIQAATIVAAIGNIRNFEKASHLRTFCGWSPQAIQTGISRDTSKLSDTGQRQLRQTLFLITINAVHQSESFELIYTRLVKRMCHWDARTETYKGKMRAIGHISGQICGLIYRFLRQDADLVDASPAEQIPPPVLFSPDIHLSHVLHGKPHEKPTNDVSQDLPPDETETEILDEERETVVLV

SEQ ID NO: 393605 - protein, 407 aa, unidentified
MEVLYARCAGLDVHKETVVACARVAEGGKVDQAVETFPTTTSGLLALADWLETHGVRQVAMEATGVYWKPVWHILEGAFELTLANAMHVKNVPGRKTDVNDAMWLADLLAHGLIRASFVPPLEVQELRALTRSRKQFVRERSGHVQRIEKVLEDANLKLSVVLSDLLGQSGRAVLQALIDGETRPEHLLKRVNRRVKASRASLLEALNGRVTKHHRFMLRLHLAQIDALDQAIAAIETEVGDTLAPFREAAERLTTIPGISHVAAHVLVAECGIDMTRFPDAANLISWAGFCPKNDESAGKRRSTRVRKGSPWLKTTLVQAAWAAVRVKGSYLQAQFVRLRARRGPKKAILAVAASMLTAAYYMLRDGTCYHDLGAAHFAPADPAKTAHRLVRKLSQLGFQVELKAA

SEQ ID NO: 393606 - protein, 411 aa, unidentified
MKLFVGLDVSSFDIKVCFLNGEGDKLSSFTVANDLPGATKLRDEILLTVQGKSVTELRIGLESTSVYSFHPSMFLHNDEFIQVLGGQVFVMNPKQIANFKKSYSDMDKTDEIDAFIIADYMRFGRLPMSVVKEEQYVALQQLTRARYQIVQQITREKQRFLQYLSYKCNTFTEDVESSVFGKAMMDLLLECYSLDELAQMPLEDLADYLRIKGRNRFPDAKQVAKSIQKAASSSYRLDKVVEDSIDAILATSITLIRTFEKQIKELDKSIERIMKGVPQTLQTIPGIGPVFTAGIIAEIGQIERFDNEEKIAKYAGLYWRKHQSGRFTADVTSLSRNGNQYLRYYLVEAANSVRRQIPEYRDYYVKKYQEVPKHQHKRALVLTARKFVRLVDALLRKNQIYTPKRSEIYEA

SEQ ID NO: 393607 - protein, 427 aa, unidentified
MNYNTQNAKIASITEKTLIVGIDVGSETHYARAFNWRNYEYSKKPFAFSNDETGFAAFKKWMNDIAEKHGMEVIIPGMEPTGHYWLNLGAYLQEQGMKPVHVNPHHVKKSKELDDNNPSKNDRKDPKTIAGLVNEGRFSYPYIPTGIYAEIREVASSRDRIMKELNVASNRIQRWLKIYFPEYLTVYKKFDTTTGMMILEEAPLPAMVPALGVDNIVKIWREHKVRGKGASFNRAKTLVDAAHDSVGKSGGQGAVMEIQMLLEDYKVKKQQLEMVTSVMEELTMQIPNADKMLSVNGIGLVTVAGFISEVGDISRFKNPKQIQKYAGFELVENSSGKHKGRTTISKRGRKIIYQVVLPLIRINQEFGSIYDYYRKRIKNPLKGRQAMIAVGCKLIRVFFAIMTKGVVFNGTKMIEDIHRPTQLPQAA

SEQ ID NO: 393608 - protein, 383 aa, unidentified
MRKIQETLPAQSTTTQDIMYIAFELSNSTWRLAFSDGNKKRHVTIKARDLKQLEVETAKAKKRFCLKDNVQIKSCYEAGRDGFWIHRYLLSKGIDNLVVDSSSIEVNRRKRRVKSDRLDAENLLRLLMRYHGNERQVWKVVTAPTVEEEDARHLHREIETLLRERTRYRNRIRALLVQHGLDVKNPSRKNFLKVLNTLRTWEGQALPESMKARVVREHERLKMIEDHIKLLKKEREQRVKSKETASLRQVAQLRGLCGIGVNSSWIFVMEFFGWRKFRNRREVAALAGLTPTPYDSGGSQREQGISKAGNKRIRTMAVEIAWCWLRFQPHSKLSRWFNERFASGGSRMRRIGIVALARKLLISLWRYLEHGVIPEGAIIKSAS

SEQ ID NO: 393609 - protein, 402 aa, unidentified
MNCVGIDVSKGKSMIAVMRPFGEVVVSPFEVRHTASELSELARLLKNLDGETRVVMESTGNYHAPVAWLLHGAGFYVSVVNAMLVHDYGNNSLRRGKTDKKDAVKLANYGLDHWLTLPRYVPEEDTRLMLKTCYRQYQQYSKVQTMLKNNLISLLDTAFPDANRLFTSPPRADGSEKWVDFVATFWHCECVCGLSKKAFTAKYQKWCRKHGYNFSQDKALDIYASACGRFGVMPKTNTAKLLVEQAISQLQTTSAALAALKQEMQSLAASLPEYPVVMEMFGVGPTLGPQLIAEIGDVRRFHSKKALVAFAGIDAPPYQSGQIDVRSRSISKRGSASLRRTLFLVMGFLLQCAPMDEPVYQFMNKKRSEGKPYRVYMMASANKFLRIYYASVKAYLDSLEHD

SEQ ID NO: 393610 - protein, 353 aa, unidentified
MQKIYIGVDFHARQQTICYLTTDSGELVRHQLKHQDKAAVRAFYAQFSGDVIVGLEASGYSPWFERLLEELGCEVWLGHATEIRRRARWRHKNDRRDAELILELMLHDEFPRLYLPPLQSREVLRMLRYRQKLIKIRTIGKNSLQALALQAGLAKGPHLFSKAGLQQLRQASMSAAMQWQREQWLQLLEPLEARLLETRLWLKQQSHADQRISRVRTHPGIGLLTALCLVHSLEPVSRFANTRKVTAYAGLDPLERSSAERQRFLGISKGGSRVLRFLLVEAAHTAIRKDAELRRFYQRLAERHGRPKAKVAVSRKLLIRAYIMLRDEIDYAEFQRRAVAARLARQSSRPPCL

SEQ ID NO: 393611 - protein, 410 aa, unidentified
MNLNVGIDVAKAKLDYCGMDSAKHIIFQDEVVNAPAGTEKIIKLILDWADSRDDAEKVVIGMEATSVYNIHPTLYFEQSSALQALDTEIVTLNPKMTHRYSQLFDDDKTDTLDAFHIADFLRMGRYQVPVTRDEKHIALQRLTRERYFVVSQITDCKNHFLNNLYFRLNTLEAELPTSVFGNTMMTVLSGEKYTLDEIAQMPLETLTQDLNQLSHGRFGEPEEVAKALKKAIRSSYRLNKTVADSVDQILAMYIREIRMFQKQLKELDKSIAALCAVIDGAKSLNSMPGLGPVYSAGLLAEIGQIERFPDEASLASYAGLSWRRSQSGGSERQLTPRTHNGDQYLRYYLVEAANSIRVHDPVFAKYYDKKYGEVPKYQHRRACIMTARKLVRVIYKLLSDHELYVPAKVV

SEQ ID NO: 393612 - protein, 460 aa, unidentified
MIRVGCDWRTIEVKAEPEEIPDTEHELVLERVCAVDVAKDSGKVCVRVSSRAGRRVSKVWDVAARSGAVAELAEQLVEEGIEKVTVESTSDYWRIWFYLLEAAGLSVQLVNARDVKNVPGRPKTDKLDAVWLAKLTEKGLLRPSFVPPAPIRELRDYTRLRIDLTRERTRYWQRLEKLLEDALIKVSAVASTLDTLSVRDMLEALIAGERDPRRLADLARGRMRVKHGALVEALTGRFDDHHAELTRMLLDQIDALSTQIATLTTRIDELLTVMQPHTRADEPHTPGGAGTVADGARESTTIERLDEIPGISPGLAQIILAEIGLDMSQFPTAAHLVSWAKLCPRTIQSGAIQRGGKTGKGNPYLKGALGEAAAAAAKTNTFLGERYRRIVKRRGKLKALVAVARSILVIIWNMLNDPTARFRDLGADYHTTRINTERRTRNYVTQLMAMGYRVTLEPAA

SEQ ID NO: 393613 - protein, 313 aa, unidentified
MSPNNPIIHCGLDVSKSSLDLFCQGRNSNFSNSSSGIQRLIAHLASLQKSLHLVLEATGGYEQLLVRACHNASITVCVVEPGRVRHFARSQGILAKTDALDAAVLARYGECVQPRATTPLTAQQDQLRQLVRERARLIELHSVLKNQSRVSTLPELVRLHKKHLKLLDKQIAQINLLIQQTIQEDSTLKEKNDLLMAVPSIGPVVASTVLAELPELGSLNRNQIAAMAGLCPYNRDSGKWKGRRWIQGGRPLLRKALYMAAVVGMRYNPVLKPLYKNLKLRGKPSKVALVALARHLLIQLNSILKKSHFPLAS

SEQ ID NO: 393614 - protein, 328 aa, unidentified
MLYVGIDAAKNKHDVTVIDNTGKMVLKPITITNCKQGFELLHNTLKQLNQNCLIAMEDTGHYALNLLTFLHQNNYQIYTYNPLLIKEFTKSISLRKTKTDKKDARTIALKLLSDPNRALFMHDNKQEELKIMTRHMNRLKKHQSDWKVQYTKCLDIIFPELHQVVTKHSDYVYELLKRFPSPEKMVTAGFDKLIEIKRLTAKHALDILELAPNSIGTTSLAREFELIEIIENIQHYEKLIKQTEKKIDELMAEFNSVITTVPGISNRLGSVILAEIRNINTFNHSAQLQAFAGLEPAIYQSGQLDAQGKWSNEAHHTYVGHSYKLPLK

SEQ ID NO: 393615 - protein, 370 aa, unidentified
MSVRRILAKTIDTDLEYEAIGIDLAKNCVSAALITTEGEVVGIDRLDYSELEKSAQVLSPTTFVMEPCTEMNYLVQKLEAWGHRCLVIGGKNVQNYVENHYSGQKTDLNDAQALAFLAQDTQLRPIKAKDMEQQKYASLTTLREQYVKQYRQTIVSLKGICQAWGLNISKGISGKARLKDLIENHAAFPEELKESLVDMVTHAQTTQKALNKITKTLEELAKNDKLCQLIQTIPGLGPVCSCRLRATIGDIQRFKNPKDFPAYYGLVPRSIATGHNEKKGRITHRGDKTMRSLMVQGAGSVVNMATKGKLKSKQLTKWILKKQKEKMPWGKLVCAVAAKLLRIVRAVLISSKPYNPKIAGVAKCSLPKGS

SEQ ID NO: 393616 - protein, 359 aa, unidentified
MANNEDGTRHVVGGVDTHKDLHVAAVVDGQDRVLGTACFATTRQGYRQMLVWMRSFGDLRRIGIESTGSYGAGLLRFMQQAGIDVLEVTAPDKHDRRRRGKNDDLDAQNAAHAALAGRRIVTPRSRDGMVESLRVLTVCRKTAVAARRVAIQIIQTTIVSAPDGLRDTLRSMTRMQLVRTLAAWRPDLTAYREVEAAYRISLKSLARRYLELHDEIADLDAMISAIVDDLAPELIARNSIGYTSAAQLLLTAGDNPERLRSEASFAALCGVSPVPASSGKTIRHRLNRGGDRAANSALHIIAIGRIRTDSATKAYVARRTSGGHSKLDAIRALKRYIAREVFHIITRRHREINQTCIAA

SEQ ID NO: 393617 - protein, 370 aa, unidentified
MENGITFVGIDAHKELMSVAMLLPGESKAITWDVANEGAAIRRLVRKLEREAPGEVRICYEAGPVGYALQRQVTEAGEASCMVVAPSLIPRKPGERIKTDRRDARKLAELFRAGLLTEVHPPTLEDEAIRDLCRGREDAREDLTRCRHRLGKMLLRKGLVFGHGKKAWTRGHRAWLRGLRFELSADQAVFDDYLLAVEQLEERVKGLEEKIEAFSIGGPYAEPVGWLRCFRGIDTVTAMTIVSELHGFGRFASPRGLMAFLGLVPSENTTGYEPRRGGITKAGNSHVRRVLIEAAWHYRHRPGVGALRKRRQGQPAAIIALADKAQHRLYRRYRRMTEAGKPGTKAVTAIARELTGFIWAALSPRTRVTA

SEQ ID NO: 393618 - protein, 449 aa, unidentified
MMEPQEIEDEEHEQVLERVAAVDVAKASGMVCTRVPHQARPGKRRTRVWPVDATTNAILELGGHLAAEGIEKVTLESTSDYWRIWFYLLEAAGLDVQLVRARDVKQAPGRPKTDKLDAVWLAKLTERGMLRPSFVPPAEIRQLRDYTRLRTDLTRERTRHYSRLEKLLEDALIKVSAVASKLDTKPVRDMLEALIAGERDPQVLAGLARGRMRSKHDRLVQALTGKFDDHHAELARMLLDQIDALSAQTGTLTTRIGELIAAIPAAQGIDADGSTGPGAGRGPGAPVLPAADRLDEVTGIGREAAQAIIAEIGLHMSIFPTPGHLVSWAKISPQTVQSGAKNRPGKTGKGNPYLKGVLGEAAAAAGKTDTFLGERYRRLARRRGKLKALVATARSILVIVWHLLTDRNARYRDLGASYHASRIDQNRKMRNHVRQLEALGYTVNLTQAA

SEQ ID NO: 393619 - protein, 383 aa, unidentified
MPYNGMDRPRSSGVNGNAAEAQLIRKKEPAMTDIATHDDRIATIGMDLGKRSFHLIGMDARGKVIMRQQLSRGRLERHMANLQPCLVGVEAGAGAHHIGRRLSAFGHNVRLIPGQYVKPFRKGQKNDYRDAEAIAEAVQRPTMRFVPIKSAEQLDLQALHRIRSRLVGHRTAVINQLRGFLLECGVIVPQGPARLREILPSVLAQRTDVLSPRMIRLIEELADDWRRLDDRVDAVTSEVQALARQDECCRRLISVPGIGALTASAVVAAIGNGAAFTKGRDFGAWLGLVPKQLSTGDRTILGRLSKRGNKYLRTLFIIGARAVLAKPGSWAKFGLEGWLAAATKRLHHNVLAAALANKLARIAWSVLYHGRSFARGFEPQSVS

SEQ ID NO: 393620 - protein, 289 aa, unidentified
MDKSITLHVGLDVHKDSIDIATAAPGRDGEVRHVASTGRELTSLDKALRKLVSRGHRLHVVNEAGPCEFVIWRHLSAHGIDCEVVAPSSIPKRSGDRIKTDRRDAMLLARLDRSGELTAVRVPGAADEAVRDLVRARDDAVRECRNARHRLKALLLRNGITYAGKSAWTAAHLRWLATMKMEHAAQQIGFQEYLHSITEATTRIARLEQAMRDTLADWSSKPLVQALMSLRGVQLIAAMTLVAELQDFLRFDSPRKLMAFVGLVPGEHSSGPKRRQGSIPRPATAPRGA

SEQ ID NO: 393621 - protein, 345 aa, unidentified
MKNTMIGVDLAKEVIQVCVYTNKHVPSNKELTHKEFLLWLINTKPSTIVFEACATSNYWKQKAIEAGHEARLISAKLVATVRQNQKTDKNDALAIIQAAQLPEIRFINGKTKPQQQLQSVLRLRELAIKQKTALSNQLKALLLEFNIRISNKNGGLKGTIELLLEDAENGFSCEFRQALDSSWRQYSQLLESIRVYDDCLESSIEEHKDCKRLMKLEGVGTLNAINLYIALGCAEAGCFSKGKDASACIGLTPVQYSSGGKTKLGSIGSYVKNGTLRSQLITGAMSAITQITRREAVTKKEAWIQGLVERRGKKCAAVALANKTVRTAYAMLTQGSEYKAELIVA

SEQ ID NO: 393622 - protein, 423 aa, unidentified
MDVLHERVAGLDVHQKTIVACVRRMAEGKVERECRTFETTTAGLLVLLAWLQECRCTHVGMEATGVYWKPVWNILSDGDFELIVANAAHIKNVPGRKTDLNDAMWIADLVACGLIRASFVPDEPLQQLRSLMRTRKQFSREQTRHVQRIQKTLEEANIKLSAVISDIMGASGRRIVQAMIAGVRDPGQLVQLADRRLKASRTELYEALRGRLTEHHGFLLRVHLEQHDALAATIRQIDRQVEVALTRLDQERATGRITYRDLIALLCTIPGVSTLAAITILAEIGRDMSRFHTAGHLLAWAGLCPGQNESAGKRKATRLRKGAPWLKTMLVQCAWAAKRKKDSYYRAQFYQISARRGPQKAICAVAASLLTAIYHMLKDGTEHQDLGANRFDRRPVEAKVQSLVARLAKLGYQVQLQPLAEAA

SEQ ID NO: 393623 - protein, 414 aa, unidentified
MDVVVERCAGLDVHRDSVVATVRVPGKGKSRRRRAQQTRSFGTTIRQLEQLANWLQGFGVTLVGMEATGVYWKPVFWVLERRFECWLLNAQHLHNVPGRKSDLIDSAWCCQLLEHGLVRPSFVPPPEIRRLRDLTRLRSTQMEERSRAIQRLEKVLQDAGIKLSSVASKTYSVSARAMLEALLGGVSDPAILAELAKGKLRAKIPQLQEALANRFELAHHGVLVAQPLAHIDALDETVANLDGRIIEATDPHAELITLLSTIPGVGRYIAEVLIAECGVDMTVFPNAEHLVSWAGICPGTNQSGGKRRSGKTRHGDRWLRTALSEAARAAARTKNTHLASHYWQIRGRRGEKKAIGATRHDILIAYYHITRDQVPFRELGPDRLARRHSVEHRTRRLVKQLEALGHAVTLEAAA

SEQ ID NO: 393624 - protein, 384 aa, unidentified
MVYLGIDVAKDKHDCYIVNSDGEILANVFTIPNDQAGFNLLLQKLKSVAPDLSKVKVGLEATGHYSYNILGFLLDNGLHTYVINPLHVNLFRKAANIRKTKTDPIDARTIAEMIMSNVVLTSYTAKSYHNEELKSLTRYRFDKVHERARLKTSVARLVSILFPELEKLVPTLHMHTVYALLTEFPGARQIASCLLTRLTHLLSESSKGRYKRDKAIQIREAARSSIGSVMPVKSLELKHTIHLIEVLTAEIDEIELSIKRIMDADPSPILTIPGISYRMGAMILSEIGDFSRFTSPDQILAYAGLSPSTYQSGKLDNAYPHMEKRGSHYLRFALFNATRYVCNWDPTFASYLAKKRAEGKHYYVAISHATKKLVRLVNMDVASF

SEQ ID NO: 393625 - protein, 413 aa, unidentified
MDVLHPRCCGLDVHKSSISACILLREAGRVQKHQRRFGAMTQELQELAEWLRQFGVTQVAMESSGVYWKPVWNILEGLFTVVLANAQHIKKVPGRKTDQKDAEWIAQLLQYGLLRASYIPCEIIRDLRDLTRMRTSLSQEASRISSRIQKVLEDANVKLASVATNVLGKSGRAMLEDIITGEDNPENLASLALGHLRVKIPQLRLALEGKIRSHHRFLLRRLLDQIQFVEHEIALLDERLEDIGRQRPDLAQAVARWDTIPGIDRVAAWALLAEIGDNMAQFPTAEHLASWAALCPGNHESAGKRLRGTTRQGSPWLCRMACQCAWAAARTKNTYLSSQFRRLAARRGKKRAIIAVAYTIIVIGYHLQKNQSNYEDLGGNYFDRIHSDGLKRYLVKRLQQLGHKVTLEPMEAA

SEQ ID NO: 393626 - protein, 358 aa, unidentified
MTRMTQPAPLNQGNPDIVLGVDTHKDVHVAAVVTTAGAFVESRSFQTTAEGYEQLLEWARTLGHLSQAGVECTGSYGAALNRYLRGQGITVFEVNQPDKATRRRRGKSDIVDAEAAARAVITGRATATAKAGDGPVEVLRLFKMAKGSAIKSRAQAINQLKAVLVATDPELRESLAGLSNPKLIRACAGLGSSASGTAGAAAHTLKLLARRIQHLTEEIEDLTTRIRDVITQHNPQLLACYGVGPDSAATLLIAAGDNPERLRSEASFAALCGVSPVEASSGKTQRRRLNRGGNRQANSALYTIVLARLRWDTRTRGYIDRRVSEGKTRREALRCLKRYVAREIHQLITRTTTHVLAA

SEQ ID NO: 393627 - protein, 344 aa, unidentified
MSPDSCLVRPNARPHHVRPGQGKDGELEKNHIGVDVAKDTLDVAAYETGKMWRFTNNDAGIAQLVQIISELPVELVVMESTGGYETQLAYALSSAGIPCAVVNPRETRDFAKATKKLAKTDTIDARVLAHFAAVIKPEPRPLSDEGTRELGAILARRRQLVQMITAEKNRLHTAHPSVKRGIFDLIAYMEKDLADIDSNLKGRIEESPIQSEKYNCLKSVPGVGPNLATTLVIELPELGTLNRKKIAALVGVAPLNHDSGSKRGKRSPWGGRPQVRTALYMAALVATRFNPIIRERYGRLCNAGKAKKVALVACMHKLLTIMNAMLKHRTPWHYEIIPVHASRC

SEQ ID NO: 393628 - protein, 344 aa, unidentified
MQHYVGLDLSVKETSVCIIDKAGKVIREVKVATKPVPILAVLTEEALAIERIGLEAGPLSQWLYSALAEAGLPVICVETRHMKAALSAQINKSDRNDARGIAQMMRVGLYRPVHVKTLASQKRRMLLTSRQLLQAKALDIENDLRGTLRNFGLKVGMVGTIKFEARIRELVADHPDLAAIVEPLLIARRVLREQLDVLHHQLLEIVRHDEVCRRLMTTPGVGPVVALTFRATVDVPSRFNNSKAVGAALGLTPRRQQSGEIDRMGGISKSGDAMMREMLFEAALVLMTHSRKWSWLKAWGMKIARHRGMKRAIVAVARRLAVIMHRMWVDGTEFRWTRKEVAAT

SEQ ID NO: 393629 - protein, 310 aa, unidentified
MEAITAVGIDVSKDRLDVAVRPSGDVFVVERAAAGLDGLVTRLKALGPGIVALEATGGFETVVTAALAAAGLPVVVVNPAQVRAFAKAIGQRAKTDPIDAGVIAHFAEATRPPVRPLPDAETRLLSDLVQRRRQIIEMILAERQRLKRAPARLGRSITRLLKALQKELTSVDTDIDGAVRGSPAWREKEDLLVSVPGIGTRIARTLIADLPELGHLDRKEIAALAGLAPFTRQSGQWRGKSFIGGGRTSVRTALFMGAMVASQRNPALKAFFERLVTSGKPKMVALIAVARKLLTILNAILRDRRPWQPA

SEQ ID NO: 393630 - protein, 370 aa, unidentified
MTERTTYFVGLDVHKDSIAVAHAEALRTEPPHYVGVIGTRQVDLDKLVRRLHSQASELVFAYEAGPCGYVLHRYLTAKGLDCRVVAPSLIPKRPGDKVKTDRRDAVEIARLLRSGDLVNVYVPRIEDEAIRDLCRARDASLVMLKEAKLRLKSFLLRLGLHYSGRADWTDAHRRYLAKIVCPTAPQQIVFQEFVHAVDEQVERLGRVEKEILDVIPTWRLYPLVEAFQALRGVQWIVATIIVTELGDITRFDNPRQLAAFVGLIPSEHSSGEKRRQGGITKAGNSRARRALIEGSWAYRHVAKVSPAIQKRLESLPKPIRDIGWKAQVRLCKRFRRLSSRGKNANVVVTAIARELLAYMWAIAKEVPINV

SEQ ID NO: 393631 - protein, 356 aa, unidentified
MVTLGVDAHKRIHVAVALDEAGREIAQWRGQNSALGWQALWEWALGLEAGPRQWGIEGAWNYGRGLAQHLVAAGETVYEVNARWTAAGRRRARQTAKTDRLDARAVAHWVRQEAPRLPEVRADDETAVLDLLTSERAAALGEATRLRNQLHALLMQLDPEYHRQLRSLDAPEGLTALQSYRPPTAGALAEERAAAVRRMAQRLSLALDQAAELAERVKALTIRAGFTPLTEICGVGFIVAGTLAGILGPGCRFGTDAELAAYAGVAPVETSSAGLVRHRLNRGGNRRLNSLLHMIAVTQLRSWAPARIYVSRRTTEGKTRREGMRALKRFLVRAIWHAWQRCLEQRMASQESLTAA

SEQ ID NO: 393632 - protein, 342 aa, unidentified
MSKVTVYVGLDYHKDSIQVCIMDQSGQVLANRSCANDAKALVLLVAFFGDHVRGAIEACTGAAELADELVARHGWDLDLAHPGYVNRMKQSPDKSDYSDARMLADLVRVGYLPRVWLAPHDVRQLRTLVRYRQQLVNQRRATKLRVTALLREARLVEPQGLRRWGSPWLAWLATTAGLGSEARFVVDCHRAELRRLDEQIRGVQLRLATVTAEDPVVSRLVAMRGVGMVTAWALRAEIGRFDRFRTGKQLARYCGLSPRNASSGQRQADAGLIKASSELLRATLIEAAHRLIRFDTRWGELAAAMRAAGKPACVVAAAVANRWVRWLFHQVEGGAITLKTAG

SEQ ID NO: 393633 - protein, 340 aa, unidentified
MKDTIYDHYIAIDWSIMNMAIARMTKRSNKITAIDVPSDIINLKAYLKSLRGTKVLTIEETTTSQWLYTELKSYVERIIICDPSRNKLLTEGAKTDKIDATKLVQLLKADLLKEVYHSFDKFLYLRRVVSGYEDLVKAGVRLKNQRYALLRACGKSGQEKGDVKLGSYGEQFVLRGLDRQIKAYQKEKEGYEKEFKRLSRKYPEIKHQKSLPGIGTINAVKIVSRVVCPYRFSDKGHYLSYVGLIKLEKISGGRSYGKRNPRYCRQLKCVYKSGALAAIGNNNPINDYYQYLIQEKGYSEYKARHKASRRLAVLSLGVFKSGKKYQPYWGDYVKRSQKIS

SEQ ID NO: 393634 - protein, 365 aa, unidentified
MQKISTTQTSGKSIFKGQLTIGLDLGDRASAYCVLNDAGEIVLERKLATSPKAMTEIFGKMVRCRIAMETVTHSPWVSRLLTALGHEVIVGHAQRVRLITKSRRKDDRQDARKLARLARIDPELLSPVKHRSVQAQLHLTEIRARAGLVSARTALVNGARGLVKSYGERLRKCDTRQFRREATGGLSTGLRDALEPLLREIESLNDRIQEYDRRIERMAKLTYPEASLLKQVKGVGDLIATTYVLTMEDPHRFRKSRDAGCFVGLQPGRRNSGDSEPQMHISKEGDEYLRTLLVQGAHYILGPFGEDSDLRRWGRKLSERGGKTAKKRAVVAVARKLAVLLHRLWVSGEVYEPLHNNQKAMTAAA

SEQ ID NO: 393635 - protein, 341 aa, unidentified
MKNLFIGVDFSKEKVDVAIIFADGLTETAPRVFNEFKTTVSGYKQLVKWVEKNSYGIDPSLWLFCGENTGDYSKGLCNFLYGKGYDMWLENAKSIKDASGLRRLKSDRADASMIAEYAMRNHDKAVMYEPLSESLAQLRELFLYRQMVVRHRCSFQVRRGEKKLTMEKSPIKTMISQSGRHIVSELNKEVAKIDKRIAELIKSDEELTEVFTIVTSVPGIGTQNAVCLMVYTDNFRRFNYDSRKIACYYGLAPFGKDSGTSVHSDPHVHYMANRQIKAMLTQAALAAVKFNPVMARYYMRLVERGKKKQVALNNVKNKLVHLVTAMVRNRQTFTPDYKISA

SEQ ID NO: 393636 - protein, 370 aa, unidentified
MHQSRTLYIGMDVHKESMAVAYVAQDHYAEVISLGAIGTRQCDIDHLIRKMQSKGKHLIFVYEAGPCGYWLYRSLTPKGHICWVVAPSLIPKKPGDRVKTNRRDAIQLARLMRSGDLTPVHVPQVEDKAIRDLCRARADAIRALQAAKFRLQAFLLRQDMRYTGRATWGPAHLRWLSEVVCPTPAQQIVFQEYVRAVTEHTERLTRLEQELHTQGQTWRLAPVVDALQALRGVQFTVAVTKVAELGDLTRFDHPRQLVHYLGLTPSEYSTGERRRQGGITQTGNTHARRALVEGAWAYRYPAKVSRHLQLRLEKLPKPIQDISWKAQVRLCRRYRQLSARGKNANQVVVVIARELSALMWAIAQQVPITP

SEQ ID NO: 393637 - protein, 426 aa, unidentified
MGGADVGGDEPAGVVEMEVLVDRVAGLDVHKKTVTACVRVPGEGRERVEHKQTFPTFRADLESMRDWLAGHHVSVVVMEATGVFWKPVWMVLEDAAGFELKLVNARHVKQVPGRKTDVGDAAWLARLAEVGLLRGSFVPPREIRELRDLTRYKKRLIQDRTREGQRVEKVLEDTGIKLQAVASKTLGMSGRAMLDALIAGERDPEVLADLAKGRLRERIDDLVRALHGEIGAHHIEMLRLHLDHIDYLTEAIARLDGRIEEAVAPFAQARDRVVTIPGIGPQVAETILAECGPDMSVFPTAAHLASWAGLCPGNDESGGKHRSGKTRPGNIWLLDALTQAAWSAARTDTFLAARFRRLSRRLGKKKAIVAVAHTMIVAVWHVLANDRNYHDLGSGWYDAWDPKARTQSLIRQLEALGHHVVLQPAA

SEQ ID NO: 393638 - protein, 388 aa, unidentified
MIYVGIDVAKHKHDCYIINSDSEIIKDVFTITNDLDGFTTLLHSIPNVDSEHIKIGLEATGHYSINLLNFLKDYYHHIVVFNPLQTNLFRKAHTLRKNKTDKIDAKFLALMLHSTDYNSYSDISYHLKDLKSLTRHRFRLKSQSSRLKISLTRLITIIFPELPSVVYSIHQKSTYALLEAFPSKDAISKAHLTTLTTLLHKASRGKYSKEKALLIRDTARQSIGSDSRALEFELKQTLRLIQSLEDEIHHLDLEIKSIMQEIESPITTIPGVSDTLGSIIISEIGDISNFDTPAQLQAFAGLEPSTYQSGTYTASNTKMVKRGSKYLRWALLEAARLIAVRDNTFKLYYQKKKAEGKHHYVAQSHVAKKLIRVIFHLLTNNLSFQPQT

SEQ ID NO: 393639 - protein, 339 aa, unidentified
MTKSTTIIGFDLHAATTVAAVLLPGQRTPALHALSSDIPTVVRFVERVRRQGRVVCCYEAGPCGFELQRALANREMQCDVIAPALIPRRPGDRIKTDRRDASQLAILYRAGALTIIGIPTEQEEAARDLLRCREDIRADLLRARHRLSKFLLRHGRRFTETKNAWTKRHRAWLQAQHWPLAALEQTHRAYIRAVDEAVARLQSVDTELRDLLTIEPLRARVERLRCFRGIDDLTALTIAAELGDPRRFPTAPRLMAFTGLVPSEHSSGAKQARGTITKTGNAHLRQRGAPAPVIQQAWHAQHRLNRRYRCLAARGKPRPHIVTAVARELTGFVWAALTQ

SEQ ID NO: 393640 - protein, 427 aa, unidentified
MNNVTYQPTLCVGADVHLDEIVLRAVDKALGHEVVDRFSVTNNLPGAQLAAAAIAAAATELGYLRIEIACEATGMLWIPFHRYLSTAPPLQPFELELVCFNPKLVAKFKDGLVLRSPKDDDRDAFDIAARLRFGELPISYVPSDFWQGLRRLTRYRYRLSKAMSREKMRFQSHAFLKCSDWKRVKAFSDIFGATSVALLTEFTVAELQEMTHDQLVNLITHRGHGRFADPTATARAVREALRTSYPIDPRMDEMVTATLAAGWDHIRYLKRSMKRLDQLIARYINLIPNPIITIKGLGAVITAGILAEVVDVLRFPQEKQLAQYMGLTWRKSSSGGFVSQNTRLTKVGNVYLRYYFILGANLLRQNNLEYKAYYWRKYQEVSKYQHKRALVLTARKLVRLVHALLTKNETYVRPRTTRQDQEDDRLQ

SEQ ID NO: 393641 - protein, 402 aa, unidentified
MNAVGIDVSKGKSMVAIMRPFGEIVSAPFEIKHTASDIHSLVELINSVEGESRIVMEHTGRYYEVLAHQLSEANLFVSAINPKLIKDFDNDSLRKVKSDKADAVKIARYALDKWQNLKQYNVMDELRNQLKTMNRQFGFYMKHKTAMKNNLIGILDQTYPGVNTYFDSPARSDGSQKWVDFASTYWHVDCVRKMSLNAFTDHYQKWCCRKKYNFSKAKAEEIYGKAKELVPVLPKDAITKLIIKQAVDQLNSASTTVESLRTLMNETASKLPEYPVVMAMKGVGTSLGSQLMAEIGDVSRFTHKSAITAFAGVDPGVNESGSYEQKSVPTSKRGSSDLRKTLFQVMDVLIKTHPQDDPVYQFLDKKRAQGKPYYVYMTAGANKFLRIYYGRVKEYLSSLPES

SEQ ID NO: 393642 - protein, 469 aa, unidentified
MSVGKMESGKKAKRKRKRKSIDGYPVLEPNAGGIDVGAREIYVSVAPDRDEESVRIFATFTEDLERMADWLIRVGVTTVAMESTGVYWIPVFEILEQHGIRPCLVDARHLKNVPGRRTDWHECQWLRFLHSVGLLRAAFRPESEICAVRALMRHRSELVQMAAQHVQHMQKALTQMNLQIHHVISDLTGVTGLAIVDAIIAGERDSKELAKLRDFRIKADEETIRKSLVGNWRAEHLFTLKQSRQLYQTYQQQIVDCDEEIQRLTTAFSSRADPSEKPLPADRKHNKVGRKRNKDIDPKSCFDMRTETYRLFGVDVTQIPGIGNMALSLFTELGRDLSKWPTSSHFASWLALCTDNDISGGRVLWQATRKLKNRAGQLFRLAANSLHHSPTYLGNYLRRMKAKLGAPAGITATAHKIAIVFYTLVTKQIEYDESVWAEREAERQKRFEAKIKRQAKKLGFQLVPIQQNV

SEQ ID NO: 393643 - protein, 352 aa, unidentified
MLIIGCDFHPGFQQVAIFDNRTGEIEEKRLQHRAEAEQFYRSLAGQEVLVGMEACGHYPWFERLLEELSMELWFGDAARVRASEVRKQKTDRRDAEHLLDLLRADRFPRIWVPSLEVRDVRQLLVHRHKQVQARTRTKNQLQAMALSCGVQKQRKLWTKAGRAELEQLPLLPYAAQRRQRLLEALDALEAEISELDRRVAEEAGQRPEAVRLMTHPGVGSVTALAMVLTLGPAERFGSAKQVGSYFGLIPSEDSSGGKQRLGRISKQGSSFLRFLLVEAGQTAARLDPQLKRFYRRLAVRKNRSVAKVAVARKLATRLYLMLREDWTYAQLSQAVMQVSPSHSVAGEQEPSV

SEQ ID NO: 393644 - protein, 314 aa, unidentified
MITTSNAAVGFIGCDVGKTTIVVFDSRDGRTTDIPNRPRDLASFAKRLDDSCLVVCEATGGHEATLLDVLVQAGIAAHRADARKVKAFIRSFGTLGKTDAIDARALAEYGQERQTRLPRWQAPDQYRSQLQTLVLTRRDLVAERLACTNRLGAPGAQTVQPYLECLLDCLNAQIKAIEVAIEALIRAHKPLATAAKTLRKIAGIGPATAAALIALMPELGRLNRRKAAALAGLAPHPRQSGTTDAYRSTKGGRPEVKRVLFMAALSAAKHNTDLRLFYKKLIANGKKPLVALTAVMRKLVVICNAMLRQSPIAI

SEQ ID NO: 393645 - protein, 438 aa, unidentified
MNTTETIKEKIAPEEIVAWVGLDWADNEHKISMCDVATGQAEDSVLKHSSESLQQWLAQLRKRYEGKKVAVILEQSRGGLLYALMSCDFIVLYPVNPQSLASYRKALYPSGAKDDPVDAALLREMVQKNPRRFRQWIPDDPDTRSLKLLAEGRRNLVKQMTRLTNQLTSQLKTFYPQALEWAGELNSVQACDFLREWPTLQAVQQARPARLRKFYLRYGRPRTETINKRIGQIKEATPLTTDPAAVLAGSTMVRSIAMQIRPLIAAIENYDDEIKRLFQQHPDRLISESLPGAGAVFAPRLLAAFGADRERWTSAAEIQKLSGIAPVTERSGKQRVVHWRLGCPKFVRQTFHEFAGSSIQWCNWAKAYYQHMRDRGEQHHTAVRALAYKWIRILFACWKTRTPYDNELFLEALAKRGSPLSARAAAVIEAGRAKAHMA

SEQ ID NO: 393646 - protein, 364 aa, unidentified
MHYVDNTELSSHEETRSQFNGGTGAIKLGVDVHQDFYVVVEQVGGGNPKPPQRFRKEAFLHWATRLKQKSGAQVHAVYEACGFGFALQRKLSALGIHCYVVCPQKLDEQNRRVKTDGLDAKALCLKLDRFVQGNRDALAIVRVPTEEEEQARAIHRQREQLVKARKQLEAQGRSLMVNHGLEPVQNWWKPHTFAALPMPQWMKELLANSQPILMALQQKIAALTVQLQSAAAPDQPRGLGKMTSVVIDREIGDWKRFNNRRQIASYTGLCPGEYSSGNTRLQSCVTKHGNPRLRAALVELAWRLVRFQPDYKPIVKWRATLTKGALATGAARKKAIVAVARQLAVDLWRIKTGRLSAEELGLIN

SEQ ID NO: 393647 - protein, 317 aa, unidentified
MNTLNNQNEINVGVDTGKTQLDIYIRPLDIYFTVENNDGGIKHAIKTLKKHPITRVTIEATGRLEHPFIMACAQANIPFVVANPVNIKRFAGAIGQKAKTDKLDAQLIAHFGEAIKPPLSSLKPEQMRLMSDLLSRRRQLMDMQTMEKNRSKIMPKTISSLIKPILTALKNQIDKVDLKLQKLIKECDEYKVKNDIIQSVPGVGNVVAFNLLSDMPELGCVNNKEAASLVGVAPFNRESGAYQGKRMIRGGRPKIRTAMYMAMMSAIQCNPKFKAIYHRLVAAGKPKKVAIIACIRKLIVIINSMVRDGVMWDPKMV

SEQ ID NO: 393648 - protein, 341 aa, unidentified
MNGSKTVVGIDIAKRVFQLHWIDMESGEIVSLQLKREKFLEHFANRQKCLIGMEACGGAQHWARRLTAMGHQVKLLPGKAVKGFVTGNKNDRHDARAIWTAVQQPHVKAVAIKTEEQQAVLALHRMRSQLVKFRTAQINGLRGLLTEYGEVMSQGKAGVRKGITEALAGLEDRLPAMVIDTLREQWDRIGKMDEEIATIEQRIKLWLKNDDACKRIAEIPGVGPLTATAAVAIMGDAKAFKSGREFAAFAGLVPRQTGTGGRIKLLGISKRGDTYLRTLLIHGARSVLTHAKEPGPWVTELRQRRPLNVAIVALANKMARTIWAILAHERTYQKGFVSRPA

SEQ ID NO: 393649 - protein, 343 aa, unidentified
MTKLYGGIDLHANNSVIVLVDEQEQVVYEQRTPNDLSKILSQLSPFQPRIHGLVVESTYNWYWLVDGLMEAGYSVHLANTAAIHQYDGLKHTNDHSDARWLAQLLRLGILPTGYIYPKEDRAIRDLLRKRSQLVRQKTSTLLSIHNLVTRNTGTSLTGNRIKTLTAEAMRDVLPTPDLALAVTSTLAVMRCVAEQIAAIEHAIKARVSLRPTFRHVLTVAGIGQTLALTIMLEAGDMHRFPTVGQWASYCRCVNSTKLSNGKRKGQGNTKNGNKYLAWAFIEAANFAVRYYPDIQRFYQRKKAKTQGVVAIKAVAHKLARACYDVLRDQVPFDIKKAFVTQPA

SEQ ID NO: 393650 - protein, 335 aa, unidentified
MEQKYFIGIDVSKEKLDLAMINSNLELVTEKIIPNSLTKINTFFTALFRKLKISKEQVLVCCENTGIYGRPLEICCVKLGINLWVEHPLKIKKASTDMRGKSDQKDAYRIAEYVFRYSDKVVLFKESTDLIKELRTLLHVREDMIEKRAMFKNQLGEAKSHNKEQYNVLQACYTPLIKALNKQLIVVEKRIDVLTDQETSVKKNIQLITSIKGIGKQNALQFIIHTDNFQKFTSANQLACYSGVVPFPNQSGTIFKRERISKQANKKLKKLLHMAAMAAIRFNQELKEYYIRKVKEGKNKMCVINAVRNKLVHRIFSVIKRQTKFVASREEFLSI

SEQ ID NO: 393651 - protein, 404 aa, unidentified
MLYAGIDWADQKHDALVLDDTGRKLGSIHVAHTPEGLAKLDTWLVQMLGPQDKAQMACVIETTHGLLIAFLLERGWSVFPVNPRTVDRKRSASGAKTDIIDAYLLAKTGRADFADLHQLIPDSDQVAELKALTRDQDNLIQMQTRLVNQLTACLKEYYPIALSLFAKLHQKSALLFLQTYPTVQAAQAASLEQIAQVLAEAGHTSVKRVAPKIFEQVHQPQLSAHEITTRTKSRLALALIAQLLPLVEQIADYDREIEQLFLSHEDNEVFKSLPGAGKRLAPRLLAEIGDDPSRYKSAGSLQALGGTSPVLFQSGNYSKPHRRQGCIKPLRNALHQFAWQSTQQEAWAKAYYERKRAEGKSHSVAVRALSNIWVRIIFAMLQSHTPYASATFEAAKHQHALKAA

SEQ ID NO: 393652 - protein, 343 aa, unidentified
MQVTTIGLDLAKHWFQVHGVDACGAVAIRRKLRRSEVLSFFQSLPPCLVGMEACATAHHWARELTKLGHEVKLMPPAYVKAYVKRNKNDAADAEAICEAVTRPSMRFVPVKDTEQQSVLLLHRARNLLVRQRTMLVNALRAHMAEFGMIAPQGLRHVELLTRIVAHEQERLPELARQILQLIVDQLHETMARVRAIELRLTQWHRQSQVSRLLATVPGVGIMGASAIAATVADPSLFRSGREFAAWLGMTPRQNSSGGKERLGRTSKRGDKYIRSLLIAGAVAVLRHARNRPTRDGVWVRAMMERKPTKVAAVALANKTARIVWAVMMRGDGYRAKQVLGQPA

SEQ ID NO: 393653 - protein, 432 aa, unidentified
MYTHLTTIPLVGLDIGKNIHVLGSYRSDDLSALHPPLTLYNNRAGFEQAAGQIDQLLATYPRVVVGNEPTGIYYEAWGRELLSRYTEALQGGQLVYHLVNPHLVKLARVALQDGRFHKSDAIDTQAIARCLQQGQGAPAHFPEGTGLLFAEWARRYRRLERGRRVLGVEILRQMDRLWPGAFVNLRRFKTAHPRLEPPVPLVATRPLERKLVQALLGHDPNPYTIRALGEEGIQTLLRQSMGRCGSVTARRVLDNACQALLPPPDVAVVYAEALQDDWQRYQTLLSQLARLEAQAEAIVPNSPAAVLTTVPGISIFHAARYLAAIQDAHRFPSADHIWAFAGFDPVRTQSGDSRRVGHISKRGDPAFRNTLYLIGKHTARHCPPIRRTFRQARQRFRDRTEVRAVLHAARKANRLLYRLLIDQVPYDPARHR

SEQ ID NO: 393654 - protein, 358 aa, unidentified
MSSITYVGMDVHQDSIVLAGVSVQGSDRLFEIRLPNDHAVFMRHMKRLNKRHNLRCCYEASSCGYVVYRWLNKSGIACDIIAPSLIPHKPGDRIKTDKRDALNLALLYRAGLLARVHIPDENEQGVRSLVRGRETLHREVVRSRQYILKFLQQRGLVFREGSNWTLKHWKYLRDLSFSGSEESIYRLYLELLEYKLTQLNELDRKIEEASLSRPYSDRVKILRCFRGIDTLTAMVLQTEVVDFSRFAGAELLMSYFGLVPSQHSSGDAVRTGSITKAGNNRCRRILIESSWHYQHKPSIGQRLKKCQKGQPAHVIAVSWKAQCRLYRKFWKIANRKDKNKAVVAVARELTGFIWSVMH

SEQ ID NO: 393655 - protein, 281 aa, unidentified
MDAIYVGIDVSKDRLDVHVRPTGEAYVVSRDGKGLGELIRRVAGLLPTLVAVEATGGYETIVAAAIAGSRLPLAVVNPAQVRHFAQAIGKRAKTDPVDAAVIAHFAEATKPEPRSVPDEQVQVLSDLVARRRQIIEMIVAEKQREKRAINRRVRKSIARLIAVLEKELSAVDTDIDDLVRGSPVWREKENLLASVPGIGSTTARTLLAELPELGCLDRRRIASLAGLAPYTRQSGQWRGKSMIAGGRGAVRSALFICAMVARRYNPSLKAFYERLLAARKP

SEQ ID NO: 393656 - protein, 391 aa, unidentified
MIYIGIDVAKDKHDCFITNSEGEMLFNAFTIPNNSAGFNDLYQKISSLTNDFSNIKVGLEATGHYNYNLLGFLIDKGFPTFVINPLHTNLFRKSLSLRQTKTDKVDSRTIALMMMSGVNLQSYSDTSYHNEELKSLTRYRFDKVKERAKLKTSVSRLVNILFPELERLVPTLHMASVYALLAELPSSPQIASCHLTHLTKLLQDASKGHYGKEKAVEIRNAARQSIGSSMPAKSLELKHTIKLIQELTSEIDEIETSIQSIMDSIHSPILSIPGVNYRMGAMIIAEIGDFSRFSSPDKILAYAGLSPSTYQSGQLDSCYSHMEKRGSRYLRYALFNATKYVCIWDNAFAAYLAKKRAEGKHYNVAISHAAKKLVRVIYQMEKTGQSYNRAS

SEQ ID NO: 393657 - protein, 320 aa, unidentified
MDAVLGIDIGKAKFHVTLLFSDGTRRRKACANSPAGCTELLAWLARHRAARVHACLEATGAYGELLATTLVDAGHPVSILNPAIIHHYAKSRLSRAKTDPVDADIIADYAAKEHPPLWTPLPREVRELQGLVRRLDALIGMQTDERNRAQAGALTPAVQQSIEAVLEHLAAQIDTVRQQIRQHMDHHPGLRAQRDLLTSIPGIGEATAALLLAELFNKAFTSARQAAAFAGVVPRPHDSGLHEGRRVMCKLGPARLRKGLYFPAIAAIRFNPSLQPLADRLRGAGKPPMLIIGAAMRKLIHLAFGVLKSGRPYDSSLAGA

SEQ ID NO: 393658 - protein, 368 aa, unidentified
MKNVTTYVGIDAHKKDLFFAMLVGTQTTPVTWTIPNEPNAIRRVGRKLERDAPGSVRACYEAGPCGYALQRQLTSARVACQVIAPALIPRKPGARFKTDRRDARKLVELFRAGLLTGVRPPTADEEAVRDLCRARDDVREDLQRSRHRLGKLLLRRGLHYSGRNWTQAHRRWVESLQWTQAAERVVVDDYLLAIEQLETRRREFDAQLAEIAETDPYRERVGWLRCFRGIDTLTAMLILAELHDFRRFQSPRALMAYLGLVPGEDSSGEKHRRGRITRTGNTLVRRLLVETAWHYQHRASIGVALTRRREGQPGRVIAIADKAQQRLCRRFRRLMEQHKPAPKVVVAIARELAGFLWAALQPAPTPAS

SEQ ID NO: 393659 - protein, 348 aa, unidentified
MAGSTLPHRWSVGIDLHKDTLTACVYCSCCGEIRFQKIACRCRKQIAEFFGSLPRPHVVAIEAVGFYRWLWEMLEPLVERLVLADATQARALAGRRMKTDREDAQNVAELLACNRLPLAYAPPFEVQVLRDCSRQRNALSRQHAHVLHRVKSVMNANNRPGPARMASSGLIRYLEAFESKLPERHGRYLWLCVDQLALIERQRAQLERELERLLAQPLFAETSAILNSFPGVGLVTCATVLAEIGDFGRFSYRKSISRYGGFDPRTFDSAGKQRTGHISKRGPSNLRWVLVQAAWAAIRLDPQVKRIWLRISRKAGKKAATVAVARRLLVWMWKAVRTGQPYRAPVAA

SEQ ID NO: 393660 - protein, 339 aa, unidentified
MNILKQIFGIDVSMDNIEVRFGTTDIYQNQVISNSITFKNSTSGFKKLILWVKKTIISNDIPIFFVMEATGVYYENLAYFLFLNCFNVAVVLPNKIHNYSKSLESKSKTDPIDAATITRFGLERKLNLWSPPNNLVKSIKSLCREYYSVKTMITEVKNQLHAKNHSHLPDKNTIKRKSLLLKMLDKQSRQIEMDLHDIIHNDKELSEKVERLDKIKGLGFISIVTVIAETNCFELVTNQKQLASYAGLDVVFNDSGIKKGKTSISKRGNKFLRKAVFMPALSACKHNHKMKELFTRLVAKGKNKKLALIAVARKLLLLIYTIWKNNTEYIPNYNPSLNL

SEQ ID NO: 393661 - protein, 457 aa, unidentified
MRKRHRSKSKLRSRQIAPATIRPDAAGIDVGATEVHVAVNPERDPESVRTFATFTVDLERLAAWLRACQVKTVAMESTGVYWIPLFDILEAHGFEVCLVNAQHVKKVPGRKSDVLDCQWLQYLHSVGLLRASFRPPSQICALRALLRHRQNLVRYAAAHVQHMQKSLDQMNLQLHHVLSDITGVSGLRILDAILEGERDPLQLAGLRDYRVRSSEETIAKALTGNYRDEHVFTLRQALAAYRHYQQMIVACDQHIESLLEGFSDRVDPQQQPLPEPRRKRRRSGNGAHFDLRTHCYRVLGTDLTAVPGVDALTAQAVIAEVGTDFSKFPNAAAFSSWVALCPHNDITGGKVIRRGTRPVKNRLAVALRQAAQALHGEQSYLGAFHRRLRARLGPAAAVTATAHKLARIIYHLVTTGEAYDESVFQREQQRYRQRAEAHLRARARSYGFQLVPLDRPA

SEQ ID NO: 393662 - protein, 349 aa, unidentified
MAMTIVEAPLGITGGVDTHLDVHVVAALDPLGRLIGSESFGADAAGYRSALTWLRQFGQVVKVGIEGTGTYGTGLARFLRTQGVEVVEVMRPNRQERRNKGKSDPLDAVEAARAALSGKASGQGKTMNGAAETVRVLVVAKRSARQARIKALVQMRHLAVSAPEELHQRMKGLSVTALVHEATGLRPSRSPDPVTAATKASMSSLAHRVQSLDAELVALDEKIASLLAAAAPGLLGLYGVGPDSAAALLVAAGDNPERLKSEPAWARLCGVAPIPADSGKVTGHHRLHSGGDRQANSALWRIVMVRISHDPGTRAYFDRRVKEGRTKRDVIRILKRYVAREVYRALPRG

SEQ ID NO: 393663 - protein, 419 aa, unidentified
MAFKIFRKNCCGLDVHKTWIYACIGITDTNGRTEYKQARFSSFTKGLQELADWLAKYDCNDVCMESTGKFWIPVFNILEKTCWVTLAHPKYTKPQKGNKTDRKDAKWICDLYMCDMVKPSFIPPSDIRQLRDLMRYRMKLTNVETSEKNRALNCLTVSNLKLDDVFSDVFGKSSRSIIHHILEHPGETFDVAPFIDRRCKHPVEEVQAAVDGAISHEQAVKLRECLQHLDELEIHKTSIEKEILRLAQQYPYQLELLQTVPGFSGNIMTAIALISEIGADMSVFPSAKHLVSWAGCCPRNDQSSKKVKSTRISRAGVYLKPLLVQVANAVIKSDKYPECKERYRRIKARRGHKKAIIAVCRMLLTAIWNILSKLEPYSAAGYLEDKLAEHSVVISKAQGLELLRKRGYIFKDEVDPAPA

SEQ ID NO: 393664 - protein, 452 aa, unidentified
MRKVGFPSPKEKPPVKIEMMHPHQIILNEEVSVDKNDDSRLEKFRQLKRDIRGSTQHLVVGMDIAKERHHAFFGTPAGKVLLHRLVFDNTREGFEKLCFQADILKSQHGLAHVVFGMEPSSDYHKPLGEYLIGHGHSVVLVAGTAVKKNREILDGRWDKNDTKDAANVADLITQGKCLFYEFPSLYLRELRSLLSLKRRLKKSEQGYRVRIRNHLIAQYFPEMDAYFNYAEGPGLVRCLDPQKLAGLQFQEFVRMVPSGNGRQEERLGEIYAKAASSIGCAAHPSVAFEASTVLDGLKAFHLMILETDKRIAEVCKKFPEYPCLLSIPGFGPDISAKVLGALGNPHRFENHRQVLKMAGLDLSADRSGKRTDVTPVISKKGKADLRYGLYQAALIASTRNTQFMTYFTNKLKGREKEKGIGTKMRVKLSAKMLVIAWTLMRKKGMFDPGCIE

SEQ ID NO: 393665 - protein, 332 aa, unidentified
MHPYFVGLDVHKQIIAYCVKKVDGQLVTEGTIKATRTALAEWVKSLPQPWVGGMEATMFSHWIYVALQPHAAELYMGHAARMKAISAGKKKSDKLDSRTIADLLRCNVFPKCFVIAPELGRLRQQLRFRQLVVKQQVAFMNKTAGLLMETGIEYERRRLHGKRYFSELMATTHWVNQELKPLLKFSRQQIESLAGMDKRLIRMLEKHPQLRARVAALRTIEGVGPILALSWALETGTPERFPSIKDAQSYCGLTSAFWESAGQQKRRPLSKQRNQHLQTVLIEVANLAPLYNEKLKALYQKEKAAGADSNQATLEVARKLVAYLLAVDRAFW

SEQ ID NO: 393666 - protein, 343 aa, unidentified
MSVQTIGIDLGKTVFHLVGMDSRGEIVVKKRLSRLQLVRYTANLPACRIGMESCCGAHHIGALLTAQGHDVRLIPGQFVRPYVKSNKNDYVDAEAIAEAVQRPTMRFVPIKTKDQLDLQAIHRVRDRLITRRTSVINQLRAFLLERGITVGQGRAVLRRQMPDLLAHADQSLSPCMQRLLQQLWREWLDLESQITATTKEIDAVVAQDAACQRLLDVPGVGPLVATAMVAAIGNGSAFARGRDFAAWLGLVPRQSSTGGKARLLGISKRGNPYLRRLFVHGARSVLRNANRERHPLTQWISGLESRAHPNVVTVGLANKLARIAWAVLATGTPYRVAAPVAAQ

SEQ ID NO: 393667 - protein, 366 aa, unidentified
MARYVGLDAHSKKCVYVIQEEDGKVVGEGSVPTTLEGLQLLRARYELAAGTRVALESGTMAFFVARRLAGLGLEPRVVDAHEVRQKALRPNQKSDRRDALELCEGLRRNSYRSEVHVPPEAIEQLRETLKRRRHLVRVKTMQVNAAKHVARAAGLQLRSRSLRTEEGWKRLQAAVAIDPLLEGFCRAHHAVWRCAHDQVTTLEGSLRTQGEPFQRDLDRLQTAPGVGPIVALTVVAVLSDVRRFPTAKHAASYAGLVASTYDSGERVQHGRITRRGSNELRAMLCEAAQHARERTSPLYPYFSRLCVRRGYKMAVVAVAHRLCRILFAMLREGTEFDLSRLAVEPGELEHTTVRCYRRKRGVATSA

SEQ ID NO: 393668 - protein, 481 aa, unidentified
MSQSKKHSPKTRKEKPAAGQGKRGGKRTGMCLEDRPILEPNAAGIDIGAREIFVAVPPDRAEDPVQVFSTFTEDLEKMAQWLVSCGVTTVAMESTGVYWIPLYDVLETHGVKPCLVDAHGMKNVPGRRTDWHECQWLQFLHSVGLLRGAFRPDGDVCAVRSLMRHRSDLVQMTNQHIQHIHKALTQMNVQIHHVIDDITGVTGSAIVDAIVAGQRDPLELAKLRDPRIKASEEMIVKSLKGNWRPEHRFTLKQSRQMNRHYQEQIAACDEEIEKLLVAFQARVDPQEKPLPPDRKKRKRGRCKKNAKTKQGFDLRTESYKIFGVDLTQIPGLMAMVLTLFSEVGRDMSRWKTAGQFVSWLALCPDNDITGGRVAWRGMRRVHNRAGELFRMAAYSLHHDKSPLGDYLRRMKSKLGPAGATTATAHKIAIIFYTMVKRQVEYDATLWAERDTQREKRFEAKLKRQAQQLGYKLVPIEEEPAA

SEQ ID NO: 393669 - protein, 400 aa, unidentified
MVSAQLQVAVDVGSQRHRVAVGDVAGELLEEFDVEHTAAGLAGFFTRIEHWEARCGWPVAVAMEGYNGWARPLDRQVLLRGWRLFNVNNLKLARYKEIFAAPAKNDAIDTRRMLELFRLRGQLRVAREVLQEVAPVALENDKLKRITRRRRQLVGEKGRMLNRLQADLQAVCPGLLSITGEADNLWFLSLLSCREDLRKIAGLRRSTLLSLAGVGSKYASVIQAWQQEAVFSEEAPWVGPMIVADAGRILALKREIKTLDETVEQLVQDSGLARRIDTIPGFSPTCSGELAGEIGTLERFRGEASLAVYLGMATLDDSSGKQRGSKPPRQVNTRAKAAMMIAAMRHIEQVAASRAYYDKKRAQGKNHNQAVRCLGRQLVRVIWSMLKHGRDYELRAPAVA

SEQ ID NO: 393670 - protein, 350 aa, unidentified
MLVFEPALKGTAQMEITTIGIDIAKSVFQFHGVDAAGQTVLQKKLRRNAVLDTLAKLPPCLIGMEACATSHHWAREITALGHDVRLIPPAYVKPYVKRQKNDAADAEAICEAVTRPNMHFVAIKSVDQQAAMMLHRVRDLLVRQRTMLINALRAHMAELGIIAPQRPQNVLGLIQQLEEDSNGGITEVARSALLSLADQLTSLTQEIRALDRKILEWHRSSETSQRLATIPGVGVLTATAMAASVTDPSLFRSGRQFAAFLGLVPRQNSSGGKERLGRITKMGDGYLRKLLVVGATAILRRVADTQTRTANWIRSLLERKAPRLVSVAMANKTARIVWALLARGGTYRAA

SEQ ID NO: 393671 - protein, 341 aa, unidentified
MSTVTLIGIDLGKHSFHLHGQDVTGRMVFRKKCSRQQLFTLLGNTPGSTVVMEACAGAHWMARRIQALGHRAKLISPQFVRPFVQGNKNDFADAQAICEAASRPSMRFVSARNEAQQTVSALHRVRESLVRDRTGVINQVHAFLLEFGISLPRGQAIIRRLPAVLAGHELPPRLVALLERLQTHFKYLDEQMGQIERELCQQLREDERSQRLLEIPGIGPITASVLMTELGDAQQFGSARQFAASVGLVPRQYSTGGKPTLLGISKRGDKNLRRLLVQGARAIMQRVQQRTDRLGIWVRELLARRHSNVVACALANKLARIAWAILANGTNYRSEQAVSTT

SEQ ID NO: 393672 - protein, 345 aa, unidentified
MEEGTGAYQLYVGIDIAADTFTAAWRTRAGKPTPPFIAEQTPAGFAALQRRLAASGAAPANVLVVMEATGNYWVALAVTLHEAGYRVAVVNPRQAHHFAKAQLRRAKTDALDARDLAQLAAALQPTPWTPPPAVYHEVRQRLVARDGLLAMRTQARNQRHALQQWPVVVAGVRQHLDELITDLDRRIAALETEIAAVLRESVWAESLACLTSAPGIGLVTASRLLVSTLNFALCTGPEALTAYAGLAPVPRESGRSLRVRATIGHDGNGRLRTALYMATLSAARFNPAIKVFYQRLRAAGKPQKVARCAAARKLLHQAWALGSKLQRFDPVLNQQQHEALPVLAA

SEQ ID NO: 393673 - protein, 323 aa, unidentified
MNWITYVGIDVAKDKLDIAIKLTEKGQAASPATQAHEAWTSPNRDENVAEIVERLRAAKPHRIAIEATGGYEKRVFRALYAAGLPVVLVNPGRVRDFARSMGRLAKTDRIDALMLAHFAEIRQPEVISPPTENQERVASLRALRTDLIGTRVAYTNRLETCEPEVAQHIKQLLTSVEAQIKTIEAKLAKALEATPEDAAKARLVQTVPGVGPVTAATLVGELPELGKLDRRRISALVGLAPMNHDSGYQRGQRRVQGGRSEVRRVLFMAAFSASRYNPVLRKFAERLKAAGKPYKVIMTACMRKLLVILNAMVLSGTSWAPPT

SEQ ID NO: 393674 - protein, 343 aa, unidentified
MQAVTVVGLDIAKSVFQVHGVDAQGSVVVRRQLKRRYVLAFFKKLPPCLVGIEACATSHHWSRELQAVGHTVRLIPPAYVKPYVKRQKNDATDAEAICEAVTRANMRFVETKTPEQQSCLMLHRTRHLFIRQQTSVINAIRAHLAEFGIVAPVGRKGVELLLAVVTDTSDQRVPEVARACVAALGAQLRSLKAQILEFDRRIMAWHRSNETSRRLDKIPGVGPALATALVASVADAKAFRSGRNFSAWIGLVPKQHSIGGKNKLGSISKQGDRYLRSLFTAGALAVIRYAKIHGTQHRPWLTVLLARRPTKVAAIALANKIARMAWAMMAKGERYKEPVALAA

SEQ ID NO: 393675 - protein, 343 aa, unidentified
MDHFAGLDVSVKETSVCIVDETGKIVREVKVASEPEALLSVLKNPAYRFKRIGLEAGPLSQWLFSALAEAELPVVCVETRHMQAVLKAQINKTDRNDARGIAQMMRVGLYRPVHVKTLRSQKLRMLLTHRKLLQSKAIAIENDLRGTLRNFGLKVGLVGTVKFEARIKELVENLPDLAVLVEPLLVVRRVLREQFVILHRRLLAIVQDDAVCRRLMTTPGVGPVVALTYRATVDVPARFRKSKAVGAVFGLTCSKYQSGEIDRSGRISRCGDEMMRVMLYEAAQSMLHSKKWSWLKAWAMQIARRRGKKKAIVALARRLAVIMHRIWVDGTEFRWTREQAVTA

SEQ ID NO: 393676 - protein, 424 aa, unidentified
MEVMHERVAGLDVHKETVVACVRVMVGGRRPKRECRTFATTTEGLLNLLEWLTATRCSHVAMEATGVYWTPVWKILSDGDFELIVANAAHIKQVPGRKTDMNDATWIADLLACGLIRASFVPEEEIQELRSLMRTRKQLVREQTRHVQRLQKTLEEANVKLDSVVSDIMGVSGRRMIEAMIGGERNPQRLAALADRGLKASPKQLYDALHGRLREHHRFLLKLHLTQWDALDATIRDIDRQVDGQIERMDETTEDQQPPFRQLILRLCSIPGVSHLSATSILAEIGRDMRRFATAGHLVAWAGLCPGQNQSAGKSKSSRLRKGAPWLKTMLVQCAWAAKRRKDSYYMAQFQRLKARRGPQKAICAVAASILTAIYHMLRANAPHRDLGADYFDRRSPDAKAQRLVRQLTKLGFAVNLQPLDAAA

SEQ ID NO: 393677 - protein, 360 aa, unidentified
MEMIGLDLHKRETQLCICTEDGTIVEQRIATSRERFTAVLGARPRARILLEASTESEWVARHLESLGHEVIVGDPNFAPMYATRTRRTKTDRRDARALLGANQVGAYRPAYRVSDARRHVRAELAVRETLVRTRARYITLAKTLVRRDGLRVPTSSPAVAVRHIQALPVLADALALSPFLGEELAPLTAILAPLSAEIAAADRRLEAHATTDPEVTRLMTMPAIGPVTASALVATIDDIQRFRSAHQFEAYLGLVPSEQSSGERQHRGRITKTGNARMRWLLIEAGWRVLHAKTPATAALRAWALGIAARRGKRVAVVALARRIAGILFAMWRDGVPYDARKLRSGSAHATTVVRSASDR

SEQ ID NO: 393678 - protein, 443 aa, unidentified
MVTDDDQHIEEAETYRRHHEQIHRADAGGMVAQKEAMGRAARVWHHRRCMITDGRCSMSQVDDQSRSLTAFDQGTTMAVVVEMSESSWLVAGMLPGVARQPLKKLEPDPVALERLLERWRAEAAKTGRTIGGIVLAYEAGRDGFWLARWLQARGIEAHVIHSTSVAVSREHRRSKTDRLDTAMMRVFLGWLRGERGHCGMVAIPTLEQEDAKRPSRERENLVGERTRIINSMKSALSRLGIRGFNPKLRKAPQRLAAVSTPEGIPIPPNTLDEIRRDLARLAIIREQIDAIERARLKRLGQAPEAGPNAAVLLLARVVGIGVETADMLVQEVLSRALRDRRAVARYAGLTGSPDESGAKRREKGLAKSGNARVRRGLIQLAWRFLMFQRDSALAQWYRSRTEGTAGARKTTMIVALARKLLIALWRLVTTGVVPEGVVLRPAA

SEQ ID NO: 393679 - protein, 372 aa, unidentified
MTRERPVDPVTAVVAQEAFVITIGVDAHKQVHAAVAVDDAGRDVARWRGPNSRAAWDELHCWAAQLADERQWGVEGAGGYGRGLAQRLVDLGEPVFEVNSRWTASGRRSARKGEKTDALDATAVARTVRMEGSALPRVQPDDESSILSVLTTERDELIRESSRIRNQIHHLLLQVDPEYKGQIGCLTTRRSLGALSRYTAPDEGALQEHRAAAVRRLAVRLELVKHHIEDVSLQIKNLAAARFPALMRLCGVNALTAGVLAGLLGPGQRFASDAQLAAYAGVAPLEASSGLRVRHRLSRSGNRRLNSVIYWIVLTQAHHSPEARAYLARRMSQGKTRREAHRALRRYIARALWRLWVECHSTSVSMQVQVAA

SEQ ID NO: 393680 - protein, 354 aa, unidentified
MKRDKYMGMDVHQATTVVVVIDSEARLVLETIVATEKGAIVRLLESISGPLQVTFEETTQAGWLYELVRAHVREVIVCDPRRNKLLTEGSKGDKPDARKLAELLRAGMLRSVYHGNHGTRTLKQLVRAHETLSSDCQRTMVRIKALYRGQGIGTSGRGVYQAKQREGWLRQLSEPGIKQRAGWLFEQLDQLRLLRKQAKEAMLVEARKHRAVKLLGTIPQLGPIRSAQIVATLDTPYRFRTKRQLWSYAGLAVVTHMSAEYEIRDGRVVRTRKPLATRGLNRNCNRGLKEVFISAATGGGHSEPYRSYIENLLKNGMREQMARLTLARKIAATALHIWKKGESFDPKKLNLATT

SEQ ID NO: 393681 - protein, 402 aa, unidentified
MRYFCGLDWAKDEHAVCVLDETGTIRARIATPHTADGLRELIVTLRKITEPATLPIAIERPSGLLVDVLVEAGFPVIPIHPNALKATRARYRAAGSKSDPGDAYILADLLRTDGHRFEPLRPLNDAIRALRAMVRLRDDLVAERVALANQLRALLESFWAGAVAIFADVDTPIALAFLAAYPTPAHAERLGPKRLAAFLARESYCGRRSPEELLGRLRTPPLGTCGELETEVKGALVRSLVAVLEPLCLQIQKLSSAIERTIATDNDAAWLRAFPRIGLINAAQVYAEITDDSRRFASADQLAAEAGVAPVTHASGKHRAVVFRWACNKRLRRAITCWADNSRHSSDWAASVYRAARGRGRDHPHAVRILARAWLRILWQCWRNKTPYDRSRHTAAVRLEAA

SEQ ID NO: 393682 - protein, 335 aa, unidentified
MHYLYYVGLDVSKETFDASLVAFEDANEMAHRKFANSRKGICSCLHWVEKRHGIRIDDVIFCAEDMGSYISEMAVCASDRTLNFNFSLISPLVIKYSMGIARGKTDRVDARRIAEYAITHYRKIALYLPAEKELCQLRTWLILRAHLAKQRVAKLVLLEKLDYKEKFADVSIQRSMLQEEIAYAETHMKTIEREMKELIAADSNICRNYKLLTSIKGVGPITAIVMLCSTLNFTKITDHRKFACYCGLAPFEHSSGTSVRGGCHTSSMANRDIKVQLNRSALIAIRCDPQLKAYYERKVAEGKHKFSVLNAVRAKIAARCFAVVRRGTPYVALQI

SEQ ID NO: 393683 - protein, 357 aa, unidentified
MSKSRQSEQSRSNSQATVFCGIDVSAATLSVAVEADPEWKLEQRQFANSAVGHRQLMAWLGKSKCPVRVTLEATGVYSIDVALALEEAEGFAVQVLNPRKASDFARSLGRSKTDKTDAVALAEYSRRMEFVAWKRPRREVLELRALGRHMTTLTEEHARLSNRLHAAQASRTAPRCVRDDLKRTMTGIQKRLVRLRREARMRIETEAGMHRKWLRLLAMPGIGEVSAVQILAELAGLDEEMTVRQWVAHSGLDPAHETSGTSVNRPSRISRQGNRYLRRALFMPALTAARFDPHLKAFYRQLLTRHKTKLQALTAVARKMLHAIYGIFKSDTSYDGAKLFPRLAVSISTQPQPIPTY

SEQ ID NO: 393684 - protein, 314 aa, unidentified
MERQESVYVGIDVSKDRLDVALLPAGESLAVGRDSAGLEDLIARLRGLSPALIVLEATGGYEQVVSAGLAAAGLPVAVVNPRQIRDFARATGKLAKTDRLDALAIARFAQAIKPEPRPLADAQAQMLGELVARRRQVIEMIGMESNRLRQARAKTVKRTIEHLLAALQVELSTLESELDETIRGTPIWREREELLTSAPGIGDVTARALLAELPELGQVYRHQIAALAGLAPFNRDSGQWRGERHIHGGRASVRTALYMPTVVATRYNPVIRALYRRLRAAGKKPKFALTACMRKLLTILNAMLRDGTPWRETA

SEQ ID NO: 393685 - protein, 353 aa, unidentified
MIIIGVDPHKASHTATVLEGTTSTELGTLRITASLQDYQRLLAWAGAWVPRQWAIENADGLGHHLAQWLLAHGEEVLDVPPTATARFRSLSRGGRRKNDRIDAAAAAGSAAVHGDSRRVFPEDHTDALALLAERRQSLSQHRTRLLNQLHALLRELIPGGAPRSLTATRAAQLLRRVRPTGTADRVRREVARDLIAEVRHHDRLVAANTEQIRKMLIEHPTTLTEIVGIGPVLAARILAGAGNPRRFPTAAAFANYSGTAPIQIASAEHSRHRLSRYGNRDLNSAIHSVAIIQIRTPSSAGYAYYAKKRDEGKTPREAIRCLKRQLASTIWRAMTNDCAGPPVQITQPMVMAA

SEQ ID NO: 393686 - protein, 316 aa, unidentified
MSKHTRIVGVDVSKAHLDLADTKSGSPWRVANSNDAIATLIGDLQIDPPALVVLEATGGYEMALVIALQAASLPVALVNPRQIRDFARATGQLAKTDALDARVIARFGLAVQPAPLPPIEAGQEAFAGLVGRRRQIIDMLVAEKNRLEHADAAVRGWIDRHLVQLKAQLAEVDAAIALAIQTSDELRARQEILTSIEGVGPLTAAVLLAELPELGAIGHKQLAALVGVAPLNHDSGTLRGQRHIAGGRASVRCALYMATLVAVRHNPTLKAFYRRLREAGKRPKVALVAAMRKLLSILNALVRDNRQWQPLRQDGC

SEQ ID NO: 393687 - protein, 417 aa, unidentified
MSEGIGKLVLNKTFNILFSMGFIKYSIGIDISKDYFNCAIILIDDQQTATVKSSSKFANTASGFKQFIDWVNKHCKQEVPIFFVMEATGIYYEQLAWYLFSKDFNVSVVLPTKAKNYIRSTGLKSKNDKIDAKGLALMGAQQQLRLWKPLSQKIYELRTLTRFLEDLNGQLTSIRNQKHALSHSMYKLKEVMDIQTKTILHLEKQIAKVRAAIEEVIIKDPALKAKYALVKNLKGIGITTFAVIVAETNGFELFTNQRQLISFCGYDPIENQSGKHTGRTKISKKGNSHVRRILFLPSFTAVRRKGGDVFTSLYNRLIKNGKSKMQAYVAVQKKMLTIIYTLWKTDKPFDSQYAKTKDQTRKLHSEQPNMQNIENVGEKEEKRVVQELARTTQGRYTKKELWDTAFSGFENTSKNPN

SEQ ID NO: 393688 - protein, 390 aa, unidentified
MHFAGIDIASETHMVAVVDADGSPTVRPTAFGEDEGGYQKLLALLGEPKACVVAMEATGHYWQNLFAALAAAGFEVSLLNPLRTRRFAQEDLERTKTDAIDALGIARFVQQKRPAPTRLPDSATLALRELVRLRDRLVQDMGDKVRQLHRAVDLGFPEFTRYVKTLSSELATAILHEYPTARAFPVVPRPLAKLVYDGRHKVGAELARQITEAAKRSVGQHHDEAYRVQVRFACEDIDLLRRRIRELDDRIETTLREHEVGTLLTTIDGIGPQTAARLVAEIGDFERFANAGKLASYIGSIPGLKHSGKHRPRGSMTSIGNARLRKALWMPVLTAVRKNPWLMAYYERLKAAGKPPKVALIAAMRKLLHAIYSVAVNRKPFVPRLSEART

SEQ ID NO: 393689 - protein, 353 aa, unidentified
MKRDKYIGMDVHQATTVVAVLDANGKVIWETIVPTQGGPIIELLESLSGPVHVTFEETTQAEWLYELVRAQVAEVIVCDPRRNKLLTEGSKADKVDARRLAELLRVGMLRSVYHGNDGARKLKQLARGYQTLLSDTQRTMARIKAMYRSRGIQTPGRGVYQAKQREQWLSLLTDPGVRQRTGWLYEQLDLLGRLRRQAKLAMLAESRNHRAVGQLRTIPQLGPIRSALIVAILDTPHRFRTRRQLWSYSGLAVVTHTSSEYQIKEGRVVRSQKPIATRGLNRNCNRVLKDVFIGAATGGGQREPYRQYMQGLQDRGMRKEMARLTLARKISSIALTIWKKGETFDPKKLSWAT

SEQ ID NO: 393690 - protein, 455 aa, unidentified
MKHEPEEIPDAEHELVIERVAAVDVAKASGKVCVRLPGKAGRRVSRVWDVAATTAAVTELAEDLVELGVERVTVESTSDYWRIWYYLLEAAGLEVQLVNARDVKNVPGRAKTDKLDAVWLAKLTEKGLLRPSFVPPTEIRRLRDYTRLRADLTHDRSRQVQRLEKLLEDALVKLSTVATDIMGVSGRAMIEALIAGQRDAKVLAGLARGRMKTKRAALIEALSGRFDDHHAELARMLLDQIDALTAQIDTLTARIEQLLAAMPEAQPVDPRRDGPTSGHPVGVTADTLAECARLTTVERLDEIAGIGEHNAQVIIAEIGLDMSRFPTPAHLVSWAKLCPRTIQSGPVTRGGRTGKGNPYLKGVLGDAAAAAAKTNTFLGQRYRRIVKRRGKLKALVAVARSILVIVWNLLNDPTARFHDLGPDYHTNRIATERRMRNHIAQLTAMGYRVTLEPAA

SEQ ID NO: 393691 - protein, 436 aa, unidentified
MRGCRCSMIMGFTKPIEHFNLQRKKVITMNTLYVGIDVSSKSNVVYLMLPNGDKHSNFSVANSHEGSTLLVKKIYSALTSHSLDTVLIGLEATSVYGDNLVYFLREDATLAPFNRKIHVLNPKQVKKFHDTYNDLPKNDYVDSFVIADCLRFGRINKEVYMGDYRYKALQNLTRARFFAVQNLVKEKQRFMNVLFKKYSTMTQEKVFSDAFSTTALAVYDEFESAEALANMDLHELTDFIIEKGKNRFPDPVAVAKAIQKAARSSYRLPKTVNDSVNQVLSISITSMKALESQIKEFDKAIKALMELLPNVLISIPGIGPVYSAGIMAEIGDINRFDNQASLAKYAGLAWKQHQSGGFEAEVTRLIPSGNRFLKYYLCEAAFSLVRCDKEYSDFYHLKYKEVNRCQHKRALALTARKFVRLVFRLLKDNRLYCPAK

SEQ ID NO: 393692 - protein, 455 aa, unidentified
MYFEKRDLPQYNSIVLVRARKAQIPIGECLYMKRTQNEKILQIKNETLIVGVDIAKKIHHARAFDNRGVELGKLLKFENSAQGFAAFDAWLAKIQQKHGMTEAVVGFEPTGHYWFNLGDHLAECGHKLAILNPYHVKCARELDDNSPSKSDQKDPKTIAMLVKDGRYRDVYIPDGVYQELREMVRERERLQERLGSLSSQIIRWLDIYFPEFVTVFKDWRGKAAWIALRRFSTPKRMAEVGAQEILLAWREEMKRPSLKKAEALCSTAEQSIGRTQGSGAAVRSLQNIMTEYELLTMQMEQLEEEMQECLFRIPHAAELLAIKGVGMVAVAVFVSEIGDIRRFKDPRQLIKYAGLNLRTNSSGEFKGKTKISKRGRRRLRHALYKAMIPILATNEEFRSLHQRNLTRTQNPLTKMQSIIALCGKLLRVIFALLTKGVEYEPSKIKVVTTDVAQAA

SEQ ID NO: 393693 - protein, 359 aa, unidentified
MRALYAGFDLHGNSNYLGMIDGDGKRVFRKKLSNDLGWIVQVLVPFKEELVGIAVESTYNWYWLVDGLMEEGYKVHLANPSAIQQYEGLKHGDDKHDAFWLAEMLRLGILPEGYIYPKEERSARDLLRKRGHLVRLRTSLVISLQNILSRHLGRKVSVNDVKVLKEDRVTPLLESSEDLALAGRVSKESIDFLTHQIRRIEGVVEKRMEVKEEYRYLLTLPGVGKILALTMMLETGPIGRFATVGDYVSYCRKVPSQWTSNGKRKGAGNRKNGNKYLAWAYAEASELARRFYPEPRVYYNRKMQKTNASVAHSALAHKLARAGYYVMRDQVPFESQKLFGRGQGWNGEPELGLAKSHET

SEQ ID NO: 393694 - protein, 400 aa, unidentified
MLSIGIDVSKGKSTVCGMKPGGEIVYTPFEVQHTREGMSELVSLLRGSGEEVRAVLESTGSYHCPVVAALLENGIFVSVINSLRMKRFCSQSIRKVKTDRIDAMQIALYGLAYWQELQPTKLPEDTYRELQLLARQYYQMTSMLIKAKVDFNAICDQVLPGMQELMNDHAGRHKLSDFVLRYRHTTHILEMGETRFRKDYCKWAEKKGYRNCERMAAHIFATAQNGIPVLPNAPSTQIVITEAIRVLHTVEASRDAILTQMQALAKTLPEYSLVREMPCIGDTLAPRLIAEIGDVRRFHSKRALIAYAGIDAPPYQSGKFCANNRHISKRGNRYLRKTGYEVMQSYVMHKPANDPIFTFIEKKRGEGKSGKLAMVAGLNKFLRVYYGKVTELYRSLPAIE

SEQ ID NO: 393695 - protein, 348 aa, unidentified
MTKVSMIGLDLAKNVFQVHGIEASGKVVVRRQLRRGAMEKFFAELPRCVVGMEACGGAHHWARVLTELGHEVRMMPPAYVKPYVKRNKNDGRDAEGICEAMTRPTMRFVPVKTLESQAVAVLHRTRRLLVRQRTMSANAFRSALTEFGIVAAQGLKGLRSLMQVLEDPASTIPDKARMPLRVLARQWEALNTDICKLEAEIVRAAKSDDVARRLMAIPGLGPIGATAILAAVPDARVFKTARDFAAWLGLTPRQFGTGGKQRLGGISKQGDRTLRMLLTVGATAHLRYERTRDTKDPWLQALLGRRPFKVAAVAYAAKMARIIWAMLVTGEHYRAPNRRHSGSVQAAA

SEQ ID NO: 393696 - protein, 354 aa, unidentified
MAAVVIGIDPHKASHTAVAVDEREVALGDVRVRATAAQSERLLAWAGRWPQRIWAVENAEGLGYLLAQQLAGAGEHVVDVQPKLAARVRLLAADASSKTDPHDARSVAIVGLRSAGLPRVVVEDHAAVMRVWIRRRRRLSRLRTKVVNQLHALLCEVVPGGFAREISARQATVLLQTVHPSSAADQARVELAAEILDDLRRVDAQLRELHKRLTAVVLASKTSVTSIVGVGSIVAAMVVGITGDVSRFRTSDHFAAYAGTAPIEVSSGPHKIFRLSRRGNRQLNHAIHMAAVTQIRNRNSDGYAYYQRKIAEGKSPKMALRALKRRITTTLFDTMIRDARHQPPRHGPVGPTGT

SEQ ID NO: 393697 - protein, 401 aa, unidentified
MKYVLVLDVAKGKSMFMLSSNEGEVLLEPTEFVHNKSNFVLIDSNINKLNIKDNLTVIMEATSIYHKAPERFFKENNYHVIVFNPLIGKEITNTIRKTKTDKQDCIKLTNLFWKGSIPDRNYNEDEIYTKLNELSRQYYHLDEGLTRHKNRYKELLHLCFPEFELCFKDGKIYDLTALNFIKEFPHAYIIKEKRVDALAYNMANTNDRHLNYYKRKANTIKEYAQNSYPGVNENSKDVDNLKQLVKIIIDITKQKNDVKNQMIELARQTKNFDNIISIFGIGELSTALIIAELKDITRFDNIKQINASCGLDPTIVQSGKSINYHGPISKRGNRYARKILFNCSRNIVTLSAKCDKENQIYVYYQKKKQEGKHFYACLTACSTKLIRIIYAICMNNSTQQN

SEQ ID NO: 393698 - protein, 274 aa, unidentified
MFTVSDKSGKALLCTKFTRTKLIEFLAGCTPATVVMEACGGARFMARRIADLGHEPKLIYPQFVRPFVKSNKNDFVDAEAICEAASRPSMRFVQPRTEVQQAMRALHRVRESLVRDKVKTTNQMHAFLLEFGISMPIGVTVIKRLSTVLAENELPPYLAQLLMRLHAHYLYLVEQITELETALEQELSRDETGQRLQTIPGVGPITANVLSSQLGDGKQYSCSRDFAASTGLVPRQYSMGGKNTLLGISKRGDKNLRRRLLTNLDDSILQGEDR

SEQ ID NO: 393699 - protein, 343 aa, unidentified
MHVPIRTKGVNAMPSLAERVDVVIGVDTHKYTHTAAAVAAATGAKLDELTIGTDSDGYAALLTWAQSHPGDRVWSLEGAGGYGAGLARFLAAAGEVVLELDRPVRAARRNGAKSDPLDAVRAAREALSREHLAEPKTDGPRAQLAALMAARRSAVEAATLAQHQLHALVIAAPDSLRALFRGQTTAVMLATAAKLRPHTGWDPTTVTTAQVLRRLARRSNDLTEEAVEHEKAITTLVKAWRPDLLELPGIGPIVAAQVLTAWSHQGRIRSEAAFAMLAGTAIPASSGMLTRHRLNRSGDRQLNRALHVVALSRTRYDQRTRDYIERRRAEGKTDREIRRCLIG

SEQ ID NO: 393700 - protein, 341 aa, unidentified
MNGSKNVVGIDIAKRVFQLHSIDMETGEIVSLQLKREQFLEHFANRQSCLIGMEACGGAQHWARKLTAMGHQVKLLPGKAVKGFVTGNKNDRHDARAIWTAVQQPHVKAVAIKTEEQQAILALHRMRSQLVKFRTAQINGLRGLLTEYGEVMPQGKAGVRKGIAEALARLSDRLPAMVIDTLREQWARIGKMDEEIATIEQRIKLWLKNDDACRRIAEIPGVGPLTATAAVAIMGDAKTFKSGREFAAFAGLVPRQTGTGGRIKLLGISKRGDTYLRTLLIHGARSVLTHAKEPGPWVTELRQRRPLNVAIVALANKMARTIWAMLAHERTYQKEFVSQPA

SEQ ID NO: 393701 - protein, 351 aa, unidentified
MKYYKTTTKFNCGIDLHTRQMYICVMDQEGNILVHRNIRNNDFAFFLKLVEPYRHDLTVTCESCFVCFWLADACEDAGINFVLAHAYYVKSIAANKHKNDKEDCRELAECLRTNRIPPAYVCPRDLRPVRKLLRRRNKFVKNRSELTGHSTSEVMAAGNQPLTISSNSKERWREGVRASFDNPVDSFTSEAELFIIESYDEIILKMEQRIEKHARDFQQQDYRLIRTASGIGKILALTIIYETIDIKRFPTVKDYISYCRLVCGTNESGGKDFGGKGRKMGNPYLKWAFMQAAILGKRADPKLNAYYQKLERKKGKHTANAIIAAKIARAVYFMLDRKTGFNVDQLIKGRR

SEQ ID NO: 393702 - protein, 348 aa, unidentified
MIIIGVDFHPEFQQIAWVDTETGEFQEKRLAHPDEAEKFYRALAGEKVRVGMEASGHARWFERLVSELQFELRIGDAAEIRTKRVRKQKTDRQDAQLILRLLLEDRFPQIWVPSSENRDLRQLLWHRHRMVQARTRIMNQLQAVALNEGLRCKKKLWRERGRQQLESFRLAPWASRRRRDLLELMDRLNPTIAELTQAVEYEAEKCPQAQRLRTHPGVGSLTALAFVLIIGKAERFSCGKQVASYLGLVPLEESSGNRRRLGHITKQGSSMLRFLLVEAAQVTVRSDPQWRSRYFHLMMRRGRKTAKLAMARRLAVSLYWMWRKGWEYEQFKKFGSHAGEPVNRHGVE

SEQ ID NO: 393703 - protein, 315 aa, unidentified
MVDVPCCVGIDVAKAQWDIALRPAGERWAVPNDASGIAPLVDRRQALQPTLIVLEATGGLERAATAALAAAGLPVVGVNPRPARDFARATGPLAKTDALDARTLAHCADVIRPTPRPLPDAQTHELRALLGRRQPLIVMRTAERNRLAGTSERLTKDITAHMTWLNARLATLDDDLETLLRASPLWRENDDLLQRAKGIGPVSAHTLLLELPALGTLTRQQIAALVGVAPLNCDSGTMRGKRTIWGGRAHVRTVLSMRTLVATRFNPQIKAFYERLLAAGKVKKVAWTACMHKFLTILNAMLKHRTPWQPQEVQS

SEQ ID NO: 393704 - protein, 354 aa, unidentified
MKRFKKELQPGDKVFVGIDMHKLKWHVTVRSADFELFSGSIPGKWEALQRILNRYQGHQIHTVYEAGYFGFWLHDDLVEYGAECIVTPPSLIPQEYGNKVKTDRRDSRKLAHFLAKGMLKRVWVPTEKERYHRQVIRRRRQLIGDRIRAQSRIKAELQLHGLNLSAPHGKWTKIFLGNLDRIRFNNRWMQESFKCLLEQYLFLDEQINKQTDLLKELSETELYKQRVEILMTIPGIGMIAAMELLLELQDVSRFQRADQLAAYVGLTPSQYSSADKIRMGRITCVGKNSLRAMLVQASWALIRKDGVMREKYDRLKSRSGGKRAIVAVARTLLIRMRRMLLDNNPYVVGLVATN

SEQ ID NO: 393705 - protein, 315 aa, unidentified
MQTVLDLGADVDSRTFVVAAAAMSTAPQRIANARRDILAWLRSVPPGSRLGLEATGTYHELLADLAHRAGLQVFVLNARDVRRYAQGLGRRGKTDRVDAQVIARYVAHEHSELHAYVPPSPQQRALARLIKRRAKLVTIKGMLNQSLRGVPGVAAELRQATARLERLIGHVEGLMQRALEQLPSASQAAQHCRTIPGVGPLGSTCLAYTLTRVPYANSDALIAHTGLDPRPADSGQKHGRRRLCKRGPGELRRVLFNCGMAAAKTALWRPYYQAQRAKGLSSTAAIVILTRKLVRVAFALYKYQQPFDPTRVATA

SEQ ID NO: 393706 - protein, 437 aa, unidentified
MTENINSSHTSDQSCEFVALIGLDWATEHHDFCLLDPTNNKTEFGRFDHSPEKIAEWVIGLVERFGQGKIAICLEQSRGPLIYALLGYENLVLFPVNPKTISKLRSALYPNEPKDDRLDAKLALKMLILHREVLRPLQPLDAESNKLNLLSERRRELVDLQADQSNRLQSFLKHSYPQAIEMIGTNPTSRMATAFLQRWPTLESLQRAKPQELRKFYYKQNCRKEECIQKRLELAKNALPLTEDSAIIETYKLMVLGVVNIIIALNDTIDQIEEVLSEVVESHQDSHIFQSLKGAGPAFVPRMIGAFGTDRDRFPQASDIQCFSGIAPVTRQTGKAPAIVVKRWQCPRFLRQTFHEFAKCSVNFNGWAKCYYDDQRAKGKKKHVAYRALAYKWLRIIWKCWHDKVPYDEAKYIRALQKKGLKIYSHLQVEQQITKCE

SEQ ID NO: 393707 - protein, 337 aa, unidentified
MKFCGIDLHSNNSVVVVTDETDRVLISRRCPNELTQILPLLEPHRGELFGVVVESTYNWYWLVDGLKAAGFEVKLANPVAMQRYNGLKHSDDKDDAAFLAHLLRLGILPTGYIHPPQERALRDLARKRIQLVRNRTQHILAAENIMARQSGHRLTCNEVKSLSATSVDRLGLSTEVALAMKANVAIVQALQTQIDVIEERLLHEVSLRPEFCLLKTMPGVGEVLATVIMLETGDIERFADVGNFASYARCVKSAHYSNGKKKGEGNTKNGNAYLIWAFIEAANFARRFSADAKRFFEKKKAKTNAVVATKALAHKLARASYHILKEKQPFDAKRCFA

SEQ ID NO: 393708 - protein, 401 aa, unidentified
MKRLSGGIDVGSESHHITILDEEDHILYNQKVAHKLNEFTESIKQFKKIERKEKGVISFALEGKNGYSAPFDRILLDQGFTLYNVDNLKLKRFREAFAGEWRDDQRDALMLSKMLKLKEHINSPREKVFIKIEKPSPLTESLKLLSRHQQTLIDEKVRLVNRLRKKLLEVCPQILELGKAKSKKLIAILTKYPDFSKYKRITLCSLLKIKGIGKKGAFFLLKRLNHLEYMPGLTDIYKTIIFSYAKRISELQEEIEDIDKSLDEIGEKNKEVNHLKTLPGVATKLASRLIGEIGDIHRFPSEKQLAIYCGIACVDSNSGKITKAKAVYKANKICKQTLITMAGGSIRLSLQCRAYYQKKRAEGKSHNHTLRCLARQLIKVIYKMLTEDRDYMVRKELRKVA

SEQ ID NO: 393709 - protein, 344 aa, unidentified
METGASEALFAGLDLHSSNVWCGIVDGEGRRVFGKRLGADLGLVLGELEPYRQRLKAVTVESTYNWYWLVDGLLAAGYAVRLANPARTSRYEALKVSTDRSEAFWLAEMLRLGILPEGYIYPKEIRPVRDMLRRRGLIVRQRTQIVLSLQSMVARQTGRQIGGGTLRRWALPEIEEFFEDRWSRQTARSMVELIRSHDAHEQELNGQVLERVKLFGPYKNLLGVPGIGRVLAVTIMLETGPIERFASAGHYASYCRMVQSRRESNRKNKGENNRKNGNKYLGWAFVEAANFAQRYNRVAQGWFDRKRARGGRALAVKALGCKMSKAVFYILRDGVAFDLKLMFG

SEQ ID NO: 393710 - protein, 393 aa, unidentified
MVVSVGIDVSKNKHDCFIVSSEGEVLADVFTIPNNMDGFDALLEKIRACTTPQDKIKVGLEATGHYSYNILGFLLDNGLATYVLNPLRTNLYRKSLSLRKTKTDRVDARTIAAMLLSDVGLKPYTNTAYHNEELKSLTRYRFDKVKERAKLKSSISRLVCILFPELEKLVSSLHLATVYALLEEFPGSKQIAKAHLTRLKTLLGNASKGRYGRDMAVTIRSAAQNSVGSCMPAKSLELQHTIRLIRELDAEIAEIEAEIETMMDKIQSPITTIPGMGFRMAAMILAEIGDFSRFESPDKLLAYAGMSPSTYQSGQLKNCYPHMEKRGSRYLRYALYNAAKYVCHWDPTFAAYLAKKRDEGKHYNVALSHATKKLVRLLFALERSRQPYCSLAA

SEQ ID NO: 393711 - protein, 366 aa, unidentified
MKKISTVQVFGNDIFKGPKLTIGLDLGDRWSFYCVLDEAGKIILEQKIPTTTEGMKQAFAKIPRSLIALETGTHSPWISRLLTEWGHEVLVAHAQKVELITKSNRKDDRHDARALARLARIDPELLGPVRHRSAKAQIHLTVIRARAELVSARTALVNGARGLVKSYGERLPKCGTYQVSRELAAGLSIELRDVLEPLFREIESLNERIKEYDGRMEKIAKEVYPEVSLLQQVKGVGTQIALTYVLTIEDPHRFLKSREVGCFLGLKPGRRNSGQSEPQKKISKEGDRYLRTMMVQGAHYILGPFGEDSDLRRWGRKLAERGGANAKKRAVVAVARKLAVLLHRLWVSGEVYEPLRNSNKAMQAVA

SEQ ID NO: 393712 - protein, 361 aa, unidentified
MSSTFQSFVGVDLHKCTVTLTAVDVAGEITRLKISTKSTGKIEAWLRALPGPVHMAVEACPFVEWFIDRFRDCVQRIDIADATELANRRGKRRKTDWNDSLDIAVRLSRGECPLGFIADEELMQLRKRGRHWRHLSRLLSRSKHSMKSMLNAANIRGPKFDGAAAQRWLLANRDLLKPVQQQTFADFIDVVMLTERHRERLRREIIFATRSARFAPIVSLLTSVPGIGEIWAAIIAAEIGPFDRFPNADALEFWAGLTADMKESAGRTQSGNITKAGSVTLRWALCQAAVTLCQCDARQEAIRQRLVKRLGKPRANVAMGRRLLRVLYAMMRDGKTFERGPVRDRTAAANKARLGRKKQVA

SEQ ID NO: 393713 - protein, 318 aa, unidentified
MQEKIEFDQVIERGCGIDIHKSLLVSTVRGKGIKTETRSYDAFTESIEQLRDWLKSLGITHIAMESTGVYWKPVYNILEKDFEIVLVNARHIKNIPGNKTDKKDSRRIAKLLLAGLLKGSFIPPKPIREMRDLTRYKRRIIEQIASEKNRIHKFLEDANIKLSSVVSNLSGATATKIIDAMIEGEGNPEELAKLRHGKMKASEQELIVALTGNLTEHHRFMLKMVKKSIKDKELLINELDKQIDNKLKENEMVLDAELLSTIPGVDKEAAAYILSEIGNNMERFADEQHLASWAGLCPGNNESAGKKKAQESRMEING

SEQ ID NO: 393714 - protein, 327 aa, unidentified
MTSYVGVDVAKHKIDCAWLRDPDNNKIKTKALPNHKAGFEQLIQWLSAQVSADLSSIHVIMEATGIYHEALAYTLNSRGLQVSVVNPARVHDFAKSLGSQHKTDKKDSVVLARYGLSAKPALWVPEPDEVRELKALLGRLSALEKDLMREHNRLEKAQVSQASKVVLTSIDGMIDQLKQEIERVKQQIDDHIDRHPGLKNDRELLESVPAIGQTMSRQLLAVLRSRHFSNAGQVAAFVGLVPRIRESGQWQGRSRLSKSGNGEIRAKLYMAAIVAVRYNPDIRAQYVRLLKAGKRKMQAIGAAMRKLIQICYGVLKHQSRYQPQMVV

SEQ ID NO: 393715 - protein, 341 aa, unidentified
MKNLFIGVDFSKEKVDVAIIFADGLTETAARVFNEFKTTVSGYKQLVKWVEQNSYGIDSSLWLFCGENTGDYSKGLCNFLYGKGYDMWLENAKSIKDASGLRRLKSDRADASMIAEYAMRNYDKAIMYEPLSESLAQLRELFLYRQMVVRHRCSFQVRRGEKRLTMEKSPIKTMISQSGRHIVSELNKEVEKIDKRIAELIKSDEELTEVFTIVTSVPGIGTQNAVSLMVYTDNFRRFNYDSRKIACYYGIAPFGKDSGTSVHSDPRVHYMANRQIKAMLTQAALAAVNFNPVMARYYMRLVERGKKKQVALNNVKNKLVHLITAMVRNRQLFTTEYKITA

SEQ ID NO: 393716 - protein, 475 aa, unidentified
MNIKGSKKKNQVLSVNIFEQQEIIAKADAIKAGLKASTWHELETKGKFDKNDKLSFVSDDMLILGCDIGSETHYVRAIDTRGRELSKSVFGFSNTAEGFESMLDWSTKLAAANDKKQIVLGLEPTGHYWFCLTTWLVAKGISVVQVNPYAVKQTKEVEDNSQLKDDKKDPKLIANLVKDGNFGMPYLPEKLYADIRRLSMFRDQLNEDRIRNLNRLHREMKIYFPEYKDAFGKIDGAFSLELLKEAPFPDGLAALGTEGMKQIWHEAKLRGRGYANASAILEYARKSVGIKDGADAGRQAVKWFVSRIIELDEQLSDIENQLNQRCNEIPYAKNILAISGIGENILSGILAEMGDISRFDDVKEIQKLSGLGLVACSSGKHTGETKISHRGRKRLRYWLFQAAKSAVAHSGEFKELHVYYTTRKQNPLKKMQSLIVIACKILRVIFTILTKGTTYDPKKLLGDIVRPDQSIPQAA

SEQ ID NO: 393717 - protein, 415 aa, unidentified
MSSSPKYTRFCGIDVGKSKHVAAIIDADRQTVTRARSFRNDAAGYQNLLERLTDAGGASAVLVGMEATAHYWYSLRDFLTDRGYEVAVLNPIQTAQQAKKGIRKAKTDKVDAGHIAMLIRNGEQRPALIPGELAMTCRQLTRLRYALARQGARIKQIIWSRLHPVWPEYEAIFSTPFSRTGRALLAAAPTPDDILAMDPKQLDDLICKTSRGRYGPANCEKVRRAAAESIGTRRGIEGARIGIRSLIAQLDALDPIKKQLDEQIAKLAERLPDYLRTLPGADTRSVVSLFGEIDPISTFATPAKLVAFAGLDLTVFETGQYAAPRRRITKRGSPTLRYTLWQMALRACRHDGDLRDYWLRRRGEGLTHRSAVTATAIKLTHVAWRILTDARPYLPQRPNRHSEANPSNTQPPVAD

SEQ ID NO: 393718 - protein, 387 aa, unidentified
MSRNARVPVPATTLDQDSTLVVVLELSARSWLVGARVPGIGRMSRYALAPSAEALAAWLGTAKARAGATGRTVVRVVLAYEAGRDGFWLARYLEARGVEVYVIQPSSVLVDRRARRAKTDALDVEMLMRTLLAWLRGEPGVCSMVPIPEVAEEDGRRPVRERQGLIGERLALLNEIDGLLATLGITGYRPLRRDRRAQLAALRTPEGDPLATNAAARIGRILDRLELVMQQIAELEQVRDAVLAKEVASGEAETMIRGLARLKGIGAELATVLVWEAYVRSFPNRKALGAYAGLTGTPFASGSTTREQGISKAGNRRLRSSLVELAWLWLRYQPDSKLAAWFRSRTGSAGSRMRKVMIVALARKLLVALWRFCRDGVLPEGAALKAT

SEQ ID NO: 393719 - protein, 345 aa, unidentified
MTEAYDGRQVVGMDLHRRRSVLVRMSMDGRKLETVRIENSPAALRRVLARCGERPLVVLEATYGWYWAADVLAGAGAVVHLAHPLGVKAFSYRRVKNDERDAADLADLARMGRLPEAWIAPPGVRALREVVRYRHKLVRQRTSCKDQVHAVLAKLGIPVTHSDIFGRGGGLWLGQLVLPEPYAAKVASLRALIGVLDGEIARLGEQAAGMLAADPGYAALRELDGIGPVLAAVIIAEIGDVTRFRRAGQLCSWAGLTPRHYESDTKVIRGHVSKQGSRMLRWALVEAIQHQPAGTRPQQAKEAILARRGKEARNIAKTAAARVLLTQVFYALRDGHVRRASHPAA

SEQ ID NO: 393720 - protein, 379 aa, unidentified
MRRVCGLDVHKDSVFMCILSENGEKVQEKYGVLTKELDTLRDVLVANNVGEVAMESTSIYWMPIWRVLESDFDLKLVNPYFIKQLPGKKSDVKDAEWIATCLQKELIKGSFVPDAAIQRLRQYNRRIFDLNKDISYKLTKLDMALQRCNIRISNYVSRTDSKSYKKVVDKLAGGITDPQELEKCIHGRTVNRFGKDVITASLTGVINETDIDIMSQLKSEIDLAERHKSECLMKMREICMENYPKQLENIKSMPGVKEQSATAIIAEIGVDMKMFLTAAAIVSWCGLRPRNEESAGKIKSRKIVHGNKYLRRTLIECAWAASKTQGCFYNKFSYTQVSIRKKNVLKVRVAVARKMLVTIWNILSKGEAYREILDCTLPQ

SEQ ID NO: 393721 - protein, 374 aa, unidentified
MEDYSEAFIGLDTSKLRNAVAIADAGRGGEVRFYGEIENTPAATAKLVRKLSAKYQRLTFCYEAGPTGYGLQRQIKELGFECVVVAPSLIPKRPGDRVKTNRRDALSLAKLLRADELTAVWVPDGPHEAMRDLTRARETAMLDLRTKRQHISAFLLRLGRPYPEKKTWTKVHVSWITSQKLEYPQQRLVLEEMMLAMRQAQERQQRLEQAIAAAVGEWSLAEVVTALRAMRGIDLISAATLLAEIGDLSRFRTPTELMAYLGLVPSEESTGDKIKRGSITKAGNRRARRMLIECSWSYQHPPRVGQAKQPKVDAAPPAVRAIAWKAQCRLYRRYRTLIRKGKLKTVAIVAVARELAGFIWAVARAVTTARAAVA

SEQ ID NO: 393722 - protein, 416 aa, unidentified
MNPSDPPSCVVDASSFQYVVGVDIGMESCSFCVCSPEKSLLIKPTTMTNAAQGFAQLHEQLQQLGVAPDRILIGLEATSRYGENLYHFLEGHGYELCLLHPRQTHEFAQRRGLRAKTDKLDAQTIARALLSGEARRGYVPSELIASYRELVRLHTQLNDEVARYRNEIHAELSVLFPEFTQVFADPSRPTALALLQLYPSARAMAAAPVESLTTKLRELAPRKYGERTAKLLVALAQHSVSSGRATAARATSLKILCNQLQQTQKNLALLEAEIDRLLVGDSGASGLGSVPEFGPKTVVVLRAELGDVSRFQRMDQAVAYAGLDIQVKESGKWKGQAKLSKRGSGRLRRILYLAALRCTRLAGSAFGVYYHRLIARGMRKREALMAVMRKMLIVAVHLLKTEEEYDPGKVAVAGAG

SEQ ID NO: 393723 - protein, 356 aa, unidentified
MSQNLDSKVAVIGIDIGKSSFHIVGQDRRGALVLRQKWSRGQVEARLANLPPCLIGLEACTGAHHLSRKLQALGHDARLMPAKYVRPYSKGEKNDYRDAEAIAEAVQRPTMKFVATKTADQLDLQALHRVRERLVSQRTGIINQIRAFLLERDIAVRQGLHSLRAELPGILGTRTDVLSPRMLRVIEDLAGDWRRLDERIEGLSGEIDALAHHDKGCERLMTVPGVGPIISSAIVAAIGTGDAFSKGRDFGAWLGLVPKQMSTGDRTILGSISRRGNRYLRKLFVQAAWVVLVKLGPEQWERYGLKSWIEAAKKRLHHNVLAIALANKLARIAWAVLHKGRAFEYVKTNATASRSA

SEQ ID NO: 393724 - protein, 345 aa, unidentified
MKKIIKQVAGIDVAQKELVVTIGRTYEDLCLELFAHRVFENSIKGFASLLNWVDKLCSEPSQVHYVMEATGVYHESFSYFLVDQKRILSVVLPNKISNYMRTLDVKTITDKSCSEAITRFGLERKLDLWQKPHPFYKKLRQLTRERDQLVVERTAAKNQLHAESVEAEPNQSTIRRIKQRIAVIIKQIKEIETELRQVINSDSRIKHFVKIISSIKGIGDLTAATILAETNGFELIRNKRQLISYAGLDVKEKLSGTSVRGKAKISKRGNRYLRKAMYMPALSAIKHDERFKMVYHRLVSRNGIKMKACVAVQRRLLELAYILFKTDQLYDKDYHKQFIEQTLAA

SEQ ID NO: 393725 - protein, 325 aa, unidentified
MTASHFADNSFIGIDVGSSALDVAWHRGDSAHYANRPDAIAALVERLKKQPVARIAIEPTGGYEKTLVKAVRQARLPLEIVHTTRFKAYRELVGVKAKSDTSDARLLASYAAAPDEVRGRKAGYVELPEDATREALSELASRRDQLKHMIHAETCRLGTTRLEELRQAIAAHLDALKTEDKLIHKRMLELVRQRLDLKRDQKLLATIKGIGPKSGLVLLASVPELGRIDNKAAAALVGVAPFVHKSGTMVAPARIHGGRAAVRRILYMAAVAASRHNPVLRPFYERLIAKGKPAKIALIAVLRRLVVFANAVLKSGQPWKGAAIA

SEQ ID NO: 393726 - protein, 319 aa, unidentified
MSHVAIFGIDVDQARLVVARHGMEGTQTIDNQAAAIRAWLKHTPAGSRIGVESTSRYHETVVRLAQAAGHTVYVLNPRDVRHYAKSIGRRGKTDRVDAVVIARYVAKEADQLHPYVPRTDRQQALHVLLQRRAAVQRARTQLRQALTAHGPAPAFQPLMDAARQALRQIDTHIHEHMRQGAQAALFQRLVTIPGIGPVIATCLVHHLQRWPLARVDSWIACTGLDPRPNDSGRKIGVRVLSKRGDATLRQMLYLAAMTFARHPLGKALADRYRQRRFCSTAIYTILARLLARIAWHLAKTSSCFDADRFAKDHHIPLQA

SEQ ID NO: 393727 - protein, 321 aa, unidentified
MLPALGIDISKSNFHVELSLGDNKLRHRKFANRKEGFAELAAWLTKHKTQPVHACMEATGPYSEDLALYLQQQGHTVSVVNPAQIKAFGQSELLRNKDDKPDAGLIRRFCEKQQPAAWVPPPAHLRQLQALTRHLENLAETKQQQVNRLESTKAKDVVKSLRKLIAYLDTEIERTEKQIQNHIDTHPDLKEQFELLDSISGIGTRTAATLLGEINFKQYRTARQLAAFVGLTPKNNRSGTFSGRTRLSKIGNQRVRKALFMPAIVAKQHNPIVRAFCQRLARRGKPKMAIIGAAMRKLIHIAFGVVKTGRAFNPDHELFLS

SEQ ID NO: 393728 - protein, 410 aa, unidentified
MNAVGIDVSKGKSMVAILRPFGEVVSTPFEIKHTTSDINSLVELINSVDGESRIVMEHTGRYYEVLAHQLSAANLFVSAINPKLIKDFDNDSLRKVKSDKADAVKIARYALDKWQNLKQYSVMDELRNQLKTMNRQFGFYMKQKTAMKNNLIGILDQTYPGVNTYFDSPARSDGSQKWVDFASTYWHVDCVRKMSQNAFVEHYQNWCKHKKYNFSQSKAEEIYGKAKELVPVLPKDDITKLIIKQAVDQLNSTSTTVESLRTLMNETASKLPEYPIVMAMKGVGPSLGPQLMAEIGDVSRFTHKGAITAFAGVDPGVNESGTYEQKSVPTSKRGSADLRKTLFQVMDVLIKTMPQDDPVYQFLDKKRAQGKPYYVYMTAGANKFLRIYYGRVKEYLSSLPESDTSVVVLF

SEQ ID NO: 393729 - protein, 452 aa, unidentified
MNKRPSSGTVKKHNRVWEQINEHAAGIDAGAAEHWVAVPAESGKVSVRKFATNTPGLYELADWIVECGVTTVAVEATGVYCVPLLEVLDARGVEVVLAKPSSLKSVNDRRKTDMADCQWIQMLHTFGLLRSSLRPTEQVAAFRTYNRHRQMLIVQAATAIEHMKKALTEMNVRLDQAVSDVTGQTGMRIIRAILGGERDPHVLAAMRDERCAKNEASIADDLTGKWADHHLFALRQAVASWDHLQGLIKECNVEIERQAHKFARKQSRSTLPKARRIEHLRKNVLTFEARELFYEVLGQDLTQIDGISVATVSAFLAEIGTDLSAFKTEKHFCSWLKACPGSNTSGGKNRSGRNRPTTNRFWTALRIAAQTLSRSKSALGAFYRRLRARLGPEKAINAAAHKLARMIYFTLKFQRPYLDPGPDAYAQHHRDQVLKSMEKRARQLGYTLLKVA

SEQ ID NO: 393730 - protein, 408 aa, unidentified
MEVVHPRCGALDLGKDELVACIRIQEGARVRQECRTFKTTVKQLLALSSWMESEGVSHIVMEATGTYWKPVWHVLEDSFTLILANAAHVRGIPGRKSDVNDAMWLADLLAHGLIRGSFIPPAPVQNLRDLTRTRKQLVREIVQHTQRIQKTLDDANLKITGLITDILGVTGRAILKALISGETDPERLADLARGRLKAKRSRLIEALHGWMTPHHRMLLKLHLDVIQAIEVAVDNLDREIGDALAPFRVAAQRVMTVPGIAELAAQGVIAEIGVDMSRFPTHQHLLSWACLCPRLDQSAGKVHSTRTRKGALWLKTLLIQCAWSAVQCKNTYLRAQFYRVRARRGPKKAIGAVAASMLTAIYYILRDNVPYHDLGPNYLDAIDRTRISRRLVRRLEGMGYHVEVSEAA

SEQ ID NO: 393731 - protein, 417 aa, unidentified
MKCFVGLDVSSTKLDVCIMLSDTSTPVTASLSNDLSGATEIKNHILDLNHTYHFERIVIGMEATSLYSFHPAMFFHEDSQLKELHVEIMVEQPNKIKKYRDAFEENKNDTIDAFYIADYFRIERFSPSFLKEEKYMALQHLTRTRLQIIEQLTRTKQHFIENIYYKCNTLAYQFKKEELSTNLWNSTMMTLITDEMTLDELANMPLQELADWLQKLGKGHFKDSEKLAQTIQAAIRGSYRLSKLQQDSVNVILGLLAREIRNLEKMIKEIDKAIEDMVETIPEYQCLTSIPGVGKVYAAGIIAEIGQIERFKDPPQVAKFAGLNWREKQSGNSNSQHTSLVNRGNRYLRYYLVEAANSVRRYDDEYKDFYKKKYHEVPKHQHKRAIVLTARKFVRLVVVLLRNHQLYTPPRRLMEDK

SEQ ID NO: 393732 - protein, 401 aa, unidentified
MSMYFVGIDISKYKHDCCIISAADQQIVSKFTITNDKDGFEHLLLSLNSLSNPEGIKIGFESTAHYALNLELFLENAHHSFMEVNPVLIKEYKKSTTLMRTKTDSVDCESIARWLMTVEYKPHSKGFYHAYSLKSLTRLRDRLIRQRSFYLVKITNVLDHTFPEFKPFFNERLSKTAIYLLENYGSAEKMAHMNSASYDKLRCISRGKFSIQQFLRLKELAANTVGVNNSIFDIELNSLLTLYNSLCKEIKVLETEITRLIEEVHPHYMSIPGIGPISAAVIYAEYGDISNFSNPGQMLAFAGIEPGIDESGTESHGGRMVKHGSSQLRYVLLNACLPLIRFDITFATYYAKKRAEGKKHRVAITHVAKKLIRVIYALEVSAKYSCGFSNLLDSSIIVNER

SEQ ID NO: 393733 - protein, 338 aa, unidentified
MLYVGLDYHLRTSSLCILNEDGKIVKQQSIRGGYQEVAGELARLEEPLEVVFEATGGYGPLHEKLSKVAARVVMAHPASLALIWKSKRKNDRVDAQKLAKLLYLDAVPAAHVPGAATRQWRRLIELRRSLVRRRAGLKNQLHALLRSSGIAAAPFSPFSRRGIQWLMSQTLDQASALERIVLVEQMHGVKQQLNIVEKSLSHTGDDDPRVRLLRTIPGVGRRTAETFVAYVDRVDRFSRSGKVGSYFGLVPCQDSSAARDRLGHITKQGPPLMRQLLVEAAWIGIRKSPTLRQRFEQIRGDDPDRRKIAVVALARHLSQVMTAMLRDHRPWRETSGTI

SEQ ID NO: 393734 - protein, 328 aa, unidentified
MLTLGIDVSKLTLDCYLSEGIEKKARHSCKFQMSNSEAGFKELAQNLAKRGIGIEQMTIVLEPTSQYHKALLYWLYEHKARACMVNPADVRHFAKSLGKYSKSDGLDCFVLAQFAQTRELITWQPPARIIQNLDSLLHLRHQIVVERGAAQVRLSELPSDSLQTVKDCYSKTLEHFKAMEKEVNHEIQKLIDSDVSLKQKHKLLQTSPGIGPVVASLMLVIFETKQFTKSCQVPAFCGVTPKEFQSGTSVLGQTRMTKRGPAQVRAGLRMAATAIVRSKRRSTLKVFYESLLAKGKSKACALGAVMRKITLVAYAIWRDSNAFNGFVS

SEQ ID NO: 393735 - protein, 338 aa, unidentified
MTSVKFFIGVDMASATFTACAGTTPWQVLVKPTTFDNSEDGFITFLNWLKEHHLTSAQTVVCMESTGVYSEGLAYFLHAHQFTVAIEPPLNIQRKFPATRSKNDLQDSQHIAEYACRYADKLSFWQPRPEILEQIKVLLTTREQFTTQVTAHKNALHAVKRKKVLSELAKQVHEDIIQHLAKHIKAIDVEIRRLIESDPTFKKTLLLLLTIPGVGLTLAAHLLLITQYSLDPRELAAYLGICPYDNESGTSIYHAPTSRHYGPSAIRKLLYLAACSVRTHRKEFRQYFFRKVAEGKSKRLVLNNIENKLLKVACAVLRSQKPFISNYVSVNPLVLKNA

SEQ ID NO: 393736 - protein, 415 aa, unidentified
MSLALPPAEFFVGVDWAAEVHAVCVINIEGKVLSQFTVEHSADGIALLVHRLAKFGEPIDIPIGIERRDGRLVDLLLAAGHPVVPVSPNAIKTWREGEVLSGAKSDAADAAVIAEYLRLRRHRLTAAAPYSGETKAVRTVVRTRDDLVQMRVAAVNQLAALLDAHWPGAKAIFADLESKIALEFLSRYPTPTAAAHLGVKRIAGFCAARGYSGKRPAAELLTRLRAAPAGTTDPHLTIALNDAVLALVGVVKAVNTAVKNLDKSVAARLGEHPDGKIFTSLPRSGQTNAAQMLAEWGDCRQAYETPDSIAALAGCTPITKASGKHTAVHFRWACNKRFRVAITTFADNSRHASPWAAKIYNDARTGHKDHPHAVRILARAWIRVIWRCWHDNTPYDPTKHGAAQTLTAQSVNLAA

SEQ ID NO: 393737 - protein, 430 aa, unidentified
MSRCFSRATQHDWRCELGLPRWVGRAIGLDVHREFCEVAICEDGKVRSAGRAPAAPEGVRALAESLVPADRVALEVTGSCWEVARILEPHVNRVVVVSPDDTGITSARAKTDKLDARALATLLWKGELEAVWMPDERCRILRRRLARRQQLVWSRSRAKNEIHACLQRRLKPRPPCSDLFGVKGRAWLASLELPPEERESVDAGMRHVEFLDAEIVHVEKLIAQQALSWPEIRRLMTVPGVNLICAASFIAAVGDPNRFMTSRKLVAYLGLDPRVKQSGEGPARSGRISKRGSPAARWALVEAAWTAVLQPGPLHAFYVRTKNRRGHGKAIVATARKLAVLFWCMLTRSEDYAHQQPSLTRKKLRRLEITAGAPKYTRRAAGIWSTNDLMRTAELELAQQAETSYQRLVQDQQAGAPARKAGASVTLERA

SEQ ID NO: 393738 - protein, 310 aa, unidentified
MENIFVGIDVSKDRLDVAVRPSGEVFAVERNAAGLEQLTQRLRGLCPQLIALEATGGFETIAAAALAAADLPVVVVNPAQIRAFARAVGQRAKTDPIDAAVIAHFAEATRPPVRALPDEATRLLADLVARRRQIVEMMVAERQRQKRLTVPHLRASIERLLKALQKELTSVDTDIGGIVRASPAWREKEDLLASVPGVGAVISRTLIAELPELGQLSRRQIAALAGLAPFTRQSGRWRGKCFIGGGRTAVRTALFMGAMVAKRFNPVLRAFFNRLVAAGKPKMIALIAVARKLLTMLNAIIRDRREWRTA

SEQ ID NO: 393739 - protein, 416 aa, unidentified
METEREVVCGADIHKQFLLATILTKDGQKFQDRFDSNFEGLLNFRQWLLDHDCQRLAVESTANYWQPIYFVVGKDVEFVLANAYQIKHIPGRKTDVLDSEWIAELCLKDLISPSRIFSEDERDLRSMTRTRENYVKMRSQIKNRIHQELESACIKLSSVLSDIFGKSGIHIIRGILNGLSIDDILDRIPSKKLKAKRGEIQDAIQANISPVQIDLISLLLDSVDFLNREIESIDKQIQSLISTRQEDLKIAMSIPGMGFTSASTILAEIGNLKDFNNGEKLAAYCGLVPSVYQSAGKLITGHITKHGSPHVRRMLIEVAHAISRTKADSKLKRFYFRIKSRHGAKVAVVALARKVLCILHHLIVNREMFEDGISSKSKREKTGRSSSSTEMIIEDAIQILVRAGYLVQKRSEKEGG

SEQ ID NO: 393740 - protein, 318 aa, unidentified
MSDAVFVGIDVSSQTLEVASSAQTKTWQVSNDTSGLESLVSQLVGLSPALVVLEATGGYEFEAACTLQAAGLAVAVVNPRTARDFARAMGALAKTDALDARMLASFAKVLHQHPERDRFVKPLADSQLQRLQALVLRRRQIVQMLTSERQRLRLSHVAARPSIERVIEFLKAELGDSDAEVAAHVQHHHAELAQALSSVPGIGAASVAVLLAELPELGTLDRRRVAALVGVAPMNRDSGQRRGQRSIWGGRADVRRTLYMATLVGVRHNPVLKAYYERLLAAGKRKKVALVACMRKLLTVLNAIAKHGSIWRPDLHHA

SEQ ID NO: 393741 - protein, 341 aa, unidentified
MHMRKVTSLPGKGKSIFALDFDHYVSLDWSVRTMAAGHLRRRDTEPVVFERPSDILGLKEYFKTLKGTIVLTFEETTTAQWLYLELRDYVNRIIICNPYRNRLLSEGPKTDKIDAAKLVLLLRAGLLKEVFHCDDSLYDLRLLVSAYNDLVQAGVRAQNQRTALERGHGDSTTHASFILEHLDSSIALYRQSKKAYTTKFENFCRRNKQLKLLLAVEGIDTIGAVKILAVVVDARRFPRTGNYLSYCGLVQNEKSSGGRSYGRRKPQFSRTLKSVYKSATLAALKGHNPVREYYETLLARGVSEVHARHEIARYLATVTYGILKTGTPYDPYRWRKNTTVA

SEQ ID NO: 393742 - protein, 344 aa, unidentified
MNVSTVGLDLAKNVFQVHGIDDIGKVLVRRSLRRRQVIPFFRKLEPCLVGMEACGTSHFWARELEALGHEVKLMPPAYVKPYVKRGKTDAADAEAICEAVRRPTMRFVAIKSPEQQSVLALHRTRGLLIRQRTQLVNMIRAQLAEFGIVLAKGIQHALKLVDRLLEGAAIDIPPLARRVVIVLAERIRDLGDWIGELEKDLTASSRGNEVVRRLRTIPGIGPITASALAASVTDPHGFRSARQFAASLGLTPRADSSGGKERMGRISKMGDRYLRCLLVNGMTSQLQAARRKPEAHPWVIGLLATKPNKLVAVAMANKAARIAWVVMTRGEVYRARQHATEGTA

SEQ ID NO: 393743 - protein, 367 aa, unidentified
MEAILERCAGLDVHQETVVACVLYGELERKPKHEIRTFSMTTKGLLALHDWLGEWECTHIAMESTGVYWKPVWNILEGAYTLILANARRIKNVPGRETDVADAFWIAQLLRSGLISPSFVPPVDIRNLRDLTRYRRKLLGNATAEKNRIHKILQDANLKLTTYISDIFGVSGRALLESVINGEVLEADEVRKKVKTSLKRKVPELLEALDGRMRRHHRLMLGLHLDHLSYVEKQLEKVEFEIDRLLEPHLSSIELLITIPGIQKDAAAVILAEIGNDMSCFGGDPQIAAWDGLSPGNNESAGKKKSSRIAKGNKSLKAVLCQAAWAASQSKGTRLAFFLLSHTETTRTEESDNSNSSSPPTYDLPNA

SEQ ID NO: 393744 - protein, 403 aa, unidentified
MSPEHSIDIFLGLDVGKSEHHACALDRDGNKVFDKPLPQLESELAGVFHQLQKLGTVLVIVDQPNTIGALPIAVARDCGCEVGYLPGLAMRKAADLYPGRAKTDKRDAFIIADTARTMPHTLRAVDRNDEVLSALKMLSGFDDDIARDCTRTVNRLRSVLTQIYPSLERVFAGSTLTRTPILELLIHYKGPQGLKRAGYQRVLNWMIKRTRKDPTPLVDDIFAALKAQTVTVPGSDAAELVIPQLAANIKALKEQRNTIAEQVEEMLADFPLCEVLMSMPGVGIKTAAQILLAIGDGSDFDSAGHIAAYAGIAPVTRQSGSSIRGEFPARSGNKRLKNALFYSAFAVIRSHEPSRRYYQRKRAEGKRHNAAVICLARRRCNVIYAMLKNKEFFREIPPRPVAA

SEQ ID NO: 393745 - protein, 394 aa, unidentified
MAFKIFRKNCCGLDVHKTWIYACMGITDTNGRTEYKQARFSSFTKGLQKLADWLAKYDCNDVCMESTGKFWIPVFNILEKTCWVTLAYPKYTKPQKGNKTDHKDAKWICDLYMCDMVNPSFIPPPDIRQLRDLMRYRSKLTNIMTSEKNRALNCLTVSYLKLDDVFSDVFGKSSRSIIRYILEHPGETFQVAPFIDRRCKHPVEEIQAVIDGTISHQQAVKLRECLQHLDELKVHKTNVEKEILCLVQQYPYQLELLQTVPGFSGNIMTAIALISEIGADMSVFPSAKHLVSWAGCCPRNDQSSKKVKSTRISRAGVYLKPLLVQVAIQPFTANADKLSAAGALEIRCQICDGRFLSMWAALFIFLGCPLPPCPKNLHVHNGRIVILASVAWIF

SEQ ID NO: 393746 - protein, 413 aa, unidentified
MDVLHTSCAGLDVHKKTVVATVIISQEKGKPLKATRTFGTMTGDLLALSDWLMSFGITHAAMESTGEYWKPIYNILEDNFEVWLVNPQHIKAVPGRKTDVKDSEWIAELLRYGLIRASFVPPKGQRELRELTRMRSTFVKERATLVNRLHKVLESANIKLASVASDVNGVSGKAILQAMIAGGSTPEEMAELAQGRLRGKRDLLSRSLQGYVKPHHRFVLSELLLQIDGLDETIDRFDEQIREYCRPFEEAVVLLDTIPGVARKTAEVIVSEIGVDMSRFPTANHLASWAGVAPGNHESAGKRLSGKTTKGNQALVSALTQAAHAASRVKNSYLYAQFHRLAGRRGKKKAIIAVAHSILIIAYHMIKNKEPYRELGSDFFDKRNVQATTRRMVRRLETLGYKVNLEVLTPIAV

SEQ ID NO: 393747 - protein, 396 aa, unidentified
MRHVIMAGCDLHDGSMVLKVAVDRGEPERLDFKNTAAGRRTMIARLQKRAADLGGARIVFVYEASGQGFGLYDELTGAGVEAHVLAPTRIARSVRHSRQKTDDRDAQQALELVRGYVLAGNALPDVWIPDRQTRDDRELVRMRMDVGDKITAVKTQVQSLLKRHQLRRPEATGKGWSVAFRGWLRRLALARADSDSEPIGPSGRVALGSLLRQLVGLEAEEGRLDRCLMKLADTARYAKPLRRMTELCGVGVLTALVFLTEMGDLARFANRRQIAAYLGLAPSSNESGEANDRKGHITHQGSSRVRKVLCQATWARVRHDPEEKAAYERIKAKNPKKKKIAVVASMRRLAVRLFHRGREAIVENSPGSPDTAVQADRGPIPTGATKCGCAAGFSKA

SEQ ID NO: 393748 - protein, 392 aa, unidentified
MYIVGIDIGKNHHEASIVSPEGKQIDRSLRFATTHKGADSLMSFIFKNIGNSPCVFGMEATGHYWYPIYSFLKAKGYTIYVINPIQSDSLRKMYIRQTKNDSIDSFLIAEVIRFGQFGTTSMADENILAMRQLCRYRDSVISSRTEIKLRIGTIMEQIFPEYEKQFSSLWVSTSMGILEKYLTPENIKNAPIDELFEIIKDKSHNRLTRAKAISIKDAAADTFGIKIAQDAFSFQLKQLIDRMNFLDKQIEALDIEIMKYYEQFGCYLHTIPGIGIIGAATILAEIGDISRFKNSSALVAFAGIDPTVRQSGEFNNTHNHMSKRGSPYLRHAIFLAATTCSFHNSPLNAYYKKKRDQGKHHLTATGAVARKLTTVIYAVLRDSKPYEPKKFC

SEQ ID NO: 393749 - protein, 350 aa, unidentified
MVVVGADVHKRTHTFVAVDQAGRKLGEKVVAATTVGRHKALVWARVEFGNELVWGIEDCRHLSARLVRDLLSAGQQVVRVPPKLMARTRASARTRGKSDPIDALAVARAVLREPDLPVASHDAVSRELKLLIDRREDLVAQRTSAINRLLWRVHELDPERAPKPRSLDLAKHRELLRAWLATQPGLVAELARDELADISRLTEAINALAKRITERVRVVSPALLALPGCAELTAAKLIGETAGVSRFKSESAFARHAGVAPIPVWSGNTTGRVRMTRSGNRQLNAALHRIAVTQVRLDGIGRAYYRKRRDAGASKTEALRCLKRRLARVVFHHLHTDHQTRNQPCQTAAA

SEQ ID NO: 393750 - protein, 338 aa, unidentified
MSELALIGIDLGKHTFHLHGQDKSGREVFCKKCSRAQMMQFFASSQSCVVAMEACAGSHCVARQLAAIGHTAKLISPQFVKPFVKGNKNDFVDAEAICEAASRPSMRFVTPKTESQQTLSVLHRMRESLVRDRTRTANQMHGFLLEFGVSLPRGLTIMKRLAVVLAEHELPVRLTVLLQRLHNHFIYLDEQIKAMDKELACQVADDDLGSRLLSIPCVGPITASLLAVEMGDGKQYRCSRDFAASVGLVPKQYSTGGKANLLGISKRGDKHLRQLLVQCSRVYMQRLDHQKGALADWVRSLLSRRHSNVVACALANKLARIAWAIAAHHTQYEAGPGA

SEQ ID NO: 393751 - protein, 356 aa, unidentified
MNEANPHDIIVGIDTHKHTHAAVAVTGLGARVGELTIRVGLDGYRELEVWAQSLGAVRAFGIEGTGSYGAGLARFLRAAGHTVHEAGRPDRGLRHRHGKTDHLDAEGAARAVLGGQATALPKAGTGEVEMIRHLKIARDTAVKARTQAMLALKAIIVSAPAALRERLDAVAGKMALVRHLAALRPGPLTTTTASAKASLRAIARRWLDLDVEIRSHDTHLGQLTERCAPEMVAAHGTGTATAAEMLILVGDDPERIRSEAAFAKPCGACPVPASSGKTSRHRLNRGGHRQANAALHRVVVVRMRTHQPTLDYVRRRTAEGKSKREIIRCLKRFVAREIFGYLCRVPKPTRPEQISA

SEQ ID NO: 393752 - protein, 417 aa, unidentified
MKLFIGLDVSSTNLDACFLTSESTILLETSVSNDLTGACEIRELTLDYIKQFAFSRVVIGMEATGQYSSLPALFFHEDEALRSHGVETTVENPRNIHRFMKVFTEDKNDRLDAFHIADYLRLERFNTSPIKEEQYIALQSLTRTRFNLIQDMTRTKQHFLNILYMKCNVLQRELKSDNGSTSVFSATIIELFTTDYTLDEIGYMPLEQLIGILQEKGRGRFREPKNLAERLQKAVRSSYRLSKTVQDSIDSVLASQVRIIRTYQEEIKALDKAVVDILEVIPESKSLLSIPGIGPVYTAGILAEVGQIGRFASQAKLAKYAGLYWPKNQSGHFEKESTPLSKQGNRYLRYYLIEATNSVKRRLPEYSEYYEKKFQEVPKYQHKRALALTARKFVRLVDKLLRDHQLYTPPRRSIEHS

SEQ ID NO: 393753 - protein, 374 aa, unidentified
MDNTITHVAMDTHKKEHKVALHYPGEEQIVRFAIKNTVRDIKKMVSKIKKQAPADIEFCYEAGVCGFILKRRIEALGCKCIVIAPSLTPIKPGDRVKTDRRDALKLLAMFKAGLLTEVHAPDPKQEAARDLTRCRQTAQENLKRIRHQILKFLTRHGYVYTDGNHWTQKHLHWMGGLEFELPSLRDVFDSYFTEMQHCLQRLTSLDKDVKKLAASKPYQKIVGLMRCFHGIDTLTAITVITEIFEFGRFSTPGELMSYLGLTCSEDSSGQNQRRGSITKAGNKRVRRLLIEASWHYRHPYITRSKVLRERRKGQPQWAIDIADKTGQRLRKRYWYLVNHGKSPCVAAVAIARELAGFIWSLFREYEARSSKKAA

SEQ ID NO: 393754 - protein, 333 aa, unidentified
MATWVGIDIAAKDVELVSRIDGKSSRPMKFKQTSEGHQRVIKHLRALAPSGVVMEATGVYYLDLAVALFRAGLPVMVNNPKSFHHFAKLMLKPSKTDGIDTALLAEYGERMTPVRWIPPDTTRLGLRDIGRQINRLTASRTQAKNRLHALQAKGMTLSLLLEDEQEGIALLDRRIARLQEAALTLVADSEELSVQLPHLTTAVGVGTASAIALLGELCVLPREMKASQVSRYAGLDVRLNLSGTSVHRPARLSKAGNAYLRAAMYMPAMSAVRYDARAKAFYDGLVGRGKQKIQALCAVMRKYLTGLWACLQHGTPFDSTKLFSDCHQDNACR

SEQ ID NO: 393755 - protein, 391 aa, unidentified
MIYIGIDVAKDKHDCFITNSDSEVLFKAFTIANNLDGFNDLYQKIESVMDDVTKVKVGLEATGHYSYNLLGYLIDKGLPTYVINPLHTNLYRKSLSLRQTKTDKVDARTIASMLMSDVNLKSYSDTFYHNEELKSLTRYRFDKVKERTKLKTSVSRLVCILFPELEKLVPTLHIASVYALLSEFPSAKHVATAHLTRLTNLLSESSKGRYGKDTAITFRDAARASIGSNMPAKSLELKHTIKLIQELDSEIDEIENEIKIIMDEINSPILSIPGINYRMGAMIIAEIGDFNRFDSPDKILAYAGFSPSTYQSGQLDGAYAHMEKRGSRYLRYALYNATKYVCHWDPTFAAYLAKKRAEGKHYNVAISHVVKKLVRVIYHLEKTKQQYIKVA

SEQ ID NO: 393756 - protein, 365 aa, unidentified
MLQEAELSAQADSENNLGGSSETMYFIGLDVHKKTISYCVKNAAGRVLQEGKIGSTRRELDSWIRTMPQPRTIAMEATIFTGWIYDHLVPHAEKVKVAHPLMLRAIAAAKKKNDRIDASKIADCLRCDFLPECYMASTEIRDRRRTLRYRSLVLKQMVQMKNRVSGLLMETGVSYNKQRLHKLGYFEALMASNEDVHDSIRPLLKLSREMISRSQKLDYALISSLERDPLLKERLRRLRTVPGVGPITALTWALEIGDFTRFMSNKQAISYCGLCGEEKSSADKVLRMPISKQRNKHIQRVLIEAAKLATRESPELAMIRARELERGNPNRATLAVARKMVIYLLVERRQQDWVAAEQFSRTAAA

SEQ ID NO: 393757 - protein, 436 aa, unidentified
MNQHPFPLLIGLDRSDAKADLYYIDTRSGRRWSQTLDTTPERLHDWLAQLRQDYPQAQVALCVEQPAINVLLFLETYTWVTLFPINPITLQKFREAFVTSRAKDDGKDAQYLAELLLTHHDKLKPWAPEDAQTRRLQQLVLHRRAVVDERTALTNRLQALLKQYFPQALGLCGEELWRPLATAFLRKWPTLQALQKAKPATLKAFYHLHGSRSRTLITQRLERIAQAVPLTDETALLDTFALRVQLICRQLELVTQAVAQYDQQIAAAFAAHPDHAIFASLPGAGPVLGPRLLAAIGAQRDRYANAAALQRFTGIAPVTKQSGGKRVVHRRYRCPIFQRQGYHEYAKGSVLWCRWAAAYYLQQRRRGAPHHTAVRALGYKWQRIIFRCWQTHTPYDDARYEAVLRKRGSPLVALFESIELGKSPVKTNAAKAQKNR

SEQ ID NO: 393758 - protein, 357 aa, unidentified
MYFIGIDQHKQYSHMTVLNEKGQEIRAGRVANMHGEIERFLEGIVPDAKGVVEAGRACYFVSDILKEMGVEVIIAHPYQVKAIAKARIKNDKRDSRILAHLLRTGMIPEVYQRRPSNRQAQRILRLRAYYTKSLTQVKNKIWSLLAQQSEESQMEVTRMGNVFSQKGLEFLDQLELAGTDKEILVSLVKNFRHLKEQRKESDGLVKTLYKEMEEAKWIDTVPGFAVTLSVLVAVELSEITRFKRAEELHSYAGLVPSTRSSADKTYHGKITKQGNKWLRWAVIEAVYPAIRKDHDLLVFYKRIAQRRGANIAKVATARRLLTIIYKILKEKRCYIPYKRNENRLPITHTNGLGQAAL

SEQ ID NO: 393759 - protein, 412 aa, unidentified
MIEAILECCAGIDVGKTFVVVCVLKGPANGDAQAQTRKFGTMNAALQELGEWLVDCGCTHVVMESTGEYWRPVFNVLEETGNLHIVLANSQQVKGLRGHKTDPEDAHWLAHLLRHGMIRPSYIPPPAIRQLRDLTRRRRQLVRCGAQERNRVQKVLEGANIKLGNVLSDVFGLSGQLMLEGKAEPEQIAQLAQKSAKKKIPQIRQALEGHRMTATQRRLIGFSLDHMAFLEEQIVALEQEIATHLRASELQPQYDILQTVPGVKKEAASSLLAEFGPDMKVFGSGAKCSAWAGVAPGNNESAGRKKRAPALRGNPWVRSTLVECAWSASRKNGSEFQRQYERLKPRLGHKRAIVAVAHSLALVIFQLLSTQQPYTKPGANPMPETQAARLIRHHTRRLKTLRSRLRTITTKT

SEQ ID NO: 393760 - protein, 380 aa, unidentified
METAATREERYSTRGNTLYMSMELSEAKWLLMFTVGAGQPPREKTIRGSDRAALERELGRARQRFGLAPEARVVSCYEAGREGFWLHRYLRSLGVESLVVDSSSIAVNRRRRRAKTDRLDAKQLLSKLLRYDGGEHKAWSVVRVPTVADEAARQPSRELRTLRSERTRSRNRIQGLLAAQGIRVRHLGGLAQRLDELRLWDGTALAPELKAQVRREHERLEHVERQIVAVEGERRQRLRQVTDTVSAQVRKLQRLRAIGPHSAWTFSTELFAWRQFRNRRQVGGIVGLTGTPYDSGQRPHEQGISKAGNPAVRAMSIEIAWGWLRYQPRSALAQWYQARFGHGGSRLRRIGIVALARKLLIALWRYLEFDQLPAGAELKV

SEQ ID NO: 393761 - protein, 339 aa, unidentified
MYSIGLDVHKKTISFCVNDVAGHVHREGKIGSTRRELDGWIETLPLARTIAMEATIFTGWIYDHLLPHAEKVKVAHPLMLRAIAAAKRKNDEIDARKIADLLRCDLLPECHMASTEIRDRRRTLRYRGLLVRQMVQLKNRVSGLLMETGVSYNKRRLHKVGYFAELLSTNEEVNQSIRPLLKLSRETIVRCQKTDYALVSSLERDPLLAERLKRLRTVPEVGPITALTWALEICDVTRFESIKQAISYCGLCSAEKSSADKVMRTPISKQRNKHIQRALVEAAKLAPRQCHELAVIYEKEKERGNDNRATLAVARKMLAVERRKMDFVPAEEFAGTAAA

SEQ ID NO: 393762 - protein, 371 aa, unidentified
MKKNSTIKFIGLDVHSKTISIAIADEGRKGEVRHYGTIENTTEAIDKVIKKITATGVELRFIYEAGPCGFALYRYLTGNGFTCIVTAPGLIPKRSGVRIKNDRRDAMTLARLYRAGELTGIYVPEPEDEAVRDLGRARDDARVAERKAKQRLNSFLLRYNLIYPGKTKWNRTYFNWLGSVGMKYPAQKVALQEYIEAVNECTGRVARLSEQIGLAVEEWRMAPMVKALQALRGVSLICATVTVAELGDLSRFQNPKELMAYVGLVPSEHSSGETIRRGGITKTGNGHARRVLVEGAWTYKHHARVTPPLIKRQRDLSKSICQISWKAQLRLCARYRKMVARKKPNNVVVIAIARELAAFMWAIAQEVRAAA

SEQ ID NO: 393763 - protein, 386 aa, unidentified
MSRPSNILLPVINYDHTLVLSVELSNKSWVLAAQVPGLPRTKAQRTIEPNKNALLAAIDGYRARAAAVGYTVDRVITTYEAGWSGFWLARWLVAQGVEVHVVQPSSVPVDRRLRRAKSDGIDAELLLRTLLAWLRGEPRVCSMVPIPDEADEDARRCVRERTELLSDRVGLTNRIGAVLATLGVNDYNPLLQSRRRRLAELRTGLDEPIPPNALAKIERLLARLELVLAQIAELERERDEVAAADAPDRAGKMIQQLASLRGIGVQSATVLVREAFVRHFPNGKALGSYAGLTSTPYSSGGIDREQGIGKAGNRRLRTVMVELAWLWQRYQPGAAQVAWFRDRVGSTGRRIRKVMVVALARKLLIALWRFVIDGVMPEGAVMKPSI

SEQ ID NO: 393764 - protein, 393 aa, unidentified
MKNRYARVAYGWLDVHRKFSNVTLRDAEGEVVVRERLDHLDRGKLREHLSWWPKGTPIVLEASFGWPWLSDELEAAGHRPHLSNCYKVEQLRKARGLVKTNKKDADLVSLLPGEPTRWWEVWRAPLAVRDLREWMRHRMSLVGMQTAVKSRVHACFHRHGIFFPFTDLFGARGRAFLQALVRDGRHENGTLPAGTLEALRSDLRVLQRLRAELATVAWRLRGRLKRDTLTQRLKTIPGIGLILANVLAAEIGQIGRFRTHKTLASYACLAPRSDETGDPDPRRPPLGRHLGDRGNRTLKWAFILAAHGAVKRGGKWRALFDRHTDGGTREKNRGYIKVARGLVTVLFAVWSKEMPYTETPPPRPGSRRARRRGKHTRPGTGQPFHPMVQASRA

SEQ ID NO: 393765 - protein, 354 aa, unidentified
MTSNQSKDTVPGARAGVIKLGLDIHASLIVVVRQVDGQASQPPQRFSEEAFIGFVLRQLAAAEAVHSCYEAGPFGYVLHRRLTALGVHNLVVRPRDWSTYGERVKTDARDAGALCSSLDRHLAGNRGALAVVRVPTEAQEAQRSISRQRESLVRDRVRFTLRGKGIARLRGVTLPPEWWRERAFARLELPADLREQLSALRRVILSIDAEAVALTTQIEAAAPAALPAYLGPLTWEILRREVGDWSRFANRRQVASYTGLCPSEHSSGAARLQGSINRHGNPRLRHILVEAAWRLLRYQPAYRPVAKWREAFMDQGRPGRRKKIVVAIARQLAVDLWRLATGRATAAQLGLVVP

SEQ ID NO: 393766 - protein, 447 aa, unidentified
MLKEQKEKQPRGLVPTPVLEPNAAGIDIGATEIYIAVPSDRGAQPVRRFATFTEDLVAAADWLQRCGIETAAMESTGVYWIPLFQMLEARGIKVCLVNARYVKNVPGRKSDVSDCQWLQYLHAVGLLRASFRPEQQICAVRSLMRYRESLVQMAAVHLQHMQKALDQMNLQLHHVISDLSGTTGMAILDAILAGERDPLKLAQLRDGRIKASETTIAKSLMGDYRREHLFTLRQSMVAYRNYQKQMSEIDVEIEQMLVEFSDGAGPDAPALPQPKDRHKPRRNDLRFDLRTQLYRIFGVDLTAIPGINAMTAYVLLSEVGRDLSGFRNAAAFASWLGLCPGNRVSGGKVLSSRTRSVNHRLAHALRMAAQSLFRSQSWLGQYFRRMRAKLGAPKSITAAAHKLARILFHILTTGQAYDETVFAQQEAHNHQRMQQKLRKQASVVRHK

SEQ ID NO: 393767 - protein, 305 aa, unidentified
MGSTFRKSALDVAILPQEEVFAVGNDHAGIDELAERLKGIGVDAIALEATGGFEMLAVAGLSAAGLTVLVVNPAQVRAYAHAIGRRAKTDPIDAAVIAAFVLATKPEIRPLRDAETQALSELVARRRQIVQMVVAEENRLRMALAKQAQKSIKRLLKALRRELESLDADLDSHIRKSPVWRVREALLTSVPGVGATTARTLLAELPELGSLDRRQIASLAGLAPWTRQSGKWKGKSFIGGGRGKVRAVLFMAALVASRYNPDLKAFRDRLVAAGKPKIVATVATMRKLLTILNAIIRDGRPWQNA

SEQ ID NO: 393768 - protein, 395 aa, unidentified
MFIVGIDVAKRSHEVCMITSDGQTVQRPFSIRNNCTGYNLMLEKIRKHTNIKSQIVFAMESTAHYWLALFTRLRKDGYHVILLNPIQTSAMRDMFIRKIKTDAKDSFIIAELIRFGRYAESNVAQDRLLALKELCRNRFYLVDMAGDLKRKLIALIDRVFPEYEAQFDTIFCKSSVALLKKYPTPQRLSNAHLDKLTELLWNSSNGHFGEWKARELRELARNSFGVEDCDGAYSTLILLMLDQIQSLSGKADALEKEISRLFQSFDTTVTTIPGVGPIIGAVILSEVGDISRFSSADKLAAYIGVDPSVNQSGEFQAAHAHMSKRGSPYLRRCIWMASQVAVQRDPMFRAYYEKKAAEGLKYMTIIGHVTRKMTAVIFAILRDHKVYEPVLPTAA

SEQ ID NO: 393769 - protein, 343 aa, unidentified
MKLRTIGIDLAKNVFQVCGVNEHMKSQFNQKLKRPQLLDFMRQQAPTMVVMEACYSSHYWGREMAKLGHDVKLIPAQHVTPFVRGNKNDHNDAFAITEASQRPYIRFVPIKTEHQQEISCLHRIRERLNKNKVALSNQSRGLLSEFGVVFPCGHKALLNGLNSVIDNAQYSHRLQNMVIDMLSEYNTTIERLKSIKKQLDKFVDESESGKILLSIPGIGVINASALLAAIDKGQAFNNPKEFAVWLGLTPKQHASGNISKMGGITKRGDRYLRKQLIHGARALVSRAAKSTDSLSVWATKLRVTKPFNKVAVAVAHRLARLIWILLTRQERYCAVPASLEVSA

SEQ ID NO: 393770 - protein, 351 aa, unidentified
MNNLRHNPIEETEMPLYGGIDLHANNSVVVLLDEQDQVIYQRRLANHLPTILEQLAPYHADIKGVVVESTSNWYGLVDGLMEADYRVHLANPAAMQQYSGLKYTDDHSDARWLAHVLRLGVLPQGYIYPKPERAVRDVLRKRAHLVRQHTANVRSVQNILGRNTGSRFGVKQMHELTKQDLEGVLPEAAQVLAVTSTLALLDCLSQQIKTLEQAVTKRLKHTPAYQQLLSVDGIGTIVAQTIVLETGDIGRFPTVGDYASYCRCVKSTKISHGKRKGQGNIKNGHPYLEWASMEAAQCAIRFSVQVQRFYQRKEAKSHLMVARKAVAHKLSRACYDIMRDLVPFEVQKAFG

SEQ ID NO: 393771 - protein, 458 aa, unidentified
MKREKPSGVRHSDLIRVHADAAAIDIGATMHMAAVGADRSTEPVRSFGTFTADLCRLTDWFTECGVKTVVMESTGVYWIPIFELLDERGFQVFLVNARDAKHVPGRKTDVSDAQWLQRLHSHGLLRASFRPKGEIAELRAYLRQRERLLDYAASHIQHMQKALTEMNLQLHHVVSDVTGATGLRIVRAIIAGERDPAVLALLRDTRCHANAETIQKALVGHYRPEHLFALEQALGLYEAYQERAKACDIRIEAVLKALSTLRDRQNAPMPPPRQRGSRQSNGPGFDVRGALYSLLGKDLTQIHGMGPYLALKLICECGDDLSAWPSAKHFTSWLCLAPSNKISGGKVLSSRTRRSGSRAAALLRLAATTIGRTNTALGAFYRRLSTRTGKAKAVTATARKIAVLFYNAVRHGMDYVDPGASSYEARYRARVIDNLQRRAKTFGFILQPAGPPSAGAVS

SEQ ID NO: 393772 - protein, 317 aa, unidentified
MSKRTTICAGIDTGKRKLEVALEATGERLEVDNNAAGHGTLMDWLRRHRVKRVGIEASGGYEREVVAELRHKRFVVVVFQPAQVRAYAMFHLQRAKNDKVDAALIAMCAAAAKKIHAPPDPRLAPFAHDLTLLDQITDTIAGHRNRRETCGDPRISQFWKEEIARLKKLHKTELKRLLAAIRQYPDLAQRLDLINSVEGIGLPTAVAILVRMPEIGRISREKAAALAGVAPYDDDSGDFVGVRHIEGGRKRLRIALYCAALPASLRWNPQLIALYQRLMAAGKEHKRALIACARKLLIFANTVVARGTPWISQPNPV

SEQ ID NO: 393773 - protein, 343 aa, unidentified
MQAVMTIGLDIAKSVFQIHGVDAAGNVIVRRQLKRRYVLPFFQRLPPCLIGIEACASSHHWSRELQALGHTVRLMPPAYVKPYVKRQKNDAADAEAICEAVTRANMRFVETKTPEQQSCLMLHRTRHLFIRQQTAVINAIRAHLAEYGIVAAVGRSGVEELLGVVADPSDKRVPEIARACLAALGAQLRMLKAQILEFDRMITAWHRSNETSKRLDAIPGVGPALATALVASVADPKAFRSGRNFSAWIGLVPKQHSSGGKDKLGSISKQGDRYLRSLFTAGALAVIRYAKIHGTKHRPWLTALLARRPTKVAAIALANKIARMAWAMMARGDHYKEPVALAA

SEQ ID NO: 393774 - protein, 348 aa, unidentified
MRFYTKQHNYYCGIDLHARSMYICIVDEQGKTVFHRNRKASAEALLKAIEPFREDIVVAVECVFVWYWLADVCAKEKIPFVLGHALYMKAIHGGKSKNDKIDSKKIATLLRGGNIPMAYVYPRKMRSTRDLLRRRNHLMRKRSELLAHIQNTNSQYNLPEFGKKLAYKANREGIAEHFPDPSVSKSIEVDLQLLDFYDQLLNDLELYIVKKAKVDDAYSWYRLRSIPGVGKILGLILLYEIHDIKRFPRVQDFVSYCRLVKCPRESAGKKFGTKNSKIGNAHLKWAFSEAACLFLRGNEQAQHYHARLVSKYGKGKALSILAHKIGRAAYFMLKRKEPFSMKAFFNET

SEQ ID NO: 393775 - protein, 320 aa, unidentified
MPKILNVLNKSCCGIDVHKRNVVACVLKADEFGEYTDSIKTFSTMTSDLEKLKNWLKEQNCEKVAMESTGVYWIPVFNVLEGEFDIVLSNARQIKNVPGRKTDPSDSRWIAKLLALGLVNGSFIPPKDIRELREMTRYRAKLVSMRTSEKDRAHNILETCNIKLSCVATDIFGASGTAIMKALIENPEEADPEELAQLAKGKLRRKIPELMEALNGKMDKHHAMMLQMVLEHLAFISEQIEELDKLLEEKCKPYQQEIQLLTTIPGVDKTSAQAIVAEVGIDMSVFETPERLTSWSGLSPGNNVSAGKKKAQEQDQATNT

SEQ ID NO: 393776 - protein, 345 aa, unidentified
MKLSRVGVDLAKNVYQLHGVDRYGKTVWKRRLRRGQWLQVLTDTIDPGCEIGMEACTGAHHWARELQSRGYTVKLIAPQFVKPFVKSNKNDANDAEAICEAMSRPHMRFVSVKSVEQQDIQATHRVREELKAHRNAKGNQIRGLVAEYGLVAPKGILALRRMIPEWLEDAENGLTDNFRSLLHGLWNDLLALEERLKELDKKVEKLARSNEVTQRLQQLRGVGPLVATALVATVGDGRQYAKGRQMASALGLTPRQNSSGDKYRLQGISKRGDVYLRTQMIHGARAVVSQAKHRDDPLSRWVTDIAKRRHPNVAAVALANKTARMAWAMLQNETNYDSSLAVGQA

SEQ ID NO: 393777 - protein, 400 aa, unidentified
MISVGIDVSKGKSTVCILKPYGEIVSKPFNITHTQKDLSELSSMLFRLNDEVKIVMEATRIYHLPVLTYLQEKGFFVSVINPYLMKSYRNESLRKAKTDKIDSRIIANYGIDHWFKMKEFQTSGEIYEELKLLGQQYRHYMKLHLLSLAELTHLLDLTMPGIKNLLASWNETNRKDKRSDFVERFWHYDVITSMSEQEFTEKYILWAKEKKYVPSQEKAKVIYTLAQESIPTLPSETSSVKMLVTEAVRVLKEVDATLGLILSRMQEIAKTLPEYSVVREMGGVGNTLAPKLIAEIGDVRRFRNGKALVAFAGIDPPPYESGQFVGCNRKISKRGSASLRKVGYETMRSLKMRSRPEDPVYRYVVKKESEGKSKKSAKIAGLNKFLRIYYARVTELYKNI

SEQ ID NO: 393778 - protein, 319 aa, unidentified
MEICIGIDISKAQLDADLQNKINQFPNNKQGIKKLIACLQEVKKIGELSCVIVEATGGYEKDLVSACHASDIPIHVAHANKVRAFAKSKGILAKTDNLDACVLSEYGTLMKVTPDTVLLSENAEKIRYLLWRREQLRNDMQREKNRLDKIKDVDIKDSVNSHIEWLVKEIKKIEKQLDNFSQKSDIKPQHDLLTSIPSIGGLVANYLIANLPELGLLNHKAIAALVGVAPYNRDSGGFRGKRFIQGGRRNLRRMLYMSAVSSVRCNADMKIFYTRLRNAGKPARVALIAVVRKLLTVINSVVTRQTPWQEKVEKVTIAA

SEQ ID NO: 393779 - protein, 315 aa, unidentified
MHRVTHFVGIDIAKHSLEVAFRPTGQQLKLAYDTAGLQQLLRTLPEPETCLVVVEATGGYQRRVVTELLTAGHLVAVANPRQVHDFARAHNILAKTDSIDARIIARFAEEVELRLVSKRSGKHEELAQLVARRRQLVDHRASEKNHRETSSSKTVKKSVQHVIDVLTREIARLDKQLLALVESDDDWNQTAEIVSSVPGVGPVVSATLVADLPELGDLNRQEISALVGLAPFNRDSGRSSGKRSIWGGRKNVRKALYMAARTACRCNPVIKAFAHRLRKRGKPYKVMITACMRKLLVILNRMVHTQTPWTPAGVH

SEQ ID NO: 393780 - protein, 436 aa, unidentified
MRAAHEATLCDERGEVIWSKRRFGNRHQELVAVVAQGGDCDQLTVVMEPTRNAWVPVAAHFMAVGADVVLILPQRSADLRRYYTKHTKNDRLDSHVLARLPLHPEGLNPIDSLGPADALKRAVHRRVKLVEWQLASRQRLDSMLDLLGPGYAETIGGARYTKTALEILEHYGNPRRLRRLGVNRLTVLMRGTSGDQWSEDKATELVAAAGEAIALWEHDQLDFDELAWDLASEVRLVRQLGDEITRLQERIDVLYEKADPAGIVISALGVGPILAGGILGRLGDAKRFATLAGVRSFSGMVPKVNQSGHTETRPGITKAGDAGLRRDIWFAADQARHVDPQLGAKYHRLIVERRLHHYSAVCHLATTLLTRIAACWRNDERYVNPGRRGPTYHCHRRESHRQSPLPDPTRTPDPDTHHRHNERISAIRSRPKPLRR

SEQ ID NO: 393781 - protein, 403 aa, unidentified
MARVFIGVDPHKLSATIEVVDQSETVLATGRFATDKAGYAAMRRHVVSFPDRVWAVEGSNGAGRPLAQRLLADGEHVVDVPAKLSARARALDTGHNRKTDPHDAHAVAVVAVRTPALRVLAHDVRLEALRLLVDRRAELTRARIQCVNRVHRLLSELVPGQSKKNITTAQAKTILATVKPRDVAGKTRRRLAAEQIAELVAIEKKTKTLTRELKELVLATGSTLMDLPGVGPVVAARVLADTGDVARFADRNKYASWTGTAPIEASSGEVVRHRLSRAGNRRMNHMIHIAATTQIRLDTEGRAYYRRKIAAGKSRREAMRCLKRRISDALYRRLRADARAAEAKDVNAGPGGHRGASLISCAAGSHPHTGTSDQPLPGPAPTTLPAPASRRKTSSSRPLEPAS

SEQ ID NO: 393782 - protein, 455 aa, unidentified
MPDAITGDRPELKPVNIGAAAIDIGSKMHVAAVNPTCTDVPVRAFGTFTQDLHDMADWFKACGVTSVAMESTGVYWIPAYEILEQHGFEVILVNARYAKNVPGRKTDVSDAAWLRQLHSYGLLRGSFRPDAEIATLRAYLRQRERLVEYAAAHIQHMQKALMEMNLQLHHVVSDITGATGMRIIRAIVAGERSPDVLATYRDVRCHSSIETIRAALVGNDRDEHIFALTQSLELYDTYQAKMLDCDRKLESLIATLTEKGAKPVGKLSKPRVKTKQVNTPSFDVRAALYGVLGVDLTEIHGLGPSLALKLIGECGTDLRAWPTAKHFTSWLCLAPGNKISGGKVLSSRTRRSSSRAAALLRLAATTIGRSDTALGAFYRRLSSRAGKAKAVTATARKIAVLFYNTLRHGMTYRDPGADHYEEQYRSRVLANLKRRAKSLGFVLQAVPGDTEAAVS

SEQ ID NO: 393783 - protein, 365 aa, unidentified
MEDRTCVGIDLHKTQFTVCAIRSVTGEVVHEQRYPTTEEGYQEFIGKMHEEESKGNSIELAIETTGNARYFKNRMEAEGFLVLVVNTNKFKVITMSTKKTDANDARTLAYYLMKEMLPQAHLCDQTSEEIRRLLKTRSILVKSTVSIKNQIHGMMLGYGIETKAAQFQSKKKRQELYKDLADQGYSQFTASSLKVTLDILDDLYEQIKKLEKQLHEMLDKDESVELLMTVPGIGFISASTIASYTRDIERFGGDFKRFSSYLGLVPSVHNSNETVHMGRITKHGPQDLRTAFVQVAMGVIRRSKRTGDWKLIKDYHRMKVEKGSGRAIIALTRKMARIVFAMLNDRTRFDPSRMVGRQYHTQETA

SEQ ID NO: 393784 - protein, 383 aa, unidentified
MKAVCGLDVHKDSIFLCILHSDGELFEQVFGVLTFQLEEMRKLLQKHHVFEVCMESTSIYWIPIWRVLSPHFTLRLVNPYFIKQLPGHKSDVKDAQWIAECTMKELVRGSFVPPEIIQQLRQYDRRIFDLNAEIVRKVSKVDGVLQRCNIRLSNYVSNIECKSYRDVVRRLSEGVTNPNELMKLVHGRIVNRHGAETILASLTGVVSQAEIDVLRQLHEEIDIAESHRNECQQRMLEICEKHFPEELERLQKIPGIKERAATSLIAEIGTDMSKFETANHLASWSGLRPRNDESNKKIKSRKITHGNVYLRNTIIQCAWAASRQKDCFFSRFSYHQTIVRRKNKMKVIVAVARKLLIAVWHVLHDKTDYVDFKPDREESANNG

SEQ ID NO: 393785 - protein, 309 aa, unidentified
MEIVVGIDVSKERLDVAILPQEEVFAVGNDHAGIDELAERLKGIGVDAIALEATGGFEMLAVAGLSAAGLTVLVVNPAQVRAYAHAIGRRAKTDPIDAAVIAAFVLATKPEIRPLRDAETQALSELVARRRQIVQMVVAEENRLRMALAKQAQKSIKRLLKALRRELESLDADLDSHIRKSPVWRVREALLTSVPGVGATTARTLPAELPELGSLDRRQIASLAGLAPWTRQSGKWKGKSFIGGGRGKVRAVLFMAALVASRYNPDLKAFRDRLVAAGKPKIVATVATMRKLLTILNAIIRDGRPWQNA

SEQ ID NO: 393786 - protein, 366 aa, unidentified
MKTPTEKKFRFFVGIDVSRDFFDATIMHGKVVITHQKVENSETAIKGFISELKTIKGFRLCFCVFGMEHTGIYCNFLLTTLEKKRANIVHENSLVIRNSLGLIRGKNDKVDSARIAGYLYKCRDQLSLWHSKRDIIGKLCILDSLRNKLASQIKALKQTEKEISCFLDKKTSLLRSNNCAGTVLAMNKDIEEIDNTIRSFIQKDDRISRLMEWITSVPNIGEKTALQIVIKTNEFRDISDPKKFACFAGIAPFPYESGKSVKQKTRVSHLSDGKMKSMLHLCAMGSLRSNPELLAYFKRKTETDGKNGMLVLNVIRYKLVLRIFACVKGERMFRNDYQPKAIEPDNDPATNNEPDQVYEKTLVLSD

SEQ ID NO: 393787 - protein, 340 aa, unidentified
MQAITIGLDIAKSVFQVHGVDAAGRTVVRKRLARGRVLTFFANLPPCVVGLEACGGAHFWARELQALGHDARLMPPQYVKAYVKTNKHDAADAEACCEAVQRPGMRFVAVKSAEQQAVAMLHRVRDQLVGQKTATINALRGHLTEFGLVAAKRRAGLRELLEILGDLEDPRIPPLARTTLASLVDQLKDLEARIGDFDRQLVDQTRTDPVCRRLAEVPGVGPVIATALRAAVPDPSRFHSGRHLAAWLGLVPAQHSTGGKPRPLGISKRGDAYLRRQLIHGARALVRVSRGRSGGLWSWVEGLLARRPFNVAVAAVANKLARILWAMLSRGEAYRAPAMT

SEQ ID NO: 393788 - protein, 319 aa, unidentified
MDYIGVDVSKQDISVFDYKGLSTFKNEKGLKDLRFYIKKQFKSYDDIAIIFESTGVYSDYLKEFCSIHKIKACIVNPKKSSNFAKAIGNRSKTDKIDANMLYRFKDIISQKDILIPETNKTADRLSSYLTSYEFISKKVTSISNHIEALKHKSDTPKDILRMFEKELKYTKEMQNKILLKMEEFIENNKGLKKDYENLLTIPGIGKISAMALSTLFTTYKDTNRSQITALAGLDPIRKESGTSVNKRRKISKSGNKMFRKILYFPMLTAIRYNKKIKKFYDRLVENHKPKKLALIAAMRKMILIAHAIYKNKTVFCDDL

SEQ ID NO: 393789 - protein, 344 aa, unidentified
MQHYVRLDVSVKETSVCIVDKAGRVIREVKVATKPAEILAVLTEEALAIERIGLEAGPLSQWLYSALAEACLPVICVETRHMKAALSAQINKSDRNDARGIAQMMRVGLYRPVHVKTLASQKRRMLLTSRQLLQAKALDIENDLRGTLRNFGLKVGMVGTVEFEARIRELVADHPDLAAIVEPLLIARRVLREQLGVLHRQLLEIVRQDEVCRRLMTTPGVGPVVALTFRATVDVPSRFNNSKAVGAALGLTPRRYQSGDIDRMGGISKSGDAMMREMLFEAALVLMTHSRKWSWLKAWGMKIARHRGMKRAIVAVARRLAVIMHRMWVDGTEFRWSRKEAAAA

SEQ ID NO: 393790 - protein, 370 aa, unidentified
MHETITSYVGLDIHKDSIAVAVAEAGRSSARFLGTTAPTIKALCSALKRCGPVDQTLVVYEAGPCGYGWARYLIAHGWRCEVIAPAHITRKPAEKRIKTDRRDALLLARESRSGNLVKVIVPDARDEAMRDLSRAREDANAARMRARLQLKAMLLRHGHVYHGKTSWTLAHQRHLASIRFEHPAQEIAFNEYRQAVTDAQERLDRLTEALQTQCEQWRMKSLVKALMCMRGFDCIAAITFIAEIGDLSRFEHPRALMAYLGLVPSEFSTGHSRHQGSITKSGNKHARRIMVESAWTYRFKAQVSREIQVRQQGKPKAVRDIAWKAQMRLAKRYRSLRMGRKVHQNKVCVAIARELAGFVWDLARQVHIAA

SEQ ID NO: 393791 - protein, 343 aa, unidentified
MQTITTIGLDIAKSVFQVHGVDAGGQVIVRRQLKRRYVLTFFQKLSPCLVGIEACGSAHHWSRELQALGHTVRLMPPAYVKPYVKRQKNDATDAEAICEAVTRANMRFVPTKTSEQQSGLVLLRARHLFIRQQTSVINAIRAHLAEFGIVAPVGRHGVEELLNVVADPNDKRVPEIARACLSAFGAQLRMIKEQILEFDRLIRAWHRSNEMSMRLEEAPGVGPVLATALVAAVADPKSFRSGRNFSAWIGLVPKQHSSGGKNRLGNISKQGDRYLRGLFVAGALAVIRYAKIHGTKHRPWLTALLARRPTKVAAIALANKIARMVWAMMARGERYKEPVALAR

SEQ ID NO: 393792 - protein, 422 aa, unidentified
MDSNASAVDYAAFIGLDWGSEKHSIALQAAGSKEIERYELKQSPEDLHGWLSKLRDKFGGRPVAVAIEQTKGAVIYALMSYDFVHIFRINPKSMADYRKAFSPGGAKDDPSDAEYLLEWLTLHRDRIKPWVPDDPQTRALQRLVEFRREIVNQRTALTNQLTQVLKDYFPQALDWAGDIERVMACDFLSKWPTLEKVKKAKPDTLRTFYRQHGSRSKEVIEERLKAICTAQALTEDTIVIETSVSVAQTIIRVLRPTLESIDRLDEEIKTRFQAHPDMAIFDSFPGAGAALAPRILAAMGSDRSRFESASEVQQYSGIAPVTERSGKHMWIHRRFACSKFLRQTFHEFSGQSIKWSGWARGYYDMQRDRGKGHHAAVRALAYKWIRIIYRCWKDRVMYNEEIHLKSLRDKASEILNFIAKAA

SEQ ID NO: 393793 - protein, 332 aa, unidentified
MEKNHYIGVDISKKTIDVAIYKKEKTGKAVLCEKFHNSPNGFKDMKRWLRKCGVTLAESLFCMEATGHYTYELCLFLEQQKVVYSVQSPLHLKRSFGLAHGKSDKVDSYRIAYYAYLHREDIKPSQLATNSIRKLKALMAERKSLVVEIARCKAQLNESGSHSSSPGTIKRTKELLEFLETQVIELENEMVESINSEEELKSNYQLLLSISGIGIVNAVNTIIATHNFKMFDNARQYASYIGVAPFEHTSGTSVRGKTRVEPGAKMLKADLTGAVRTCINHDNEIRKYYGRKIAEGKPYGVVANAIKFKLLLRMFAVIKRGTPFVKKADHLI

SEQ ID NO: 393794 - protein, 415 aa, unidentified
MSGKERVQPEPEFVAFVGIDWADQKHVWCWQAADTGKCESGELEHKPEAVEAWVGKLCQRFGDGPIAVAVEQVKGALVYMLGKYECLHLYPVPSTMSASMRAALYPSGAKDDPRDAELLLELLVLHRDKLRRLRPDNEATRQVQNLVEERRKLVEEKTAQLNRLTGYLKVYFPQILEWFAKLDSKLVCDFLERWPSLEELQQVPSGEVKKFFRHRRGRHGELTEWRMQGISQAMPAIRDHAVIAAKRTVVQVIAQLLRVLLEGIATLDRKIAEAAEAHPDFFIFQSLPGAGAALAPRLLAALGSQRDRYASANEVQKYSGIAPVTERSGKKKWVHFRWACSKFLRQSFHEWAGHSIAQSVWARAYYQRQRERGQEHHAAVRALAFKQAWFAPDLCLRHGGSKSVTLLCILSGYRN

SEQ ID NO: 393795 - protein, 367 aa, unidentified
MEKSSTAYVGMDVHKESIDLAIADAKEARHYGRIGGEAASVDRAVKKLRSAHRQVVFVYEAGPCGFWIYRRLRAQGLTCMVVSPSMTPRNAADRVKTDRRDAMKLARLARAGELVPIYVPDAADEAMRDLVRAREDAVIMQRQARQRLQALLLRNEIRYAGKTPWTKAHRRWISQLKLPNPAQQIAFEEYVQAVHEASLRVERLTGAITTELEHWRWRPVAQALQALRGVQAIHAVRIVAELGDLSRFQSPRKLMGYLGLIPSEDSSGPRRRQGSITKAGNSSARRAMVEAAQGYAYPARVSWVIARRQTGLPKSVCDIAWKAQLRLCARFQRLVRRGVPRNKVVVAVARELSGFVWDIARQVTLAV

SEQ ID NO: 393796 - protein, 353 aa, unidentified
MQQFVGIDWATRRARWCAVTRAGAVIDEGWAPADEDGLAGLVMRLGPEASACMEMMSGAAWVRERLQAAGWTVQVADARKAKAVGSLAAKTDKLDARVLAELARRDLVPQVYVPTFADRELKERLGRRMHMIRLRTAAINRAHGVLSQFGVRLAFDRLRAPDADELLVARGVPAVWRRSIAEAVAIVRVLDERLIPIEQELRPLARADERVRLLITIPGIGDLLGLTIATEIGDISRFASARKLVGYSGLTPRVYQSGQKSRTGKLSRTGSTILRWAAIEAAHQAWRPNNPWHQLYLDVKQRCGGKGNPAKAAVARKVLIASWHVLSLNQPFTPSRPRAAAPAPANSSCVLAD

SEQ ID NO: 393797 - protein, 349 aa, unidentified
MSKQKNAIAVRTIGIDTGKNTLHMVGLDERGEVVLREKVSRNRIAARLVNVPPCLIGIEAGMATHYMARELVALGHLVKQVPPAFSKPFRPNHKNDFRDAHAVAEAVERPSTRCVPIKTDGQLDLQALHRVRSRLIGDRTAVINQLRGFLLEHGITVRQGCRFLRQQLPQILATRTDVLSPRMVRIIGDLVEDWAHLDERIESVTDEIEGLARTDVSCGRLMTVPGIGPIIASAMVAAIGDGASFAKGRDFAAWLGLVPRQMSTGDRTILGRITKRGNRYLRMLFIQGARAIQLHPASWAKHSFGRWLTAAAQRLHCNVLTVALANKLARIALSVLVQGRNYETRVVAA

SEQ ID NO: 393798 - protein, 348 aa, unidentified
MTRILAIDLGKFKSVACLYDAESAEAVFQTLQTTPQTMHDLLVELEPDRLVIEICGIAGWIHDMATDLDIPIEVANPQHEGWRWNKVKRKTDRDDALKLARLAAMNQLPTVYMPGRRTRQWKSAIAYRHALVDRRTAIKNTIRALLDTQGLRMPSGASGWTAVSLERLRSLARPIGRCGADDLWRGQLQSELTSLRQINELLKRIEQRLDRLAAGDERVRRLQSIPGVGTRLAELVVATIDRADRFRTGREVSAYAGLVPRQFESGTMSRQGRISKQGPTLLRRLLVQIAWGMERRSAHVAALFARISGGQKTRRKKAAVAIARKILVWCWAMLRDGTPWRDPSLRPA

SEQ ID NO: 393799 - protein, 359 aa, unidentified
MRIIGCDLHARQQTLAMLETATGEVVKTTLKHEGNSVREFYSSLVRPVRVGIEATGSMQWFVNLMEELGIECLVGHPAEIRAAEPRKQKHDRRDADLLLSLLVEERFPAIWLPTKELLDLRALLRHRHQWVSLRVKIQNALQAIALANGLRRGSSLWTQAGQHAIASLPLSPHAAYRRDELQAMYVKFETEIEKLNQRVEQQARERFGARLLMTHPGVGPITALASEVFLGDPSRFAGSKELASYVGLIPGEHSSGKRQRLGGLSKQGNPLLRFLWSEAAIHAVRRDPKLKQFYRRKLIQKGLGKARAAVARKLGIRMWIMLRDQIEYNEFCRRGQRQQKSGDACAGMPGPRYGAKVAG

SEQ ID NO: 393800 - protein, 425 aa, unidentified
MNYVGFDWASRAHDVTVLDEAGGVLDRWAFPHSETGWVTTLDRLARHGSAAEVPVIIERTSGLIVDRLLAAGHPVVPVHPTAFYAARPRWGASGAKSDPGDSYKLADYLRTDGHRLRRLTPTDPGLHELQALVRLRDDQVRARTAATNQLTAILDTYWAGPKRLFMSLASQIALAFLTDYPTPTSAAHLGEARMAAFCRRHAYRGGKSPAELLSRLRAAPVAPVGLPPATLAAMVTAQVTVLKTLQTVISDVERLIAVRVVAHPRSYLFENLPGVGMINLAQLLAEVGPILDRVDSAEQAATECGAAPVTRSSGQTRGVYFRWAANTRARKAITSFAHNARMQDDWAAALYADARARGKRHPHATRIVARAWLRVIWACWTTQQPYDPSRHRTSTSSYPPGSSAASQHCRRAGAVKMEHPTAERP

SEQ ID NO: 393801 - protein, 353 aa, unidentified
MQSTATVTTIAIDLAKNVFQLALADRDLRVFRSLRLRRKEFLAFWSNYPAVQVVMEACGSAHHIGRWLSAMGHRVTLLPAQHVKVYRRRRNKTDAIDCVALLEALRAANIRPVPIKTESQQVIQMLHRARQQWQKMRTAQINLAHGALREFGIAVPEGAARAVACMRAEQANAQLDPMIRGLLQSLLQEIAMLERRVADVDRQFAAASRTDVVLHKLQTLPGIGWVTASAIRASVGDIERFANARSFSAWIGMTPAQTASGDKRKLGRSKQGDTYVRTLVIQGARAVLAAAQRQRLTTRPLSALGHWAATLADRRGFNKAAVGLANKLLRIVWATWKHDRPFDANYRPALATT

SEQ ID NO: 393802 - protein, 311 aa, unidentified
MTLPQDIIGVDIAKDWIDVFHLSTSKHERIATTEQALARFSKGVAGALVVLEASGGYERPLIEALAKAHTEYARVNPRQAREFARATGRLAKTDRVDAEVLARMGRALELKPTPPEDPDLARLSDLVARRGVLVGQIRAEKNRAGTTRDRWIAKEIALMIKVLDAHLAAVETQIATLVESRDALAATQARLSSVPGIGPAISAVLIARLPELGHLDPRRIASLAGLAPHATDSGLTRGKRRIWGGRADARRALYVAAFIASRYDPAMKAFRARLQAAGKPLKLVLTACARKLLTILNAMLRTGKDYRKMSP

SEQ ID NO: 393803 - protein, 476 aa, unidentified
MRRLLGIDLAITADNRACIMEETGRVIVERRFGRTRGELEDLLAVATDGLGQGDELVVVMEPTANAWVAPAALFSSRGAVVHLVPPEQSADLRRYYTKHVKNDRIDAKLLARIPLLHPEGLHPVSLPVGARGTLRRVVTRRARLSAECARHRGRIRSLLQLAMPAMPAALGDELGKGALAVLGRYGDPRSLIRLGRARLTQVLIKATRGAWRSERAEQILAAAREAVQLWQGLEGCDFAEVAEDLAAEVRLIRAIESELRELDARAAGLLDEIDPAGLHRSMPGFGERTATTVAGRLGDPSRFSGAPKVRSFAGVIPGTNQSGESESRPHLTKSGDHVLRHALFLAAETARRLDPQLAAIYHRQVLERGSHHTKAVCAVATALTSRLVAVLMQERAYEIRDTDGTPVDAAAARAIIAARFTVPPEIRAARRQPRSAQRMKGRPVHGVRTKTSPSSPPVDEASEVDATRVLVGVDLP

SEQ ID NO: 393804 - protein, 345 aa, unidentified
MTEAYDGRQVVGIDLHRRRSVIVRMTGDGRKLETVRITNSAAALRREIAKAGKHPRVVVEATYGWYWAADVLEAAGAEVHLAHPLGVQAYSCRRVKNDQRDAADLADLLRMGRLPEAWIAPPEIRELREITRYRHKLVQARTSVKDQVHAVLAKLGIPVTHTDIFGVHGQAWLDGLRLPQPYAGKVTSLRQLAGELSAEITLLEQVLGDLLAGHEGYAAIRQLPGIGPVLAAVIVAEIGDITRFRKAGQLACWAGLTPRHRESDAKVTRGHISKQGPRILRWALCEAIQHQSAGTRPRQVKDGIIARRGPQARNIAKTAAARELLTLIFYAMRDGRVRRAASPAA

SEQ ID NO: 393805 - protein, 340 aa, unidentified
MNATTYGLDVAKQIFQMYWVDAQTGEIANRRFRRDELIAFLAKRPAGRVALEACGSAHWWARKIKALGHEVVLLHAKFIRPFVQTNKTDAADARAIWTAVQQPGMRTVAAKTEDQQAMLGLHRMRSLLIKFRTMQVNQLRGLVYEFGVSFRAGRVAGLTEMRARMAELEDALPGTMFSSLHDQLRRIDGIEQDIDHLEKQISGWHKQEAACRAIAEVPGIGRLTATALVATIGDAKTFRSGREFASFLGLVPRQSGTGGKIRLGSISRRGDPYLRTLLIHGARSAMCHAKVPTTWQKAIQERRPANVAAVALANKMARTAWAILAHGKTYEKNHVSVKPA

SEQ ID NO: 393806 - protein, 309 aa, unidentified
MKEQLVYLGVDIAKSYLDAAVGNEKRRFSNDAIGHCELIKWVKQVKAPVQVICEPSGGYERALVRALARARIKVSLVQANRVRQFARAAGILAKTDCIDAEVLCEFGKVMQPQTVTAATLEQEHLRELESQRRHLTHLLVMEQNRAARVSDTSVVRLNRSLINQIKKQIEKLDLLIKEHIEQSPGLSAKAQKLISIKGVGLRTAALLLAQMPELGQLNRREVAALVGVAPFNRDSGKMRGKRAIYGGRRFVRHGLYMAALVAARHNPILRNFYLRLRAAGKPAKLALTATMRKLLIVLNSALKPDLPYA

SEQ ID NO: 393807 - protein, 395 aa, unidentified
MYFLGIDIGKRTHVASIMNEEGKVLLKGFSFPNTTEGAESLIERMVDYSGAPSDFVIGMEATGHYWLSIFSYLHESDYLIHVVNPLQTDGWRKGTEIRKRKNDIIDSVLIADLMRYGSFVETVLSDENVFSLKQLSRYRTYLVGTASDFKRKIIAVLDQVFPEYATIFTKQGVFGKASKELLLAFSAPIDLENISSETLAQYLAELSRNRIKAEKADQLKQAASNSFGVKFAQEAFTFQPRSMIEQLKFIESQIKETEREIKHIMDTLNSVILTIPGIGPINGATILGEIGDIQKFSNPKKLVAYAGIDASVTQSGQYEATHNVMSKRGSPYLRKALFSAALVASQCDPVFSAFYQKKVSEGKHHLTALGAVSRKLCYVIHAILTKNEPYIIVSD

SEQ ID NO: 393808 - protein, 358 aa, unidentified
MATMTWAGLDVHARSTEAAALDVASGEITRRRFGGGAEPVVAWLAGLPQPVCACYEAGPTGYGLYRAATAAGLAMQVIAPGKTPRAAGTRVKTDRRDAELLVRLLMAGALTQVSVPPPETEAARDLARARDQLRGDLMRARHRVSKLLLRHGRVYEGSTWTEVHRGWLAGQRFELAATELAYHDGLAAIEGLLARREALDRRLGRLALEEPFWPTVARLRCFRGIDTLSALALHLEVHDWRRFERAPQLAAWLGLTPSLAQSGQTSTHGAVTKTGSTYARRLLVEAAKHYARPPRGGAALARRQEGQPDHVLQTAWRAQHRLFRLQTRLRRRGKPANVATVAAARELACFLWSVATAD

SEQ ID NO: 393809 - protein, 434 aa, unidentified
MLTTDPMTPFRGAASAALRREQNRAYADQFLVLIGVDCGRTFHKLVARARDGRRHKAVRVDVNRAGFDAAHAYLRRTFPGVRPAEMLVGIEFAGHYGATFAQFLRQQGYAIVTVLSSVTKKLREVEDNSPRKDDAKDAGQICQLVSDGLFVGHAVLSEVVAQMRVLSTERLRLGVEETRLRNRLRSAVDLAFPEVLEAFATLRNRTPLAIVARWPLARDLAAASPRSVHAQLRLSSQNHIGRDRTQQLIAEAHTSIALVDAAPARRAEIQRMVARRAFLMEQMAACEAELADLVEAHAGAKALCTLPGVGVVVAAALVSEIGTPETFLSPRQVLKLAGMNLAGKSSGTSLRGRIRQTKRGRPLLRRQLFLLAGRWCQSRGLYRDYYLAYVARNGGSKIKGLAAVARKLVPLVLHIIQTGEPFDAARWGRQRHVA

SEQ ID NO: 393810 - protein, 414 aa, unidentified
MEAVYQRSAGLDVHKKSVTACRILADKGHGWQKETKRFGTMTADILAMADWLREGSVTHVAMESTGVYWKPIFNILEGDFDVILVNAKHIKYVPGRKTDVSDAQWIAELLQHGLLKASFIPEAPQRELRELVRYRTALIRERAREVNRVQKVLEDANIKLASVASDVMGVSGREMLAAVIAGNDDPEALAQLAKGRMRNKIAELERALTGRVKDNHRLLLRLHLEHIDELNAKLEELNQEIDRLVAPFNQNDEIERLDGIPGVGKEVAQVIVAELGTDMSRFPSSGHAASWAGLAPGKNESAGKNRSGKTPPGNRHLKTMLLQAAHAAGRSRDNYLSAQFRRLASRRGKKRAAVAVAHSILVIAYHMLRDGTDYRELGGDYFDNRNKDQIQRGLVRRLEGLGLKVTLEPAAVAT

SEQ ID NO: 393811 - protein, 394 aa, unidentified
MKLVGIDVGKNSHHFCVMDKETGEFNVAPSSFSNNKEGFDFLINSLKPYSKKSILIGMEDTGHYHVALLKFLLSNGYTVALINPKTTDLTRKMEGGITKNDKLDTITICDVLDTPERKKQYRITKVDRFDLYEQRQLTRHHHNLKEELNVYCNRLQKSIDLVFPEFNTLFSSKYSIVYMNLLKTFGSAEAIASTDIRTIRKCFEVKGRGGRISLTPEKLKECAKNSIGISSEVETIQIKHLVSQITLIKEQIAEIDKKIEEFSIKNNSPILSIPGISHFSGTSILAELGDIGNYSKPSQIIKFAGVAPYHYESSQYNAQHTGITKKGSKYLRKTLYQIILTVINNNPVFKKYYLLKISQGKGHRCAQGHCIRKLLRIIYHLLETGQSFDPALLR

SEQ ID NO: 393812 - protein, 328 aa, unidentified
MFYLGIDVSKLKLDCTLLLDPENGKRKSKVLPNSRDGARDLVRWCFKHGVGADRIHAVLEATGPYHEQVATTLHDGGVTVSIANPANVHDFGRALAMRSKTDALDSLVLARYGVAMRPAAWQPPPVHVRELRALITQLEALSKDRLRTLNRQEKIEASAASELVERSISDTLSFYDQEIALLEKAIDDHIDRHPDLKDDAKLLSTIPGVGPKVARTMLRVMRTHQFKCAEDLAAYLGLVPVQRQSGTSLHGRSRMSKAGPADVRALVYMAGVVASKHNPHVRALYQRLLVTGKTKMSALGACMRKVVHLCFGVLKTRQAYRPDYAFSA

SEQ ID NO: 393813 - protein, 351 aa, unidentified
MKNTIVGVDLAKEVIQVCIYTNKKVHSNNEMTHQEYRAWLFKTKPTTIVFEACATSNYWKQKAIEAGHKAELISAKLVATVRQNQKTDKNDALAIVQASQLPDIQFIKGKNVDQQQLQSMLRLRELAIKQKTASNNQLKALLLEFNVRVSPRNGGLKGVVQSTLEDAENGLSDEFRQALDATWKHYSGLLESIRIYDDCLESSIQEHADCKRLLKLEGVGTVNAINLYIALGCAELGTFTKGKDASACMGLTPLQYSSGGKTTLGSIGRHVKNSMLRSQLITGALSAVSQIMKRTAVTKKEAWIQGLVERRGKKCAAVALANKTVRTAFAMLTKCTEYKAELISDLKVECA

SEQ ID NO: 393814 - protein, 414 aa, unidentified
MDLLHERCGGGDLGKRDCKVCIRAPGKGARRHQEVRTFTTTTSGLLELRDYLLAHEITVFGMEATGSYWKALYYLLEATDGIEPWLLNAQHMKAVPVRKTDVTDAQWICRLVEHGLVRPSFVPPVAIRRLRDLTRYRTETCQERTREVNRLANLLEDAGIKLSLVVSDIAGVSALEMLEAMADGERDTEVLAAMARGTMRRKHGELVEALTGNFTDHHGFMVRVLIRAIRDASTRIALLEEEIKRQIAPFRRQVELLITIPGISTTVAHVMVAEMGVDMNRFPTAGHLAAWSGLAPGNRESAGKRKRAPTRHGNVWLKGGLGVAALAIGRTKGTYLAAQYHRLRPRRGEKRTIVAVAHSMLVSAYHMLANDVPYQDLGPDYFTRRLGEERHRRRLVAQLDALGYDVALQRREAI

SEQ ID NO: 393815 - protein, 428 aa, unidentified
MLKINPLSTLYVGIDVSSKSNFVCTLDFYKNKYINSSFANNQPGADELAKKILECLKEHPDLNTVVAALEATSVYSIHIANYLSSCEELMSFKPYVFVVNPKCTANYKKSYIGVGKSDPIDAFVIADYARAGNIETQPWRGSQFLALKRLTRHRLHLVECMTREKAYLVSNLYLKFSELQMLEKDDQPFCDIYGATSSGVLTEYLSPEEIIDSSEEELVAFLAEKSRNRIKDISKTAELLKKAARDSYRLDKALYEPLNVSIASSFNCIETFKKEIKVIDAAIEREIKGLNPNAFIILQSIDGIGPVFAGGIIAEIGDIAAFHSSDALAKYAGLMWKSNQSGDFDGEDTPISKAGNRYLRYYLGEAANSMKKHNVEYGAYYRKKYNEVPKHQHKRALALTSRKFVRLVYGLLAKNQLYSGVSLDTSTE

SEQ ID NO: 393816 - protein, 341 aa, unidentified
MSKRSVPNRGVLYCGIDVSAESLAVAVQPEGTDNFEQREFANSAAGHRQLIAWLLKRGASARVSLEATGIYSLDVALALEAADGIEVAVLNPRTVHRFAESLRRSKTDTADAAALAEYSRRMPFVAWMKPSVAALELRSISRHIATLSEEHARLKNRLHAAEGSASTPRCVREDLRRSMTGVERRLVRLRREAQAAIGKDAGLKRKFDHLIGIKGIGEVSAIELLGELAGLDPAMTVRQWVAQSGLDPVHQVSGTSVHKRSRISRQGNRHLRRALYMPAVSASRFDPHMKAFYNLLQTRDKTKMQALTAVARKLLHAIFGIFKTGTAWDGAKLFPQLILPS

SEQ ID NO: 393817 - protein, 435 aa, unidentified
MDEVTDEPLYRDRVCGIDIGKAGMAATIRVPSEKDPGRRMAETRSFGTTRREVLALADWLRCWQVPAVVMEATGDYWKPVFYRLEAEGLECVLADARQVKNLPGRPKRDPSDSRWLAACFERGSVSPCFVATPEFRLIREHTRYRRDLTAERTRDKQRAEKLLESAAVKLSSVLADLHGVTGRDIMDHLIAGQRDPKVLAQLARQRARAKIPRLEQALEGAEFFTPEHAALLQVMLARIDRVNADIAALTAVIDQLLAPYEEQLAQAGSMPGWGRRAAQDVIAETGVDMTRFPTGGHLASWAGRTPLDSQSGSRAGRARHKHGNRYIGAVTGETAVAAGRTQTREGARHRRLARRRGKAKACVATGNTQMRVFHKLLSNPGMRYADLGWDYYEPDRHTARQVSHHVGKLASLGYQVTLSKRPDPAPGQDADTPAP

SEQ ID NO: 393818 - protein, 322 aa, unidentified
MNTTNPERVHPVVVGIDVSKGRLDVCLMPEGEAFAVTNDQRGIDELLGRLLKLRPELVVLEATGRYERPASAAIAASGIAVAVVNPRRARDFAKATGRLAKTDKIDAEVLARFATAIGPPPSVLPDEEAQALQAILTRRRQILEMLVSENNRLQMAPEAVAKRIRAHMKWLEKELSRTDRDLDEAVEASTTFKANEALLRSVPGVGPVLARTLLAELPELGTLTHKRLCALVGVAPFNRDSGQRRGKREVWGGRAPVRAALYMGALVATRHNPTIKEFYERLLKAGKPKKVALVACMRKLLSILNAMMRDSAIWRCPHVLIP

SEQ ID NO: 393819 - protein, 343 aa, unidentified
MNVTTYAVDTAKNVMQLHWVDGHTGEIGRRKLSRARFFEFFAQRPGSHVVMEACGGSHHLARRLGALGHDVELLPARQVRPFVSGNKDDAADARALWLASRHPDIRRVPVKTEQQQAVLSLHRMRAHWSSVRTATLNALRALLYEFGVVLPRGKACGLKTLAERRAEFDAQLPALMQRLVDQHLAALRQMDLEVKRIEAELAAVQAADDNARRLREVPGIGLLGATALSATLGDARAWRRARDFATSTGLTPRHTGTGGKVRMGGISKRGDPYIRTLLVSGARSLLNSPSAPQWARQMLLRRPVNVVVVALANKLARTAWALVAHDGAFDRRWGRPDAVGTTG

SEQ ID NO: 393820 - protein, 378 aa, unidentified
MNRIIKIGMDVHTTNYTLCIFEPSFENKGTVHFVTQVKPNVKNIVRVIDTFKRKNENDELRITCGYEAGCLGYSLYRELKDKGIDCVILAPTTMKTEKGGRKIKNDYRDAKMIAECLAYGGYSAVHIPNELDNSVKEYIRMRDDIHENLKKIKQQIISLMTRNGKQFDGKSYWTKKHLDWIKATAFQEEFLNETLDEYMIEYHHLIDRVEALDKRIEEISTKEEYVEKVQQLQCLIGIKTHTALSLIVETSDFTRFTKGNVFAAYLGLIPGEDSSGEKENRLSITEAGNRHLRKLVVESAQGYTRGQIGFKSKDLKARQSKCSNEVIAYADRCNERLRRKYYRMIARGKSYNVAKVAVARELACFVWGIMTDRMELSK

SEQ ID NO: 393821 - protein, 414 aa, unidentified
MQVLYSHCAGLDVHKRTVVACCLTPDPQGGWQQERRTFPTMTVDLLALADWLREHGVTHVAMESTGEYWRPVFNILEAEFETLLVNAAHVKNGPGRKTDVRDAQWLAELLQHGLLRASFIPPVPVRELRDLVRHRSNFVRERATLVNRVQKVLEAANIKLASVATDVMGVCGRRMLAAIVAGEADPELLAELARGRLARKRDELAKALAGRVLPHHRFVLTELLCQIDSFDETIARFDEQIVTAARPFAEAVERLDTIPGVGRETAQVIVAEIGVDMSRFPSANHLAAWAGVAPGNCESGGERLSGRTRKGNQALRHGLVQAAHGAARMKNTFLAAQYQRLARRRGSKRAVLAVAHSILVIAYHLLERQEEYRELGGDYFDRQRPEATAKRLTHRLERLGYRVIIQKPEEAVTA

SEQ ID NO: 393822 - protein, 430 aa, unidentified
MKSNTQNAKIEAITEKTLVLGIDVGSETHYARAFDYRGIEYSKKPFKFSNTEAGFVTFKEWILDLKERHEKDKVVPGMEPTGHYWFNLGKFLQDNEMKPVLVNPHHVKKSKELDDNNPTKNDRKDPKVIAGLVREGRYMIPYLPDGVYADLRTASNIRFQLQAELTRIQNRISRWFNIYFPEYKTVYGKPDAKSGMLILKAAPLPEDILTLGIDGVNQIWRDAKLRAVGKARAKTLIEAAEHSVGSKEGAVAARMEIRMLLEDYESRSIRLQEVMTLIEGLVKQIPMAEKLLEIKGVGIRTVSGFLAEVGDISRFNNPKELQKLAGLALVENSSGKHKGETTISRRGRKRLRYLLFEVAMSLVAKNPEFRELHNYYTTRRLNPLKKMQSLMAIAAKLIRVFYVMLTKGVNYDPKKMVNDIKRPAVYLQTA

SEQ ID NO: 393823 - protein, 354 aa, unidentified
MIVSGVDPHKQSHSAAALDKRTGELRGERTVRARRVGHEQLLAWARALDGERCFALEDCRHVSVALERFLLASGERVVRVPPKLMAGARKNGRARGKSDAIDALAVARAALRERELPVARLAGVEREIRLLVDHRDDLVAERTRIQQRLRWHLHELEPGLELPAGCLDRRVWLERIVRRLARHEASVQVRICRELVERCRELSRQANELERELERMLRAQAAPLLALPGCGVLTAAKLIGETAGASRFADDARLAMHAGAAPLPASSGSRRRHRLNRSGNRQLNCALHRIAVSQGQHHPPARAYLAGKQAEGKSRKEALRCLKRHLARSVYRLLCSLEEGRVTPIRRELTSALT

SEQ ID NO: 393824 - protein, 333 aa, unidentified
MSKFKHFVGIDVSKEYFDAVVILEGAKEKSIHNQFVNDYKGIKLLCKWLKEHGSTSEDTLVCLEHTGMYGKLIIKYLIGFNFSLWVEMSLKIIRSIGVQRGKNDKVDAERIAYYPKKNQQEAVIFKTPRKEVDKIRNLLSLREKLVTTKASLLRNAKELKSFDLEVAKLSEKLQKNTIKGITLDLKNIENQLNEIIVEDENLTRIYELVTSVIGIGKVTALFLICFTNEFTMYSNPRQLACYAGVVPFEHTSGKSVRLKPKVHYMANKKLKKQLHMCALSAITSDPELKHYYKRKVEEGKNKMLVINNVRNKLVHRISACVKNNKMYQRREVA

SEQ ID NO: 393825 - protein, 359 aa, unidentified
MEAQVKKIDFTGQNIYAGFDVHKKSWKVTIMAEDTFYKTFTQPPNPEVLFNYLKSNFPGGNYHSAYEAGFCGYWIHDKLTSFGVRSIVVNPADIPTTDKERVQKEDKRDSRKIARSLSSGTLVPIYTPTIQTQRDRSLLRTRAMLVKDMTRYKNRIKSYLFFYGISIDDAFTESKKHWSNRFMIWLESLEFEGETGKVALQLLISEFKNLRTSILKVTQQIRALSQTPTYNEKTTLLKSVPGIGLLTAMTILTELETMDRFPNLDKMCGYIGLVPSTKSSGEKEKNGDLTSRGHIVLRSAIIESSWMAIRHDPSLMKSYLTYLQRMDSNKAIIKIAKKLLSRIRFVLANNTPYQCLIEK

SEQ ID NO: 393826 - protein, 428 aa, unidentified
MNCTQNEKLNQVTPHTLIVGVDIAKFKHVARAQDDRGKILGKSLVFTNTKEGFEAFFSWLEEMQHKHEKSDVLVGMEPTGHYWLNLAYTLKERLVSFGVVNPLHVKRSKELDDNSPTKNDIKDARVIAQLIKDGRFSYPRLPMNEDAEIKAGITIRNQIVGDLQVLQGRVHNWLDKYFPEFLTVFKDWSGKMALATLEHIPLPGQLNQATPERVAEIWSIYGGVQRPSLKRIQRLQEAAARSVGLNVGLQMAQREIATNIKRYKMLKEELRALEKELETLVLTLPGIAEMLTVPGVGMVTVIELYSELGDIKNFENPRQILKYAGLNLRESSSGKHKGQTRITKRGRAKLRALLFRTVMPLVRHNRAFKALHQYYTTRQENPLRKKQSLIVLCGKLVRILHTVGQKQCPFDEERMIRDIPHLSLALGA

SEQ ID NO: 393827 - protein, 418 aa, unidentified
MKSNKAEKVKIINQKTLIVALDIGKNVHYGYFRTPKNKDIKPFPIYNTRQSFKRFWGKLCRFKEEHMLDEVVIGFESTGPYAEPITNYLRKKPVNLVQVNPMHTKRIKELTGNSPNKTDEKDPRVIADVISLGHSLTVVMPAGAAAQLRRLTHARERAIARRTAMNNQLQDLVFVIFPEFGSIIKPSTKTGMYLIKNYPYSESIASIGIENLSDIIRRVSRGKLDKGRAEELYNAAEQSIGITEGKESVILETSHLVSNIENENRYIKSLEEQMIEYLEQVPYSHSILSIKGIGHVTVAGLIGEVGDFNKFNTISEITKLAGLDLFEISSGQFKGQRRISKRGRPMMRKLLFFAAINMVKSTGIMHEKYKQMCERGMLKRKALIAIARKILGLIFAIVRDNTVYVENYTKHNRYKLVA

SEQ ID NO: 393828 - protein, 482 aa, unidentified
MPKHTPTRLGIKGQCIVLAVDVAKRNHVLMVQGPDGAREKPRRIGNSAAGFGALLQHAQTARRRWPGVPLVVALEPTGHYWLPLAYWLQARDLPVLTVNPAHTKRAKELEDNSPAKTDEKDVRVIADLAAMGRARPCRLQTGVYATLRALARLRARVAADLTAVTNQLHQLCDQLFPELLPCFGGDLRRTSCRRLLAVAPTPAAVQALGVERLTVLLRGASRGRYGAARATQLLAAAATSIGLREGTAPLVTRLHYLLEEEARLRGYRRALEQQQAAALRLVPYAAGLLQFRGLGVVTVATLLGETGDLQGFRRARQLLKHAGLNLYELSSGEHQGQRRLTKRGRPGLRRILYMAALRLLKRGAPPWVLPPPPRALGGHRGRGGGDAEVAARGACVGPQRPGLRRPAARSLTAATGMEVPLCVRGAPATSQITVDPIPGTLLHRMKHCRSRATAPRTPEDLGRWVRSGKADTTFFRFSQLGT

SEQ ID NO: 393829 - protein, 406 aa, unidentified
MEVIYPRCAGLDVHKQTVVACVRIAGDGTPLQEVRTFATTTSGLLALADWLESFGVEVVAMEATGVYWKPVWHVLEGHFELVLANAAHVKNVPGRKTDVNDAMWLADLLAHGLIRASFVPPVAVQELRTLTRTRKQFVRERASHVQRIEKVLEDANLKLSGVLTDIMGKSGRAVLQAIIDGQTDPERLLACIGRVKASRAELLEALRGHIRAHHRFMLKLHLSHIDALDRAIADIEKEVGLGLEPFRQAAKLLSTMPGLSAVSANVVIAEIGIDMSRFATPGHLLSWACLCPRNDESAGKRRSTRLRRGGKWLKTTLVQAAWAAVKVKGGYLQAQFHRIRARRGAKKAIIAVAASMLTAAWHMLRDGTEWQDLGAAHFDRADATRTANRLIRRLQQMGYAVHAAPA

SEQ ID NO: 393830 - protein, 345 aa, unidentified
MDATTVAVDLAKNVFELALADEQWKVVGRARLTRGQFERWFGNRTVRLVIMEACATAHHWARRLRARGIEVRLLPAKYVRAYVKRNKTDAADAMALLEAARGDDITPVAVKSVEQQALQALHRLRSGWMSTRTRRINALRGFCREFGMEVSVGAARGLAQIARLLADEQSAIPAMLRSPMRLALEEIRLLEARIDSLERELGAIARQSEPCQALASVPGIGLLTSTAMVAAVGDPRSFDSGRRYASFFGLTPREHSSGNTRYLGRISKRGNRYVRTLLTHGARSVLRAATVARRAGRNVDRLRSWALDLQSRTNHNKATCALANKLARIAWAVWVKHERYQAQPA

SEQ ID NO: 393831 - protein, 335 aa, unidentified
MKKFDYYIGIDVSKLTLDVTLLSECENFAKTEHYKIENSKKSIAQFLKHKLAKYDAQQLLFCFEDTGIYSMPLADYLNVCKLTFWQVSSVEIKRSKGISRGKDDKIDSKEIAFYAFTHMHKFRPEKVSTQSIRQLRLLFTEREKVLKALALFENTSENKGFIPKEVFNAVASVNKPVINQLRKTLKSLEEKMLAIIESDDKLSRQHKLVTSIPGIGMQTAIYLLIATKGFEAFDNWRQLACYAGVAPFPFQSGTSIRGRTKVHPLADRKLKSLLNMCAMAAVRHDRELKTYYERKVKEGKSKMLVINNVRAKLLARVFAVINRETPFVNTCKFAA

SEQ ID NO: 393832 - protein, 392 aa, unidentified
MLQRGLPGWTGQSLKLGGRVVGHHTEAFVGIDTSKSRNAVAIADSGRGGEVRYLGEFPATEAAIRKLVAKLAAKCCHLTFCYEAGPTGYGLYRLLKSLGHDCLVVAPSLVPKKAGDRVKTNRRDALSLAKLLRAGELTAVWVPDERHEAMRDLSRARLAVKKDLQGKRQQISSLMLRLGRIYPGKTTWGRAHMRWLMEQKFEHREQRIAFEELLEGIRQESERMERLEDAIREVVPDWSLAEVVAALQAMRGIDLIAAVGVLAEIGDLSRFQNPRELMGYLGLVPTEDSTGDKVKRGGITKAGNGRARRILVEAAWSYRYPPRVSRDKQPKVEAAPRRAREIAWKAQTRLCGRFRSLERKGKRRTVIVTAIARELSAFIWAINRELLPPRQA

SEQ ID NO: 393833 - protein, 360 aa, unidentified
MPVQSNKLNFKGQNIYIGIDVHLKSWNVCVYVGGLKIKPFSQTPSAAVLKSHLETNYPGGTYYSAYESGFCGFSVHYELLRHGINNIVFNAADISDTSKERMRKTDSTDSSKIARNLSKGELSAIHVPSEQEISDREVLRTRMTHVKMCVQTKMRIKSLLYVKGIRYPDTFEKPGTHWSRNFVSLIENEASSLPYEGGRSLLIQIENLRFIHNQILKATRELRKIMTQPRYQDSYKLLMSIPGIGFLTAATFLLEAGDISRFASNDHLASFVGFVPDTRSTGEKDIAIGVTSRSNHRLRTMFIESAWSAIRQDPALTLAYTKLVSRMEPNKAIIRIGRKLLNRVACVLRTRKPYVKAVVQ

SEQ ID NO: 393834 - protein, 405 aa, unidentified
MSNNVFVGLDWAAQTHAVCVIDAEGRGLDRFEVVHDRDGLAGLMQRLARFGSRLRIAIERPSGLIVDALVEAGHEVVPIHPNAVKASRPRYRSHGGKSDSSDAYLLADLLRTDGHRWRALCPQSDAIKGLRALVRSRDDLVATRVALGNQLRSALEASWPGAACIFADITSPIGLAFLKRYPTPASAARLGERRLQAFCRREHYSGHRSAAELLTRLRSGASALGGPAIVDAMAQVVRSLVAVLQPLVDQIAELTRRIARTVEELPDGQIIMSFPRAGHVCAAQILAELGDVRERFPNAEQLAAEAGAVPVTYQSGKTRSVSFRWACNHRLRRAITCMADNSRHANAWAHTIYVAARARGCDHTHAVRILARAWLRVIWRAWTDRRPYAPELHGAAVQLVSSQGG

SEQ ID NO: 393835 - protein, 340 aa, unidentified
MGEYVGLDVSLNETTISVRRNGKRIWRGACPSHPQAISAVLSQHAPNAARVVLETGPLAVWLFHSLTAEGVPVICIDARHAKAALDMAPNKTDANDADGLAQLSEVGFFREVRVKQFDSMLTRTLVGARSQMIKIVTDLHNQIRGVMKTFGLIVPKGAGRVFDANVRRLLEANPELALIVAPLLDAWRSTRSRASELDRQLVAAARRSPSCKVLMSIPGVGAVTATSFAAAIEDPRNFKTSRSVGAWLGLTTRRYQSGEVDYDGHISRRGDKHLRALVYEAATVILTRSTAESALRSWGLKLRERVGFKRAAVALARKLAVVMHSMLKTGEIFNPGAAAA

SEQ ID NO: 393836 - protein, 398 aa, unidentified
MTKKNTLKSLPTDTEFRVVGLDLAKSDVSVAAIPVDDNTPSLVDRMTYADLLDWAGKISPTLFAMEPCNGYSLLCLQLENLGHEIKVISGWTVSMWINTHLSGQKTDLNDAIALARLAVSDAELTPIRHKSITEIRIQTVQAVRQQLMSQRSKSIVSFKALAQQWGIPCAAGHRNLKKLRESIEAKVDLITRPVANAMLFLLDAVKSLDRQIGQLNQTLQELVMSDERGRLLQSVLGVGTQISARVITVVGNVERFNSPRSLVAYVGVAPRNFITGHKNLTKKKHGNCPDLSHKGQGKISRQGDKLLRSLFIQGAACLYMQFCKDQLPECQLKRWILKQLAMQKTYGKLIVSLAAKLIRIVWAVLTYGEKFNIQKAGMTRSMWSEMALETPLNKEVPA

SEQ ID NO: 393837 - protein, 383 aa, unidentified
MRHGGILIEANDSEGEAMKKHTTINQSLSADVVACTTVAVDLAKRVFQLAGEDALGRVLFEDRIKSREAFQAFLHKLPASVTVLMETGPGAQAWGRLLQTQGNPVRILPAQLVANHRSGPKNDRNDALAILRAGRDIKISAVPLKSAAALAMQALHRARQGYVRRRTAVGNQMRGLLLEHGVALAQGETAISQLVPRILEDATQPLPDLLRELIAELLSEWSQLGERVNVLTGRLETAAKEDETARRLMTVRGVGPIIATALLAKQTQPERFANARLFAAYFGLVPSQHSTGEKVRLGKMSKHGDAYLRSLTIQGAHAVLKQLRPDSQQPDDQRLQRWISRLGRKEAAVRLANRNLRILWVLLQNDQTYRRQPGAAPEAAMSH

SEQ ID NO: 393838 - protein, 340 aa, unidentified
MLYAAIDIHKHAFQAAVLDPETGVVVEERFADRESLARWAEQWRGRLAAVAIEATTGWRWVWRELVANGFDVRLAEPVQTRALLGRRRSAKTDRLDARWLARLLAKEMLPESWIPPAQIQKLRDRTRLRKALAEDRRRWGQRLHAYLLHEGWPCSRSNLLRPPGLRWAAALQLSEHARLQVDSLLSVMAALETQLETVDGELRRFARADQRCQALQSIYGIGPILACHLLAEIGEARRFRRAEQITRLAGLDPVVDESGETRRRGHLAKAGSPHLRWALVEAAVHAHRTTAPDLALYRATRQRRDTTGGETDRRPQDRQARLPRPARARARHRLTGLDWP

SEQ ID NO: 393839 - protein, 394 aa, unidentified
MAAVDREGKVVLQPVRVEHQDLEGWLKKNLCPSDHVVIESTTNAWHVYDLLEPLTEQVLVANPIKVKQIACARVKTDIRDTLILARLLAANLVPVVWVPPVHVRQLRQLLSQRRQMVETHTQIVNRMHSVAHRHHLSHPRGKRFNEKNTGWQKDKLLSQVEQLQLTIEMENREYIEKQINKISKEIAKMSHQKPWAESMTYIMQLPGFGVITAMTVLAAIGEIERFESPKKLGGYSGLTSGVEQSGTKLREKGITKEGRKELRWALVEVAQRAVKSDPLWKRRFQELQQRMHRNQAIVAIARRLLELVWYVLTRHQPYRHFSQERIAYKYLSWGWQMDDEARDGLTRQQFARYYLMRLGIGQDLTRVALNPKYPRRLASEAELLALRPELQKIE

SEQ ID NO: 393840 - protein, 409 aa, unidentified
MRIIGLDIHRTFAEAVAWDDGKLKRLGRVDMRRHLLETFAKKLTKEDVVVVEATGNAASVASVIAPYVKKVVIANPKQVRVIAHAKIKTDTIDASVLAQLYASGFLPEVWIPDEPTQALRRQVTRRNQIVRQRSRLKNIIQSILHSHLIPSCPHADLCGASGRTWLFHQVLPEDERLAVERHLREFDRLGEDLKVIERGLARSALGDEGVKRLMTIPGVDMIVALAIVAAIGEAGRFDRPEKLVSYLGLNPSVRQSGPGPAYHGRITKQGRGHARGMLVEAAWAAARAPGPLRAFFLRVRARRGQHVAAVATARKLAVIIWYLLRKGESYAWARPALHAKKLRDLELKAGHKAERGQKGSACAYNIKSHRDQERRWVEQAETAYARFVAGWNPRGPQQVRTGAANEGRQ

SEQ ID NO: 393841 - protein, 347 aa, unidentified
MERFCVGLDVSAKTFDIAFRVARGRVEWQTFENDGVGHRALVKYLKKRWKLIRVVMESTGIYGLDLALALNKAEIEVMVANPRAAANFAKATLQRSKTDRLDAEMLLLFAERMPFIQWRSPSSGQLELRAISRRVQALLETVRAEKNRMHAAMHVDGTKVVRKSITATLKALAKQIAELRAAALKLIAADSLLARRNELLLSIKGVGQVSAISILAELSILSADMTDRQWVAHAGLDPREFESGTSVRSLPRISKRGNRYLRAVLYLPARVASRFEPNAAAFSARLKARGKKPLQIHVAVMRKLLHGIHAMFLTDQPFDGRRLFPAAGAVGTSGIAPSAISEVSIAL

SEQ ID NO: 393842 - protein, 426 aa, unidentified
MIPAVIERCAGIDVGKTFLTVCLLTGPADGEPKAETRKFGTFHADLQALCRWLTEEQCTRVVMESTGCYWKPVFNILEDSVAVSLANGQDVKGRKGHKTDWNDCRWLAHLLRHGLIRASFIPPKPVRELRDLTRRRKQILSSAVSERNRVQKVLEEGNVKIGSVLTDVFGVSGQLMLDALLEGKATVEEIADLARHTARRKIPEIIQSLEGNRLDGHYRMLIKLSLEHLAFLEQQLQQIDAEILLRAERPEFRQAFQLLQTVPGIKQDGAASILAEIGPNMAQFPSEAHLSSWAGVCPGNNCTGGKAKPARIPRGNRWLRTTLVECAWAASKTKDCFLKDRFWRLAARGKKRALVAIAHTVLVLLYRSLSTGQPYQERGVVEVNERKRKRLIQHHVRRLGRLGIAVSSLRLAGPDDSGYVTATPTP

SEQ ID NO: 393843 - protein, 345 aa, unidentified
MTIVETRVITGGVDTHADTHVAAALDPLGGLLGVREFPATAAGYGRLMSWLGGFGTVALVGVEGTGSYGAGLTRHITAAGVRVVEVDRADRQDRRRAGKSDSLDAVSAARAAQSGRAAGAPKGRDGAVEALRALMVAKRSARAERTRAVNQARALITTGPEDLRIRFARHTAPALVTALAQLRPRPGDAAGYATRIALRELGRRARFLDAQAARLDELIIPLVTGRAPGLLALHGIGPDTAALLLIAAGDHPQRLRSEAAWAHLCAVAPIPASSGKITRHRLNPGGNRQANHALWRIAISRMSTHPATRAYVERRTEEGLSKKEIIRCLKRYIARQVYPCLRPAH

SEQ ID NO: 393844 - protein, 374 aa, unidentified
METIYIGVDFHARQQTICYLKTETGELVSLELKHQDKEKVRAFYAGFHGQVIVGLEASGYSPWFERLLEELGHAVWLGHATEIRRRARWRQKNDRRDAELILDLMLHNEFPRLPRPSVQSREVMRMLRYRQKLVKMRTMSKNSLQALALQAGLAKRSSLFTRDGQQQLATAEMSPAMQWQREHWLELLAPLNQQVLASMAWLKAAGKDDVCIARLRTHPGIGLLTSLCLVHTLQPVDRFRNTRKVAAYAGFDPVERSSAETKRFLGISKAGSRLLRHLMVEAANVAVRHDEELKRFYQRLADRRGRPKAKVAAARKLLIRAYIMMRDEIDYAEFRRRAVAARLARLRHGPQGPGVVIGQPASSECQEPLTRVRK

SEQ ID NO: 393845 - protein, 375 aa, unidentified
MEKGSTYVGLDVHKETIAVAVAEGHGGEVRSLGLIPNRPEAVRKLVRRLGPAERLVCAYEAGPCGYVLYRCLTRLGARCVVVAPSLVPTKPGDRVKTDRRDAAKLARLLRSGEVTPIWVPDEEHEALRDLTRAREDARVDLLRARHRLSKFLLRLGLLPPAGVKPWGVKHRQWLQGLKLVRASQQVVLRESLLAVEQAQERLRRVEAELTEAARTSRHAAVIAALQALRGVGLVTAVTLVAELGDLQRFRTPREVMAYAGLVPREASSGPRQHRGAITKTGNAHVRHVIVEAAWQYRHAPGVWGALRQRQVGQPEAIKAIAWRAQDRLHRRYRRLLGRGKARQQVVVAVARELLGFVWAVAHAVKDGQQTGRGNA

SEQ ID NO: 393846 - protein, 400 aa, unidentified
MSPVVGLDVAKGESQVQAFLDKSKPFGKSFSMKHTREELHLFIGFLKEIEAMTGQMPMVILESTGHYHSPVVQYMEEHEVLYILLNPIISYQAKKSSLRKVKTDAIDAYQLCVLYYKEDFEPHKNRGLQLLDLRNLSRQQEIVTNMYVEAKLQFHTILDQVFPEYRKVFGDLYSKVSLLMLKEFPTSEDVLSAGECKLAERVMEFCPSRSSQWAREKAKKIMDSASRNPFRKIVYQSHLINLKMYIEMLFQYQGHLSILENRIVTLANELEDYEIVQSIPGIGEKIAATIISEIGEIDRFSHPKKLVAYAGVDSSVHLSGKFTATNNRITKRGSSRLRHALYLAVLCGIRSSRNKKLKEFYDKKKSEGKPAKVAIVACINKLLHWIYALLNRKESFLDIA

SEQ ID NO: 393847 - protein, 357 aa, unidentified
MKKGYQRAESLARESKVYVGIDVHKDSWHVTAVTEGEEVFHGRIPSQYLVLKKVLERFTGREVKVAYEAGPCGFWLHDRLTEDGIETIVVPPSLIPLESGNRVKTDKRDSRKLAQLLEKSMLKRVHVLSEEERLHRELVRTRRQFLEHRSDVMRQIKSKLLFHGIELPWTTGHGWNRQFVRWLRGLIDSHRVFAISLEFLIDLYEHLTDQLKKITKQVFLLSRNEKYAQNINLLRTIPGIGRLIATEILVELQDMKRFKSAEKIASYMGLTPSEYSTGQYTRQGRITRCGNTRVRTCLVESSWVLIYRDPVMKYKYEKLKIRKGAKRAIIAIAKNLIIRIRSMVLNNEPYNIGSIAR

SEQ ID NO: 393848 - protein, 363 aa, unidentified
MKSTTIWVGLDVHKESISVAVFEATRSQGRPAMTIPNEPGQIRKLFSRLKREGDVRACYEAGSCGYEVYRQLATMGITCDVVAPGLIPVRVGDRVKTDRRDAEKLARLFRAGELTSIRVPTEAEEALRDLIRCREDAREDVLRQRHHVLKFLLRRGRVFRETKHWTMAHWKWLRAQRFDESLAQLVFTEYVATLEKTLARVVVLDQEIAKQAEKEPYRALAGRLRCLRGIDTLSAMALIAEICDFRRFEHPRELMAYLGLVPSERSSGGKQRRGSITKTGNSHARRILVEASWHYRHAAARSATMKVRWKDQPQAVVEHSYKAQERLHRRYFRLTSRGKPSQVAVVAVARELCGFVWAVARAA

SEQ ID NO: 393849 - protein, 323 aa, unidentified
MQGKVSFQEDAMPVVYAGVDVSKEWLDIHLHPLGESRRFCNDKTGIRQLKRLLARHRLASIVMEATGKFHRPAHRSLWLDGFAVAVIDPLRARMFARACGYLAKTDRLDARFLALLAESLRPPADTPPSPHVEALQELVNARSAAKCDITALQNRSKTATTALLRGELNRLVRRLEQHVERLDKEIERRVGEDPQLYRKAEILTSIPGIGRVTALALMAGMDELGSCSGKQAAMLAGLAPIANDSGARTGRRSIRAGRPAPRRALYMAALSACRYNPALARFADTLKAAGKPAKVILVAVMRKLLVLANCVLSHDRLWTPNPP

SEQ ID NO: 393850 - protein, 474 aa, unidentified
MKKHKQAETKTKSEAIKPIGEREPDSAGIDLGANEIWVAVPADRDQKAVRQFGAFTRDLLAIVQWLVQLGVRSVAMESTGGYWIPLYQLLEEAGLKVCLVNARHVKNVPGRKSDVRDCQWLQYLHSVGLLSGSFRPAQAICASRSIYRYRQNLLSMAAQHVQHMQAALDQMNIKLHHVIDDLSGVTGQAIIAAILSGQRDPVQLAQLRDKRIKAPEAAIAKALEGDWRKEHLFVLAKAWAQYQELQKQIQDCDQELWSYTRKLEACTQVIKPAKVMRLKPQLMGVEPLSKPPIQKRLRRKTSKNQPEGPWQQELERFFGVDLTAIPGISVLTGLTLMTELGNDLGAFKTEHHFASWLCLCPDNETSAGKVLRRRTRRSQNRVRQALRMAASSLHHDKSYFGDKYRRLRARLGAPKAITAMAHQLARILWTLITRQLPFDPSVFAYHEKAHQQRRLKHLAASARQMGYHLTPLAA

SEQ ID NO: 393851 - protein, 299 aa, unidentified
MSQPGSLCVDIDVSKAILDIAASSAIEQFSVGNDSDGFDAIIAELRMYAIALVLMKATGGLETAIVCALQAEGFELAVVNPRQARDFARAMGYLAKTDSIDARVLSQMAEVLNRHPERERFIRALPDTECQVLTAMVVRRRQLITMLVAERNRLHPAHPLNRKSINIIIKALEDELARLDADMNSHIHSHFKELAKRLSSIKGVGTMTAAALLAEVPEQGNLSRREISVLVGMVPVNRDSGTMRGRRTIFGGRAGVRTALYMAALVATRFNPVIKVFYMRLLAAGKPKKVALVPVYASC

SEQ ID NO: 393852 - protein, 411 aa, unidentified
MDVVHARCAGLDVHKATVVAGVRMPSPRCGERCGETTTFATTTRGLRELREWLIAHGVTHVALESTGVYWRPVYAVLEGVVEMILVNARHVKMVPGRKTDVRDCEWLAQLLECGLLRGSFVPPADVRDLRDLTRLRKTLIRERSQHVNRVAKTLELAQLKLGCVVTDIMGKTGRAILQALSTGIDDPVRLADCAQGNLRKKRAALREALVGRLTPHYAFLLQQHLSLIDALDVHIATLDARIAEAMAPFAEAATLVQSMPGIAARAAQAIIAETGIDMSQFPTAAHFASWARLCPGNNESAGKRRPTTTGKGATWLRATLQEAAWAAVRSKKSYYRALYHRLRARRGPKKAIVAVQHAMVVALWHMLKHRVSHRDLGADYFDRQNTERIRRHHVRRLERLGYDVVLVEKAA

SEQ ID NO: 393853 - protein, 340 aa, unidentified
MSEITTIGLDLAKHVFQVHGIDAEGTTVLRKRLRRNQVLGFFSRLPRCVVGLEACATAQYWARELGALGHEVRLMPAQYVKAYVKRNKNDAADAEAICEAVQRPTMRFVAVKTAEQQAAQLLHRGREQLVRQRTMLVNALRAHLAEFGMVAAQGLRNVAQLIAIVRDASDLRLPDVARQVLQVLSAQLEHIEAAIAALEKQLMAWHKANAVSQRLASIPGIGPIIATAIATTVADPGVFRSGREFAAWLGLVPRQNSTGGKTRLGGITKRGNRYLRRLLINGASANLLRSKATKADPWVIGLRRRRPPLVVAVALANKTARIAWAVMLRQTEYQPRAVAA

SEQ ID NO: 393854 - protein, 357 aa, unidentified
MTKLNHAPCFSGTTIYFGMDVHLKIWNITLYNDQQYLRKFQQEANPQTLIKHLSSNYPGAHFKLAYESGFSGFWIQRAFAQAGMECMVVHAADVPQTDKGSKTKNDVTDSFRISEALKGGMLKPIFIPDTQTESDRTVIRYRHSLHKDLVRSKTRIKSFLNHFGVKLLPQFDNSKWTIALIQWLKELQLPHASMRLTLSRMIEQVEQLQLKLHELSRDIRAMIRSEQYCNTAKLLMSVPGIGALTAISMLTEIGSISRFPSFYKFNSFIGLCPTEFSSGETERKGHITPRHHSQLRSLTIEMAWTAVRLDPAINLAYHEYKKRMTAKRAIIRIARKMLSRIYYVLVKQQPYVNGIIK

SEQ ID NO: 393855 - protein, 393 aa, unidentified
MICVGIDVAKDKHDCFILNSEGEVLADVFTIPNNAEGFDRLLQTIRRCARPEDKMKVGLEATGHYSYNILGFLLNEGLPTYLINPLHTNLYRKSLSLRKTKTDRIDARTIAAMLMSDVDLKPYTDTTYHNEELKSLTRYRFDKVCERAKLKQSVSRLVTILFPELEKLVPTLHMASVYALLSEFPGAKQVAGAHLTHLKAVLYDASRGRYGREMATTLREAARCSVGSVMPAKSLELQHTIRLIRELDAEIEDIETAIQSMMDEIQSPITTIPGIGVRMGAMILAEIGDFSRFDSPDKILAYAGMSPSTYQSGQLSLSGTYSHMEKRGSRYLRYALYNATKYVCLWNPTFAAYLAKKRAEGKHYNVALSHAAKKLVRLIYAIEKSQKPYCSAA

SEQ ID NO: 393856 - protein, 417 aa, unidentified
MKSKTKKIGTINKKTLVVTLDIGKKIHYGYLRAPNGNDISPFAVYNFRKSFEQFWAKIAHFRKQQGLKDVVIGFESTGPYAEPLFHYLKDKPVTLVQVNPMHTKRVKELTGNSPGKTDKKDPRVIADVICLGHALTVVIPEGPAAQLRRLTQARERAITTRTTMVNQLQHLVFVIFPEFFNIIKSSTKTAMYLVKNYTTPETIYAMGIEAVTAVLKKVSCGRLGQKRAKKLFEAARDSIGIHEAKESILEEITHLVAQIESQDRFIDKLETQMAEFLGQIPYSGSILSIKGIGVTTAAGLIGEVGDFRNFRTISEVMKLAGLDLYEVSSGRHKGQRHISKRGRSLMRKLLYFAAINAVKSNGIMHEPYQRMLDRGMPKPKAVIAISRKLLRTIFALARDNSKYVKDYDQIRHYKLAA

SEQ ID NO: 393857 - protein, 368 aa, unidentified
MNNYTLEVARTAGAKELKNQKAAKAKRIVMGTDVHSRSYQAARKIDNGPIGAVAKFRSQEELLLYVEKQKEQAEEVVVVYEAGPLGYVLYRALKARGLRCYVCAPDSREQKRKRRKNNTIDTRTLTSNLFNYLHGNERALQLVRVPTEEQEQARWQSRQHDQLVEERKRLGAKGNALLLSRGFGSWKNWWRPKAFSRLSQLVPEWLLELLETWVDLLRKLDEKIRRAKVALAQRCSGLRPKGVGAPSLVQLQSEVLDWGRYRNRRKIGCLAGMVPSEWSTGDTQRRGSITKVGVGAIRRIITEMVWRIILFQPQYKAVQKWQEVLRGSNRGLKKKAVVAIGRQLMVDLWRLQTGRISAQELNLVMIGG

SEQ ID NO: 393858 - protein, 334 aa, unidentified
MEQITTAGIDLAKRVFALHGVDGAGRVGLRKTVRREQLMQTVAALPPCLIGMEACSGAHEWARRFQELGHTVRLMAPVFVAPYRKSGKNDGNDAEAICEAVSRPNMRFVPVKSAEQQAVLALHRVRQGWIEERTATINRLRALLTEFGIVLPNRAQHVRRGAHAAAEALPELARRAVQELRAHLALLDERIGAYDRELQAQARQSEAAQRLMQIRGIGPLTAVAIVATVGNARDFRSGRQFAAWLGLTPRQHSSGGKHRLGHISRRGDAYLRCLLVQGARSVLLTAMRHSDRMSRWAVSLQARCGYHKALVAIAAKNARIAWALLSKNQTLQTA

SEQ ID NO: 393859 - protein, 379 aa, unidentified
MTLDKYFRQCVGIDISKDKFTACLYMYDMASDAGCCTESIDFPNNRTGFNQMVKWSRKESQKGFPLVYLMEPTGSYYEPLAYHLHKIGQTLYVVLPNKARKFCEYEGIKTKTDAMDARCLALMGCKNRKLRPWEPPLPIYRELRQLTRLRADLVKMQTQMLNHIESIDHMEDVAPEVRKSYEKLLDTIEKQLEKNEKDIAAKLAQDKELETKVKRIATAKGIRVGTVTCIVAETQGFHLISNRKQLTSFAGLDVKARQSGKDDPRHHITKKGNAHIRAALYMPALSAAHCNRQMAQAYGRICAKHPDVKMIGVTAIMRKMLLLVYSLWKSGEEYDETRDNTHTPRKKEPQPTNSPEDCLKPNAEPPDWNAADKEGNPPF

SEQ ID NO: 393860 - protein, 449 aa, unidentified
MEAIYARCAGFDVHKKTVRVCLLIRQEHGKPHKEFRTYGTTTQELLDLLEWLLSQGCTHVALEGTGVYWKPIYNLFEGQIEVLVVNAQHIKAVPGRKTDTKDAEWIADLLQHGLLKASFIPSAPQRELRELTRYRVRLSEERAREVNRVQKTLEGTNLKLGDVVSDIMGKASRMILWAIVEGESDPARLASLAVGRVRASQEQLEEALTGTVTEHHQFLLREHLTQIEHLEAAVERITAEIARRFSLPDPPDDVAGSGAESSEGNEASTGSSQPILPPSKQGLNWEEAVNLLISIPGISERAASGILAEIGVNMQQFPTASHLASWAGVCPGNHESAGKRLSGKTRKGNPWVRRLLLQAAHVAGRQKHGYLASQFRRIASRRGKKRAGMAVAHSILVIIYYLLRDGVPYEEKGDAFFEEQDREFIERRLVRQLEKLGHQVTLQPLGQAG

SEQ ID NO: 393861 - protein, 331 aa, unidentified
MKKKDVIGIDVSKLTIDAYLKLAQAHAVFSNDTKGFRQLVKWIMKHTDCKSEELLICFETTGLYSLQLASFLSQSNIDFVMENPIQIKRSMGLVRGKDDHVDSKRIAEYAYMRKEKLKLTQLPSEELIKIQNLLAIRERMIRQKAGYQASLGEYKRVLVQQQQKDFFLLLNNMINALKKQIRKAEETLIEIIHSSSKLLNIYTLLTSIKGIGVILAANIMVTTICFTKFNDSRKYACYCGTAPFKYSSGTSIIGRTKVSQMANKKMKALFNLAALSAIQHDPELKLYFDNRMANGANGMSTINIIRNKIIHRVFAVVKRGTPYVVMAKYAA

SEQ ID NO: 393862 - protein, 326 aa, unidentified
MEHELHYIGIDTAKEKLDVDVLRPDGRHRTKKFANTTKGHDELVSWLKGHKIDHAHICIEATGTYMEPVAECLYDAGYIVSVINPALGKAFAQSEGLRNKTDTVDARMLAEFCRQKRPATWEAPHPLERALRALVVRHQALTDMHTQELNRTETAREVQRPSIDAHLLWLEAELKRLEKQIKDLTDDDPDMKHRRKLLESIPGIGEKTSAVLLAYIGLKDRFAHARQFAAFAGLTPRLHESGSSVRGASRMSKAGHVSLRRALYMPAMVATSKTEWGRVFRDRLAANGKKGKVILGAMMRKLAQVAYGVLKSGVPFDVSRHNPVAA

SEQ ID NO: 393863 - protein, 317 aa, unidentified
MAELCGVGIDVAKATLDVAWSTNPVARWQTSNDETGWVALIAHVRTLDPAVIVLEATGGYETGVATALSAAGLPVAIVNPRQVRAFAKALGLLEKTDALDAAVLAAFAARIQPTPRPLADDLQADLQALVTRRRQLVEMLTAERNRVPLARGAVRKNLLAHIAWLDKQLGKTDHDLRTRIEASPIWRVRDQLLQSVPGIGPTTSARLLASLPELGTLTHRQISKLVGVAPLPDDSGTHRGYRRIQGGRREVRTALYMATVTAVTHNPTIRAAYRRWRAAGKLPKVALVAAMHKLLIHLNAMLKHHTLWQPSPTAPTA

SEQ ID NO: 393864 - protein, 340 aa, unidentified
MKIIGCDLHAAQQTIAMLDCETGEVVEQTLKHEADTVRDFYAALPAPVVVGLEATGSMGWFLQLLDELSITYRVGHPATIRRAETRKQKHDRRDAALLLQLLSENRFPAIWIPSTELRDLRALLLHRHQWVRLRTRVQNALHAIALGYGVQRGHALWSRDGQAMLAILPLPPHAAHRRDELQALYQQLDEQVDRLDNRVRHAAAQRPRATELTTHPGVGHVTALATEVFLGDPTRFADGKALASYVGMIPSEYSSGARQRLGGLSKQGNPILRFLWGEAAIHAVRRDPELQRFYRRKLQQKGLGKARVAAARKLGIRLWIMLRDRIDYAEFCRRSPRRQS

SEQ ID NO: 393865 - protein, 401 aa, unidentified
MVSDFMKGRYNLMKIFVGIDIAKLNHFAAAISSDGEILIEPFKFTNDADGFQLLVSKLESFDKNSIIIGLESTAHYGDNLVRYLVAEFYQVCVLNPIKTCQMRKNNVRKTKTDKVDTFVIAKTLMMQDSLRFVTYYDLDLINLRTLGRLRQKTIKQRTRLKIQLTSYVDEVFPELQYFFKSGLHQKSVYALLKEAPTPKEIASMHMTHLANLLKVNSHGHFTKEQAKELRILAQKSVGANDSAISIQITQTIQQIELLDSQLEKIEAEMTDIMKFNDSVIMTIPGIGYINGGMILGEIGDIHRFSNPNKLLAFAGLDPSVYQSGNFQAKTTRMSKRGSRVLRYALVNAAWNVVRNNATFKAYYDAKRAEGRSHYNALGHCAGKLVRVIWKMLTDEVEFNLE

SEQ ID NO: 393866 - protein, 340 aa, unidentified
MSLYGGIDLHANNSVIVLLNEQDEVIYRKRLPNALPTILEQLAPYHTEVKGLVVEATYNWYWLVDGLMEAEYRGHLANPAAMQQYSGLKYTDDHSDARWLAHLLRLGVLPEGYIYPKAERAVRDLLRKRAHLVRQHTANVLSVQNIMARNTGARFSVKRIQELTQQELTTLLAEETQVLAVTSSLMVLDCLRHQIKTLEQSVHKRLHHTPAYEQLLTVQGIGTILAQTITLETGAINRFPSVGHSASYCRCVDSTKLSNGKRTGTGNVKNGNPYLAWASMEAAQFAMRFQPEAQRFYQRKLAKSRNNTILARKAVAHKLARACYYLMRDLVPYEATQAFG

SEQ ID NO: 393867 - protein, 368 aa, unidentified
MMIIGVDYHPSDQYIAFADTETGECGERRLNHSDGEAEKFYRDLQSRAASVRVGMEATGYSRWFERLLAELGIGLWIGDAAEIKTRRVRKQKTDSNDARLLLKLLLEDNFPRIWVPSPENRDLRQLLWHRHRMVQMRTRIMNQLQALAMNEGQRRKRKLWSEQGRAQLETLPLAPWASRRRNDLLELLDRMNPTIEELTRAIEREARKRTEVTRLMTHPGVGPITALAFTLIIGTPKRFGCGKQIGSYVGLIPAEDSSAGHQRLGRITKQGSALLRFLLVEAAQAAARCDADWRQRYMQLAMRRQRNIAKVAMARRLGVRLYWMWRNGWEYSEWVKFGSNAGQLGTGHSVHSNAVHLNGHPALSQEGV

SEQ ID NO: 393868 - protein, 347 aa, unidentified
MRFYTQSHRYYCGIDLHARWMYLCILDPQGEVLLHRNLRACPEAFLKAVEPYRQDMVVAVECIFSWYWLADLCAQHGIEFILGHALYMKAIHGGKAKNDKIDSQKIAVLLRGGMIPVAYVYPPEMRSTRDLLRRRTYLMRKRAELLVHVQNTNSQYNLPEIGKKIAYRANRSGVAERFSDPAVQTSIAADLSLIDFYDTLLNQLELFITSQAKQQDHHSFYLLRSVPGIGKILALTILYEIHDIARFPRVQEFVSYCRLVKCSRQSAGKNYGFSGKKIGNVHLKWAFSEAAVLFLRNNPEGQKLLARLERKHGKAKALTILAHKLARAVYFILRREKAFDLTQFLAA

SEQ ID NO: 393869 - protein, 379 aa, unidentified
MTTLSMAAAFRAIQAAEAPATPPSVVLGVDTHKDMHVAAVLDHLGGLLGTGEFPATLAGYRQLLNWARERGTVLRAGVEVTGSYGAGLSRYLATERVAVVEVNQPDRSARRRRGKTDAVDAEAAAWAPLSGIARALPKSGDGQVEALRMLRLAKNSAVKARTQALNQLKAVLVNGPSALREELEPLSTWLLVRRCAELVDSRSEDPAADTAVFTLRLLAQRVWRLRQEVTELGRRMTAAVKATAPSLLERFGIGPDSAAALLIADGDNPERLGSEASFAALCGASPVEQSSGKSQRRRLNRGGDRQANAALHRIVVTRMRQDERTRGYLERRTAEGKGKREVMRCLKRYVAREIYALIRADMVTCDRQPDDPATLTTAA

SEQ ID NO: 393870 - protein, 344 aa, unidentified
MSKHSVPGGDFAGLMERFAQLQEKARLRTGQSFRIIVIQEAGLDGFWIHRALQNEGIESHVVDAASIATSRRRRRAKTDKIDGETLVRALLAYKRGEPRVCAMVKAPTPGEEDRRHLCRERKALTAERVRHVNRIKGLLFSQGISGYQPLRRDRRQRLEELQTGDGRAFPQHLKALVNRELDRLELLLKQIKTVEAARDALLAVGQTAKPAPAAMLLDIRGIGPEFAAILWSEGLFRHFENRRQIAAYAGLAPTPWQSGAVDREQGVSKAGNPRLRTTLIQLAWLWLRNQPRSALSVWFHERVSRNGGRLRKTTIVALARKLLVALWKYVTAGVVIEGVTMKVA

SEQ ID NO: 393871 - protein, 421 aa, unidentified
MEVIIERVAGLDIHKKSITACVRTPDGHGGRAEQVRTFSAFLGGLEALRAWLLEERVSHVAMEATSSYWLPVWRVLEEGEVFVELLLCNARHIKHVPGRKTDVKDACWLAQLCEVGLLHGSFVPPPEIRRLRTVTRYRKRLVQLRTSEVQRVEKTLEDAVCKLGSVASSTLTKSGRAMIDALIAGERDPETLAELAKARLRNKIPELTEALDSRFDDHHAVQLRQLLDHIDWFDATIDGLNQRIVSMTQPWSDVIERLQTIPGVGRRTAEVIVAETGAEMSRFPDHRHLASWAGLCPGHNESGGKRRSGRTRHGDVWLADALTEAAWAAIRTKDTYLQAKFWRVAGPRADSHARSKAAIAVAHKILIAAYHIMAAPDAVYHELGGDFFASRDNPERRRDRLVSQLAKLGYDVDLTPTVAPA

SEQ ID NO: 393872 - protein, 380 aa, unidentified
MARKKDMTVRDEDTAKTPTIYVALDLGRRRWTVGVLLPGDRAARIFQIASGDREGLSRLIGRQREIIVGPDVRVVSCYEAGRDGFWLHRWLRDQGIDNRVLDPTSLEVPRRRRRVKTDRVDTLGLLRVLLRLDRDETEIARAIWVPSPPIEDARQRTRARERLVKERTAHLNRIQGLLVAQGVTSVKVGARDWLDQLTAERTGDGRPLGAALLADIRREVERLALVERQIEEVEAAQRAVLKTHTPLAVRARKLKRLKGLGEVFANGLTHEAFWRDFENRRQVGGAFGLTPWPWESGDTHTDQPISKAGNRRARTLAIECAWMWTFHQPGSALTRWWQQRFARGSKRQRRIGIVALARKLMVALWRYLKEDLIPEGAVLG

SEQ ID NO: 393873 - protein, 402 aa, unidentified
MKKSSRMSVIHPHAAGVDIGAEFHVVAVSPDADAAPVRTFQSFTGDLHRMSDWLKTCHITTIAMESTGVYWLPAFEIPEAAGFNLILVNARDAKNVPGRKTDVNDAQWLQKLHSFGLLRASFRPEHDISLLRSYLRQRERLTEYRAAHIQHMQKALMQMNVQLHHAVSDITGVTGLSIVRAIVSGERDPSVLIQYRDVRCKKTPEVLQQALTGNWQPEHLFALEQSVAFFDFYQEKIRECDDQIETSLLQLSTGTEEPEGVLPSARHRTKQPNQLSFDVRPLLWKITGADLTQIHGFGPYLALKFVAECGTDMNRWPDASHFTSWLCLSPGNKISGGKVLSSKTRRSSSRIAAALRLAATTIGRSDTALGAFYRRLSSRIGKAKAVTARARKLAILFYNALK

SEQ ID NO: 393874 - protein, 452 aa, unidentified
MAKKSKRRCDTLPVLHPDAAGIDVGASELFVAVSADRDPHPVRSFPTFTRDLHALADWLEQCGIHSVAMESTSVYWIPIYQILEARGLEVYLVNAQHVKNVPGRKTDVSDCQWLQYLHSVGLLRASFRPPGEICAIRSLWRHRSSLIQMAAEHVLHMQKALDQMNLQIHRVLNDITGVSGLKILDAILEGQRDPVFLARLCHGGVRSSEDTIAKSLEGDYRSEHLFALRQSLTTFRYYQQLVLEVDREIELQLGDLKTAATAERTTPARTKARPYQRCRYEPKMFDLRAELYRIFGVDLTNVPGISAITAQTILCETGTDVSRFRNASAFASWLGLCPEKKISGGKVLFTKSRRIRSRVATALRMGAQSLHHAKDYLGEFFRRIVRKLGKPQAITATAHKLARIVFHILNTKEPYSETVFHKSEEETMRRAEMRLRKQAAYLGFHVVPAENG

SEQ ID NO: 393875 - protein, 328 aa, unidentified
MGDLSIGMDVSKATVVIAVHPSGERWTSELTPAGIEAVVTRVGALAPSVLVVEATGGYERALVAHCAAAGLPVAVVNPRQVRAFAQALGRTAKTDAIDAEVLAAFGARVQPPPRPIADAATQALAALVTRRRQLVEMIGMERRRLEHAPPTGKITRELRHHIRWLERRVEDVDDELGTAIEASPLWRVHEDLLRSVPGIGPTTARTLLAELPELGQLERRAIAALVGVAPVNCDSGQHRGQRHIWGGRASVRTALYMATVTATRHNPVLAVFYRRLRAGGKPAKVALVATMRKLLTILNAMLKHQTRWTAQVASTPASLARRARAATV

SEQ ID NO: 393876 - protein, 421 aa, unidentified
MKGLRTKRGNVVREGTLIATVDIGLTGNVGYCTTLEGRSTKTFKFDNTREGFEKFWGMVVASKNRFGCDEVLVGYESTGPYAEPLVHYLVNKPVNLVQVNPMHTKKMKEVQDNSPLKTDDKDPRVIADIIRLGRVLTIIVPEGDAAYLRRLTNARERHVKERTALLNQIQQLVFLIFPEFKTVLKDMKGKTAQYLLKRYTTPERIGSLTKEALGKAMWKRSRGKFGFRDAESLIALAQGTVGIQEGLAGIVMDIRHILMQLEAEERFMAEIEAEMEVTLGRIPYSTRLLSIKGLGIVSVSGLIGEVGDFSKFSTQSEILKLAGLDLYEISSGKRKGQRRISKRGRGLLRKILYYAAIQTIRKNGILYEYYTRLTDRGMTRMRALIAVSRKLLGIIHALVRDDTDYVGQHQAPERRLLKKAA

SEQ ID NO: 393877 - protein, 390 aa, unidentified
MSVSPSVALPAARGEHVTMHVAFELSKMKWKIGIVAPGSSKMSRFTVAGGDRVGLAMLLARKQGEAAARCGRPVRIVSCYEAGYDGFWLHRRLGEHGVENHVLDPASIEVERRHRRAKTDRIDLDKLMRVLLALCRGEPRVCSVVRVPSVEEEDAKRRNRERERLIRERTAHVNRIKALLHGQGIRDVKPLAKSFATQLAVRHTGDGHDLPPLLAAEIAREHTRLRLIVEQIGVIETESRQALHKAPAHATAAARARQLNRLVGIGMAGAQTLANEVYYRAFANRRQVGGYTGLTGTPYDSGETRREQGISKAGNPRARAILIELAWLWLRLQPDSALTRWFKERVGNGKGRIAKIAIVALARKLAVALWRYLETGLVPTGARLRAGVAG

SEQ ID NO: 393878 - protein, 472 aa, unidentified
MARAARRPGARQYPKRRSSRGRSAPFEQMHLNAAGIDVGATEHWVAVPEDRDEEPVRRFGAFTAALYVLAEWLRQCQIETVVMESTGVYWITLFEVLEERGFDVKLVDAHDARQVPGRKTDVKDCQWLQELHTYGLLRGAFRPEDQICVLRSYLRQRSMLVAMASRAVQHMQKALEQMNLKLTEVVSDINGKTGMEIIHAILAGERDPQRLASHRDRRCKHDQATIAKALEGHWRAEHLFALQQALEQYAFLQQQLQACEQQIEECLQTFVTHVEVEPPQPTPARTRRARQRQAPSFDVHKYLDAMTGVDLTQIDGIDALTALKVISEIGLDMTRWPTGKHFASWLGLCPGNKVSGGKRYRMRSKPTANRAASALRLAAQGLVKSHSALGAYYRRMRARLGAPKAITATAHKLARLVYSMLRYGTAYVDAGQQAYEQKYRERVLTNLQRKAKAFGYQLVHVEDLDGGVVSTL

SEQ ID NO: 393879 - protein, 428 aa, unidentified
MSPLLEQPFTAWVGIDWADTKHDICVQAAGDTRRESGCIAHQVAAIDEWANALHRRFGGPIAVALELAKGPIVAALQKYDFLVLFPINPATLARYREAFQPSGAKNDPGDAELALDLLLHHPERFGPLRPQSVPMRSLVSLVERRRQLVGDQNRLTNRLCDTLKQYYPQALEWFDDRGTVLFCDFLERWPTLRSVRQARTAVLETFFHAHHCRSASRISARIESIRSAAALTDDPAIIGPCRLHVLALVAQLRAVLAAIVQFDLEIAAVVHTLPDYALFEDLPGAGACLAPRLLAAFGEQRERFRSADELQKYAGIAPVTERSGKKSWVHWRLQCPKFLRQTFVEWAAQTITRSFWAGAYYRQQRAKGSSHHIAVRALAFKWIRILYRCWQTRTPYNETVYLNALVKRGSPLLGKQGDSVKMGSCSPV

SEQ ID NO: 393880 - protein, 371 aa, unidentified
MSSVSLPHRGLTHLGMDVHKDSISIGILAPEDDVPEVEKIFHDEASVRRFVARFPDTRRLVACYEAGPTGYELYRLLISTGVSCQVIAPSLIPRTAADRVKTDRRDCRKLARLHRSGNLVAIRVPNRQEEAIRDLCRARADMVEDLDRARKRLGAFLLRHGEVWRGGSAWTMKHHQWLTARRFDDPAMAATFAHYRSVVDARSRELTAAEADLAPWYGRDPFADSVRRLGAYRGVAQLGALTLASEVGDWRRFGRASAFMGFTGLVPSEYSSGGKTSRGHITKAGNWHMRTQLIESAWAYQSGPSVGVELRKRQDGVDADTVKRAWAAQTRLCGRFRRLAARKNSKNVVAAAIARELCGFLWAEMTAQKSA

SEQ ID NO: 393881 - protein, 315 aa, unidentified
MAMPVATTQSIVGVDVAKDELVIYHVESDRLETISNTKPAIKKWLKTVAKPVAIAIEATNIYHQEFAELAHADGCRIYMVGGYELSHYRKGVNVRAKTDALDARLLARYLTNEGDHLRPWTPPSPLYCRLISLFRRRAALVQARVSLKQSWENEPLLKTAFKNQISAMQRLETLLEKTILTQIEEAGLGAQLKRCMKVEGIGTLSGARLLASFQRGDFRNADAFIAFLGMDLRIADSGKKKGRRCLTKRGDPEARRLLHNAAMAASRTSVWKGFYEAMRGRGLSTTQALVALARKLARVVFALLKNQSEYSPKGV

SEQ ID NO: 393882 - protein, 369 aa, unidentified
MPHVTSIGLDVHARSVAAAAFNPFTGEVVRRSFGTDASEIAEWALGFEDPRACYESGPTGFHMARELRALGLDCAVAAVSKMQGPAADARRKNDRRDAEFIARMLATHNIVEVPLPDTAVEAARDLDRALDDAARELRRSRQRLNMFLIRVGHVWDERNADGARKRAWTRAHWRWISEIRLEGPQRDVLEYYVTAARCAESDRRQLEKKVLALARTDRWRPAVEALSCIKGIDTLTAFRLAAEAGSFTRFRTAPAFASWCGLVPSERSSGETERRGGITKTGNRLARTALVESAWHYLTCTPRPKAPAPGADVPAAIRAPRDDCTARLCRRREALAAAGKSPCKANAAVARELACWVWEIGRRAEGALS

SEQ ID NO: 393883 - protein, 369 aa, unidentified
MNKTNEENWSNGSKEASVTDNGKRVLRLGLDVHYRQVTVAIQEDGGRIKAAGRMKHPVFVDWIQKKLDQGWEICSCYEAGASGYWLHRRLEQMGVQNLVVVPKAMGQGGKKQKTDKRDAGELCDSLDRYLRGHDKALSVVRVPTQDQEQKRALIRYHRQIMADRGRCEARGKGLLCAQGIEVQGRWWEGHGWLEVQSDPQLKDWMKEQLIGWRNKILSLDEEQSGLRARVAALAPALLPKGVGAYSAAVLYYEMRGFERFKNRRQVGSMTGLCPGVHLSDGRGKEGSINRCGIGIVRWTLVEMVWRLMIWQPQYPPVRRLAAGLVKGKRAKKRLVVQAARRLAIDLWRLSTGQTTPEKLGLIMHDTSVK

SEQ ID NO: 393884 - protein, 323 aa, unidentified
MPRTLVGCDLARGWIDLHRLPSGVSERIANSPDAVDATVAAPPPDALVVFEATSGCDGLLIAALAARGLAFSRVNPRQAREFARALGVLAKTDRVDARVLAEMGARLPLPRTAPSSPVRAKLACLLRRRRQLVEMRKAERMRRHDAGRAEIGRMIRILGRRIDALDALEAEIAAAIEGDPHTAARARLLRAVPGVGPTVLAVLLGELPELGRLCRRRIASPAGLAPHARESGTWRGTRRIRGGRRRVREGLYIAALSASRSVPAPKPSRDRMRAAGKAPKTALIAVARQLLVMLNAITRTGQPIRLRTRLPPSVAPALEGRAQ

SEQ ID NO: 393885 - protein, 400 aa, unidentified
MLSIGIDVSKGKSTVCGMKPGGEIVYTPFEVQHTREGMSELVSLLRGSGEEVRVVLESTGSYHCPVVAALLENGIFVSVVNSLRMKRFCSQSIRRVKTDQIDAMQIALYGLAYWQELQPTRLPENTYRELQLLARQYYQMTSLLIKAKVDFNALCDQVLPGMQELMSDHAGRHKLSDFVLRYRHTTHILKMGETRFRKDYCKWAEKKGYRNHERMAALIFATAQNGIPVLPNAPSTQIVITEAIRVLHTVEASRDAILTQMQALAKTLPEYSLVREMPCIGDTLAPRLIAEIGDVRRFHSKRALIAYAGIDAPPYQSGKFCANNRHISKRGNRYLRKTGYEVMQSYVMHKPANDPIFTFIEKKRSEGKSGKLAMVAGLNKFLRVYYGKVTELYRSLPAIE

SEQ ID NO: 393886 - protein, 347 aa, unidentified
MNIIGCDFHSRMQVIAMLDTETGEVVEKKLEHENGEAKAFYEGLKEPALVGIETTGYTRWFAEMLQELGHELVVGEAAKIRALKTRKQHHDRGDAQHLLNLLVRGDFPKIWLPPAEERDVRVLIEHRHQLVELRTRAQNGLQAVALSYGLRRRGRLWSQAGQQELQKIPLREGMGRRREDLLRLVRQLSTWIKELDQRIEEEVARREDAQRLMTHPGVGPQTALATVLVLGPVERFPDRQHLTSYLGLIPEEESTAGRQRFGHLTKQGNRLMRFLLVEAAQTASRYDPRLRRVYRRLVFRKGAPIAKVAVARKLAIRLYIMLRDGIDYEEFCRRGSHAGMLGDVALV

SEQ ID NO: 393887 - protein, 382 aa, unidentified
MSEIIRIGIDTSKSVFVLHGVDGTEKPALRKKLRRRDLVDFLAKLKPTRIGIEACGAAHHWGRTFQTLGHEAVLLPTQLVKPYIARNKNDSADAEGICEAMSRPRMRFVPIKTAEQQAAQMLIGLRDRLVRQRTQVSNAIRGYAAEFGLVAAKGLDKIEPLLARIAAAPDLPDLAKELFALHSQEYVQLKVRLRQIEAKLMAWHRHNKLSRRLAEIPAIGPIGACALAIKVTDPGAFRCGRDFAAWLGLTPKDHSTAGKQRLGAITRAGDEMLRSVLVAGATAVIQQARRGRGKATPWLIDLIKRKPPKLAAVALANKTARIAWKLMVSGERYDPHHQGRGRSNPPSPPAASIAPCSHRQGRCAPPTGGGLRPALTALARGA

SEQ ID NO: 393888 - protein, 356 aa, unidentified
MNIIGCDFHSRTQVIAMVETETGEVIQRRLDHESGEAKAFYEGLKEPALVGIESTGYARWFAEMLAGLGHELVVGEAAKIRARETRKQKHDRRDAEHILNLLVKGDFPKIWLPPAEERDVRVIIEHRHQLVELRTRAQNGLQAIALGYGLRRRHRLWSAAGQVELQKLPLREGTARRRQDLVALVRQLNVWIKELNQRIVEEAGRREDAQRLMTHPGIGPQTALATVLVLGPVERFPTDRHLTSYLGLIPQEDSSAGRQRFGHLTKQGNRLMRFLLVEAAGIATRYAAGLRRTYRRLAFRKGAAIAKVAIARKLAIRLYIMLRDRIDYEEFCRRGPVPDGAGRGSHAGMLGDRTLA

SEQ ID NO: 393889 - protein, 330 aa, unidentified
MDGTSVGIDVSKETFVIAVTPTHDRWTSETTAAAVDGLVARLVQLQPAIIVVEAAGGYERAMVAQCAAAGLPVAVVNPRHVRAFAQAMGRSAKTDDIDAAVLADFGARINPPTRVIADAETRALAALVVRRRQLIEMIVMERQRLAQAPPTGKITRDLRNHIRWLERRVQDVDDEIGTAIQASPVWRVHEDLLRSVPGIGPTTARTLLAELPELGRLERRTIAALVGVAPLNCDSGQHRGQRHIWGGRASVRAALYMAALSAIRCNPVLAAFYQRLRSTCKPGKVALVATMRKLLTILNTMMKHQLAWNPKAASTPASPSRSARAAAVLA

SEQ ID NO: 393890 - protein, 382 aa, unidentified
MKGNVCGLDVHKDNVFVCILKENGEKILQRVGILTPELDSLRDLLVSHGVGEVCMESTSIYWMPVWRVLESDFHLWLVNPLAIKQLPGRKSDVKDAEWIATCLKKDLVRGSYVPEKIIQQLRQYNRRVFDINKQMTFLYNKLDAALQRCNIRLSNYVSNVDTKAYRDVVEELSKGVTEPDTLLGHIHKRTKNKWGEDVLRAALTGVVSEVDSELTGMYREEIELLRTQKAKCLSRMREICQKHFPEQMKNLQTMPGVREQSATQIIAEIGVDMRTFLTAAMLVGWAGFKPRNDESNRKLKSRSITHGNKYIKKLMVECAWGATRTQGCFYSQFCYHQTQVRKKNAMKVRVAVARKQLVGIWHILSEGCTYKEYSEKKEDGES

SEQ ID NO: 393891 - protein, 366 aa, unidentified
MAITHVALDDSKRVIVAGILRADATQPELREIPNDPRQVRRLFERLLREAPVRACYEAGVSGYDLYRQLTALGVDCAVIAPALTPRKPGERVKTDRRDAAKLVRLFRAGELTAIHVPTEAEEGVRDLTRCRDDVRADIVRWRHRVLKLLARHGRVYQAAKNWSQAHWTWIRAQRFEDVPLARTLEASLEALEQALRRRADLDRAIDGLASEPRYRDAVGPLRCFRDINTLSAMILVAEIVAFERFRRPRALMAYLGLVPSEYSSGDRHRRGALTKAGNTHARRVLVEAAWHYRHRPALGPRLVRHTADQAPAVVAEAWRAQHRLHRRYRHLVGHGKRPTVAVAAVARELAGFLWAAMTQAPRVRAA

SEQ ID NO: 393892 - protein, 315 aa, unidentified
MTKPLPAINVGVDVGKSQLDLYLLERGKPITLPNQEPDISILIRSLRRCRIERIVVEATGRLEQPFVRAALAAGLPVIVVSPLKIRRFAEVIGQLAKTDAIDARLIAQFAATVKPTARPASNANAQAIKDLVVRRRQLTTLRTMEKNRRQVMPQELKSSIDRIIKMLNHELKLLEQLIDDAIEQHAASRHKRELLTSMPGIGNSVAATLIGDLPELGSLDRREIASLTGVAPFNRDSGTLRGKRRIRGGRSQSRTALFLSAMVATRFNPDIKRFYARLLAAGKHKKVALIACIRKIVTALNAMLRDNVPWRLAIA

SEQ ID NO: 393893 - protein, 381 aa, unidentified
MQRIDPHQIRTAAEGYDTTIYVALELSKASWLVAINAPGGDKVSKYTVAAGATTALSAILTRARAQAERWCGESVRIVAIHEAGMDGFWVHRWLEAQGIESHVVDPASIAVDRRKRRVKTDRIDVEKLLRTLMGWARGERRICSMVRPPHPEQEDERRLTREREILVGERTRHVNRIKGLLMTQGISYFQPLRRDRRARFEALRLWNGTTLPSRLKAELLREFDRLELVMNQIQVIEAERDRALQIKSRDTIGALLVRLRGIGPEIASVLCGEMFHRDFVNRREVASYAGLAPSPWKSGTIDIDQGISKAGNPRLRKTTIQLAWLWLRHQPGSSLSRWFHARVGDRRGRIRRITIVAVARKLLIALWRYVTLGLVPEGALV

SEQ ID NO: 393894 - protein, 410 aa, unidentified
MTAINQFAAHVGLDWADKKHDVCVQFKNGERVFHVIEHTAEALDAWLTELHQKVKGRIAVALELKKGPVVYALQKYPFITVFPVHALSLARYRQAFSPSGAKDDPQDAELALELMLRYPQKIKAIEPDNSDIRLLQQLVEQRRQLVEDKRRFVNRIINTLKQYYPQPLEWFSHRGSLLLCELIIRWPSLQQLKRARRETIRNFLNAKGGRAMALTEQRVVSIDNAISLTTDPSVIEANALMATALATQIKVVSEIIKTYDERIETLFDTLPDATLFKSLPGMGPCMAPRMLAALGDNRDRFNSAEEIQNYAGIAPVTERSGQKSWVHWRWQCAKFVRQTFVEWAAKTVNSSYWAKMYYQGLRERGKSHQSAIRALAFKWIRIIYRCWKTRTQYDEAKYLLALEARHSPLL

SEQ ID NO: 393895 - protein, 477 aa, unidentified
MESIEFKFNVDWRSNPFFCGLDVHKHELAVAICSAEYRDAKIVSRAIFSVNSEGLERFWNYIKKYQPAGFAMEATGIFHHVIHNFLTEKLTTVDWRSEIVVTNPADANSLPGRQKNDKIDSESLAKYLAHGMLKKGKPVSSVLEDLKAIFRMTHRLEKDKTALKNRIIKTLDRAGIRPKRLDLNKNWTCQLLYHFVQFQGTLGAFLDEIFTKDCPLELQRNIIKKNLSLFEPFSRFSLTSVQRTLVRQDLVDLDFKAGRKDTLIVEIGQVIEQYPDLRLHASNLASIPGISKATAVWILSEIGSVKQYPTSRAFAAYCGCCPRIVSSAGKVYSAHISRHSNAYLRTIFYNAAIVICNLLKQDSELKRYAVRAMQRKEKRAFKLAVCNIATKLTKITYAILRDGVAFDPEFSRPTKKSSKEYKGQEFSLVDKKIIRHARNALLRVSQMENSQEQGLIGKDLENLAESLDALLKGKKII

SEQ ID NO: 393896 - protein, 374 aa, unidentified
MSQSSTLYVGMDVHKESIAVAYVAQDHGAEVISLGTIGTRQCDIDKLLRHLQSKGQQLVFVYEAGPCGYWLYRYLLKKGYVCWVVAPSLIPKKPGDRVKTDRRDARQLARLMRSGDLTPVYVPAVDDEAIRDLSRAREDTLRDLKAAKLRLKAFLLRHDIRYTGRANWSPAHLRWLSEVVCPTPAQQIVFQEYVQTVTERTERLGRLELELHEQVQTWRFAPVVEAFQALRGVQFTVAVTTVAELGDLTRFENPRQLMNYLGLTPSEYSSGARRQQGSITKTGNTHARRALVEGAWAYRYPAKVSRHLQLRLEKLPQAIQAISWKAQVRLCKRYRQLMAKGKNANQVVVAIARELSAFMWAIAKQIHVPPKAER

SEQ ID NO: 393897 - protein, 424 aa, unidentified
MKVTYQTCCGVDVHKSFLVATIVKTTGGIEPSYQKKRFSTFNHSILEFKQWLLENDCHDVCMESTGKYWVPAFNLLEDEINVTIANPKWVKAVKGNKDDTKDSKWIGDLFRLGLVKGSYIPCKKIRILREYTRYRYKLVSCRSSEKNRYQNALTVCNVALDSVVSDIFGKSSTSIIDYLLEQADNSINHEEIASKLLRRLKSKEDAVIESIEGYQMTDSQKYRMRLVRAHMDYITAEINDVDSMIESMISSDPDYENAIQFLMTIPGVKRDSAITIISETGIDMSQFCSSKRLCCWAGLVPGSNESGGKKKSVRIARAGVYLKPALVQCAHAAVKSEKSPYYKKKYESLMKRRGKKRAIVAVARMILTAIYQMLSTGEAWNPSDLYKIDMPEALLEKQKTKAIKQAMKLLQREGLYPPPEPIAS

SEQ ID NO: 393898 - protein, 422 aa, unidentified
MSYCPVAGIDVSKRFSDMCILSPDNKIFAQEKIYHDETSINRANALLQKAERLFFSKPVIVMESTSHYHLILFQFFLEHGYDVIVVNPLQSNSMKDFSIRKRKTDRVDAFKLAMMYRTKTLRPSQIPQTATRALRQLCRHRAELLNDVSSYKNRLTALLDQTFSGYDKVFSDVGGVTSCAVLVRFPTPTILLVEEESELVEVIAAASKSGYSFAKKKAGLLISAAQKAQTLGIHSCADETLIVCTIQMLRTLSESVLQIETAIDNLLAQIKEMRNNVSLLQSIPGIGSHSAALLLGEIGDISLFKKPKQLAAYFGLDPTERQSGSFRGTKNKLSKRGSSYARAALHMGIVNSICKRGKDSAANPVLLSYYEKKCKNKPAKVAQAASMHKLVFIIFAVLRDQKPFELKTPEQHAVEQGFVKAA

SEQ ID NO: 393899 - protein, 395 aa, unidentified
MRRDTKEVLTELVGKLKEKLDPKKPAATSAGEKHKRGELRPNLDRLTVGVDLGDRWSNYCILGLEGETLAEGQLRTTQEDLAEFFQALNAARVVFEVGTHSPWVQEVIGGCGHEVLVANPRMMDGSKRRKRKNDRIDANKLARLGRVDPQSLHPIQHRSREVRQDLVILRARDALVAARTELINATRGLVKSMGTRLPKCSSPSFAEKVEGTVPAELRDALLPLMRMATALSDCIQEYDEKIEKLGREKYGHTELLRQVKGVGPITALAYVLTLENPDRFVKSRDVGPYLGLVPKQEDSGESQPQLGISKTGDTMLRKLLVGSAHYILGPFGPDTDLRRYGLRLCERGGKNAKKRAAVAVARKLAVLLHCLWVSGEVYEPLRQGTSATIAPAVAA

SEQ ID NO: 393900 - protein, 348 aa, unidentified
MVLIGCDFHPSWQQVSWLNRETGEAGDQKLVHELGAVEKFYLQFPAGTRIGMEATGNCQWFVELMMRLGHAVLVGDAAKIRASDSRQQKHDKRDARLLVQLLAEDRFPEIWVPSREQKDLRQLLIHRHKLVRIRAQVKNGLQHLAMNQGVLKKRKLWSRAGEKVLRELPLAPWASRRREDLFKVREMLNGQIDLLDRAVVEAAEKNEKARLLMTQPGVGPITSMAFVLTMGDVSRFQRGKQVASYLGLIPREYSSGGHQRLGSISKQGNTFLRMLLVEAAQGAVRCDESFRNEYLHRCHSKPKGVAKVAAARKLAIRLYWMLRSNTKYPEIVHVESSSRVALVVPHAG

SEQ ID NO: 393901 - protein, 338 aa, unidentified
MTLYCGIDLHSNNCVVSVINENDCVLFEKRLPNELTSVLDALIPYQKELLAIVVESTYNWYWLVDGLMEQGFDVRLANTAAIQQYNGIKHTNDQTDARYLAHLLRLGILPEGHVYPKEQRATRDLLRRRLLLVRQKTLRHLSLQSLIARHTGQRLNNAQVKKLTNESLLKLLPNKTTLLAAQSALQLMNTFTRNIELLEETILAEQKSRPEYENLTSIKGVGKIIGLTILLETGNIHRFPSPGHYASYARCVNSQKVSNGKNKGRGNTKNGNKYLNWAFMEAAHYSAIWDPTVKKYYQRKKDKVHIMVAKKSLANKLARACYHMLKQGVPFDVNRAFA

SEQ ID NO: 393902 - protein, 319 aa, unidentified
MRDACMVGIDVAQATLAVAVLPAGRTWEVAYTEEGLATLVAALQPLAPARVVLEGTGGLQAPAVAALALAGLPVVVVNPRQVRDFAKATGQLAKHDRLDALVLARFAAAVQPPARALADDDTTRLSEFVTRRRQLVEMRRAEEQRLTRLEHRRTTPRVRADVVDHIAWLSRRIERLDEELHAAIQASPVWCVRAQLYQSVRGVGPVVARTLLAELPELGTVSAKVIAALVGVAPYVRESGVWRGRRHIGGGRAEVRRVLYLAAMSGVRTNPVLRAYYARLVAAGKPRKVALIACAHKLLTILNAMARDQRPWTPTLGST

SEQ ID NO: 393903 - protein, 312 aa, unidentified
MITHTIGIDISKDTLDVHVQPGGEDRRFTNDAKGFRALRKWIGERCVERLVFEATGAYHRAFETAMGKAGLPLCKINPRQAKRFGQALGLIAKTDRIDAGMLARFGALIEPPIRPAPPETLLKLRELHVARTALIKDRTATKNREKSLSSPLLKRQCRDRLGQIARHLEAIEADMLAIIEADPDLARKFEILTSIPGVAKRSAFALITGMPELGTLDSQSAAALSGTAPMTRQSGKRTGKAFVTGGRVNVRQALYMPALVAARHNPDLKAKYEDMTGRGKPPKVALTAIMRKLITLANALIKADRKWEPRLA

SEQ ID NO: 393904 - protein, 321 aa, unidentified
MPTFYLGIDVAKAKLDCALRLPNGKFRTKVIANSQDGFATLVTWLTGPEARNVHVCMEATGVYWEDVAQCLATQGFTVSVINPAPIKAYAASRLTRTKTDAVDARLIAEFCAERHPPPWQARSEAEIALRALVLRLDALQALRTQESNRLEVARDAVRTNIQEHLNWLDQQIKSLIKTINEHIASNPDLKGKRELLESIPGIGERTIAILLAFYAEPSRFANSRQAVGFAGLDPRRQESGTSVKTKPRLSKAGHAFLRKALYMPAMVILYKTAWGQPFKNRLALSGKPAKLIIGAMMRKLLQVAFGVLKSGKPFDPALHGT

SEQ ID NO: 393905 - protein, 389 aa, unidentified
MLLDHPSNGPTAIRTQFGAIFVSLELSRSNWLITSLSPGKGEKMSKHSVTAGDVAGLMRLCEELKRKAEVRTGRSYPIITIQEAGLDGFWLHRVLQQERIESHVVDPASIATPRRRRRAKTDRLDGETLLRALLAYKRGEPRVCAMVVAPSPEEEDRRRLCRERRTLIEERITHVNRIKGLLFAQGISDYAPLRRDRRARLEALRTGDGRELPSHLKAQLGRALDRIELLVDQIKAVEAGQEALLAAARKPASEEAVPDPVTMLLALKGMGANFAAVLWSEAFYRHFANRRQVAAYAGLAATPWQSGGIRHEQGVSKAGNPRLRTTMIQLAWLWIRHQPQSALTRWFKERSQQGRKRAIVALARKLLVALWKYVTQGVVIEGAVMKPAA

SEQ ID NO: 393906 - protein, 346 aa, unidentified
MTKIIRIGVDTSKSVFVLHGVDAAERVVLRKRLRRRQVLELFAQLEPTKVGLEACGAAHYWARELQGLGHEVVLLPPQYVKPYVKRNKNDAADAEAICEAMSRPTMRFVPVKTAEQQAALMLVGIRERLIARRTQLSNAIRGYAAEFGLVAAKGLDKIEPLLAWVAQDENVPTLARELFAMQGREYTQLQVELKAIEARLKAWHRANACSQRLTQIPGLGPIGATALVMKTPDPRAFPSGRHFAAWLGLTPKDHSTAGKTRLGKITRAGDEFLRSVLVAGATAVIQQVRRGRGHPSRWLLALLKRKPPKLAAVALANKIARIAWKLMTTGESYDGAPMPRVSAVAA

SEQ ID NO: 393907 - protein, 389 aa, unidentified
MKIFVGIDIAKLNHFAAAISSDGEILIEPFKFTNDADGFQLLVSKLESFDKNSIIIGLESTAHYGDNLVRYLVAEFYQVCVLNPIKTCQMRKNNVRKTKTDKVDTFVIAKTLMMQDDLRFITFFDLDMMDLKALGRFRQKTIKQRTRLKIQLTTYVDQVFPEIQYFFKSGLHQHAVYALLKEAPSPKEIASMHMTHLANLLKVNSHGHFTKEQAKELRVLAQKSVGANDSAISIQITQTIQQIELLDSQLDKIEAEMTDIMKFNDSVIMTIPGIGYINGGMILGEIGDIHRFSNPNKLLAFAGLDPSVYQSGNFQAKTTRMSKRGSRVLRYALVNAAWNVVRNNATFKAYYDAKRAEGRSHYNALGHCAGKLVRVIWKMLTDEVEFNLE

SEQ ID NO: 393908 - protein, 407 aa, unidentified
MNTRFAVVVGLDVGKTAHHACALDPEGNKLFDKPLPQDETKLRELFTQLQNHGEVLMVVDQPNTIGTLPIAVARDTGCTVAYLAGLAMRKAADLYPGRSKTDARDAFIIADTARTMPHTLRQVDRDNEILSALKVLAGFDEDLAHETTRALNRIRSLLTQIHPALERVFVGGSFSTTLVLDLLEKFGGPTGLKTAGRGKVLRFARSHSRRSPEALVDQIFTALGEQTVIVPATAAVELVIPRVAGQVKELKEQRATVAREVEGMLEDFPLASVLMSMPGIGIKTAAQILLNIGDGSAFETPGHLAAYAGIAPVTRRSGTSIRGEFPARSGNKRLKNALFYSAWVASNHDPISKAYYDRKRAQGKRHNAAVICLARRRCNVIFAMLRDGTYYQPPTNAPTPEPAALAA

SEQ ID NO: 393909 - protein, 330 aa, unidentified
MIRNKPRGATVYGIDLGKNIFHVVGTDSAGNVVQRVKFRRDTLRAFFERAERAVVGMEACPGSQWLARKLQAMGHTVRIIPAQFVKPYVKSHKNDTIDAAAIAEAVTRPTMRFVQVKQPEQVDLQSLHRIRDQMVGSRTRLICQMRAFCLEYGVAIRQGAGLFKSDLPRVIADECNDLTPTMRRLLNELFEDLMRLEKRIAEITREIEALAASDEKARRLMTIPGIGPLGATALLAAAGNGQQFKKARDLAAWLGLVPQQYSTGGKPQMFGISKRGNRYLRRLLIHGARSCVMHLDRSRDRLGAWLRQLHSRMHVNKVTVALAARVARIA

SEQ ID NO: 393910 - protein, 351 aa, unidentified
MENITIGMDLGDKKHEVYALSDKGETIKSVSLENTKEVLVQFFNHYLGATVAMEAGTHSPWISRLLSSLGCKVLVGNPRKLRVIWDSDDKTDICDAEILCRIARFDPKLLYPITHRGKQAQIDLEILQARDALVKNRTQLINHVRSSVKSLGERLPSCGPETFHKKAADSIPDYLEETLAPIVDIIGKLSEQIKLYERTIESISKERYPETELLRAIKGVGPLTALAFVLILEDPSRFSKSRQVGKFVGLVPRRDQSGEVDKQLSITKAGNPFLRRLLVGAAQYILGPFGEDCNLRRFGLRLAARGGKNAKKRAVVAVARKLAVLLHRLWMNGEVYIPLYKQQTKVLAKAA

SEQ ID NO: 393911 - protein, 474 aa, unidentified
MKNKQSAKPARDQRYREQRHRWTPLLQRIQPDAAGIDCGAEHHYVAVPPDRDERPVRAFRTFTADLNQLAGWLIQCRIKTVAMESTGVYWIPVFEILETRGIEVVLVNAHHLHNVRGRKSDVTDCEWLRELHSVGLLNASFRPAAEIVVLRTYLRQRASLVEQASSHIHRMQKSLTQMNLMLHLVLSDITGATGLKIVRRILDGERDPAALAAHRDPRCKASTQEIIAALTGNYRVEHLFTLKQNFDAYEFECQQIGECDSAIQKLIDTLASQQPPPTTELPSVRHPLRPKRHDPSFDIRTPLHRLTGGADLSQIDGIGPHAALQLVAEIGTDMSRWLSAAHFTSWLSLAPNNKISGGRLLSSRTPPSANRAAAILRRCAMSLMRTSTALGAFYRRLAARTGKPTAITATARKLALLVYRVLRGDITYCDPGANAYAQLHRTRLLKSLSKRAHQLGHALVDLSTGEILHPHKVS

SEQ ID NO: 393912 - protein, 343 aa, unidentified
MKFMRVGVDLAKNVFQVHGVDHNEKPVWRRRLSRKKWLNALLETVEPGCEIGMEASSGAHHWARQLQAQGFTVKLIAPQFVKPYVKSNKNDANDAEAVCEAMSRPSMRFVAVKSVEQQDIQAVHRIRSELLGQRKSKANQIRGLAGEYGLVAPLQLCHLRQAIPTWLEDPDNGLSERFRRLLNGLWKDLTGLDERVAELDAEIATIAEEDPVAQRLQQLRGVGPIIATALVAAVGDGRQFANGRQMSAALGLTPRQHSSGGKDRLLVISKRGGSYLRTLLIHGARSVIRTATQKEDRLSQWVTALVERRHPNVAAAALANKTARIAWAMLRNGTDYHPERVAC

SEQ ID NO: 393913 - protein, 416 aa, unidentified
MKKKDYIEFEQVVERGCGMDVHKETIVATIRGKGIKTITKSYNTFTGSLKKLKEWLKKHGVTHIAMESTGIYWKPVFNILGDDFEILLVNARHVKNVPGHKTDKTDSRWLAKLLLSGLLKGSFIPSRPFRELRDLTRYKKKLINQVAAEKNRFMKILEDANIKLSTVLSDVFGASGTKMINHMLAFDGYRPEELMQYVHGKVKASREDIKEALTGYVTPHHKFMMKTILGNIAKIESTISEIEGHIDTVLGPYKLEKELLETIPGVGPDVAIGIISEISTNMEHFPDHKHLASCAGMSPGSNESAGKNKSSSTTHGNKNLRSYLTEGGWAASKTKNTYFSSKYKSLVGRRGKKRAIIALGHKILIASYFIIKDKVEFKELGEEYLNNFRKDKLIAYYKKQIEKLDPNAELDNEVAA

SEQ ID NO: 393914 - protein, 342 aa, unidentified
MKFYCGIDLSARECHVCVIDQQLEVVVQQKLRNELTRIVKLLEPYKANLKIVVESTFNWYWLIDGLQAEGFEVVLAHTLGLYLITGAKVKTDRRDAYALAKLLLVGAVPSAYIYPVETRPVRDLLRRRMHLVQVRAGEYGSLRRLLLRQGILTSKQQEIKTATETELEQWFEHPLVRLHASQELKRIELYSEQIAELEKTILELAQTEHSYELLQQLPGVGQTIALTILYEVGELKRFATVRDFSSYCRVVPGVAQSGNVTGRGRGSKQGNHYLKAAFSQAAVHAVRCYPKVRRYYERQLKRHQGRGRQMICYNIIAHKLAQAAFHVLKEQTEYREELLFGR

SEQ ID NO: 393915 - protein, 414 aa, unidentified
MYCVGIDIAKRSHVACVMSESNALVVKPFEFASTHDGFKKLLVHLQSLSVDLSDVIIGMEATGMLFENLYRYLKELTYRVVLLNPYQTSKFREMDTMKRVKNDNIDSVMIAALIKSGRFSKGYVSDEQLQSLRELYRHKASLDDQLKAIKRQTGTLLAVVFPELEEIVSDPFNVTGLALLEKYPTAKHYDYASADRVLKTFRGIKGNNFNEAKALKLLELAKVSIYSGVAKDARAMSIRSNIALIRLLQEQIAACDQEMIELFAIQGKQVSNDERHEMSDLIDNLRTIPGVGDKTILALLAECGNLDRFTDAKALVGYLGLYPTLEQSGGTIKHGRLAKRGARLAKKAIYLASIAAIRHNKELHTVYDKYRSKGRAKKECVIIVARKLIAIIYSIYKRNTPYDPVRVFVPMPNQ

SEQ ID NO: 393916 - protein, 339 aa, unidentified
MNVTTIGIDLAKNNFSLHGVDSHGKLVFRKVLNRAKLLPFLAQQPPCLIGMEACSGAHYWGRELKKLGHQIGIMAPRFVAPYRKGGKNDGNDAEAICEAVGRPSMRFVPVKSDEQQAILSMHRVRQGLIKERTALINQLRGLLSEFGLIMPKGRYSAQHHIPDILEDAGNGLPLLARRLLHDTYQRLRVLNEQILAYDRELNHLVKDSEPAKQLMTVPGIGAMTATALLASVGDPKQFKNGRQFAAWLGLTPRQYTTGGKIRLGRITKKGDAYLRTLLIHGTRAVLSTVVDRQDKLSLWTKTLIERRGYKRAAVALAAKNARIVWAMMVRGEAYQLKSV

SEQ ID NO: 393917 - protein, 325 aa, unidentified
MMVLGIDVSKASFDVVLLADEQSKGLHKIFPNTPRGFNVLRAWLAKQGAEQLHACLESTGSYGVPLAEFLVAERYIVSVVNPRRIKHYAQSRLSRNKTDKQDAFVIARFCLKEQPDPWVPMAPEAKQLQALVRRLEDLKDLKEQEENRLEASLNGAVRDSLESMVAYLDEQIAAVEAAINDHIDQHPALKRDAELLESIPGIGSITAHKLLAEIAFANFSSARELAAFVGLTPRQNQSGTSLKGKGRLSKVGSSDLRKALYFPAVNARRFNPVIQAFCKNLLDKGKPMMVVVCAAMRKLLHLAFGVVKSGKPFAVAHLTQSSLAA

SEQ ID NO: 393918 - protein, 329 aa, unidentified
MNDLSAVQQWIGIDVSKRCLDVYIRPLGRALQVANSELGLVELYQHLDGLGIGLIVLEATGGYQTLAARTLMGQGYPTVVVNPRQVRDFAKATGRLAKTDKIDAEVLAHFADAIRPAVRAMASEDSQVLQTLVTRRQQLVEMRSAEKTRQRTARPTVQTNIDTHIEWLDEQIKALDSDIEALIQQSDQWQRTRVLLTSVPGLGPATIGVLVSQLPELGRLSAKPLASLCGLAPMNRDSGQMRGKRQIVGGRAAVRTALYMATLVATRHNPVIREFYQHLLQRGKPKKVALIASMRKLLTILNAMVAHDTLWQAPACSLPPTTTPVVATT

SEQ ID NO: 393919 - protein, 337 aa, unidentified
MNVTLIGIDLAKSVFQLCAVNRAGKPVFNRQVRRQRLLALLDAYPQATIAMEACSGSNYWGRTLEQRGFAVRLIPPQHVKPFVKGNKNDRNDAFAITEAARRPQLRCVAPRSLEQTDLIQVHRVRERLICQRTALVNQIRGFLNEYGIVVARGRSRLQAALPGLLEDASNGLTAAARALLEELWLEWQHRDAALRRLQKRITAQARTSPDARRLMVIKGVAETTATALVAHAGNGSAYCNGRHFAANLGLVPRERSSGGQQTLGPITKRGNRYLRRLLIQGAWSVVRNAEDGSDRLSRWTRQLMARRGKYKAVVAVANKLARISWSLLYHQTEYRPA

SEQ ID NO: 393920 - protein, 341 aa, unidentified
MKVTTVGLDLAKQVFSVHGVDEHGKAVLRKRVSRGKLLELFAQLPSSLVGMEACSGAHYWARELERLGHRVGIMAPRFVVPYRKNQKNDGNDAEAICEAVSRPNMRHVPVKSVEQQGLLVLHRVRQGLTAERTGAINQLRGLLAEFGIVLPKGRYQLRAHIGAVLENAENAIPGLARRAFADLNTRIGELDQKILAYDRELEALARQSDAAKRLQQIPGIGPITATALVASVADAKQFSNGRQFAAWLGLVPRQYTTGGHVRLGRITKRGDVYLRTLLIHGTRAVLSSTKEKPDRLSRWAEAVRERRGTRKAAVALAAKNARIAWVLLARGEDYQLRRAAG

SEQ ID NO: 393921 - protein, 414 aa, unidentified
MDLVHPRCCGIDISKRDAKVCVRVASTGRAKATETVTTWGAVTNRILALRDHLVSEEVTLVVMEATSDYWKPFYYLLEDAPFDLMLVNARHVKTMPGRKTDVSDAAWLAQLGAHGLVRGSFVPPEPIRQLRDLTRTRSVLTRDRAREIQRLEKLLEDAGIKLSSVASDITGVSGRAMLEALIEGNRDPVALADLAKRRMRSKIPELTEALTGRFSAHHAFLVRMHLDLIDNYSGALKELTERIEVVIEPFRCARELIITIPGISIAVADVIIAETGADMSRFPTAGHLASWAGTCPGSNESAGRVKSTHTRPGNPYLKGALGVAALSVSRSKNTYFAAKYRRIASRRGPMKALVALEHAMLIAIWNMLDTGSLYTDPGEEFFTRLNPDRAKNRALDQLRRMGYAVTLEPLPATG

SEQ ID NO: 393922 - protein, 458 aa, unidentified
MAPRHKGNRSKVKSVSPQLPTLHPHAAGIDIGARELYVAVPPGSDPRPVRCFATFTEDLHALRDWLQSCGVTTVALESTGVYWIPVFQILEAAGIEVCLVNARHCKNLPGRKTDVQDCQWLQYLHSVGLLRGSFRPADQVCAVRTILRHRDALVRGASRCVSHLHKALTQMNVQLQHVISDLTGVTGQAILTAILAGERDPQKLAALKDHRIKASRDVLAKSLRGDWRAEHLFTLQQTHALWQQHRQLIAQCDAQIEQMLQGFEARADVTLAPLPPQTKSSHKKAQRNEPQFAAREECYRVLGVDLTVVPGFATPTVLTLLCELGPEFAEKFVTAKHFGSWLGLCPDNRITGGKIYSVRTRDVKSRVAEALRLAAQSLWQAKNYFGDLYRRWKARLGSPKAITAMAHKLARILWHLLKYKQPFNPEVFAKEEAKMKRKKLQRLQTMAASLNYQLIPQP

SEQ ID NO: 393923 - protein, 417 aa, unidentified
MNTMTINPYVAFVGIDWADTKHDVCIQAADSIQREFAVVPHKIEEIDEWAQSLHKRFPGQIAIAIELSKGPIVYALQKYDYFVLFPIHPLTLAKYREAFQPSRAKDDPTDAELALDLIMRHPARFKPLQPQSIEIRTLTALVEQRRRLVNDRVRLTNRLRSTLKQYYPQALEWFGRIDSKLFCNFIERWPTLTQVKRARTTTLTAFLKAGKTRNPGLLETRIASIRSSKHLTLDEAVIGPNKLQALMLIDMLRVILSGIKTYDKEIAELAPKHDDYDLFSSLPGAGPSLAPRLLVAFGEQRDRFKNAAEMQKYSGVAPVTERSGNKHWVHWRWRCPAFVRQTFVEWAAQTINKSYWAGEYYRQQREKGSAHQSALRALAFKWIRILYRCWQTRTRYDEATYLKALERRGSPLLAKAA

SEQ ID NO: 393924 - protein, 391 aa, unidentified
MTNRYESVACGGMDVHYKFSTVTWRDESGGIVLRERLDHTDRSRLLDQMAGWPKGVPLVMEASFGWGWLSDVATGLGLEACLSNCYKVEQMRKARGWVKTNKKDADLLSLLAFEATPWWRVWRAPAAVRDRRERIRHRADLVAIQTETKNRIHAIFHRHGVFHEFSDLFGGKGRRFLAALCGHGRHAGGVLSDGALEALRGQVDLLVHLRDQLALLARGLRANLERDALTKRLTGIPGIGLILSHVMRAEIGRFERFGGHRSLASYSLLAPRSSETGEPPPGRAPRGRHLGRQGNRTLKWAFIEAAHGAVRHGGKWRAMFDRYTDGGKKSRGRGYIKVAREWVKVVYVVWAKGATYTETPPPRPGSRRRRRKAKRTSRSGTGQPCTAMVGA

SEQ ID NO: 393925 - protein, 353 aa, unidentified
MISELTASPKLYIGIDIHKKTWSVSMRTDLFDHKTFSIPPDSHNLFHYVESHFRCHEVHVTYEACCCGFVAAQDFLNFGWRVTVVNPADVPTSDKHHYQKTDSIDSRHLCKQLSLGNLRPIYIRTEQEDLLRSLLTQRDQITKQLRKVKTHIKSYLLLHGIQVPEEYDNSNWSKGFISWLKRLEWTHSTGLISLQSKLRSLEFHHKEYLLIGNELRSYCRKYHKKDYYLLKSIPGIGGFLSAAIIAELGDIRRFQNESQLASYIGIIPGIRQSGNSETKLGITPRSRELLRSYLIEAAWIAIRKDPEIQSYYRKHAHKNPKSVIVKVAHKMVRRILSIIKQEKTYEINTNQKD

SEQ ID NO: 393926 - protein, 362 aa, unidentified
MRGVAVQEKLYVGVDLHKTQFTICVINEEGDSFEAGTKFPMDKEGYIAFADKMKKLSRRHDGATVSIAIESTANARFFRDIMEAKGFEVTVVNTLRFKVVNLSTKKTDKNDAKTLAEFLARDILPKSHLCRPESESLRRVLKSRTLMVQDAVALKNQAHAVMLAYGYITQPAQFQSKSSRTKLLARLPAKVKEIIEIIFETLDLVESQTHVLERRLRRITIDNEYVNLLMTIPGIGIVNACTIYAYTDNIDRFESYKNFSAYCGLVPWVQTSNESVYYGKITKRGPQELRTALVQCVVAMVRMPGKTADLGIMKQYHQLKDDKSSGKAIIATARKLSRIIYVMLKTMTPFDSAKLIKDDPKE

SEQ ID NO: 393927 - protein, 367 aa, unidentified
MGWMAPLRHLGAKMLVVIESPADGEPSMSEIRTIGLDLAKHVFQVHGVDGEGTTVLRKQLRRGQVLAFFSRLPRCVVGMEACATAHYWARELRALGHEVRLMPAQYVKAYVKRNKNDAADAEAICEAVLRPSMRFVPVKTADQQAALLLHRGRERLVCQRTMMANALRAHLAEFGVIAPQGLRNIGQLMAIVRDENDARLPDLARQVLQVLVGQIEQLEAGIATLEKQLMAWHRSNPVSQRLATIPGIGPIIATAIAATVVDPIAFRSGREFAAWLGLVPRQNSTGGKTRLGGISKRGNQYLRRLMINGASANLLRSKATNSDPWVIGLRRRRPSLVVAVALANKTARIAWAVMHRQEDYRRVAAAA

SEQ ID NO: 393928 - protein, 345 aa, unidentified
MTEAYAGRQVVGMDLHRRRSVLVRMTEDGRKLETARITNSPQALRAVLARAGECPRVVLEATYGWYWAADVLAAAGAEVHLAHPLGVKAFSYRRVKNDERDSADLADLLRMGRLPEAWIAPEPVRAVREVTRFRHKLVAQRTSCKDQVHAVLAKAGITVTHSDLFGRGGGLWLDQLVLAQPYAGKVAALRALIAVLDGQIGLLGEQAAGMLAGEAGYAAVRELPGIGPVLGAVIVAEIGDITRFSKPGQLASWAGLTPRHHESDTRVIRGHVSKQGSRMLRWALCEAIQRQPATTRPQRVKEGIIARRGEQARNIAKTAAARVLLIQVFYAWRDGHARSARRPAG

SEQ ID NO: 393929 - protein, 390 aa, unidentified
MSQSFDASKSLTAFEQDSTLVAVIEMSQSKWLVAAVVPGIARQPLKKLDADAGALLKLLQRWREEARKAGREVKRIVCAYEAGRDGFWLVRWLQARTIEAYVIHAASIAVSREHRRAKTDRIDTELLMRSFLGWLRGEKRHCSMVAIPTMVEEDARRPSRERESLVAEQTRTVNRVKAVLALFGIGGFNPRLRKAAQKLETLRTVEGTPLPENVHAELRRDLERLRLVHDQIRTIESERLRRLAQAPAAATGPHAMVRLIAKVLGVGIETADMLVNEVLARNLRDRRAVARYAGLTGAPDESGKRRREKGLARAGNGRVRRGMIQLAWRSLIFQKESRLVRWFRARTADGRSTTRKTMIVALARKLLIALWRLVTTGEMTEGLKLRPAGT

SEQ ID NO: 393930 - protein, 346 aa, unidentified
MLYAGLDLSRKRLDFCLLDELGEKVEVGAAPPDADGLHSLVVRISRFGEPVFAAIESMNGARFVHDQLELAGWRVEIADAVKVKGLAPLACKTDRIDAWVLAELTRRDLVPAIWLPDPEIRAERERARFRLHLVRHRTSLKQRVHAVLLAHGKPCPVSDLFGVAGRDLLERLELPEPWTSTVAASLQLIDELDQQISNCERDLHRLGVEHRYVPLLVTVPGIGWVLAYTIAAEIGDISRFATPTKLTGYTGLCPRVYQSGQSDRRGALAKNGPRYLRWALIEATMHASRHPLYRDRYQHTKQRLGKQRGAKVAQIDLARRLAEAIWHMLTRDQPFAPAGATSPLAA

SEQ ID NO: 393931 - protein, 339 aa, unidentified
MELNVIAIDIAKQVFQLHWIDSDTGSIERLRLKRSQVLSWFVNRKPAVVVMEACGGAHEWGRQLLQLGHQVRMLTPNSVRPFVQRNKTDAADACAIWTAGQQPGAKFVAVKTVHQQVVLSLHRLRAQLMKMRIMQTNELRGLLYEFGIVLPEGHRALLKELPAALMHAGERLPSMFVQCLQEQVSRIGSLDADIAAIERRLAQQLRETPACKTLTDIPGIGLLTATAVVASMGSPAAFRDGREFAASIGLAPRQTGTGGRVRQLGISKRGDGYLRTLFMHGARAIVRSSHAASWPWLAELLKRRPYNVAVAAVANKLARTVWAILAKGQSWRASAWQAT

SEQ ID NO: 393932 - protein, 337 aa, unidentified
MTLFSAIDLHSNNSVVVVIDEQDRILLQKRYPNDIQLILSALEPFKNQLHGVAVESTFNWYWLVDGLQAAGIDACLVNTVAVQQYSGLKHTDDHSDAFWLAHLMRLGILPTGYIYPASERPLRDLLRKRLQLVRHRVTFMLSAQCQIWRCTGVKVENTLIKQADGQLLRYHDNPELRMALHSNLAILRTLNAQIEAIEQRVKEQIALKPEFQSLLSVDGIGDILGQTIALETGDIKRFSTVGRYASYCRCVDSKRLSNGKSKGQNNRKNGNVYLGWAFVEAAHSIIRHNKTAHRFYQRKRAQRNGALATKALAHKLARACYYVMRDQVPFQAERLFG

SEQ ID NO: 393933 - protein, 367 aa, unidentified
MKKSLRFVGLDVHKETITAALALAGRDPAEFVGTIAHDEQALLELLDGLGPKARLRVCYEAGPTGYGLARRLNERGYCCEVIAPSMVPVQGGRIKTDRRDARKLAHFLRSGDLTPVRIPECQTEAMRDLERAREDAKAAERVVRQQLDKFLLRHGRAWSGGTKWTHKHWAWIRQQQFSEPAWHAVCDDGIDAVEQATARVERLTQAIADHVEQWALRPLVQALQALRGVSLVTSVILAAEIGDFKRFASPRQLMAYLGLVPSEHSSGQTRRQGGITKTGNRHARWILTEAAWNYRFYPRGSKTIEARRRPVSARVRNIAERAEHRLHRRFDHLTRRGKDSRKAVTAVARELAGFVWAIAREEQKLAV

SEQ ID NO: 393934 - protein, 381 aa, unidentified
MTTAVPHHEQRNPTEATLFVAFELSEKTWKLGFTTGHGQKPRERTVTARHHEHVLNEIAQAKRRLGLPATAPVVSCYEAGREGFWLHRFLQAQGITNHVVDSSSIEVNRRRRRAKSDGLDVRKLLSMLLRYAQGERQVWQVVKVPAVEAEDHRHLHRDLETLKQERASTTTRIQGLLSSQGIRLTSLSKLPEQLEALRLWDGSPIPPGLRRRVLRVYAHHTFLSEQIAEVEAERRAQLQTSTEAHIDKVRQLMQLKGIGINGAWLLVMEFFGWRAFKNRREVGGLAGFTPTPYQSGESAREQGITKAGNRHVRWMTTELAWSWLRFQPDSALSCWFRERFGSGGKRLRRIGIVAVARKLLIALWRFLETGVFPAGAVLKEG

SEQ ID NO: 393935 - protein, 401 aa, unidentified
MHQVEVQNENEKIMWRGQISNNRKGFETLLEKFRIIERSNNDKIKGIFMNPTGNYHIPLHHFLESNGYKVIYVDPRVTDYARKMSNLGKEKSDTVDSAMLASAPWKNKNKELFDKNVHRKDAVSGLTRLRQSVTKNITRITNIIGSDLACVFPEFTDVFSDIGSKTSLAILDQFTTPSLIVNAGIDNVLKVMRKTSRNHYGKENAQKLLELAKESVGIPDTECIYAFRIRQNVARLISEQKHLKEIEEKILDLTKNDENIKRLDDIKGIGPMNAAAIVSEIGDIKQFESALKLQSYGGKAPMMSGSGGKNHATGISKISNSYLSNSVYESARSLVNHNNEEFVKIYEREIGKGKKKKQAYIIVARRLLYHVYSMMKNEKPYRVRLPTMKGEGETFPLDYKK

SEQ ID NO: 393936 - protein, 348 aa, unidentified
MTLTIVETRAVTGGVDTHADTHVAAALDSIGGMLGVREFSATPVGYADLLGWLGGFGTVHLVGVEGTGSYGAGLARHLGAAGVRVVEVDRCDRQDRRRQGKSDPLDAVSAARAALSGRALGVPKGRDGAVEAIRALMVAKRSARGERTQTINQARALIVTGPDELRAKFARHSPAALVAELAALRPRAGDVPGYATQIALRELARRVEFFDAQLHRLDALIVPLVTTHAPGLLAVYGVGPDTAAMLLVAAGDEPARLRSEAAWAHLCAVAPIPASSGKVTRRRFNPGGDRQANHALWRIVITRMSAHPPTRAYVARRTAEGLSKKEIIRCLKRYIAREVYPHLRPAGG

SEQ ID NO: 393937 - protein, 333 aa, unidentified
MKNYDLFIGIDVSKLKLDITGINIENEIDLKHLIIKNTTSDIKKYFKQVLKKYPQSIIVGFENTGIYSALVASVLHELSIDYCQLPSLEVSMSKGISRGKSDKIDALQIAQYLLSHKFKIKLSSISDSFLIEMKLLYTQREKILKSIVKFNSNYENNDYLPKSLQKDLIRTTKSIIKNLKMNLLSIEKRLDFIIKKTPPLLDNFNLTISIPGVGKQTAIYLLIVTKNFTVFKEARQLACYAGIAPFPYQSGSSINGRNKVSHMADKKLKSLLNMCALSAKKHDYELSQYFEKKVIEGKNKMLVLNNVRNKLLARVFAVINRQEPYVNLKKYAA

SEQ ID NO: 393938 - protein, 340 aa, unidentified
MKTVALDVHAASFTLEVMTAGGQVAQRISRQTTGRNLIEVVDAVVGPKTLIVEESHLAQWVKRTLSPYVDELIVCDPQRNAWIAKDEYNDDDSSAHKLALLYRGGFLKPIVHPDDQGAQLRGLFLHYYDLNQQLTRFKNKLKGTFRQEAIVASGPGIYKEDEHETWLKQLKGQPHLQHAARQRFTLIDTLSELKQQTFEAMVKTARKNKAFALLQTVPGAGPVIATGYVALIDTPTRFSRKNKLWSYAALSNKQHTSDDETYCDHASSRGNRVLKWVVIEHFHHAVAIGGKDNRFRQQYQALRRKGLDHTPARRAICRALLSTVRAMWIKGEEYRDKALS

SEQ ID NO: 393939 - protein, 362 aa, unidentified
MTDTFAGPRAGRRRPNGEVVLGVDTHRDAHVAAVLSPVGELLGTEVFPATAAGYRDLLKWARRLGRVRRAGVEGTGSFGAALSRYLLAQGVEVLDVNRPDRTDRRRRGKTDPLDAQNAARSVLSCRARARAKSGDGPVEVARLYKLAKASAVKARTQAINQLKAVLVSADPNLREELAGLKNAELFRICARLADDQAEAGGEEAVLQATRVTLSLLAQRIEQLTQQIQELQHRMARVVECHFPHLLTVVGIGPDTAVTLLITVGDNPERLGSDASFAALCGVSPVERSSGSRQYRRLNRGGDRQANAALHRIVQTRLRVDPRTQDYFERRTKEGKTRREIVRSLKRYAAREVFHLVRPTQSP

SEQ ID NO: 393940 - protein, 367 aa, unidentified
MQAILPYRLFVGIDVGSQELVTCINDANLRIQEALISSDGMLQKVERFPQTKKGYLTLARTIRRYAKQQEIAQDDILIIVEATGNYWLPPSSYLYRQGFDITVINPSSARHYAKMNLQQSKSDPIDARTLSELGMVLVLSDSNALRLWHEPPSIYDELQQRVKLFSEISKVMTQTLNRHHARSWRNVKVDEVQARQKAMLDVLSQHKQQLQKEIRSLLFSNSEWRRNAEILMSIPGFGAIVTSQMLTITQNFTLFDTVHQLQSYCGLVPREYSSGKMQKHKRIGRAGNQTMRSLLFLAAQTASYRDPRLRAYKQRLTQEDPDEKRKEKAIRPNRGKPSTVAHIAVARKLVGIAWACIHNNTLYNPDH

SEQ ID NO: 393941 - protein, 339 aa, unidentified
MNNSVISIDLAKNSFQICALNSHHKVVFNKKVTRKKLVSELQQLSPAPVIMEACYSANPWGRKLQELGFDVKLIPPYQVKPFLVGNKNDHNDAVAIAEASLRPKARFVPVKTLEQQDVQSLQRIRERLIKSRTALVNQLRGLLSEYGIVVEKLPYKLKAKVPLILEDSSNPLTVKARQFIQSLYQEWDYLDKRINDIEEMTDNSVKDNEDYQRLINIPGIGPVTATALIASICDPHHFKNGRHMAAWIGLTPSQYASGDSNKLGGITKRGNRTLRRLLIHGARALMNWSHKKNDKFSRWINALCQRMHVCKAIVAIANKLARIAWAVLAKKESYNPAVA

SEQ ID NO: 393942 - protein, 319 aa, unidentified
MNTTNQEYIKNSDRNVGIDVGKDTLDIVVYELNLHWQEANSAEGIRRLISRLKRFQLTRVLVEATGGYERLIVEAATEQSMPIIIVQPIQVRQFARAQGVFAKTDKIDARLIARYGALLQLEVKLLPGKKVRRVRDLLARKRQLNAMRTMELNRSHKTQRIIAASHRRLLKLIDKEIVEINEKLSREVSAIAEWQRTYDVITSAPGIGDGVAFTLLGELPELGQLTNRQIAALCGLAPFNRDSGKMRGKRRIRGGRAPIRTVLYMAMLSAIQHNPVIKQFYQHLVAQGKNKKVAITACMRKMMTILNTMVRNDKEWQMN

SEQ ID NO: 393943 - protein, 412 aa, unidentified
MDVVYERCCGLDVHKRTVVACLLTPGPQGQPQKAVRTFGTMTGDVLALAEWLAAAGCSHVAMEGTRVYWQPIWNLLEDRFVLLLVNARHVKAVPGRKTDVKDAEWLADLLRYGLLAGSFVPDREQRELREVTRYRTALLRERAATANRLQKTLEAANLKLASVVTDITGKSSRAMLRALIAGETEPTRLPALAEGRLREKIPQLEQALVGRFGPHQRFLVAQQLDHLDFLDERIAQISAEVATRTQPLAAAVAQLDAIPGVGQRTAEVLVAEVGTNMARFPTADHLASWAGMCPGNRQSAGRQLSGKTRKGSPWLRAALAEAAQAAGRTKGSSLQAQYRRLAARRGKQRAMVAVGHTILRIAYHLLQDPASVYDERGAHGVTERTRQAIERDLVRRLQQLGNTVVLHPVGAT

SEQ ID NO: 393944 - protein, 422 aa, unidentified
MLTNRPVIGIDVAKNFCFYAAVSPTCTTFLKPFKALNTKQGLLFVLGQIRKVEEAFSSKPLIALESTGHYSQRIVHFFLKQGFEVYHINPLISHSIKNSVVRKVKTDRVDALELARLLFVHAFYPTTMPKEQLANLKVLARTRGQLVEQRANLLNKLQCAIEQIAPLFPTILNPGSLTALTLVNKFPTPCEWSKKANQHVILDMLQTVSRKGRLYAQQKYADLLSCADDAQVTGISLSAYAATIQCYASIVQSLDAQISLLDDQIKALAEQLPAITFLKSIPGIGDTLAAIILGEIGDIERFANAKQLVAFSGIDPSVKQSGNFVGTKNKVTKRGSPFLRHALYIAATTSIRKESKGSHVNSVIYEYYQRKIETKTKKQALGAVMNKLLRIIFSVLKNKQPFRLITPDQQVELYQKHLQKAA

SEQ ID NO: 393945 - protein, 433 aa, unidentified
MKVLYERVAGIDVHKEMIKVAIRSPGEKPWTRTTEILEFRTFYGVLQAMARELRARGVTHVVMEASGVYTEPVFYALAEQDFEQVAVINPAHAKALKGHKTDARDCARLAELFESGLLRGSYIPAPELKEVRDLTRYRMKTVQARTSEIQRLGKALESAGIKLGSVASSITGASATAMIEALIDGERRGQVLADLAKGRMRAAGKLADLSMALTGRFTGHHALLCRLHQDRIAGFDAAVAGLDERIAGKVTRWQREAGLLTSVPGFGDVVAQAWLGEIGPAPHRHFATHEKLASWVTLCPGNNISARKRKHGRTGDAGTYIKPMLVQAAWNAIRVRGRLQARYNRLVRRFGGDKNPGAKKKAITAIAHTLLKIAYQVLKSGTPYQDLGADFYTRRESPEQKQAWLERQLQRLHPGCTITITISAPEAALPLGA

SEQ ID NO: 393946 - protein, 353 aa, unidentified
MTGTKYIGMDVHKESISIAVRNDAGKLVMECVIETKANVILDFIHGLRGELHVTFEEGTWATWLYDLLKPHVTKLVVCDPRKNSRQGNKNDRIDARELADRLYMNKLSSVYHGGAGVRTLKELARSYLTISKDLGRVMSRVKAIYRSWGIPCAGKQVYAPRHRTEWLAKITEVGVLRRAEFYYQQLDALRVLRQAVRRDLLTESKKHKATKLLRQIPSIGPIRAALLIALIQTPHRFRTKRPFWKYSGFAIEMHSSADYRSVKGELQKSKKQISVRGLNRDCNHDLKNLFKSAATIASVKPGPFQEFYAALVAKGMRPEMARLTLARKIATIVLIVWKRGVSFDAKYLKSQTA

SEQ ID NO: 393947 - protein, 444 aa, unidentified
MLPILFKLVAGLDVHKKTVVATRMRVTGDGAAERETKTFGTTTLDLLALLDWLLEWSITHVSMESTADYWKPVYNVLEGTFEILVVNAKHVKHVPSRKTDVKDSEWLAELLMHGMLKASFVPPKPQRALREMTRYRTTLVEERTRLINRVQKLLEGANIKLSSVVSSVMGVSARAMLAEIVVGQTDPALMAELARGRLRNKIPELEKALTGIVQPHHRFLLAKQLSHIDFLDEQIEDISVEIGRQIEAMSQPPEGSDSGVGQGTEESAAVGDTKPPLTWVEAVALLKTIPGVDERTAEKILAEIGLNMKQFPTAGHLATWAGLAPGNHQSGGKRYSGRTPKGNSALNTTMVVAAWAAVRTKDTFLNARYHRLAGRRGKKRALVAVAHSMLVSVWHMLTYQQPYQELGGDYFDHRRKEAKVSYLIRRLEKLTGGSVSIELQPAAA

SEQ ID NO: 393948 - protein, 352 aa, unidentified
MTETSPDVSLTIFAGIDTHKDTHHAAIIDYLGREIADRQFPATATGYQALLAWLNGTGITARVGVEGTGSYGSALAMVLQAAGIDVVDVDRTDRRSRRFHGKSDTLDAYSAARLAASGGARTIPKAHNGDVEAIRFLHNTRRSAVKSRAEAITGLKSAVVNAPETIREQLRPLTSTTLVKACALLRPGTVAPGEINAAVKTALRSTARRIQFLDEQIKALEAHLKVLIDATATGLVTTFGVGYETAAQLLITVGDNPHRIADEAAFASLCGVAPIPASSGKTNRHRLNRGGNRQANRALHIIVMARLKHDQRTRDYRDRRLAEGKTKRDIIRCLKRAVAREMFQLLTHKTTA

SEQ ID NO: 393949 - protein, 545 aa, unidentified
MGTSSNLREGAENASSAFSVTERPTRCSVSAITLSDVMHNPPERALKAKRRKVVNNSAKCHNNPGVRKSVPTRSRLVSACTSSTTWRSPVESGIPAKTSERTTPHEGHCNSSMHCRKKTCGKQQTKEKPMNKTKEWKVITHFGGFDWAQDHHDVVIVNQQGEIIEKWQFQHDQNGWKDFAAIVAKYPCLGIAVETSQGLMIEQMLNMELNVYPVQPKAAKRYRERKAPSGNKNDSLDAWALADALRMEGQHWRVLNPQDPMISELRLLCRDEVSLIEQRTALVVQLQDALRMYYPAVLEAFDDWVQESSWAFVEAFPTPRILEKAGKRKWEKFLHVHRLWREATAQKRYAIFERAAQFCGSPSVTAAKSRLALTLVKMLRLLERELKDYRHRIEELFQQHPDRDLFGSLPGAGPKLSARLMSEIGDDRALYPTADNLKCYAGISPVSYQSGQIHKVHVRRHCNKNLRHAVHLWANLSRRFCPWAQIYYQTHRQKGQSHATAIRCLGSRWLKILWKMWQTHTPYNEALHTQNQIKHGSWIVELKAA

SEQ ID NO: 393950 - protein, 321 aa, unidentified
MTTTARTYVGIDVAKAHLDISVHPTGERWTTGYTEATVAQLATRMQTLAPQVIVIEASGGYESLVATMLAAAGLPVAVVNPRQVRDFAKAIGRLAKNDRIDADVLALFGERVQPEIRPLPDAAVQELAALVTRRRQLGEMLTAERHRLVLATKTVRRGIQRHIRWLDRQVKDSDDDILRALQRSPVWRVQDNLLRSVPGIAHRVSAALLAHVPELGRLSRREIAALVGVAPFDDDSGKHHGRRHIRGGRTAARGALYMATLVGTRHNPVIRAHYQHLLTVGKEKKVALVACMRKLLTIVNAMLKHQQSWRAAAVAAAPLDL

SEQ ID NO: 393951 - protein, 444 aa, unidentified
MQSMYYIGLDVHKKSISYCVKDGSGRIHAEGAIPATRSDLDRWMRTLPQPWTAAMEATLFTGWIYDHLKPHAAALKVAHPLMLRAIAAAKKKNDRIDANKITDCLRCDFLPECYMASTEIRERRRTLRYRNLLVRQAVQLKNKIAVLLMEAGVSYNKQKLHKVGYFRELLATNQDIDDGLRSLLRMCRETVVRLGRTESPLVRSLGRDPLLVKRVERLMTIPAVGPVTALTWVLEVGDVRRFSSIKKAISYCGLCGAEKSSAEAIKRTPLSKQRNKHLQSVLIEAAKLAPRRSPELALVYDQEKQGQREPSDPRGGAQAGGLPACRRSAPKRISNSRKRKPHRRVARCRKYQDLLSALPARSRQLPTGRRSVSSRGPHRIVSRLAGDTNSIFCSRPLAGLRQQMDVWFYIEKGTTAERHERELTNLKDFFPALLPSASGEPLPS
